United States Patent Application Publication US 2018/0305689 A1 - sequence listing, part 29

SEQ ID NO: 364893 - RNA, 19 nt, Artificial Sequence
  Description of Artificial Sequence: Synthetic oligonucleotide
  Sense Strand Starting at position 588 of SEQ ID NO: 316416
ggcccaaugucuggaauag

SEQ ID NO: 364894 - RNA, 19 nt, Artificial Sequence
  Description of Artificial Sequence: Synthetic oligonucleotide
  Antisense Strand to SEQ ID NO: 364893
cuauuccagacauugggcc

SEQ ID NO: 364895 - RNA, 19 nt, Artificial Sequence
  Description of Artificial Sequence: Synthetic oligonucleotide
  Sense Strand Starting at position 588 of SEQ ID NO: 316417
gcccaaugucuggaauaga

SEQ ID NO: 364896 - RNA, 19 nt, Artificial Sequence
  Description of Artificial Sequence: Synthetic oligonucleotide
  Antisense Strand to SEQ ID NO: 364895
ucuauuccagacauugggc

SEQ ID NO: 364897 - RNA, 19 nt, Artificial Sequence
  Description of Artificial Sequence: Synthetic oligonucleotide
  Sense Strand Starting at position 588 of SEQ ID NO: 316735
ccuguuugcucuucucuca

SEQ ID NO: 364898 - RNA, 19 nt, Artificial Sequence
  Description of Artificial Sequence: Synthetic oligonucleotide
  Antisense Strand to SEQ ID NO: 364897
ugagagaagagcaaacagg

SEQ ID NO: 364899 - RNA, 19 nt, Artificial Sequence
  Description of Artificial Sequence: Synthetic oligonucleotide
  Sense Strand Starting at position 588 of SEQ ID NO: 317247
ggaggaauguggcccugaa

SEQ ID NO: 364900 - RNA, 19 nt, Artificial Sequence
  Description of Artificial Sequence: Synthetic oligonucleotide
  Antisense Strand to SEQ ID NO: 364899
uucagggccacauuccucc

SEQ ID NO: 364901 - RNA, 19 nt, Artificial Sequence
  Description of Artificial Sequence: Synthetic oligonucleotide
  Sense Strand Starting at position 588 of SEQ ID NO: 317548
cgaagccucuguucuggaa

SEQ ID NO: 364902 - RNA, 19 nt, Artificial Sequence
  Description of Artificial Sequence: Synthetic oligonucleotide
  Antisense Strand to SEQ ID NO: 364901
uuccagaacagaggcuucg

SEQ ID NO: 364903 - RNA, 19 nt, Artificial Sequence
  Description of Artificial Sequence: Synthetic oligonucleotide
  Sense Strand Starting at position 588 of SEQ ID NO: 317617
cuuccucuccagcguguaa

SEQ ID NO: 364904 - RNA, 19 nt, Artificial Sequence
  Description of Artificial Sequence: Synthetic oligonucleotide
  Antisense Strand to SEQ ID NO: 364903
uuacacgcuggagaggaag

SEQ ID NO: 364905 - RNA, 19 nt, Artificial Sequence
  Description of Artificial Sequence: Synthetic oligonucleotide
  Sense Strand Starting at position 588 of SEQ ID NO: 317681
gcugaugccuacucaacau

SEQ ID NO: 364906 - RNA, 19 nt, Artificial Sequence
  Description of Artificial Sequence: Synthetic oligonucleotide
  Antisense Strand to SEQ ID NO: 364905
auguugaguaggcaucagc

SEQ ID NO: 364907 - RNA, 19 nt, Artificial Sequence
  Description of Artificial Sequence: Synthetic oligonucleotide
  Sense Strand Starting at position 588 of SEQ ID NO: 317934
cuaugacaagcuuaaagua

SEQ ID NO: 364908 - RNA, 19 nt, Artificial Sequence
  Description of Artificial Sequence: Synthetic oligonucleotide
  Antisense Strand to SEQ ID NO: 364907
uacuuuaagcuugucauag

SEQ ID NO: 364909 - RNA, 19 nt, Artificial Sequence
  Description of Artificial Sequence: Synthetic oligonucleotide
  Sense Strand Starting at position 588 of SEQ ID NO: 317965
acuuuagaguucuuuagug

SEQ ID NO: 364910 - RNA, 19 nt, Artificial Sequence
  Description of Artificial Sequence: Synthetic oligonucleotide
  Antisense Strand to SEQ ID NO: 364909
cacuaaagaacucuaaagu

SEQ ID NO: 364911 - RNA, 19 nt, Artificial Sequence
  Description of Artificial Sequence: Synthetic oligonucleotide
  Sense Strand Starting at position 588 of SEQ ID NO: 317967
uuuagaguucuuuagugau

SEQ ID NO: 364912 - RNA, 19 nt, Artificial Sequence
  Description of Artificial Sequence: Synthetic oligonucleotide
  Antisense Strand to SEQ ID NO: 364911
aucacuaaagaacucuaaa

SEQ ID NO: 364913 - RNA, 19 nt, Artificial Sequence
  Description of Artificial Sequence: Synthetic oligonucleotide
  Sense Strand Starting at position 588 of SEQ ID NO: 317969
uagaguucuuuagugauag

SEQ ID NO: 364914 - RNA, 19 nt, Artificial Sequence
  Description of Artificial Sequence: Synthetic oligonucleotide
  Antisense Strand to SEQ ID NO: 364913
cuaucacuaaagaacucua

SEQ ID NO: 364915 - RNA, 19 nt, Artificial Sequence
  Description of Artificial Sequence: Synthetic oligonucleotide
  Sense Strand Starting at position 588 of SEQ ID NO: 317970
agaguucuuuagugauagu

SEQ ID NO: 364916 - RNA, 19 nt, Artificial Sequence
  Description of Artificial Sequence: Synthetic oligonucleotide
  Antisense Strand to SEQ ID NO: 364915
acuaucacuaaagaacucu

SEQ ID NO: 364917 - RNA, 19 nt, Artificial Sequence
  Description of Artificial Sequence: Synthetic oligonucleotide
  Sense Strand Starting at position 588 of SEQ ID NO: 317997
aaggcaacauugugaagua

SEQ ID NO: 364918 - RNA, 19 nt, Artificial Sequence
  Description of Artificial Sequence: Synthetic oligonucleotide
  Antisense Strand to SEQ ID NO: 364917
uacuucacaauguugccuu

SEQ ID NO: 364919 - RNA, 19 nt, Artificial Sequence
  Description of Artificial Sequence: Synthetic oligonucleotide
  Sense Strand Starting at position 588 of SEQ ID NO: 318708
ucauguaucuaguaagggu

SEQ ID NO: 364920 - RNA, 19 nt, Artificial Sequence
  Description of Artificial Sequence: Synthetic oligonucleotide
  Antisense Strand to SEQ ID NO: 364919
acccuuacuagauacauga

SEQ ID NO: 364921 - RNA, 19 nt, Artificial Sequence
  Description of Artificial Sequence: Synthetic oligonucleotide
  Sense Strand Starting at position 588 of SEQ ID NO: 318723
gggucuaguguccauagua

SEQ ID NO: 364922 - RNA, 19 nt, Artificial Sequence
  Description of Artificial Sequence: Synthetic oligonucleotide
  Antisense Strand to SEQ ID NO: 364921
uacuauggacacuagaccc

SEQ ID NO: 364923 - RNA, 19 nt, Artificial Sequence
  Description of Artificial Sequence: Synthetic oligonucleotide
  Sense Strand Starting at position 588 of SEQ ID NO: 318796
caggcaagguaucugagua

SEQ ID NO: 364924 - RNA, 19 nt, Artificial Sequence
  Description of Artificial Sequence: Synthetic oligonucleotide
  Antisense Strand to SEQ ID NO: 364923
uacucagauaccuugccug

SEQ ID NO: 364925 - RNA, 19 nt, Artificial Sequence
  Description of Artificial Sequence: Synthetic oligonucleotide
  Sense Strand Starting at position 588 of SEQ ID NO: 318800
caagguaucugaguagauu

SEQ ID NO: 364926 - RNA, 19 nt, Artificial Sequence
  Description of Artificial Sequence: Synthetic oligonucleotide
  Antisense Strand to SEQ ID NO: 364925
aaucuacucagauaccuug

SEQ ID NO: 364927 - RNA, 19 nt, Artificial Sequence
  Description of Artificial Sequence: Synthetic oligonucleotide
  Sense Strand Starting at position 588 of SEQ ID NO: 318874
ccucacuaaucuuuaggga

SEQ ID NO: 364928 - RNA, 19 nt, Artificial Sequence
  Description of Artificial Sequence: Synthetic oligonucleotide
  Antisense Strand to SEQ ID NO: 364927
ucccuaaagauuagugagg

SEQ ID NO: 364929 - RNA, 19 nt, Artificial Sequence
  Description of Artificial Sequence: Synthetic oligonucleotide
  Sense Strand Starting at position 588 of SEQ ID NO: 318896
guaaaucaagaccgcaaua

SEQ ID NO: 364930 - RNA, 19 nt, Artificial Sequence
  Description of Artificial Sequence: Synthetic oligonucleotide
  Antisense Strand to SEQ ID NO: 364929
uauugcggucuugauuuac

SEQ ID NO: 364931 - RNA, 19 nt, Artificial Sequence
  Description of Artificial Sequence: Synthetic oligonucleotide
  Sense Strand Starting at position 588 of SEQ ID NO: 319033
uggcaucugucaugguuag

SEQ ID NO: 364932 - RNA, 19 nt, Artificial Sequence
  Description of Artificial Sequence: Synthetic oligonucleotide
  Antisense Strand to SEQ ID NO: 364931
cuaaccaugacagaugcca

SEQ ID NO: 364933 - RNA, 19 nt, Artificial Sequence
  Description of Artificial Sequence: Synthetic oligonucleotide
  Sense Strand Starting at position 588 of SEQ ID NO: 319037
aucugucaugguuagggua

SEQ ID NO: 364934 - RNA, 19 nt, Artificial Sequence
  Description of Artificial Sequence: Synthetic oligonucleotide
  Antisense Strand to SEQ ID NO: 364933
uacccuaaccaugacagau

SEQ ID NO: 364935 - RNA, 19 nt, Artificial Sequence
  Description of Artificial Sequence: Synthetic oligonucleotide
  Sense Strand Starting at position 589 of SEQ ID NO: 315503
uuaacacuuaggugucagu

SEQ ID NO: 364936 - RNA, 19 nt, Artificial Sequence
  Description of Artificial Sequence: Synthetic oligonucleotide
  Antisense Strand to SEQ ID NO: 364935
acugacaccuaaguguuaa

SEQ ID NO: 364937 - RNA, 19 nt, Artificial Sequence
  Description of Artificial Sequence: Synthetic oligonucleotide
  Sense Strand Starting at position 589 of SEQ ID NO: 315729
gccagucauccgucaggca

SEQ ID NO: 364938 - RNA, 19 nt, Artificial Sequence
  Description of Artificial Sequence: Synthetic oligonucleotide
  Antisense Strand to SEQ ID NO: 364937
ugccugacggaugacuggc

SEQ ID NO: 364939 - RNA, 19 nt, Artificial Sequence
  Description of Artificial Sequence: Synthetic oligonucleotide
  Sense Strand Starting at position 589 of SEQ ID NO: 315778
agugccuucccacggaauu

SEQ ID NO: 364940 - RNA, 19 nt, Artificial Sequence
  Description of Artificial Sequence: Synthetic oligonucleotide
  Antisense Strand to SEQ ID NO: 364939
aauuccgugggaaggcacu

SEQ ID NO: 364941 - RNA, 19 nt, Artificial Sequence
  Description of Artificial Sequence: Synthetic oligonucleotide
  Sense Strand Starting at position 589 of SEQ ID NO: 315779
gugccuucccacggaauua

SEQ ID NO: 364942 - RNA, 19 nt, Artificial Sequence
  Description of Artificial Sequence: Synthetic oligonucleotide
  Antisense Strand to SEQ ID NO: 364941
uaauuccgugggaaggcac

SEQ ID NO: 364943 - RNA, 19 nt, Artificial Sequence
  Description of Artificial Sequence: Synthetic oligonucleotide
  Sense Strand Starting at position 589 of SEQ ID NO: 315790
cggaauuaucuagaacugu

SEQ ID NO: 364944 - RNA, 19 nt, Artificial Sequence
  Description of Artificial Sequence: Synthetic oligonucleotide
  Antisense Strand to SEQ ID NO: 364943
acaguucuagauaauuccg

SEQ ID NO: 364945 - RNA, 19 nt, Artificial Sequence
  Description of Artificial Sequence: Synthetic oligonucleotide
  Sense Strand Starting at position 589 of SEQ ID NO: 315813
cuugcaauagagugaaagu

SEQ ID NO: 364946 - RNA, 19 nt, Artificial Sequence
  Description of Artificial Sequence: Synthetic oligonucleotide
  Antisense Strand to SEQ ID NO: 364945
acuuucacucuauugcaag

SEQ ID NO: 364947 - RNA, 19 nt, Artificial Sequence
  Description of Artificial Sequence: Synthetic oligonucleotide
  Sense Strand Starting at position 589 of SEQ ID NO: 315814
uugcaauagagugaaagua

SEQ ID NO: 364948 - RNA, 19 nt, Artificial Sequence
  Description of Artificial Sequence: Synthetic oligonucleotide
  Antisense Strand to SEQ ID NO: 364947
uacuuucacucuauugcaa

SEQ ID NO: 364949 - RNA, 19 nt, Artificial Sequence
  Description of Artificial Sequence: Synthetic oligonucleotide
  Sense Strand Starting at position 589 of SEQ ID NO: 315826
gaaaguaagugcuugugcu

SEQ ID NO: 364950 - RNA, 19 nt, Artificial Sequence
  Description of Artificial Sequence: Synthetic oligonucleotide
  Antisense Strand to SEQ ID NO: 364949
agcacaagcacuuacuuuc

SEQ ID NO: 364951 - RNA, 19 nt, Artificial Sequence
  Description of Artificial Sequence: Synthetic oligonucleotide
  Sense Strand Starting at position 589 of SEQ ID NO: 315827
aaaguaagugcuugugcuu

SEQ ID NO: 364952 - RNA, 19 nt, Artificial Sequence
  Description of Artificial Sequence: Synthetic oligonucleotide
  Antisense Strand to SEQ ID NO: 364951
aagcacaagcacuuacuuu

SEQ ID NO: 364953 - RNA, 19 nt, Artificial Sequence
  Description of Artificial Sequence: Synthetic oligonucleotide
  Sense Strand Starting at position 589 of SEQ ID NO: 315864
ugaaucuauuaggacacau

SEQ ID NO: 364954 - RNA, 19 nt, Artificial Sequence
  Description of Artificial Sequence: Synthetic oligonucleotide
  Antisense Strand to SEQ ID NO: 364953
auguguccuaauagauuca

SEQ ID NO: 364955 - RNA, 19 nt, Artificial Sequence
  Description of Artificial Sequence: Synthetic oligonucleotide
  Sense Strand Starting at position 589 of SEQ ID NO: 315894
acagguugauagucauaaa

SEQ ID NO: 364956 - RNA, 19 nt, Artificial Sequence
  Description of Artificial Sequence: Synthetic oligonucleotide
  Antisense Strand to SEQ ID NO: 364955
uuuaugacuaucaaccugu

SEQ ID NO: 364957 - RNA, 19 nt, Artificial Sequence
  Description of Artificial Sequence: Synthetic oligonucleotide
  Sense Strand Starting at position 589 of SEQ ID NO: 315897
gguugauagucauaaauac

SEQ ID NO: 364958 - RNA, 19 nt, Artificial Sequence
  Description of Artificial Sequence: Synthetic oligonucleotide
  Antisense Strand to SEQ ID NO: 364957
guauuuaugacuaucaacc

SEQ ID NO: 364959 - RNA, 19 nt, Artificial Sequence
  Description of Artificial Sequence: Synthetic oligonucleotide
  Sense Strand Starting at position 589 of SEQ ID NO: 315904
agucauaaauacugugauc

SEQ ID NO: 364960 - RNA, 19 nt, Artificial Sequence
  Description of Artificial Sequence: Synthetic oligonucleotide
  Antisense Strand to SEQ ID NO: 364959
gaucacaguauuuaugacu

SEQ ID NO: 364961 - RNA, 19 nt, Artificial Sequence
  Description of Artificial Sequence: Synthetic oligonucleotide
  Sense Strand Starting at position 589 of SEQ ID NO: 316743
uguugugggcuggaugaga

SEQ ID NO: 364962 - RNA, 19 nt, Artificial Sequence
  Description of Artificial Sequence: Synthetic oligonucleotide
  Antisense Strand to SEQ ID NO: 364961
ucucauccagcccacaaca

SEQ ID NO: 364963 - RNA, 19 nt, Artificial Sequence
  Description of Artificial Sequence: Synthetic oligonucleotide
  Sense Strand Starting at position 589 of SEQ ID NO: 317446
gcaucaugcgcucaucaaa

SEQ ID NO: 364964 - RNA, 19 nt, Artificial Sequence
  Description of Artificial Sequence: Synthetic oligonucleotide
  Antisense Strand to SEQ ID NO: 364963
uuugaugagcgcaugaugc

SEQ ID NO: 364965 - RNA, 19 nt, Artificial Sequence
  Description of Artificial Sequence: Synthetic oligonucleotide
  Sense Strand Starting at position 589 of SEQ ID NO: 317498
cucccuagguguugguaau

SEQ ID NO: 364966 - RNA, 19 nt, Artificial Sequence
  Description of Artificial Sequence: Synthetic oligonucleotide
  Antisense Strand to SEQ ID NO: 364965
auuaccaacaccuagggag

SEQ ID NO: 364967 - RNA, 19 nt, Artificial Sequence
  Description of Artificial Sequence: Synthetic oligonucleotide
  Sense Strand Starting at position 589 of SEQ ID NO: 317499
ucccuagguguugguaaua

SEQ ID NO: 364968 - RNA, 19 nt, Artificial Sequence
  Description of Artificial Sequence: Synthetic oligonucleotide
  Antisense Strand to SEQ ID NO: 364967
uauuaccaacaccuaggga

SEQ ID NO: 364969 - RNA, 19 nt, Artificial Sequence
  Description of Artificial Sequence: Synthetic oligonucleotide
  Sense Strand Starting at position 589 of SEQ ID NO: 317504
agguguugguaauaccuga

SEQ ID NO: 364970 - RNA, 19 nt, Artificial Sequence
  Description of Artificial Sequence: Synthetic oligonucleotide
  Antisense Strand to SEQ ID NO: 364969
ucagguauuaccaacaccu

SEQ ID NO: 364971 - RNA, 19 nt, Artificial Sequence
  Description of Artificial Sequence: Synthetic oligonucleotide
  Sense Strand Starting at position 589 of SEQ ID NO: 317764
cccagauugugcccuugua

SEQ ID NO: 364972 - RNA, 19 nt, Artificial Sequence
  Description of Artificial Sequence: Synthetic oligonucleotide
  Antisense Strand to SEQ ID NO: 364971
uacaagggcacaaucuggg

SEQ ID NO: 364973 - RNA, 19 nt, Artificial Sequence
  Description of Artificial Sequence: Synthetic oligonucleotide
  Sense Strand Starting at position 589 of SEQ ID NO: 317870
cuuacaaucuaggugugga

SEQ ID NO: 364974 - RNA, 19 nt, Artificial Sequence
  Description of Artificial Sequence: Synthetic oligonucleotide
  Antisense Strand to SEQ ID NO: 364973
uccacaccuagauuguaag

SEQ ID NO: 364975 - RNA, 19 nt, Artificial Sequence
  Description of Artificial Sequence: Synthetic oligonucleotide
  Sense Strand Starting at position 589 of SEQ ID NO: 317874
caaucuagguguggagaga

SEQ ID NO: 364976 - RNA, 19 nt, Artificial Sequence
  Description of Artificial Sequence: Synthetic oligonucleotide
  Antisense Strand to SEQ ID NO: 364975
ucucuccacaccuagauug

SEQ ID NO: 364977 - RNA, 19 nt, Artificial Sequence
  Description of Artificial Sequence: Synthetic oligonucleotide
  Sense Strand Starting at position 589 of SEQ ID NO: 317920
uauguuacagagugucuua

SEQ ID NO: 364978 - RNA, 19 nt, Artificial Sequence
  Description of Artificial Sequence: Synthetic oligonucleotide
  Antisense Strand to SEQ ID NO: 364977
uaagacacucuguaacaua

SEQ ID NO: 364979 - RNA, 19 nt, Artificial Sequence
  Description of Artificial Sequence: Synthetic oligonucleotide
  Sense Strand Starting at position 589 of SEQ ID NO: 317923
guuacagagugucuuaaag

SEQ ID NO: 364980 - RNA, 19 nt, Artificial Sequence
  Description of Artificial Sequence: Synthetic oligonucleotide
  Antisense Strand to SEQ ID NO: 364979
cuuuaagacacucuguaac

SEQ ID NO: 364981 - RNA, 19 nt, Artificial Sequence
  Description of Artificial Sequence: Synthetic oligonucleotide
  Sense Strand Starting at position 589 of SEQ ID NO: 317925
uacagagugucuuaaaggu

SEQ ID NO: 364982 - RNA, 19 nt, Artificial Sequence
  Description of Artificial Sequence: Synthetic oligonucleotide
  Antisense Strand to SEQ ID NO: 364981
accuuuaagacacucugua

SEQ ID NO: 364983 - RNA, 19 nt, Artificial Sequence
  Description of Artificial Sequence: Synthetic oligonucleotide
  Sense Strand Starting at position 589 of SEQ ID NO: 317931
gugucuuaaagguaauaag

SEQ ID NO: 364984 - RNA, 19 nt, Artificial Sequence
  Description of Artificial Sequence: Synthetic oligonucleotide
  Antisense Strand to SEQ ID NO: 364983
cuuauuaccuuuaagacac

SEQ ID NO: 364985 - RNA, 19 nt, Artificial Sequence
  Description of Artificial Sequence: Synthetic oligonucleotide
  Sense Strand Starting at position 589 of SEQ ID NO: 317941
gguaauaagcacuauugca

SEQ ID NO: 364986 - RNA, 19 nt, Artificial Sequence
  Description of Artificial Sequence: Synthetic oligonucleotide
  Antisense Strand to SEQ ID NO: 364985
ugcaauagugcuuauuacc

SEQ ID NO: 364987 - RNA, 19 nt, Artificial Sequence
  Description of Artificial Sequence: Synthetic oligonucleotide
  Sense Strand Starting at position 589 of SEQ ID NO: 318038
aggguagucagguagacuu

SEQ ID NO: 364988 - RNA, 19 nt, Artificial Sequence
  Description of Artificial Sequence: Synthetic oligonucleotide
  Antisense Strand to SEQ ID NO: 364987
aagucuaccugacuacccu

SEQ ID NO: 364989 - RNA, 19 nt, Artificial Sequence
  Description of Artificial Sequence: Synthetic oligonucleotide
  Sense Strand Starting at position 589 of SEQ ID NO: 318040
gguagucagguagacuuua

SEQ ID NO: 364990 - RNA, 19 nt, Artificial Sequence
  Description of Artificial Sequence: Synthetic oligonucleotide
  Antisense Strand to SEQ ID NO: 364989
uaaagucuaccugacuacc

SEQ ID NO: 364991 - RNA, 19 nt, Artificial Sequence
  Description of Artificial Sequence: Synthetic oligonucleotide
  Sense Strand Starting at position 589 of SEQ ID NO: 318048
gguagacuuuacuauagua

SEQ ID NO: 364992 - RNA, 19 nt, Artificial Sequence
  Description of Artificial Sequence: Synthetic oligonucleotide
  Antisense Strand to SEQ ID NO: 364991
uacuauaguaaagucuacc

SEQ ID NO: 364993 - RNA, 19 nt, Artificial Sequence
  Description of Artificial Sequence: Synthetic oligonucleotide
  Sense Strand Starting at position 589 of SEQ ID NO: 318073
auguaucgugcagcuacua

SEQ ID NO: 364994 - RNA, 19 nt, Artificial Sequence
  Description of Artificial Sequence: Synthetic oligonucleotide
  Antisense Strand to SEQ ID NO: 364993
uaguagcugcacgauacau

SEQ ID NO: 364995 - RNA, 19 nt, Artificial Sequence
  Description of Artificial Sequence: Synthetic oligonucleotide
  Sense Strand Starting at position 589 of SEQ ID NO: 318117
gggaauaccucugaagaga

SEQ ID NO: 364996 - RNA, 19 nt, Artificial Sequence
  Description of Artificial Sequence: Synthetic oligonucleotide
  Antisense Strand to SEQ ID NO: 364995
ucucuucagagguauuccc

SEQ ID NO: 364997 - RNA, 19 nt, Artificial Sequence
  Description of Artificial Sequence: Synthetic oligonucleotide
  Sense Strand Starting at position 589 of SEQ ID NO: 318187
gcagauaagcuauguugga

SEQ ID NO: 364998 - RNA, 19 nt, Artificial Sequence
  Description of Artificial Sequence: Synthetic oligonucleotide
  Antisense Strand to SEQ ID NO: 364997
uccaacauagcuuaucugc

SEQ ID NO: 364999 - RNA, 19 nt, Artificial Sequence
  Description of Artificial Sequence: Synthetic oligonucleotide
  Sense Strand Starting at position 589 of SEQ ID NO: 318191
auaagcuauguuggagaau

SEQ ID NO: 365000 - RNA, 19 nt, Artificial Sequence
  Description of Artificial Sequence: Synthetic oligonucleotide
  Antisense Strand to SEQ ID NO: 364999
auucuccaacauagcuuau

SEQ ID NO: 365001 - RNA, 19 nt, Artificial Sequence
  Description of Artificial Sequence: Synthetic oligonucleotide
  Sense Strand Starting at position 589 of SEQ ID NO: 318192
uaagcuauguuggagaaug

SEQ ID NO: 365002 - RNA, 19 nt, Artificial Sequence
  Description of Artificial Sequence: Synthetic oligonucleotide
  Antisense Strand to SEQ ID NO: 365001
cauucuccaacauagcuua

SEQ ID NO: 365003 - RNA, 19 nt, Artificial Sequence
  Description of Artificial Sequence: Synthetic oligonucleotide
  Sense Strand Starting at position 589 of SEQ ID NO: 318197
uauguuggagaaugaaagu

SEQ ID NO: 365004 - RNA, 19 nt, Artificial Sequence
  Description of Artificial Sequence: Synthetic oligonucleotide
  Antisense Strand to SEQ ID NO: 365003
acuuucauucuccaacaua

SEQ ID NO: 365005 - RNA, 19 nt, Artificial Sequence
  Description of Artificial Sequence: Synthetic oligonucleotide
  Sense Strand Starting at position 589 of SEQ ID NO: 318786
ggccaauugcauuaucuua

SEQ ID NO: 365006 - RNA, 19 nt, Artificial Sequence
  Description of Artificial Sequence: Synthetic oligonucleotide
  Antisense Strand to SEQ ID NO: 365005
uaagauaaugcaauuggcc

SEQ ID NO: 365007 - RNA, 19 nt, Artificial Sequence
  Description of Artificial Sequence: Synthetic oligonucleotide
  Sense Strand Starting at position 589 of SEQ ID NO: 318791
auugcauuaucuuagauga

SEQ ID NO: 365008 - RNA, 19 nt, Artificial Sequence
  Description of Artificial Sequence: Synthetic oligonucleotide
  Antisense Strand to SEQ ID NO: 365007
ucaucuaagauaaugcaau

SEQ ID NO: 365009 - RNA, 19 nt, Artificial Sequence
  Description of Artificial Sequence: Synthetic oligonucleotide
  Sense Strand Starting at position 589 of SEQ ID NO: 318793
ugcauuaucuuagaugaua

SEQ ID NO: 365010 - RNA, 19 nt, Artificial Sequence
  Description of Artificial Sequence: Synthetic oligonucleotide
  Antisense Strand to SEQ ID NO: 365009
uaucaucuaagauaaugca

SEQ ID NO: 365011 - RNA, 19 nt, Artificial Sequence
  Description of Artificial Sequence: Synthetic oligonucleotide
  Sense Strand Starting at position 589 of SEQ ID NO: 318807
ugauacuauuacugggaaa

SEQ ID NO: 365012 - RNA, 19 nt, Artificial Sequence
  Description of Artificial Sequence: Synthetic oligonucleotide
  Antisense Strand to SEQ ID NO: 365011
uuucccaguaauaguauca

SEQ ID NO: 365013 - RNA, 19 nt, Artificial Sequence
  Description of Artificial Sequence: Synthetic oligonucleotide
  Sense Strand Starting at position 589 of SEQ ID NO: 318851
gcaggacaaacuggauuau

SEQ ID NO: 365014 - RNA, 19 nt, Artificial Sequence
  Description of Artificial Sequence: Synthetic oligonucleotide
  Antisense Strand to SEQ ID NO: 365013
auaauccaguuuguccugc

SEQ ID NO: 365015 - RNA, 19 nt, Artificial Sequence
  Description of Artificial Sequence: Synthetic oligonucleotide
  Sense Strand Starting at position 590 of SEQ ID NO: 315334
guccaaauccugugaccaa

SEQ ID NO: 365016 - RNA, 19 nt, Artificial Sequence
  Description of Artificial Sequence: Synthetic oligonucleotide
  Antisense Strand to SEQ ID NO: 365015
uuggucacaggauuuggac

SEQ ID NO: 365017 - RNA, 19 nt, Artificial Sequence
  Description of Artificial Sequence: Synthetic oligonucleotide
  Sense Strand Starting at position 590 of SEQ ID NO: 315462
ccagaacauuauucuguga

SEQ ID NO: 365018 - RNA, 19 nt, Artificial Sequence
  Description of Artificial Sequence: Synthetic oligonucleotide
  Antisense Strand to SEQ ID NO: 365017
ucacagaauaauguucugg

SEQ ID NO: 365019 - RNA, 19 nt, Artificial Sequence
  Description of Artificial Sequence: Synthetic oligonucleotide
  Sense Strand Starting at position 590 of SEQ ID NO: 315505
guccucuaucaaggauuau

SEQ ID NO: 365020 - RNA, 19 nt, Artificial Sequence
  Description of Artificial Sequence: Synthetic oligonucleotide
  Antisense Strand to SEQ ID NO: 365019
auaauccuugauagaggac

SEQ ID NO: 365021 - RNA, 19 nt, Artificial Sequence
  Description of Artificial Sequence: Synthetic oligonucleotide
  Sense Strand Starting at position 590 of SEQ ID NO: 315715
aagaguccuggcuaaguca

SEQ ID NO: 365022 - RNA, 19 nt, Artificial Sequence
  Description of Artificial Sequence: Synthetic oligonucleotide
  Antisense Strand to SEQ ID NO: 365021
ugacuuagccaggacucuu

SEQ ID NO: 365023 - RNA, 19 nt, Artificial Sequence
  Description of Artificial Sequence: Synthetic oligonucleotide
  Sense Strand Starting at position 590 of SEQ ID NO: 315723
uggcuaagucagggacuua

SEQ ID NO: 365024 - RNA, 19 nt, Artificial Sequence
  Description of Artificial Sequence: Synthetic oligonucleotide
  Antisense Strand to SEQ ID NO: 365023
uaagucccugacuuagcca

SEQ ID NO: 365025 - RNA, 19 nt, Artificial Sequence
  Description of Artificial Sequence: Synthetic oligonucleotide
  Sense Strand Starting at position 590 of SEQ ID NO: 315758
acuuaccaucugugagaag

SEQ ID NO: 365026 - RNA, 19 nt, Artificial Sequence
  Description of Artificial Sequence: Synthetic oligonucleotide
  Antisense Strand to SEQ ID NO: 365025
cuucucacagaugguaagu

SEQ ID NO: 365027 - RNA, 19 nt, Artificial Sequence
  Description of Artificial Sequence: Synthetic oligonucleotide
  Sense Strand Starting at position 590 of SEQ ID NO: 315834
cagagcugucacgauaucu

SEQ ID NO: 365028 - RNA, 19 nt, Artificial Sequence
  Description of Artificial Sequence: Synthetic oligonucleotide
  Antisense Strand to SEQ ID NO: 365027
agauaucgugacagcucug

SEQ ID NO: 365029 - RNA, 19 nt, Artificial Sequence
  Description of Artificial Sequence: Synthetic oligonucleotide
  Sense Strand Starting at position 590 of SEQ ID NO: 315979
aggcaaacaccgcaguaau

SEQ ID NO: 365030 - RNA, 19 nt, Artificial Sequence
  Description of Artificial Sequence: Synthetic oligonucleotide
  Antisense Strand to SEQ ID NO: 365029
auuacugcgguguuugccu

SEQ ID NO: 365031 - RNA, 19 nt, Artificial Sequence
  Description of Artificial Sequence: Synthetic oligonucleotide
  Sense Strand Starting at position 590 of SEQ ID NO: 316366
aaauuuacacgucguaaau

SEQ ID NO: 365032 - RNA, 19 nt, Artificial Sequence
  Description of Artificial Sequence: Synthetic oligonucleotide
  Antisense Strand to SEQ ID NO: 365031
auuuacgacguguaaauuu

SEQ ID NO: 365033 - RNA, 19 nt, Artificial Sequence
  Description of Artificial Sequence: Synthetic oligonucleotide
  Sense Strand Starting at position 590 of SEQ ID NO: 316558
cuguauauuauggagcaga

SEQ ID NO: 365034 - RNA, 19 nt, Artificial Sequence
  Description of Artificial Sequence: Synthetic oligonucleotide
  Antisense Strand to SEQ ID NO: 365033
ucugcuccauaauauacag

SEQ ID NO: 365035 - RNA, 19 nt, Artificial Sequence
  Description of Artificial Sequence: Synthetic oligonucleotide
  Sense Strand Starting at position 590 of SEQ ID NO: 316714
gucuuaauuucccucaggu

SEQ ID NO: 365036 - RNA, 19 nt, Artificial Sequence
  Description of Artificial Sequence: Synthetic oligonucleotide
  Antisense Strand to SEQ ID NO: 365035
accugagggaaauuaagac

SEQ ID NO: 365037 - RNA, 19 nt, Artificial Sequence
  Description of Artificial Sequence: Synthetic oligonucleotide
  Sense Strand Starting at position 590 of SEQ ID NO: 317182
ugaagauucuaacugccca

SEQ ID NO: 365038 - RNA, 19 nt, Artificial Sequence
  Description of Artificial Sequence: Synthetic oligonucleotide
  Antisense Strand to SEQ ID NO: 365037
ugggcaguuagaaucuuca

SEQ ID NO: 365039 - RNA, 19 nt, Artificial Sequence
  Description of Artificial Sequence: Synthetic oligonucleotide
  Sense Strand Starting at position 590 of SEQ ID NO: 317293
ugaggauucuaacugccca

SEQ ID NO: 365040 - RNA, 19 nt, Artificial Sequence
  Description of Artificial Sequence: Synthetic oligonucleotide
  Antisense Strand to SEQ ID NO: 365039
ugggcaguuagaauccuca

SEQ ID NO: 365041 - RNA, 19 nt, Artificial Sequence
  Description of Artificial Sequence: Synthetic oligonucleotide
  Sense Strand Starting at position 590 of SEQ ID NO: 317308
cccacagagccugauguuu

SEQ ID NO: 365042 - RNA, 19 nt, Artificial Sequence
  Description of Artificial Sequence: Synthetic oligonucleotide
  Antisense Strand to SEQ ID NO: 365041
aaacaucaggcucuguggg

SEQ ID NO: 365043 - RNA, 19 nt, Artificial Sequence
  Description of Artificial Sequence: Synthetic oligonucleotide
  Sense Strand Starting at position 590 of SEQ ID NO: 317532
gucuuaguucuggaaacag

SEQ ID NO: 365044 - RNA, 19 nt, Artificial Sequence
  Description of Artificial Sequence: Synthetic oligonucleotide
  Antisense Strand to SEQ ID NO: 365043
cuguuuccagaacuaagac

SEQ ID NO: 365045 - RNA, 19 nt, Artificial Sequence
  Description of Artificial Sequence: Synthetic oligonucleotide
  Sense Strand Starting at position 590 of SEQ ID NO: 317621
ggcugagugauugccgcua

SEQ ID NO: 365046 - RNA, 19 nt, Artificial Sequence
  Description of Artificial Sequence: Synthetic oligonucleotide
  Antisense Strand to SEQ ID NO: 365045
uagcggcaaucacucagcc

SEQ ID NO: 365047 - RNA, 19 nt, Artificial Sequence
  Description of Artificial Sequence: Synthetic oligonucleotide
  Sense Strand Starting at position 590 of SEQ ID NO: 317982
ggucacuguccugagcaca

SEQ ID NO: 365048 - RNA, 19 nt, Artificial Sequence
  Description of Artificial Sequence: Synthetic oligonucleotide
  Antisense Strand to SEQ ID NO: 365047
ugugcucaggacagugacc

SEQ ID NO: 365049 - RNA, 19 nt, Artificial Sequence
  Description of Artificial Sequence: Synthetic oligonucleotide
  Sense Strand Starting at position 590 of SEQ ID NO: 318007
ggaccagaagaucguuaga

SEQ ID NO: 365050 - RNA, 19 nt, Artificial Sequence
  Description of Artificial Sequence: Synthetic oligonucleotide
  Antisense Strand to SEQ ID NO: 365049
ucuaacgaucuucuggucc

SEQ ID NO: 365051 - RNA, 19 nt, Artificial Sequence
  Description of Artificial Sequence: Synthetic oligonucleotide
  Sense Strand Starting at position 590 of SEQ ID NO: 318009
accagaagaucguuagaca

SEQ ID NO: 365052 - RNA, 19 nt, Artificial Sequence
  Description of Artificial Sequence: Synthetic oligonucleotide
  Antisense Strand to SEQ ID NO: 365051
ugucuaacgaucuucuggu

SEQ ID NO: 365053 - RNA, 19 nt, Artificial Sequence
  Description of Artificial Sequence: Synthetic oligonucleotide
  Sense Strand Starting at position 590 of SEQ ID NO: 318043
ggagaggucccugguagga

SEQ ID NO: 365054 - RNA, 19 nt, Artificial Sequence
  Description of Artificial Sequence: Synthetic oligonucleotide
  Antisense Strand to SEQ ID NO: 365053
uccuaccagggaccucucc

SEQ ID NO: 365055 - RNA, 19 nt, Artificial Sequence
  Description of Artificial Sequence: Synthetic oligonucleotide
  Sense Strand Starting at position 590 of SEQ ID NO: 318270
gcugacaugugguugagga

SEQ ID NO: 365056 - RNA, 19 nt, Artificial Sequence
  Description of Artificial Sequence: Synthetic oligonucleotide
  Antisense Strand to SEQ ID NO: 365055
uccucaaccacaugucagc

SEQ ID NO: 365057 - RNA, 19 nt, Artificial Sequence
  Description of Artificial Sequence: Synthetic oligonucleotide
  Sense Strand Starting at position 590 of SEQ ID NO: 318271
cugacaugugguugaggau

SEQ ID NO: 365058 - RNA, 19 nt, Artificial Sequence
  Description of Artificial Sequence: Synthetic oligonucleotide
  Antisense Strand to SEQ ID NO: 365057
auccucaaccacaugucag

SEQ ID NO: 365059 - RNA, 19 nt, Artificial Sequence
  Description of Artificial Sequence: Synthetic oligonucleotide
  Sense Strand Starting at position 590 of SEQ ID NO: 318311
uuagaauagucagcacaau

SEQ ID NO: 365060 - RNA, 19 nt, Artificial Sequence
  Description of Artificial Sequence: Synthetic oligonucleotide
  Antisense Strand to SEQ ID NO: 365059
auugugcugacuauucuaa

SEQ ID NO: 365061 - RNA, 19 nt, Artificial Sequence
  Description of Artificial Sequence: Synthetic oligonucleotide
  Sense Strand Starting at position 590 of SEQ ID NO: 318396
accugucugguuuaugauu

SEQ ID NO: 365062 - RNA, 19 nt, Artificial Sequence
  Description of Artificial Sequence: Synthetic oligonucleotide
  Antisense Strand to SEQ ID NO: 365061
aaucauaaaccagacaggu

SEQ ID NO: 365063 - RNA, 19 nt, Artificial Sequence
  Description of Artificial Sequence: Synthetic oligonucleotide
  Sense Strand Starting at position 590 of SEQ ID NO: 318407
uuaugauuauggccaauaa

SEQ ID NO: 365064 - RNA, 19 nt, Artificial Sequence
  Description of Artificial Sequence: Synthetic oligonucleotide
  Antisense Strand to SEQ ID NO: 365063
uuauuggccauaaucauaa

SEQ ID NO: 365065 - RNA, 19 nt, Artificial Sequence
  Description of Artificial Sequence: Synthetic oligonucleotide
  Sense Strand Starting at position 590 of SEQ ID NO: 318418
gccaauaagaaucgaguca

SEQ ID NO: 365066 - RNA, 19 nt, Artificial Sequence
  Description of Artificial Sequence: Synthetic oligonucleotide
  Antisense Strand to SEQ ID NO: 365065
ugacucgauucuuauuggc

SEQ ID NO: 365067 - RNA, 19 nt, Artificial Sequence
  Description of Artificial Sequence: Synthetic oligonucleotide
  Sense Strand Starting at position 590 of SEQ ID NO: 318442
augugugucacuuagauga

SEQ ID NO: 365068 - RNA, 19 nt, Artificial Sequence
  Description of Artificial Sequence: Synthetic oligonucleotide
  Antisense Strand to SEQ ID NO: 365067
ucaucuaagugacacacau

SEQ ID NO: 365069 - RNA, 19 nt, Artificial Sequence
  Description of Artificial Sequence: Synthetic oligonucleotide
  Sense Strand Starting at position 590 of SEQ ID NO: 318507
agagguguccaugggauca

SEQ ID NO: 365070 - RNA, 19 nt, Artificial Sequence
  Description of Artificial Sequence: Synthetic oligonucleotide
  Antisense Strand to SEQ ID NO: 365069
ugaucccauggacaccucu

SEQ ID NO: 365071 - RNA, 19 nt, Artificial Sequence
  Description of Artificial Sequence: Synthetic oligonucleotide
  Sense Strand Starting at position 590 of SEQ ID NO: 318548
aaguauugugaagaugcca

SEQ ID NO: 365072 - RNA, 19 nt, Artificial Sequence
  Description of Artificial Sequence: Synthetic oligonucleotide
  Antisense Strand to SEQ ID NO: 365071
uggcaucuucacaauacuu

SEQ ID NO: 365073 - RNA, 19 nt, Artificial Sequence
  Description of Artificial Sequence: Synthetic oligonucleotide
  Sense Strand Starting at position 590 of SEQ ID NO: 318632
uguuaaggccucugcauuu

SEQ ID NO: 365074 - RNA, 19 nt, Artificial Sequence
  Description of Artificial Sequence: Synthetic oligonucleotide
  Antisense Strand to SEQ ID NO: 365073
aaaugcagaggccuuaaca

SEQ ID NO: 365075 - RNA, 19 nt, Artificial Sequence
  Description of Artificial Sequence: Synthetic oligonucleotide
  Sense Strand Starting at position 590 of SEQ ID NO: 318683
ccuuaaauagcugaucuga

SEQ ID NO: 365076 - RNA, 19 nt, Artificial Sequence
  Description of Artificial Sequence: Synthetic oligonucleotide
  Antisense Strand to SEQ ID NO: 365075
ucagaucagcuauuuaagg

SEQ ID NO: 365077 - RNA, 19 nt, Artificial Sequence
  Description of Artificial Sequence: Synthetic oligonucleotide
  Sense Strand Starting at position 590 of SEQ ID NO: 318685
uuaaauagcugaucugaaa

SEQ ID NO: 365078 - RNA, 19 nt, Artificial Sequence
  Description of Artificial Sequence: Synthetic oligonucleotide
  Antisense Strand to SEQ ID NO: 365077
uuucagaucagcuauuuaa

SEQ ID NO: 365079 - RNA, 19 nt, Artificial Sequence
  Description of Artificial Sequence: Synthetic oligonucleotide
  Sense Strand Starting at position 590 of SEQ ID NO: 318709
agggucauuccucacucaa

SEQ ID NO: 365080 - RNA, 19 nt, Artificial Sequence
  Description of Artificial Sequence: Synthetic oligonucleotide
  Antisense Strand to SEQ ID NO: 365079
uugagugaggaaugacccu

SEQ ID NO: 365081 - RNA, 19 nt, Artificial Sequence
  Description of Artificial Sequence: Synthetic oligonucleotide
  Sense Strand Starting at position 590 of SEQ ID NO: 318914
cagcuuuaaguauggauca

SEQ ID NO: 365082 - RNA, 19 nt, Artificial Sequence
  Description of Artificial Sequence: Synthetic oligonucleotide
  Antisense Strand to SEQ ID NO: 365081
ugauccauacuuaaagcug

SEQ ID NO: 365083 - RNA, 19 nt, Artificial Sequence
  Description of Artificial Sequence: Synthetic oligonucleotide
  Sense Strand Starting at position 590 of SEQ ID NO: 318916
gcuuuaaguauggaucaag

SEQ ID NO: 365084 - RNA, 19 nt, Artificial Sequence
  Description of Artificial Sequence: Synthetic oligonucleotide
  Antisense Strand to SEQ ID NO: 365083
cuugauccauacuuaaagc

SEQ ID NO: 365085 - RNA, 19 nt, Artificial Sequence
  Description of Artificial Sequence: Synthetic oligonucleotide
  Sense Strand Starting at position 590 of SEQ ID NO: 318934
gcacuagauuaagcuaauc

SEQ ID NO: 365086 - RNA, 19 nt, Artificial Sequence
  Description of Artificial Sequence: Synthetic oligonucleotide
  Antisense Strand to SEQ ID NO: 365085
gauuagcuuaaucuagugc

SEQ ID NO: 365087 - RNA, 19 nt, Artificial Sequence
  Description of Artificial Sequence: Synthetic oligonucleotide
  Sense Strand Starting at position 590 of SEQ ID NO: 318976
uagugacugguggguuuaa

SEQ ID NO: 365088 - RNA, 19 nt, Artificial Sequence
  Description of Artificial Sequence: Synthetic oligonucleotide
  Antisense Strand to SEQ ID NO: 365087
uuaaacccaccagucacua

SEQ ID NO: 365089 - RNA, 19 nt, Artificial Sequence
  Description of Artificial Sequence: Synthetic oligonucleotide
  Sense Strand Starting at position 590 of SEQ ID NO: 319055
gauccugcuggaugucaga

SEQ ID NO: 365090 - RNA, 19 nt, Artificial Sequence
  Description of Artificial Sequence: Synthetic oligonucleotide
  Antisense Strand to SEQ ID NO: 365089
ucugacauccagcaggauc

SEQ ID NO: 365091 - RNA, 19 nt, Artificial Sequence
  Description of Artificial Sequence: Synthetic oligonucleotide
  Sense Strand Starting at position 590 of SEQ ID NO: 319135
gacaucauuggguggauga

SEQ ID NO: 365092 - RNA, 19 nt, Artificial Sequence
  Description of Artificial Sequence: Synthetic oligonucleotide
  Antisense Strand to SEQ ID NO: 365091
ucauccacccaaugauguc

SEQ ID NO: 365093 - RNA, 19 nt, Artificial Sequence
  Description of Artificial Sequence: Synthetic oligonucleotide
  Sense Strand Starting at position 590 of SEQ ID NO: 319183
aucuuuaguuaugugaaga

SEQ ID NO: 365094 - RNA, 19 nt, Artificial Sequence
  Description of Artificial Sequence: Synthetic oligonucleotide
  Antisense Strand to SEQ ID NO: 365093
ucuucacauaacuaaagau

SEQ ID NO: 365095 - RNA, 19 nt, Artificial Sequence
  Description of Artificial Sequence: Synthetic oligonucleotide
  Sense Strand Starting at position 591 of SEQ ID NO: 315334
guccaaauccugugaccaa

SEQ ID NO: 365096 - RNA, 19 nt, Artificial Sequence
  Description of Artificial Sequence: Synthetic oligonucleotide
  Antisense Strand to SEQ ID NO: 365095
uuggucacaggauuuggac

SEQ ID NO: 365097 - RNA, 19 nt, Artificial Sequence
  Description of Artificial Sequence: Synthetic oligonucleotide
  Sense Strand Starting at position 591 of SEQ ID NO: 315462
ccagaacauuauucuguga

SEQ ID NO: 365098 - RNA, 19 nt, Artificial Sequence
  Description of Artificial Sequence: Synthetic oligonucleotide
  Antisense Strand to SEQ ID NO: 365097
ucacagaauaauguucugg

SEQ ID NO: 365099 - RNA, 19 nt, Artificial Sequence
  Description of Artificial Sequence: Synthetic oligonucleotide
  Sense Strand Starting at position 591 of SEQ ID NO: 315505
guccucuaucaaggauuau

SEQ ID NO: 365100 - RNA, 19 nt, Artificial Sequence
  Description of Artificial Sequence: Synthetic oligonucleotide
  Antisense Strand to SEQ ID NO: 365099
auaauccuugauagaggac

SEQ ID NO: 365101 - RNA, 19 nt, Artificial Sequence
  Description of Artificial Sequence: Synthetic oligonucleotide
  Sense Strand Starting at position 591 of SEQ ID NO: 315715
aagaguccuggcuaaguca

SEQ ID NO: 365102 - RNA, 19 nt, Artificial Sequence
  Description of Artificial Sequence: Synthetic oligonucleotide
  Antisense Strand to SEQ ID NO: 365101
ugacuuagccaggacucuu

SEQ ID NO: 365103 - RNA, 19 nt, Artificial Sequence
  Description of Artificial Sequence: Synthetic oligonucleotide
  Sense Strand Starting at position 591 of SEQ ID NO: 315723
uggcuaagucagggacuua

SEQ ID NO: 365104 - RNA, 19 nt, Artificial Sequence
  Description of Artificial Sequence: Synthetic oligonucleotide
  Antisense Strand to SEQ ID NO: 365103
uaagucccugacuuagcca

SEQ ID NO: 365105 - RNA, 19 nt, Artificial Sequence
  Description of Artificial Sequence: Synthetic oligonucleotide
  Sense Strand Starting at position 591 of SEQ ID NO: 315758
acuuaccaucugugagaag

SEQ ID NO: 365106 - RNA, 19 nt, Artificial Sequence
  Description of Artificial Sequence: Synthetic oligonucleotide
  Antisense Strand to SEQ ID NO: 365105
cuucucacagaugguaagu

SEQ ID NO: 365107 - RNA, 19 nt, Artificial Sequence
  Description of Artificial Sequence: Synthetic oligonucleotide
  Sense Strand Starting at position 591 of SEQ ID NO: 315834
cagagcugucacgauaucu

SEQ ID NO: 365108 - RNA, 19 nt, Artificial Sequence
  Description of Artificial Sequence: Synthetic oligonucleotide
  Antisense Strand to SEQ ID NO: 365107
agauaucgugacagcucug

SEQ ID NO: 365109 - RNA, 19 nt, Artificial Sequence
  Description of Artificial Sequence: Synthetic oligonucleotide
  Sense Strand Starting at position 591 of SEQ ID NO: 315979
aggcaaacaccgcaguaau

SEQ ID NO: 365110 - RNA, 19 nt, Artificial Sequence
  Description of Artificial Sequence: Synthetic oligonucleotide
  Antisense Strand to SEQ ID NO: 365109
auuacugcgguguuugccu

SEQ ID NO: 365111 - RNA, 19 nt, Artificial Sequence
  Description of Artificial Sequence: Synthetic oligonucleotide
  Sense Strand Starting at position 591 of SEQ ID NO: 316366
aaauuuacacgucguaaau

SEQ ID NO: 365112 - RNA, 19 nt, Artificial Sequence
  Description of Artificial Sequence: Synthetic oligonucleotide
  Antisense Strand to SEQ ID NO: 365111
auuuacgacguguaaauuu

SEQ ID NO: 365113 - RNA, 19 nt, Artificial Sequence
  Description of Artificial Sequence: Synthetic oligonucleotide
  Sense Strand Starting at position 591 of SEQ ID NO: 316558
cuguauauuauggagcaga

SEQ ID NO: 365114 - RNA, 19 nt, Artificial Sequence
  Description of Artificial Sequence: Synthetic oligonucleotide
  Antisense Strand to SEQ ID NO: 365113
ucugcuccauaauauacag

SEQ ID NO: 365115 - RNA, 19 nt, Artificial Sequence
  Description of Artificial Sequence: Synthetic oligonucleotide
  Sense Strand Starting at position 591 of SEQ ID NO: 316714
gucuuaauuucccucaggu

SEQ ID NO: 365116 - RNA, 19 nt, Artificial Sequence
  Description of Artificial Sequence: Synthetic oligonucleotide
  Antisense Strand to SEQ ID NO: 365115
accugagggaaauuaagac

SEQ ID NO: 365117 - RNA, 19 nt, Artificial Sequence
  Description of Artificial Sequence: Synthetic oligonucleotide
  Sense Strand Starting at position 591 of SEQ ID NO: 317182
ugaagauucuaacugccca

SEQ ID NO: 365118 - RNA, 19 nt, Artificial Sequence
  Description of Artificial Sequence: Synthetic oligonucleotide
  Antisense Strand to SEQ ID NO: 365117
ugggcaguuagaaucuuca

SEQ ID NO: 365119 - RNA, 19 nt, Artificial Sequence
  Description of Artificial Sequence: Synthetic oligonucleotide
  Sense Strand Starting at position 591 of SEQ ID NO: 317293
ugaggauucuaacugccca

SEQ ID NO: 365120 - RNA, 19 nt, Artificial Sequence
  Description of Artificial Sequence: Synthetic oligonucleotide
  Antisense Strand to SEQ ID NO: 365119
ugggcaguuagaauccuca

SEQ ID NO: 365121 - RNA, 19 nt, Artificial Sequence
  Description of Artificial Sequence: Synthetic oligonucleotide
  Sense Strand Starting at position 591 of SEQ ID NO: 317308
cccacagagccugauguuu

SEQ ID NO: 365122 - RNA, 19 nt, Artificial Sequence
  Description of Artificial Sequence: Synthetic oligonucleotide
  Antisense Strand to SEQ ID NO: 365121
aaacaucaggcucuguggg

SEQ ID NO: 365123 - RNA, 19 nt, Artificial Sequence
  Description of Artificial Sequence: Synthetic oligonucleotide
  Sense Strand Starting at position 591 of SEQ ID NO: 317532
gucuuaguucuggaaacag

SEQ ID NO: 365124 - RNA, 19 nt, Artificial Sequence
  Description of Artificial Sequence: Synthetic oligonucleotide
  Antisense Strand to SEQ ID NO: 365123
cuguuuccagaacuaagac

SEQ ID NO: 365125 - RNA, 19 nt, Artificial Sequence
  Description of Artificial Sequence: Synthetic oligonucleotide
  Sense Strand Starting at position 591 of SEQ ID NO: 317621
ggcugagugauugccgcua

SEQ ID NO: 365126 - RNA, 19 nt, Artificial Sequence
  Description of Artificial Sequence: Synthetic oligonucleotide
  Antisense Strand to SEQ ID NO: 365125
uagcggcaaucacucagcc

SEQ ID NO: 365127 - RNA, 19 nt, Artificial Sequence
  Description of Artificial Sequence: Synthetic oligonucleotide
  Sense Strand Starting at position 591 of SEQ ID NO: 317982
ggucacuguccugagcaca

SEQ ID NO: 365128 - RNA, 19 nt, Artificial Sequence
  Description of Artificial Sequence: Synthetic oligonucleotide
  Antisense Strand to SEQ ID NO: 365127
ugugcucaggacagugacc

SEQ ID NO: 365129 - RNA, 19 nt, Artificial Sequence
  Description of Artificial Sequence: Synthetic oligonucleotide
  Sense Strand Starting at position 591 of SEQ ID NO: 318007
ggaccagaagaucguuaga

SEQ ID NO: 365130 - RNA, 19 nt, Artificial Sequence
  Description of Artificial Sequence: Synthetic oligonucleotide
  Antisense Strand to SEQ ID NO: 365129
ucuaacgaucuucuggucc

SEQ ID NO: 365131 - RNA, 19 nt, Artificial Sequence
  Description of Artificial Sequence: Synthetic oligonucleotide
  Sense Strand Starting at position 591 of SEQ ID NO: 318009
accagaagaucguuagaca

SEQ ID NO: 365132 - RNA, 19 nt, Artificial Sequence
  Description of Artificial Sequence: Synthetic oligonucleotide
  Antisense Strand to SEQ ID NO: 365131
ugucuaacgaucuucuggu

SEQ ID NO: 365133 - RNA, 19 nt, Artificial Sequence
  Description of Artificial Sequence: Synthetic oligonucleotide
  Sense Strand Starting at position 591 of SEQ ID NO: 318043
ggagaggucccugguagga

SEQ ID NO: 365134 - RNA, 19 nt, Artificial Sequence
  Description of Artificial Sequence: Synthetic oligonucleotide
  Antisense Strand to SEQ ID NO: 365133
uccuaccagggaccucucc

SEQ ID NO: 365135 - RNA, 19 nt, Artificial Sequence
  Description of Artificial Sequence: Synthetic oligonucleotide
  Sense Strand Starting at position 591 of SEQ ID NO: 318270
gcugacaugugguugagga

SEQ ID NO: 365136 - RNA, 19 nt, Artificial Sequence
  Description of Artificial Sequence: Synthetic oligonucleotide
  Antisense Strand to SEQ ID NO: 365135
uccucaaccacaugucagc

SEQ ID NO: 365137 - RNA, 19 nt, Artificial Sequence
  Description of Artificial Sequence: Synthetic oligonucleotide
  Sense Strand Starting at position 591 of SEQ ID NO: 318271
cugacaugugguugaggau

SEQ ID NO: 365138 - RNA, 19 nt, Artificial Sequence
  Description of Artificial Sequence: Synthetic oligonucleotide
  Antisense Strand to SEQ ID NO: 365137
auccucaaccacaugucag

SEQ ID NO: 365139 - RNA, 19 nt, Artificial Sequence
  Description of Artificial Sequence: Synthetic oligonucleotide
  Sense Strand Starting at position 591 of SEQ ID NO: 318311
uuagaauagucagcacaau

SEQ ID NO: 365140 - RNA, 19 nt, Artificial Sequence
  Description of Artificial Sequence: Synthetic oligonucleotide
  Antisense Strand to SEQ ID NO: 365139
auugugcugacuauucuaa

SEQ ID NO: 365141 - RNA, 19 nt, Artificial Sequence
  Description of Artificial Sequence: Synthetic oligonucleotide
  Sense Strand Starting at position 591 of SEQ ID NO: 318396
accugucugguuuaugauu

SEQ ID NO: 365142 - RNA, 19 nt, Artificial Sequence
  Description of Artificial Sequence: Synthetic oligonucleotide
  Antisense Strand to SEQ ID NO: 365141
aaucauaaaccagacaggu

SEQ ID NO: 365143 - RNA, 19 nt, Artificial Sequence
  Description of Artificial Sequence: Synthetic oligonucleotide
  Sense Strand Starting at position 591 of SEQ ID NO: 318407
uuaugauuauggccaauaa

SEQ ID NO: 365144 - RNA, 19 nt, Artificial Sequence
  Description of Artificial Sequence: Synthetic oligonucleotide
  Antisense Strand to SEQ ID NO: 365143
uuauuggccauaaucauaa

SEQ ID NO: 365145 - RNA, 19 nt, Artificial Sequence
  Description of Artificial Sequence: Synthetic oligonucleotide
  Sense Strand Starting at position 591 of SEQ ID NO: 318418
gccaauaagaaucgaguca

SEQ ID NO: 365146 - RNA, 19 nt, Artificial Sequence
  Description of Artificial Sequence: Synthetic oligonucleotide
  Antisense Strand to SEQ ID NO: 365145
ugacucgauucuuauuggc

SEQ ID NO: 365147 - RNA, 19 nt, Artificial Sequence
  Description of Artificial Sequence: Synthetic oligonucleotide
  Sense Strand Starting at position 591 of SEQ ID NO: 318442
augugugucacuuagauga

SEQ ID NO: 365148 - RNA, 19 nt, Artificial Sequence
  Description of Artificial Sequence: Synthetic oligonucleotide
  Antisense Strand to SEQ ID NO: 365147
ucaucuaagugacacacau

SEQ ID NO: 365149 - RNA, 19 nt, Artificial Sequence
  Description of Artificial Sequence: Synthetic oligonucleotide
  Sense Strand Starting at position 591 of SEQ ID NO: 318507
agagguguccaugggauca

SEQ ID NO: 365150 - RNA, 19 nt, Artificial Sequence
  Description of Artificial Sequence: Synthetic oligonucleotide
  Antisense Strand to SEQ ID NO: 365149
ugaucccauggacaccucu

SEQ ID NO: 365151 - RNA, 19 nt, Artificial Sequence
  Description of Artificial Sequence: Synthetic oligonucleotide
  Sense Strand Starting at position 591 of SEQ ID NO: 318548
aaguauugugaagaugcca

SEQ ID NO: 365152 - RNA, 19 nt, Artificial Sequence
  Description of Artificial Sequence: Synthetic oligonucleotide
  Antisense Strand to SEQ ID NO: 365151
uggcaucuucacaauacuu

SEQ ID NO: 365153 - RNA, 19 nt, Artificial Sequence
  Description of Artificial Sequence: Synthetic oligonucleotide
  Sense Strand Starting at position 591 of SEQ ID NO: 318632
uguuaaggccucugcauuu

SEQ ID NO: 365154 - RNA, 19 nt, Artificial Sequence
  Description of Artificial Sequence: Synthetic oligonucleotide
  Antisense Strand to SEQ ID NO: 365153
aaaugcagaggccuuaaca

SEQ ID NO: 365155 - RNA, 19 nt, Artificial Sequence
  Description of Artificial Sequence: Synthetic oligonucleotide
  Sense Strand Starting at position 591 of SEQ ID NO: 318683
ccuuaaauagcugaucuga

SEQ ID NO: 365156 - RNA, 19 nt, Artificial Sequence
  Description of Artificial Sequence: Synthetic oligonucleotide
  Antisense Strand to SEQ ID NO: 365155
ucagaucagcuauuuaagg

SEQ ID NO: 365157 - RNA, 19 nt, Artificial Sequence
  Description of Artificial Sequence: Synthetic oligonucleotide
  Sense Strand Starting at position 591 of SEQ ID NO: 318685
uuaaauagcugaucugaaa

SEQ ID NO: 365158 - RNA, 19 nt, Artificial Sequence
  Description of Artificial Sequence: Synthetic oligonucleotide
  Antisense Strand to SEQ ID NO: 365157
uuucagaucagcuauuuaa

SEQ ID NO: 365159 - RNA, 19 nt, Artificial Sequence
  Description of Artificial Sequence: Synthetic oligonucleotide
  Sense Strand Starting at position 591 of SEQ ID NO: 318709
agggucauuccucacucaa

SEQ ID NO: 365160 - RNA, 19 nt, Artificial Sequence
  Description of Artificial Sequence: Synthetic oligonucleotide
  Antisense Strand to SEQ ID NO: 365159
uugagugaggaaugacccu

SEQ ID NO: 365161 - RNA, 19 nt, Artificial Sequence
  Description of Artificial Sequence: Synthetic oligonucleotide
  Sense Strand Starting at position 591 of SEQ ID NO: 318914
cagcuuuaaguauggauca

SEQ ID NO: 365162 - RNA, 19 nt, Artificial Sequence
  Description of Artificial Sequence: Synthetic oligonucleotide
  Antisense Strand to SEQ ID NO: 365161
ugauccauacuuaaagcug

SEQ ID NO: 365163 - RNA, 19 nt, Artificial Sequence
  Description of Artificial Sequence: Synthetic oligonucleotide
  Sense Strand Starting at position 591 of SEQ ID NO: 318916
gcuuuaaguauggaucaag

SEQ ID NO: 365164 - RNA, 19 nt, Artificial Sequence
  Description of Artificial Sequence: Synthetic oligonucleotide
  Antisense Strand to SEQ ID NO: 365163
cuugauccauacuuaaagc

SEQ ID NO: 365165 - RNA, 19 nt, Artificial Sequence
  Description of Artificial Sequence: Synthetic oligonucleotide
  Sense Strand Starting at position 591 of SEQ ID NO: 318934
gcacuagauuaagcuaauc

SEQ ID NO: 365166 - RNA, 19 nt, Artificial Sequence
  Description of Artificial Sequence: Synthetic oligonucleotide
  Antisense Strand to SEQ ID NO: 365165
gauuagcuuaaucuagugc

SEQ ID NO: 365167 - RNA, 19 nt, Artificial Sequence
  Description of Artificial Sequence: Synthetic oligonucleotide
  Sense Strand Starting at position 591 of SEQ ID NO: 318976
uagugacugguggguuuaa

SEQ ID NO: 365168 - RNA, 19 nt, Artificial Sequence
  Description of Artificial Sequence: Synthetic oligonucleotide
  Antisense Strand to SEQ ID NO: 365167
uuaaacccaccagucacua

SEQ ID NO: 365169 - RNA, 19 nt, Artificial Sequence
  Description of Artificial Sequence: Synthetic oligonucleotide
  Sense Strand Starting at position 591 of SEQ ID NO: 319055
gauccugcuggaugucaga

SEQ ID NO: 365170 - RNA, 19 nt, Artificial Sequence
  Description of Artificial Sequence: Synthetic oligonucleotide
  Antisense Strand to SEQ ID NO: 365169
ucugacauccagcaggauc

SEQ ID NO: 365171 - RNA, 19 nt, Artificial Sequence
  Description of Artificial Sequence: Synthetic oligonucleotide
  Sense Strand Starting at position 591 of SEQ ID NO: 319135
gacaucauuggguggauga

SEQ ID NO: 365172 - RNA, 19 nt, Artificial Sequence
  Description of Artificial Sequence: Synthetic oligonucleotide
  Antisense Strand to SEQ ID NO: 365171
ucauccacccaaugauguc

SEQ ID NO: 365173 - RNA, 19 nt, Artificial Sequence
  Description of Artificial Sequence: Synthetic oligonucleotide
  Sense Strand Starting at position 591 of SEQ ID NO: 319183
aucuuuaguuaugugaaga

SEQ ID NO: 365174 - RNA, 19 nt, Artificial Sequence
  Description of Artificial Sequence: Synthetic oligonucleotide
  Antisense Strand to SEQ ID NO: 365173
ucuucacauaacuaaagau

SEQ ID NO: 365175 - RNA, 19 nt, Artificial Sequence
  Description of Artificial Sequence: Synthetic oligonucleotide
  Sense Strand Starting at position 592 of SEQ ID NO: 315280
accuguggcccaugcaaau

SEQ ID NO: 365176 - RNA, 19 nt, Artificial Sequence
  Description of Artificial Sequence: Synthetic oligonucleotide
  Antisense Strand to SEQ ID NO: 365175
auuugcaugggccacaggu

SEQ ID NO: 365177 - RNA, 19 nt, Artificial Sequence
  Description of Artificial Sequence: Synthetic oligonucleotide
  Sense Strand Starting at position 592 of SEQ ID NO: 315504
ggaucugggauguguucuu

SEQ ID NO: 365178 - RNA, 19 nt, Artificial Sequence
  Description of Artificial Sequence: Synthetic oligonucleotide
  Antisense Strand to SEQ ID NO: 365177
aagaacacaucccagaucc

SEQ ID NO: 365179 - RNA, 19 nt, Artificial Sequence
  Description of Artificial Sequence: Synthetic oligonucleotide
  Sense Strand Starting at position 592 of SEQ ID NO: 315607
cagacacacucggucuuau

SEQ ID NO: 365180 - RNA, 19 nt, Artificial Sequence
  Description of Artificial Sequence: Synthetic oligonucleotide
  Antisense Strand to SEQ ID NO: 365179
auaagaccgagugugucug

SEQ ID NO: 365181 - RNA, 19 nt, Artificial Sequence
  Description of Artificial Sequence: Synthetic oligonucleotide
  Sense Strand Starting at position 592 of SEQ ID NO: 315716
ucuccugaacagcaugauu

SEQ ID NO: 365182 - RNA, 19 nt, Artificial Sequence
  Description of Artificial Sequence: Synthetic oligonucleotide
  Antisense Strand to SEQ ID NO: 365181
aaucaugcuguucaggaga

SEQ ID NO: 365183 - RNA, 19 nt, Artificial Sequence
  Description of Artificial Sequence: Synthetic oligonucleotide
  Sense Strand Starting at position 592 of SEQ ID NO: 315718
uccugaacagcaugauucu

SEQ ID NO: 365184 - RNA, 19 nt, Artificial Sequence
  Description of Artificial Sequence: Synthetic oligonucleotide
  Antisense Strand to SEQ ID NO: 365183
agaaucaugcuguucagga

SEQ ID NO: 365185 - RNA, 19 nt, Artificial Sequence
  Description of Artificial Sequence: Synthetic oligonucleotide
  Sense Strand Starting at position 592 of SEQ ID NO: 315727
gcaugauucuuagugggcu

SEQ ID NO: 365186 - RNA, 19 nt, Artificial Sequence
  Description of Artificial Sequence: Synthetic oligonucleotide
  Antisense Strand to SEQ ID NO: 365185
agcccacuaagaaucaugc

SEQ ID NO: 365187 - RNA, 19 nt, Artificial Sequence
  Description of Artificial Sequence: Synthetic oligonucleotide
  Sense Strand Starting at position 592 of SEQ ID NO: 315765
ccaggaaugcuugaguacu

SEQ ID NO: 365188 - RNA, 19 nt, Artificial Sequence
  Description of Artificial Sequence: Synthetic oligonucleotide
  Antisense Strand to SEQ ID NO: 365187
aguacucaagcauuccugg

SEQ ID NO: 365189 - RNA, 19 nt, Artificial Sequence
  Description of Artificial Sequence: Synthetic oligonucleotide
  Sense Strand Starting at position 592 of SEQ ID NO: 315773
gcuugaguacugcgaucca

SEQ ID NO: 365190 - RNA, 19 nt, Artificial Sequence
  Description of Artificial Sequence: Synthetic oligonucleotide
  Antisense Strand to SEQ ID NO: 365189
uggaucgcaguacucaagc

SEQ ID NO: 365191 - RNA, 19 nt, Artificial Sequence
  Description of Artificial Sequence: Synthetic oligonucleotide
  Sense Strand Starting at position 592 of SEQ ID NO: 315833
gugacucuccugcauaacu

SEQ ID NO: 365192 - RNA, 19 nt, Artificial Sequence
  Description of Artificial Sequence: Synthetic oligonucleotide
  Antisense Strand to SEQ ID NO: 365191
aguuaugcaggagagucac

SEQ ID NO: 365193 - RNA, 19 nt, Artificial Sequence
  Description of Artificial Sequence: Synthetic oligonucleotide
  Sense Strand Starting at position 592 of SEQ ID NO: 316273
ggucgaauggcccauauga

SEQ ID NO: 365194 - RNA, 19 nt, Artificial Sequence
  Description of Artificial Sequence: Synthetic oligonucleotide
  Antisense Strand to SEQ ID NO: 365193
ucauaugggccauucgacc

SEQ ID NO: 365195 - RNA, 19 nt, Artificial Sequence
  Description of Artificial Sequence: Synthetic oligonucleotide
  Sense Strand Starting at position 592 of SEQ ID NO: 316275
ucgaauggcccauaugaga

SEQ ID NO: 365196 - RNA, 19 nt, Artificial Sequence
  Description of Artificial Sequence: Synthetic oligonucleotide
  Antisense Strand to SEQ ID NO: 365195
ucucauaugggccauucga

SEQ ID NO: 365197 - RNA, 19 nt, Artificial Sequence
  Description of Artificial Sequence: Synthetic oligonucleotide
  Sense Strand Starting at position 592 of SEQ ID NO: 316282
gcccauaugagaugagacu

SEQ ID NO: 365198 - RNA, 19 nt, Artificial Sequence
  Description of Artificial Sequence: Synthetic oligonucleotide
  Antisense Strand to SEQ ID NO: 365197
agucucaucucauaugggc

SEQ ID NO: 365199 - RNA, 19 nt, Artificial Sequence
  Description of Artificial Sequence: Synthetic oligonucleotide
  Sense Strand Starting at position 592 of SEQ ID NO: 316335
ggcggugucacugggaagu

SEQ ID NO: 365200 - RNA, 19 nt, Artificial Sequence
  Description of Artificial Sequence: Synthetic oligonucleotide
  Antisense Strand to SEQ ID NO: 365199
acuucccagugacaccgcc

SEQ ID NO: 365201 - RNA, 19 nt, Artificial Sequence
  Description of Artificial Sequence: Synthetic oligonucleotide
  Sense Strand Starting at position 592 of SEQ ID NO: 316373
cccuauauccuaggagcuu

SEQ ID NO: 365202 - RNA, 19 nt, Artificial Sequence
  Description of Artificial Sequence: Synthetic oligonucleotide
  Antisense Strand to SEQ ID NO: 365201
aagcuccuaggauauaggg

SEQ ID NO: 365203 - RNA, 19 nt, Artificial Sequence
  Description of Artificial Sequence: Synthetic oligonucleotide
  Sense Strand Starting at position 592 of SEQ ID NO: 316679
gagagugaagccgagucua

SEQ ID NO: 365204 - RNA, 19 nt, Artificial Sequence
  Description of Artificial Sequence: Synthetic oligonucleotide
  Antisense Strand to SEQ ID NO: 365203
uagacucggcuucacucuc

SEQ ID NO: 365205 - RNA, 19 nt, Artificial Sequence
  Description of Artificial Sequence: Synthetic oligonucleotide
  Sense Strand Starting at position 592 of SEQ ID NO: 317802
ucacccaguugugagauaa

SEQ ID NO: 365206 - RNA, 19 nt, Artificial Sequence
  Description of Artificial Sequence: Synthetic oligonucleotide
  Antisense Strand to SEQ ID NO: 365205
uuaucucacaacuggguga

SEQ ID NO: 365207 - RNA, 19 nt, Artificial Sequence
  Description of Artificial Sequence: Synthetic oligonucleotide
  Sense Strand Starting at position 592 of SEQ ID NO: 317826
aggagcagugcucaguaaa

SEQ ID NO: 365208 - RNA, 19 nt, Artificial Sequence
  Description of Artificial Sequence: Synthetic oligonucleotide
  Antisense Strand to SEQ ID NO: 365207
uuuacugagcacugcuccu

SEQ ID NO: 365209 - RNA, 19 nt, Artificial Sequence
  Description of Artificial Sequence: Synthetic oligonucleotide
  Sense Strand Starting at position 592 of SEQ ID NO: 317902
uccauauucuagucacuug

SEQ ID NO: 365210 - RNA, 19 nt, Artificial Sequence
  Description of Artificial Sequence: Synthetic oligonucleotide
  Antisense Strand to SEQ ID NO: 365209
caagugacuagaauaugga

SEQ ID NO: 365211 - RNA, 19 nt, Artificial Sequence
  Description of Artificial Sequence: Synthetic oligonucleotide
  Sense Strand Starting at position 592 of SEQ ID NO: 317910
cuagucacuuggucucgua

SEQ ID NO: 365212 - RNA, 19 nt, Artificial Sequence
  Description of Artificial Sequence: Synthetic oligonucleotide
  Antisense Strand to SEQ ID NO: 365211
uacgagaccaagugacuag

SEQ ID NO: 365213 - RNA, 19 nt, Artificial Sequence
  Description of Artificial Sequence: Synthetic oligonucleotide
  Sense Strand Starting at position 592 of SEQ ID NO: 317966
gcaucaacgucaucuggga

SEQ ID NO: 365214 - RNA, 19 nt, Artificial Sequence
  Description of Artificial Sequence: Synthetic oligonucleotide
  Antisense Strand to SEQ ID NO: 365213
ucccagaugacguugaugc

SEQ ID NO: 365215 - RNA, 19 nt, Artificial Sequence
  Description of Artificial Sequence: Synthetic oligonucleotide
  Sense Strand Starting at position 592 of SEQ ID NO: 318031
aucggaagcucugaagguu

SEQ ID NO: 365216 - RNA, 19 nt, Artificial Sequence
  Description of Artificial Sequence: Synthetic oligonucleotide
  Antisense Strand to SEQ ID NO: 365215
aaccuucagagcuuccgau

SEQ ID NO: 365217 - RNA, 19 nt, Artificial Sequence
  Description of Artificial Sequence: Synthetic oligonucleotide
  Sense Strand Starting at position 592 of SEQ ID NO: 318060
aggguuugcgugcacugaa

SEQ ID NO: 365218 - RNA, 19 nt, Artificial Sequence
  Description of Artificial Sequence: Synthetic oligonucleotide
  Antisense Strand to SEQ ID NO: 365217
uucagugcacgcaaacccu

SEQ ID NO: 365219 - RNA, 19 nt, Artificial Sequence
  Description of Artificial Sequence: Synthetic oligonucleotide
  Sense Strand Starting at position 592 of SEQ ID NO: 318165
ggauuaaguauaugcaugu

SEQ ID NO: 365220 - RNA, 19 nt, Artificial Sequence
  Description of Artificial Sequence: Synthetic oligonucleotide
  Antisense Strand to SEQ ID NO: 365219
acaugcauauacuuaaucc

SEQ ID NO: 365221 - RNA, 19 nt, Artificial Sequence
  Description of Artificial Sequence: Synthetic oligonucleotide
  Sense Strand Starting at position 592 of SEQ ID NO: 318166
gauuaaguauaugcauguu

SEQ ID NO: 365222 - RNA, 19 nt, Artificial Sequence
  Description of Artificial Sequence: Synthetic oligonucleotide
  Antisense Strand to SEQ ID NO: 365221
aacaugcauauacuuaauc

SEQ ID NO: 365223 - RNA, 19 nt, Artificial Sequence
  Description of Artificial Sequence: Synthetic oligonucleotide
  Sense Strand Starting at position 592 of SEQ ID NO: 318364
ugaauugacugcuaucaug

SEQ ID NO: 365224 - RNA, 19 nt, Artificial Sequence
  Description of Artificial Sequence: Synthetic oligonucleotide
  Antisense Strand to SEQ ID NO: 365223
caugauagcagucaauuca

SEQ ID NO: 365225 - RNA, 19 nt, Artificial Sequence
  Description of Artificial Sequence: Synthetic oligonucleotide
  Sense Strand Starting at position 592 of SEQ ID NO: 318382
guugaagucugaccacacu

SEQ ID NO: 365226 - RNA, 19 nt, Artificial Sequence
  Description of Artificial Sequence: Synthetic oligonucleotide
  Antisense Strand to SEQ ID NO: 365225
aguguggucagacuucaac

SEQ ID NO: 365227 - RNA, 19 nt, Artificial Sequence
  Description of Artificial Sequence: Synthetic oligonucleotide
  Sense Strand Starting at position 592 of SEQ ID NO: 318448
acaacagaguuuggauaau

SEQ ID NO: 365228 - RNA, 19 nt, Artificial Sequence
  Description of Artificial Sequence: Synthetic oligonucleotide
  Antisense Strand to SEQ ID NO: 365227
auuauccaaacucuguugu

SEQ ID NO: 365229 - RNA, 19 nt, Artificial Sequence
  Description of Artificial Sequence: Synthetic oligonucleotide
  Sense Strand Starting at position 592 of SEQ ID NO: 318454
gaguuuggauaaugguuga

SEQ ID NO: 365230 - RNA, 19 nt, Artificial Sequence
  Description of Artificial Sequence: Synthetic oligonucleotide
  Antisense Strand to SEQ ID NO: 365229
ucaaccauuauccaaacuc

SEQ ID NO: 365231 - RNA, 19 nt, Artificial Sequence
  Description of Artificial Sequence: Synthetic oligonucleotide
  Sense Strand Starting at position 592 of SEQ ID NO: 318519
gcccgaucuccuuagcaua

SEQ ID NO: 365232 - RNA, 19 nt, Artificial Sequence
  Description of Artificial Sequence: Synthetic oligonucleotide
  Antisense Strand to SEQ ID NO: 365231
uaugcuaaggagaucgggc

SEQ ID NO: 365233 - RNA, 19 nt, Artificial Sequence
  Description of Artificial Sequence: Synthetic oligonucleotide
  Sense Strand Starting at position 592 of SEQ ID NO: 318694
cgcuguucuuucuuccuga

SEQ ID NO: 365234 - RNA, 19 nt, Artificial Sequence
  Description of Artificial Sequence: Synthetic oligonucleotide
  Antisense Strand to SEQ ID NO: 365233
ucaggaagaaagaacagcg

SEQ ID NO: 365235 - RNA, 19 nt, Artificial Sequence
  Description of Artificial Sequence: Synthetic oligonucleotide
  Sense Strand Starting at position 592 of SEQ ID NO: 318905
cgguauagcucucuaagga

SEQ ID NO: 365236 - RNA, 19 nt, Artificial Sequence
  Description of Artificial Sequence: Synthetic oligonucleotide
  Antisense Strand to SEQ ID NO: 365235
uccuuagagagcuauaccg

SEQ ID NO: 365237 - RNA, 19 nt, Artificial Sequence
  Description of Artificial Sequence: Synthetic oligonucleotide
  Sense Strand Starting at position 592 of SEQ ID NO: 318906
gguauagcucucuaaggag

SEQ ID NO: 365238 - RNA, 19 nt, Artificial Sequence
  Description of Artificial Sequence: Synthetic oligonucleotide
  Antisense Strand to SEQ ID NO: 365237
cuccuuagagagcuauacc

SEQ ID NO: 365239 - RNA, 19 nt, Artificial Sequence
  Description of Artificial Sequence: Synthetic oligonucleotide
  Sense Strand Starting at position 592 of SEQ ID NO: 318909
auagcucucuaaggagaaa

SEQ ID NO: 365240 - RNA, 19 nt, Artificial Sequence
  Description of Artificial Sequence: Synthetic oligonucleotide
  Antisense Strand to SEQ ID NO: 365239
uuucuccuuagagagcuau

SEQ ID NO: 365241 - RNA, 19 nt, Artificial Sequence
  Description of Artificial Sequence: Synthetic oligonucleotide
  Sense Strand Starting at position 592 of SEQ ID NO: 318930
agucuuagauaucuuugua

SEQ ID NO: 365242 - RNA, 19 nt, Artificial Sequence
  Description of Artificial Sequence: Synthetic oligonucleotide
  Antisense Strand to SEQ ID NO: 365241
uacaaagauaucuaagacu

SEQ ID NO: 365243 - RNA, 19 nt, Artificial Sequence
  Description of Artificial Sequence: Synthetic oligonucleotide
  Sense Strand Starting at position 592 of SEQ ID NO: 318974
ggcuuagguagaugcuuaa

SEQ ID NO: 365244 - RNA, 19 nt, Artificial Sequence
  Description of Artificial Sequence: Synthetic oligonucleotide
  Antisense Strand to SEQ ID NO: 365243
uuaagcaucuaccuaagcc

SEQ ID NO: 365245 - RNA, 19 nt, Artificial Sequence
  Description of Artificial Sequence: Synthetic oligonucleotide
  Sense Strand Starting at position 592 of SEQ ID NO: 318977
uuagguagaugcuuaaaca

SEQ ID NO: 365246 - RNA, 19 nt, Artificial Sequence
  Description of Artificial Sequence: Synthetic oligonucleotide
  Antisense Strand to SEQ ID NO: 365245
uguuuaagcaucuaccuaa

SEQ ID NO: 365247 - RNA, 19 nt, Artificial Sequence
  Description of Artificial Sequence: Synthetic oligonucleotide
  Sense Strand Starting at position 592 of SEQ ID NO: 318978
uagguagaugcuuaaacau

SEQ ID NO: 365248 - RNA, 19 nt, Artificial Sequence
  Description of Artificial Sequence: Synthetic oligonucleotide
  Antisense Strand to SEQ ID NO: 365247
auguuuaagcaucuaccua

SEQ ID NO: 365249 - RNA, 19 nt, Artificial Sequence
  Description of Artificial Sequence: Synthetic oligonucleotide
  Sense Strand Starting at position 592 of SEQ ID NO: 318985
augcuuaaacauuguugaa

SEQ ID NO: 365250 - RNA, 19 nt, Artificial Sequence
  Description of Artificial Sequence: Synthetic oligonucleotide
  Antisense Strand to SEQ ID NO: 365249
uucaacaauguuuaagcau

SEQ ID NO: 365251 - RNA, 19 nt, Artificial Sequence
  Description of Artificial Sequence: Synthetic oligonucleotide
  Sense Strand Starting at position 592 of SEQ ID NO: 318987
gcuuaaacauuguugaaag

SEQ ID NO: 365252 - RNA, 19 nt, Artificial Sequence
  Description of Artificial Sequence: Synthetic oligonucleotide
  Antisense Strand to SEQ ID NO: 365251
cuuucaacaauguuuaagc

SEQ ID NO: 365253 - RNA, 19 nt, Artificial Sequence
  Description of Artificial Sequence: Synthetic oligonucleotide
  Sense Strand Starting at position 592 of SEQ ID NO: 318988
cuuaaacauuguugaaaga

SEQ ID NO: 365254 - RNA, 19 nt, Artificial Sequence
  Description of Artificial Sequence: Synthetic oligonucleotide
  Antisense Strand to SEQ ID NO: 365253
ucuuucaacaauguuuaag

SEQ ID NO: 365255 - RNA, 19 nt, Artificial Sequence
  Description of Artificial Sequence: Synthetic oligonucleotide
  Sense Strand Starting at position 593 of SEQ ID NO: 315389
gggagcuuaacauaggguu

SEQ ID NO: 365256 - RNA, 19 nt, Artificial Sequence
  Description of Artificial Sequence: Synthetic oligonucleotide
  Antisense Strand to SEQ ID NO: 365255
aacccuauguuaagcuccc

SEQ ID NO: 365257 - RNA, 19 nt, Artificial Sequence
  Description of Artificial Sequence: Synthetic oligonucleotide
  Sense Strand Starting at position 593 of SEQ ID NO: 315395
uuaacauaggguugucaga

SEQ ID NO: 365258 - RNA, 19 nt, Artificial Sequence
  Description of Artificial Sequence: Synthetic oligonucleotide
  Antisense Strand to SEQ ID NO: 365257
ucugacaacccuauguuaa

SEQ ID NO: 365259 - RNA, 19 nt, Artificial Sequence
  Description of Artificial Sequence: Synthetic oligonucleotide
  Sense Strand Starting at position 593 of SEQ ID NO: 315538
gagcguugacaacaauaca

SEQ ID NO: 365260 - RNA, 19 nt, Artificial Sequence
  Description of Artificial Sequence: Synthetic oligonucleotide
  Antisense Strand to SEQ ID NO: 365259
uguauuguugucaacgcuc

SEQ ID NO: 365261 - RNA, 19 nt, Artificial Sequence
  Description of Artificial Sequence: Synthetic oligonucleotide
  Sense Strand Starting at position 593 of SEQ ID NO: 315551
aauacauuccugugugaug

SEQ ID NO: 365262 - RNA, 19 nt, Artificial Sequence
  Description of Artificial Sequence: Synthetic oligonucleotide
  Antisense Strand to SEQ ID NO: 365261
caucacacaggaauguauu

SEQ ID NO: 365263 - RNA, 19 nt, Artificial Sequence
  Description of Artificial Sequence: Synthetic oligonucleotide
  Sense Strand Starting at position 593 of SEQ ID NO: 315553
uacauuccugugugaugca

SEQ ID NO: 365264 - RNA, 19 nt, Artificial Sequence
  Description of Artificial Sequence: Synthetic oligonucleotide
  Antisense Strand to SEQ ID NO: 365263
ugcaucacacaggaaugua

SEQ ID NO: 365265 - RNA, 19 nt, Artificial Sequence
  Description of Artificial Sequence: Synthetic oligonucleotide
  Sense Strand Starting at position 593 of SEQ ID NO: 315639
ccggauggguguuuggaau

SEQ ID NO: 365266 - RNA, 19 nt, Artificial Sequence
  Description of Artificial Sequence: Synthetic oligonucleotide
  Antisense Strand to SEQ ID NO: 365265
auuccaaacacccauccgg

SEQ ID NO: 365267 - RNA, 19 nt, Artificial Sequence
  Description of Artificial Sequence: Synthetic oligonucleotide
  Sense Strand Starting at position 593 of SEQ ID NO: 315671
cuccaagcucuggagugau

SEQ ID NO: 365268 - RNA, 19 nt, Artificial Sequence
  Description of Artificial Sequence: Synthetic oligonucleotide
  Antisense Strand to SEQ ID NO: 365267
aucacuccagagcuuggag

SEQ ID NO: 365269 - RNA, 19 nt, Artificial Sequence
  Description of Artificial Sequence: Synthetic oligonucleotide
  Sense Strand Starting at position 593 of SEQ ID NO: 315674
caagcucuggagugauuau

SEQ ID NO: 365270 - RNA, 19 nt, Artificial Sequence
  Description of Artificial Sequence: Synthetic oligonucleotide
  Antisense Strand to SEQ ID NO: 365269
auaaucacuccagagcuug

SEQ ID NO: 365271 - RNA, 19 nt, Artificial Sequence
  Description of Artificial Sequence: Synthetic oligonucleotide
  Sense Strand Starting at position 593 of SEQ ID NO: 315740
ugaauuagggucugaacga

SEQ ID NO: 365272 - RNA, 19 nt, Artificial Sequence
  Description of Artificial Sequence: Synthetic oligonucleotide
  Antisense Strand to SEQ ID NO: 365271
ucguucagacccuaauuca

SEQ ID NO: 365273 - RNA, 19 nt, Artificial Sequence
  Description of Artificial Sequence: Synthetic oligonucleotide
  Sense Strand Starting at position 593 of SEQ ID NO: 315745
uagggucugaacgaaguua

SEQ ID NO: 365274 - RNA, 19 nt, Artificial Sequence
  Description of Artificial Sequence: Synthetic oligonucleotide
  Antisense Strand to SEQ ID NO: 365273
uaacuucguucagacccua

SEQ ID NO: 365275 - RNA, 19 nt, Artificial Sequence
  Description of Artificial Sequence: Synthetic oligonucleotide
  Sense Strand Starting at position 593 of SEQ ID NO: 315757
gaaguuauuguuugcucag

SEQ ID NO: 365276 - RNA, 19 nt, Artificial Sequence
  Description of Artificial Sequence: Synthetic oligonucleotide
  Antisense Strand to SEQ ID NO: 365275
cugagcaaacaauaacuuc

SEQ ID NO: 365277 - RNA, 19 nt, Artificial Sequence
  Description of Artificial Sequence: Synthetic oligonucleotide
  Sense Strand Starting at position 593 of SEQ ID NO: 315758
aaguuauuguuugcucaga

SEQ ID NO: 365278 - RNA, 19 nt, Artificial Sequence
  Description of Artificial Sequence: Synthetic oligonucleotide
  Antisense Strand to SEQ ID NO: 365277
ucugagcaaacaauaacuu

SEQ ID NO: 365279 - RNA, 19 nt, Artificial Sequence
  Description of Artificial Sequence: Synthetic oligonucleotide
  Sense Strand Starting at position 593 of SEQ ID NO: 315759
aguuauuguuugcucagac

SEQ ID NO: 365280 - RNA, 19 nt, Artificial Sequence
  Description of Artificial Sequence: Synthetic oligonucleotide
  Antisense Strand to SEQ ID NO: 365279
gucugagcaaacaauaacu

SEQ ID NO: 365281 - RNA, 19 nt, Artificial Sequence
  Description of Artificial Sequence: Synthetic oligonucleotide
  Sense Strand Starting at position 593 of SEQ ID NO: 315893
guaucuccggcuugaaagu

SEQ ID NO: 365282 - RNA, 19 nt, Artificial Sequence
  Description of Artificial Sequence: Synthetic oligonucleotide
  Antisense Strand to SEQ ID NO: 365281
acuuucaagccggagauac

SEQ ID NO: 365283 - RNA, 19 nt, Artificial Sequence
  Description of Artificial Sequence: Synthetic oligonucleotide
  Sense Strand Starting at position 593 of SEQ ID NO: 315900
cggcuugaaaguuaauaga

SEQ ID NO: 365284 - RNA, 19 nt, Artificial Sequence
  Description of Artificial Sequence: Synthetic oligonucleotide
  Antisense Strand to SEQ ID NO: 365283
ucuauuaacuuucaagccg

SEQ ID NO: 365285 - RNA, 19 nt, Artificial Sequence
  Description of Artificial Sequence: Synthetic oligonucleotide
  Sense Strand Starting at position 593 of SEQ ID NO: 316158
gugcaaaucgcgggauaaa

SEQ ID NO: 365286 - RNA, 19 nt, Artificial Sequence
  Description of Artificial Sequence: Synthetic oligonucleotide
  Antisense Strand to SEQ ID NO: 365285
uuuaucccgcgauuugcac

SEQ ID NO: 365287 - RNA, 19 nt, Artificial Sequence
  Description of Artificial Sequence: Synthetic oligonucleotide
  Sense Strand Starting at position 593 of SEQ ID NO: 316159
ugcaaaucgcgggauaaag

SEQ ID NO: 365288 - RNA, 19 nt, Artificial Sequence
  Description of Artificial Sequence: Synthetic oligonucleotide
  Antisense Strand to SEQ ID NO: 365287
cuuuaucccgcgauuugca

SEQ ID NO: 365289 - RNA, 19 nt, Artificial Sequence
  Description of Artificial Sequence: Synthetic oligonucleotide
  Sense Strand Starting at position 593 of SEQ ID NO: 316188
ggaauuuaauagggaaguc

SEQ ID NO: 365290 - RNA, 19 nt, Artificial Sequence
  Description of Artificial Sequence: Synthetic oligonucleotide
  Antisense Strand to SEQ ID NO: 365289
gacuucccuauuaaauucc

SEQ ID NO: 365291 - RNA, 19 nt, Artificial Sequence
  Description of Artificial Sequence: Synthetic oligonucleotide
  Sense Strand Starting at position 593 of SEQ ID NO: 316820
cugagugugcgacaaaguu

SEQ ID NO: 365292 - RNA, 19 nt, Artificial Sequence
  Description of Artificial Sequence: Synthetic oligonucleotide
  Antisense Strand to SEQ ID NO: 365291
aacuuugucgcacacucag

SEQ ID NO: 365293 - RNA, 19 nt, Artificial Sequence
  Description of Artificial Sequence: Synthetic oligonucleotide
  Sense Strand Starting at position 593 of SEQ ID NO: 317638
ccgagauuacuugggccaa

SEQ ID NO: 365294 - RNA, 19 nt, Artificial Sequence
  Description of Artificial Sequence: Synthetic oligonucleotide
  Antisense Strand to SEQ ID NO: 365293
uuggcccaaguaaucucgg

SEQ ID NO: 365295 - RNA, 19 nt, Artificial Sequence
  Description of Artificial Sequence: Synthetic oligonucleotide
  Sense Strand Starting at position 593 of SEQ ID NO: 317640
gagauuacuugggccaaag

SEQ ID NO: 365296 - RNA, 19 nt, Artificial Sequence
  Description of Artificial Sequence: Synthetic oligonucleotide
  Antisense Strand to SEQ ID NO: 365295
cuuuggcccaaguaaucuc

SEQ ID NO: 365297 - RNA, 19 nt, Artificial Sequence
  Description of Artificial Sequence: Synthetic oligonucleotide
  Sense Strand Starting at position 593 of SEQ ID NO: 317783
gcgacuucuggaugagcaa

SEQ ID NO: 365298 - RNA, 19 nt, Artificial Sequence
  Description of Artificial Sequence: Synthetic oligonucleotide
  Antisense Strand to SEQ ID NO: 365297
uugcucauccagaagucgc

SEQ ID NO: 365299 - RNA, 19 nt, Artificial Sequence
  Description of Artificial Sequence: Synthetic oligonucleotide
  Sense Strand Starting at position 593 of SEQ ID NO: 318202
ccaauaugccgcuauauuu

SEQ ID NO: 365300 - RNA, 19 nt, Artificial Sequence
  Description of Artificial Sequence: Synthetic oligonucleotide
  Antisense Strand to SEQ ID NO: 365299
aaauauagcggcauauugg

SEQ ID NO: 365301 - RNA, 19 nt, Artificial Sequence
  Description of Artificial Sequence: Synthetic oligonucleotide
  Sense Strand Starting at position 593 of SEQ ID NO: 318212
gcuauauuucguuguccuu

SEQ ID NO: 365302 - RNA, 19 nt, Artificial Sequence
  Description of Artificial Sequence: Synthetic oligonucleotide
  Antisense Strand to SEQ ID NO: 365301
aaggacaacgaaauauagc

SEQ ID NO: 365303 - RNA, 19 nt, Artificial Sequence
  Description of Artificial Sequence: Synthetic oligonucleotide
  Sense Strand Starting at position 593 of SEQ ID NO: 318218
uuucguuguccuuacugau

SEQ ID NO: 365304 - RNA, 19 nt, Artificial Sequence
  Description of Artificial Sequence: Synthetic oligonucleotide
  Antisense Strand to SEQ ID NO: 365303
aucaguaaggacaacgaaa

SEQ ID NO: 365305 - RNA, 19 nt, Artificial Sequence
  Description of Artificial Sequence: Synthetic oligonucleotide
  Sense Strand Starting at position 593 of SEQ ID NO: 318238
aucugucaguuuccaugau

SEQ ID NO: 365306 - RNA, 19 nt, Artificial Sequence
  Description of Artificial Sequence: Synthetic oligonucleotide
  Antisense Strand to SEQ ID NO: 365305
aucauggaaacugacagau

SEQ ID NO: 365307 - RNA, 19 nt, Artificial Sequence
  Description of Artificial Sequence: Synthetic oligonucleotide
  Sense Strand Starting at position 593 of SEQ ID NO: 318242
gucaguuuccaugaucaaa

SEQ ID NO: 365308 - RNA, 19 nt, Artificial Sequence
  Description of Artificial Sequence: Synthetic oligonucleotide
  Antisense Strand to SEQ ID NO: 365307
uuugaucauggaaacugac

SEQ ID NO: 365309 - RNA, 19 nt, Artificial Sequence
  Description of Artificial Sequence: Synthetic oligonucleotide
  Sense Strand Starting at position 593 of SEQ ID NO: 318383
gggcuuggauucgcuacaa

SEQ ID NO: 365310 - RNA, 19 nt, Artificial Sequence
  Description of Artificial Sequence: Synthetic oligonucleotide
  Antisense Strand to SEQ ID NO: 365309
uuguagcgaauccaagccc

SEQ ID NO: 365311 - RNA, 19 nt, Artificial Sequence
  Description of Artificial Sequence: Synthetic oligonucleotide
  Sense Strand Starting at position 593 of SEQ ID NO: 318418
gugguugauaggcaagaga

SEQ ID NO: 365312 - RNA, 19 nt, Artificial Sequence
  Description of Artificial Sequence: Synthetic oligonucleotide
  Antisense Strand to SEQ ID NO: 365311
ucucuugccuaucaaccac

SEQ ID NO: 365313 - RNA, 19 nt, Artificial Sequence
  Description of Artificial Sequence: Synthetic oligonucleotide
  Sense Strand Starting at position 593 of SEQ ID NO: 318564
cuguuauccaguugaggaa

SEQ ID NO: 365314 - RNA, 19 nt, Artificial Sequence
  Description of Artificial Sequence: Synthetic oligonucleotide
  Antisense Strand to SEQ ID NO: 365313
uuccucaacuggauaacag

SEQ ID NO: 365315 - RNA, 19 nt, Artificial Sequence
  Description of Artificial Sequence: Synthetic oligonucleotide
  Sense Strand Starting at position 593 of SEQ ID NO: 318596
ggguuaacugcuggaggaa

SEQ ID NO: 365316 - RNA, 19 nt, Artificial Sequence
  Description of Artificial Sequence: Synthetic oligonucleotide
  Antisense Strand to SEQ ID NO: 365315
uuccuccagcaguuaaccc

SEQ ID NO: 365317 - RNA, 19 nt, Artificial Sequence
  Description of Artificial Sequence: Synthetic oligonucleotide
  Sense Strand Starting at position 593 of SEQ ID NO: 318780
uuuggauguuaaccuuuau

SEQ ID NO: 365318 - RNA, 19 nt, Artificial Sequence
  Description of Artificial Sequence: Synthetic oligonucleotide
  Antisense Strand to SEQ ID NO: 365317
auaaagguuaacauccaaa

SEQ ID NO: 365319 - RNA, 19 nt, Artificial Sequence
  Description of Artificial Sequence: Synthetic oligonucleotide
  Sense Strand Starting at position 593 of SEQ ID NO: 318832
ugccucaaugccugaggaa

SEQ ID NO: 365320 - RNA, 19 nt, Artificial Sequence
  Description of Artificial Sequence: Synthetic oligonucleotide
  Antisense Strand to SEQ ID NO: 365319
uuccucaggcauugaggca

SEQ ID NO: 365321 - RNA, 19 nt, Artificial Sequence
  Description of Artificial Sequence: Synthetic oligonucleotide
  Sense Strand Starting at position 593 of SEQ ID NO: 318833
gccucaaugccugaggaag

SEQ ID NO: 365322 - RNA, 19 nt, Artificial Sequence
  Description of Artificial Sequence: Synthetic oligonucleotide
  Antisense Strand to SEQ ID NO: 365321
cuuccucaggcauugaggc

SEQ ID NO: 365323 - RNA, 19 nt, Artificial Sequence
  Description of Artificial Sequence: Synthetic oligonucleotide
  Sense Strand Starting at position 593 of SEQ ID NO: 318848
gaaguaaacuucuugaagu

SEQ ID NO: 365324 - RNA, 19 nt, Artificial Sequence
  Description of Artificial Sequence: Synthetic oligonucleotide
  Antisense Strand to SEQ ID NO: 365323
acuucaagaaguuuacuuc

SEQ ID NO: 365325 - RNA, 19 nt, Artificial Sequence
  Description of Artificial Sequence: Synthetic oligonucleotide
  Sense Strand Starting at position 593 of SEQ ID NO: 318850
aguaaacuucuugaaguac

SEQ ID NO: 365326 - RNA, 19 nt, Artificial Sequence
  Description of Artificial Sequence: Synthetic oligonucleotide
  Antisense Strand to SEQ ID NO: 365325
guacuucaagaaguuuacu

SEQ ID NO: 365327 - RNA, 19 nt, Artificial Sequence
  Description of Artificial Sequence: Synthetic oligonucleotide
  Sense Strand Starting at position 593 of SEQ ID NO: 318905
auagcaagcuccuuuauag

SEQ ID NO: 365328 - RNA, 19 nt, Artificial Sequence
  Description of Artificial Sequence: Synthetic oligonucleotide
  Antisense Strand to SEQ ID NO: 365327
cuauaaaggagcuugcuau

SEQ ID NO: 365329 - RNA, 19 nt, Artificial Sequence
  Description of Artificial Sequence: Synthetic oligonucleotide
  Sense Strand Starting at position 593 of SEQ ID NO: 318919
uauaguauuugugaaagga

SEQ ID NO: 365330 - RNA, 19 nt, Artificial Sequence
  Description of Artificial Sequence: Synthetic oligonucleotide
  Antisense Strand to SEQ ID NO: 365329
uccuuucacaaauacuaua

SEQ ID NO: 365331 - RNA, 19 nt, Artificial Sequence
  Description of Artificial Sequence: Synthetic oligonucleotide
  Sense Strand Starting at position 593 of SEQ ID NO: 319164
cuggccuauuguuuaugua

SEQ ID NO: 365332 - RNA, 19 nt, Artificial Sequence
  Description of Artificial Sequence: Synthetic oligonucleotide
  Antisense Strand to SEQ ID NO: 365331
uacauaaacaauaggccag

SEQ ID NO: 365333 - RNA, 19 nt, Artificial Sequence
  Description of Artificial Sequence: Synthetic oligonucleotide
  Sense Strand Starting at position 593 of SEQ ID NO: 319165
uggccuauuguuuauguaa

SEQ ID NO: 365334 - RNA, 19 nt, Artificial Sequence
  Description of Artificial Sequence: Synthetic oligonucleotide
  Antisense Strand to SEQ ID NO: 365333
uuacauaaacaauaggcca

SEQ ID NO: 365335 - RNA, 19 nt, Artificial Sequence
  Description of Artificial Sequence: Synthetic oligonucleotide
  Sense Strand Starting at position 594 of SEQ ID NO: 315827
gggacuuucuaguuuacaa

SEQ ID NO: 365336 - RNA, 19 nt, Artificial Sequence
  Description of Artificial Sequence: Synthetic oligonucleotide
  Antisense Strand to SEQ ID NO: 365335
uuguaaacuagaaaguccc

SEQ ID NO: 365337 - RNA, 19 nt, Artificial Sequence
  Description of Artificial Sequence: Synthetic oligonucleotide
  Sense Strand Starting at position 594 of SEQ ID NO: 315928
aaccgaagcucagagauaa

SEQ ID NO: 365338 - RNA, 19 nt, Artificial Sequence
  Description of Artificial Sequence: Synthetic oligonucleotide
  Antisense Strand to SEQ ID NO: 365337
uuaucucugagcuucgguu

SEQ ID NO: 365339 - RNA, 19 nt, Artificial Sequence
  Description of Artificial Sequence: Synthetic oligonucleotide
  Sense Strand Starting at position 594 of SEQ ID NO: 315965
cagggaguucccugcccaa

SEQ ID NO: 365340 - RNA, 19 nt, Artificial Sequence
  Description of Artificial Sequence: Synthetic oligonucleotide
  Antisense Strand to SEQ ID NO: 365339
uugggcagggaacucccug

SEQ ID NO: 365341 - RNA, 19 nt, Artificial Sequence
  Description of Artificial Sequence: Synthetic oligonucleotide
  Sense Strand Starting at position 594 of SEQ ID NO: 315968
ggaguucccugcccaagaa

SEQ ID NO: 365342 - RNA, 19 nt, Artificial Sequence
  Description of Artificial Sequence: Synthetic oligonucleotide
  Antisense Strand to SEQ ID NO: 365341
uucuugggcagggaacucc

SEQ ID NO: 365343 - RNA, 19 nt, Artificial Sequence
  Description of Artificial Sequence: Synthetic oligonucleotide
  Sense Strand Starting at position 594 of SEQ ID NO: 316350
ggguccuugucaccuaaca

SEQ ID NO: 365344 - RNA, 19 nt, Artificial Sequence
  Description of Artificial Sequence: Synthetic oligonucleotide
  Antisense Strand to SEQ ID NO: 365343
uguuaggugacaaggaccc

SEQ ID NO: 365345 - RNA, 19 nt, Artificial Sequence
  Description of Artificial Sequence: Synthetic oligonucleotide
  Sense Strand Starting at position 594 of SEQ ID NO: 316364
uaacauguggcccacagaa

SEQ ID NO: 365346 - RNA, 19 nt, Artificial Sequence
  Description of Artificial Sequence: Synthetic oligonucleotide
  Antisense Strand to SEQ ID NO: 365345
uucugugggccacauguua

SEQ ID NO: 365347 - RNA, 19 nt, Artificial Sequence
  Description of Artificial Sequence: Synthetic oligonucleotide
  Sense Strand Starting at position 594 of SEQ ID NO: 316366
acauguggcccacagaauu

SEQ ID NO: 365348 - RNA, 19 nt, Artificial Sequence
  Description of Artificial Sequence: Synthetic oligonucleotide
  Antisense Strand to SEQ ID NO: 365347
aauucugugggccacaugu

SEQ ID NO: 365349 - RNA, 19 nt, Artificial Sequence
  Description of Artificial Sequence: Synthetic oligonucleotide
  Sense Strand Starting at position 594 of SEQ ID NO: 316384
uuauuucucuuagaugagu

SEQ ID NO: 365350 - RNA, 19 nt, Artificial Sequence
  Description of Artificial Sequence: Synthetic oligonucleotide
  Antisense Strand to SEQ ID NO: 365349
acucaucuaagagaaauaa

SEQ ID NO: 365351 - RNA, 19 nt, Artificial Sequence
  Description of Artificial Sequence: Synthetic oligonucleotide
  Sense Strand Starting at position 594 of SEQ ID NO: 316399
gaguguugcucccagguuu

SEQ ID NO: 365352 - RNA, 19 nt, Artificial Sequence
  Description of Artificial Sequence: Synthetic oligonucleotide
  Antisense Strand to SEQ ID NO: 365351
aaaccugggagcaacacuc

SEQ ID NO: 365353 - RNA, 19 nt, Artificial Sequence
  Description of Artificial Sequence: Synthetic oligonucleotide
  Sense Strand Starting at position 594 of SEQ ID NO: 316586
cugggcuguucuccacuaa

SEQ ID NO: 365354 - RNA, 19 nt, Artificial Sequence
  Description of Artificial Sequence: Synthetic oligonucleotide
  Antisense Strand to SEQ ID NO: 365353
uuaguggagaacagcccag

SEQ ID NO: 365355 - RNA, 19 nt, Artificial Sequence
  Description of Artificial Sequence: Synthetic oligonucleotide
  Sense Strand Starting at position 594 of SEQ ID NO: 316587
ugggcuguucuccacuaaa

SEQ ID NO: 365356 - RNA, 19 nt, Artificial Sequence
  Description of Artificial Sequence: Synthetic oligonucleotide
  Antisense Strand to SEQ ID NO: 365355
uuuaguggagaacagccca

SEQ ID NO: 365357 - RNA, 19 nt, Artificial Sequence
  Description of Artificial Sequence: Synthetic oligonucleotide
  Sense Strand Starting at position 594 of SEQ ID NO: 316859
augugagcccuuggauaag

SEQ ID NO: 365358 - RNA, 19 nt, Artificial Sequence
  Description of Artificial Sequence: Synthetic oligonucleotide
  Antisense Strand to SEQ ID NO: 365357
cuuauccaagggcucacau

SEQ ID NO: 365359 - RNA, 19 nt, Artificial Sequence
  Description of Artificial Sequence: Synthetic oligonucleotide
  Sense Strand Starting at position 594 of SEQ ID NO: 316995
uggguucuagccugaaaca

SEQ ID NO: 365360 - RNA, 19 nt, Artificial Sequence
  Description of Artificial Sequence: Synthetic oligonucleotide
  Antisense Strand to SEQ ID NO: 365359
uguuucaggcuagaaccca

SEQ ID NO: 365361 - RNA, 19 nt, Artificial Sequence
  Description of Artificial Sequence: Synthetic oligonucleotide
  Sense Strand Starting at position 594 of SEQ ID NO: 316996
ggguucuagccugaaacau

SEQ ID NO: 365362 - RNA, 19 nt, Artificial Sequence
  Description of Artificial Sequence: Synthetic oligonucleotide
  Antisense Strand to SEQ ID NO: 365361
auguuucaggcuagaaccc

SEQ ID NO: 365363 - RNA, 19 nt, Artificial Sequence
  Description of Artificial Sequence: Synthetic oligonucleotide
  Sense Strand Starting at position 594 of SEQ ID NO: 317005
ccugaaacaugcugugaug

SEQ ID NO: 365364 - RNA, 19 nt, Artificial Sequence
  Description of Artificial Sequence: Synthetic oligonucleotide
  Antisense Strand to SEQ ID NO: 365363
caucacagcauguuucagg

SEQ ID NO: 365365 - RNA, 19 nt, Artificial Sequence
  Description of Artificial Sequence: Synthetic oligonucleotide
  Sense Strand Starting at position 594 of SEQ ID NO: 317008
gaaacaugcugugaugggu

SEQ ID NO: 365366 - RNA, 19 nt, Artificial Sequence
  Description of Artificial Sequence: Synthetic oligonucleotide
  Antisense Strand to SEQ ID NO: 365365
acccaucacagcauguuuc

SEQ ID NO: 365367 - RNA, 19 nt, Artificial Sequence
  Description of Artificial Sequence: Synthetic oligonucleotide
  Sense Strand Starting at position 594 of SEQ ID NO: 317028
ccaguuugccuccaagaug

SEQ ID NO: 365368 - RNA, 19 nt, Artificial Sequence
  Description of Artificial Sequence: Synthetic oligonucleotide
  Antisense Strand to SEQ ID NO: 365367
caucuuggaggcaaacugg

SEQ ID NO: 365369 - RNA, 19 nt, Artificial Sequence
  Description of Artificial Sequence: Synthetic oligonucleotide
  Sense Strand Starting at position 594 of SEQ ID NO: 317387
agccuaaagugagacauga

SEQ ID NO: 365370 - RNA, 19 nt, Artificial Sequence
  Description of Artificial Sequence: Synthetic oligonucleotide
  Antisense Strand to SEQ ID NO: 365369
ucaugucucacuuuaggcu

SEQ ID NO: 365371 - RNA, 19 nt, Artificial Sequence
  Description of Artificial Sequence: Synthetic oligonucleotide
  Sense Strand Starting at position 594 of SEQ ID NO: 317610
ugccuauggcccugauaga

SEQ ID NO: 365372 - RNA, 19 nt, Artificial Sequence
  Description of Artificial Sequence: Synthetic oligonucleotide
  Antisense Strand to SEQ ID NO: 365371
ucuaucagggccauaggca

SEQ ID NO: 365373 - RNA, 19 nt, Artificial Sequence
  Description of Artificial Sequence: Synthetic oligonucleotide
  Sense Strand Starting at position 594 of SEQ ID NO: 317750
ggucaagugugagaggaaa

SEQ ID NO: 365374 - RNA, 19 nt, Artificial Sequence
  Description of Artificial Sequence: Synthetic oligonucleotide
  Antisense Strand to SEQ ID NO: 365373
uuuccucucacacuugacc

SEQ ID NO: 365375 - RNA, 19 nt, Artificial Sequence
  Description of Artificial Sequence: Synthetic oligonucleotide
  Sense Strand Starting at position 594 of SEQ ID NO: 317980
ugggcuuagccauauaccu

SEQ ID NO: 365376 - RNA, 19 nt, Artificial Sequence
  Description of Artificial Sequence: Synthetic oligonucleotide
  Antisense Strand to SEQ ID NO: 365375
agguauauggcuaagccca

SEQ ID NO: 365377 - RNA, 19 nt, Artificial Sequence
  Description of Artificial Sequence: Synthetic oligonucleotide
  Sense Strand Starting at position 594 of SEQ ID NO: 318158
ucaauacagugcuggauaa

SEQ ID NO: 365378 - RNA, 19 nt, Artificial Sequence
  Description of Artificial Sequence: Synthetic oligonucleotide
  Antisense Strand to SEQ ID NO: 365377
uuauccagcacuguauuga

SEQ ID NO: 365379 - RNA, 19 nt, Artificial Sequence
  Description of Artificial Sequence: Synthetic oligonucleotide
  Sense Strand Starting at position 594 of SEQ ID NO: 318159
caauacagugcuggauaaa

SEQ ID NO: 365380 - RNA, 19 nt, Artificial Sequence
  Description of Artificial Sequence: Synthetic oligonucleotide
  Antisense Strand to SEQ ID NO: 365379
uuuauccagcacuguauug

SEQ ID NO: 365381 - RNA, 19 nt, Artificial Sequence
  Description of Artificial Sequence: Synthetic oligonucleotide
  Sense Strand Starting at position 594 of SEQ ID NO: 318162
uacagugcuggauaaacau

SEQ ID NO: 365382 - RNA, 19 nt, Artificial Sequence
  Description of Artificial Sequence: Synthetic oligonucleotide
  Antisense Strand to SEQ ID NO: 365381
auguuuauccagcacugua

SEQ ID NO: 365383 - RNA, 19 nt, Artificial Sequence
  Description of Artificial Sequence: Synthetic oligonucleotide
  Sense Strand Starting at position 594 of SEQ ID NO: 318168
gcuggauaaacauggauua

SEQ ID NO: 365384 - RNA, 19 nt, Artificial Sequence
  Description of Artificial Sequence: Synthetic oligonucleotide
  Antisense Strand to SEQ ID NO: 365383
uaauccauguuuauccagc

SEQ ID NO: 365385 - RNA, 19 nt, Artificial Sequence
  Description of Artificial Sequence: Synthetic oligonucleotide
  Sense Strand Starting at position 594 of SEQ ID NO: 318199
ggugcaggcaaauauuaau

SEQ ID NO: 365386 - RNA, 19 nt, Artificial Sequence
  Description of Artificial Sequence: Synthetic oligonucleotide
  Antisense Strand to SEQ ID NO: 365385
auuaauauuugccugcacc

SEQ ID NO: 365387 - RNA, 19 nt, Artificial Sequence
  Description of Artificial Sequence: Synthetic oligonucleotide
  Sense Strand Starting at position 594 of SEQ ID NO: 318205
ggcaaauauuaaugacaaa

SEQ ID NO: 365388 - RNA, 19 nt, Artificial Sequence
  Description of Artificial Sequence: Synthetic oligonucleotide
  Antisense Strand to SEQ ID NO: 365387
uuugucauuaauauuugcc

SEQ ID NO: 365389 - RNA, 19 nt, Artificial Sequence
  Description of Artificial Sequence: Synthetic oligonucleotide
  Sense Strand Starting at position 594 of SEQ ID NO: 318248
cuaacacauuuagaggaau

SEQ ID NO: 365390 - RNA, 19 nt, Artificial Sequence
  Description of Artificial Sequence: Synthetic oligonucleotide
  Antisense Strand to SEQ ID NO: 365389
auuccucuaaauguguuag

SEQ ID NO: 365391 - RNA, 19 nt, Artificial Sequence
  Description of Artificial Sequence: Synthetic oligonucleotide
  Sense Strand Starting at position 594 of SEQ ID NO: 318306
cccagcucugggugguuaa

SEQ ID NO: 365392 - RNA, 19 nt, Artificial Sequence
  Description of Artificial Sequence: Synthetic oligonucleotide
  Antisense Strand to SEQ ID NO: 365391
uuaaccacccagagcuggg

SEQ ID NO: 365393 - RNA, 19 nt, Artificial Sequence
  Description of Artificial Sequence: Synthetic oligonucleotide
  Sense Strand Starting at position 594 of SEQ ID NO: 318307
ccagcucugggugguuaaa

SEQ ID NO: 365394 - RNA, 19 nt, Artificial Sequence
  Description of Artificial Sequence: Synthetic oligonucleotide
  Antisense Strand to SEQ ID NO: 365393
uuuaaccacccagagcugg

SEQ ID NO: 365395 - RNA, 19 nt, Artificial Sequence
  Description of Artificial Sequence: Synthetic oligonucleotide
  Sense Strand Starting at position 594 of SEQ ID NO: 318309
agcucugggugguuaaacu

SEQ ID NO: 365396 - RNA, 19 nt, Artificial Sequence
  Description of Artificial Sequence: Synthetic oligonucleotide
  Antisense Strand to SEQ ID NO: 365395
aguuuaaccacccagagcu

SEQ ID NO: 365397 - RNA, 19 nt, Artificial Sequence
  Description of Artificial Sequence: Synthetic oligonucleotide
  Sense Strand Starting at position 594 of SEQ ID NO: 318345
ccaugucccucuguguaga

SEQ ID NO: 365398 - RNA, 19 nt, Artificial Sequence
  Description of Artificial Sequence: Synthetic oligonucleotide
  Antisense Strand to SEQ ID NO: 365397
ucuacacagagggacaugg

SEQ ID NO: 365399 - RNA, 19 nt, Artificial Sequence
  Description of Artificial Sequence: Synthetic oligonucleotide
  Sense Strand Starting at position 594 of SEQ ID NO: 318346
caugucccucuguguagaa

SEQ ID NO: 365400 - RNA, 19 nt, Artificial Sequence
  Description of Artificial Sequence: Synthetic oligonucleotide
  Antisense Strand to SEQ ID NO: 365399
uucuacacagagggacaug

SEQ ID NO: 365401 - RNA, 19 nt, Artificial Sequence
  Description of Artificial Sequence: Synthetic oligonucleotide
  Sense Strand Starting at position 594 of SEQ ID NO: 318367
gcgcuuagccuaugugaac

SEQ ID NO: 365402 - RNA, 19 nt, Artificial Sequence
  Description of Artificial Sequence: Synthetic oligonucleotide
  Antisense Strand to SEQ ID NO: 365401
guucacauaggcuaagcgc

SEQ ID NO: 365403 - RNA, 19 nt, Artificial Sequence
  Description of Artificial Sequence: Synthetic oligonucleotide
  Sense Strand Starting at position 594 of SEQ ID NO: 318368
cgcuuagccuaugugaacu

SEQ ID NO: 365404 - RNA, 19 nt, Artificial Sequence
  Description of Artificial Sequence: Synthetic oligonucleotide
  Antisense Strand to SEQ ID NO: 365403
aguucacauaggcuaagcg

SEQ ID NO: 365405 - RNA, 19 nt, Artificial Sequence
  Description of Artificial Sequence: Synthetic oligonucleotide
  Sense Strand Starting at position 594 of SEQ ID NO: 318376
cuaugugaacugugaggau

SEQ ID NO: 365406 - RNA, 19 nt, Artificial Sequence
  Description of Artificial Sequence: Synthetic oligonucleotide
  Antisense Strand to SEQ ID NO: 365405
auccucacaguucacauag

SEQ ID NO: 365407 - RNA, 19 nt, Artificial Sequence
  Description of Artificial Sequence: Synthetic oligonucleotide
  Sense Strand Starting at position 594 of SEQ ID NO: 318530
uuuggucuugagugcuaga

SEQ ID NO: 365408 - RNA, 19 nt, Artificial Sequence
  Description of Artificial Sequence: Synthetic oligonucleotide
  Antisense Strand to SEQ ID NO: 365407
ucuagcacucaagaccaaa

SEQ ID NO: 365409 - RNA, 19 nt, Artificial Sequence
  Description of Artificial Sequence: Synthetic oligonucleotide
  Sense Strand Starting at position 594 of SEQ ID NO: 318533
ggucuugagugcuagagug

SEQ ID NO: 365410 - RNA, 19 nt, Artificial Sequence
  Description of Artificial Sequence: Synthetic oligonucleotide
  Antisense Strand to SEQ ID NO: 365409
cacucuagcacucaagacc

SEQ ID NO: 365411 - RNA, 19 nt, Artificial Sequence
  Description of Artificial Sequence: Synthetic oligonucleotide
  Sense Strand Starting at position 594 of SEQ ID NO: 319208
uagcuugagccuggaaagu

SEQ ID NO: 365412 - RNA, 19 nt, Artificial Sequence
  Description of Artificial Sequence: Synthetic oligonucleotide
  Antisense Strand to SEQ ID NO: 365411
acuuuccaggcucaagcua

SEQ ID NO: 365413 - RNA, 19 nt, Artificial Sequence
  Description of Artificial Sequence: Synthetic oligonucleotide
  Sense Strand Starting at position 595 of SEQ ID NO: 315238
agccauuacuggucugugu

SEQ ID NO: 365414 - RNA, 19 nt, Artificial Sequence
  Description of Artificial Sequence: Synthetic oligonucleotide
  Antisense Strand to SEQ ID NO: 365413
acacagaccaguaauggcu

SEQ ID NO: 365415 - RNA, 19 nt, Artificial Sequence
  Description of Artificial Sequence: Synthetic oligonucleotide
  Sense Strand Starting at position 595 of SEQ ID NO: 315240
ccauuacuggucuguguaa

SEQ ID NO: 365416 - RNA, 19 nt, Artificial Sequence
  Description of Artificial Sequence: Synthetic oligonucleotide
  Antisense Strand to SEQ ID NO: 365415
uuacacagaccaguaaugg

SEQ ID NO: 365417 - RNA, 19 nt, Artificial Sequence
  Description of Artificial Sequence: Synthetic oligonucleotide
  Sense Strand Starting at position 595 of SEQ ID NO: 315241
cauuacuggucuguguaac

SEQ ID NO: 365418 - RNA, 19 nt, Artificial Sequence
  Description of Artificial Sequence: Synthetic oligonucleotide
  Antisense Strand to SEQ ID NO: 365417
guuacacagaccaguaaug

SEQ ID NO: 365419 - RNA, 19 nt, Artificial Sequence
  Description of Artificial Sequence: Synthetic oligonucleotide
  Sense Strand Starting at position 595 of SEQ ID NO: 315247
uggucuguguaaccacaaa

SEQ ID NO: 365420 - RNA, 19 nt, Artificial Sequence
  Description of Artificial Sequence: Synthetic oligonucleotide
  Antisense Strand to SEQ ID NO: 365419
uuugugguuacacagacca

SEQ ID NO: 365421 - RNA, 19 nt, Artificial Sequence
  Description of Artificial Sequence: Synthetic oligonucleotide
  Sense Strand Starting at position 595 of SEQ ID NO: 315313
guguguuugcacggacaga

SEQ ID NO: 365422 - RNA, 19 nt, Artificial Sequence
  Description of Artificial Sequence: Synthetic oligonucleotide
  Antisense Strand to SEQ ID NO: 365421
ucuguccgugcaaacacac

SEQ ID NO: 365423 - RNA, 19 nt, Artificial Sequence
  Description of Artificial Sequence: Synthetic oligonucleotide
  Sense Strand Starting at position 595 of SEQ ID NO: 315413
uugcuuauaugcuucugaa

SEQ ID NO: 365424 - RNA, 19 nt, Artificial Sequence
  Description of Artificial Sequence: Synthetic oligonucleotide
  Antisense Strand to SEQ ID NO: 365423
uucagaagcauauaagcaa

SEQ ID NO: 365425 - RNA, 19 nt, Artificial Sequence
  Description of Artificial Sequence: Synthetic oligonucleotide
  Sense Strand Starting at position 595 of SEQ ID NO: 315423
gcuucugaaucauugggau

SEQ ID NO: 365426 - RNA, 19 nt, Artificial Sequence
  Description of Artificial Sequence: Synthetic oligonucleotide
  Antisense Strand to SEQ ID NO: 365425
aucccaaugauucagaagc

SEQ ID NO: 365427 - RNA, 19 nt, Artificial Sequence
  Description of Artificial Sequence: Synthetic oligonucleotide
  Sense Strand Starting at position 595 of SEQ ID NO: 315454
acaucaucacuuuggguau

SEQ ID NO: 365428 - RNA, 19 nt, Artificial Sequence
  Description of Artificial Sequence: Synthetic oligonucleotide
  Antisense Strand to SEQ ID NO: 365427
auacccaaagugaugaugu

SEQ ID NO: 365429 - RNA, 19 nt, Artificial Sequence
  Description of Artificial Sequence: Synthetic oligonucleotide
  Sense Strand Starting at position 595 of SEQ ID NO: 315457
ucaucacuuuggguauaua

SEQ ID NO: 365430 - RNA, 19 nt, Artificial Sequence
  Description of Artificial Sequence: Synthetic oligonucleotide
  Antisense Strand to SEQ ID NO: 365429
uauauacccaaagugauga

SEQ ID NO: 365431 - RNA, 19 nt, Artificial Sequence
  Description of Artificial Sequence: Synthetic oligonucleotide
  Sense Strand Starting at position 595 of SEQ ID NO: 315498
ugugauacaucugacaacu

SEQ ID NO: 365432 - RNA, 19 nt, Artificial Sequence
  Description of Artificial Sequence: Synthetic oligonucleotide
  Antisense Strand to SEQ ID NO: 365431
aguugucagauguaucaca

SEQ ID NO: 365433 - RNA, 19 nt, Artificial Sequence
  Description of Artificial Sequence: Synthetic oligonucleotide
  Sense Strand Starting at position 595 of SEQ ID NO: 315620
gcugaggucugguuggagu

SEQ ID NO: 365434 - RNA, 19 nt, Artificial Sequence
  Description of Artificial Sequence: Synthetic oligonucleotide
  Antisense Strand to SEQ ID NO: 365433
acuccaaccagaccucagc

SEQ ID NO: 365435 - RNA, 19 nt, Artificial Sequence
  Description of Artificial Sequence: Synthetic oligonucleotide
  Sense Strand Starting at position 595 of SEQ ID NO: 316075
gcaagcauguuugcuaaca

SEQ ID NO: 365436 - RNA, 19 nt, Artificial Sequence
  Description of Artificial Sequence: Synthetic oligonucleotide
  Antisense Strand to SEQ ID NO: 365435
uguuagcaaacaugcuugc

SEQ ID NO: 365437 - RNA, 19 nt, Artificial Sequence
  Description of Artificial Sequence: Synthetic oligonucleotide
  Sense Strand Starting at position 595 of SEQ ID NO: 316177
ucuacauaagugggaacua

SEQ ID NO: 365438 - RNA, 19 nt, Artificial Sequence
  Description of Artificial Sequence: Synthetic oligonucleotide
  Antisense Strand to SEQ ID NO: 365437
uaguucccacuuauguaga

SEQ ID NO: 365439 - RNA, 19 nt, Artificial Sequence
  Description of Artificial Sequence: Synthetic oligonucleotide
  Sense Strand Starting at position 595 of SEQ ID NO: 316178
cuacauaagugggaacuaa

SEQ ID NO: 365440 - RNA, 19 nt, Artificial Sequence
  Description of Artificial Sequence: Synthetic oligonucleotide
  Antisense Strand to SEQ ID NO: 365439
uuaguucccacuuauguag

SEQ ID NO: 365441 - RNA, 19 nt, Artificial Sequence
  Description of Artificial Sequence: Synthetic oligonucleotide
  Sense Strand Starting at position 595 of SEQ ID NO: 316327
agcgacaagucguugggua

SEQ ID NO: 365442 - RNA, 19 nt, Artificial Sequence
  Description of Artificial Sequence: Synthetic oligonucleotide
  Antisense Strand to SEQ ID NO: 365441
uacccaacgacuugucgcu

SEQ ID NO: 365443 - RNA, 19 nt, Artificial Sequence
  Description of Artificial Sequence: Synthetic oligonucleotide
  Sense Strand Starting at position 595 of SEQ ID NO: 316346
ggccaaaggucuuuccaaa

SEQ ID NO: 365444 - RNA, 19 nt, Artificial Sequence
  Description of Artificial Sequence: Synthetic oligonucleotide
  Antisense Strand to SEQ ID NO: 365443
uuuggaaagaccuuuggcc

SEQ ID NO: 365445 - RNA, 19 nt, Artificial Sequence
  Description of Artificial Sequence: Synthetic oligonucleotide
  Sense Strand Starting at position 595 of SEQ ID NO: 316410
gcauaugagguuuacuuau

SEQ ID NO: 365446 - RNA, 19 nt, Artificial Sequence
  Description of Artificial Sequence: Synthetic oligonucleotide
  Antisense Strand to SEQ ID NO: 365445
auaaguaaaccucauaugc

SEQ ID NO: 365447 - RNA, 19 nt, Artificial Sequence
  Description of Artificial Sequence: Synthetic oligonucleotide
  Sense Strand Starting at position 595 of SEQ ID NO: 316412
auaugagguuuacuuaugu

SEQ ID NO: 365448 - RNA, 19 nt, Artificial Sequence
  Description of Artificial Sequence: Synthetic oligonucleotide
  Antisense Strand to SEQ ID NO: 365447
acauaaguaaaccucauau

SEQ ID NO: 365449 - RNA, 19 nt, Artificial Sequence
  Description of Artificial Sequence: Synthetic oligonucleotide
  Sense Strand Starting at position 595 of SEQ ID NO: 316418
gguuuacuuaugugcugga

SEQ ID NO: 365450 - RNA, 19 nt, Artificial Sequence
  Description of Artificial Sequence: Synthetic oligonucleotide
  Antisense Strand to SEQ ID NO: 365449
uccagcacauaaguaaacc

SEQ ID NO: 365451 - RNA, 19 nt, Artificial Sequence
  Description of Artificial Sequence: Synthetic oligonucleotide
  Sense Strand Starting at position 595 of SEQ ID NO: 316419
guuuacuuaugugcuggau

SEQ ID NO: 365452 - RNA, 19 nt, Artificial Sequence
  Description of Artificial Sequence: Synthetic oligonucleotide
  Antisense Strand to SEQ ID NO: 365451
auccagcacauaaguaaac

SEQ ID NO: 365453 - RNA, 19 nt, Artificial Sequence
  Description of Artificial Sequence: Synthetic oligonucleotide
  Sense Strand Starting at position 595 of SEQ ID NO: 316583
gcuaaauugcucugagaac

SEQ ID NO: 365454 - RNA, 19 nt, Artificial Sequence
  Description of Artificial Sequence: Synthetic oligonucleotide
  Antisense Strand to SEQ ID NO: 365453
guucucagagcaauuuagc

SEQ ID NO: 365455 - RNA, 19 nt, Artificial Sequence
  Description of Artificial Sequence: Synthetic oligonucleotide
  Sense Strand Starting at position 595 of SEQ ID NO: 316611
ugaguucuccuaggcacca

SEQ ID NO: 365456 - RNA, 19 nt, Artificial Sequence
  Description of Artificial Sequence: Synthetic oligonucleotide
  Antisense Strand to SEQ ID NO: 365455
uggugccuaggagaacuca

SEQ ID NO: 365457 - RNA, 19 nt, Artificial Sequence
  Description of Artificial Sequence: Synthetic oligonucleotide
  Sense Strand Starting at position 595 of SEQ ID NO: 316612
gaguucuccuaggcaccaa

SEQ ID NO: 365458 - RNA, 19 nt, Artificial Sequence
  Description of Artificial Sequence: Synthetic oligonucleotide
  Antisense Strand to SEQ ID NO: 365457
uuggugccuaggagaacuc

SEQ ID NO: 365459 - RNA, 19 nt, Artificial Sequence
  Description of Artificial Sequence: Synthetic oligonucleotide
  Sense Strand Starting at position 595 of SEQ ID NO: 317255
gggacuuucuaguuuacaa

SEQ ID NO: 365460 - RNA, 19 nt, Artificial Sequence
  Description of Artificial Sequence: Synthetic oligonucleotide
  Antisense Strand to SEQ ID NO: 365459
uuguaaacuagaaaguccc

SEQ ID NO: 365461 - RNA, 19 nt, Artificial Sequence
  Description of Artificial Sequence: Synthetic oligonucleotide
  Sense Strand Starting at position 595 of SEQ ID NO: 317356
aaccgaagcucagagauaa

SEQ ID NO: 365462 - RNA, 19 nt, Artificial Sequence
  Description of Artificial Sequence: Synthetic oligonucleotide
  Antisense Strand to SEQ ID NO: 365461
uuaucucugagcuucgguu

SEQ ID NO: 365463 - RNA, 19 nt, Artificial Sequence
  Description of Artificial Sequence: Synthetic oligonucleotide
  Sense Strand Starting at position 595 of SEQ ID NO: 317393
cagggaguucccugcccaa

SEQ ID NO: 365464 - RNA, 19 nt, Artificial Sequence
  Description of Artificial Sequence: Synthetic oligonucleotide
  Antisense Strand to SEQ ID NO: 365463
uugggcagggaacucccug

SEQ ID NO: 365465 - RNA, 19 nt, Artificial Sequence
  Description of Artificial Sequence: Synthetic oligonucleotide
  Sense Strand Starting at position 595 of SEQ ID NO: 317396
ggaguucccugcccaagaa

SEQ ID NO: 365466 - RNA, 19 nt, Artificial Sequence
  Description of Artificial Sequence: Synthetic oligonucleotide
  Antisense Strand to SEQ ID NO: 365465
uucuugggcagggaacucc

SEQ ID NO: 365467 - RNA, 19 nt, Artificial Sequence
  Description of Artificial Sequence: Synthetic oligonucleotide
  Sense Strand Starting at position 595 of SEQ ID NO: 317778
ggguccuugucaccuaaca

SEQ ID NO: 365468 - RNA, 19 nt, Artificial Sequence
  Description of Artificial Sequence: Synthetic oligonucleotide
  Antisense Strand to SEQ ID NO: 365467
uguuaggugacaaggaccc

SEQ ID NO: 365469 - RNA, 19 nt, Artificial Sequence
  Description of Artificial Sequence: Synthetic oligonucleotide
  Sense Strand Starting at position 595 of SEQ ID NO: 317792
uaacauguggcccacagaa

SEQ ID NO: 365470 - RNA, 19 nt, Artificial Sequence
  Description of Artificial Sequence: Synthetic oligonucleotide
  Antisense Strand to SEQ ID NO: 365469
uucugugggccacauguua

SEQ ID NO: 365471 - RNA, 19 nt, Artificial Sequence
  Description of Artificial Sequence: Synthetic oligonucleotide
  Sense Strand Starting at position 595 of SEQ ID NO: 317794
acauguggcccacagaauu

SEQ ID NO: 365472 - RNA, 19 nt, Artificial Sequence
  Description of Artificial Sequence: Synthetic oligonucleotide
  Antisense Strand to SEQ ID NO: 365471
aauucugugggccacaugu

SEQ ID NO: 365473 - RNA, 19 nt, Artificial Sequence
  Description of Artificial Sequence: Synthetic oligonucleotide
  Sense Strand Starting at position 595 of SEQ ID NO: 317812
uuauuucucuuagaugagu

SEQ ID NO: 365474 - RNA, 19 nt, Artificial Sequence
  Description of Artificial Sequence: Synthetic oligonucleotide
  Antisense Strand to SEQ ID NO: 365473
acucaucuaagagaaauaa

SEQ ID NO: 365475 - RNA, 19 nt, Artificial Sequence
  Description of Artificial Sequence: Synthetic oligonucleotide
  Sense Strand Starting at position 595 of SEQ ID NO: 318014
cugggcuguucuccacuaa

SEQ ID NO: 365476 - RNA, 19 nt, Artificial Sequence
  Description of Artificial Sequence: Synthetic oligonucleotide
  Antisense Strand to SEQ ID NO: 365475
uuaguggagaacagcccag

SEQ ID NO: 365477 - RNA, 19 nt, Artificial Sequence
  Description of Artificial Sequence: Synthetic oligonucleotide
  Sense Strand Starting at position 595 of SEQ ID NO: 318015
ugggcuguucuccacuaaa

SEQ ID NO: 365478 - RNA, 19 nt, Artificial Sequence
  Description of Artificial Sequence: Synthetic oligonucleotide
  Antisense Strand to SEQ ID NO: 365477
uuuaguggagaacagccca

SEQ ID NO: 365479 - RNA, 19 nt, Artificial Sequence
  Description of Artificial Sequence: Synthetic oligonucleotide
  Sense Strand Starting at position 595 of SEQ ID NO: 318287
augugagcccuuggauaag

SEQ ID NO: 365480 - RNA, 19 nt, Artificial Sequence
  Description of Artificial Sequence: Synthetic oligonucleotide
  Antisense Strand to SEQ ID NO: 365479
cuuauccaagggcucacau

SEQ ID NO: 365481 - RNA, 19 nt, Artificial Sequence
  Description of Artificial Sequence: Synthetic oligonucleotide
  Sense Strand Starting at position 595 of SEQ ID NO: 318423
uggguucuagccugaaaca

SEQ ID NO: 365482 - RNA, 19 nt, Artificial Sequence
  Description of Artificial Sequence: Synthetic oligonucleotide
  Antisense Strand to SEQ ID NO: 365481
uguuucaggcuagaaccca

SEQ ID NO: 365483 - RNA, 19 nt, Artificial Sequence
  Description of Artificial Sequence: Synthetic oligonucleotide
  Sense Strand Starting at position 595 of SEQ ID NO: 318424
ggguucuagccugaaacau

SEQ ID NO: 365484 - RNA, 19 nt, Artificial Sequence
  Description of Artificial Sequence: Synthetic oligonucleotide
  Antisense Strand to SEQ ID NO: 365483
auguuucaggcuagaaccc

SEQ ID NO: 365485 - RNA, 19 nt, Artificial Sequence
  Description of Artificial Sequence: Synthetic oligonucleotide
  Sense Strand Starting at position 595 of SEQ ID NO: 318456
ccaguuugccuccaagaug

SEQ ID NO: 365486 - RNA, 19 nt, Artificial Sequence
  Description of Artificial Sequence: Synthetic oligonucleotide
  Antisense Strand to SEQ ID NO: 365485
caucuuggaggcaaacugg

SEQ ID NO: 365487 - RNA, 19 nt, Artificial Sequence
  Description of Artificial Sequence: Synthetic oligonucleotide
  Sense Strand Starting at position 595 of SEQ ID NO: 318815
agccuaaagugagacauga

SEQ ID NO: 365488 - RNA, 19 nt, Artificial Sequence
  Description of Artificial Sequence: Synthetic oligonucleotide
  Antisense Strand to SEQ ID NO: 365487
ucaugucucacuuuaggcu

SEQ ID NO: 365489 - RNA, 19 nt, Artificial Sequence
  Description of Artificial Sequence: Synthetic oligonucleotide
  Sense Strand Starting at position 595 of SEQ ID NO: 319038
ugccuauggcccugauaga

SEQ ID NO: 365490 - RNA, 19 nt, Artificial Sequence
  Description of Artificial Sequence: Synthetic oligonucleotide
  Antisense Strand to SEQ ID NO: 365489
ucuaucagggccauaggca

SEQ ID NO: 365491 - RNA, 19 nt, Artificial Sequence
  Description of Artificial Sequence: Synthetic oligonucleotide
  Sense Strand Starting at position 595 of SEQ ID NO: 319178
ggucaagugugagaggaaa

SEQ ID NO: 365492 - RNA, 19 nt, Artificial Sequence
  Description of Artificial Sequence: Synthetic oligonucleotide
  Antisense Strand to SEQ ID NO: 365491
uuuccucucacacuugacc

SEQ ID NO: 365493 - RNA, 19 nt, Artificial Sequence
  Description of Artificial Sequence: Synthetic oligonucleotide
  Sense Strand Starting at position 596 of SEQ ID NO: 315243
agccauuacuggucugugu

SEQ ID NO: 365494 - RNA, 19 nt, Artificial Sequence
  Description of Artificial Sequence: Synthetic oligonucleotide
  Antisense Strand to SEQ ID NO: 365493
acacagaccaguaauggcu

SEQ ID NO: 365495 - RNA, 19 nt, Artificial Sequence
  Description of Artificial Sequence: Synthetic oligonucleotide
  Sense Strand Starting at position 596 of SEQ ID NO: 315245
ccauuacuggucuguguaa

SEQ ID NO: 365496 - RNA, 19 nt, Artificial Sequence
  Description of Artificial Sequence: Synthetic oligonucleotide
  Antisense Strand to SEQ ID NO: 365495
uuacacagaccaguaaugg

SEQ ID NO: 365497 - RNA, 19 nt, Artificial Sequence
  Description of Artificial Sequence: Synthetic oligonucleotide
  Sense Strand Starting at position 596 of SEQ ID NO: 315246
cauuacuggucuguguaac

SEQ ID NO: 365498 - RNA, 19 nt, Artificial Sequence
  Description of Artificial Sequence: Synthetic oligonucleotide
  Antisense Strand to SEQ ID NO: 365497
guuacacagaccaguaaug

SEQ ID NO: 365499 - RNA, 19 nt, Artificial Sequence
  Description of Artificial Sequence: Synthetic oligonucleotide
  Sense Strand Starting at position 596 of SEQ ID NO: 315252
uggucuguguaaccacaaa

SEQ ID NO: 365500 - RNA, 19 nt, Artificial Sequence
  Description of Artificial Sequence: Synthetic oligonucleotide
  Antisense Strand to SEQ ID NO: 365499
uuugugguuacacagacca

SEQ ID NO: 365501 - RNA, 19 nt, Artificial Sequence
  Description of Artificial Sequence: Synthetic oligonucleotide
  Sense Strand Starting at position 596 of SEQ ID NO: 315318
guguguuugcacggacaga

SEQ ID NO: 365502 - RNA, 19 nt, Artificial Sequence
  Description of Artificial Sequence: Synthetic oligonucleotide
  Antisense Strand to SEQ ID NO: 365501
ucuguccgugcaaacacac

SEQ ID NO: 365503 - RNA, 19 nt, Artificial Sequence
  Description of Artificial Sequence: Synthetic oligonucleotide
  Sense Strand Starting at position 596 of SEQ ID NO: 315418
uugcuuauaugcuucugaa

SEQ ID NO: 365504 - RNA, 19 nt, Artificial Sequence
  Description of Artificial Sequence: Synthetic oligonucleotide
  Antisense Strand to SEQ ID NO: 365503
uucagaagcauauaagcaa

SEQ ID NO: 365505 - RNA, 19 nt, Artificial Sequence
  Description of Artificial Sequence: Synthetic oligonucleotide
  Sense Strand Starting at position 596 of SEQ ID NO: 315428
gcuucugaaucauugggau

SEQ ID NO: 365506 - RNA, 19 nt, Artificial Sequence
  Description of Artificial Sequence: Synthetic oligonucleotide
  Antisense Strand to SEQ ID NO: 365505
aucccaaugauucagaagc

SEQ ID NO: 365507 - RNA, 19 nt, Artificial Sequence
  Description of Artificial Sequence: Synthetic oligonucleotide
  Sense Strand Starting at position 596 of SEQ ID NO: 315459
acaucaucacuuuggguau

SEQ ID NO: 365508 - RNA, 19 nt, Artificial Sequence
  Description of Artificial Sequence: Synthetic oligonucleotide
  Antisense Strand to SEQ ID NO: 365507
auacccaaagugaugaugu

SEQ ID NO: 365509 - RNA, 19 nt, Artificial Sequence
  Description of Artificial Sequence: Synthetic oligonucleotide
  Sense Strand Starting at position 596 of SEQ ID NO: 315462
ucaucacuuuggguauaua

SEQ ID NO: 365510 - RNA, 19 nt, Artificial Sequence
  Description of Artificial Sequence: Synthetic oligonucleotide
  Antisense Strand to SEQ ID NO: 365509
uauauacccaaagugauga

SEQ ID NO: 365511 - RNA, 19 nt, Artificial Sequence
  Description of Artificial Sequence: Synthetic oligonucleotide
  Sense Strand Starting at position 596 of SEQ ID NO: 315503
ugugauacaucugacaacu

SEQ ID NO: 365512 - RNA, 19 nt, Artificial Sequence
  Description of Artificial Sequence: Synthetic oligonucleotide
  Antisense Strand to SEQ ID NO: 365511
aguugucagauguaucaca

SEQ ID NO: 365513 - RNA, 19 nt, Artificial Sequence
  Description of Artificial Sequence: Synthetic oligonucleotide
  Sense Strand Starting at position 596 of SEQ ID NO: 315625
gcugaggucugguuggagu

SEQ ID NO: 365514 - RNA, 19 nt, Artificial Sequence
  Description of Artificial Sequence: Synthetic oligonucleotide
  Antisense Strand to SEQ ID NO: 365513
acuccaaccagaccucagc

SEQ ID NO: 365515 - RNA, 19 nt, Artificial Sequence
  Description of Artificial Sequence: Synthetic oligonucleotide
  Sense Strand Starting at position 596 of SEQ ID NO: 316080
gcaagcauguuugcuaaca

SEQ ID NO: 365516 - RNA, 19 nt, Artificial Sequence
  Description of Artificial Sequence: Synthetic oligonucleotide
  Antisense Strand to SEQ ID NO: 365515
uguuagcaaacaugcuugc

SEQ ID NO: 365517 - RNA, 19 nt, Artificial Sequence
  Description of Artificial Sequence: Synthetic oligonucleotide
  Sense Strand Starting at position 596 of SEQ ID NO: 316182
ucuacauaagugggaacua

SEQ ID NO: 365518 - RNA, 19 nt, Artificial Sequence
  Description of Artificial Sequence: Synthetic oligonucleotide
  Antisense Strand to SEQ ID NO: 365517
uaguucccacuuauguaga

SEQ ID NO: 365519 - RNA, 19 nt, Artificial Sequence
  Description of Artificial Sequence: Synthetic oligonucleotide
  Sense Strand Starting at position 596 of SEQ ID NO: 316183
cuacauaagugggaacuaa

SEQ ID NO: 365520 - RNA, 19 nt, Artificial Sequence
  Description of Artificial Sequence: Synthetic oligonucleotide
  Antisense Strand to SEQ ID NO: 365519
uuaguucccacuuauguag

SEQ ID NO: 365521 - RNA, 19 nt, Artificial Sequence
  Description of Artificial Sequence: Synthetic oligonucleotide
  Sense Strand Starting at position 596 of SEQ ID NO: 316332
agcgacaagucguugggua

SEQ ID NO: 365522 - RNA, 19 nt, Artificial Sequence
  Description of Artificial Sequence: Synthetic oligonucleotide
  Antisense Strand to SEQ ID NO: 365521
uacccaacgacuugucgcu

SEQ ID NO: 365523 - RNA, 19 nt, Artificial Sequence
  Description of Artificial Sequence: Synthetic oligonucleotide
  Sense Strand Starting at position 596 of SEQ ID NO: 316351
ggccaaaggucuuuccaaa

SEQ ID NO: 365524 - RNA, 19 nt, Artificial Sequence
  Description of Artificial Sequence: Synthetic oligonucleotide
  Antisense Strand to SEQ ID NO: 365523
uuuggaaagaccuuuggcc

SEQ ID NO: 365525 - RNA, 19 nt, Artificial Sequence
  Description of Artificial Sequence: Synthetic oligonucleotide
  Sense Strand Starting at position 596 of SEQ ID NO: 316415
gcauaugagguuuacuuau

SEQ ID NO: 365526 - RNA, 19 nt, Artificial Sequence
  Description of Artificial Sequence: Synthetic oligonucleotide
  Antisense Strand to SEQ ID NO: 365525
auaaguaaaccucauaugc

SEQ ID NO: 365527 - RNA, 19 nt, Artificial Sequence
  Description of Artificial Sequence: Synthetic oligonucleotide
  Sense Strand Starting at position 596 of SEQ ID NO: 316417
auaugagguuuacuuaugu

SEQ ID NO: 365528 - RNA, 19 nt, Artificial Sequence
  Description of Artificial Sequence: Synthetic oligonucleotide
  Antisense Strand to SEQ ID NO: 365527
acauaaguaaaccucauau

SEQ ID NO: 365529 - RNA, 19 nt, Artificial Sequence
  Description of Artificial Sequence: Synthetic oligonucleotide
  Sense Strand Starting at position 596 of SEQ ID NO: 316423
gguuuacuuaugugcugga

SEQ ID NO: 365530 - RNA, 19 nt, Artificial Sequence
  Description of Artificial Sequence: Synthetic oligonucleotide
  Antisense Strand to SEQ ID NO: 365529
uccagcacauaaguaaacc

SEQ ID NO: 365531 - RNA, 19 nt, Artificial Sequence
  Description of Artificial Sequence: Synthetic oligonucleotide
  Sense Strand Starting at position 596 of SEQ ID NO: 316424
guuuacuuaugugcuggau

SEQ ID NO: 365532 - RNA, 19 nt, Artificial Sequence
  Description of Artificial Sequence: Synthetic oligonucleotide
  Antisense Strand to SEQ ID NO: 365531
auccagcacauaaguaaac

SEQ ID NO: 365533 - RNA, 19 nt, Artificial Sequence
  Description of Artificial Sequence: Synthetic oligonucleotide
  Sense Strand Starting at position 596 of SEQ ID NO: 316588
gcuaaauugcucugagaac

SEQ ID NO: 365534 - RNA, 19 nt, Artificial Sequence
  Description of Artificial Sequence: Synthetic oligonucleotide
  Antisense Strand to SEQ ID NO: 365533
guucucagagcaauuuagc

SEQ ID NO: 365535 - RNA, 19 nt, Artificial Sequence
  Description of Artificial Sequence: Synthetic oligonucleotide
  Sense Strand Starting at position 596 of SEQ ID NO: 316616
ugaguucuccuaggcacca

SEQ ID NO: 365536 - RNA, 19 nt, Artificial Sequence
  Description of Artificial Sequence: Synthetic oligonucleotide
  Antisense Strand to SEQ ID NO: 365535
uggugccuaggagaacuca

SEQ ID NO: 365537 - RNA, 19 nt, Artificial Sequence
  Description of Artificial Sequence: Synthetic oligonucleotide
  Sense Strand Starting at position 596 of SEQ ID NO: 316617
gaguucuccuaggcaccaa

SEQ ID NO: 365538 - RNA, 19 nt, Artificial Sequence
  Description of Artificial Sequence: Synthetic oligonucleotide
  Antisense Strand to SEQ ID NO: 365537
uuggugccuaggagaacuc

SEQ ID NO: 365539 - RNA, 19 nt, Artificial Sequence
  Description of Artificial Sequence: Synthetic oligonucleotide
  Sense Strand Starting at position 596 of SEQ ID NO: 317260
gggacuuucuaguuuacaa

SEQ ID NO: 365540 - RNA, 19 nt, Artificial Sequence
  Description of Artificial Sequence: Synthetic oligonucleotide
  Antisense Strand to SEQ ID NO: 365539
uuguaaacuagaaaguccc

SEQ ID NO: 365541 - RNA, 19 nt, Artificial Sequence
  Description of Artificial Sequence: Synthetic oligonucleotide
  Sense Strand Starting at position 596 of SEQ ID NO: 317361
aaccgaagcucagagauaa

SEQ ID NO: 365542 - RNA, 19 nt, Artificial Sequence
  Description of Artificial Sequence: Synthetic oligonucleotide
  Antisense Strand to SEQ ID NO: 365541
uuaucucugagcuucgguu

SEQ ID NO: 365543 - RNA, 19 nt, Artificial Sequence
  Description of Artificial Sequence: Synthetic oligonucleotide
  Sense Strand Starting at position 596 of SEQ ID NO: 317398
cagggaguucccugcccaa

SEQ ID NO: 365544 - RNA, 19 nt, Artificial Sequence
  Description of Artificial Sequence: Synthetic oligonucleotide
  Antisense Strand to SEQ ID NO: 365543
uugggcagggaacucccug

SEQ ID NO: 365545 - RNA, 19 nt, Artificial Sequence
  Description of Artificial Sequence: Synthetic oligonucleotide
  Sense Strand Starting at position 596 of SEQ ID NO: 317401
ggaguucccugcccaagaa

SEQ ID NO: 365546 - RNA, 19 nt, Artificial Sequence
  Description of Artificial Sequence: Synthetic oligonucleotide
  Antisense Strand to SEQ ID NO: 365545
uucuugggcagggaacucc

SEQ ID NO: 365547 - RNA, 19 nt, Artificial Sequence
  Description of Artificial Sequence: Synthetic oligonucleotide
  Sense Strand Starting at position 596 of SEQ ID NO: 317783
ggguccuugucaccuaaca

SEQ ID NO: 365548 - RNA, 19 nt, Artificial Sequence
  Description of Artificial Sequence: Synthetic oligonucleotide
  Antisense Strand to SEQ ID NO: 365547
uguuaggugacaaggaccc

SEQ ID NO: 365549 - RNA, 19 nt, Artificial Sequence
  Description of Artificial Sequence: Synthetic oligonucleotide
  Sense Strand Starting at position 596 of SEQ ID NO: 317797
uaacauguggcccacagaa

SEQ ID NO: 365550 - RNA, 19 nt, Artificial Sequence
  Description of Artificial Sequence: Synthetic oligonucleotide
  Antisense Strand to SEQ ID NO: 365549
uucugugggccacauguua

SEQ ID NO: 365551 - RNA, 19 nt, Artificial Sequence
  Description of Artificial Sequence: Synthetic oligonucleotide
  Sense Strand Starting at position 596 of SEQ ID NO: 317799
acauguggcccacagaauu

SEQ ID NO: 365552 - RNA, 19 nt, Artificial Sequence
  Description of Artificial Sequence: Synthetic oligonucleotide
  Antisense Strand to SEQ ID NO: 365551
aauucugugggccacaugu

SEQ ID NO: 365553 - RNA, 19 nt, Artificial Sequence
  Description of Artificial Sequence: Synthetic oligonucleotide
  Sense Strand Starting at position 596 of SEQ ID NO: 317817
uuauuucucuuagaugagu

SEQ ID NO: 365554 - RNA, 19 nt, Artificial Sequence
  Description of Artificial Sequence: Synthetic oligonucleotide
  Antisense Strand to SEQ ID NO: 365553
acucaucuaagagaaauaa

SEQ ID NO: 365555 - RNA, 19 nt, Artificial Sequence
  Description of Artificial Sequence: Synthetic oligonucleotide
  Sense Strand Starting at position 596 of SEQ ID NO: 318019
cugggcuguucuccacuaa

SEQ ID NO: 365556 - RNA, 19 nt, Artificial Sequence
  Description of Artificial Sequence: Synthetic oligonucleotide
  Antisense Strand to SEQ ID NO: 365555
uuaguggagaacagcccag

SEQ ID NO: 365557 - RNA, 19 nt, Artificial Sequence
  Description of Artificial Sequence: Synthetic oligonucleotide
  Sense Strand Starting at position 596 of SEQ ID NO: 318020
ugggcuguucuccacuaaa

SEQ ID NO: 365558 - RNA, 19 nt, Artificial Sequence
  Description of Artificial Sequence: Synthetic oligonucleotide
  Antisense Strand to SEQ ID NO: 365557
uuuaguggagaacagccca

SEQ ID NO: 365559 - RNA, 19 nt, Artificial Sequence
  Description of Artificial Sequence: Synthetic oligonucleotide
  Sense Strand Starting at position 596 of SEQ ID NO: 318292
augugagcccuuggauaag

SEQ ID NO: 365560 - RNA, 19 nt, Artificial Sequence
  Description of Artificial Sequence: Synthetic oligonucleotide
  Antisense Strand to SEQ ID NO: 365559
cuuauccaagggcucacau

SEQ ID NO: 365561 - RNA, 19 nt, Artificial Sequence
  Description of Artificial Sequence: Synthetic oligonucleotide
  Sense Strand Starting at position 596 of SEQ ID NO: 318428
uggguucuagccugaaaca

SEQ ID NO: 365562 - RNA, 19 nt, Artificial Sequence
  Description of Artificial Sequence: Synthetic oligonucleotide
  Antisense Strand to SEQ ID NO: 365561
uguuucaggcuagaaccca

SEQ ID NO: 365563 - RNA, 19 nt, Artificial Sequence
  Description of Artificial Sequence: Synthetic oligonucleotide
  Sense Strand Starting at position 596 of SEQ ID NO: 318429
ggguucuagccugaaacau

SEQ ID NO: 365564 - RNA, 19 nt, Artificial Sequence
  Description of Artificial Sequence: Synthetic oligonucleotide
  Antisense Strand to SEQ ID NO: 365563
auguuucaggcuagaaccc

SEQ ID NO: 365565 - RNA, 19 nt, Artificial Sequence
  Description of Artificial Sequence: Synthetic oligonucleotide
  Sense Strand Starting at position 596 of SEQ ID NO: 318461
ccaguuugccuccaagaug

SEQ ID NO: 365566 - RNA, 19 nt, Artificial Sequence
  Description of Artificial Sequence: Synthetic oligonucleotide
  Antisense Strand to SEQ ID NO: 365565
caucuuggaggcaaacugg

SEQ ID NO: 365567 - RNA, 19 nt, Artificial Sequence
  Description of Artificial Sequence: Synthetic oligonucleotide
  Sense Strand Starting at position 596 of SEQ ID NO: 318820
agccuaaagugagacauga

SEQ ID NO: 365568 - RNA, 19 nt, Artificial Sequence
  Description of Artificial Sequence: Synthetic oligonucleotide
  Antisense Strand to SEQ ID NO: 365567
ucaugucucacuuuaggcu

SEQ ID NO: 365569 - RNA, 19 nt, Artificial Sequence
  Description of Artificial Sequence: Synthetic oligonucleotide
  Sense Strand Starting at position 596 of SEQ ID NO: 319043
ugccuauggcccugauaga

SEQ ID NO: 365570 - RNA, 19 nt, Artificial Sequence
  Description of Artificial Sequence: Synthetic oligonucleotide
  Antisense Strand to SEQ ID NO: 365569
ucuaucagggccauaggca

SEQ ID NO: 365571 - RNA, 19 nt, Artificial Sequence
  Description of Artificial Sequence: Synthetic oligonucleotide
  Sense Strand Starting at position 596 of SEQ ID NO: 319183
ggucaagugugagaggaaa

SEQ ID NO: 365572 - RNA, 19 nt, Artificial Sequence
  Description of Artificial Sequence: Synthetic oligonucleotide
  Antisense Strand to SEQ ID NO: 365571
uuuccucucacacuugacc

SEQ ID NO: 365573 - RNA, 19 nt, Artificial Sequence
  Description of Artificial Sequence: Synthetic oligonucleotide
  Sense Strand Starting at position 597 of SEQ ID NO: 315443
ggguccuugucaccuaaca

SEQ ID NO: 365574 - RNA, 19 nt, Artificial Sequence
  Description of Artificial Sequence: Synthetic oligonucleotide
  Antisense Strand to SEQ ID NO: 365573
uguuaggugacaaggaccc

SEQ ID NO: 365575 - RNA, 19 nt, Artificial Sequence
  Description of Artificial Sequence: Synthetic oligonucleotide
  Sense Strand Starting at position 597 of SEQ ID NO: 315457
uaacauguggcccacagaa

SEQ ID NO: 365576 - RNA, 19 nt, Artificial Sequence
  Description of Artificial Sequence: Synthetic oligonucleotide
  Antisense Strand to SEQ ID NO: 365575
uucugugggccacauguua

SEQ ID NO: 365577 - RNA, 19 nt, Artificial Sequence
  Description of Artificial Sequence: Synthetic oligonucleotide
  Sense Strand Starting at position 597 of SEQ ID NO: 315459
acauguggcccacagaauu

SEQ ID NO: 365578 - RNA, 19 nt, Artificial Sequence
  Description of Artificial Sequence: Synthetic oligonucleotide
  Antisense Strand to SEQ ID NO: 365577
aauucugugggccacaugu

SEQ ID NO: 365579 - RNA, 19 nt, Artificial Sequence
  Description of Artificial Sequence: Synthetic oligonucleotide
  Sense Strand Starting at position 597 of SEQ ID NO: 315477
uuauuucucuuagaugagu

SEQ ID NO: 365580 - RNA, 19 nt, Artificial Sequence
  Description of Artificial Sequence: Synthetic oligonucleotide
  Antisense Strand to SEQ ID NO: 365579
acucaucuaagagaaauaa

SEQ ID NO: 365581 - RNA, 19 nt, Artificial Sequence
  Description of Artificial Sequence: Synthetic oligonucleotide
  Sense Strand Starting at position 597 of SEQ ID NO: 315679
cugggcuguucuccacuaa

SEQ ID NO: 365582 - RNA, 19 nt, Artificial Sequence
  Description of Artificial Sequence: Synthetic oligonucleotide
  Antisense Strand to SEQ ID NO: 365581
uuaguggagaacagcccag

SEQ ID NO: 365583 - RNA, 19 nt, Artificial Sequence
  Description of Artificial Sequence: Synthetic oligonucleotide
  Sense Strand Starting at position 597 of SEQ ID NO: 315680
ugggcuguucuccacuaaa

SEQ ID NO: 365584 - RNA, 19 nt, Artificial Sequence
  Description of Artificial Sequence: Synthetic oligonucleotide
  Antisense Strand to SEQ ID NO: 365583
uuuaguggagaacagccca

SEQ ID NO: 365585 - RNA, 19 nt, Artificial Sequence
  Description of Artificial Sequence: Synthetic oligonucleotide
  Sense Strand Starting at position 597 of SEQ ID NO: 315952
augugagcccuuggauaag

SEQ ID NO: 365586 - RNA, 19 nt, Artificial Sequence
  Description of Artificial Sequence: Synthetic oligonucleotide
  Antisense Strand to SEQ ID NO: 365585
cuuauccaagggcucacau

SEQ ID NO: 365587 - RNA, 19 nt, Artificial Sequence
  Description of Artificial Sequence: Synthetic oligonucleotide
  Sense Strand Starting at position 597 of SEQ ID NO: 316088
uggguucuagccugaaaca

SEQ ID NO: 365588 - RNA, 19 nt, Artificial Sequence
  Description of Artificial Sequence: Synthetic oligonucleotide
  Antisense Strand to SEQ ID NO: 365587
uguuucaggcuagaaccca

SEQ ID NO: 365589 - RNA, 19 nt, Artificial Sequence
  Description of Artificial Sequence: Synthetic oligonucleotide
  Sense Strand Starting at position 597 of SEQ ID NO: 316089
ggguucuagccugaaacau

SEQ ID NO: 365590 - RNA, 19 nt, Artificial Sequence
  Description of Artificial Sequence: Synthetic oligonucleotide
  Antisense Strand to SEQ ID NO: 365589
auguuucaggcuagaaccc

SEQ ID NO: 365591 - RNA, 19 nt, Artificial Sequence
  Description of Artificial Sequence: Synthetic oligonucleotide
  Sense Strand Starting at position 597 of SEQ ID NO: 316121
ccaguuugccuccaagaug

SEQ ID NO: 365592 - RNA, 19 nt, Artificial Sequence
  Description of Artificial Sequence: Synthetic oligonucleotide
  Antisense Strand to SEQ ID NO: 365591
caucuuggaggcaaacugg

SEQ ID NO: 365593 - RNA, 19 nt, Artificial Sequence
  Description of Artificial Sequence: Synthetic oligonucleotide
  Sense Strand Starting at position 597 of SEQ ID NO: 316480
agccuaaagugagacauga

SEQ ID NO: 365594 - RNA, 19 nt, Artificial Sequence
  Description of Artificial Sequence: Synthetic oligonucleotide
  Antisense Strand to SEQ ID NO: 365593
ucaugucucacuuuaggcu

SEQ ID NO: 365595 - RNA, 19 nt, Artificial Sequence
  Description of Artificial Sequence: Synthetic oligonucleotide
  Sense Strand Starting at position 597 of SEQ ID NO: 316703
ugccuauggcccugauaga

SEQ ID NO: 365596 - RNA, 19 nt, Artificial Sequence
  Description of Artificial Sequence: Synthetic oligonucleotide
  Antisense Strand to SEQ ID NO: 365595
ucuaucagggccauaggca

SEQ ID NO: 365597 - RNA, 19 nt, Artificial Sequence
  Description of Artificial Sequence: Synthetic oligonucleotide
  Sense Strand Starting at position 597 of SEQ ID NO: 317073
ugggcuuagccauauaccu

SEQ ID NO: 365598 - RNA, 19 nt, Artificial Sequence
  Description of Artificial Sequence: Synthetic oligonucleotide
  Antisense Strand to SEQ ID NO: 365597
agguauauggcuaagccca

SEQ ID NO: 365599 - RNA, 19 nt, Artificial Sequence
  Description of Artificial Sequence: Synthetic oligonucleotide
  Sense Strand Starting at position 597 of SEQ ID NO: 317252
caauacagugcuggauaaa

SEQ ID NO: 365600 - RNA, 19 nt, Artificial Sequence
  Description of Artificial Sequence: Synthetic oligonucleotide
  Antisense Strand to SEQ ID NO: 365599
uuuauccagcacuguauug

SEQ ID NO: 365601 - RNA, 19 nt, Artificial Sequence
  Description of Artificial Sequence: Synthetic oligonucleotide
  Sense Strand Starting at position 597 of SEQ ID NO: 317255
uacagugcuggauaaacau

SEQ ID NO: 365602 - RNA, 19 nt, Artificial Sequence
  Description of Artificial Sequence: Synthetic oligonucleotide
  Antisense Strand to SEQ ID NO: 365601
auguuuauccagcacugua

SEQ ID NO: 365603 - RNA, 19 nt, Artificial Sequence
  Description of Artificial Sequence: Synthetic oligonucleotide
  Sense Strand Starting at position 597 of SEQ ID NO: 317261
gcuggauaaacauggauua

SEQ ID NO: 365604 - RNA, 19 nt, Artificial Sequence
  Description of Artificial Sequence: Synthetic oligonucleotide
  Antisense Strand to SEQ ID NO: 365603
uaauccauguuuauccagc

SEQ ID NO: 365605 - RNA, 19 nt, Artificial Sequence
  Description of Artificial Sequence: Synthetic oligonucleotide
  Sense Strand Starting at position 597 of SEQ ID NO: 317292
ggugcaggcaaauauuaau

SEQ ID NO: 365606 - RNA, 19 nt, Artificial Sequence
  Description of Artificial Sequence: Synthetic oligonucleotide
  Antisense Strand to SEQ ID NO: 365605
auuaauauuugccugcacc

SEQ ID NO: 365607 - RNA, 19 nt, Artificial Sequence
  Description of Artificial Sequence: Synthetic oligonucleotide
  Sense Strand Starting at position 597 of SEQ ID NO: 317341
cuaacacauuuagaggaau

SEQ ID NO: 365608 - RNA, 19 nt, Artificial Sequence
  Description of Artificial Sequence: Synthetic oligonucleotide
  Antisense Strand to SEQ ID NO: 365607
auuccucuaaauguguuag

SEQ ID NO: 365609 - RNA, 19 nt, Artificial Sequence
  Description of Artificial Sequence: Synthetic oligonucleotide
  Sense Strand Starting at position 597 of SEQ ID NO: 317399
cccagcucugggugguuaa

SEQ ID NO: 365610 - RNA, 19 nt, Artificial Sequence
  Description of Artificial Sequence: Synthetic oligonucleotide
  Antisense Strand to SEQ ID NO: 365609
uuaaccacccagagcuggg

SEQ ID NO: 365611 - RNA, 19 nt, Artificial Sequence
  Description of Artificial Sequence: Synthetic oligonucleotide
  Sense Strand Starting at position 597 of SEQ ID NO: 317400
ccagcucugggugguuaaa

SEQ ID NO: 365612 - RNA, 19 nt, Artificial Sequence
  Description of Artificial Sequence: Synthetic oligonucleotide
  Antisense Strand to SEQ ID NO: 365611
uuuaaccacccagagcugg

SEQ ID NO: 365613 - RNA, 19 nt, Artificial Sequence
  Description of Artificial Sequence: Synthetic oligonucleotide
  Sense Strand Starting at position 597 of SEQ ID NO: 317402
agcucugggugguuaaacu

SEQ ID NO: 365614 - RNA, 19 nt, Artificial Sequence
  Description of Artificial Sequence: Synthetic oligonucleotide
  Antisense Strand to SEQ ID NO: 365613
aguuuaaccacccagagcu

SEQ ID NO: 365615 - RNA, 19 nt, Artificial Sequence
  Description of Artificial Sequence: Synthetic oligonucleotide
  Sense Strand Starting at position 597 of SEQ ID NO: 317438
ccaugucccucuguguaga

SEQ ID NO: 365616 - RNA, 19 nt, Artificial Sequence
  Description of Artificial Sequence: Synthetic oligonucleotide
  Antisense Strand to SEQ ID NO: 365615
ucuacacagagggacaugg

SEQ ID NO: 365617 - RNA, 19 nt, Artificial Sequence
  Description of Artificial Sequence: Synthetic oligonucleotide
  Sense Strand Starting at position 597 of SEQ ID NO: 317439
caugucccucuguguagaa

SEQ ID NO: 365618 - RNA, 19 nt, Artificial Sequence
  Description of Artificial Sequence: Synthetic oligonucleotide
  Antisense Strand to SEQ ID NO: 365617
uucuacacagagggacaug

SEQ ID NO: 365619 - RNA, 19 nt, Artificial Sequence
  Description of Artificial Sequence: Synthetic oligonucleotide
  Sense Strand Starting at position 597 of SEQ ID NO: 317469
cuaugugaacugugaggau

SEQ ID NO: 365620 - RNA, 19 nt, Artificial Sequence
  Description of Artificial Sequence: Synthetic oligonucleotide
  Antisense Strand to SEQ ID NO: 365619
auccucacaguucacauag

SEQ ID NO: 365621 - RNA, 19 nt, Artificial Sequence
  Description of Artificial Sequence: Synthetic oligonucleotide
  Sense Strand Starting at position 597 of SEQ ID NO: 317623
uuuggucuugagugcuaga

SEQ ID NO: 365622 - RNA, 19 nt, Artificial Sequence
  Description of Artificial Sequence: Synthetic oligonucleotide
  Antisense Strand to SEQ ID NO: 365621
ucuagcacucaagaccaaa

SEQ ID NO: 365623 - RNA, 19 nt, Artificial Sequence
  Description of Artificial Sequence: Synthetic oligonucleotide
  Sense Strand Starting at position 597 of SEQ ID NO: 318301
uagcuugagccuggaaagu

SEQ ID NO: 365624 - RNA, 19 nt, Artificial Sequence
  Description of Artificial Sequence: Synthetic oligonucleotide
  Antisense Strand to SEQ ID NO: 365623
acuuuccaggcucaagcua

SEQ ID NO: 365625 - RNA, 19 nt, Artificial Sequence
  Description of Artificial Sequence: Synthetic oligonucleotide
  Sense Strand Starting at position 597 of SEQ ID NO: 318313
ggaaaguggugguugcaga

SEQ ID NO: 365626 - RNA, 19 nt, Artificial Sequence
  Description of Artificial Sequence: Synthetic oligonucleotide
  Antisense Strand to SEQ ID NO: 365625
ucugcaaccaccacuuucc

SEQ ID NO: 365627 - RNA, 19 nt, Artificial Sequence
  Description of Artificial Sequence: Synthetic oligonucleotide
  Sense Strand Starting at position 597 of SEQ ID NO: 318581
uggcuuagaaaguguguga

SEQ ID NO: 365628 - RNA, 19 nt, Artificial Sequence
  Description of Artificial Sequence: Synthetic oligonucleotide
  Antisense Strand to SEQ ID NO: 365627
ucacacacuuucuaagcca

SEQ ID NO: 365629 - RNA, 19 nt, Artificial Sequence
  Description of Artificial Sequence: Synthetic oligonucleotide
  Sense Strand Starting at position 597 of SEQ ID NO: 318584
cuuagaaagugugugacau

SEQ ID NO: 365630 - RNA, 19 nt, Artificial Sequence
  Description of Artificial Sequence: Synthetic oligonucleotide
  Antisense Strand to SEQ ID NO: 365629
augucacacacuuucuaag

SEQ ID NO: 365631 - RNA, 19 nt, Artificial Sequence
  Description of Artificial Sequence: Synthetic oligonucleotide
  Sense Strand Starting at position 597 of SEQ ID NO: 318585
uuagaaagugugugacauc

SEQ ID NO: 365632 - RNA, 19 nt, Artificial Sequence
  Description of Artificial Sequence: Synthetic oligonucleotide
  Antisense Strand to SEQ ID NO: 365631
gaugucacacacuuucuaa

SEQ ID NO: 365633 - RNA, 19 nt, Artificial Sequence
  Description of Artificial Sequence: Synthetic oligonucleotide
  Sense Strand Starting at position 597 of SEQ ID NO: 318592
gugugugacauccagccau

SEQ ID NO: 365634 - RNA, 19 nt, Artificial Sequence
  Description of Artificial Sequence: Synthetic oligonucleotide
  Antisense Strand to SEQ ID NO: 365633
auggcuggaugucacacac

SEQ ID NO: 365635 - RNA, 19 nt, Artificial Sequence
  Description of Artificial Sequence: Synthetic oligonucleotide
  Sense Strand Starting at position 597 of SEQ ID NO: 318625
cagugcuaaccugguauua

SEQ ID NO: 365636 - RNA, 19 nt, Artificial Sequence
  Description of Artificial Sequence: Synthetic oligonucleotide
  Antisense Strand to SEQ ID NO: 365635
uaauaccagguuagcacug

SEQ ID NO: 365637 - RNA, 19 nt, Artificial Sequence
  Description of Artificial Sequence: Synthetic oligonucleotide
  Sense Strand Starting at position 597 of SEQ ID NO: 318636
ugguauuagcucugucaga

SEQ ID NO: 365638 - RNA, 19 nt, Artificial Sequence
  Description of Artificial Sequence: Synthetic oligonucleotide
  Antisense Strand to SEQ ID NO: 365637
ucugacagagcuaauacca

SEQ ID NO: 365639 - RNA, 19 nt, Artificial Sequence
  Description of Artificial Sequence: Synthetic oligonucleotide
  Sense Strand Starting at position 597 of SEQ ID NO: 318637
gguauuagcucugucagag

SEQ ID NO: 365640 - RNA, 19 nt, Artificial Sequence
  Description of Artificial Sequence: Synthetic oligonucleotide
  Antisense Strand to SEQ ID NO: 365639
cucugacagagcuaauacc

SEQ ID NO: 365641 - RNA, 19 nt, Artificial Sequence
  Description of Artificial Sequence: Synthetic oligonucleotide
  Sense Strand Starting at position 597 of SEQ ID NO: 318684
augggagaucugcgcuuua

SEQ ID NO: 365642 - RNA, 19 nt, Artificial Sequence
  Description of Artificial Sequence: Synthetic oligonucleotide
  Antisense Strand to SEQ ID NO: 365641
uaaagcgcagaucucccau

SEQ ID NO: 365643 - RNA, 19 nt, Artificial Sequence
  Description of Artificial Sequence: Synthetic oligonucleotide
  Sense Strand Starting at position 597 of SEQ ID NO: 318812
gaagaugaaugacauguuu

SEQ ID NO: 365644 - RNA, 19 nt, Artificial Sequence
  Description of Artificial Sequence: Synthetic oligonucleotide
  Antisense Strand to SEQ ID NO: 365643
aaacaugucauucaucuuc

SEQ ID NO: 365645 - RNA, 19 nt, Artificial Sequence
  Description of Artificial Sequence: Synthetic oligonucleotide
  Sense Strand Starting at position 597 of SEQ ID NO: 318838
cgaggacucauuuguguca

SEQ ID NO: 365646 - RNA, 19 nt, Artificial Sequence
  Description of Artificial Sequence: Synthetic oligonucleotide
  Antisense Strand to SEQ ID NO: 365645
ugacacaaaugaguccucg

SEQ ID NO: 365647 - RNA, 19 nt, Artificial Sequence
  Description of Artificial Sequence: Synthetic oligonucleotide
  Sense Strand Starting at position 597 of SEQ ID NO: 318840
aggacucauuugugucaug

SEQ ID NO: 365648 - RNA, 19 nt, Artificial Sequence
  Description of Artificial Sequence: Synthetic oligonucleotide
  Antisense Strand to SEQ ID NO: 365647
caugacacaaaugaguccu

SEQ ID NO: 365649 - RNA, 19 nt, Artificial Sequence
  Description of Artificial Sequence: Synthetic oligonucleotide
  Sense Strand Starting at position 597 of SEQ ID NO: 318970
gcccaaggccaucauguaa

SEQ ID NO: 365650 - RNA, 19 nt, Artificial Sequence
  Description of Artificial Sequence: Synthetic oligonucleotide
  Antisense Strand to SEQ ID NO: 365649
uuacaugauggccuugggc

SEQ ID NO: 365651 - RNA, 19 nt, Artificial Sequence
  Description of Artificial Sequence: Synthetic oligonucleotide
  Sense Strand Starting at position 597 of SEQ ID NO: 319166
ugcugugacccugauaaga

SEQ ID NO: 365652 - RNA, 19 nt, Artificial Sequence
  Description of Artificial Sequence: Synthetic oligonucleotide
  Antisense Strand to SEQ ID NO: 365651
ucuuaucagggucacagca

SEQ ID NO: 365653 - RNA, 19 nt, Artificial Sequence
  Description of Artificial Sequence: Synthetic oligonucleotide
  Sense Strand Starting at position 598 of SEQ ID NO: 315653
ggucuucuacacuggaaga

SEQ ID NO: 365654 - RNA, 19 nt, Artificial Sequence
  Description of Artificial Sequence: Synthetic oligonucleotide
  Antisense Strand to SEQ ID NO: 365653
ucuuccaguguagaagacc

SEQ ID NO: 365655 - RNA, 19 nt, Artificial Sequence
  Description of Artificial Sequence: Synthetic oligonucleotide
  Sense Strand Starting at position 598 of SEQ ID NO: 315810
uccagcuaugcgugggaca

SEQ ID NO: 365656 - RNA, 19 nt, Artificial Sequence
  Description of Artificial Sequence: Synthetic oligonucleotide
  Antisense Strand to SEQ ID NO: 365655
ugucccacgcauagcugga

SEQ ID NO: 365657 - RNA, 19 nt, Artificial Sequence
  Description of Artificial Sequence: Synthetic oligonucleotide
  Sense Strand Starting at position 598 of SEQ ID NO: 315812
cagcuaugcgugggacacu

SEQ ID NO: 365658 - RNA, 19 nt, Artificial Sequence
  Description of Artificial Sequence: Synthetic oligonucleotide
  Antisense Strand to SEQ ID NO: 365657
agugucccacgcauagcug

SEQ ID NO: 365659 - RNA, 19 nt, Artificial Sequence
  Description of Artificial Sequence: Synthetic oligonucleotide
  Sense Strand Starting at position 598 of SEQ ID NO: 315909
ccuccugggucuuuaggua

SEQ ID NO: 365660 - RNA, 19 nt, Artificial Sequence
  Description of Artificial Sequence: Synthetic oligonucleotide
  Antisense Strand to SEQ ID NO: 365659
uaccuaaagacccaggagg

SEQ ID NO: 365661 - RNA, 19 nt, Artificial Sequence
  Description of Artificial Sequence: Synthetic oligonucleotide
  Sense Strand Starting at position 598 of SEQ ID NO: 315923
agguaauugccucauucug

SEQ ID NO: 365662 - RNA, 19 nt, Artificial Sequence
  Description of Artificial Sequence: Synthetic oligonucleotide
  Antisense Strand to SEQ ID NO: 365661
cagaaugaggcaauuaccu

SEQ ID NO: 365663 - RNA, 19 nt, Artificial Sequence
  Description of Artificial Sequence: Synthetic oligonucleotide
  Sense Strand Starting at position 598 of SEQ ID NO: 316060
auauaaagaugcuucguga

SEQ ID NO: 365664 - RNA, 19 nt, Artificial Sequence
  Description of Artificial Sequence: Synthetic oligonucleotide
  Antisense Strand to SEQ ID NO: 365663
ucacgaagcaucuuuauau

SEQ ID NO: 365665 - RNA, 19 nt, Artificial Sequence
  Description of Artificial Sequence: Synthetic oligonucleotide
  Sense Strand Starting at position 598 of SEQ ID NO: 316066
agaugcuucgugagggugu

SEQ ID NO: 365666 - RNA, 19 nt, Artificial Sequence
  Description of Artificial Sequence: Synthetic oligonucleotide
  Antisense Strand to SEQ ID NO: 365665
acacccucacgaagcaucu

SEQ ID NO: 365667 - RNA, 19 nt, Artificial Sequence
  Description of Artificial Sequence: Synthetic oligonucleotide
  Sense Strand Starting at position 598 of SEQ ID NO: 316124
uaaggaagugucugcggaa

SEQ ID NO: 365668 - RNA, 19 nt, Artificial Sequence
  Description of Artificial Sequence: Synthetic oligonucleotide
  Antisense Strand to SEQ ID NO: 365667
uuccgcagacacuuccuua

SEQ ID NO: 365669 - RNA, 19 nt, Artificial Sequence
  Description of Artificial Sequence: Synthetic oligonucleotide
  Sense Strand Starting at position 598 of SEQ ID NO: 316172
ggcuacauccugcgagguu

SEQ ID NO: 365670 - RNA, 19 nt, Artificial Sequence
  Description of Artificial Sequence: Synthetic oligonucleotide
  Antisense Strand to SEQ ID NO: 365669
aaccucgcaggauguagcc

SEQ ID NO: 365671 - RNA, 19 nt, Artificial Sequence
  Description of Artificial Sequence: Synthetic oligonucleotide
  Sense Strand Starting at position 598 of SEQ ID NO: 316221
ccaggaguccugcgcuguu

SEQ ID NO: 365672 - RNA, 19 nt, Artificial Sequence
  Description of Artificial Sequence: Synthetic oligonucleotide
  Antisense Strand to SEQ ID NO: 365671
aacagcgcaggacuccugg

SEQ ID NO: 365673 - RNA, 19 nt, Artificial Sequence
  Description of Artificial Sequence: Synthetic oligonucleotide
  Sense Strand Starting at position 598 of SEQ ID NO: 316259
ggccguaagcuguuugcca

SEQ ID NO: 365674 - RNA, 19 nt, Artificial Sequence
  Description of Artificial Sequence: Synthetic oligonucleotide
  Antisense Strand to SEQ ID NO: 365673
uggcaaacagcuuacggcc

SEQ ID NO: 365675 - RNA, 19 nt, Artificial Sequence
  Description of Artificial Sequence: Synthetic oligonucleotide
  Sense Strand Starting at position 598 of SEQ ID NO: 316282
ugaggagucagcuguuaua

SEQ ID NO: 365676 - RNA, 19 nt, Artificial Sequence
  Description of Artificial Sequence: Synthetic oligonucleotide
  Antisense Strand to SEQ ID NO: 365675
uauaacagcugacuccuca

SEQ ID NO: 365677 - RNA, 19 nt, Artificial Sequence
  Description of Artificial Sequence: Synthetic oligonucleotide
  Sense Strand Starting at position 598 of SEQ ID NO: 316800
agaggucacacucguuuga

SEQ ID NO: 365678 - RNA, 19 nt, Artificial Sequence
  Description of Artificial Sequence: Synthetic oligonucleotide
  Antisense Strand to SEQ ID NO: 365677
ucaaacgagugugaccucu

SEQ ID NO: 365679 - RNA, 19 nt, Artificial Sequence
  Description of Artificial Sequence: Synthetic oligonucleotide
  Sense Strand Starting at position 598 of SEQ ID NO: 316802
aggucacacucguuugaga

SEQ ID NO: 365680 - RNA, 19 nt, Artificial Sequence
  Description of Artificial Sequence: Synthetic oligonucleotide
  Antisense Strand to SEQ ID NO: 365679
ucucaaacgagugugaccu

SEQ ID NO: 365681 - RNA, 19 nt, Artificial Sequence
  Description of Artificial Sequence: Synthetic oligonucleotide
  Sense Strand Starting at position 598 of SEQ ID NO: 316804
gucacacucguuugagacu

SEQ ID NO: 365682 - RNA, 19 nt, Artificial Sequence
  Description of Artificial Sequence: Synthetic oligonucleotide
  Antisense Strand to SEQ ID NO: 365681
agucucaaacgagugugac

SEQ ID NO: 365683 - RNA, 19 nt, Artificial Sequence
  Description of Artificial Sequence: Synthetic oligonucleotide
  Sense Strand Starting at position 598 of SEQ ID NO: 316811
ucguuugagacuugaaccu

SEQ ID NO: 365684 - RNA, 19 nt, Artificial Sequence
  Description of Artificial Sequence: Synthetic oligonucleotide
  Antisense Strand to SEQ ID NO: 365683
agguucaagucucaaacga

SEQ ID NO: 365685 - RNA, 19 nt, Artificial Sequence
  Description of Artificial Sequence: Synthetic oligonucleotide
  Sense Strand Starting at position 598 of SEQ ID NO: 316849
ugagcaguuccuggugcau

SEQ ID NO: 365686 - RNA, 19 nt, Artificial Sequence
  Description of Artificial Sequence: Synthetic oligonucleotide
  Antisense Strand to SEQ ID NO: 365685
augcaccaggaacugcuca

SEQ ID NO: 365687 - RNA, 19 nt, Artificial Sequence
  Description of Artificial Sequence: Synthetic oligonucleotide
  Sense Strand Starting at position 598 of SEQ ID NO: 317220
gcccacgcuccuuauauga

SEQ ID NO: 365688 - RNA, 19 nt, Artificial Sequence
  Description of Artificial Sequence: Synthetic oligonucleotide
  Antisense Strand to SEQ ID NO: 365687
ucauauaaggagcgugggc

SEQ ID NO: 365689 - RNA, 19 nt, Artificial Sequence
  Description of Artificial Sequence: Synthetic oligonucleotide
  Sense Strand Starting at position 598 of SEQ ID NO: 317235
augagcaagccugguguuu

SEQ ID NO: 365690 - RNA, 19 nt, Artificial Sequence
  Description of Artificial Sequence: Synthetic oligonucleotide
  Antisense Strand to SEQ ID NO: 365689
aaacaccaggcuugcucau

SEQ ID NO: 365691 - RNA, 19 nt, Artificial Sequence
  Description of Artificial Sequence: Synthetic oligonucleotide
  Sense Strand Starting at position 598 of SEQ ID NO: 317345
ccucgaugugucugucuga

SEQ ID NO: 365692 - RNA, 19 nt, Artificial Sequence
  Description of Artificial Sequence: Synthetic oligonucleotide
  Antisense Strand to SEQ ID NO: 365691
ucagacagacacaucgagg

SEQ ID NO: 365693 - RNA, 19 nt, Artificial Sequence
  Description of Artificial Sequence: Synthetic oligonucleotide
  Sense Strand Starting at position 598 of SEQ ID NO: 317346
cucgaugugucugucugaa

SEQ ID NO: 365694 - RNA, 19 nt, Artificial Sequence
  Description of Artificial Sequence: Synthetic oligonucleotide
  Antisense Strand to SEQ ID NO: 365693
uucagacagacacaucgag

SEQ ID NO: 365695 - RNA, 19 nt, Artificial Sequence
  Description of Artificial Sequence: Synthetic oligonucleotide
  Sense Strand Starting at position 598 of SEQ ID NO: 317348
cgaugugucugucugaaga

SEQ ID NO: 365696 - RNA, 19 nt, Artificial Sequence
  Description of Artificial Sequence: Synthetic oligonucleotide
  Antisense Strand to SEQ ID NO: 365695
ucuucagacagacacaucg

SEQ ID NO: 365697 - RNA, 19 nt, Artificial Sequence
  Description of Artificial Sequence: Synthetic oligonucleotide
  Sense Strand Starting at position 598 of SEQ ID NO: 317448
gaagcugugggccaacaaa

SEQ ID NO: 365698 - RNA, 19 nt, Artificial Sequence
  Description of Artificial Sequence: Synthetic oligonucleotide
  Antisense Strand to SEQ ID NO: 365697
uuuguuggcccacagcuuc

SEQ ID NO: 365699 - RNA, 19 nt, Artificial Sequence
  Description of Artificial Sequence: Synthetic oligonucleotide
  Sense Strand Starting at position 598 of SEQ ID NO: 317529
agggcaucucagcauuguu

SEQ ID NO: 365700 - RNA, 19 nt, Artificial Sequence
  Description of Artificial Sequence: Synthetic oligonucleotide
  Antisense Strand to SEQ ID NO: 365699
aacaaugcugagaugcccu

SEQ ID NO: 365701 - RNA, 19 nt, Artificial Sequence
  Description of Artificial Sequence: Synthetic oligonucleotide
  Sense Strand Starting at position 598 of SEQ ID NO: 317537
ucagcauuguugccucuua

SEQ ID NO: 365702 - RNA, 19 nt, Artificial Sequence
  Description of Artificial Sequence: Synthetic oligonucleotide
  Antisense Strand to SEQ ID NO: 365701
uaagaggcaacaaugcuga

SEQ ID NO: 365703 - RNA, 19 nt, Artificial Sequence
  Description of Artificial Sequence: Synthetic oligonucleotide
  Sense Strand Starting at position 598 of SEQ ID NO: 317740
ccagcugucucugugaucu

SEQ ID NO: 365704 - RNA, 19 nt, Artificial Sequence
  Description of Artificial Sequence: Synthetic oligonucleotide
  Antisense Strand to SEQ ID NO: 365703
agaucacagagacagcugg

SEQ ID NO: 365705 - RNA, 19 nt, Artificial Sequence
  Description of Artificial Sequence: Synthetic oligonucleotide
  Sense Strand Starting at position 598 of SEQ ID NO: 317936
cugcuuugucaugaccuua

SEQ ID NO: 365706 - RNA, 19 nt, Artificial Sequence
  Description of Artificial Sequence: Synthetic oligonucleotide
  Antisense Strand to SEQ ID NO: 365705
uaaggucaugacaaagcag

SEQ ID NO: 365707 - RNA, 19 nt, Artificial Sequence
  Description of Artificial Sequence: Synthetic oligonucleotide
  Sense Strand Starting at position 598 of SEQ ID NO: 318406
gagaguuguugggagcaga

SEQ ID NO: 365708 - RNA, 19 nt, Artificial Sequence
  Description of Artificial Sequence: Synthetic oligonucleotide
  Antisense Strand to SEQ ID NO: 365707
ucugcucccaacaacucuc

SEQ ID NO: 365709 - RNA, 19 nt, Artificial Sequence
  Description of Artificial Sequence: Synthetic oligonucleotide
  Sense Strand Starting at position 598 of SEQ ID NO: 318482
uggucuaauggcuggaaga

SEQ ID NO: 365710 - RNA, 19 nt, Artificial Sequence
  Description of Artificial Sequence: Synthetic oligonucleotide
  Antisense Strand to SEQ ID NO: 365709
ucuuccagccauuagacca

SEQ ID NO: 365711 - RNA, 19 nt, Artificial Sequence
  Description of Artificial Sequence: Synthetic oligonucleotide
  Sense Strand Starting at position 598 of SEQ ID NO: 318483
ggucuaauggcuggaagag

SEQ ID NO: 365712 - RNA, 19 nt, Artificial Sequence
  Description of Artificial Sequence: Synthetic oligonucleotide
  Antisense Strand to SEQ ID NO: 365711
cucuuccagccauuagacc

SEQ ID NO: 365713 - RNA, 19 nt, Artificial Sequence
  Description of Artificial Sequence: Synthetic oligonucleotide
  Sense Strand Starting at position 598 of SEQ ID NO: 318521
gauggagaguugccaaauc

SEQ ID NO: 365714 - RNA, 19 nt, Artificial Sequence
  Description of Artificial Sequence: Synthetic oligonucleotide
  Antisense Strand to SEQ ID NO: 365713
gauuuggcaacucuccauc

SEQ ID NO: 365715 - RNA, 19 nt, Artificial Sequence
  Description of Artificial Sequence: Synthetic oligonucleotide
  Sense Strand Starting at position 598 of SEQ ID NO: 318721
uuuccaagccagugaaaug

SEQ ID NO: 365716 - RNA, 19 nt, Artificial Sequence
  Description of Artificial Sequence: Synthetic oligonucleotide
  Antisense Strand to SEQ ID NO: 365715
cauuucacuggcuuggaaa

SEQ ID NO: 365717 - RNA, 19 nt, Artificial Sequence
  Description of Artificial Sequence: Synthetic oligonucleotide
  Sense Strand Starting at position 598 of SEQ ID NO: 319114
ggauucuguagcugcucaa

SEQ ID NO: 365718 - RNA, 19 nt, Artificial Sequence
  Description of Artificial Sequence: Synthetic oligonucleotide
  Antisense Strand to SEQ ID NO: 365717
uugagcagcuacagaaucc

SEQ ID NO: 365719 - RNA, 19 nt, Artificial Sequence
  Description of Artificial Sequence: Synthetic oligonucleotide
  Sense Strand Starting at position 598 of SEQ ID NO: 319164
gaaccagagucgucaugca

SEQ ID NO: 365720 - RNA, 19 nt, Artificial Sequence
  Description of Artificial Sequence: Synthetic oligonucleotide
  Antisense Strand to SEQ ID NO: 365719
ugcaugacgacucugguuc

SEQ ID NO: 365721 - RNA, 19 nt, Artificial Sequence
  Description of Artificial Sequence: Synthetic oligonucleotide
  Sense Strand Starting at position 598 of SEQ ID NO: 319169
agagucgucaugcagacuu

SEQ ID NO: 365722 - RNA, 19 nt, Artificial Sequence
  Description of Artificial Sequence: Synthetic oligonucleotide
  Antisense Strand to SEQ ID NO: 365721
aagucugcaugacgacucu

SEQ ID NO: 365723 - RNA, 19 nt, Artificial Sequence
  Description of Artificial Sequence: Synthetic oligonucleotide
  Sense Strand Starting at position 598 of SEQ ID NO: 319171
agucgucaugcagacuuua

SEQ ID NO: 365724 - RNA, 19 nt, Artificial Sequence
  Description of Artificial Sequence: Synthetic oligonucleotide
  Antisense Strand to SEQ ID NO: 365723
uaaagucugcaugacgacu

SEQ ID NO: 365725 - RNA, 19 nt, Artificial Sequence
  Description of Artificial Sequence: Synthetic oligonucleotide
  Sense Strand Starting at position 598 of SEQ ID NO: 319184
acuuuauaauuagacggaa

SEQ ID NO: 365726 - RNA, 19 nt, Artificial Sequence
  Description of Artificial Sequence: Synthetic oligonucleotide
  Antisense Strand to SEQ ID NO: 365725
uuccgucuaauuauaaagu

SEQ ID NO: 365727 - RNA, 19 nt, Artificial Sequence
  Description of Artificial Sequence: Synthetic oligonucleotide
  Sense Strand Starting at position 598 of SEQ ID NO: 319187
uuauaauuagacggaaucu

SEQ ID NO: 365728 - RNA, 19 nt, Artificial Sequence
  Description of Artificial Sequence: Synthetic oligonucleotide
  Antisense Strand to SEQ ID NO: 365727
agauuccgucuaauuauaa

SEQ ID NO: 365729 - RNA, 19 nt, Artificial Sequence
  Description of Artificial Sequence: Synthetic oligonucleotide
  Sense Strand Starting at position 598 of SEQ ID NO: 319196
gacggaaucuaagagaucu

SEQ ID NO: 365730 - RNA, 19 nt, Artificial Sequence
  Description of Artificial Sequence: Synthetic oligonucleotide
  Antisense Strand to SEQ ID NO: 365729
agaucucuuagauuccguc

SEQ ID NO: 365731 - RNA, 19 nt, Artificial Sequence
  Description of Artificial Sequence: Synthetic oligonucleotide
  Sense Strand Starting at position 598 of SEQ ID NO: 319204
cuaagagaucuuuggguuc

SEQ ID NO: 365732 - RNA, 19 nt, Artificial Sequence
  Description of Artificial Sequence: Synthetic oligonucleotide
  Antisense Strand to SEQ ID NO: 365731
gaacccaaagaucucuuag

SEQ ID NO: 365733 - RNA, 19 nt, Artificial Sequence
  Description of Artificial Sequence: Synthetic oligonucleotide
  Sense Strand Starting at position 599 of SEQ ID NO: 315296
ucuguacuuugagcuggaa

SEQ ID NO: 365734 - RNA, 19 nt, Artificial Sequence
  Description of Artificial Sequence: Synthetic oligonucleotide
  Antisense Strand to SEQ ID NO: 365733
uuccagcucaaaguacaga

SEQ ID NO: 365735 - RNA, 19 nt, Artificial Sequence
  Description of Artificial Sequence: Synthetic oligonucleotide
  Sense Strand Starting at position 599 of SEQ ID NO: 315298
uguacuuugagcuggaaug

SEQ ID NO: 365736 - RNA, 19 nt, Artificial Sequence
  Description of Artificial Sequence: Synthetic oligonucleotide
  Antisense Strand to SEQ ID NO: 365735
cauuccagcucaaaguaca

SEQ ID NO: 365737 - RNA, 19 nt, Artificial Sequence
  Description of Artificial Sequence: Synthetic oligonucleotide
  Sense Strand Starting at position 599 of SEQ ID NO: 315475
cuuugagaauaaguccuuu

SEQ ID NO: 365738 - RNA, 19 nt, Artificial Sequence
  Description of Artificial Sequence: Synthetic oligonucleotide
  Antisense Strand to SEQ ID NO: 365737
aaaggacuuauucucaaag

SEQ ID NO: 365739 - RNA, 19 nt, Artificial Sequence
  Description of Artificial Sequence: Synthetic oligonucleotide
  Sense Strand Starting at position 599 of SEQ ID NO: 315479
gagaauaaguccuuuggca

SEQ ID NO: 365740 - RNA, 19 nt, Artificial Sequence
  Description of Artificial Sequence: Synthetic oligonucleotide
  Antisense Strand to SEQ ID NO: 365739
ugccaaaggacuuauucuc

SEQ ID NO: 365741 - RNA, 19 nt, Artificial Sequence
  Description of Artificial Sequence: Synthetic oligonucleotide
  Sense Strand Starting at position 599 of SEQ ID NO: 315481
gaauaaguccuuuggcaag

SEQ ID NO: 365742 - RNA, 19 nt, Artificial Sequence
  Description of Artificial Sequence: Synthetic oligonucleotide
  Antisense Strand to SEQ ID NO: 365741
cuugccaaaggacuuauuc

SEQ ID NO: 365743 - RNA, 19 nt, Artificial Sequence
  Description of Artificial Sequence: Synthetic oligonucleotide
  Sense Strand Starting at position 599 of SEQ ID NO: 315528
ggguguacuccugaagaug

SEQ ID NO: 365744 - RNA, 19 nt, Artificial Sequence
  Description of Artificial Sequence: Synthetic oligonucleotide
  Antisense Strand to SEQ ID NO: 365743
caucuucaggaguacaccc

SEQ ID NO: 365745 - RNA, 19 nt, Artificial Sequence
  Description of Artificial Sequence: Synthetic oligonucleotide
  Sense Strand Starting at position 599 of SEQ ID NO: 315592
gagcgauggagucauagca

SEQ ID NO: 365746 - RNA, 19 nt, Artificial Sequence
  Description of Artificial Sequence: Synthetic oligonucleotide
  Antisense Strand to SEQ ID NO: 365745
ugcuaugacuccaucgcuc

SEQ ID NO: 365747 - RNA, 19 nt, Artificial Sequence
  Description of Artificial Sequence: Synthetic oligonucleotide
  Sense Strand Starting at position 599 of SEQ ID NO: 315714
caguauuggcccuauugac

SEQ ID NO: 365748 - RNA, 19 nt, Artificial Sequence
  Description of Artificial Sequence: Synthetic oligonucleotide
  Antisense Strand to SEQ ID NO: 365747
gucaauagggccaauacug

SEQ ID NO: 365749 - RNA, 19 nt, Artificial Sequence
  Description of Artificial Sequence: Synthetic oligonucleotide
  Sense Strand Starting at position 599 of SEQ ID NO: 315867
gggugacgcucuucaagag

SEQ ID NO: 365750 - RNA, 19 nt, Artificial Sequence
  Description of Artificial Sequence: Synthetic oligonucleotide
  Antisense Strand to SEQ ID NO: 365749
cucuugaagagcgucaccc

SEQ ID NO: 365751 - RNA, 19 nt, Artificial Sequence
  Description of Artificial Sequence: Synthetic oligonucleotide
  Sense Strand Starting at position 599 of SEQ ID NO: 315868
ggugacgcucuucaagagu

SEQ ID NO: 365752 - RNA, 19 nt, Artificial Sequence
  Description of Artificial Sequence: Synthetic oligonucleotide
  Antisense Strand to SEQ ID NO: 365751
acucuugaagagcgucacc

SEQ ID NO: 365753 - RNA, 19 nt, Artificial Sequence
  Description of Artificial Sequence: Synthetic oligonucleotide
  Sense Strand Starting at position 599 of SEQ ID NO: 315969
ggcaucucauaugugaaca

SEQ ID NO: 365754 - RNA, 19 nt, Artificial Sequence
  Description of Artificial Sequence: Synthetic oligonucleotide
  Antisense Strand to SEQ ID NO: 365753
uguucacauaugagaugcc

SEQ ID NO: 365755 - RNA, 19 nt, Artificial Sequence
  Description of Artificial Sequence: Synthetic oligonucleotide
  Sense Strand Starting at position 599 of SEQ ID NO: 315983
gaacauuugucucagguaa

SEQ ID NO: 365756 - RNA, 19 nt, Artificial Sequence
  Description of Artificial Sequence: Synthetic oligonucleotide
  Antisense Strand to SEQ ID NO: 365755
uuaccugagacaaauguuc

SEQ ID NO: 365757 - RNA, 19 nt, Artificial Sequence
  Description of Artificial Sequence: Synthetic oligonucleotide
  Sense Strand Starting at position 599 of SEQ ID NO: 315994
ucagguaagagauagcagu

SEQ ID NO: 365758 - RNA, 19 nt, Artificial Sequence
  Description of Artificial Sequence: Synthetic oligonucleotide
  Antisense Strand to SEQ ID NO: 365757
acugcuaucucuuaccuga

SEQ ID NO: 365759 - RNA, 19 nt, Artificial Sequence
  Description of Artificial Sequence: Synthetic oligonucleotide
  Sense Strand Starting at position 599 of SEQ ID NO: 316242
gugaccagguccuuugauu

SEQ ID NO: 365760 - RNA, 19 nt, Artificial Sequence
  Description of Artificial Sequence: Synthetic oligonucleotide
  Antisense Strand to SEQ ID NO: 365759
aaucaaaggaccuggucac

SEQ ID NO: 365761 - RNA, 19 nt, Artificial Sequence
  Description of Artificial Sequence: Synthetic oligonucleotide
  Sense Strand Starting at position 599 of SEQ ID NO: 316320
cccucagagcugggagaau

SEQ ID NO: 365762 - RNA, 19 nt, Artificial Sequence
  Description of Artificial Sequence: Synthetic oligonucleotide
  Antisense Strand to SEQ ID NO: 365761
auucucccagcucugaggg

SEQ ID NO: 365763 - RNA, 19 nt, Artificial Sequence
  Description of Artificial Sequence: Synthetic oligonucleotide
  Sense Strand Starting at position 599 of SEQ ID NO: 316332
ggagaauucggagguagac

SEQ ID NO: 365764 - RNA, 19 nt, Artificial Sequence
  Description of Artificial Sequence: Synthetic oligonucleotide
  Antisense Strand to SEQ ID NO: 365763
gucuaccuccgaauucucc

SEQ ID NO: 365765 - RNA, 19 nt, Artificial Sequence
  Description of Artificial Sequence: Synthetic oligonucleotide
  Sense Strand Starting at position 599 of SEQ ID NO: 316349
acuagagucuggucucuga

SEQ ID NO: 365766 - RNA, 19 nt, Artificial Sequence
  Description of Artificial Sequence: Synthetic oligonucleotide
  Antisense Strand to SEQ ID NO: 365765
ucagagaccagacucuagu

SEQ ID NO: 365767 - RNA, 19 nt, Artificial Sequence
  Description of Artificial Sequence: Synthetic oligonucleotide
  Sense Strand Starting at position 599 of SEQ ID NO: 316360
gucucugagaguugggaau

SEQ ID NO: 365768 - RNA, 19 nt, Artificial Sequence
  Description of Artificial Sequence: Synthetic oligonucleotide
  Antisense Strand to SEQ ID NO: 365767
auucccaacucucagagac

SEQ ID NO: 365769 - RNA, 19 nt, Artificial Sequence
  Description of Artificial Sequence: Synthetic oligonucleotide
  Sense Strand Starting at position 599 of SEQ ID NO: 316587
gugccaaguggcuuguuua

SEQ ID NO: 365770 - RNA, 19 nt, Artificial Sequence
  Description of Artificial Sequence: Synthetic oligonucleotide
  Antisense Strand to SEQ ID NO: 365769
uaaacaagccacuuggcac

SEQ ID NO: 365771 - RNA, 19 nt, Artificial Sequence
  Description of Artificial Sequence: Synthetic oligonucleotide
  Sense Strand Starting at position 599 of SEQ ID NO: 316611
uuggguauuugcucugcga

SEQ ID NO: 365772 - RNA, 19 nt, Artificial Sequence
  Description of Artificial Sequence: Synthetic oligonucleotide
  Antisense Strand to SEQ ID NO: 365771
ucgcagagcaaauacccaa

SEQ ID NO: 365773 - RNA, 19 nt, Artificial Sequence
  Description of Artificial Sequence: Synthetic oligonucleotide
  Sense Strand Starting at position 599 of SEQ ID NO: 316613
ggguauuugcucugcgaca

SEQ ID NO: 365774 - RNA, 19 nt, Artificial Sequence
  Description of Artificial Sequence: Synthetic oligonucleotide
  Antisense Strand to SEQ ID NO: 365773
ugucgcagagcaaauaccc

SEQ ID NO: 365775 - RNA, 19 nt, Artificial Sequence
  Description of Artificial Sequence: Synthetic oligonucleotide
  Sense Strand Starting at position 599 of SEQ ID NO: 316614
gguauuugcucugcgacaa

SEQ ID NO: 365776 - RNA, 19 nt, Artificial Sequence
  Description of Artificial Sequence: Synthetic oligonucleotide
  Antisense Strand to SEQ ID NO: 365775
uugucgcagagcaaauacc

SEQ ID NO: 365777 - RNA, 19 nt, Artificial Sequence
  Description of Artificial Sequence: Synthetic oligonucleotide
  Sense Strand Starting at position 599 of SEQ ID NO: 316615
guauuugcucugcgacaag

SEQ ID NO: 365778 - RNA, 19 nt, Artificial Sequence
  Description of Artificial Sequence: Synthetic oligonucleotide
  Antisense Strand to SEQ ID NO: 365777
cuugucgcagagcaaauac

SEQ ID NO: 365779 - RNA, 19 nt, Artificial Sequence
  Description of Artificial Sequence: Synthetic oligonucleotide
  Sense Strand Starting at position 599 of SEQ ID NO: 316784
gagacauagucagcauaaa

SEQ ID NO: 365780 - RNA, 19 nt, Artificial Sequence
  Description of Artificial Sequence: Synthetic oligonucleotide
  Antisense Strand to SEQ ID NO: 365779
uuuaugcugacuaugucuc

SEQ ID NO: 365781 - RNA, 19 nt, Artificial Sequence
  Description of Artificial Sequence: Synthetic oligonucleotide
  Sense Strand Starting at position 599 of SEQ ID NO: 316895
cccucuauuaggugggaga

SEQ ID NO: 365782 - RNA, 19 nt, Artificial Sequence
  Description of Artificial Sequence: Synthetic oligonucleotide
  Antisense Strand to SEQ ID NO: 365781
ucucccaccuaauagaggg

SEQ ID NO: 365783 - RNA, 19 nt, Artificial Sequence
  Description of Artificial Sequence: Synthetic oligonucleotide
  Sense Strand Starting at position 599 of SEQ ID NO: 316896
ccucuauuaggugggagaa

SEQ ID NO: 365784 - RNA, 19 nt, Artificial Sequence
  Description of Artificial Sequence: Synthetic oligonucleotide
  Antisense Strand to SEQ ID NO: 365783
uucucccaccuaauagagg

SEQ ID NO: 365785 - RNA, 19 nt, Artificial Sequence
  Description of Artificial Sequence: Synthetic oligonucleotide
  Sense Strand Starting at position 599 of SEQ ID NO: 316897
cucuauuaggugggagaau

SEQ ID NO: 365786 - RNA, 19 nt, Artificial Sequence
  Description of Artificial Sequence: Synthetic oligonucleotide
  Antisense Strand to SEQ ID NO: 365785
auucucccaccuaauagag

SEQ ID NO: 365787 - RNA, 19 nt, Artificial Sequence
  Description of Artificial Sequence: Synthetic oligonucleotide
  Sense Strand Starting at position 599 of SEQ ID NO: 317701
auagauacgccguauuucu

SEQ ID NO: 365788 - RNA, 19 nt, Artificial Sequence
  Description of Artificial Sequence: Synthetic oligonucleotide
  Antisense Strand to SEQ ID NO: 365787
agaaauacggcguaucuau

SEQ ID NO: 365789 - RNA, 19 nt, Artificial Sequence
  Description of Artificial Sequence: Synthetic oligonucleotide
  Sense Strand Starting at position 599 of SEQ ID NO: 318003
ccaggaaucgcugguugag

SEQ ID NO: 365790 - RNA, 19 nt, Artificial Sequence
  Description of Artificial Sequence: Synthetic oligonucleotide
  Antisense Strand to SEQ ID NO: 365789
cucaaccagcgauuccugg

SEQ ID NO: 365791 - RNA, 19 nt, Artificial Sequence
  Description of Artificial Sequence: Synthetic oligonucleotide
  Sense Strand Starting at position 599 of SEQ ID NO: 318006
ggaaucgcugguugagaga

SEQ ID NO: 365792 - RNA, 19 nt, Artificial Sequence
  Description of Artificial Sequence: Synthetic oligonucleotide
  Antisense Strand to SEQ ID NO: 365791
ucucucaaccagcgauucc

SEQ ID NO: 365793 - RNA, 19 nt, Artificial Sequence
  Description of Artificial Sequence: Synthetic oligonucleotide
  Sense Strand Starting at position 599 of SEQ ID NO: 318128
agcgcucugcuccuuguaa

SEQ ID NO: 365794 - RNA, 19 nt, Artificial Sequence
  Description of Artificial Sequence: Synthetic oligonucleotide
  Antisense Strand to SEQ ID NO: 365793
uuacaaggagcagagcgcu

SEQ ID NO: 365795 - RNA, 19 nt, Artificial Sequence
  Description of Artificial Sequence: Synthetic oligonucleotide
  Sense Strand Starting at position 599 of SEQ ID NO: 318139
ccuuguaaagugggaucga

SEQ ID NO: 365796 - RNA, 19 nt, Artificial Sequence
  Description of Artificial Sequence: Synthetic oligonucleotide
  Antisense Strand to SEQ ID NO: 365795
ucgaucccacuuuacaagg

SEQ ID NO: 365797 - RNA, 19 nt, Artificial Sequence
  Description of Artificial Sequence: Synthetic oligonucleotide
  Sense Strand Starting at position 599 of SEQ ID NO: 318143
guaaagugggaucgaguga

SEQ ID NO: 365798 - RNA, 19 nt, Artificial Sequence
  Description of Artificial Sequence: Synthetic oligonucleotide
  Antisense Strand to SEQ ID NO: 365797
ucacucgaucccacuuuac

SEQ ID NO: 365799 - RNA, 19 nt, Artificial Sequence
  Description of Artificial Sequence: Synthetic oligonucleotide
  Sense Strand Starting at position 599 of SEQ ID NO: 318148
gugggaucgagugaguaca

SEQ ID NO: 365800 - RNA, 19 nt, Artificial Sequence
  Description of Artificial Sequence: Synthetic oligonucleotide
  Antisense Strand to SEQ ID NO: 365799
uguacucacucgaucccac

SEQ ID NO: 365801 - RNA, 19 nt, Artificial Sequence
  Description of Artificial Sequence: Synthetic oligonucleotide
  Sense Strand Starting at position 599 of SEQ ID NO: 318150
gggaucgagugaguacaua

SEQ ID NO: 365802 - RNA, 19 nt, Artificial Sequence
  Description of Artificial Sequence: Synthetic oligonucleotide
  Antisense Strand to SEQ ID NO: 365801
uauguacucacucgauccc

SEQ ID NO: 365803 - RNA, 19 nt, Artificial Sequence
  Description of Artificial Sequence: Synthetic oligonucleotide
  Sense Strand Starting at position 599 of SEQ ID NO: 318230
ugagucuguggccacagau

SEQ ID NO: 365804 - RNA, 19 nt, Artificial Sequence
  Description of Artificial Sequence: Synthetic oligonucleotide
  Antisense Strand to SEQ ID NO: 365803
aucuguggccacagacuca

SEQ ID NO: 365805 - RNA, 19 nt, Artificial Sequence
  Description of Artificial Sequence: Synthetic oligonucleotide
  Sense Strand Starting at position 599 of SEQ ID NO: 318414
uccugucuccauuagaggu

SEQ ID NO: 365806 - RNA, 19 nt, Artificial Sequence
  Description of Artificial Sequence: Synthetic oligonucleotide
  Antisense Strand to SEQ ID NO: 365805
accucuaauggagacagga

SEQ ID NO: 365807 - RNA, 19 nt, Artificial Sequence
  Description of Artificial Sequence: Synthetic oligonucleotide
  Sense Strand Starting at position 599 of SEQ ID NO: 318566
ucuggauacgauugggauu

SEQ ID NO: 365808 - RNA, 19 nt, Artificial Sequence
  Description of Artificial Sequence: Synthetic oligonucleotide
  Antisense Strand to SEQ ID NO: 365807
aaucccaaucguauccaga

SEQ ID NO: 365809 - RNA, 19 nt, Artificial Sequence
  Description of Artificial Sequence: Synthetic oligonucleotide
  Sense Strand Starting at position 599 of SEQ ID NO: 318567
cuggauacgauugggauua

SEQ ID NO: 365810 - RNA, 19 nt, Artificial Sequence
  Description of Artificial Sequence: Synthetic oligonucleotide
  Antisense Strand to SEQ ID NO: 365809
uaaucccaaucguauccag

SEQ ID NO: 365811 - RNA, 19 nt, Artificial Sequence
  Description of Artificial Sequence: Synthetic oligonucleotide
  Sense Strand Starting at position 599 of SEQ ID NO: 318981
ggucaugcaggcugagaau

SEQ ID NO: 365812 - RNA, 19 nt, Artificial Sequence
  Description of Artificial Sequence: Synthetic oligonucleotide
  Antisense Strand to SEQ ID NO: 365811
auucucagccugcaugacc

SEQ ID NO: 365813 - RNA, 19 nt, Artificial Sequence
  Description of Artificial Sequence: Synthetic oligonucleotide
  Sense Strand Starting at position 600 of SEQ ID NO: 315302
cccuguuauuuaccauguu

SEQ ID NO: 365814 - RNA, 19 nt, Artificial Sequence
  Description of Artificial Sequence: Synthetic oligonucleotide
  Antisense Strand to SEQ ID NO: 365813
aacaugguaaauaacaggg

SEQ ID NO: 365815 - RNA, 19 nt, Artificial Sequence
  Description of Artificial Sequence: Synthetic oligonucleotide
  Sense Strand Starting at position 600 of SEQ ID NO: 315354
ccaaaucugcagcaauagu

SEQ ID NO: 365816 - RNA, 19 nt, Artificial Sequence
  Description of Artificial Sequence: Synthetic oligonucleotide
  Antisense Strand to SEQ ID NO: 365815
acuauugcugcagauuugg

SEQ ID NO: 365817 - RNA, 19 nt, Artificial Sequence
  Description of Artificial Sequence: Synthetic oligonucleotide
  Sense Strand Starting at position 600 of SEQ ID NO: 315376
guacgugcacccguugaaa

SEQ ID NO: 365818 - RNA, 19 nt, Artificial Sequence
  Description of Artificial Sequence: Synthetic oligonucleotide
  Antisense Strand to SEQ ID NO: 365817
uuucaacgggugcacguac

SEQ ID NO: 365819 - RNA, 19 nt, Artificial Sequence
  Description of Artificial Sequence: Synthetic oligonucleotide
  Sense Strand Starting at position 600 of SEQ ID NO: 315439
aggaacuguuguguuuaca

SEQ ID NO: 365820 - RNA, 19 nt, Artificial Sequence
  Description of Artificial Sequence: Synthetic oligonucleotide
  Antisense Strand to SEQ ID NO: 365819
uguaaacacaacaguuccu

SEQ ID NO: 365821 - RNA, 19 nt, Artificial Sequence
  Description of Artificial Sequence: Synthetic oligonucleotide
  Sense Strand Starting at position 600 of SEQ ID NO: 315442
aacuguuguguuuacagau

SEQ ID NO: 365822 - RNA, 19 nt, Artificial Sequence
  Description of Artificial Sequence: Synthetic oligonucleotide
  Antisense Strand to SEQ ID NO: 365821
aucuguaaacacaacaguu

SEQ ID NO: 365823 - RNA, 19 nt, Artificial Sequence
  Description of Artificial Sequence: Synthetic oligonucleotide
  Sense Strand Starting at position 600 of SEQ ID NO: 315512
cugccagauuccuugacac

SEQ ID NO: 365824 - RNA, 19 nt, Artificial Sequence
  Description of Artificial Sequence: Synthetic oligonucleotide
  Antisense Strand to SEQ ID NO: 365823
gugucaaggaaucuggcag

SEQ ID NO: 365825 - RNA, 19 nt, Artificial Sequence
  Description of Artificial Sequence: Synthetic oligonucleotide
  Sense Strand Starting at position 600 of SEQ ID NO: 315514
gccagauuccuugacacuc

SEQ ID NO: 365826 - RNA, 19 nt, Artificial Sequence
  Description of Artificial Sequence: Synthetic oligonucleotide
  Antisense Strand to SEQ ID NO: 365825
gagugucaaggaaucuggc

SEQ ID NO: 365827 - RNA, 19 nt, Artificial Sequence
  Description of Artificial Sequence: Synthetic oligonucleotide
  Sense Strand Starting at position 600 of SEQ ID NO: 316001
gcgguuuagauagaacuua

SEQ ID NO: 365828 - RNA, 19 nt, Artificial Sequence
  Description of Artificial Sequence: Synthetic oligonucleotide
  Antisense Strand to SEQ ID NO: 365827
uaaguucuaucuaaaccgc

SEQ ID NO: 365829 - RNA, 19 nt, Artificial Sequence
  Description of Artificial Sequence: Synthetic oligonucleotide
  Sense Strand Starting at position 600 of SEQ ID NO: 316325
gguaacuacgcuuacuuau

SEQ ID NO: 365830 - RNA, 19 nt, Artificial Sequence
  Description of Artificial Sequence: Synthetic oligonucleotide
  Antisense Strand to SEQ ID NO: 365829
auaaguaagcguaguuacc

SEQ ID NO: 365831 - RNA, 19 nt, Artificial Sequence
  Description of Artificial Sequence: Synthetic oligonucleotide
  Sense Strand Starting at position 600 of SEQ ID NO: 316411
aagggaaguguuuggcaga

SEQ ID NO: 365832 - RNA, 19 nt, Artificial Sequence
  Description of Artificial Sequence: Synthetic oligonucleotide
  Antisense Strand to SEQ ID NO: 365831
ucugccaaacacuucccuu

SEQ ID NO: 365833 - RNA, 19 nt, Artificial Sequence
  Description of Artificial Sequence: Synthetic oligonucleotide
  Sense Strand Starting at position 600 of SEQ ID NO: 316416
aaguguuuggcagauccca

SEQ ID NO: 365834 - RNA, 19 nt, Artificial Sequence
  Description of Artificial Sequence: Synthetic oligonucleotide
  Antisense Strand to SEQ ID NO: 365833
ugggaucugccaaacacuu

SEQ ID NO: 365835 - RNA, 19 nt, Artificial Sequence
  Description of Artificial Sequence: Synthetic oligonucleotide
  Sense Strand Starting at position 600 of SEQ ID NO: 316601
gcgcaagagagggauacau

SEQ ID NO: 365836 - RNA, 19 nt, Artificial Sequence
  Description of Artificial Sequence: Synthetic oligonucleotide
  Antisense Strand to SEQ ID NO: 365835
auguaucccucucuugcgc

SEQ ID NO: 365837 - RNA, 19 nt, Artificial Sequence
  Description of Artificial Sequence: Synthetic oligonucleotide
  Sense Strand Starting at position 600 of SEQ ID NO: 317545
cuggaauccaggugucacu

SEQ ID NO: 365838 - RNA, 19 nt, Artificial Sequence
  Description of Artificial Sequence: Synthetic oligonucleotide
  Antisense Strand to SEQ ID NO: 365837
agugacaccuggauuccag

SEQ ID NO: 365839 - RNA, 19 nt, Artificial Sequence
  Description of Artificial Sequence: Synthetic oligonucleotide
  Sense Strand Starting at position 600 of SEQ ID NO: 317576
gggcuaggagcucggauuu

SEQ ID NO: 365840 - RNA, 19 nt, Artificial Sequence
  Description of Artificial Sequence: Synthetic oligonucleotide
  Antisense Strand to SEQ ID NO: 365839
aaauccgagcuccuagccc

SEQ ID NO: 365841 - RNA, 19 nt, Artificial Sequence
  Description of Artificial Sequence: Synthetic oligonucleotide
  Sense Strand Starting at position 600 of SEQ ID NO: 317684
guguuugcggucaaggauu

SEQ ID NO: 365842 - RNA, 19 nt, Artificial Sequence
  Description of Artificial Sequence: Synthetic oligonucleotide
  Antisense Strand to SEQ ID NO: 365841
aauccuugaccgcaaacac

SEQ ID NO: 365843 - RNA, 19 nt, Artificial Sequence
  Description of Artificial Sequence: Synthetic oligonucleotide
  Sense Strand Starting at position 600 of SEQ ID NO: 317705
aggcgcgaggugucuuuau

SEQ ID NO: 365844 - RNA, 19 nt, Artificial Sequence
  Description of Artificial Sequence: Synthetic oligonucleotide
  Antisense Strand to SEQ ID NO: 365843
auaaagacaccucgcgccu

SEQ ID NO: 365845 - RNA, 19 nt, Artificial Sequence
  Description of Artificial Sequence: Synthetic oligonucleotide
  Sense Strand Starting at position 600 of SEQ ID NO: 317743
ucggguuugcacgagaaac

SEQ ID NO: 365846 - RNA, 19 nt, Artificial Sequence
  Description of Artificial Sequence: Synthetic oligonucleotide
  Antisense Strand to SEQ ID NO: 365845
guuucucgugcaaacccga

SEQ ID NO: 365847 - RNA, 19 nt, Artificial Sequence
  Description of Artificial Sequence: Synthetic oligonucleotide
  Sense Strand Starting at position 600 of SEQ ID NO: 317745
ggguuugcacgagaaacca

SEQ ID NO: 365848 - RNA, 19 nt, Artificial Sequence
  Description of Artificial Sequence: Synthetic oligonucleotide
  Antisense Strand to SEQ ID NO: 365847
ugguuucucgugcaaaccc

SEQ ID NO: 365849 - RNA, 19 nt, Artificial Sequence
  Description of Artificial Sequence: Synthetic oligonucleotide
  Sense Strand Starting at position 600 of SEQ ID NO: 318001
gggagcuguaaaugcuuaa

SEQ ID NO: 365850 - RNA, 19 nt, Artificial Sequence
  Description of Artificial Sequence: Synthetic oligonucleotide
  Antisense Strand to SEQ ID NO: 365849
uuaagcauuuacagcuccc

SEQ ID NO: 365851 - RNA, 19 nt, Artificial Sequence
  Description of Artificial Sequence: Synthetic oligonucleotide
  Sense Strand Starting at position 600 of SEQ ID NO: 318005
gcuguaaaugcuuaaguaa

SEQ ID NO: 365852 - RNA, 19 nt, Artificial Sequence
  Description of Artificial Sequence: Synthetic oligonucleotide
  Antisense Strand to SEQ ID NO: 365851
uuacuuaagcauuuacagc

SEQ ID NO: 365853 - RNA, 19 nt, Artificial Sequence
  Description of Artificial Sequence: Synthetic oligonucleotide
  Sense Strand Starting at position 600 of SEQ ID NO: 318237
ccugucuugccucaaauga

SEQ ID NO: 365854 - RNA, 19 nt, Artificial Sequence
  Description of Artificial Sequence: Synthetic oligonucleotide
  Antisense Strand to SEQ ID NO: 365853
ucauuugaggcaagacagg

SEQ ID NO: 365855 - RNA, 19 nt, Artificial Sequence
  Description of Artificial Sequence: Synthetic oligonucleotide
  Sense Strand Starting at position 600 of SEQ ID NO: 318319
gugagccaaacgcauuaua

SEQ ID NO: 365856 - RNA, 19 nt, Artificial Sequence
  Description of Artificial Sequence: Synthetic oligonucleotide
  Antisense Strand to SEQ ID NO: 365855
uauaaugcguuuggcucac

SEQ ID NO: 365857 - RNA, 19 nt, Artificial Sequence
  Description of Artificial Sequence: Synthetic oligonucleotide
  Sense Strand Starting at position 600 of SEQ ID NO: 318366
gccuaaagaucuguuauaa

SEQ ID NO: 365858 - RNA, 19 nt, Artificial Sequence
  Description of Artificial Sequence: Synthetic oligonucleotide
  Antisense Strand to SEQ ID NO: 365857
uuauaacagaucuuuaggc

SEQ ID NO: 365859 - RNA, 19 nt, Artificial Sequence
  Description of Artificial Sequence: Synthetic oligonucleotide
  Sense Strand Starting at position 600 of SEQ ID NO: 318457
ugcgucaugcuauugaguu

SEQ ID NO: 365860 - RNA, 19 nt, Artificial Sequence
  Description of Artificial Sequence: Synthetic oligonucleotide
  Antisense Strand to SEQ ID NO: 365859
aacucaauagcaugacgca

SEQ ID NO: 365861 - RNA, 19 nt, Artificial Sequence
  Description of Artificial Sequence: Synthetic oligonucleotide
  Sense Strand Starting at position 600 of SEQ ID NO: 318540
ucagguaacuucccaaaug

SEQ ID NO: 365862 - RNA, 19 nt, Artificial Sequence
  Description of Artificial Sequence: Synthetic oligonucleotide
  Antisense Strand to SEQ ID NO: 365861
cauuugggaaguuaccuga

SEQ ID NO: 365863 - RNA, 19 nt, Artificial Sequence
  Description of Artificial Sequence: Synthetic oligonucleotide
  Sense Strand Starting at position 600 of SEQ ID NO: 318598
agacucuacguguaugaaa

SEQ ID NO: 365864 - RNA, 19 nt, Artificial Sequence
  Description of Artificial Sequence: Synthetic oligonucleotide
  Antisense Strand to SEQ ID NO: 365863
uuucauacacguagagucu

SEQ ID NO: 365865 - RNA, 19 nt, Artificial Sequence
  Description of Artificial Sequence: Synthetic oligonucleotide
  Sense Strand Starting at position 600 of SEQ ID NO: 318639
ccgccauugccuuaaauag

SEQ ID NO: 365866 - RNA, 19 nt, Artificial Sequence
  Description of Artificial Sequence: Synthetic oligonucleotide
  Antisense Strand to SEQ ID NO: 365865
cuauuuaaggcaauggcgg

SEQ ID NO: 365867 - RNA, 19 nt, Artificial Sequence
  Description of Artificial Sequence: Synthetic oligonucleotide
  Sense Strand Starting at position 600 of SEQ ID NO: 318726
uugccaucugaaggaaauu

SEQ ID NO: 365868 - RNA, 19 nt, Artificial Sequence
  Description of Artificial Sequence: Synthetic oligonucleotide
  Antisense Strand to SEQ ID NO: 365867
aauuuccuucagauggcaa

SEQ ID NO: 365869 - RNA, 19 nt, Artificial Sequence
  Description of Artificial Sequence: Synthetic oligonucleotide
  Sense Strand Starting at position 600 of SEQ ID NO: 318767
uuagcaggauuccuuaaua

SEQ ID NO: 365870 - RNA, 19 nt, Artificial Sequence
  Description of Artificial Sequence: Synthetic oligonucleotide
  Antisense Strand to SEQ ID NO: 365869
uauuaaggaauccugcuaa

SEQ ID NO: 365871 - RNA, 19 nt, Artificial Sequence
  Description of Artificial Sequence: Synthetic oligonucleotide
  Sense Strand Starting at position 600 of SEQ ID NO: 318800
augaaacuuuaggaacaaa

SEQ ID NO: 365872 - RNA, 19 nt, Artificial Sequence
  Description of Artificial Sequence: Synthetic oligonucleotide
  Antisense Strand to SEQ ID NO: 365871
uuuguuccuaaaguuucau

SEQ ID NO: 365873 - RNA, 19 nt, Artificial Sequence
  Description of Artificial Sequence: Synthetic oligonucleotide
  Sense Strand Starting at position 600 of SEQ ID NO: 318834
agcuaauaguuauuacuga

SEQ ID NO: 365874 - RNA, 19 nt, Artificial Sequence
  Description of Artificial Sequence: Synthetic oligonucleotide
  Antisense Strand to SEQ ID NO: 365873
ucaguaauaacuauuagcu

SEQ ID NO: 365875 - RNA, 19 nt, Artificial Sequence
  Description of Artificial Sequence: Synthetic oligonucleotide
  Sense Strand Starting at position 600 of SEQ ID NO: 318882
uugacacuuauugggugaa

SEQ ID NO: 365876 - RNA, 19 nt, Artificial Sequence
  Description of Artificial Sequence: Synthetic oligonucleotide
  Antisense Strand to SEQ ID NO: 365875
uucacccaauaagugucaa

SEQ ID NO: 365877 - RNA, 19 nt, Artificial Sequence
  Description of Artificial Sequence: Synthetic oligonucleotide
  Sense Strand Starting at position 600 of SEQ ID NO: 318884
gacacuuauugggugaaug

SEQ ID NO: 365878 - RNA, 19 nt, Artificial Sequence
  Description of Artificial Sequence: Synthetic oligonucleotide
  Antisense Strand to SEQ ID NO: 365877
cauucacccaauaaguguc

SEQ ID NO: 365879 - RNA, 19 nt, Artificial Sequence
  Description of Artificial Sequence: Synthetic oligonucleotide
  Sense Strand Starting at position 600 of SEQ ID NO: 318911
caggcauuggucuaaacuc

SEQ ID NO: 365880 - RNA, 19 nt, Artificial Sequence
  Description of Artificial Sequence: Synthetic oligonucleotide
  Antisense Strand to SEQ ID NO: 365879
gaguuuagaccaaugccug

SEQ ID NO: 365881 - RNA, 19 nt, Artificial Sequence
  Description of Artificial Sequence: Synthetic oligonucleotide
  Sense Strand Starting at position 600 of SEQ ID NO: 318919
ggucuaaacucuuucugua

SEQ ID NO: 365882 - RNA, 19 nt, Artificial Sequence
  Description of Artificial Sequence: Synthetic oligonucleotide
  Antisense Strand to SEQ ID NO: 365881
uacagaaagaguuuagacc

SEQ ID NO: 365883 - RNA, 19 nt, Artificial Sequence
  Description of Artificial Sequence: Synthetic oligonucleotide
  Sense Strand Starting at position 600 of SEQ ID NO: 318995
gcacaaagcgauuaaauua

SEQ ID NO: 365884 - RNA, 19 nt, Artificial Sequence
  Description of Artificial Sequence: Synthetic oligonucleotide
  Antisense Strand to SEQ ID NO: 365883
uaauuuaaucgcuuugugc

SEQ ID NO: 365885 - RNA, 19 nt, Artificial Sequence
  Description of Artificial Sequence: Synthetic oligonucleotide
  Sense Strand Starting at position 600 of SEQ ID NO: 319030
acaaauagcugagucuuga

SEQ ID NO: 365886 - RNA, 19 nt, Artificial Sequence
  Description of Artificial Sequence: Synthetic oligonucleotide
  Antisense Strand to SEQ ID NO: 365885
ucaagacucagcuauuugu

SEQ ID NO: 365887 - RNA, 19 nt, Artificial Sequence
  Description of Artificial Sequence: Synthetic oligonucleotide
  Sense Strand Starting at position 600 of SEQ ID NO: 319044
cuugaacccugguccuaaa

SEQ ID NO: 365888 - RNA, 19 nt, Artificial Sequence
  Description of Artificial Sequence: Synthetic oligonucleotide
  Antisense Strand to SEQ ID NO: 365887
uuuaggaccaggguucaag

SEQ ID NO: 365889 - RNA, 19 nt, Artificial Sequence
  Description of Artificial Sequence: Synthetic oligonucleotide
  Sense Strand Starting at position 600 of SEQ ID NO: 319104
guauuugccugcucagaua

SEQ ID NO: 365890 - RNA, 19 nt, Artificial Sequence
  Description of Artificial Sequence: Synthetic oligonucleotide
  Antisense Strand to SEQ ID NO: 365889
uaucugagcaggcaaauac

SEQ ID NO: 365891 - RNA, 19 nt, Artificial Sequence
  Description of Artificial Sequence: Synthetic oligonucleotide
  Sense Strand Starting at position 600 of SEQ ID NO: 319148
ggcaaagcucuugaaauag

SEQ ID NO: 365892 - RNA, 19 nt, Artificial Sequence
  Description of Artificial Sequence: Synthetic oligonucleotide
  Antisense Strand to SEQ ID NO: 365891
cuauuucaagagcuuugcc

SEQ ID NO: 365893 - RNA, 19 nt, Artificial Sequence
  Description of Artificial Sequence: Synthetic oligonucleotide
  Sense Strand Starting at position 601 of SEQ ID NO: 315246
guauuuguguuccaggaaa

SEQ ID NO: 365894 - RNA, 19 nt, Artificial Sequence
  Description of Artificial Sequence: Synthetic oligonucleotide
  Antisense Strand to SEQ ID NO: 365893
uuuccuggaacacaaauac

SEQ ID NO: 365895 - RNA, 19 nt, Artificial Sequence
  Description of Artificial Sequence: Synthetic oligonucleotide
  Sense Strand Starting at position 601 of SEQ ID NO: 315273
uuauguguggcaggaacau

SEQ ID NO: 365896 - RNA, 19 nt, Artificial Sequence
  Description of Artificial Sequence: Synthetic oligonucleotide
  Antisense Strand to SEQ ID NO: 365895
auguuccugccacacauaa

SEQ ID NO: 365897 - RNA, 19 nt, Artificial Sequence
  Description of Artificial Sequence: Synthetic oligonucleotide
  Sense Strand Starting at position 601 of SEQ ID NO: 315309
gguagugggauaugaauca

SEQ ID NO: 365898 - RNA, 19 nt, Artificial Sequence
  Description of Artificial Sequence: Synthetic oligonucleotide
  Antisense Strand to SEQ ID NO: 365897
ugauucauaucccacuacc

SEQ ID NO: 365899 - RNA, 19 nt, Artificial Sequence
  Description of Artificial Sequence: Synthetic oligonucleotide
  Sense Strand Starting at position 601 of SEQ ID NO: 315316
ggauaugaaucacaaagac

SEQ ID NO: 365900 - RNA, 19 nt, Artificial Sequence
  Description of Artificial Sequence: Synthetic oligonucleotide
  Antisense Strand to SEQ ID NO: 365899
gucuuugugauucauaucc

SEQ ID NO: 365901 - RNA, 19 nt, Artificial Sequence
  Description of Artificial Sequence: Synthetic oligonucleotide
  Sense Strand Starting at position 601 of SEQ ID NO: 315326
cacaaagacuaugagaguu

SEQ ID NO: 365902 - RNA, 19 nt, Artificial Sequence
  Description of Artificial Sequence: Synthetic oligonucleotide
  Antisense Strand to SEQ ID NO: 365901
aacucucauagucuuugug

SEQ ID NO: 365903 - RNA, 19 nt, Artificial Sequence
  Description of Artificial Sequence: Synthetic oligonucleotide
  Sense Strand Starting at position 601 of SEQ ID NO: 315328
caaagacuaugagaguuaa

SEQ ID NO: 365904 - RNA, 19 nt, Artificial Sequence
  Description of Artificial Sequence: Synthetic oligonucleotide
  Antisense Strand to SEQ ID NO: 365903
uuaacucucauagucuuug

SEQ ID NO: 365905 - RNA, 19 nt, Artificial Sequence
  Description of Artificial Sequence: Synthetic oligonucleotide
  Sense Strand Starting at position 601 of SEQ ID NO: 315724
gcuuacaagugagcugaga

SEQ ID NO: 365906 - RNA, 19 nt, Artificial Sequence
  Description of Artificial Sequence: Synthetic oligonucleotide
  Antisense Strand to SEQ ID NO: 365905
ucucagcucacuuguaagc

SEQ ID NO: 365907 - RNA, 19 nt, Artificial Sequence
  Description of Artificial Sequence: Synthetic oligonucleotide
  Sense Strand Starting at position 601 of SEQ ID NO: 315726
uuacaagugagcugagauc

SEQ ID NO: 365908 - RNA, 19 nt, Artificial Sequence
  Description of Artificial Sequence: Synthetic oligonucleotide
  Antisense Strand to SEQ ID NO: 365907
gaucucagcucacuuguaa

SEQ ID NO: 365909 - RNA, 19 nt, Artificial Sequence
  Description of Artificial Sequence: Synthetic oligonucleotide
  Sense Strand Starting at position 601 of SEQ ID NO: 315864
cugacugcaccauaggauu

SEQ ID NO: 365910 - RNA, 19 nt, Artificial Sequence
  Description of Artificial Sequence: Synthetic oligonucleotide
  Antisense Strand to SEQ ID NO: 365909
aauccuauggugcagucag

SEQ ID NO: 365911 - RNA, 19 nt, Artificial Sequence
  Description of Artificial Sequence: Synthetic oligonucleotide
  Sense Strand Starting at position 601 of SEQ ID NO: 316101
ggccuagagaugugaaaca

SEQ ID NO: 365912 - RNA, 19 nt, Artificial Sequence
  Description of Artificial Sequence: Synthetic oligonucleotide
  Antisense Strand to SEQ ID NO: 365911
uguuucacaucucuaggcc

SEQ ID NO: 365913 - RNA, 19 nt, Artificial Sequence
  Description of Artificial Sequence: Synthetic oligonucleotide
  Sense Strand Starting at position 601 of SEQ ID NO: 316415
aguguaugauguuuggaag

SEQ ID NO: 365914 - RNA, 19 nt, Artificial Sequence
  Description of Artificial Sequence: Synthetic oligonucleotide
  Antisense Strand to SEQ ID NO: 365913
cuuccaaacaucauacacu

SEQ ID NO: 365915 - RNA, 19 nt, Artificial Sequence
  Description of Artificial Sequence: Synthetic oligonucleotide
  Sense Strand Starting at position 601 of SEQ ID NO: 316446
cgaacuaguaauugaaugu

SEQ ID NO: 365916 - RNA, 19 nt, Artificial Sequence
  Description of Artificial Sequence: Synthetic oligonucleotide
  Antisense Strand to SEQ ID NO: 365915
acauucaauuacuaguucg

SEQ ID NO: 365917 - RNA, 19 nt, Artificial Sequence
  Description of Artificial Sequence: Synthetic oligonucleotide
  Sense Strand Starting at position 601 of SEQ ID NO: 316450
cuaguaauugaauguagaa

SEQ ID NO: 365918 - RNA, 19 nt, Artificial Sequence
  Description of Artificial Sequence: Synthetic oligonucleotide
  Antisense Strand to SEQ ID NO: 365917
uucuacauucaauuacuag

SEQ ID NO: 365919 - RNA, 19 nt, Artificial Sequence
  Description of Artificial Sequence: Synthetic oligonucleotide
  Sense Strand Starting at position 601 of SEQ ID NO: 316618
acgaauuacugauuaaucu

SEQ ID NO: 365920 - RNA, 19 nt, Artificial Sequence
  Description of Artificial Sequence: Synthetic oligonucleotide
  Antisense Strand to SEQ ID NO: 365919
agauuaaucaguaauucgu

SEQ ID NO: 365921 - RNA, 19 nt, Artificial Sequence
  Description of Artificial Sequence: Synthetic oligonucleotide
  Sense Strand Starting at position 601 of SEQ ID NO: 316654
ggcagauuauucucucccu

SEQ ID NO: 365922 - RNA, 19 nt, Artificial Sequence
  Description of Artificial Sequence: Synthetic oligonucleotide
  Antisense Strand to SEQ ID NO: 365921
agggagagaauaaucugcc

SEQ ID NO: 365923 - RNA, 19 nt, Artificial Sequence
  Description of Artificial Sequence: Synthetic oligonucleotide
  Sense Strand Starting at position 601 of SEQ ID NO: 316684
gaagcugaggcucaaauua

SEQ ID NO: 365924 - RNA, 19 nt, Artificial Sequence
  Description of Artificial Sequence: Synthetic oligonucleotide
  Antisense Strand to SEQ ID NO: 365923
uaauuugagccucagcuuc

SEQ ID NO: 365925 - RNA, 19 nt, Artificial Sequence
  Description of Artificial Sequence: Synthetic oligonucleotide
  Sense Strand Starting at position 601 of SEQ ID NO: 316699
auuagaaauucgguuucga

SEQ ID NO: 365926 - RNA, 19 nt, Artificial Sequence
  Description of Artificial Sequence: Synthetic oligonucleotide
  Antisense Strand to SEQ ID NO: 365925
ucgaaaccgaauuucuaau

SEQ ID NO: 365927 - RNA, 19 nt, Artificial Sequence
  Description of Artificial Sequence: Synthetic oligonucleotide
  Sense Strand Starting at position 601 of SEQ ID NO: 316707
uucgguuucgaaggugaua

SEQ ID NO: 365928 - RNA, 19 nt, Artificial Sequence
  Description of Artificial Sequence: Synthetic oligonucleotide
  Antisense Strand to SEQ ID NO: 365927
uaucaccuucgaaaccgaa

SEQ ID NO: 365929 - RNA, 19 nt, Artificial Sequence
  Description of Artificial Sequence: Synthetic oligonucleotide
  Sense Strand Starting at position 601 of SEQ ID NO: 316709
cgguuucgaaggugauaca

SEQ ID NO: 365930 - RNA, 19 nt, Artificial Sequence
  Description of Artificial Sequence: Synthetic oligonucleotide
  Antisense Strand to SEQ ID NO: 365929
uguaucaccuucgaaaccg

SEQ ID NO: 365931 - RNA, 19 nt, Artificial Sequence
  Description of Artificial Sequence: Synthetic oligonucleotide
  Sense Strand Starting at position 601 of SEQ ID NO: 317395
gcuguaauaucaguuagga

SEQ ID NO: 365932 - RNA, 19 nt, Artificial Sequence
  Description of Artificial Sequence: Synthetic oligonucleotide
  Antisense Strand to SEQ ID NO: 365931
uccuaacugauauuacagc

SEQ ID NO: 365933 - RNA, 19 nt, Artificial Sequence
  Description of Artificial Sequence: Synthetic oligonucleotide
  Sense Strand Starting at position 601 of SEQ ID NO: 317411
ggauacuucuguccacacu

SEQ ID NO: 365934 - RNA, 19 nt, Artificial Sequence
  Description of Artificial Sequence: Synthetic oligonucleotide
  Antisense Strand to SEQ ID NO: 365933
aguguggacagaaguaucc

SEQ ID NO: 365935 - RNA, 19 nt, Artificial Sequence
  Description of Artificial Sequence: Synthetic oligonucleotide
  Sense Strand Starting at position 601 of SEQ ID NO: 317456
uaugacuuucccuggagca

SEQ ID NO: 365936 - RNA, 19 nt, Artificial Sequence
  Description of Artificial Sequence: Synthetic oligonucleotide
  Antisense Strand to SEQ ID NO: 365935
ugcuccagggaaagucaua

SEQ ID NO: 365937 - RNA, 19 nt, Artificial Sequence
  Description of Artificial Sequence: Synthetic oligonucleotide
  Sense Strand Starting at position 601 of SEQ ID NO: 317458
ugacuuucccuggagcaca

SEQ ID NO: 365938 - RNA, 19 nt, Artificial Sequence
  Description of Artificial Sequence: Synthetic oligonucleotide
  Antisense Strand to SEQ ID NO: 365937
ugugcuccagggaaaguca

SEQ ID NO: 365939 - RNA, 19 nt, Artificial Sequence
  Description of Artificial Sequence: Synthetic oligonucleotide
  Sense Strand Starting at position 601 of SEQ ID NO: 317817
gaggaaaucuggcuugucu

SEQ ID NO: 365940 - RNA, 19 nt, Artificial Sequence
  Description of Artificial Sequence: Synthetic oligonucleotide
  Antisense Strand to SEQ ID NO: 365939
agacaagccagauuuccuc

SEQ ID NO: 365941 - RNA, 19 nt, Artificial Sequence
  Description of Artificial Sequence: Synthetic oligonucleotide
  Sense Strand Starting at position 601 of SEQ ID NO: 317826
uggcuugucucccuuaaac

SEQ ID NO: 365942 - RNA, 19 nt, Artificial Sequence
  Description of Artificial Sequence: Synthetic oligonucleotide
  Antisense Strand to SEQ ID NO: 365941
guuuaagggagacaagcca

SEQ ID NO: 365943 - RNA, 19 nt, Artificial Sequence
  Description of Artificial Sequence: Synthetic oligonucleotide
  Sense Strand Starting at position 601 of SEQ ID NO: 317850
gucaguuaauuugaucaau

SEQ ID NO: 365944 - RNA, 19 nt, Artificial Sequence
  Description of Artificial Sequence: Synthetic oligonucleotide
  Antisense Strand to SEQ ID NO: 365943
auugaucaaauuaacugac

SEQ ID NO: 365945 - RNA, 19 nt, Artificial Sequence
  Description of Artificial Sequence: Synthetic oligonucleotide
  Sense Strand Starting at position 601 of SEQ ID NO: 318034
augucaaggccaugaaaga

SEQ ID NO: 365946 - RNA, 19 nt, Artificial Sequence
  Description of Artificial Sequence: Synthetic oligonucleotide
  Antisense Strand to SEQ ID NO: 365945
ucuuucauggccuugacau

SEQ ID NO: 365947 - RNA, 19 nt, Artificial Sequence
  Description of Artificial Sequence: Synthetic oligonucleotide
  Sense Strand Starting at position 601 of SEQ ID NO: 318161
gcuucaguucgggaagaug

SEQ ID NO: 365948 - RNA, 19 nt, Artificial Sequence
  Description of Artificial Sequence: Synthetic oligonucleotide
  Antisense Strand to SEQ ID NO: 365947
caucuucccgaacugaagc

SEQ ID NO: 365949 - RNA, 19 nt, Artificial Sequence
  Description of Artificial Sequence: Synthetic oligonucleotide
  Sense Strand Starting at position 601 of SEQ ID NO: 318201
ggugguacugauugcacaa

SEQ ID NO: 365950 - RNA, 19 nt, Artificial Sequence
  Description of Artificial Sequence: Synthetic oligonucleotide
  Antisense Strand to SEQ ID NO: 365949
uugugcaaucaguaccacc

SEQ ID NO: 365951 - RNA, 19 nt, Artificial Sequence
  Description of Artificial Sequence: Synthetic oligonucleotide
  Sense Strand Starting at position 601 of SEQ ID NO: 318231
ugcuuaaugccacggaaac

SEQ ID NO: 365952 - RNA, 19 nt, Artificial Sequence
  Description of Artificial Sequence: Synthetic oligonucleotide
  Antisense Strand to SEQ ID NO: 365951
guuuccguggcauuaagca

SEQ ID NO: 365953 - RNA, 19 nt, Artificial Sequence
  Description of Artificial Sequence: Synthetic oligonucleotide
  Sense Strand Starting at position 601 of SEQ ID NO: 318232
gcuuaaugccacggaaacu

SEQ ID NO: 365954 - RNA, 19 nt, Artificial Sequence
  Description of Artificial Sequence: Synthetic oligonucleotide
  Antisense Strand to SEQ ID NO: 365953
aguuuccguggcauuaagc

SEQ ID NO: 365955 - RNA, 19 nt, Artificial Sequence
  Description of Artificial Sequence: Synthetic oligonucleotide
  Sense Strand Starting at position 601 of SEQ ID NO: 318335
gaaguuauauuauccgaau

SEQ ID NO: 365956 - RNA, 19 nt, Artificial Sequence
  Description of Artificial Sequence: Synthetic oligonucleotide
  Antisense Strand to SEQ ID NO: 365955
auucggauaauauaacuuc

SEQ ID NO: 365957 - RNA, 19 nt, Artificial Sequence
  Description of Artificial Sequence: Synthetic oligonucleotide
  Sense Strand Starting at position 601 of SEQ ID NO: 318377
cauguauagugagcaucuu

SEQ ID NO: 365958 - RNA, 19 nt, Artificial Sequence
  Description of Artificial Sequence: Synthetic oligonucleotide
  Antisense Strand to SEQ ID NO: 365957
aagaugcucacuauacaug

SEQ ID NO: 365959 - RNA, 19 nt, Artificial Sequence
  Description of Artificial Sequence: Synthetic oligonucleotide
  Sense Strand Starting at position 601 of SEQ ID NO: 318403
ccaggaugcucugcuauga

SEQ ID NO: 365960 - RNA, 19 nt, Artificial Sequence
  Description of Artificial Sequence: Synthetic oligonucleotide
  Antisense Strand to SEQ ID NO: 365959
ucauagcagagcauccugg

SEQ ID NO: 365961 - RNA, 19 nt, Artificial Sequence
  Description of Artificial Sequence: Synthetic oligonucleotide
  Sense Strand Starting at position 601 of SEQ ID NO: 318487
acuuguacccaugaagcua

SEQ ID NO: 365962 - RNA, 19 nt, Artificial Sequence
  Description of Artificial Sequence: Synthetic oligonucleotide
  Antisense Strand to SEQ ID NO: 365961
uagcuucauggguacaagu

SEQ ID NO: 365963 - RNA, 19 nt, Artificial Sequence
  Description of Artificial Sequence: Synthetic oligonucleotide
  Sense Strand Starting at position 601 of SEQ ID NO: 318572
uuaggaaagucucucugga

SEQ ID NO: 365964 - RNA, 19 nt, Artificial Sequence
  Description of Artificial Sequence: Synthetic oligonucleotide
  Antisense Strand to SEQ ID NO: 365963
uccagagagacuuuccuaa

SEQ ID NO: 365965 - RNA, 19 nt, Artificial Sequence
  Description of Artificial Sequence: Synthetic oligonucleotide
  Sense Strand Starting at position 601 of SEQ ID NO: 318574
aggaaagucucucuggagu

SEQ ID NO: 365966 - RNA, 19 nt, Artificial Sequence
  Description of Artificial Sequence: Synthetic oligonucleotide
  Antisense Strand to SEQ ID NO: 365965
acuccagagagacuuuccu

SEQ ID NO: 365967 - RNA, 19 nt, Artificial Sequence
  Description of Artificial Sequence: Synthetic oligonucleotide
  Sense Strand Starting at position 601 of SEQ ID NO: 318736
uuaagagugacuggagcau

SEQ ID NO: 365968 - RNA, 19 nt, Artificial Sequence
  Description of Artificial Sequence: Synthetic oligonucleotide
  Antisense Strand to SEQ ID NO: 365967
augcuccagucacucuuaa

SEQ ID NO: 365969 - RNA, 19 nt, Artificial Sequence
  Description of Artificial Sequence: Synthetic oligonucleotide
  Sense Strand Starting at position 601 of SEQ ID NO: 319146
gauagaucuaguugcugug

SEQ ID NO: 365970 - RNA, 19 nt, Artificial Sequence
  Description of Artificial Sequence: Synthetic oligonucleotide
  Antisense Strand to SEQ ID NO: 365969
cacagcaacuagaucuauc

SEQ ID NO: 365971 - RNA, 19 nt, Artificial Sequence
  Description of Artificial Sequence: Synthetic oligonucleotide
  Sense Strand Starting at position 601 of SEQ ID NO: 319153
cuaguugcuguguagagaa

SEQ ID NO: 365972 - RNA, 19 nt, Artificial Sequence
  Description of Artificial Sequence: Synthetic oligonucleotide
  Antisense Strand to SEQ ID NO: 365971
uucucuacacagcaacuag

SEQ ID NO: 365973 - RNA, 19 nt, Artificial Sequence
  Description of Artificial Sequence: Synthetic oligonucleotide
  Sense Strand Starting at position 602 of SEQ ID NO: 315313
agaacuugagccuaaguuu

SEQ ID NO: 365974 - RNA, 19 nt, Artificial Sequence
  Description of Artificial Sequence: Synthetic oligonucleotide
  Antisense Strand to SEQ ID NO: 365973
aaacuuaggcucaaguucu

SEQ ID NO: 365975 - RNA, 19 nt, Artificial Sequence
  Description of Artificial Sequence: Synthetic oligonucleotide
  Sense Strand Starting at position 602 of SEQ ID NO: 315438
gugaaucuuguuuaaauuc

SEQ ID NO: 365976 - RNA, 19 nt, Artificial Sequence
  Description of Artificial Sequence: Synthetic oligonucleotide
  Antisense Strand to SEQ ID NO: 365975
gaauuuaaacaagauucac

SEQ ID NO: 365977 - RNA, 19 nt, Artificial Sequence
  Description of Artificial Sequence: Synthetic oligonucleotide
  Sense Strand Starting at position 602 of SEQ ID NO: 315462
aguauaaauugucucuaag

SEQ ID NO: 365978 - RNA, 19 nt, Artificial Sequence
  Description of Artificial Sequence: Synthetic oligonucleotide
  Antisense Strand to SEQ ID NO: 365977
cuuagagacaauuuauacu

SEQ ID NO: 365979 - RNA, 19 nt, Artificial Sequence
  Description of Artificial Sequence: Synthetic oligonucleotide
  Sense Strand Starting at position 602 of SEQ ID NO: 315549
ccaggauguuuguuggaga

SEQ ID NO: 365980 - RNA, 19 nt, Artificial Sequence
  Description of Artificial Sequence: Synthetic oligonucleotide
  Antisense Strand to SEQ ID NO: 365979
ucuccaacaaacauccugg

SEQ ID NO: 365981 - RNA, 19 nt, Artificial Sequence
  Description of Artificial Sequence: Synthetic oligonucleotide
  Sense Strand Starting at position 602 of SEQ ID NO: 315557
uuuguuggagagugagaau

SEQ ID NO: 365982 - RNA, 19 nt, Artificial Sequence
  Description of Artificial Sequence: Synthetic oligonucleotide
  Antisense Strand to SEQ ID NO: 365981
auucucacucuccaacaaa

SEQ ID NO: 365983 - RNA, 19 nt, Artificial Sequence
  Description of Artificial Sequence: Synthetic oligonucleotide
  Sense Strand Starting at position 602 of SEQ ID NO: 315571
agaauuaacugccuuggua

SEQ ID NO: 365984 - RNA, 19 nt, Artificial Sequence
  Description of Artificial Sequence: Synthetic oligonucleotide
  Antisense Strand to SEQ ID NO: 365983
uaccaaggcaguuaauucu

SEQ ID NO: 365985 - RNA, 19 nt, Artificial Sequence
  Description of Artificial Sequence: Synthetic oligonucleotide
  Sense Strand Starting at position 602 of SEQ ID NO: 315575
uuaacugccuugguaauga

SEQ ID NO: 365986 - RNA, 19 nt, Artificial Sequence
  Description of Artificial Sequence: Synthetic oligonucleotide
  Antisense Strand to SEQ ID NO: 365985
ucauuaccaaggcaguuaa

SEQ ID NO: 365987 - RNA, 19 nt, Artificial Sequence
  Description of Artificial Sequence: Synthetic oligonucleotide
  Sense Strand Starting at position 602 of SEQ ID NO: 315626
caugcacugggauaaguau

SEQ ID NO: 365988 - RNA, 19 nt, Artificial Sequence
  Description of Artificial Sequence: Synthetic oligonucleotide
  Antisense Strand to SEQ ID NO: 365987
auacuuaucccagugcaug

SEQ ID NO: 365989 - RNA, 19 nt, Artificial Sequence
  Description of Artificial Sequence: Synthetic oligonucleotide
  Sense Strand Starting at position 602 of SEQ ID NO: 316112
ucaggaguuugaucucauu

SEQ ID NO: 365990 - RNA, 19 nt, Artificial Sequence
  Description of Artificial Sequence: Synthetic oligonucleotide
  Antisense Strand to SEQ ID NO: 365989
aaugagaucaaacuccuga

SEQ ID NO: 365991 - RNA, 19 nt, Artificial Sequence
  Description of Artificial Sequence: Synthetic oligonucleotide
  Sense Strand Starting at position 602 of SEQ ID NO: 316260
agaagacuuuaauugcauu

SEQ ID NO: 365992 - RNA, 19 nt, Artificial Sequence
  Description of Artificial Sequence: Synthetic oligonucleotide
  Antisense Strand to SEQ ID NO: 365991
aaugcaauuaaagucuucu

SEQ ID NO: 365993 - RNA, 19 nt, Artificial Sequence
  Description of Artificial Sequence: Synthetic oligonucleotide
  Sense Strand Starting at position 602 of SEQ ID NO: 316305
agauuaaccugagaaauaa

SEQ ID NO: 365994 - RNA, 19 nt, Artificial Sequence
  Description of Artificial Sequence: Synthetic oligonucleotide
  Antisense Strand to SEQ ID NO: 365993
uuauuucucagguuaaucu

SEQ ID NO: 365995 - RNA, 19 nt, Artificial Sequence
  Description of Artificial Sequence: Synthetic oligonucleotide
  Sense Strand Starting at position 602 of SEQ ID NO: 316369
gcuguaucuguagauaauc

SEQ ID NO: 365996 - RNA, 19 nt, Artificial Sequence
  Description of Artificial Sequence: Synthetic oligonucleotide
  Antisense Strand to SEQ ID NO: 365995
gauuaucuacagauacagc

SEQ ID NO: 365997 - RNA, 19 nt, Artificial Sequence
  Description of Artificial Sequence: Synthetic oligonucleotide
  Sense Strand Starting at position 602 of SEQ ID NO: 316397
agcuauccucaggauaggu

SEQ ID NO: 365998 - RNA, 19 nt, Artificial Sequence
  Description of Artificial Sequence: Synthetic oligonucleotide
  Antisense Strand to SEQ ID NO: 365997
accuauccugaggauagcu

SEQ ID NO: 365999 - RNA, 19 nt, Artificial Sequence
  Description of Artificial Sequence: Synthetic oligonucleotide
  Sense Strand Starting at position 602 of SEQ ID NO: 316478
cugugugcaccauauauga

SEQ ID NO: 366000 - RNA, 19 nt, Artificial Sequence
  Description of Artificial Sequence: Synthetic oligonucleotide
  Antisense Strand to SEQ ID NO: 365999
ucauauauggugcacacag

SEQ ID NO: 366001 - RNA, 19 nt, Artificial Sequence
  Description of Artificial Sequence: Synthetic oligonucleotide
  Sense Strand Starting at position 602 of SEQ ID NO: 316636
gagacuugagccugagucu

SEQ ID NO: 366002 - RNA, 19 nt, Artificial Sequence
  Description of Artificial Sequence: Synthetic oligonucleotide
  Antisense Strand to SEQ ID NO: 366001
agacucaggcucaagucuc

SEQ ID NO: 366003 - RNA, 19 nt, Artificial Sequence
  Description of Artificial Sequence: Synthetic oligonucleotide
  Sense Strand Starting at position 602 of SEQ ID NO: 316665
agcuucuuacugcaggaau

SEQ ID NO: 366004 - RNA, 19 nt, Artificial Sequence
  Description of Artificial Sequence: Synthetic oligonucleotide
  Antisense Strand to SEQ ID NO: 366003
auuccugcaguaagaagcu

SEQ ID NO: 366005 - RNA, 19 nt, Artificial Sequence
  Description of Artificial Sequence: Synthetic oligonucleotide
  Sense Strand Starting at position 602 of SEQ ID NO: 316667
cuucuuacugcaggaauca

SEQ ID NO: 366006 - RNA, 19 nt, Artificial Sequence
  Description of Artificial Sequence: Synthetic oligonucleotide
  Antisense Strand to SEQ ID NO: 366005
ugauuccugcaguaagaag

SEQ ID NO: 366007 - RNA, 19 nt, Artificial Sequence
  Description of Artificial Sequence: Synthetic oligonucleotide
  Sense Strand Starting at position 602 of SEQ ID NO: 316668
uucuuacugcaggaaucau

SEQ ID NO: 366008 - RNA, 19 nt, Artificial Sequence
  Description of Artificial Sequence: Synthetic oligonucleotide
  Antisense Strand to SEQ ID NO: 366007
augauuccugcaguaagaa

SEQ ID NO: 366009 - RNA, 19 nt, Artificial Sequence
  Description of Artificial Sequence: Synthetic oligonucleotide
  Sense Strand Starting at position 602 of SEQ ID NO: 316760
gaguacugagcuugaugaa

SEQ ID NO: 366010 - RNA, 19 nt, Artificial Sequence
  Description of Artificial Sequence: Synthetic oligonucleotide
  Antisense Strand to SEQ ID NO: 366009
uucaucaagcucaguacuc

SEQ ID NO: 366011 - RNA, 19 nt, Artificial Sequence
  Description of Artificial Sequence: Synthetic oligonucleotide
  Sense Strand Starting at position 602 of SEQ ID NO: 316981
augucucuauguguauuua

SEQ ID NO: 366012 - RNA, 19 nt, Artificial Sequence
  Description of Artificial Sequence: Synthetic oligonucleotide
  Antisense Strand to SEQ ID NO: 366011
uaaauacacauagagacau

SEQ ID NO: 366013 - RNA, 19 nt, Artificial Sequence
  Description of Artificial Sequence: Synthetic oligonucleotide
  Sense Strand Starting at position 602 of SEQ ID NO: 317417
ugcaguggucuugagaaug

SEQ ID NO: 366014 - RNA, 19 nt, Artificial Sequence
  Description of Artificial Sequence: Synthetic oligonucleotide
  Antisense Strand to SEQ ID NO: 366013
cauucucaagaccacugca

SEQ ID NO: 366015 - RNA, 19 nt, Artificial Sequence
  Description of Artificial Sequence: Synthetic oligonucleotide
  Sense Strand Starting at position 602 of SEQ ID NO: 317447
ucaaguccaugucuuaaau

SEQ ID NO: 366016 - RNA, 19 nt, Artificial Sequence
  Description of Artificial Sequence: Synthetic oligonucleotide
  Antisense Strand to SEQ ID NO: 366015
auuuaagacauggacuuga

SEQ ID NO: 366017 - RNA, 19 nt, Artificial Sequence
  Description of Artificial Sequence: Synthetic oligonucleotide
  Sense Strand Starting at position 602 of SEQ ID NO: 317521
uggcuccuccaauagaaua

SEQ ID NO: 366018 - RNA, 19 nt, Artificial Sequence
  Description of Artificial Sequence: Synthetic oligonucleotide
  Antisense Strand to SEQ ID NO: 366017
uauucuauuggaggagcca

SEQ ID NO: 366019 - RNA, 19 nt, Artificial Sequence
  Description of Artificial Sequence: Synthetic oligonucleotide
  Sense Strand Starting at position 602 of SEQ ID NO: 317551
gccagaagcucggccauuu

SEQ ID NO: 366020 - RNA, 19 nt, Artificial Sequence
  Description of Artificial Sequence: Synthetic oligonucleotide
  Antisense Strand to SEQ ID NO: 366019
aaauggccgagcuucuggc

SEQ ID NO: 366021 - RNA, 19 nt, Artificial Sequence
  Description of Artificial Sequence: Synthetic oligonucleotide
  Sense Strand Starting at position 602 of SEQ ID NO: 317711
cauggaaccuuuguuauag

SEQ ID NO: 366022 - RNA, 19 nt, Artificial Sequence
  Description of Artificial Sequence: Synthetic oligonucleotide
  Antisense Strand to SEQ ID NO: 366021
cuauaacaaagguuccaug

SEQ ID NO: 366023 - RNA, 19 nt, Artificial Sequence
  Description of Artificial Sequence: Synthetic oligonucleotide
  Sense Strand Starting at position 602 of SEQ ID NO: 317712
auggaaccuuuguuauagu

SEQ ID NO: 366024 - RNA, 19 nt, Artificial Sequence
  Description of Artificial Sequence: Synthetic oligonucleotide
  Antisense Strand to SEQ ID NO: 366023
acuauaacaaagguuccau

SEQ ID NO: 366025 - RNA, 19 nt, Artificial Sequence
  Description of Artificial Sequence: Synthetic oligonucleotide
  Sense Strand Starting at position 602 of SEQ ID NO: 317862
caguauuugugagccucaa

SEQ ID NO: 366026 - RNA, 19 nt, Artificial Sequence
  Description of Artificial Sequence: Synthetic oligonucleotide
  Antisense Strand to SEQ ID NO: 366025
uugaggcucacaaauacug

SEQ ID NO: 366027 - RNA, 19 nt, Artificial Sequence
  Description of Artificial Sequence: Synthetic oligonucleotide
  Sense Strand Starting at position 602 of SEQ ID NO: 317916
cugguagauacugguagau

SEQ ID NO: 366028 - RNA, 19 nt, Artificial Sequence
  Description of Artificial Sequence: Synthetic oligonucleotide
  Antisense Strand to SEQ ID NO: 366027
aucuaccaguaucuaccag

SEQ ID NO: 366029 - RNA, 19 nt, Artificial Sequence
  Description of Artificial Sequence: Synthetic oligonucleotide
  Sense Strand Starting at position 602 of SEQ ID NO: 317932
gauagaagguucucccuua

SEQ ID NO: 366030 - RNA, 19 nt, Artificial Sequence
  Description of Artificial Sequence: Synthetic oligonucleotide
  Antisense Strand to SEQ ID NO: 366029
uaagggagaaccuucuauc

SEQ ID NO: 366031 - RNA, 19 nt, Artificial Sequence
  Description of Artificial Sequence: Synthetic oligonucleotide
  Sense Strand Starting at position 602 of SEQ ID NO: 318237
cuuugugucccucaaagaa

SEQ ID NO: 366032 - RNA, 19 nt, Artificial Sequence
  Description of Artificial Sequence: Synthetic oligonucleotide
  Antisense Strand to SEQ ID NO: 366031
uucuuugagggacacaaag

SEQ ID NO: 366033 - RNA, 19 nt, Artificial Sequence
  Description of Artificial Sequence: Synthetic oligonucleotide
  Sense Strand Starting at position 602 of SEQ ID NO: 318269
aguuacucgagugauuacu

SEQ ID NO: 366034 - RNA, 19 nt, Artificial Sequence
  Description of Artificial Sequence: Synthetic oligonucleotide
  Antisense Strand to SEQ ID NO: 366033
aguaaucacucgaguaacu

SEQ ID NO: 366035 - RNA, 19 nt, Artificial Sequence
  Description of Artificial Sequence: Synthetic oligonucleotide
  Sense Strand Starting at position 602 of SEQ ID NO: 318271
uuacucgagugauuacuaa

SEQ ID NO: 366036 - RNA, 19 nt, Artificial Sequence
  Description of Artificial Sequence: Synthetic oligonucleotide
  Antisense Strand to SEQ ID NO: 366035
uuaguaaucacucgaguaa

SEQ ID NO: 366037 - RNA, 19 nt, Artificial Sequence
  Description of Artificial Sequence: Synthetic oligonucleotide
  Sense Strand Starting at position 602 of SEQ ID NO: 318525
ggaugaccuuguucuccaa

SEQ ID NO: 366038 - RNA, 19 nt, Artificial Sequence
  Description of Artificial Sequence: Synthetic oligonucleotide
  Antisense Strand to SEQ ID NO: 366037
uuggagaacaaggucaucc

SEQ ID NO: 366039 - RNA, 19 nt, Artificial Sequence
  Description of Artificial Sequence: Synthetic oligonucleotide
  Sense Strand Starting at position 602 of SEQ ID NO: 318888
ugggucucggcagagacau

SEQ ID NO: 366040 - RNA, 19 nt, Artificial Sequence
  Description of Artificial Sequence: Synthetic oligonucleotide
  Antisense Strand to SEQ ID NO: 366039
augucucugccgagaccca

SEQ ID NO: 366041 - RNA, 19 nt, Artificial Sequence
  Description of Artificial Sequence: Synthetic oligonucleotide
  Sense Strand Starting at position 602 of SEQ ID NO: 318968
acaagacuccaguguguag

SEQ ID NO: 366042 - RNA, 19 nt, Artificial Sequence
  Description of Artificial Sequence: Synthetic oligonucleotide
  Antisense Strand to SEQ ID NO: 366041
cuacacacuggagucuugu

SEQ ID NO: 366043 - RNA, 19 nt, Artificial Sequence
  Description of Artificial Sequence: Synthetic oligonucleotide
  Sense Strand Starting at position 602 of SEQ ID NO: 318972
gacuccaguguguaguuaa

SEQ ID NO: 366044 - RNA, 19 nt, Artificial Sequence
  Description of Artificial Sequence: Synthetic oligonucleotide
  Antisense Strand to SEQ ID NO: 366043
uuaacuacacacuggaguc

SEQ ID NO: 366045 - RNA, 19 nt, Artificial Sequence
  Description of Artificial Sequence: Synthetic oligonucleotide
  Sense Strand Starting at position 602 of SEQ ID NO: 319142
aggucuguaggaugggaau

SEQ ID NO: 366046 - RNA, 19 nt, Artificial Sequence
  Description of Artificial Sequence: Synthetic oligonucleotide
  Antisense Strand to SEQ ID NO: 366045
auucccauccuacagaccu

SEQ ID NO: 366047 - RNA, 19 nt, Artificial Sequence
  Description of Artificial Sequence: Synthetic oligonucleotide
  Sense Strand Starting at position 602 of SEQ ID NO: 319155
gggaaucacuuucuccagu

SEQ ID NO: 366048 - RNA, 19 nt, Artificial Sequence
  Description of Artificial Sequence: Synthetic oligonucleotide
  Antisense Strand to SEQ ID NO: 366047
acuggagaaagugauuccc

SEQ ID NO: 366049 - RNA, 19 nt, Artificial Sequence
  Description of Artificial Sequence: Synthetic oligonucleotide
  Sense Strand Starting at position 602 of SEQ ID NO: 319156
ggaaucacuuucuccagua

SEQ ID NO: 366050 - RNA, 19 nt, Artificial Sequence
  Description of Artificial Sequence: Synthetic oligonucleotide
  Antisense Strand to SEQ ID NO: 366049
uacuggagaaagugauucc

SEQ ID NO: 366051 - RNA, 19 nt, Artificial Sequence
  Description of Artificial Sequence: Synthetic oligonucleotide
  Sense Strand Starting at position 602 of SEQ ID NO: 319213
cuuguuuaaggucagauaa

SEQ ID NO: 366052 - RNA, 19 nt, Artificial Sequence
  Description of Artificial Sequence: Synthetic oligonucleotide
  Antisense Strand to SEQ ID NO: 366051
uuaucugaccuuaaacaag

SEQ ID NO: 366053 - RNA, 19 nt, Artificial Sequence
  Description of Artificial Sequence: Synthetic oligonucleotide
  Sense Strand Starting at position 603 of SEQ ID NO: 315392
ucgggcaauuccucaacaa

SEQ ID NO: 366054 - RNA, 19 nt, Artificial Sequence
  Description of Artificial Sequence: Synthetic oligonucleotide
  Antisense Strand to SEQ ID NO: 366053
uuguugaggaauugcccga

SEQ ID NO: 366055 - RNA, 19 nt, Artificial Sequence
  Description of Artificial Sequence: Synthetic oligonucleotide
  Sense Strand Starting at position 603 of SEQ ID NO: 315393
cgggcaauuccucaacaaa

SEQ ID NO: 366056 - RNA, 19 nt, Artificial Sequence
  Description of Artificial Sequence: Synthetic oligonucleotide
  Antisense Strand to SEQ ID NO: 366055
uuuguugaggaauugcccg

SEQ ID NO: 366057 - RNA, 19 nt, Artificial Sequence
  Description of Artificial Sequence: Synthetic oligonucleotide
  Sense Strand Starting at position 603 of SEQ ID NO: 315422
gcaagacgcccagagaguu

SEQ ID NO: 366058 - RNA, 19 nt, Artificial Sequence
  Description of Artificial Sequence: Synthetic oligonucleotide
  Antisense Strand to SEQ ID NO: 366057
aacucucugggcgucuugc

SEQ ID NO: 366059 - RNA, 19 nt, Artificial Sequence
  Description of Artificial Sequence: Synthetic oligonucleotide
  Sense Strand Starting at position 603 of SEQ ID NO: 315430
cccagagaguuacccugaa

SEQ ID NO: 366060 - RNA, 19 nt, Artificial Sequence
  Description of Artificial Sequence: Synthetic oligonucleotide
  Antisense Strand to SEQ ID NO: 366059
uucaggguaacucucuggg

SEQ ID NO: 366061 - RNA, 19 nt, Artificial Sequence
  Description of Artificial Sequence: Synthetic oligonucleotide
  Sense Strand Starting at position 603 of SEQ ID NO: 315748
ucugaauucugguuucuag

SEQ ID NO: 366062 - RNA, 19 nt, Artificial Sequence
  Description of Artificial Sequence: Synthetic oligonucleotide
  Antisense Strand to SEQ ID NO: 366061
cuagaaaccagaauucaga

SEQ ID NO: 366063 - RNA, 19 nt, Artificial Sequence
  Description of Artificial Sequence: Synthetic oligonucleotide
  Sense Strand Starting at position 603 of SEQ ID NO: 315842
cuuaaugacgcgcaggaaa

SEQ ID NO: 366064 - RNA, 19 nt, Artificial Sequence
  Description of Artificial Sequence: Synthetic oligonucleotide
  Antisense Strand to SEQ ID NO: 366063
uuuccugcgcgucauuaag

SEQ ID NO: 366065 - RNA, 19 nt, Artificial Sequence
  Description of Artificial Sequence: Synthetic oligonucleotide
  Sense Strand Starting at position 603 of SEQ ID NO: 315890
ccuuauaucugcucaggau

SEQ ID NO: 366066 - RNA, 19 nt, Artificial Sequence
  Description of Artificial Sequence: Synthetic oligonucleotide
  Antisense Strand to SEQ ID NO: 366065
auccugagcagauauaagg

SEQ ID NO: 366067 - RNA, 19 nt, Artificial Sequence
  Description of Artificial Sequence: Synthetic oligonucleotide
  Sense Strand Starting at position 603 of SEQ ID NO: 315891
cuuauaucugcucaggaua

SEQ ID NO: 366068 - RNA, 19 nt, Artificial Sequence
  Description of Artificial Sequence: Synthetic oligonucleotide
  Antisense Strand to SEQ ID NO: 366067
uauccugagcagauauaag

SEQ ID NO: 366069 - RNA, 19 nt, Artificial Sequence
  Description of Artificial Sequence: Synthetic oligonucleotide
  Sense Strand Starting at position 603 of SEQ ID NO: 315934
guguuuguggcacagagga

SEQ ID NO: 366070 - RNA, 19 nt, Artificial Sequence
  Description of Artificial Sequence: Synthetic oligonucleotide
  Antisense Strand to SEQ ID NO: 366069
uccucugugccacaaacac

SEQ ID NO: 366071 - RNA, 19 nt, Artificial Sequence
  Description of Artificial Sequence: Synthetic oligonucleotide
  Sense Strand Starting at position 603 of SEQ ID NO: 315984
accaguaacucagccagaa

SEQ ID NO: 366072 - RNA, 19 nt, Artificial Sequence
  Description of Artificial Sequence: Synthetic oligonucleotide
  Antisense Strand to SEQ ID NO: 366071
uucuggcugaguuacuggu

SEQ ID NO: 366073 - RNA, 19 nt, Artificial Sequence
  Description of Artificial Sequence: Synthetic oligonucleotide
  Sense Strand Starting at position 603 of SEQ ID NO: 315988
guaacucagccagaaaguu

SEQ ID NO: 366074 - RNA, 19 nt, Artificial Sequence
  Description of Artificial Sequence: Synthetic oligonucleotide
  Antisense Strand to SEQ ID NO: 366073
aacuuucuggcugaguuac

SEQ ID NO: 366075 - RNA, 19 nt, Artificial Sequence
  Description of Artificial Sequence: Synthetic oligonucleotide
  Sense Strand Starting at position 603 of SEQ ID NO: 316167
cuauccuagcguguguuaa

SEQ ID NO: 366076 - RNA, 19 nt, Artificial Sequence
  Description of Artificial Sequence: Synthetic oligonucleotide
  Antisense Strand to SEQ ID NO: 366075
uuaacacacgcuaggauag

SEQ ID NO: 366077 - RNA, 19 nt, Artificial Sequence
  Description of Artificial Sequence: Synthetic oligonucleotide
  Sense Strand Starting at position 603 of SEQ ID NO: 316177
guguguuaaagugacauga

SEQ ID NO: 366078 - RNA, 19 nt, Artificial Sequence
  Description of Artificial Sequence: Synthetic oligonucleotide
  Antisense Strand to SEQ ID NO: 366077
ucaugucacuuuaacacac

SEQ ID NO: 366079 - RNA, 19 nt, Artificial Sequence
  Description of Artificial Sequence: Synthetic oligonucleotide
  Sense Strand Starting at position 603 of SEQ ID NO: 316181
guuaaagugacaugaacag

SEQ ID NO: 366080 - RNA, 19 nt, Artificial Sequence
  Description of Artificial Sequence: Synthetic oligonucleotide
  Antisense Strand to SEQ ID NO: 366079
cuguucaugucacuuuaac

SEQ ID NO: 366081 - RNA, 19 nt, Artificial Sequence
  Description of Artificial Sequence: Synthetic oligonucleotide
  Sense Strand Starting at position 603 of SEQ ID NO: 316205
ggagcaucugcuuauccua

SEQ ID NO: 366082 - RNA, 19 nt, Artificial Sequence
  Description of Artificial Sequence: Synthetic oligonucleotide
  Antisense Strand to SEQ ID NO: 366081
uaggauaagcagaugcucc

SEQ ID NO: 366083 - RNA, 19 nt, Artificial Sequence
  Description of Artificial Sequence: Synthetic oligonucleotide
  Sense Strand Starting at position 603 of SEQ ID NO: 316217
uauccuauuugggaagguu

SEQ ID NO: 366084 - RNA, 19 nt, Artificial Sequence
  Description of Artificial Sequence: Synthetic oligonucleotide
  Antisense Strand to SEQ ID NO: 366083
aaccuucccaaauaggaua

SEQ ID NO: 366085 - RNA, 19 nt, Artificial Sequence
  Description of Artificial Sequence: Synthetic oligonucleotide
  Sense Strand Starting at position 603 of SEQ ID NO: 316349
cuuccacgacguuaagauu

SEQ ID NO: 366086 - RNA, 19 nt, Artificial Sequence
  Description of Artificial Sequence: Synthetic oligonucleotide
  Antisense Strand to SEQ ID NO: 366085
aaucuuaacgucguggaag

SEQ ID NO: 366087 - RNA, 19 nt, Artificial Sequence
  Description of Artificial Sequence: Synthetic oligonucleotide
  Sense Strand Starting at position 603 of SEQ ID NO: 316355
cgacguuaagauuagcaga

SEQ ID NO: 366088 - RNA, 19 nt, Artificial Sequence
  Description of Artificial Sequence: Synthetic oligonucleotide
  Antisense Strand to SEQ ID NO: 366087
ucugcuaaucuuaacgucg

SEQ ID NO: 366089 - RNA, 19 nt, Artificial Sequence
  Description of Artificial Sequence: Synthetic oligonucleotide
  Sense Strand Starting at position 603 of SEQ ID NO: 316357
acguuaagauuagcagaau

SEQ ID NO: 366090 - RNA, 19 nt, Artificial Sequence
  Description of Artificial Sequence: Synthetic oligonucleotide
  Antisense Strand to SEQ ID NO: 366089
auucugcuaaucuuaacgu

SEQ ID NO: 366091 - RNA, 19 nt, Artificial Sequence
  Description of Artificial Sequence: Synthetic oligonucleotide
  Sense Strand Starting at position 603 of SEQ ID NO: 316405
gagaguuguuaauuaauga

SEQ ID NO: 366092 - RNA, 19 nt, Artificial Sequence
  Description of Artificial Sequence: Synthetic oligonucleotide
  Antisense Strand to SEQ ID NO: 366091
ucauuaauuaacaacucuc

SEQ ID NO: 366093 - RNA, 19 nt, Artificial Sequence
  Description of Artificial Sequence: Synthetic oligonucleotide
  Sense Strand Starting at position 603 of SEQ ID NO: 316536
uguacagacaggugucaaa

SEQ ID NO: 366094 - RNA, 19 nt, Artificial Sequence
  Description of Artificial Sequence: Synthetic oligonucleotide
  Antisense Strand to SEQ ID NO: 366093
uuugacaccugucuguaca

SEQ ID NO: 366095 - RNA, 19 nt, Artificial Sequence
  Description of Artificial Sequence: Synthetic oligonucleotide
  Sense Strand Starting at position 603 of SEQ ID NO: 316568
ccaggagucacacguuaau

SEQ ID NO: 366096 - RNA, 19 nt, Artificial Sequence
  Description of Artificial Sequence: Synthetic oligonucleotide
  Antisense Strand to SEQ ID NO: 366095
auuaacgugugacuccugg

SEQ ID NO: 366097 - RNA, 19 nt, Artificial Sequence
  Description of Artificial Sequence: Synthetic oligonucleotide
  Sense Strand Starting at position 603 of SEQ ID NO: 316592
agcugagauccauguguaa

SEQ ID NO: 366098 - RNA, 19 nt, Artificial Sequence
  Description of Artificial Sequence: Synthetic oligonucleotide
  Antisense Strand to SEQ ID NO: 366097
uuacacauggaucucagcu

SEQ ID NO: 366099 - RNA, 19 nt, Artificial Sequence
  Description of Artificial Sequence: Synthetic oligonucleotide
  Sense Strand Starting at position 603 of SEQ ID NO: 316595
ugagauccauguguaaaug

SEQ ID NO: 366100 - RNA, 19 nt, Artificial Sequence
  Description of Artificial Sequence: Synthetic oligonucleotide
  Antisense Strand to SEQ ID NO: 366099
cauuuacacauggaucuca

SEQ ID NO: 366101 - RNA, 19 nt, Artificial Sequence
  Description of Artificial Sequence: Synthetic oligonucleotide
  Sense Strand Starting at position 603 of SEQ ID NO: 316735
gugacugaguucccaaaca

SEQ ID NO: 366102 - RNA, 19 nt, Artificial Sequence
  Description of Artificial Sequence: Synthetic oligonucleotide
  Antisense Strand to SEQ ID NO: 366101
uguuugggaacucagucac

SEQ ID NO: 366103 - RNA, 19 nt, Artificial Sequence
  Description of Artificial Sequence: Synthetic oligonucleotide
  Sense Strand Starting at position 603 of SEQ ID NO: 317524
agacuuagaugcuccaaga

SEQ ID NO: 366104 - RNA, 19 nt, Artificial Sequence
  Description of Artificial Sequence: Synthetic oligonucleotide
  Antisense Strand to SEQ ID NO: 366103
ucuuggagcaucuaagucu

SEQ ID NO: 366105 - RNA, 19 nt, Artificial Sequence
  Description of Artificial Sequence: Synthetic oligonucleotide
  Sense Strand Starting at position 603 of SEQ ID NO: 317642
uguaaugcugauuacuaau

SEQ ID NO: 366106 - RNA, 19 nt, Artificial Sequence
  Description of Artificial Sequence: Synthetic oligonucleotide
  Antisense Strand to SEQ ID NO: 366105
auuaguaaucagcauuaca

SEQ ID NO: 366107 - RNA, 19 nt, Artificial Sequence
  Description of Artificial Sequence: Synthetic oligonucleotide
  Sense Strand Starting at position 603 of SEQ ID NO: 317663
ugauaacagugccucauau

SEQ ID NO: 366108 - RNA, 19 nt, Artificial Sequence
  Description of Artificial Sequence: Synthetic oligonucleotide
  Antisense Strand to SEQ ID NO: 366107
auaugaggcacuguuauca

SEQ ID NO: 366109 - RNA, 19 nt, Artificial Sequence
  Description of Artificial Sequence: Synthetic oligonucleotide
  Sense Strand Starting at position 603 of SEQ ID NO: 317773
gcuguuugaacuuaggcaa

SEQ ID NO: 366110 - RNA, 19 nt, Artificial Sequence
  Description of Artificial Sequence: Synthetic oligonucleotide
  Antisense Strand to SEQ ID NO: 366109
uugccuaaguucaaacagc

SEQ ID NO: 366111 - RNA, 19 nt, Artificial Sequence
  Description of Artificial Sequence: Synthetic oligonucleotide
  Sense Strand Starting at position 603 of SEQ ID NO: 318057
guugcugauuuaguaggua

SEQ ID NO: 366112 - RNA, 19 nt, Artificial Sequence
  Description of Artificial Sequence: Synthetic oligonucleotide
  Antisense Strand to SEQ ID NO: 366111
uaccuacuaaaucagcaac

SEQ ID NO: 366113 - RNA, 19 nt, Artificial Sequence
  Description of Artificial Sequence: Synthetic oligonucleotide
  Sense Strand Starting at position 603 of SEQ ID NO: 318280
uccuguuacagaggugaag

SEQ ID NO: 366114 - RNA, 19 nt, Artificial Sequence
  Description of Artificial Sequence: Synthetic oligonucleotide
  Antisense Strand to SEQ ID NO: 366113
cuucaccucuguaacagga

SEQ ID NO: 366115 - RNA, 19 nt, Artificial Sequence
  Description of Artificial Sequence: Synthetic oligonucleotide
  Sense Strand Starting at position 603 of SEQ ID NO: 318282
cuguuacagaggugaaguu

SEQ ID NO: 366116 - RNA, 19 nt, Artificial Sequence
  Description of Artificial Sequence: Synthetic oligonucleotide
  Antisense Strand to SEQ ID NO: 366115
aacuucaccucuguaacag

SEQ ID NO: 366117 - RNA, 19 nt, Artificial Sequence
  Description of Artificial Sequence: Synthetic oligonucleotide
  Sense Strand Starting at position 603 of SEQ ID NO: 318313
gugaaugaaugccuacaga

SEQ ID NO: 366118 - RNA, 19 nt, Artificial Sequence
  Description of Artificial Sequence: Synthetic oligonucleotide
  Antisense Strand to SEQ ID NO: 366117
ucuguaggcauucauucac

SEQ ID NO: 366119 - RNA, 19 nt, Artificial Sequence
  Description of Artificial Sequence: Synthetic oligonucleotide
  Sense Strand Starting at position 603 of SEQ ID NO: 318385
gcccaauaugcccaguaga

SEQ ID NO: 366120 - RNA, 19 nt, Artificial Sequence
  Description of Artificial Sequence: Synthetic oligonucleotide
  Antisense Strand to SEQ ID NO: 366119
ucuacugggcauauugggc

SEQ ID NO: 366121 - RNA, 19 nt, Artificial Sequence
  Description of Artificial Sequence: Synthetic oligonucleotide
  Sense Strand Starting at position 603 of SEQ ID NO: 318515
gggaccuuuccaugaacca

SEQ ID NO: 366122 - RNA, 19 nt, Artificial Sequence
  Description of Artificial Sequence: Synthetic oligonucleotide
  Antisense Strand to SEQ ID NO: 366121
ugguucauggaaagguccc

SEQ ID NO: 366123 - RNA, 19 nt, Artificial Sequence
  Description of Artificial Sequence: Synthetic oligonucleotide
  Sense Strand Starting at position 603 of SEQ ID NO: 318646
aaguuugugggaggaauga

SEQ ID NO: 366124 - RNA, 19 nt, Artificial Sequence
  Description of Artificial Sequence: Synthetic oligonucleotide
  Antisense Strand to SEQ ID NO: 366123
ucauuccucccacaaacuu

SEQ ID NO: 366125 - RNA, 19 nt, Artificial Sequence
  Description of Artificial Sequence: Synthetic oligonucleotide
  Sense Strand Starting at position 603 of SEQ ID NO: 318770
uuggaaccaugcuuagauu

SEQ ID NO: 366126 - RNA, 19 nt, Artificial Sequence
  Description of Artificial Sequence: Synthetic oligonucleotide
  Antisense Strand to SEQ ID NO: 366125
aaucuaagcaugguuccaa

SEQ ID NO: 366127 - RNA, 19 nt, Artificial Sequence
  Description of Artificial Sequence: Synthetic oligonucleotide
  Sense Strand Starting at position 603 of SEQ ID NO: 318790
gugcuuuauuuaucuaugu

SEQ ID NO: 366128 - RNA, 19 nt, Artificial Sequence
  Description of Artificial Sequence: Synthetic oligonucleotide
  Antisense Strand to SEQ ID NO: 366127
acauagauaaauaaagcac

SEQ ID NO: 366129 - RNA, 19 nt, Artificial Sequence
  Description of Artificial Sequence: Synthetic oligonucleotide
  Sense Strand Starting at position 603 of SEQ ID NO: 319148
cugccacaugguugggaua

SEQ ID NO: 366130 - RNA, 19 nt, Artificial Sequence
  Description of Artificial Sequence: Synthetic oligonucleotide
  Antisense Strand to SEQ ID NO: 366129
uaucccaaccauguggcag

SEQ ID NO: 366131 - RNA, 19 nt, Artificial Sequence
  Description of Artificial Sequence: Synthetic oligonucleotide
  Sense Strand Starting at position 603 of SEQ ID NO: 319167
ccaguaaaugaucgaagca

SEQ ID NO: 366132 - RNA, 19 nt, Artificial Sequence
  Description of Artificial Sequence: Synthetic oligonucleotide
  Antisense Strand to SEQ ID NO: 366131
ugcuucgaucauuuacugg

SEQ ID NO: 366133 - RNA, 19 nt, Artificial Sequence
  Description of Artificial Sequence: Synthetic oligonucleotide
  Sense Strand Starting at position 604 of SEQ ID NO: 315271
uacagaggugcuuaacaua

SEQ ID NO: 366134 - RNA, 19 nt, Artificial Sequence
  Description of Artificial Sequence: Synthetic oligonucleotide
  Antisense Strand to SEQ ID NO: 366133
uauguuaagcaccucugua

SEQ ID NO: 366135 - RNA, 19 nt, Artificial Sequence
  Description of Artificial Sequence: Synthetic oligonucleotide
  Sense Strand Starting at position 604 of SEQ ID NO: 315329
auuccauugugacugagaa

SEQ ID NO: 366136 - RNA, 19 nt, Artificial Sequence
  Description of Artificial Sequence: Synthetic oligonucleotide
  Antisense Strand to SEQ ID NO: 366135
uucucagucacaauggaau

SEQ ID NO: 366137 - RNA, 19 nt, Artificial Sequence
  Description of Artificial Sequence: Synthetic oligonucleotide
  Sense Strand Starting at position 604 of SEQ ID NO: 315330
uuccauugugacugagaag

SEQ ID NO: 366138 - RNA, 19 nt, Artificial Sequence
  Description of Artificial Sequence: Synthetic oligonucleotide
  Antisense Strand to SEQ ID NO: 366137
cuucucagucacaauggaa

SEQ ID NO: 366139 - RNA, 19 nt, Artificial Sequence
  Description of Artificial Sequence: Synthetic oligonucleotide
  Sense Strand Starting at position 604 of SEQ ID NO: 315368
gaguauaaccuagauguuc

SEQ ID NO: 366140 - RNA, 19 nt, Artificial Sequence
  Description of Artificial Sequence: Synthetic oligonucleotide
  Antisense Strand to SEQ ID NO: 366139
gaacaucuagguuauacuc

SEQ ID NO: 366141 - RNA, 19 nt, Artificial Sequence
  Description of Artificial Sequence: Synthetic oligonucleotide
  Sense Strand Starting at position 604 of SEQ ID NO: 315439
gguugugacaaucgggaau

SEQ ID NO: 366142 - RNA, 19 nt, Artificial Sequence
  Description of Artificial Sequence: Synthetic oligonucleotide
  Antisense Strand to SEQ ID NO: 366141
auucccgauugucacaacc

SEQ ID NO: 366143 - RNA, 19 nt, Artificial Sequence
  Description of Artificial Sequence: Synthetic oligonucleotide
  Sense Strand Starting at position 604 of SEQ ID NO: 315751
agaaauggguguccucaaa

SEQ ID NO: 366144 - RNA, 19 nt, Artificial Sequence
  Description of Artificial Sequence: Synthetic oligonucleotide
  Antisense Strand to SEQ ID NO: 366143
uuugaggacacccauuucu

SEQ ID NO: 366145 - RNA, 19 nt, Artificial Sequence
  Description of Artificial Sequence: Synthetic oligonucleotide
  Sense Strand Starting at position 604 of SEQ ID NO: 316005
ccaggaguccgggagucuu

SEQ ID NO: 366146 - RNA, 19 nt, Artificial Sequence
  Description of Artificial Sequence: Synthetic oligonucleotide
  Antisense Strand to SEQ ID NO: 366145
aagacucccggacuccugg

SEQ ID NO: 366147 - RNA, 19 nt, Artificial Sequence
  Description of Artificial Sequence: Synthetic oligonucleotide
  Sense Strand Starting at position 604 of SEQ ID NO: 316301
gcaggacucuuauccaaga

SEQ ID NO: 366148 - RNA, 19 nt, Artificial Sequence
  Description of Artificial Sequence: Synthetic oligonucleotide
  Antisense Strand to SEQ ID NO: 366147
ucuuggauaagaguccugc

SEQ ID NO: 366149 - RNA, 19 nt, Artificial Sequence
  Description of Artificial Sequence: Synthetic oligonucleotide
  Sense Strand Starting at position 604 of SEQ ID NO: 317470
ccacccugucucugacaga

SEQ ID NO: 366150 - RNA, 19 nt, Artificial Sequence
  Description of Artificial Sequence: Synthetic oligonucleotide
  Antisense Strand to SEQ ID NO: 366149
ucugucagagacagggugg

SEQ ID NO: 366151 - RNA, 19 nt, Artificial Sequence
  Description of Artificial Sequence: Synthetic oligonucleotide
  Sense Strand Starting at position 604 of SEQ ID NO: 317741
gaaagugcugguugcuaaa

SEQ ID NO: 366152 - RNA, 19 nt, Artificial Sequence
  Description of Artificial Sequence: Synthetic oligonucleotide
  Antisense Strand to SEQ ID NO: 366151
uuuagcaaccagcacuuuc

SEQ ID NO: 366153 - RNA, 19 nt, Artificial Sequence
  Description of Artificial Sequence: Synthetic oligonucleotide
  Sense Strand Starting at position 604 of SEQ ID NO: 317822
guuuguuaacaggauucgu

SEQ ID NO: 366154 - RNA, 19 nt, Artificial Sequence
  Description of Artificial Sequence: Synthetic oligonucleotide
  Antisense Strand to SEQ ID NO: 366153
acgaauccuguuaacaaac

SEQ ID NO: 366155 - RNA, 19 nt, Artificial Sequence
  Description of Artificial Sequence: Synthetic oligonucleotide
  Sense Strand Starting at position 604 of SEQ ID NO: 317846
gguggugguucuauaacgu

SEQ ID NO: 366156 - RNA, 19 nt, Artificial Sequence
  Description of Artificial Sequence: Synthetic oligonucleotide
  Antisense Strand to SEQ ID NO: 366155
acguuauagaaccaccacc

SEQ ID NO: 366157 - RNA, 19 nt, Artificial Sequence
  Description of Artificial Sequence: Synthetic oligonucleotide
  Sense Strand Starting at position 604 of SEQ ID NO: 317853
guucuauaacguuacguag

SEQ ID NO: 366158 - RNA, 19 nt, Artificial Sequence
  Description of Artificial Sequence: Synthetic oligonucleotide
  Antisense Strand to SEQ ID NO: 366157
cuacguaacguuauagaac

SEQ ID NO: 366159 - RNA, 19 nt, Artificial Sequence
  Description of Artificial Sequence: Synthetic oligonucleotide
  Sense Strand Starting at position 604 of SEQ ID NO: 317893
gugcguauuaaccaggaaa

SEQ ID NO: 366160 - RNA, 19 nt, Artificial Sequence
  Description of Artificial Sequence: Synthetic oligonucleotide
  Antisense Strand to SEQ ID NO: 366159
uuuccugguuaauacgcac

SEQ ID NO: 366161 - RNA, 19 nt, Artificial Sequence
  Description of Artificial Sequence: Synthetic oligonucleotide
  Sense Strand Starting at position 604 of SEQ ID NO: 318051
gucagugcugcguuugaaa

SEQ ID NO: 366162 - RNA, 19 nt, Artificial Sequence
  Description of Artificial Sequence: Synthetic oligonucleotide
  Antisense Strand to SEQ ID NO: 366161
uuucaaacgcagcacugac

SEQ ID NO: 366163 - RNA, 19 nt, Artificial Sequence
  Description of Artificial Sequence: Synthetic oligonucleotide
  Sense Strand Starting at position 604 of SEQ ID NO: 318158
auaugcaaugugggucaua

SEQ ID NO: 366164 - RNA, 19 nt, Artificial Sequence
  Description of Artificial Sequence: Synthetic oligonucleotide
  Antisense Strand to SEQ ID NO: 366163
uaugacccacauugcauau

SEQ ID NO: 366165 - RNA, 19 nt, Artificial Sequence
  Description of Artificial Sequence: Synthetic oligonucleotide
  Sense Strand Starting at position 604 of SEQ ID NO: 318159
uaugcaaugugggucauaa

SEQ ID NO: 366166 - RNA, 19 nt, Artificial Sequence
  Description of Artificial Sequence: Synthetic oligonucleotide
  Antisense Strand to SEQ ID NO: 366165
uuaugacccacauugcaua

SEQ ID NO: 366167 - RNA, 19 nt, Artificial Sequence
  Description of Artificial Sequence: Synthetic oligonucleotide
  Sense Strand Starting at position 604 of SEQ ID NO: 318168
ugggucauaaugugcuuau

SEQ ID NO: 366168 - RNA, 19 nt, Artificial Sequence
  Description of Artificial Sequence: Synthetic oligonucleotide
  Antisense Strand to SEQ ID NO: 366167
auaagcacauuaugaccca

SEQ ID NO: 366169 - RNA, 19 nt, Artificial Sequence
  Description of Artificial Sequence: Synthetic oligonucleotide
  Sense Strand Starting at position 604 of SEQ ID NO: 318169
gggucauaaugugcuuauu

SEQ ID NO: 366170 - RNA, 19 nt, Artificial Sequence
  Description of Artificial Sequence: Synthetic oligonucleotide
  Antisense Strand to SEQ ID NO: 366169
aauaagcacauuaugaccc

SEQ ID NO: 366171 - RNA, 19 nt, Artificial Sequence
  Description of Artificial Sequence: Synthetic oligonucleotide
  Sense Strand Starting at position 604 of SEQ ID NO: 318171
gucauaaugugcuuauuau

SEQ ID NO: 366172 - RNA, 19 nt, Artificial Sequence
  Description of Artificial Sequence: Synthetic oligonucleotide
  Antisense Strand to SEQ ID NO: 366171
auaauaagcacauuaugac

SEQ ID NO: 366173 - RNA, 19 nt, Artificial Sequence
  Description of Artificial Sequence: Synthetic oligonucleotide
  Sense Strand Starting at position 604 of SEQ ID NO: 318272
uuuccagauucucuguguu

SEQ ID NO: 366174 - RNA, 19 nt, Artificial Sequence
  Description of Artificial Sequence: Synthetic oligonucleotide
  Antisense Strand to SEQ ID NO: 366173
aacacagagaaucuggaaa

SEQ ID NO: 366175 - RNA, 19 nt, Artificial Sequence
  Description of Artificial Sequence: Synthetic oligonucleotide
  Sense Strand Starting at position 604 of SEQ ID NO: 318274
uccagauucucuguguuau

SEQ ID NO: 366176 - RNA, 19 nt, Artificial Sequence
  Description of Artificial Sequence: Synthetic oligonucleotide
  Antisense Strand to SEQ ID NO: 366175
auaacacagagaaucugga

SEQ ID NO: 366177 - RNA, 19 nt, Artificial Sequence
  Description of Artificial Sequence: Synthetic oligonucleotide
  Sense Strand Starting at position 604 of SEQ ID NO: 318275
ccagauucucuguguuauu

SEQ ID NO: 366178 - RNA, 19 nt, Artificial Sequence
  Description of Artificial Sequence: Synthetic oligonucleotide
  Antisense Strand to SEQ ID NO: 366177
aauaacacagagaaucugg

SEQ ID NO: 366179 - RNA, 19 nt, Artificial Sequence
  Description of Artificial Sequence: Synthetic oligonucleotide
  Sense Strand Starting at position 604 of SEQ ID NO: 318295
ugacuuguaaugcagguua

SEQ ID NO: 366180 - RNA, 19 nt, Artificial Sequence
  Description of Artificial Sequence: Synthetic oligonucleotide
  Antisense Strand to SEQ ID NO: 366179
uaaccugcauuacaaguca

SEQ ID NO: 366181 - RNA, 19 nt, Artificial Sequence
  Description of Artificial Sequence: Synthetic oligonucleotide
  Sense Strand Starting at position 604 of SEQ ID NO: 318297
acuuguaaugcagguuaau

SEQ ID NO: 366182 - RNA, 19 nt, Artificial Sequence
  Description of Artificial Sequence: Synthetic oligonucleotide
  Antisense Strand to SEQ ID NO: 366181
auuaaccugcauuacaagu

SEQ ID NO: 366183 - RNA, 19 nt, Artificial Sequence
  Description of Artificial Sequence: Synthetic oligonucleotide
  Sense Strand Starting at position 604 of SEQ ID NO: 318355
cagugauauuagcuuagac

SEQ ID NO: 366184 - RNA, 19 nt, Artificial Sequence
  Description of Artificial Sequence: Synthetic oligonucleotide
  Antisense Strand to SEQ ID NO: 366183
gucuaagcuaauaucacug

SEQ ID NO: 366185 - RNA, 19 nt, Artificial Sequence
  Description of Artificial Sequence: Synthetic oligonucleotide
  Sense Strand Starting at position 604 of SEQ ID NO: 318357
gugauauuagcuuagacag

SEQ ID NO: 366186 - RNA, 19 nt, Artificial Sequence
  Description of Artificial Sequence: Synthetic oligonucleotide
  Antisense Strand to SEQ ID NO: 366185
cugucuaagcuaauaucac

SEQ ID NO: 366187 - RNA, 19 nt, Artificial Sequence
  Description of Artificial Sequence: Synthetic oligonucleotide
  Sense Strand Starting at position 604 of SEQ ID NO: 318363
uuagcuuagacagggcaaa

SEQ ID NO: 366188 - RNA, 19 nt, Artificial Sequence
  Description of Artificial Sequence: Synthetic oligonucleotide
  Antisense Strand to SEQ ID NO: 366187
uuugcccugucuaagcuaa

SEQ ID NO: 366189 - RNA, 19 nt, Artificial Sequence
  Description of Artificial Sequence: Synthetic oligonucleotide
  Sense Strand Starting at position 604 of SEQ ID NO: 318429
ggcagauucuuaucagguu

SEQ ID NO: 366190 - RNA, 19 nt, Artificial Sequence
  Description of Artificial Sequence: Synthetic oligonucleotide
  Antisense Strand to SEQ ID NO: 366189
aaccugauaagaaucugcc

SEQ ID NO: 366191 - RNA, 19 nt, Artificial Sequence
  Description of Artificial Sequence: Synthetic oligonucleotide
  Sense Strand Starting at position 604 of SEQ ID NO: 318530
cugagauguuucgcagauu

SEQ ID NO: 366192 - RNA, 19 nt, Artificial Sequence
  Description of Artificial Sequence: Synthetic oligonucleotide
  Antisense Strand to SEQ ID NO: 366191
aaucugcgaaacaucucag

SEQ ID NO: 366193 - RNA, 19 nt, Artificial Sequence
  Description of Artificial Sequence: Synthetic oligonucleotide
  Sense Strand Starting at position 604 of SEQ ID NO: 318551
ugccauucuccgcaaagca

SEQ ID NO: 366194 - RNA, 19 nt, Artificial Sequence
  Description of Artificial Sequence: Synthetic oligonucleotide
  Antisense Strand to SEQ ID NO: 366193
ugcuuugcggagaauggca

SEQ ID NO: 366195 - RNA, 19 nt, Artificial Sequence
  Description of Artificial Sequence: Synthetic oligonucleotide
  Sense Strand Starting at position 604 of SEQ ID NO: 318590
gugcuucucugaucaaccu

SEQ ID NO: 366196 - RNA, 19 nt, Artificial Sequence
  Description of Artificial Sequence: Synthetic oligonucleotide
  Antisense Strand to SEQ ID NO: 366195
agguugaucagagaagcac

SEQ ID NO: 366197 - RNA, 19 nt, Artificial Sequence
  Description of Artificial Sequence: Synthetic oligonucleotide
  Sense Strand Starting at position 604 of SEQ ID NO: 318755
agcauugaacucuaauggu

SEQ ID NO: 366198 - RNA, 19 nt, Artificial Sequence
  Description of Artificial Sequence: Synthetic oligonucleotide
  Antisense Strand to SEQ ID NO: 366197
accauuagaguucaaugcu

SEQ ID NO: 366199 - RNA, 19 nt, Artificial Sequence
  Description of Artificial Sequence: Synthetic oligonucleotide
  Sense Strand Starting at position 604 of SEQ ID NO: 318773
ugcucuuuguacuuugaga

SEQ ID NO: 366200 - RNA, 19 nt, Artificial Sequence
  Description of Artificial Sequence: Synthetic oligonucleotide
  Antisense Strand to SEQ ID NO: 366199
ucucaaaguacaaagagca

SEQ ID NO: 366201 - RNA, 19 nt, Artificial Sequence
  Description of Artificial Sequence: Synthetic oligonucleotide
  Sense Strand Starting at position 604 of SEQ ID NO: 318775
cucuuuguacuuugagaua

SEQ ID NO: 366202 - RNA, 19 nt, Artificial Sequence
  Description of Artificial Sequence: Synthetic oligonucleotide
  Antisense Strand to SEQ ID NO: 366201
uaucucaaaguacaaagag

SEQ ID NO: 366203 - RNA, 19 nt, Artificial Sequence
  Description of Artificial Sequence: Synthetic oligonucleotide
  Sense Strand Starting at position 604 of SEQ ID NO: 318810
uauggaugccuccaugcau

SEQ ID NO: 366204 - RNA, 19 nt, Artificial Sequence
  Description of Artificial Sequence: Synthetic oligonucleotide
  Antisense Strand to SEQ ID NO: 366203
augcauggaggcauccaua

SEQ ID NO: 366205 - RNA, 19 nt, Artificial Sequence
  Description of Artificial Sequence: Synthetic oligonucleotide
  Sense Strand Starting at position 604 of SEQ ID NO: 318817
gccuccaugcauggguaaa

SEQ ID NO: 366206 - RNA, 19 nt, Artificial Sequence
  Description of Artificial Sequence: Synthetic oligonucleotide
  Antisense Strand to SEQ ID NO: 366205
uuuacccaugcauggaggc

SEQ ID NO: 366207 - RNA, 19 nt, Artificial Sequence
  Description of Artificial Sequence: Synthetic oligonucleotide
  Sense Strand Starting at position 604 of SEQ ID NO: 319007
ccaagcgucccucagaauu

SEQ ID NO: 366208 - RNA, 19 nt, Artificial Sequence
  Description of Artificial Sequence: Synthetic oligonucleotide
  Antisense Strand to SEQ ID NO: 366207
aauucugagggacgcuugg

SEQ ID NO: 366209 - RNA, 19 nt, Artificial Sequence
  Description of Artificial Sequence: Synthetic oligonucleotide
  Sense Strand Starting at position 604 of SEQ ID NO: 319112
ggcgaauggcuugugccau

SEQ ID NO: 366210 - RNA, 19 nt, Artificial Sequence
  Description of Artificial Sequence: Synthetic oligonucleotide
  Antisense Strand to SEQ ID NO: 366209
auggcacaagccauucgcc

SEQ ID NO: 366211 - RNA, 19 nt, Artificial Sequence
  Description of Artificial Sequence: Synthetic oligonucleotide
  Sense Strand Starting at position 604 of SEQ ID NO: 319151
uuauuucccugcucagagu

SEQ ID NO: 366212 - RNA, 19 nt, Artificial Sequence
  Description of Artificial Sequence: Synthetic oligonucleotide
  Antisense Strand to SEQ ID NO: 366211
acucugagcagggaaauaa

SEQ ID NO: 366213 - RNA, 19 nt, Artificial Sequence
  Description of Artificial Sequence: Synthetic oligonucleotide
  Sense Strand Starting at position 605 of SEQ ID NO: 315261
uuacuuucugacugaaaug

SEQ ID NO: 366214 - RNA, 19 nt, Artificial Sequence
  Description of Artificial Sequence: Synthetic oligonucleotide
  Antisense Strand to SEQ ID NO: 366213
cauuucagucagaaaguaa

SEQ ID NO: 366215 - RNA, 19 nt, Artificial Sequence
  Description of Artificial Sequence: Synthetic oligonucleotide
  Sense Strand Starting at position 605 of SEQ ID NO: 315342
uguaguauuuauuccaugu

SEQ ID NO: 366216 - RNA, 19 nt, Artificial Sequence
  Description of Artificial Sequence: Synthetic oligonucleotide
  Antisense Strand to SEQ ID NO: 366215
acauggaauaaauacuaca

SEQ ID NO: 366217 - RNA, 19 nt, Artificial Sequence
  Description of Artificial Sequence: Synthetic oligonucleotide
  Sense Strand Starting at position 605 of SEQ ID NO: 315346
guauuuauuccaugugcau

SEQ ID NO: 366218 - RNA, 19 nt, Artificial Sequence
  Description of Artificial Sequence: Synthetic oligonucleotide
  Antisense Strand to SEQ ID NO: 366217
augcacauggaauaaauac

SEQ ID NO: 366219 - RNA, 19 nt, Artificial Sequence
  Description of Artificial Sequence: Synthetic oligonucleotide
  Sense Strand Starting at position 605 of SEQ ID NO: 315384
agauuuaagugcuaaauac

SEQ ID NO: 366220 - RNA, 19 nt, Artificial Sequence
  Description of Artificial Sequence: Synthetic oligonucleotide
  Antisense Strand to SEQ ID NO: 366219
guauuuagcacuuaaaucu

SEQ ID NO: 366221 - RNA, 19 nt, Artificial Sequence
  Description of Artificial Sequence: Synthetic oligonucleotide
  Sense Strand Starting at position 605 of SEQ ID NO: 315406
uuuaauacgggcugaauaa

SEQ ID NO: 366222 - RNA, 19 nt, Artificial Sequence
  Description of Artificial Sequence: Synthetic oligonucleotide
  Antisense Strand to SEQ ID NO: 366221
uuauucagcccguauuaaa

SEQ ID NO: 366223 - RNA, 19 nt, Artificial Sequence
  Description of Artificial Sequence: Synthetic oligonucleotide
  Sense Strand Starting at position 605 of SEQ ID NO: 315543
uuuacaguguuggagauuu

SEQ ID NO: 366224 - RNA, 19 nt, Artificial Sequence
  Description of Artificial Sequence: Synthetic oligonucleotide
  Antisense Strand to SEQ ID NO: 366223
aaaucuccaacacuguaaa

SEQ ID NO: 366225 - RNA, 19 nt, Artificial Sequence
  Description of Artificial Sequence: Synthetic oligonucleotide
  Sense Strand Starting at position 605 of SEQ ID NO: 316014
gcauguucuguauacuauu

SEQ ID NO: 366226 - RNA, 19 nt, Artificial Sequence
  Description of Artificial Sequence: Synthetic oligonucleotide
  Antisense Strand to SEQ ID NO: 366225
aauaguauacagaacaugc

SEQ ID NO: 366227 - RNA, 19 nt, Artificial Sequence
  Description of Artificial Sequence: Synthetic oligonucleotide
  Sense Strand Starting at position 605 of SEQ ID NO: 316033
ccuuaugggagauguauag

SEQ ID NO: 366228 - RNA, 19 nt, Artificial Sequence
  Description of Artificial Sequence: Synthetic oligonucleotide
  Antisense Strand to SEQ ID NO: 366227
cuauacaucucccauaagg

SEQ ID NO: 366229 - RNA, 19 nt, Artificial Sequence
  Description of Artificial Sequence: Synthetic oligonucleotide
  Sense Strand Starting at position 605 of SEQ ID NO: 316039
gggagauguauaggguaau

SEQ ID NO: 366230 - RNA, 19 nt, Artificial Sequence
  Description of Artificial Sequence: Synthetic oligonucleotide
  Antisense Strand to SEQ ID NO: 366229
auuacccuauacaucuccc

SEQ ID NO: 366231 - RNA, 19 nt, Artificial Sequence
  Description of Artificial Sequence: Synthetic oligonucleotide
  Sense Strand Starting at position 605 of SEQ ID NO: 316071
aauuuaagaugugaugacu

SEQ ID NO: 366232 - RNA, 19 nt, Artificial Sequence
  Description of Artificial Sequence: Synthetic oligonucleotide
  Antisense Strand to SEQ ID NO: 366231
agucaucacaucuuaaauu

SEQ ID NO: 366233 - RNA, 19 nt, Artificial Sequence
  Description of Artificial Sequence: Synthetic oligonucleotide
  Sense Strand Starting at position 605 of SEQ ID NO: 317257
cuaagucuucuuuaagugu

SEQ ID NO: 366234 - RNA, 19 nt, Artificial Sequence
  Description of Artificial Sequence: Synthetic oligonucleotide
  Antisense Strand to SEQ ID NO: 366233
acacuuaaagaagacuuag

SEQ ID NO: 366235 - RNA, 19 nt, Artificial Sequence
  Description of Artificial Sequence: Synthetic oligonucleotide
  Sense Strand Starting at position 605 of SEQ ID NO: 317271
aguguagcuugauuccuga

SEQ ID NO: 366236 - RNA, 19 nt, Artificial Sequence
  Description of Artificial Sequence: Synthetic oligonucleotide
  Antisense Strand to SEQ ID NO: 366235
ucaggaaucaagcuacacu

SEQ ID NO: 366237 - RNA, 19 nt, Artificial Sequence
  Description of Artificial Sequence: Synthetic oligonucleotide
  Sense Strand Starting at position 605 of SEQ ID NO: 317291
gggcuauuugcaugucuga

SEQ ID NO: 366238 - RNA, 19 nt, Artificial Sequence
  Description of Artificial Sequence: Synthetic oligonucleotide
  Antisense Strand to SEQ ID NO: 366237
ucagacaugcaaauagccc

SEQ ID NO: 366239 - RNA, 19 nt, Artificial Sequence
  Description of Artificial Sequence: Synthetic oligonucleotide
  Sense Strand Starting at position 605 of SEQ ID NO: 317294
cuauuugcaugucugauua

SEQ ID NO: 366240 - RNA, 19 nt, Artificial Sequence
  Description of Artificial Sequence: Synthetic oligonucleotide
  Antisense Strand to SEQ ID NO: 366239
uaaucagacaugcaaauag

SEQ ID NO: 366241 - RNA, 19 nt, Artificial Sequence
  Description of Artificial Sequence: Synthetic oligonucleotide
  Sense Strand Starting at position 605 of SEQ ID NO: 317298
uugcaugucugauuacuca

SEQ ID NO: 366242 - RNA, 19 nt, Artificial Sequence
  Description of Artificial Sequence: Synthetic oligonucleotide
  Antisense Strand to SEQ ID NO: 366241
ugaguaaucagacaugcaa

SEQ ID NO: 366243 - RNA, 19 nt, Artificial Sequence
  Description of Artificial Sequence: Synthetic oligonucleotide
  Sense Strand Starting at position 605 of SEQ ID NO: 317302
augucugauuacucaugaa

SEQ ID NO: 366244 - RNA, 19 nt, Artificial Sequence
  Description of Artificial Sequence: Synthetic oligonucleotide
  Antisense Strand to SEQ ID NO: 366243
uucaugaguaaucagacau

SEQ ID NO: 366245 - RNA, 19 nt, Artificial Sequence
  Description of Artificial Sequence: Synthetic oligonucleotide
  Sense Strand Starting at position 605 of SEQ ID NO: 317306
cugauuacucaugaagcua

SEQ ID NO: 366246 - RNA, 19 nt, Artificial Sequence
  Description of Artificial Sequence: Synthetic oligonucleotide
  Antisense Strand to SEQ ID NO: 366245
uagcuucaugaguaaucag

SEQ ID NO: 366247 - RNA, 19 nt, Artificial Sequence
  Description of Artificial Sequence: Synthetic oligonucleotide
  Sense Strand Starting at position 605 of SEQ ID NO: 317322
cuacaaagaugucaggaaa

SEQ ID NO: 366248 - RNA, 19 nt, Artificial Sequence
  Description of Artificial Sequence: Synthetic oligonucleotide
  Antisense Strand to SEQ ID NO: 366247
uuuccugacaucuuuguag

SEQ ID NO: 366249 - RNA, 19 nt, Artificial Sequence
  Description of Artificial Sequence: Synthetic oligonucleotide
  Sense Strand Starting at position 605 of SEQ ID NO: 317361
aaggcaguuuccuucuaag

SEQ ID NO: 366250 - RNA, 19 nt, Artificial Sequence
  Description of Artificial Sequence: Synthetic oligonucleotide
  Antisense Strand to SEQ ID NO: 366249
cuuagaaggaaacugccuu

SEQ ID NO: 366251 - RNA, 19 nt, Artificial Sequence
  Description of Artificial Sequence: Synthetic oligonucleotide
  Sense Strand Starting at position 605 of SEQ ID NO: 317397
uuagauaugcagcauuagu

SEQ ID NO: 366252 - RNA, 19 nt, Artificial Sequence
  Description of Artificial Sequence: Synthetic oligonucleotide
  Antisense Strand to SEQ ID NO: 366251
acuaaugcugcauaucuaa

SEQ ID NO: 366253 - RNA, 19 nt, Artificial Sequence
  Description of Artificial Sequence: Synthetic oligonucleotide
  Sense Strand Starting at position 605 of SEQ ID NO: 317455
agcagagcaguuuaagaca

SEQ ID NO: 366254 - RNA, 19 nt, Artificial Sequence
  Description of Artificial Sequence: Synthetic oligonucleotide
  Antisense Strand to SEQ ID NO: 366253
ugucuuaaacugcucugcu

SEQ ID NO: 366255 - RNA, 19 nt, Artificial Sequence
  Description of Artificial Sequence: Synthetic oligonucleotide
  Sense Strand Starting at position 605 of SEQ ID NO: 317543
ucuccuaaucaguggcaga

SEQ ID NO: 366256 - RNA, 19 nt, Artificial Sequence
  Description of Artificial Sequence: Synthetic oligonucleotide
  Antisense Strand to SEQ ID NO: 366255
ucugccacugauuaggaga

SEQ ID NO: 366257 - RNA, 19 nt, Artificial Sequence
  Description of Artificial Sequence: Synthetic oligonucleotide
  Sense Strand Starting at position 605 of SEQ ID NO: 317612
agugauaagcugggcacau

SEQ ID NO: 366258 - RNA, 19 nt, Artificial Sequence
  Description of Artificial Sequence: Synthetic oligonucleotide
  Antisense Strand to SEQ ID NO: 366257
augugcccagcuuaucacu

SEQ ID NO: 366259 - RNA, 19 nt, Artificial Sequence
  Description of Artificial Sequence: Synthetic oligonucleotide
  Sense Strand Starting at position 605 of SEQ ID NO: 317613
gugauaagcugggcacauu

SEQ ID NO: 366260 - RNA, 19 nt, Artificial Sequence
  Description of Artificial Sequence: Synthetic oligonucleotide
  Antisense Strand to SEQ ID NO: 366259
aaugugcccagcuuaucac

SEQ ID NO: 366261 - RNA, 19 nt, Artificial Sequence
  Description of Artificial Sequence: Synthetic oligonucleotide
  Sense Strand Starting at position 605 of SEQ ID NO: 317771
uuauaauagucaguccaua

SEQ ID NO: 366262 - RNA, 19 nt, Artificial Sequence
  Description of Artificial Sequence: Synthetic oligonucleotide
  Antisense Strand to SEQ ID NO: 366261
uauggacugacuauuauaa

SEQ ID NO: 366263 - RNA, 19 nt, Artificial Sequence
  Description of Artificial Sequence: Synthetic oligonucleotide
  Sense Strand Starting at position 605 of SEQ ID NO: 317776
auagucaguccauaaauuc

SEQ ID NO: 366264 - RNA, 19 nt, Artificial Sequence
  Description of Artificial Sequence: Synthetic oligonucleotide
  Antisense Strand to SEQ ID NO: 366263
gaauuuauggacugacuau

SEQ ID NO: 366265 - RNA, 19 nt, Artificial Sequence
  Description of Artificial Sequence: Synthetic oligonucleotide
  Sense Strand Starting at position 605 of SEQ ID NO: 317945
aaugucagcugaucugaaa

SEQ ID NO: 366266 - RNA, 19 nt, Artificial Sequence
  Description of Artificial Sequence: Synthetic oligonucleotide
  Antisense Strand to SEQ ID NO: 366265
uuucagaucagcugacauu

SEQ ID NO: 366267 - RNA, 19 nt, Artificial Sequence
  Description of Artificial Sequence: Synthetic oligonucleotide
  Sense Strand Starting at position 605 of SEQ ID NO: 318287
aguucuaacuuggcuguaa

SEQ ID NO: 366268 - RNA, 19 nt, Artificial Sequence
  Description of Artificial Sequence: Synthetic oligonucleotide
  Antisense Strand to SEQ ID NO: 366267
uuacagccaaguuagaacu

SEQ ID NO: 366269 - RNA, 19 nt, Artificial Sequence
  Description of Artificial Sequence: Synthetic oligonucleotide
  Sense Strand Starting at position 605 of SEQ ID NO: 318305
aguugcaagcagugagaau

SEQ ID NO: 366270 - RNA, 19 nt, Artificial Sequence
  Description of Artificial Sequence: Synthetic oligonucleotide
  Antisense Strand to SEQ ID NO: 366269
auucucacugcuugcaacu

SEQ ID NO: 366271 - RNA, 19 nt, Artificial Sequence
  Description of Artificial Sequence: Synthetic oligonucleotide
  Sense Strand Starting at position 605 of SEQ ID NO: 318306
guugcaagcagugagaaua

SEQ ID NO: 366272 - RNA, 19 nt, Artificial Sequence
  Description of Artificial Sequence: Synthetic oligonucleotide
  Antisense Strand to SEQ ID NO: 366271
uauucucacugcuugcaac

SEQ ID NO: 366273 - RNA, 19 nt, Artificial Sequence
  Description of Artificial Sequence: Synthetic oligonucleotide
  Sense Strand Starting at position 605 of SEQ ID NO: 318320
gaauaacauugaugggaaa

SEQ ID NO: 366274 - RNA, 19 nt, Artificial Sequence
  Description of Artificial Sequence: Synthetic oligonucleotide
  Antisense Strand to SEQ ID NO: 366273
uuucccaucaauguuauuc

SEQ ID NO: 366275 - RNA, 19 nt, Artificial Sequence
  Description of Artificial Sequence: Synthetic oligonucleotide
  Sense Strand Starting at position 605 of SEQ ID NO: 318351
ucuagauuaugaguaagau

SEQ ID NO: 366276 - RNA, 19 nt, Artificial Sequence
  Description of Artificial Sequence: Synthetic oligonucleotide
  Antisense Strand to SEQ ID NO: 366275
aucuuacucauaaucuaga

SEQ ID NO: 366277 - RNA, 19 nt, Artificial Sequence
  Description of Artificial Sequence: Synthetic oligonucleotide
  Sense Strand Starting at position 605 of SEQ ID NO: 318382
gggugacuauucuccacuu

SEQ ID NO: 366278 - RNA, 19 nt, Artificial Sequence
  Description of Artificial Sequence: Synthetic oligonucleotide
  Antisense Strand to SEQ ID NO: 366277
aaguggagaauagucaccc

SEQ ID NO: 366279 - RNA, 19 nt, Artificial Sequence
  Description of Artificial Sequence: Synthetic oligonucleotide
  Sense Strand Starting at position 605 of SEQ ID NO: 318588
ggaaauaacuggccuauau

SEQ ID NO: 366280 - RNA, 19 nt, Artificial Sequence
  Description of Artificial Sequence: Synthetic oligonucleotide
  Antisense Strand to SEQ ID NO: 366279
auauaggccaguuauuucc

SEQ ID NO: 366281 - RNA, 19 nt, Artificial Sequence
  Description of Artificial Sequence: Synthetic oligonucleotide
  Sense Strand Starting at position 605 of SEQ ID NO: 318592
auaacuggccuauauguau

SEQ ID NO: 366282 - RNA, 19 nt, Artificial Sequence
  Description of Artificial Sequence: Synthetic oligonucleotide
  Antisense Strand to SEQ ID NO: 366281
auacauauaggccaguuau

SEQ ID NO: 366283 - RNA, 19 nt, Artificial Sequence
  Description of Artificial Sequence: Synthetic oligonucleotide
  Sense Strand Starting at position 605 of SEQ ID NO: 318690
ugaauuuacugauggaaau

SEQ ID NO: 366284 - RNA, 19 nt, Artificial Sequence
  Description of Artificial Sequence: Synthetic oligonucleotide
  Antisense Strand to SEQ ID NO: 366283
auuuccaucaguaaauuca

SEQ ID NO: 366285 - RNA, 19 nt, Artificial Sequence
  Description of Artificial Sequence: Synthetic oligonucleotide
  Sense Strand Starting at position 605 of SEQ ID NO: 318797
agacacucgcauuguacau

SEQ ID NO: 366286 - RNA, 19 nt, Artificial Sequence
  Description of Artificial Sequence: Synthetic oligonucleotide
  Antisense Strand to SEQ ID NO: 366285
auguacaaugcgagugucu

SEQ ID NO: 366287 - RNA, 19 nt, Artificial Sequence
  Description of Artificial Sequence: Synthetic oligonucleotide
  Sense Strand Starting at position 605 of SEQ ID NO: 318819
ggcuuucccugguuuggau

SEQ ID NO: 366288 - RNA, 19 nt, Artificial Sequence
  Description of Artificial Sequence: Synthetic oligonucleotide
  Antisense Strand to SEQ ID NO: 366287
auccaaaccagggaaagcc

SEQ ID NO: 366289 - RNA, 19 nt, Artificial Sequence
  Description of Artificial Sequence: Synthetic oligonucleotide
  Sense Strand Starting at position 605 of SEQ ID NO: 318892
caaguaaaguagcuaaguu

SEQ ID NO: 366290 - RNA, 19 nt, Artificial Sequence
  Description of Artificial Sequence: Synthetic oligonucleotide
  Antisense Strand to SEQ ID NO: 366289
aacuuagcuacuuuacuug

SEQ ID NO: 366291 - RNA, 19 nt, Artificial Sequence
  Description of Artificial Sequence: Synthetic oligonucleotide
  Sense Strand Starting at position 605 of SEQ ID NO: 318950
auuaguuuccagugauaua

SEQ ID NO: 366292 - RNA, 19 nt, Artificial Sequence
  Description of Artificial Sequence: Synthetic oligonucleotide
  Antisense Strand to SEQ ID NO: 366291
uauaucacuggaaacuaau

SEQ ID NO: 366293 - RNA, 19 nt, Artificial Sequence
  Description of Artificial Sequence: Synthetic oligonucleotide
  Sense Strand Starting at position 606 of SEQ ID NO: 315258
ucuugcgaugauuaauacu

SEQ ID NO: 366294 - RNA, 19 nt, Artificial Sequence
  Description of Artificial Sequence: Synthetic oligonucleotide
  Antisense Strand to SEQ ID NO: 366293
aguauuaaucaucgcaaga

SEQ ID NO: 366295 - RNA, 19 nt, Artificial Sequence
  Description of Artificial Sequence: Synthetic oligonucleotide
  Sense Strand Starting at position 606 of SEQ ID NO: 315264
gaugauuaauacuuaguag

SEQ ID NO: 366296 - RNA, 19 nt, Artificial Sequence
  Description of Artificial Sequence: Synthetic oligonucleotide
  Antisense Strand to SEQ ID NO: 366295
cuacuaaguauuaaucauc

SEQ ID NO: 366297 - RNA, 19 nt, Artificial Sequence
  Description of Artificial Sequence: Synthetic oligonucleotide
  Sense Strand Starting at position 606 of SEQ ID NO: 315276
uuaguaguccaaugaccua

SEQ ID NO: 366298 - RNA, 19 nt, Artificial Sequence
  Description of Artificial Sequence: Synthetic oligonucleotide
  Antisense Strand to SEQ ID NO: 366297
uaggucauuggacuacuaa

SEQ ID NO: 366299 - RNA, 19 nt, Artificial Sequence
  Description of Artificial Sequence: Synthetic oligonucleotide
  Sense Strand Starting at position 606 of SEQ ID NO: 315304
agucuaaacgguuacauca

SEQ ID NO: 366300 - RNA, 19 nt, Artificial Sequence
  Description of Artificial Sequence: Synthetic oligonucleotide
  Antisense Strand to SEQ ID NO: 366299
ugauguaaccguuuagacu

SEQ ID NO: 366301 - RNA, 19 nt, Artificial Sequence
  Description of Artificial Sequence: Synthetic oligonucleotide
  Sense Strand Starting at position 606 of SEQ ID NO: 315379
gaaacuacuguuggaacau

SEQ ID NO: 366302 - RNA, 19 nt, Artificial Sequence
  Description of Artificial Sequence: Synthetic oligonucleotide
  Antisense Strand to SEQ ID NO: 366301
auguuccaacaguaguuuc

SEQ ID NO: 366303 - RNA, 19 nt, Artificial Sequence
  Description of Artificial Sequence: Synthetic oligonucleotide
  Sense Strand Starting at position 606 of SEQ ID NO: 315403
gguuaugugcccuauaaag

SEQ ID NO: 366304 - RNA, 19 nt, Artificial Sequence
  Description of Artificial Sequence: Synthetic oligonucleotide
  Antisense Strand to SEQ ID NO: 366303
cuuuauagggcacauaacc

SEQ ID NO: 366305 - RNA, 19 nt, Artificial Sequence
  Description of Artificial Sequence: Synthetic oligonucleotide
  Sense Strand Starting at position 606 of SEQ ID NO: 315405
uuaugugcccuauaaaggu

SEQ ID NO: 366306 - RNA, 19 nt, Artificial Sequence
  Description of Artificial Sequence: Synthetic oligonucleotide
  Antisense Strand to SEQ ID NO: 366305
accuuuauagggcacauaa

SEQ ID NO: 366307 - RNA, 19 nt, Artificial Sequence
  Description of Artificial Sequence: Synthetic oligonucleotide
  Sense Strand Starting at position 606 of SEQ ID NO: 315452
cagagugugguugauaacu

SEQ ID NO: 366308 - RNA, 19 nt, Artificial Sequence
  Description of Artificial Sequence: Synthetic oligonucleotide
  Antisense Strand to SEQ ID NO: 366307
aguuaucaaccacacucug

SEQ ID NO: 366309 - RNA, 19 nt, Artificial Sequence
  Description of Artificial Sequence: Synthetic oligonucleotide
  Sense Strand Starting at position 606 of SEQ ID NO: 315460
gguugauaacuuuacuauu

SEQ ID NO: 366310 - RNA, 19 nt, Artificial Sequence
  Description of Artificial Sequence: Synthetic oligonucleotide
  Antisense Strand to SEQ ID NO: 366309
aauaguaaaguuaucaacc

SEQ ID NO: 366311 - RNA, 19 nt, Artificial Sequence
  Description of Artificial Sequence: Synthetic oligonucleotide
  Sense Strand Starting at position 606 of SEQ ID NO: 315513
aagugagcauuugacacaa

SEQ ID NO: 366312 - RNA, 19 nt, Artificial Sequence
  Description of Artificial Sequence: Synthetic oligonucleotide
  Antisense Strand to SEQ ID NO: 366311
uugugucaaaugcucacuu

SEQ ID NO: 366313 - RNA, 19 nt, Artificial Sequence
  Description of Artificial Sequence: Synthetic oligonucleotide
  Sense Strand Starting at position 606 of SEQ ID NO: 315677
ucuagaaaucuuggauauu

SEQ ID NO: 366314 - RNA, 19 nt, Artificial Sequence
  Description of Artificial Sequence: Synthetic oligonucleotide
  Antisense Strand to SEQ ID NO: 366313
aauauccaagauuucuaga

SEQ ID NO: 366315 - RNA, 19 nt, Artificial Sequence
  Description of Artificial Sequence: Synthetic oligonucleotide
  Sense Strand Starting at position 606 of SEQ ID NO: 315762
acaaucuauugagugguaa

SEQ ID NO: 366316 - RNA, 19 nt, Artificial Sequence
  Description of Artificial Sequence: Synthetic oligonucleotide
  Antisense Strand to SEQ ID NO: 366315
uuaccacucaauagauugu

SEQ ID NO: 366317 - RNA, 19 nt, Artificial Sequence
  Description of Artificial Sequence: Synthetic oligonucleotide
  Sense Strand Starting at position 606 of SEQ ID NO: 315763
caaucuauugagugguaau

SEQ ID NO: 366318 - RNA, 19 nt, Artificial Sequence
  Description of Artificial Sequence: Synthetic oligonucleotide
  Antisense Strand to SEQ ID NO: 366317
auuaccacucaauagauug

SEQ ID NO: 366319 - RNA, 19 nt, Artificial Sequence
  Description of Artificial Sequence: Synthetic oligonucleotide
  Sense Strand Starting at position 606 of SEQ ID NO: 315850
augcauuauggauaacuuu

SEQ ID NO: 366320 - RNA, 19 nt, Artificial Sequence
  Description of Artificial Sequence: Synthetic oligonucleotide
  Antisense Strand to SEQ ID NO: 366319
aaaguuauccauaaugcau

SEQ ID NO: 366321 - RNA, 19 nt, Artificial Sequence
  Description of Artificial Sequence: Synthetic oligonucleotide
  Sense Strand Starting at position 606 of SEQ ID NO: 316164
cuagaagaaucccucaagu

SEQ ID NO: 366322 - RNA, 19 nt, Artificial Sequence
  Description of Artificial Sequence: Synthetic oligonucleotide
  Antisense Strand to SEQ ID NO: 366321
acuugagggauucuucuag

SEQ ID NO: 366323 - RNA, 19 nt, Artificial Sequence
  Description of Artificial Sequence: Synthetic oligonucleotide
  Sense Strand Starting at position 606 of SEQ ID NO: 316228
gaaacaaagucauugguuu

SEQ ID NO: 366324 - RNA, 19 nt, Artificial Sequence
  Description of Artificial Sequence: Synthetic oligonucleotide
  Antisense Strand to SEQ ID NO: 366323
aaaccaaugacuuuguuuc

SEQ ID NO: 366325 - RNA, 19 nt, Artificial Sequence
  Description of Artificial Sequence: Synthetic oligonucleotide
  Sense Strand Starting at position 606 of SEQ ID NO: 316668
uauacaaaugucuguggau

SEQ ID NO: 366326 - RNA, 19 nt, Artificial Sequence
  Description of Artificial Sequence: Synthetic oligonucleotide
  Antisense Strand to SEQ ID NO: 366325
auccacagacauuuguaua

SEQ ID NO: 366327 - RNA, 19 nt, Artificial Sequence
  Description of Artificial Sequence: Synthetic oligonucleotide
  Sense Strand Starting at position 606 of SEQ ID NO: 316669
auacaaaugucuguggaua

SEQ ID NO: 366328 - RNA, 19 nt, Artificial Sequence
  Description of Artificial Sequence: Synthetic oligonucleotide
  Antisense Strand to SEQ ID NO: 366327
uauccacagacauuuguau

SEQ ID NO: 366329 - RNA, 19 nt, Artificial Sequence
  Description of Artificial Sequence: Synthetic oligonucleotide
  Sense Strand Starting at position 606 of SEQ ID NO: 317354
augcgugucgggaaaugua

SEQ ID NO: 366330 - RNA, 19 nt, Artificial Sequence
  Description of Artificial Sequence: Synthetic oligonucleotide
  Antisense Strand to SEQ ID NO: 366329
uacauuucccgacacgcau

SEQ ID NO: 366331 - RNA, 19 nt, Artificial Sequence
  Description of Artificial Sequence: Synthetic oligonucleotide
  Sense Strand Starting at position 606 of SEQ ID NO: 317425
ggaauuccuauuggcugau

SEQ ID NO: 366332 - RNA, 19 nt, Artificial Sequence
  Description of Artificial Sequence: Synthetic oligonucleotide
  Antisense Strand to SEQ ID NO: 366331
aucagccaauaggaauucc

SEQ ID NO: 366333 - RNA, 19 nt, Artificial Sequence
  Description of Artificial Sequence: Synthetic oligonucleotide
  Sense Strand Starting at position 606 of SEQ ID NO: 317516
agucuucuggcggaggaga

SEQ ID NO: 366334 - RNA, 19 nt, Artificial Sequence
  Description of Artificial Sequence: Synthetic oligonucleotide
  Antisense Strand to SEQ ID NO: 366333
ucuccuccgccagaagacu

SEQ ID NO: 366335 - RNA, 19 nt, Artificial Sequence
  Description of Artificial Sequence: Synthetic oligonucleotide
  Sense Strand Starting at position 606 of SEQ ID NO: 317530
ggagaacugucauucugag

SEQ ID NO: 366336 - RNA, 19 nt, Artificial Sequence
  Description of Artificial Sequence: Synthetic oligonucleotide
  Antisense Strand to SEQ ID NO: 366335
cucagaaugacaguucucc

SEQ ID NO: 366337 - RNA, 19 nt, Artificial Sequence
  Description of Artificial Sequence: Synthetic oligonucleotide
  Sense Strand Starting at position 606 of SEQ ID NO: 317661
acuagcuuccgguaugaaa

SEQ ID NO: 366338 - RNA, 19 nt, Artificial Sequence
  Description of Artificial Sequence: Synthetic oligonucleotide
  Antisense Strand to SEQ ID NO: 366337
uuucauaccggaagcuagu

SEQ ID NO: 366339 - RNA, 19 nt, Artificial Sequence
  Description of Artificial Sequence: Synthetic oligonucleotide
  Sense Strand Starting at position 606 of SEQ ID NO: 317812
ucugaugagucaccuauga

SEQ ID NO: 366340 - RNA, 19 nt, Artificial Sequence
  Description of Artificial Sequence: Synthetic oligonucleotide
  Antisense Strand to SEQ ID NO: 366339
ucauaggugacucaucaga

SEQ ID NO: 366341 - RNA, 19 nt, Artificial Sequence
  Description of Artificial Sequence: Synthetic oligonucleotide
  Sense Strand Starting at position 606 of SEQ ID NO: 318087
cccggagccagggaugauu

SEQ ID NO: 366342 - RNA, 19 nt, Artificial Sequence
  Description of Artificial Sequence: Synthetic oligonucleotide
  Antisense Strand to SEQ ID NO: 366341
aaucaucccuggcuccggg

SEQ ID NO: 366343 - RNA, 19 nt, Artificial Sequence
  Description of Artificial Sequence: Synthetic oligonucleotide
  Sense Strand Starting at position 606 of SEQ ID NO: 318119
cucuuuagucacuauaugu

SEQ ID NO: 366344 - RNA, 19 nt, Artificial Sequence
  Description of Artificial Sequence: Synthetic oligonucleotide
  Antisense Strand to SEQ ID NO: 366343
acauauagugacuaaagag

SEQ ID NO: 366345 - RNA, 19 nt, Artificial Sequence
  Description of Artificial Sequence: Synthetic oligonucleotide
  Sense Strand Starting at position 606 of SEQ ID NO: 318124
uagucacuauaugugagaa

SEQ ID NO: 366346 - RNA, 19 nt, Artificial Sequence
  Description of Artificial Sequence: Synthetic oligonucleotide
  Antisense Strand to SEQ ID NO: 366345
uucucacauauagugacua

SEQ ID NO: 366347 - RNA, 19 nt, Artificial Sequence
  Description of Artificial Sequence: Synthetic oligonucleotide
  Sense Strand Starting at position 606 of SEQ ID NO: 318368
augagcuaacauugggaau

SEQ ID NO: 366348 - RNA, 19 nt, Artificial Sequence
  Description of Artificial Sequence: Synthetic oligonucleotide
  Antisense Strand to SEQ ID NO: 366347
auucccaauguuagcucau

SEQ ID NO: 366349 - RNA, 19 nt, Artificial Sequence
  Description of Artificial Sequence: Synthetic oligonucleotide
  Sense Strand Starting at position 606 of SEQ ID NO: 318410
aaggaaguaucagcgaaug

SEQ ID NO: 366350 - RNA, 19 nt, Artificial Sequence
  Description of Artificial Sequence: Synthetic oligonucleotide
  Antisense Strand to SEQ ID NO: 366349
cauucgcugauacuuccuu

SEQ ID NO: 366351 - RNA, 19 nt, Artificial Sequence
  Description of Artificial Sequence: Synthetic oligonucleotide
  Sense Strand Starting at position 606 of SEQ ID NO: 318451
uaguuagcccgugugcaua

SEQ ID NO: 366352 - RNA, 19 nt, Artificial Sequence
  Description of Artificial Sequence: Synthetic oligonucleotide
  Antisense Strand to SEQ ID NO: 366351
uaugcacacgggcuaacua

SEQ ID NO: 366353 - RNA, 19 nt, Artificial Sequence
  Description of Artificial Sequence: Synthetic oligonucleotide
  Sense Strand Starting at position 606 of SEQ ID NO: 318488
agaucaaaccguugaacuu

SEQ ID NO: 366354 - RNA, 19 nt, Artificial Sequence
  Description of Artificial Sequence: Synthetic oligonucleotide
  Antisense Strand to SEQ ID NO: 366353
aaguucaacgguuugaucu

SEQ ID NO: 366355 - RNA, 19 nt, Artificial Sequence
  Description of Artificial Sequence: Synthetic oligonucleotide
  Sense Strand Starting at position 606 of SEQ ID NO: 318723
cacguuucuggauagauga

SEQ ID NO: 366356 - RNA, 19 nt, Artificial Sequence
  Description of Artificial Sequence: Synthetic oligonucleotide
  Antisense Strand to SEQ ID NO: 366355
ucaucuauccagaaacgug

SEQ ID NO: 366357 - RNA, 19 nt, Artificial Sequence
  Description of Artificial Sequence: Synthetic oligonucleotide
  Sense Strand Starting at position 606 of SEQ ID NO: 318788
ugauguugcuuucuaauuu

SEQ ID NO: 366358 - RNA, 19 nt, Artificial Sequence
  Description of Artificial Sequence: Synthetic oligonucleotide
  Antisense Strand to SEQ ID NO: 366357
aaauuagaaagcaacauca

SEQ ID NO: 366359 - RNA, 19 nt, Artificial Sequence
  Description of Artificial Sequence: Synthetic oligonucleotide
  Sense Strand Starting at position 606 of SEQ ID NO: 318813
augguagcacuuuaugaca

SEQ ID NO: 366360 - RNA, 19 nt, Artificial Sequence
  Description of Artificial Sequence: Synthetic oligonucleotide
  Antisense Strand to SEQ ID NO: 366359
ugucauaaagugcuaccau

SEQ ID NO: 366361 - RNA, 19 nt, Artificial Sequence
  Description of Artificial Sequence: Synthetic oligonucleotide
  Sense Strand Starting at position 606 of SEQ ID NO: 318826
augacaauaugguuaguau

SEQ ID NO: 366362 - RNA, 19 nt, Artificial Sequence
  Description of Artificial Sequence: Synthetic oligonucleotide
  Antisense Strand to SEQ ID NO: 366361
auacuaaccauauugucau

SEQ ID NO: 366363 - RNA, 19 nt, Artificial Sequence
  Description of Artificial Sequence: Synthetic oligonucleotide
  Sense Strand Starting at position 606 of SEQ ID NO: 318827
ugacaauaugguuaguauu

SEQ ID NO: 366364 - RNA, 19 nt, Artificial Sequence
  Description of Artificial Sequence: Synthetic oligonucleotide
  Antisense Strand to SEQ ID NO: 366363
aauacuaaccauauuguca

SEQ ID NO: 366365 - RNA, 19 nt, Artificial Sequence
  Description of Artificial Sequence: Synthetic oligonucleotide
  Sense Strand Starting at position 606 of SEQ ID NO: 319085
uuaagaaacuuggccaauu

SEQ ID NO: 366366 - RNA, 19 nt, Artificial Sequence
  Description of Artificial Sequence: Synthetic oligonucleotide
  Antisense Strand to SEQ ID NO: 366365
aauuggccaaguuucuuaa

SEQ ID NO: 366367 - RNA, 19 nt, Artificial Sequence
  Description of Artificial Sequence: Synthetic oligonucleotide
  Sense Strand Starting at position 606 of SEQ ID NO: 319144
gacaauauuguuugauuag

SEQ ID NO: 366368 - RNA, 19 nt, Artificial Sequence
  Description of Artificial Sequence: Synthetic oligonucleotide
  Antisense Strand to SEQ ID NO: 366367
cuaaucaaacaauauuguc

SEQ ID NO: 366369 - RNA, 19 nt, Artificial Sequence
  Description of Artificial Sequence: Synthetic oligonucleotide
  Sense Strand Starting at position 606 of SEQ ID NO: 319150
auuguuugauuagugagaa

SEQ ID NO: 366370 - RNA, 19 nt, Artificial Sequence
  Description of Artificial Sequence: Synthetic oligonucleotide
  Antisense Strand to SEQ ID NO: 366369
uucucacuaaucaaacaau

SEQ ID NO: 366371 - RNA, 19 nt, Artificial Sequence
  Description of Artificial Sequence: Synthetic oligonucleotide
  Sense Strand Starting at position 606 of SEQ ID NO: 319165
agaagacaguguucugauu

SEQ ID NO: 366372 - RNA, 19 nt, Artificial Sequence
  Description of Artificial Sequence: Synthetic oligonucleotide
  Antisense Strand to SEQ ID NO: 366371
aaucagaacacugucuucu

SEQ ID NO: 366373 - RNA, 19 nt, Artificial Sequence
  Description of Artificial Sequence: Synthetic oligonucleotide
  Sense Strand Starting at position 607 of SEQ ID NO: 315242
ugaagaacguguuccucua

SEQ ID NO: 366374 - RNA, 19 nt, Artificial Sequence
  Description of Artificial Sequence: Synthetic oligonucleotide
  Antisense Strand to SEQ ID NO: 366373
uagaggaacacguucuuca

SEQ ID NO: 366375 - RNA, 19 nt, Artificial Sequence
  Description of Artificial Sequence: Synthetic oligonucleotide
  Sense Strand Starting at position 607 of SEQ ID NO: 315321
agcacagaucuguaauuga

SEQ ID NO: 366376 - RNA, 19 nt, Artificial Sequence
  Description of Artificial Sequence: Synthetic oligonucleotide
  Antisense Strand to SEQ ID NO: 366375
ucaauuacagaucugugcu

SEQ ID NO: 366377 - RNA, 19 nt, Artificial Sequence
  Description of Artificial Sequence: Synthetic oligonucleotide
  Sense Strand Starting at position 607 of SEQ ID NO: 315324
acagaucuguaauugauau

SEQ ID NO: 366378 - RNA, 19 nt, Artificial Sequence
  Description of Artificial Sequence: Synthetic oligonucleotide
  Antisense Strand to SEQ ID NO: 366377
auaucaauuacagaucugu

SEQ ID NO: 366379 - RNA, 19 nt, Artificial Sequence
  Description of Artificial Sequence: Synthetic oligonucleotide
  Sense Strand Starting at position 607 of SEQ ID NO: 315367
aggcauacccucuaaaggu

SEQ ID NO: 366380 - RNA, 19 nt, Artificial Sequence
  Description of Artificial Sequence: Synthetic oligonucleotide
  Antisense Strand to SEQ ID NO: 366379
accuuuagaggguaugccu

SEQ ID NO: 366381 - RNA, 19 nt, Artificial Sequence
  Description of Artificial Sequence: Synthetic oligonucleotide
  Sense Strand Starting at position 607 of SEQ ID NO: 315375
ccucuaaagguuuauguaa

SEQ ID NO: 366382 - RNA, 19 nt, Artificial Sequence
  Description of Artificial Sequence: Synthetic oligonucleotide
  Antisense Strand to SEQ ID NO: 366381
uuacauaaaccuuuagagg

SEQ ID NO: 366383 - RNA, 19 nt, Artificial Sequence
  Description of Artificial Sequence: Synthetic oligonucleotide
  Sense Strand Starting at position 607 of SEQ ID NO: 315452
agugaaaugguccaucuuc

SEQ ID NO: 366384 - RNA, 19 nt, Artificial Sequence
  Description of Artificial Sequence: Synthetic oligonucleotide
  Antisense Strand to SEQ ID NO: 366383
gaagauggaccauuucacu

SEQ ID NO: 366385 - RNA, 19 nt, Artificial Sequence
  Description of Artificial Sequence: Synthetic oligonucleotide
  Sense Strand Starting at position 607 of SEQ ID NO: 315568
gcuccuuccggugacagau

SEQ ID NO: 366386 - RNA, 19 nt, Artificial Sequence
  Description of Artificial Sequence: Synthetic oligonucleotide
  Antisense Strand to SEQ ID NO: 366385
aucugucaccggaaggagc

SEQ ID NO: 366387 - RNA, 19 nt, Artificial Sequence
  Description of Artificial Sequence: Synthetic oligonucleotide
  Sense Strand Starting at position 607 of SEQ ID NO: 315745
uuacauagagucuguguaa

SEQ ID NO: 366388 - RNA, 19 nt, Artificial Sequence
  Description of Artificial Sequence: Synthetic oligonucleotide
  Antisense Strand to SEQ ID NO: 366387
uuacacagacucuauguaa

SEQ ID NO: 366389 - RNA, 19 nt, Artificial Sequence
  Description of Artificial Sequence: Synthetic oligonucleotide
  Sense Strand Starting at position 607 of SEQ ID NO: 315746
uacauagagucuguguaaa

SEQ ID NO: 366390 - RNA, 19 nt, Artificial Sequence
  Description of Artificial Sequence: Synthetic oligonucleotide
  Antisense Strand to SEQ ID NO: 366389
uuuacacagacucuaugua

SEQ ID NO: 366391 - RNA, 19 nt, Artificial Sequence
  Description of Artificial Sequence: Synthetic oligonucleotide
  Sense Strand Starting at position 607 of SEQ ID NO: 315765
auacuuugcucuccagaga

SEQ ID NO: 366392 - RNA, 19 nt, Artificial Sequence
  Description of Artificial Sequence: Synthetic oligonucleotide
  Antisense Strand to SEQ ID NO: 366391
ucucuggagagcaaaguau

SEQ ID NO: 366393 - RNA, 19 nt, Artificial Sequence
  Description of Artificial Sequence: Synthetic oligonucleotide
  Sense Strand Starting at position 607 of SEQ ID NO: 315768
cuuugcucuccagagagga

SEQ ID NO: 366394 - RNA, 19 nt, Artificial Sequence
  Description of Artificial Sequence: Synthetic oligonucleotide
  Antisense Strand to SEQ ID NO: 366393
uccucucuggagagcaaag

SEQ ID NO: 366395 - RNA, 19 nt, Artificial Sequence
  Description of Artificial Sequence: Synthetic oligonucleotide
  Sense Strand Starting at position 607 of SEQ ID NO: 315784
ggagccauaucauugcaaa

SEQ ID NO: 366396 - RNA, 19 nt, Artificial Sequence
  Description of Artificial Sequence: Synthetic oligonucleotide
  Antisense Strand to SEQ ID NO: 366395
uuugcaaugauauggcucc

SEQ ID NO: 366397 - RNA, 19 nt, Artificial Sequence
  Description of Artificial Sequence: Synthetic oligonucleotide
  Sense Strand Starting at position 607 of SEQ ID NO: 315795
auugcaaauugcuuuauga

SEQ ID NO: 366398 - RNA, 19 nt, Artificial Sequence
  Description of Artificial Sequence: Synthetic oligonucleotide
  Antisense Strand to SEQ ID NO: 366397
ucauaaagcaauuugcaau

SEQ ID NO: 366399 - RNA, 19 nt, Artificial Sequence
  Description of Artificial Sequence: Synthetic oligonucleotide
  Sense Strand Starting at position 607 of SEQ ID NO: 315950
ggacaacuguucuuacaau

SEQ ID NO: 366400 - RNA, 19 nt, Artificial Sequence
  Description of Artificial Sequence: Synthetic oligonucleotide
  Antisense Strand to SEQ ID NO: 366399
auuguaagaacaguugucc

SEQ ID NO: 366401 - RNA, 19 nt, Artificial Sequence
  Description of Artificial Sequence: Synthetic oligonucleotide
  Sense Strand Starting at position 607 of SEQ ID NO: 315993
aguaccuuguccuucugaa

SEQ ID NO: 366402 - RNA, 19 nt, Artificial Sequence
  Description of Artificial Sequence: Synthetic oligonucleotide
  Antisense Strand to SEQ ID NO: 366401
uucagaaggacaagguacu

SEQ ID NO: 366403 - RNA, 19 nt, Artificial Sequence
  Description of Artificial Sequence: Synthetic oligonucleotide
  Sense Strand Starting at position 607 of SEQ ID NO: 316078
agcaauaauugcucugaau

SEQ ID NO: 366404 - RNA, 19 nt, Artificial Sequence
  Description of Artificial Sequence: Synthetic oligonucleotide
  Antisense Strand to SEQ ID NO: 366403
auucagagcaauuauugcu

SEQ ID NO: 366405 - RNA, 19 nt, Artificial Sequence
  Description of Artificial Sequence: Synthetic oligonucleotide
  Sense Strand Starting at position 607 of SEQ ID NO: 316205
auuggaaguuuaguguaca

SEQ ID NO: 366406 - RNA, 19 nt, Artificial Sequence
  Description of Artificial Sequence: Synthetic oligonucleotide
  Antisense Strand to SEQ ID NO: 366405
uguacacuaaacuuccaau

SEQ ID NO: 366407 - RNA, 19 nt, Artificial Sequence
  Description of Artificial Sequence: Synthetic oligonucleotide
  Sense Strand Starting at position 607 of SEQ ID NO: 316509
auacuucuucuggagcaca

SEQ ID NO: 366408 - RNA, 19 nt, Artificial Sequence
  Description of Artificial Sequence: Synthetic oligonucleotide
  Antisense Strand to SEQ ID NO: 366407
ugugcuccagaagaaguau

SEQ ID NO: 366409 - RNA, 19 nt, Artificial Sequence
  Description of Artificial Sequence: Synthetic oligonucleotide
  Sense Strand Starting at position 607 of SEQ ID NO: 316546
gaugaacuugacugucuuu

SEQ ID NO: 366410 - RNA, 19 nt, Artificial Sequence
  Description of Artificial Sequence: Synthetic oligonucleotide
  Antisense Strand to SEQ ID NO: 366409
aaagacagucaaguucauc

SEQ ID NO: 366411 - RNA, 19 nt, Artificial Sequence
  Description of Artificial Sequence: Synthetic oligonucleotide
  Sense Strand Starting at position 607 of SEQ ID NO: 316565
ucuguaacccucugagaaa

SEQ ID NO: 366412 - RNA, 19 nt, Artificial Sequence
  Description of Artificial Sequence: Synthetic oligonucleotide
  Antisense Strand to SEQ ID NO: 366411
uuucucagaggguuacaga

SEQ ID NO: 366413 - RNA, 19 nt, Artificial Sequence
  Description of Artificial Sequence: Synthetic oligonucleotide
  Sense Strand Starting at position 607 of SEQ ID NO: 316751
guuggaugacuuugcaauc

SEQ ID NO: 366414 - RNA, 19 nt, Artificial Sequence
  Description of Artificial Sequence: Synthetic oligonucleotide
  Antisense Strand to SEQ ID NO: 366413
gauugcaaagucauccaac

SEQ ID NO: 366415 - RNA, 19 nt, Artificial Sequence
  Description of Artificial Sequence: Synthetic oligonucleotide
  Sense Strand Starting at position 607 of SEQ ID NO: 316752
uuggaugacuuugcaauca

SEQ ID NO: 366416 - RNA, 19 nt, Artificial Sequence
  Description of Artificial Sequence: Synthetic oligonucleotide
  Antisense Strand to SEQ ID NO: 366415
ugauugcaaagucauccaa

SEQ ID NO: 366417 - RNA, 19 nt, Artificial Sequence
  Description of Artificial Sequence: Synthetic oligonucleotide
  Sense Strand Starting at position 607 of SEQ ID NO: 317273
ccuuuaaaguacucagagu

SEQ ID NO: 366418 - RNA, 19 nt, Artificial Sequence
  Description of Artificial Sequence: Synthetic oligonucleotide
  Antisense Strand to SEQ ID NO: 366417
acucugaguacuuuaaagg

SEQ ID NO: 366419 - RNA, 19 nt, Artificial Sequence
  Description of Artificial Sequence: Synthetic oligonucleotide
  Sense Strand Starting at position 607 of SEQ ID NO: 317549
guugcugucaaaugauaga

SEQ ID NO: 366420 - RNA, 19 nt, Artificial Sequence
  Description of Artificial Sequence: Synthetic oligonucleotide
  Antisense Strand to SEQ ID NO: 366419
ucuaucauuugacagcaac

SEQ ID NO: 366421 - RNA, 19 nt, Artificial Sequence
  Description of Artificial Sequence: Synthetic oligonucleotide
  Sense Strand Starting at position 607 of SEQ ID NO: 317573
aucaacaagugguuguaaa

SEQ ID NO: 366422 - RNA, 19 nt, Artificial Sequence
  Description of Artificial Sequence: Synthetic oligonucleotide
  Antisense Strand to SEQ ID NO: 366421
uuuacaaccacuuguugau

SEQ ID NO: 366423 - RNA, 19 nt, Artificial Sequence
  Description of Artificial Sequence: Synthetic oligonucleotide
  Sense Strand Starting at position 607 of SEQ ID NO: 317640
agagcaaaucuguggagga

SEQ ID NO: 366424 - RNA, 19 nt, Artificial Sequence
  Description of Artificial Sequence: Synthetic oligonucleotide
  Antisense Strand to SEQ ID NO: 366423
uccuccacagauuugcucu

SEQ ID NO: 366425 - RNA, 19 nt, Artificial Sequence
  Description of Artificial Sequence: Synthetic oligonucleotide
  Sense Strand Starting at position 607 of SEQ ID NO: 317692
acuggauauccauaagcga

SEQ ID NO: 366426 - RNA, 19 nt, Artificial Sequence
  Description of Artificial Sequence: Synthetic oligonucleotide
  Antisense Strand to SEQ ID NO: 366425
ucgcuuauggauauccagu

SEQ ID NO: 366427 - RNA, 19 nt, Artificial Sequence
  Description of Artificial Sequence: Synthetic oligonucleotide
  Sense Strand Starting at position 607 of SEQ ID NO: 317861
ccuagaguuaagugaagac

SEQ ID NO: 366428 - RNA, 19 nt, Artificial Sequence
  Description of Artificial Sequence: Synthetic oligonucleotide
  Antisense Strand to SEQ ID NO: 366427
gucuucacuuaacucuagg

SEQ ID NO: 366429 - RNA, 19 nt, Artificial Sequence
  Description of Artificial Sequence: Synthetic oligonucleotide
  Sense Strand Starting at position 607 of SEQ ID NO: 317871
agugaagacuuauuagacu

SEQ ID NO: 366430 - RNA, 19 nt, Artificial Sequence
  Description of Artificial Sequence: Synthetic oligonucleotide
  Antisense Strand to SEQ ID NO: 366429
agucuaauaagucuucacu

SEQ ID NO: 366431 - RNA, 19 nt, Artificial Sequence
  Description of Artificial Sequence: Synthetic oligonucleotide
  Sense Strand Starting at position 607 of SEQ ID NO: 317963
uaugaaauaccacgugaag

SEQ ID NO: 366432 - RNA, 19 nt, Artificial Sequence
  Description of Artificial Sequence: Synthetic oligonucleotide
  Antisense Strand to SEQ ID NO: 366431
cuucacgugguauuucaua

SEQ ID NO: 366433 - RNA, 19 nt, Artificial Sequence
  Description of Artificial Sequence: Synthetic oligonucleotide
  Sense Strand Starting at position 607 of SEQ ID NO: 318524
uuccauaaugggugaauga

SEQ ID NO: 366434 - RNA, 19 nt, Artificial Sequence
  Description of Artificial Sequence: Synthetic oligonucleotide
  Antisense Strand to SEQ ID NO: 366433
ucauucacccauuauggaa

SEQ ID NO: 366435 - RNA, 19 nt, Artificial Sequence
  Description of Artificial Sequence: Synthetic oligonucleotide
  Sense Strand Starting at position 607 of SEQ ID NO: 318539
augauuaaacuguggcaua

SEQ ID NO: 366436 - RNA, 19 nt, Artificial Sequence
  Description of Artificial Sequence: Synthetic oligonucleotide
  Antisense Strand to SEQ ID NO: 366435
uaugccacaguuuaaucau

SEQ ID NO: 366437 - RNA, 19 nt, Artificial Sequence
  Description of Artificial Sequence: Synthetic oligonucleotide
  Sense Strand Starting at position 607 of SEQ ID NO: 318622
aauaaaucucgagaggcuu

SEQ ID NO: 366438 - RNA, 19 nt, Artificial Sequence
  Description of Artificial Sequence: Synthetic oligonucleotide
  Antisense Strand to SEQ ID NO: 366437
aagccucucgagauuuauu

SEQ ID NO: 366439 - RNA, 19 nt, Artificial Sequence
  Description of Artificial Sequence: Synthetic oligonucleotide
  Sense Strand Starting at position 607 of SEQ ID NO: 318763
auaauugucauggguuaga

SEQ ID NO: 366440 - RNA, 19 nt, Artificial Sequence
  Description of Artificial Sequence: Synthetic oligonucleotide
  Antisense Strand to SEQ ID NO: 366439
ucuaacccaugacaauuau

SEQ ID NO: 366441 - RNA, 19 nt, Artificial Sequence
  Description of Artificial Sequence: Synthetic oligonucleotide
  Sense Strand Starting at position 607 of SEQ ID NO: 318796
agaagauggcuauggcuau

SEQ ID NO: 366442 - RNA, 19 nt, Artificial Sequence
  Description of Artificial Sequence: Synthetic oligonucleotide
  Antisense Strand to SEQ ID NO: 366441
auagccauagccaucuucu

SEQ ID NO: 366443 - RNA, 19 nt, Artificial Sequence
  Description of Artificial Sequence: Synthetic oligonucleotide
  Sense Strand Starting at position 607 of SEQ ID NO: 318850
uugugucuugauuauggua

SEQ ID NO: 366444 - RNA, 19 nt, Artificial Sequence
  Description of Artificial Sequence: Synthetic oligonucleotide
  Antisense Strand to SEQ ID NO: 366443
uaccauaaucaagacacaa

SEQ ID NO: 366445 - RNA, 19 nt, Artificial Sequence
  Description of Artificial Sequence: Synthetic oligonucleotide
  Sense Strand Starting at position 607 of SEQ ID NO: 318859
gauuaugguaguggucaca

SEQ ID NO: 366446 - RNA, 19 nt, Artificial Sequence
  Description of Artificial Sequence: Synthetic oligonucleotide
  Antisense Strand to SEQ ID NO: 366445
ugugaccacuaccauaauc

SEQ ID NO: 366447 - RNA, 19 nt, Artificial Sequence
  Description of Artificial Sequence: Synthetic oligonucleotide
  Sense Strand Starting at position 607 of SEQ ID NO: 318862
uaugguaguggucacauca

SEQ ID NO: 366448 - RNA, 19 nt, Artificial Sequence
  Description of Artificial Sequence: Synthetic oligonucleotide
  Antisense Strand to SEQ ID NO: 366447
ugaugugaccacuaccaua

SEQ ID NO: 366449 - RNA, 19 nt, Artificial Sequence
  Description of Artificial Sequence: Synthetic oligonucleotide
  Sense Strand Starting at position 607 of SEQ ID NO: 319060
auggaaucucucuauugcu

SEQ ID NO: 366450 - RNA, 19 nt, Artificial Sequence
  Description of Artificial Sequence: Synthetic oligonucleotide
  Antisense Strand to SEQ ID NO: 366449
agcaauagagagauuccau

SEQ ID NO: 366451 - RNA, 19 nt, Artificial Sequence
  Description of Artificial Sequence: Synthetic oligonucleotide
  Sense Strand Starting at position 607 of SEQ ID NO: 319078
ugcuuauaccugcauauga

SEQ ID NO: 366452 - RNA, 19 nt, Artificial Sequence
  Description of Artificial Sequence: Synthetic oligonucleotide
  Antisense Strand to SEQ ID NO: 366451
ucauaugcagguauaagca

SEQ ID NO: 366453 - RNA, 19 nt, Artificial Sequence
  Description of Artificial Sequence: Synthetic oligonucleotide
  Sense Strand Starting at position 608 of SEQ ID NO: 315340
uguauagcauuuguuaacu

SEQ ID NO: 366454 - RNA, 19 nt, Artificial Sequence
  Description of Artificial Sequence: Synthetic oligonucleotide
  Antisense Strand to SEQ ID NO: 366453
aguuaacaaaugcuauaca

SEQ ID NO: 366455 - RNA, 19 nt, Artificial Sequence
  Description of Artificial Sequence: Synthetic oligonucleotide
  Sense Strand Starting at position 608 of SEQ ID NO: 315348
auuuguuaacuuggucuuu

SEQ ID NO: 366456 - RNA, 19 nt, Artificial Sequence
  Description of Artificial Sequence: Synthetic oligonucleotide
  Antisense Strand to SEQ ID NO: 366455
aaagaccaaguuaacaaau

SEQ ID NO: 366457 - RNA, 19 nt, Artificial Sequence
  Description of Artificial Sequence: Synthetic oligonucleotide
  Sense Strand Starting at position 608 of SEQ ID NO: 315593
ggcuauuucccaggcgaca

SEQ ID NO: 366458 - RNA, 19 nt, Artificial Sequence
  Description of Artificial Sequence: Synthetic oligonucleotide
  Antisense Strand to SEQ ID NO: 366457
ugucgccugggaaauagcc

SEQ ID NO: 366459 - RNA, 19 nt, Artificial Sequence
  Description of Artificial Sequence: Synthetic oligonucleotide
  Sense Strand Starting at position 608 of SEQ ID NO: 315697
agcaguacuagaugagaaa

SEQ ID NO: 366460 - RNA, 19 nt, Artificial Sequence
  Description of Artificial Sequence: Synthetic oligonucleotide
  Antisense Strand to SEQ ID NO: 366459
uuucucaucuaguacugcu

SEQ ID NO: 366461 - RNA, 19 nt, Artificial Sequence
  Description of Artificial Sequence: Synthetic oligonucleotide
  Sense Strand Starting at position 608 of SEQ ID NO: 315711
agaaacuauuucugauagu

SEQ ID NO: 366462 - RNA, 19 nt, Artificial Sequence
  Description of Artificial Sequence: Synthetic oligonucleotide
  Antisense Strand to SEQ ID NO: 366461
acuaucagaaauaguuucu

SEQ ID NO: 366463 - RNA, 19 nt, Artificial Sequence
  Description of Artificial Sequence: Synthetic oligonucleotide
  Sense Strand Starting at position 608 of SEQ ID NO: 315722
cugauaguauaaucccaga

SEQ ID NO: 366464 - RNA, 19 nt, Artificial Sequence
  Description of Artificial Sequence: Synthetic oligonucleotide
  Antisense Strand to SEQ ID NO: 366463
ucugggauuauacuaucag

SEQ ID NO: 366465 - RNA, 19 nt, Artificial Sequence
  Description of Artificial Sequence: Synthetic oligonucleotide
  Sense Strand Starting at position 608 of SEQ ID NO: 316075
agggaaucuuacgugcaua

SEQ ID NO: 366466 - RNA, 19 nt, Artificial Sequence
  Description of Artificial Sequence: Synthetic oligonucleotide
  Antisense Strand to SEQ ID NO: 366465
uaugcacguaagauucccu

SEQ ID NO: 366467 - RNA, 19 nt, Artificial Sequence
  Description of Artificial Sequence: Synthetic oligonucleotide
  Sense Strand Starting at position 608 of SEQ ID NO: 317219
ggaacacgccagugaauua

SEQ ID NO: 366468 - RNA, 19 nt, Artificial Sequence
  Description of Artificial Sequence: Synthetic oligonucleotide
  Antisense Strand to SEQ ID NO: 366467
uaauucacuggcguguucc

SEQ ID NO: 366469 - RNA, 19 nt, Artificial Sequence
  Description of Artificial Sequence: Synthetic oligonucleotide
  Sense Strand Starting at position 608 of SEQ ID NO: 317229
agugaauuaacacgugaau

SEQ ID NO: 366470 - RNA, 19 nt, Artificial Sequence
  Description of Artificial Sequence: Synthetic oligonucleotide
  Antisense Strand to SEQ ID NO: 366469
auucacguguuaauucacu

SEQ ID NO: 366471 - RNA, 19 nt, Artificial Sequence
  Description of Artificial Sequence: Synthetic oligonucleotide
  Sense Strand Starting at position 608 of SEQ ID NO: 317238
acacgugaauacucuguga

SEQ ID NO: 366472 - RNA, 19 nt, Artificial Sequence
  Description of Artificial Sequence: Synthetic oligonucleotide
  Antisense Strand to SEQ ID NO: 366471
ucacagaguauucacgugu

SEQ ID NO: 366473 - RNA, 19 nt, Artificial Sequence
  Description of Artificial Sequence: Synthetic oligonucleotide
  Sense Strand Starting at position 608 of SEQ ID NO: 317321
gcaaguuauuucuuaagca

SEQ ID NO: 366474 - RNA, 19 nt, Artificial Sequence
  Description of Artificial Sequence: Synthetic oligonucleotide
  Antisense Strand to SEQ ID NO: 366473
ugcuuaagaaauaacuugc

SEQ ID NO: 366475 - RNA, 19 nt, Artificial Sequence
  Description of Artificial Sequence: Synthetic oligonucleotide
  Sense Strand Starting at position 608 of SEQ ID NO: 317338
cagauaaguuugguuuccu

SEQ ID NO: 366476 - RNA, 19 nt, Artificial Sequence
  Description of Artificial Sequence: Synthetic oligonucleotide
  Antisense Strand to SEQ ID NO: 366475
aggaaaccaaacuuaucug

SEQ ID NO: 366477 - RNA, 19 nt, Artificial Sequence
  Description of Artificial Sequence: Synthetic oligonucleotide
  Sense Strand Starting at position 608 of SEQ ID NO: 317342
uaaguuugguuuccugaga

SEQ ID NO: 366478 - RNA, 19 nt, Artificial Sequence
  Description of Artificial Sequence: Synthetic oligonucleotide
  Antisense Strand to SEQ ID NO: 366477
ucucaggaaaccaaacuua

SEQ ID NO: 366479 - RNA, 19 nt, Artificial Sequence
  Description of Artificial Sequence: Synthetic oligonucleotide
  Sense Strand Starting at position 608 of SEQ ID NO: 317381
ggaaucaacucugcuaacu

SEQ ID NO: 366480 - RNA, 19 nt, Artificial Sequence
  Description of Artificial Sequence: Synthetic oligonucleotide
  Antisense Strand to SEQ ID NO: 366479
aguuagcagaguugauucc

SEQ ID NO: 366481 - RNA, 19 nt, Artificial Sequence
  Description of Artificial Sequence: Synthetic oligonucleotide
  Sense Strand Starting at position 608 of SEQ ID NO: 317646
ccacaugaggcaggaauau

SEQ ID NO: 366482 - RNA, 19 nt, Artificial Sequence
  Description of Artificial Sequence: Synthetic oligonucleotide
  Antisense Strand to SEQ ID NO: 366481
auauuccugccucaugugg

SEQ ID NO: 366483 - RNA, 19 nt, Artificial Sequence
  Description of Artificial Sequence: Synthetic oligonucleotide
  Sense Strand Starting at position 608 of SEQ ID NO: 317672
uuugaugucaggugcaaag

SEQ ID NO: 366484 - RNA, 19 nt, Artificial Sequence
  Description of Artificial Sequence: Synthetic oligonucleotide
  Antisense Strand to SEQ ID NO: 366483
cuuugcaccugacaucaaa

SEQ ID NO: 366485 - RNA, 19 nt, Artificial Sequence
  Description of Artificial Sequence: Synthetic oligonucleotide
  Sense Strand Starting at position 608 of SEQ ID NO: 317690
gcaauugcucaauaaaugu

SEQ ID NO: 366486 - RNA, 19 nt, Artificial Sequence
  Description of Artificial Sequence: Synthetic oligonucleotide
  Antisense Strand to SEQ ID NO: 366485
acauuuauugagcaauugc

SEQ ID NO: 366487 - RNA, 19 nt, Artificial Sequence
  Description of Artificial Sequence: Synthetic oligonucleotide
  Sense Strand Starting at position 608 of SEQ ID NO: 317735
gcugguaauuuacuuucca

SEQ ID NO: 366488 - RNA, 19 nt, Artificial Sequence
  Description of Artificial Sequence: Synthetic oligonucleotide
  Antisense Strand to SEQ ID NO: 366487
uggaaaguaaauuaccagc

SEQ ID NO: 366489 - RNA, 19 nt, Artificial Sequence
  Description of Artificial Sequence: Synthetic oligonucleotide
  Sense Strand Starting at position 608 of SEQ ID NO: 317835
uguaguucccaacagauac

SEQ ID NO: 366490 - RNA, 19 nt, Artificial Sequence
  Description of Artificial Sequence: Synthetic oligonucleotide
  Antisense Strand to SEQ ID NO: 366489
guaucuguugggaacuaca

SEQ ID NO: 366491 - RNA, 19 nt, Artificial Sequence
  Description of Artificial Sequence: Synthetic oligonucleotide
  Sense Strand Starting at position 608 of SEQ ID NO: 317901
auaccaucacuguauuagu

SEQ ID NO: 366492 - RNA, 19 nt, Artificial Sequence
  Description of Artificial Sequence: Synthetic oligonucleotide
  Antisense Strand to SEQ ID NO: 366491
acuaauacagugaugguau

SEQ ID NO: 366493 - RNA, 19 nt, Artificial Sequence
  Description of Artificial Sequence: Synthetic oligonucleotide
  Sense Strand Starting at position 608 of SEQ ID NO: 317911
uguauuagucaaugaagau

SEQ ID NO: 366494 - RNA, 19 nt, Artificial Sequence
  Description of Artificial Sequence: Synthetic oligonucleotide
  Antisense Strand to SEQ ID NO: 366493
aucuucauugacuaauaca

SEQ ID NO: 366495 - RNA, 19 nt, Artificial Sequence
  Description of Artificial Sequence: Synthetic oligonucleotide
  Sense Strand Starting at position 608 of SEQ ID NO: 318007
ccuuaaagggucugacuaa

SEQ ID NO: 366496 - RNA, 19 nt, Artificial Sequence
  Description of Artificial Sequence: Synthetic oligonucleotide
  Antisense Strand to SEQ ID NO: 366495
uuagucagacccuuuaagg

SEQ ID NO: 366497 - RNA, 19 nt, Artificial Sequence
  Description of Artificial Sequence: Synthetic oligonucleotide
  Sense Strand Starting at position 608 of SEQ ID NO: 318159
guugcugggccacaaagau

SEQ ID NO: 366498 - RNA, 19 nt, Artificial Sequence
  Description of Artificial Sequence: Synthetic oligonucleotide
  Antisense Strand to SEQ ID NO: 366497
aucuuuguggcccagcaac

SEQ ID NO: 366499 - RNA, 19 nt, Artificial Sequence
  Description of Artificial Sequence: Synthetic oligonucleotide
  Sense Strand Starting at position 608 of SEQ ID NO: 318231
ccuagaagagugggacuuu

SEQ ID NO: 366500 - RNA, 19 nt, Artificial Sequence
  Description of Artificial Sequence: Synthetic oligonucleotide
  Antisense Strand to SEQ ID NO: 366499
aaagucccacucuucuagg

SEQ ID NO: 366501 - RNA, 19 nt, Artificial Sequence
  Description of Artificial Sequence: Synthetic oligonucleotide
  Sense Strand Starting at position 608 of SEQ ID NO: 318241
ugggacuuugccugguaca

SEQ ID NO: 366502 - RNA, 19 nt, Artificial Sequence
  Description of Artificial Sequence: Synthetic oligonucleotide
  Antisense Strand to SEQ ID NO: 366501
uguaccaggcaaaguccca

SEQ ID NO: 366503 - RNA, 19 nt, Artificial Sequence
  Description of Artificial Sequence: Synthetic oligonucleotide
  Sense Strand Starting at position 608 of SEQ ID NO: 318242
gggacuuugccugguacau

SEQ ID NO: 366504 - RNA, 19 nt, Artificial Sequence
  Description of Artificial Sequence: Synthetic oligonucleotide
  Antisense Strand to SEQ ID NO: 366503
auguaccaggcaaaguccc

SEQ ID NO: 366505 - RNA, 19 nt, Artificial Sequence
  Description of Artificial Sequence: Synthetic oligonucleotide
  Sense Strand Starting at position 608 of SEQ ID NO: 318273
gaauuugauuagcaggaga

SEQ ID NO: 366506 - RNA, 19 nt, Artificial Sequence
  Description of Artificial Sequence: Synthetic oligonucleotide
  Antisense Strand to SEQ ID NO: 366505
ucuccugcuaaucaaauuc

SEQ ID NO: 366507 - RNA, 19 nt, Artificial Sequence
  Description of Artificial Sequence: Synthetic oligonucleotide
  Sense Strand Starting at position 608 of SEQ ID NO: 318338
acaaucuaucuacgugauu

SEQ ID NO: 366508 - RNA, 19 nt, Artificial Sequence
  Description of Artificial Sequence: Synthetic oligonucleotide
  Antisense Strand to SEQ ID NO: 366507
aaucacguagauagauugu

SEQ ID NO: 366509 - RNA, 19 nt, Artificial Sequence
  Description of Artificial Sequence: Synthetic oligonucleotide
  Sense Strand Starting at position 608 of SEQ ID NO: 318341
aucuaucuacgugauuaaa

SEQ ID NO: 366510 - RNA, 19 nt, Artificial Sequence
  Description of Artificial Sequence: Synthetic oligonucleotide
  Antisense Strand to SEQ ID NO: 366509
uuuaaucacguagauagau

SEQ ID NO: 366511 - RNA, 19 nt, Artificial Sequence
  Description of Artificial Sequence: Synthetic oligonucleotide
  Sense Strand Starting at position 608 of SEQ ID NO: 318432
gccuguguugcauucuauu

SEQ ID NO: 366512 - RNA, 19 nt, Artificial Sequence
  Description of Artificial Sequence: Synthetic oligonucleotide
  Antisense Strand to SEQ ID NO: 366511
aauagaaugcaacacaggc

SEQ ID NO: 366513 - RNA, 19 nt, Artificial Sequence
  Description of Artificial Sequence: Synthetic oligonucleotide
  Sense Strand Starting at position 608 of SEQ ID NO: 318477
accugcagauaagauuuaa

SEQ ID NO: 366514 - RNA, 19 nt, Artificial Sequence
  Description of Artificial Sequence: Synthetic oligonucleotide
  Antisense Strand to SEQ ID NO: 366513
uuaaaucuuaucugcaggu

SEQ ID NO: 366515 - RNA, 19 nt, Artificial Sequence
  Description of Artificial Sequence: Synthetic oligonucleotide
  Sense Strand Starting at position 608 of SEQ ID NO: 318572
auguucagugauugagaag

SEQ ID NO: 366516 - RNA, 19 nt, Artificial Sequence
  Description of Artificial Sequence: Synthetic oligonucleotide
  Antisense Strand to SEQ ID NO: 366515
cuucucaaucacugaacau

SEQ ID NO: 366517 - RNA, 19 nt, Artificial Sequence
  Description of Artificial Sequence: Synthetic oligonucleotide
  Sense Strand Starting at position 608 of SEQ ID NO: 318595
uuuagaaucagugaggguu

SEQ ID NO: 366518 - RNA, 19 nt, Artificial Sequence
  Description of Artificial Sequence: Synthetic oligonucleotide
  Antisense Strand to SEQ ID NO: 366517
aacccucacugauucuaaa

SEQ ID NO: 366519 - RNA, 19 nt, Artificial Sequence
  Description of Artificial Sequence: Synthetic oligonucleotide
  Sense Strand Starting at position 608 of SEQ ID NO: 318684
ugucuuuacucccuggaua

SEQ ID NO: 366520 - RNA, 19 nt, Artificial Sequence
  Description of Artificial Sequence: Synthetic oligonucleotide
  Antisense Strand to SEQ ID NO: 366519
uauccagggaguaaagaca

SEQ ID NO: 366521 - RNA, 19 nt, Artificial Sequence
  Description of Artificial Sequence: Synthetic oligonucleotide
  Sense Strand Starting at position 608 of SEQ ID NO: 318685
gucuuuacucccuggauaa

SEQ ID NO: 366522 - RNA, 19 nt, Artificial Sequence
  Description of Artificial Sequence: Synthetic oligonucleotide
  Antisense Strand to SEQ ID NO: 366521
uuauccagggaguaaagac

SEQ ID NO: 366523 - RNA, 19 nt, Artificial Sequence
  Description of Artificial Sequence: Synthetic oligonucleotide
  Sense Strand Starting at position 608 of SEQ ID NO: 318762
cggcucaucagagaugauc

SEQ ID NO: 366524 - RNA, 19 nt, Artificial Sequence
  Description of Artificial Sequence: Synthetic oligonucleotide
  Antisense Strand to SEQ ID NO: 366523
gaucaucucugaugagccg

SEQ ID NO: 366525 - RNA, 19 nt, Artificial Sequence
  Description of Artificial Sequence: Synthetic oligonucleotide
  Sense Strand Starting at position 608 of SEQ ID NO: 318894
uggauaaucauccgucuag

SEQ ID NO: 366526 - RNA, 19 nt, Artificial Sequence
  Description of Artificial Sequence: Synthetic oligonucleotide
  Antisense Strand to SEQ ID NO: 366525
cuagacggaugauuaucca

SEQ ID NO: 366527 - RNA, 19 nt, Artificial Sequence
  Description of Artificial Sequence: Synthetic oligonucleotide
  Sense Strand Starting at position 608 of SEQ ID NO: 318895
ggauaaucauccgucuaga

SEQ ID NO: 366528 - RNA, 19 nt, Artificial Sequence
  Description of Artificial Sequence: Synthetic oligonucleotide
  Antisense Strand to SEQ ID NO: 366527
ucuagacggaugauuaucc

SEQ ID NO: 366529 - RNA, 19 nt, Artificial Sequence
  Description of Artificial Sequence: Synthetic oligonucleotide
  Sense Strand Starting at position 608 of SEQ ID NO: 319090
agagcaauuucugaaagca

SEQ ID NO: 366530 - RNA, 19 nt, Artificial Sequence
  Description of Artificial Sequence: Synthetic oligonucleotide
  Antisense Strand to SEQ ID NO: 366529
ugcuuucagaaauugcucu

SEQ ID NO: 366531 - RNA, 19 nt, Artificial Sequence
  Description of Artificial Sequence: Synthetic oligonucleotide
  Sense Strand Starting at position 608 of SEQ ID NO: 319126
gggaguagguuauuagaau

SEQ ID NO: 366532 - RNA, 19 nt, Artificial Sequence
  Description of Artificial Sequence: Synthetic oligonucleotide
  Antisense Strand to SEQ ID NO: 366531
auucuaauaaccuacuccc

SEQ ID NO: 366533 - RNA, 19 nt, Artificial Sequence
  Description of Artificial Sequence: Synthetic oligonucleotide
  Sense Strand Starting at position 609 of SEQ ID NO: 315293
gcuaaaccugguuaccuua

SEQ ID NO: 366534 - RNA, 19 nt, Artificial Sequence
  Description of Artificial Sequence: Synthetic oligonucleotide
  Antisense Strand to SEQ ID NO: 366533
uaagguaaccagguuuagc

SEQ ID NO: 366535 - RNA, 19 nt, Artificial Sequence
  Description of Artificial Sequence: Synthetic oligonucleotide
  Sense Strand Starting at position 609 of SEQ ID NO: 315379
guauuagacucuuuaaagg

SEQ ID NO: 366536 - RNA, 19 nt, Artificial Sequence
  Description of Artificial Sequence: Synthetic oligonucleotide
  Antisense Strand to SEQ ID NO: 366535
ccuuuaaagagucuaauac

SEQ ID NO: 366537 - RNA, 19 nt, Artificial Sequence
  Description of Artificial Sequence: Synthetic oligonucleotide
  Sense Strand Starting at position 609 of SEQ ID NO: 315515
guagaugugagauauguaa

SEQ ID NO: 366538 - RNA, 19 nt, Artificial Sequence
  Description of Artificial Sequence: Synthetic oligonucleotide
  Antisense Strand to SEQ ID NO: 366537
uuacauaucucacaucuac

SEQ ID NO: 366539 - RNA, 19 nt, Artificial Sequence
  Description of Artificial Sequence: Synthetic oligonucleotide
  Sense Strand Starting at position 609 of SEQ ID NO: 315517
agaugugagauauguaaua

SEQ ID NO: 366540 - RNA, 19 nt, Artificial Sequence
  Description of Artificial Sequence: Synthetic oligonucleotide
  Antisense Strand to SEQ ID NO: 366539
uauuacauaucucacaucu

SEQ ID NO: 366541 - RNA, 19 nt, Artificial Sequence
  Description of Artificial Sequence: Synthetic oligonucleotide
  Sense Strand Starting at position 609 of SEQ ID NO: 315519
augugagauauguaauagu

SEQ ID NO: 366542 - RNA, 19 nt, Artificial Sequence
  Description of Artificial Sequence: Synthetic oligonucleotide
  Antisense Strand to SEQ ID NO: 366541
acuauuacauaucucacau

SEQ ID NO: 366543 - RNA, 19 nt, Artificial Sequence
  Description of Artificial Sequence: Synthetic oligonucleotide
  Sense Strand Starting at position 609 of SEQ ID NO: 315852
agucuauaugcacaaguua

SEQ ID NO: 366544 - RNA, 19 nt, Artificial Sequence
  Description of Artificial Sequence: Synthetic oligonucleotide
  Antisense Strand to SEQ ID NO: 366543
uaacuugugcauauagacu

SEQ ID NO: 366545 - RNA, 19 nt, Artificial Sequence
  Description of Artificial Sequence: Synthetic oligonucleotide
  Sense Strand Starting at position 609 of SEQ ID NO: 316017
ccauacuuugacuacguaa

SEQ ID NO: 366546 - RNA, 19 nt, Artificial Sequence
  Description of Artificial Sequence: Synthetic oligonucleotide
  Antisense Strand to SEQ ID NO: 366545
uuacguagucaaaguaugg

SEQ ID NO: 366547 - RNA, 19 nt, Artificial Sequence
  Description of Artificial Sequence: Synthetic oligonucleotide
  Sense Strand Starting at position 609 of SEQ ID NO: 316272
gaagcugaggcugaguaaa

SEQ ID NO: 366548 - RNA, 19 nt, Artificial Sequence
  Description of Artificial Sequence: Synthetic oligonucleotide
  Antisense Strand to SEQ ID NO: 366547
uuuacucagccucagcuuc

SEQ ID NO: 366549 - RNA, 19 nt, Artificial Sequence
  Description of Artificial Sequence: Synthetic oligonucleotide
  Sense Strand Starting at position 609 of SEQ ID NO: 316383
ggcucagaucccuauauug

SEQ ID NO: 366550 - RNA, 19 nt, Artificial Sequence
  Description of Artificial Sequence: Synthetic oligonucleotide
  Antisense Strand to SEQ ID NO: 366549
caauauagggaucugagcc

SEQ ID NO: 366551 - RNA, 19 nt, Artificial Sequence
  Description of Artificial Sequence: Synthetic oligonucleotide
  Sense Strand Starting at position 609 of SEQ ID NO: 316395
uauauugguggucaauaug

SEQ ID NO: 366552 - RNA, 19 nt, Artificial Sequence
  Description of Artificial Sequence: Synthetic oligonucleotide
  Antisense Strand to SEQ ID NO: 366551
cauauugaccaccaauaua

SEQ ID NO: 366553 - RNA, 19 nt, Artificial Sequence
  Description of Artificial Sequence: Synthetic oligonucleotide
  Sense Strand Starting at position 609 of SEQ ID NO: 316771
gccaaucaucucuaaggca

SEQ ID NO: 366554 - RNA, 19 nt, Artificial Sequence
  Description of Artificial Sequence: Synthetic oligonucleotide
  Antisense Strand to SEQ ID NO: 366553
ugccuuagagaugauuggc

SEQ ID NO: 366555 - RNA, 19 nt, Artificial Sequence
  Description of Artificial Sequence: Synthetic oligonucleotide
  Sense Strand Starting at position 609 of SEQ ID NO: 317291
gccacaaagcuguaauuga

SEQ ID NO: 366556 - RNA, 19 nt, Artificial Sequence
  Description of Artificial Sequence: Synthetic oligonucleotide
  Antisense Strand to SEQ ID NO: 366555
ucaauuacagcuuuguggc

SEQ ID NO: 366557 - RNA, 19 nt, Artificial Sequence
  Description of Artificial Sequence: Synthetic oligonucleotide
  Sense Strand Starting at position 609 of SEQ ID NO: 317384
gguaucuucgaacacggaa

SEQ ID NO: 366558 - RNA, 19 nt, Artificial Sequence
  Description of Artificial Sequence: Synthetic oligonucleotide
  Antisense Strand to SEQ ID NO: 366557
uuccguguucgaagauacc

SEQ ID NO: 366559 - RNA, 19 nt, Artificial Sequence
  Description of Artificial Sequence: Synthetic oligonucleotide
  Sense Strand Starting at position 609 of SEQ ID NO: 317516
cauauagguuugguaaauu

SEQ ID NO: 366560 - RNA, 19 nt, Artificial Sequence
  Description of Artificial Sequence: Synthetic oligonucleotide
  Antisense Strand to SEQ ID NO: 366559
aauuuaccaaaccuauaug

SEQ ID NO: 366561 - RNA, 19 nt, Artificial Sequence
  Description of Artificial Sequence: Synthetic oligonucleotide
  Sense Strand Starting at position 609 of SEQ ID NO: 317581
uuagccauuccugauuaga

SEQ ID NO: 366562 - RNA, 19 nt, Artificial Sequence
  Description of Artificial Sequence: Synthetic oligonucleotide
  Antisense Strand to SEQ ID NO: 366561
ucuaaucaggaauggcuaa

SEQ ID NO: 366563 - RNA, 19 nt, Artificial Sequence
  Description of Artificial Sequence: Synthetic oligonucleotide
  Sense Strand Starting at position 609 of SEQ ID NO: 317584
gccauuccugauuagaguc

SEQ ID NO: 366564 - RNA, 19 nt, Artificial Sequence
  Description of Artificial Sequence: Synthetic oligonucleotide
  Antisense Strand to SEQ ID NO: 366563
gacucuaaucaggaauggc

SEQ ID NO: 366565 - RNA, 19 nt, Artificial Sequence
  Description of Artificial Sequence: Synthetic oligonucleotide
  Sense Strand Starting at position 609 of SEQ ID NO: 317592
ugauuagagucccuuugga

SEQ ID NO: 366566 - RNA, 19 nt, Artificial Sequence
  Description of Artificial Sequence: Synthetic oligonucleotide
  Antisense Strand to SEQ ID NO: 366565
uccaaagggacucuaauca

SEQ ID NO: 366567 - RNA, 19 nt, Artificial Sequence
  Description of Artificial Sequence: Synthetic oligonucleotide
  Sense Strand Starting at position 609 of SEQ ID NO: 317683
uugugcaaaccugaacauu

SEQ ID NO: 366568 - RNA, 19 nt, Artificial Sequence
  Description of Artificial Sequence: Synthetic oligonucleotide
  Antisense Strand to SEQ ID NO: 366567
aauguucagguuugcacaa

SEQ ID NO: 366569 - RNA, 19 nt, Artificial Sequence
  Description of Artificial Sequence: Synthetic oligonucleotide
  Sense Strand Starting at position 609 of SEQ ID NO: 317722
uuugaaugucagugaacca

SEQ ID NO: 366570 - RNA, 19 nt, Artificial Sequence
  Description of Artificial Sequence: Synthetic oligonucleotide
  Antisense Strand to SEQ ID NO: 366569
ugguucacugacauucaaa

SEQ ID NO: 366571 - RNA, 19 nt, Artificial Sequence
  Description of Artificial Sequence: Synthetic oligonucleotide
  Sense Strand Starting at position 609 of SEQ ID NO: 317776
ugagaaugguaaucccuca

SEQ ID NO: 366572 - RNA, 19 nt, Artificial Sequence
  Description of Artificial Sequence: Synthetic oligonucleotide
  Antisense Strand to SEQ ID NO: 366571
ugagggauuaccauucuca

SEQ ID NO: 366573 - RNA, 19 nt, Artificial Sequence
  Description of Artificial Sequence: Synthetic oligonucleotide
  Sense Strand Starting at position 609 of SEQ ID NO: 317927
guaugugcauggaugugua

SEQ ID NO: 366574 - RNA, 19 nt, Artificial Sequence
  Description of Artificial Sequence: Synthetic oligonucleotide
  Antisense Strand to SEQ ID NO: 366573
uacacauccaugcacauac

SEQ ID NO: 366575 - RNA, 19 nt, Artificial Sequence
  Description of Artificial Sequence: Synthetic oligonucleotide
  Sense Strand Starting at position 609 of SEQ ID NO: 318100
gggucuaucacagaguugu

SEQ ID NO: 366576 - RNA, 19 nt, Artificial Sequence
  Description of Artificial Sequence: Synthetic oligonucleotide
  Antisense Strand to SEQ ID NO: 366575
acaacucugugauagaccc

SEQ ID NO: 366577 - RNA, 19 nt, Artificial Sequence
  Description of Artificial Sequence: Synthetic oligonucleotide
  Sense Strand Starting at position 609 of SEQ ID NO: 318108
cacagaguuguuuagugac

SEQ ID NO: 366578 - RNA, 19 nt, Artificial Sequence
  Description of Artificial Sequence: Synthetic oligonucleotide
  Antisense Strand to SEQ ID NO: 366577
gucacuaaacaacucugug

SEQ ID NO: 366579 - RNA, 19 nt, Artificial Sequence
  Description of Artificial Sequence: Synthetic oligonucleotide
  Sense Strand Starting at position 609 of SEQ ID NO: 318160
acuuaagucucuucuggau

SEQ ID NO: 366580 - RNA, 19 nt, Artificial Sequence
  Description of Artificial Sequence: Synthetic oligonucleotide
  Antisense Strand to SEQ ID NO: 366579
auccagaagagacuuaagu

SEQ ID NO: 366581 - RNA, 19 nt, Artificial Sequence
  Description of Artificial Sequence: Synthetic oligonucleotide
  Sense Strand Starting at position 609 of SEQ ID NO: 318273
auagcaaguccuuagaguc

SEQ ID NO: 366582 - RNA, 19 nt, Artificial Sequence
  Description of Artificial Sequence: Synthetic oligonucleotide
  Antisense Strand to SEQ ID NO: 366581
gacucuaaggacuugcuau

SEQ ID NO: 366583 - RNA, 19 nt, Artificial Sequence
  Description of Artificial Sequence: Synthetic oligonucleotide
  Sense Strand Starting at position 609 of SEQ ID NO: 318281
uccuuagagucccugagaa

SEQ ID NO: 366584 - RNA, 19 nt, Artificial Sequence
  Description of Artificial Sequence: Synthetic oligonucleotide
  Antisense Strand to SEQ ID NO: 366583
uucucagggacucuaagga

SEQ ID NO: 366585 - RNA, 19 nt, Artificial Sequence
  Description of Artificial Sequence: Synthetic oligonucleotide
  Sense Strand Starting at position 609 of SEQ ID NO: 318365
uuuggaaagucugucaaua

SEQ ID NO: 366586 - RNA, 19 nt, Artificial Sequence
  Description of Artificial Sequence: Synthetic oligonucleotide
  Antisense Strand to SEQ ID NO: 366585
uauugacagacuuuccaaa

SEQ ID NO: 366587 - RNA, 19 nt, Artificial Sequence
  Description of Artificial Sequence: Synthetic oligonucleotide
  Sense Strand Starting at position 609 of SEQ ID NO: 318596
ugccaaaggucuuugagga

SEQ ID NO: 366588 - RNA, 19 nt, Artificial Sequence
  Description of Artificial Sequence: Synthetic oligonucleotide
  Antisense Strand to SEQ ID NO: 366587
uccucaaagaccuuuggca

SEQ ID NO: 366589 - RNA, 19 nt, Artificial Sequence
  Description of Artificial Sequence: Synthetic oligonucleotide
  Sense Strand Starting at position 609 of SEQ ID NO: 318597
gccaaaggucuuugaggau

SEQ ID NO: 366590 - RNA, 19 nt, Artificial Sequence
  Description of Artificial Sequence: Synthetic oligonucleotide
  Antisense Strand to SEQ ID NO: 366589
auccucaaagaccuuuggc

SEQ ID NO: 366591 - RNA, 19 nt, Artificial Sequence
  Description of Artificial Sequence: Synthetic oligonucleotide
  Sense Strand Starting at position 609 of SEQ ID NO: 318685
ggugaaaccuguuugauau

SEQ ID NO: 366592 - RNA, 19 nt, Artificial Sequence
  Description of Artificial Sequence: Synthetic oligonucleotide
  Antisense Strand to SEQ ID NO: 366591
auaucaaacagguuucacc

SEQ ID NO: 366593 - RNA, 19 nt, Artificial Sequence
  Description of Artificial Sequence: Synthetic oligonucleotide
  Sense Strand Starting at position 609 of SEQ ID NO: 318698
ugauauuacuguccaggau

SEQ ID NO: 366594 - RNA, 19 nt, Artificial Sequence
  Description of Artificial Sequence: Synthetic oligonucleotide
  Antisense Strand to SEQ ID NO: 366593
auccuggacaguaauauca

SEQ ID NO: 366595 - RNA, 19 nt, Artificial Sequence
  Description of Artificial Sequence: Synthetic oligonucleotide
  Sense Strand Starting at position 609 of SEQ ID NO: 318878
cucccaucccuugagucau

SEQ ID NO: 366596 - RNA, 19 nt, Artificial Sequence
  Description of Artificial Sequence: Synthetic oligonucleotide
  Antisense Strand to SEQ ID NO: 366595
augacucaagggaugggag

SEQ ID NO: 366597 - RNA, 19 nt, Artificial Sequence
  Description of Artificial Sequence: Synthetic oligonucleotide
  Sense Strand Starting at position 609 of SEQ ID NO: 318884
ucccuugagucauugagga

SEQ ID NO: 366598 - RNA, 19 nt, Artificial Sequence
  Description of Artificial Sequence: Synthetic oligonucleotide
  Antisense Strand to SEQ ID NO: 366597
uccucaaugacucaaggga

SEQ ID NO: 366599 - RNA, 19 nt, Artificial Sequence
  Description of Artificial Sequence: Synthetic oligonucleotide
  Sense Strand Starting at position 609 of SEQ ID NO: 318886
ccuugagucauugaggagu

SEQ ID NO: 366600 - RNA, 19 nt, Artificial Sequence
  Description of Artificial Sequence: Synthetic oligonucleotide
  Antisense Strand to SEQ ID NO: 366599
acuccucaaugacucaagg

SEQ ID NO: 366601 - RNA, 19 nt, Artificial Sequence
  Description of Artificial Sequence: Synthetic oligonucleotide
  Sense Strand Starting at position 609 of SEQ ID NO: 318889
ugagucauugaggaguucu

SEQ ID NO: 366602 - RNA, 19 nt, Artificial Sequence
  Description of Artificial Sequence: Synthetic oligonucleotide
  Antisense Strand to SEQ ID NO: 366601
agaacuccucaaugacuca

SEQ ID NO: 366603 - RNA, 19 nt, Artificial Sequence
  Description of Artificial Sequence: Synthetic oligonucleotide
  Sense Strand Starting at position 609 of SEQ ID NO: 318901
gaguucuggcaacauuaua

SEQ ID NO: 366604 - RNA, 19 nt, Artificial Sequence
  Description of Artificial Sequence: Synthetic oligonucleotide
  Antisense Strand to SEQ ID NO: 366603
uauaauguugccagaacuc

SEQ ID NO: 366605 - RNA, 19 nt, Artificial Sequence
  Description of Artificial Sequence: Synthetic oligonucleotide
  Sense Strand Starting at position 609 of SEQ ID NO: 318940
cgaaguguagacuggagau

SEQ ID NO: 366606 - RNA, 19 nt, Artificial Sequence
  Description of Artificial Sequence: Synthetic oligonucleotide
  Antisense Strand to SEQ ID NO: 366605
aucuccagucuacacuucg

SEQ ID NO: 366607 - RNA, 19 nt, Artificial Sequence
  Description of Artificial Sequence: Synthetic oligonucleotide
  Sense Strand Starting at position 609 of SEQ ID NO: 318966
ccaguuuaauauucuugga

SEQ ID NO: 366608 - RNA, 19 nt, Artificial Sequence
  Description of Artificial Sequence: Synthetic oligonucleotide
  Antisense Strand to SEQ ID NO: 366607
uccaagaauauuaaacugg

SEQ ID NO: 366609 - RNA, 19 nt, Artificial Sequence
  Description of Artificial Sequence: Synthetic oligonucleotide
  Sense Strand Starting at position 609 of SEQ ID NO: 318968
aguuuaauauucuuggaga

SEQ ID NO: 366610 - RNA, 19 nt, Artificial Sequence
  Description of Artificial Sequence: Synthetic oligonucleotide
  Antisense Strand to SEQ ID NO: 366609
ucuccaagaauauuaaacu

SEQ ID NO: 366611 - RNA, 19 nt, Artificial Sequence
  Description of Artificial Sequence: Synthetic oligonucleotide
  Sense Strand Starting at position 609 of SEQ ID NO: 319078
ugcagugcuguuguguuua

SEQ ID NO: 366612 - RNA, 19 nt, Artificial Sequence
  Description of Artificial Sequence: Synthetic oligonucleotide
  Antisense Strand to SEQ ID NO: 366611
uaaacacaacagcacugca

SEQ ID NO: 366613 - RNA, 19 nt, Artificial Sequence
  Description of Artificial Sequence: Synthetic oligonucleotide
  Sense Strand Starting at position 610 of SEQ ID NO: 315294
uuuaaauggcaaugagaua

SEQ ID NO: 366614 - RNA, 19 nt, Artificial Sequence
  Description of Artificial Sequence: Synthetic oligonucleotide
  Antisense Strand to SEQ ID NO: 366613
uaucucauugccauuuaaa

SEQ ID NO: 366615 - RNA, 19 nt, Artificial Sequence
  Description of Artificial Sequence: Synthetic oligonucleotide
  Sense Strand Starting at position 610 of SEQ ID NO: 315426
ugaucaguaccucagguaa

SEQ ID NO: 366616 - RNA, 19 nt, Artificial Sequence
  Description of Artificial Sequence: Synthetic oligonucleotide
  Antisense Strand to SEQ ID NO: 366615
uuaccugagguacugauca

SEQ ID NO: 366617 - RNA, 19 nt, Artificial Sequence
  Description of Artificial Sequence: Synthetic oligonucleotide
  Sense Strand Starting at position 610 of SEQ ID NO: 315456
auaguaguauccgccauca

SEQ ID NO: 366618 - RNA, 19 nt, Artificial Sequence
  Description of Artificial Sequence: Synthetic oligonucleotide
  Antisense Strand to SEQ ID NO: 366617
ugauggcggauacuacuau

SEQ ID NO: 366619 - RNA, 19 nt, Artificial Sequence
  Description of Artificial Sequence: Synthetic oligonucleotide
  Sense Strand Starting at position 610 of SEQ ID NO: 315458
aguaguauccgccaucaug

SEQ ID NO: 366620 - RNA, 19 nt, Artificial Sequence
  Description of Artificial Sequence: Synthetic oligonucleotide
  Antisense Strand to SEQ ID NO: 366619
caugauggcggauacuacu

SEQ ID NO: 366621 - RNA, 19 nt, Artificial Sequence
  Description of Artificial Sequence: Synthetic oligonucleotide
  Sense Strand Starting at position 610 of SEQ ID NO: 315467
cgccaucaugcaugguaaa

SEQ ID NO: 366622 - RNA, 19 nt, Artificial Sequence
  Description of Artificial Sequence: Synthetic oligonucleotide
  Antisense Strand to SEQ ID NO: 366621
uuuaccaugcaugauggcg

SEQ ID NO: 366623 - RNA, 19 nt, Artificial Sequence
  Description of Artificial Sequence: Synthetic oligonucleotide
  Sense Strand Starting at position 610 of SEQ ID NO: 315586
agacauacguaauaacauu

SEQ ID NO: 366624 - RNA, 19 nt, Artificial Sequence
  Description of Artificial Sequence: Synthetic oligonucleotide
  Antisense Strand to SEQ ID NO: 366623
aauguuauuacguaugucu

SEQ ID NO: 366625 - RNA, 19 nt, Artificial Sequence
  Description of Artificial Sequence: Synthetic oligonucleotide
  Sense Strand Starting at position 610 of SEQ ID NO: 315708
cuaccaugauuagacuaga

SEQ ID NO: 366626 - RNA, 19 nt, Artificial Sequence
  Description of Artificial Sequence: Synthetic oligonucleotide
  Antisense Strand to SEQ ID NO: 366625
ucuagucuaaucaugguag

SEQ ID NO: 366627 - RNA, 19 nt, Artificial Sequence
  Description of Artificial Sequence: Synthetic oligonucleotide
  Sense Strand Starting at position 610 of SEQ ID NO: 315829
caaagauaagacuguguau

SEQ ID NO: 366628 - RNA, 19 nt, Artificial Sequence
  Description of Artificial Sequence: Synthetic oligonucleotide
  Antisense Strand to SEQ ID NO: 366627
auacacagucuuaucuuug

SEQ ID NO: 366629 - RNA, 19 nt, Artificial Sequence
  Description of Artificial Sequence: Synthetic oligonucleotide
  Sense Strand Starting at position 610 of SEQ ID NO: 315942
gaaggacuuuaggauaaau

SEQ ID NO: 366630 - RNA, 19 nt, Artificial Sequence
  Description of Artificial Sequence: Synthetic oligonucleotide
  Antisense Strand to SEQ ID NO: 366629
auuuauccuaaaguccuuc

SEQ ID NO: 366631 - RNA, 19 nt, Artificial Sequence
  Description of Artificial Sequence: Synthetic oligonucleotide
  Sense Strand Starting at position 610 of SEQ ID NO: 315957
aaaugaguuucucugaguc

SEQ ID NO: 366632 - RNA, 19 nt, Artificial Sequence
  Description of Artificial Sequence: Synthetic oligonucleotide
  Antisense Strand to SEQ ID NO: 366631
gacucagagaaacucauuu

SEQ ID NO: 366633 - RNA, 19 nt, Artificial Sequence
  Description of Artificial Sequence: Synthetic oligonucleotide
  Sense Strand Starting at position 610 of SEQ ID NO: 315961
gaguuucucugagucucaa

SEQ ID NO: 366634 - RNA, 19 nt, Artificial Sequence
  Description of Artificial Sequence: Synthetic oligonucleotide
  Antisense Strand to SEQ ID NO: 366633
uugagacucagagaaacuc

SEQ ID NO: 366635 - RNA, 19 nt, Artificial Sequence
  Description of Artificial Sequence: Synthetic oligonucleotide
  Sense Strand Starting at position 610 of SEQ ID NO: 316020
gaaagaagaugaggauauu

SEQ ID NO: 366636 - RNA, 19 nt, Artificial Sequence
  Description of Artificial Sequence: Synthetic oligonucleotide
  Antisense Strand to SEQ ID NO: 366635
aauauccucaucuucuuuc

SEQ ID NO: 366637 - RNA, 19 nt, Artificial Sequence
  Description of Artificial Sequence: Synthetic oligonucleotide
  Sense Strand Starting at position 610 of SEQ ID NO: 316026
agaugaggauauucguagu

SEQ ID NO: 366638 - RNA, 19 nt, Artificial Sequence
  Description of Artificial Sequence: Synthetic oligonucleotide
  Antisense Strand to SEQ ID NO: 366637
acuacgaauauccucaucu

SEQ ID NO: 366639 - RNA, 19 nt, Artificial Sequence
  Description of Artificial Sequence: Synthetic oligonucleotide
  Sense Strand Starting at position 610 of SEQ ID NO: 316170
gaccgugguccugaaagag

SEQ ID NO: 366640 - RNA, 19 nt, Artificial Sequence
  Description of Artificial Sequence: Synthetic oligonucleotide
  Antisense Strand to SEQ ID NO: 366639
cucuuucaggaccacgguc

SEQ ID NO: 366641 - RNA, 19 nt, Artificial Sequence
  Description of Artificial Sequence: Synthetic oligonucleotide
  Sense Strand Starting at position 610 of SEQ ID NO: 316253
ccuacuguagcuuaaauga

SEQ ID NO: 366642 - RNA, 19 nt, Artificial Sequence
  Description of Artificial Sequence: Synthetic oligonucleotide
  Antisense Strand to SEQ ID NO: 366641
ucauuuaagcuacaguagg

SEQ ID NO: 366643 - RNA, 19 nt, Artificial Sequence
  Description of Artificial Sequence: Synthetic oligonucleotide
  Sense Strand Starting at position 610 of SEQ ID NO: 316269
ugagcuaaauguccaauaa

SEQ ID NO: 366644 - RNA, 19 nt, Artificial Sequence
  Description of Artificial Sequence: Synthetic oligonucleotide
  Antisense Strand to SEQ ID NO: 366643
uuauuggacauuuagcuca

SEQ ID NO: 366645 - RNA, 19 nt, Artificial Sequence
  Description of Artificial Sequence: Synthetic oligonucleotide
  Sense Strand Starting at position 610 of SEQ ID NO: 316279
guccaauaauauucguacu

SEQ ID NO: 366646 - RNA, 19 nt, Artificial Sequence
  Description of Artificial Sequence: Synthetic oligonucleotide
  Antisense Strand to SEQ ID NO: 366645
aguacgaauauuauuggac

SEQ ID NO: 366647 - RNA, 19 nt, Artificial Sequence
  Description of Artificial Sequence: Synthetic oligonucleotide
  Sense Strand Starting at position 610 of SEQ ID NO: 316384
aggcucauuuaaggauuaa

SEQ ID NO: 366648 - RNA, 19 nt, Artificial Sequence
  Description of Artificial Sequence: Synthetic oligonucleotide
  Antisense Strand to SEQ ID NO: 366647
uuaauccuuaaaugagccu

SEQ ID NO: 366649 - RNA, 19 nt, Artificial Sequence
  Description of Artificial Sequence: Synthetic oligonucleotide
  Sense Strand Starting at position 610 of SEQ ID NO: 316530
uccgaaauauaucacggaa

SEQ ID NO: 366650 - RNA, 19 nt, Artificial Sequence
  Description of Artificial Sequence: Synthetic oligonucleotide
  Antisense Strand to SEQ ID NO: 366649
uuccgugauauauuucgga

SEQ ID NO: 366651 - RNA, 19 nt, Artificial Sequence
  Description of Artificial Sequence: Synthetic oligonucleotide
  Sense Strand Starting at position 610 of SEQ ID NO: 316899
aaguaauguguacgagaaa

SEQ ID NO: 366652 - RNA, 19 nt, Artificial Sequence
  Description of Artificial Sequence: Synthetic oligonucleotide
  Antisense Strand to SEQ ID NO: 366651
uuucucguacacauuacuu

SEQ ID NO: 366653 - RNA, 19 nt, Artificial Sequence
  Description of Artificial Sequence: Synthetic oligonucleotide
  Sense Strand Starting at position 610 of SEQ ID NO: 316951
aaguguaagacuuacgugu

SEQ ID NO: 366654 - RNA, 19 nt, Artificial Sequence
  Description of Artificial Sequence: Synthetic oligonucleotide
  Antisense Strand to SEQ ID NO: 366653
acacguaagucuuacacuu

SEQ ID NO: 366655 - RNA, 19 nt, Artificial Sequence
  Description of Artificial Sequence: Synthetic oligonucleotide
  Sense Strand Starting at position 610 of SEQ ID NO: 316958
agacuuacguguuccguca

SEQ ID NO: 366656 - RNA, 19 nt, Artificial Sequence
  Description of Artificial Sequence: Synthetic oligonucleotide
  Antisense Strand to SEQ ID NO: 366655
ugacggaacacguaagucu

SEQ ID NO: 366657 - RNA, 19 nt, Artificial Sequence
  Description of Artificial Sequence: Synthetic oligonucleotide
  Sense Strand Starting at position 610 of SEQ ID NO: 317631
gggugugguauuggagaaa

SEQ ID NO: 366658 - RNA, 19 nt, Artificial Sequence
  Description of Artificial Sequence: Synthetic oligonucleotide
  Antisense Strand to SEQ ID NO: 366657
uuucuccaauaccacaccc

SEQ ID NO: 366659 - RNA, 19 nt, Artificial Sequence
  Description of Artificial Sequence: Synthetic oligonucleotide
  Sense Strand Starting at position 610 of SEQ ID NO: 317632
ggugugguauuggagaaag

SEQ ID NO: 366660 - RNA, 19 nt, Artificial Sequence
  Description of Artificial Sequence: Synthetic oligonucleotide
  Antisense Strand to SEQ ID NO: 366659
cuuucuccaauaccacacc

SEQ ID NO: 366661 - RNA, 19 nt, Artificial Sequence
  Description of Artificial Sequence: Synthetic oligonucleotide
  Sense Strand Starting at position 610 of SEQ ID NO: 317678
ggccucaaccuagaacuua

SEQ ID NO: 366662 - RNA, 19 nt, Artificial Sequence
  Description of Artificial Sequence: Synthetic oligonucleotide
  Antisense Strand to SEQ ID NO: 366661
uaaguucuagguugaggcc

SEQ ID NO: 366663 - RNA, 19 nt, Artificial Sequence
  Description of Artificial Sequence: Synthetic oligonucleotide
  Sense Strand Starting at position 610 of SEQ ID NO: 317711
cccagugguguccaaggga

SEQ ID NO: 366664 - RNA, 19 nt, Artificial Sequence
  Description of Artificial Sequence: Synthetic oligonucleotide
  Antisense Strand to SEQ ID NO: 366663
ucccuuggacaccacuggg

SEQ ID NO: 366665 - RNA, 19 nt, Artificial Sequence
  Description of Artificial Sequence: Synthetic oligonucleotide
  Sense Strand Starting at position 610 of SEQ ID NO: 317983
uuucccauucuccgguaaa

SEQ ID NO: 366666 - RNA, 19 nt, Artificial Sequence
  Description of Artificial Sequence: Synthetic oligonucleotide
  Antisense Strand to SEQ ID NO: 366665
uuuaccggagaaugggaaa

SEQ ID NO: 366667 - RNA, 19 nt, Artificial Sequence
  Description of Artificial Sequence: Synthetic oligonucleotide
  Sense Strand Starting at position 610 of SEQ ID NO: 318338
gagcccgaacuuuauagaa

SEQ ID NO: 366668 - RNA, 19 nt, Artificial Sequence
  Description of Artificial Sequence: Synthetic oligonucleotide
  Antisense Strand to SEQ ID NO: 366667
uucuauaaaguucgggcuc

SEQ ID NO: 366669 - RNA, 19 nt, Artificial Sequence
  Description of Artificial Sequence: Synthetic oligonucleotide
  Sense Strand Starting at position 610 of SEQ ID NO: 318730
gaggauucccuuuguguug

SEQ ID NO: 366670 - RNA, 19 nt, Artificial Sequence
  Description of Artificial Sequence: Synthetic oligonucleotide
  Antisense Strand to SEQ ID NO: 366669
caacacaaagggaauccuc

SEQ ID NO: 366671 - RNA, 19 nt, Artificial Sequence
  Description of Artificial Sequence: Synthetic oligonucleotide
  Sense Strand Starting at position 610 of SEQ ID NO: 318731
aggauucccuuuguguuga

SEQ ID NO: 366672 - RNA, 19 nt, Artificial Sequence
  Description of Artificial Sequence: Synthetic oligonucleotide
  Antisense Strand to SEQ ID NO: 366671
ucaacacaaagggaauccu

SEQ ID NO: 366673 - RNA, 19 nt, Artificial Sequence
  Description of Artificial Sequence: Synthetic oligonucleotide
  Sense Strand Starting at position 610 of SEQ ID NO: 318733
gauucccuuuguguugaaa

SEQ ID NO: 366674 - RNA, 19 nt, Artificial Sequence
  Description of Artificial Sequence: Synthetic oligonucleotide
  Antisense Strand to SEQ ID NO: 366673
uuucaacacaaagggaauc

SEQ ID NO: 366675 - RNA, 19 nt, Artificial Sequence
  Description of Artificial Sequence: Synthetic oligonucleotide
  Sense Strand Starting at position 610 of SEQ ID NO: 318736
ucccuuuguguugaaauuc

SEQ ID NO: 366676 - RNA, 19 nt, Artificial Sequence
  Description of Artificial Sequence: Synthetic oligonucleotide
  Antisense Strand to SEQ ID NO: 366675
gaauuucaacacaaaggga

SEQ ID NO: 366677 - RNA, 19 nt, Artificial Sequence
  Description of Artificial Sequence: Synthetic oligonucleotide
  Sense Strand Starting at position 610 of SEQ ID NO: 318742
uguguugaaauucgagaag

SEQ ID NO: 366678 - RNA, 19 nt, Artificial Sequence
  Description of Artificial Sequence: Synthetic oligonucleotide
  Antisense Strand to SEQ ID NO: 366677
cuucucgaauuucaacaca

SEQ ID NO: 366679 - RNA, 19 nt, Artificial Sequence
  Description of Artificial Sequence: Synthetic oligonucleotide
  Sense Strand Starting at position 610 of SEQ ID NO: 319018
ggcuauguggcucagucuu

SEQ ID NO: 366680 - RNA, 19 nt, Artificial Sequence
  Description of Artificial Sequence: Synthetic oligonucleotide
  Antisense Strand to SEQ ID NO: 366679
aagacugagccacauagcc

SEQ ID NO: 366681 - RNA, 19 nt, Artificial Sequence
  Description of Artificial Sequence: Synthetic oligonucleotide
  Sense Strand Starting at position 610 of SEQ ID NO: 319085
gcgcaucgugucccagaaa

SEQ ID NO: 366682 - RNA, 19 nt, Artificial Sequence
  Description of Artificial Sequence: Synthetic oligonucleotide
  Antisense Strand to SEQ ID NO: 366681
uuucugggacacgaugcgc

SEQ ID NO: 366683 - RNA, 19 nt, Artificial Sequence
  Description of Artificial Sequence: Synthetic oligonucleotide
  Sense Strand Starting at position 610 of SEQ ID NO: 319148
cgugaauuggcucgaaguu

SEQ ID NO: 366684 - RNA, 19 nt, Artificial Sequence
  Description of Artificial Sequence: Synthetic oligonucleotide
  Antisense Strand to SEQ ID NO: 366683
aacuucgagccaauucacg

SEQ ID NO: 366685 - RNA, 19 nt, Artificial Sequence
  Description of Artificial Sequence: Synthetic oligonucleotide
  Sense Strand Starting at position 610 of SEQ ID NO: 319149
gugaauuggcucgaaguuc

SEQ ID NO: 366686 - RNA, 19 nt, Artificial Sequence
  Description of Artificial Sequence: Synthetic oligonucleotide
  Antisense Strand to SEQ ID NO: 366685
gaacuucgagccaauucac

SEQ ID NO: 366687 - RNA, 19 nt, Artificial Sequence
  Description of Artificial Sequence: Synthetic oligonucleotide
  Sense Strand Starting at position 610 of SEQ ID NO: 319160
cgaaguucaggaugaaaug

SEQ ID NO: 366688 - RNA, 19 nt, Artificial Sequence
  Description of Artificial Sequence: Synthetic oligonucleotide
  Antisense Strand to SEQ ID NO: 366687
cauuucauccugaacuucg

SEQ ID NO: 366689 - RNA, 19 nt, Artificial Sequence
  Description of Artificial Sequence: Synthetic oligonucleotide
  Sense Strand Starting at position 610 of SEQ ID NO: 319183
aguuguaagcuaugacugu

SEQ ID NO: 366690 - RNA, 19 nt, Artificial Sequence
  Description of Artificial Sequence: Synthetic oligonucleotide
  Antisense Strand to SEQ ID NO: 366689
acagucauagcuuacaacu

SEQ ID NO: 366691 - RNA, 19 nt, Artificial Sequence
  Description of Artificial Sequence: Synthetic oligonucleotide
  Sense Strand Starting at position 610 of SEQ ID NO: 319187
guaagcuaugacugugguu

SEQ ID NO: 366692 - RNA, 19 nt, Artificial Sequence
  Description of Artificial Sequence: Synthetic oligonucleotide
  Antisense Strand to SEQ ID NO: 366691
aaccacagucauagcuuac

SEQ ID NO: 366693 - RNA, 19 nt, Artificial Sequence
  Description of Artificial Sequence: Synthetic oligonucleotide
  Sense Strand Starting at position 611 of SEQ ID NO: 315251
accuuaagucagugaacuc

SEQ ID NO: 366694 - RNA, 19 nt, Artificial Sequence
  Description of Artificial Sequence: Synthetic oligonucleotide
  Antisense Strand to SEQ ID NO: 366693
gaguucacugacuuaaggu

SEQ ID NO: 366695 - RNA, 19 nt, Artificial Sequence
  Description of Artificial Sequence: Synthetic oligonucleotide
  Sense Strand Starting at position 611 of SEQ ID NO: 315349
cauugauuggcugacuacu

SEQ ID NO: 366696 - RNA, 19 nt, Artificial Sequence
  Description of Artificial Sequence: Synthetic oligonucleotide
  Antisense Strand to SEQ ID NO: 366695
aguagucagccaaucaaug

SEQ ID NO: 366697 - RNA, 19 nt, Artificial Sequence
  Description of Artificial Sequence: Synthetic oligonucleotide
  Sense Strand Starting at position 611 of SEQ ID NO: 315368
gguugauugaucuaggugu

SEQ ID NO: 366698 - RNA, 19 nt, Artificial Sequence
  Description of Artificial Sequence: Synthetic oligonucleotide
  Antisense Strand to SEQ ID NO: 366697
acaccuagaucaaucaacc

SEQ ID NO: 366699 - RNA, 19 nt, Artificial Sequence
  Description of Artificial Sequence: Synthetic oligonucleotide
  Sense Strand Starting at position 611 of SEQ ID NO: 315626
ucaauuacuuggguucuca

SEQ ID NO: 366700 - RNA, 19 nt, Artificial Sequence
  Description of Artificial Sequence: Synthetic oligonucleotide
  Antisense Strand to SEQ ID NO: 366699
ugagaacccaaguaauuga

SEQ ID NO: 366701 - RNA, 19 nt, Artificial Sequence
  Description of Artificial Sequence: Synthetic oligonucleotide
  Sense Strand Starting at position 611 of SEQ ID NO: 315696
gaggaaacauuugagccaa

SEQ ID NO: 366702 - RNA, 19 nt, Artificial Sequence
  Description of Artificial Sequence: Synthetic oligonucleotide
  Antisense Strand to SEQ ID NO: 366701
uuggcucaaauguuuccuc

SEQ ID NO: 366703 - RNA, 19 nt, Artificial Sequence
  Description of Artificial Sequence: Synthetic oligonucleotide
  Sense Strand Starting at position 611 of SEQ ID NO: 315717
gguacaaacuaucuuggaa

SEQ ID NO: 366704 - RNA, 19 nt, Artificial Sequence
  Description of Artificial Sequence: Synthetic oligonucleotide
  Antisense Strand to SEQ ID NO: 366703
uuccaagauaguuuguacc

SEQ ID NO: 366705 - RNA, 19 nt, Artificial Sequence
  Description of Artificial Sequence: Synthetic oligonucleotide
  Sense Strand Starting at position 611 of SEQ ID NO: 316057
cuuaauacaucuguauagu

SEQ ID NO: 366706 - RNA, 19 nt, Artificial Sequence
  Description of Artificial Sequence: Synthetic oligonucleotide
  Antisense Strand to SEQ ID NO: 366705
acuauacagauguauuaag

SEQ ID NO: 366707 - RNA, 19 nt, Artificial Sequence
  Description of Artificial Sequence: Synthetic oligonucleotide
  Sense Strand Starting at position 611 of SEQ ID NO: 316058
uuaauacaucuguauaguc

SEQ ID NO: 366708 - RNA, 19 nt, Artificial Sequence
  Description of Artificial Sequence: Synthetic oligonucleotide
  Antisense Strand to SEQ ID NO: 366707
gacuauacagauguauuaa

SEQ ID NO: 366709 - RNA, 19 nt, Artificial Sequence
  Description of Artificial Sequence: Synthetic oligonucleotide
  Sense Strand Starting at position 611 of SEQ ID NO: 316063
acaucuguauagucugaaa

SEQ ID NO: 366710 - RNA, 19 nt, Artificial Sequence
  Description of Artificial Sequence: Synthetic oligonucleotide
  Antisense Strand to SEQ ID NO: 366709
uuucagacuauacagaugu

SEQ ID NO: 366711 - RNA, 19 nt, Artificial Sequence
  Description of Artificial Sequence: Synthetic oligonucleotide
  Sense Strand Starting at position 611 of SEQ ID NO: 316420
uuuauagagucaucuagau

SEQ ID NO: 366712 - RNA, 19 nt, Artificial Sequence
  Description of Artificial Sequence: Synthetic oligonucleotide
  Antisense Strand to SEQ ID NO: 366711
aucuagaugacucuauaaa

SEQ ID NO: 366713 - RNA, 19 nt, Artificial Sequence
  Description of Artificial Sequence: Synthetic oligonucleotide
  Sense Strand Starting at position 611 of SEQ ID NO: 316424
uagagucaucuagaugcuu

SEQ ID NO: 366714 - RNA, 19 nt, Artificial Sequence
  Description of Artificial Sequence: Synthetic oligonucleotide
  Antisense Strand to SEQ ID NO: 366713
aagcaucuagaugacucua

SEQ ID NO: 366715 - RNA, 19 nt, Artificial Sequence
  Description of Artificial Sequence: Synthetic oligonucleotide
  Sense Strand Starting at position 611 of SEQ ID NO: 316458
cucaguuugcgugucuaga

SEQ ID NO: 366716 - RNA, 19 nt, Artificial Sequence
  Description of Artificial Sequence: Synthetic oligonucleotide
  Antisense Strand to SEQ ID NO: 366715
ucuagacacgcaaacugag

SEQ ID NO: 366717 - RNA, 19 nt, Artificial Sequence
  Description of Artificial Sequence: Synthetic oligonucleotide
  Sense Strand Starting at position 611 of SEQ ID NO: 316459
ucaguuugcgugucuagac

SEQ ID NO: 366718 - RNA, 19 nt, Artificial Sequence
  Description of Artificial Sequence: Synthetic oligonucleotide
  Antisense Strand to SEQ ID NO: 366717
gucuagacacgcaaacuga

SEQ ID NO: 366719 - RNA, 19 nt, Artificial Sequence
  Description of Artificial Sequence: Synthetic oligonucleotide
  Sense Strand Starting at position 611 of SEQ ID NO: 316602
gugaauuaacaucacgcaa

SEQ ID NO: 366720 - RNA, 19 nt, Artificial Sequence
  Description of Artificial Sequence: Synthetic oligonucleotide
  Antisense Strand to SEQ ID NO: 366719
uugcgugauguuaauucac

SEQ ID NO: 366721 - RNA, 19 nt, Artificial Sequence
  Description of Artificial Sequence: Synthetic oligonucleotide
  Sense Strand Starting at position 611 of SEQ ID NO: 316922
aauacaguucuuuggguga

SEQ ID NO: 366722 - RNA, 19 nt, Artificial Sequence
  Description of Artificial Sequence: Synthetic oligonucleotide
  Antisense Strand to SEQ ID NO: 366721
ucacccaaagaacuguauu

SEQ ID NO: 366723 - RNA, 19 nt, Artificial Sequence
  Description of Artificial Sequence: Synthetic oligonucleotide
  Sense Strand Starting at position 611 of SEQ ID NO: 317288
accugaaauugagccauaa

SEQ ID NO: 366724 - RNA, 19 nt, Artificial Sequence
  Description of Artificial Sequence: Synthetic oligonucleotide
  Antisense Strand to SEQ ID NO: 366723
uuauggcucaauuucaggu

SEQ ID NO: 366725 - RNA, 19 nt, Artificial Sequence
  Description of Artificial Sequence: Synthetic oligonucleotide
  Sense Strand Starting at position 611 of SEQ ID NO: 317333
ggaacuaugauccgugaaa

SEQ ID NO: 366726 - RNA, 19 nt, Artificial Sequence
  Description of Artificial Sequence: Synthetic oligonucleotide
  Antisense Strand to SEQ ID NO: 366725
uuucacggaucauaguucc

SEQ ID NO: 366727 - RNA, 19 nt, Artificial Sequence
  Description of Artificial Sequence: Synthetic oligonucleotide
  Sense Strand Starting at position 611 of SEQ ID NO: 317334
gaacuaugauccgugaaau

SEQ ID NO: 366728 - RNA, 19 nt, Artificial Sequence
  Description of Artificial Sequence: Synthetic oligonucleotide
  Antisense Strand to SEQ ID NO: 366727
auuucacggaucauaguuc

SEQ ID NO: 366729 - RNA, 19 nt, Artificial Sequence
  Description of Artificial Sequence: Synthetic oligonucleotide
  Sense Strand Starting at position 611 of SEQ ID NO: 317335
aacuaugauccgugaaaua

SEQ ID NO: 366730 - RNA, 19 nt, Artificial Sequence
  Description of Artificial Sequence: Synthetic oligonucleotide
  Antisense Strand to SEQ ID NO: 366729
uauuucacggaucauaguu

SEQ ID NO: 366731 - RNA, 19 nt, Artificial Sequence
  Description of Artificial Sequence: Synthetic oligonucleotide
  Sense Strand Starting at position 611 of SEQ ID NO: 317345
cgugaaauauucuuuauag

SEQ ID NO: 366732 - RNA, 19 nt, Artificial Sequence
  Description of Artificial Sequence: Synthetic oligonucleotide
  Antisense Strand to SEQ ID NO: 366731
cuauaaagaauauuucacg

SEQ ID NO: 366733 - RNA, 19 nt, Artificial Sequence
  Description of Artificial Sequence: Synthetic oligonucleotide
  Sense Strand Starting at position 611 of SEQ ID NO: 317553
cugaucuuguuacuacaca

SEQ ID NO: 366734 - RNA, 19 nt, Artificial Sequence
  Description of Artificial Sequence: Synthetic oligonucleotide
  Antisense Strand to SEQ ID NO: 366733
uguguaguaacaagaucag

SEQ ID NO: 366735 - RNA, 19 nt, Artificial Sequence
  Description of Artificial Sequence: Synthetic oligonucleotide
  Sense Strand Starting at position 611 of SEQ ID NO: 317608
gacagcuugcaggaucuau

SEQ ID NO: 366736 - RNA, 19 nt, Artificial Sequence
  Description of Artificial Sequence: Synthetic oligonucleotide
  Antisense Strand to SEQ ID NO: 366735
auagauccugcaagcuguc

SEQ ID NO: 366737 - RNA, 19 nt, Artificial Sequence
  Description of Artificial Sequence: Synthetic oligonucleotide
  Sense Strand Starting at position 611 of SEQ ID NO: 317698
gcaacugaauuauuacagu

SEQ ID NO: 366738 - RNA, 19 nt, Artificial Sequence
  Description of Artificial Sequence: Synthetic oligonucleotide
  Antisense Strand to SEQ ID NO: 366737
acuguaauaauucaguugc

SEQ ID NO: 366739 - RNA, 19 nt, Artificial Sequence
  Description of Artificial Sequence: Synthetic oligonucleotide
  Sense Strand Starting at position 611 of SEQ ID NO: 317727
uguauuguaugggcaauuu

SEQ ID NO: 366740 - RNA, 19 nt, Artificial Sequence
  Description of Artificial Sequence: Synthetic oligonucleotide
  Antisense Strand to SEQ ID NO: 366739
aaauugcccauacaauaca

SEQ ID NO: 366741 - RNA, 19 nt, Artificial Sequence
  Description of Artificial Sequence: Synthetic oligonucleotide
  Sense Strand Starting at position 611 of SEQ ID NO: 318059
uuugaugguggucaaauca

SEQ ID NO: 366742 - RNA, 19 nt, Artificial Sequence
  Description of Artificial Sequence: Synthetic oligonucleotide
  Antisense Strand to SEQ ID NO: 366741
ugauuugaccaccaucaaa

SEQ ID NO: 366743 - RNA, 19 nt, Artificial Sequence
  Description of Artificial Sequence: Synthetic oligonucleotide
  Sense Strand Starting at position 611 of SEQ ID NO: 318084
gucucugaacccuaguuua

SEQ ID NO: 366744 - RNA, 19 nt, Artificial Sequence
  Description of Artificial Sequence: Synthetic oligonucleotide
  Antisense Strand to SEQ ID NO: 366743
uaaacuaggguucagagac

SEQ ID NO: 366745 - RNA, 19 nt, Artificial Sequence
  Description of Artificial Sequence: Synthetic oligonucleotide
  Sense Strand Starting at position 611 of SEQ ID NO: 318110
uuuaaauggugggugagau

SEQ ID NO: 366746 - RNA, 19 nt, Artificial Sequence
  Description of Artificial Sequence: Synthetic oligonucleotide
  Antisense Strand to SEQ ID NO: 366745
aucucacccaccauuuaaa

SEQ ID NO: 366747 - RNA, 19 nt, Artificial Sequence
  Description of Artificial Sequence: Synthetic oligonucleotide
  Sense Strand Starting at position 611 of SEQ ID NO: 318111
uuaaauggugggugagaua

SEQ ID NO: 366748 - RNA, 19 nt, Artificial Sequence
  Description of Artificial Sequence: Synthetic oligonucleotide
  Antisense Strand to SEQ ID NO: 366747
uaucucacccaccauuuaa

SEQ ID NO: 366749 - RNA, 19 nt, Artificial Sequence
  Description of Artificial Sequence: Synthetic oligonucleotide
  Sense Strand Starting at position 611 of SEQ ID NO: 318122
gugagauaaucuccaagau

SEQ ID NO: 366750 - RNA, 19 nt, Artificial Sequence
  Description of Artificial Sequence: Synthetic oligonucleotide
  Antisense Strand to SEQ ID NO: 366749
aucuuggagauuaucucac

SEQ ID NO: 366751 - RNA, 19 nt, Artificial Sequence
  Description of Artificial Sequence: Synthetic oligonucleotide
  Sense Strand Starting at position 611 of SEQ ID NO: 318342
aggcauggccaacgaauaa

SEQ ID NO: 366752 - RNA, 19 nt, Artificial Sequence
  Description of Artificial Sequence: Synthetic oligonucleotide
  Antisense Strand to SEQ ID NO: 366751
uuauucguuggccaugccu

SEQ ID NO: 366753 - RNA, 19 nt, Artificial Sequence
  Description of Artificial Sequence: Synthetic oligonucleotide
  Sense Strand Starting at position 611 of SEQ ID NO: 318377
gcaguaauuggacaguuac

SEQ ID NO: 366754 - RNA, 19 nt, Artificial Sequence
  Description of Artificial Sequence: Synthetic oligonucleotide
  Antisense Strand to SEQ ID NO: 366753
guaacuguccaauuacugc

SEQ ID NO: 366755 - RNA, 19 nt, Artificial Sequence
  Description of Artificial Sequence: Synthetic oligonucleotide
  Sense Strand Starting at position 611 of SEQ ID NO: 318416
ucuuaauaguuauucggaa

SEQ ID NO: 366756 - RNA, 19 nt, Artificial Sequence
  Description of Artificial Sequence: Synthetic oligonucleotide
  Antisense Strand to SEQ ID NO: 366755
uuccgaauaacuauuaaga

SEQ ID NO: 366757 - RNA, 19 nt, Artificial Sequence
  Description of Artificial Sequence: Synthetic oligonucleotide
  Sense Strand Starting at position 611 of SEQ ID NO: 318417
cuuaauaguuauucggaau

SEQ ID NO: 366758 - RNA, 19 nt, Artificial Sequence
  Description of Artificial Sequence: Synthetic oligonucleotide
  Antisense Strand to SEQ ID NO: 366757
auuccgaauaacuauuaag

SEQ ID NO: 366759 - RNA, 19 nt, Artificial Sequence
  Description of Artificial Sequence: Synthetic oligonucleotide
  Sense Strand Starting at position 611 of SEQ ID NO: 318418
uuaauaguuauucggaaug

SEQ ID NO: 366760 - RNA, 19 nt, Artificial Sequence
  Description of Artificial Sequence: Synthetic oligonucleotide
  Antisense Strand to SEQ ID NO: 366759
cauuccgaauaacuauuaa

SEQ ID NO: 366761 - RNA, 19 nt, Artificial Sequence
  Description of Artificial Sequence: Synthetic oligonucleotide
  Sense Strand Starting at position 611 of SEQ ID NO: 318758
gaaucaggaccagguguua

SEQ ID NO: 366762 - RNA, 19 nt, Artificial Sequence
  Description of Artificial Sequence: Synthetic oligonucleotide
  Antisense Strand to SEQ ID NO: 366761
uaacaccugguccugauuc

SEQ ID NO: 366763 - RNA, 19 nt, Artificial Sequence
  Description of Artificial Sequence: Synthetic oligonucleotide
  Sense Strand Starting at position 611 of SEQ ID NO: 318807
auguuaagaaaggguugau

SEQ ID NO: 366764 - RNA, 19 nt, Artificial Sequence
  Description of Artificial Sequence: Synthetic oligonucleotide
  Antisense Strand to SEQ ID NO: 366763
aucaacccuuucuuaacau

SEQ ID NO: 366765 - RNA, 19 nt, Artificial Sequence
  Description of Artificial Sequence: Synthetic oligonucleotide
  Sense Strand Starting at position 611 of SEQ ID NO: 318835
uguggaggucuugauugau

SEQ ID NO: 366766 - RNA, 19 nt, Artificial Sequence
  Description of Artificial Sequence: Synthetic oligonucleotide
  Antisense Strand to SEQ ID NO: 366765
aucaaucaagaccuccaca

SEQ ID NO: 366767 - RNA, 19 nt, Artificial Sequence
  Description of Artificial Sequence: Synthetic oligonucleotide
  Sense Strand Starting at position 611 of SEQ ID NO: 318838
ggaggucuugauugauuaa

SEQ ID NO: 366768 - RNA, 19 nt, Artificial Sequence
  Description of Artificial Sequence: Synthetic oligonucleotide
  Antisense Strand to SEQ ID NO: 366767
uuaaucaaucaagaccucc

SEQ ID NO: 366769 - RNA, 19 nt, Artificial Sequence
  Description of Artificial Sequence: Synthetic oligonucleotide
  Sense Strand Starting at position 611 of SEQ ID NO: 318841
ggucuugauugauuaauua

SEQ ID NO: 366770 - RNA, 19 nt, Artificial Sequence
  Description of Artificial Sequence: Synthetic oligonucleotide
  Antisense Strand to SEQ ID NO: 366769
uaauuaaucaaucaagacc

SEQ ID NO: 366771 - RNA, 19 nt, Artificial Sequence
  Description of Artificial Sequence: Synthetic oligonucleotide
  Sense Strand Starting at position 611 of SEQ ID NO: 319026
cuuguuagcccugaaacag

SEQ ID NO: 366772 - RNA, 19 nt, Artificial Sequence
  Description of Artificial Sequence: Synthetic oligonucleotide
  Antisense Strand to SEQ ID NO: 366771
cuguuucagggcuaacaag

SEQ ID NO: 366773 - RNA, 19 nt, Artificial Sequence
  Description of Artificial Sequence: Synthetic oligonucleotide
  Sense Strand Starting at position 612 of SEQ ID NO: 315269
cagucauuucguggacaug

SEQ ID NO: 366774 - RNA, 19 nt, Artificial Sequence
  Description of Artificial Sequence: Synthetic oligonucleotide
  Antisense Strand to SEQ ID NO: 366773
cauguccacgaaaugacug

SEQ ID NO: 366775 - RNA, 19 nt, Artificial Sequence
  Description of Artificial Sequence: Synthetic oligonucleotide
  Sense Strand Starting at position 612 of SEQ ID NO: 315415
uuguauguggauuacagua

SEQ ID NO: 366776 - RNA, 19 nt, Artificial Sequence
  Description of Artificial Sequence: Synthetic oligonucleotide
  Antisense Strand to SEQ ID NO: 366775
uacuguaauccacauacaa

SEQ ID NO: 366777 - RNA, 19 nt, Artificial Sequence
  Description of Artificial Sequence: Synthetic oligonucleotide
  Sense Strand Starting at position 612 of SEQ ID NO: 315420
uguggauuacaguauauau

SEQ ID NO: 366778 - RNA, 19 nt, Artificial Sequence
  Description of Artificial Sequence: Synthetic oligonucleotide
  Antisense Strand to SEQ ID NO: 366777
auauauacuguaauccaca

SEQ ID NO: 366779 - RNA, 19 nt, Artificial Sequence
  Description of Artificial Sequence: Synthetic oligonucleotide
  Sense Strand Starting at position 612 of SEQ ID NO: 315569
ugcauuaguauggaaguuu

SEQ ID NO: 366780 - RNA, 19 nt, Artificial Sequence
  Description of Artificial Sequence: Synthetic oligonucleotide
  Antisense Strand to SEQ ID NO: 366779
aaacuuccauacuaaugca

SEQ ID NO: 366781 - RNA, 19 nt, Artificial Sequence
  Description of Artificial Sequence: Synthetic oligonucleotide
  Sense Strand Starting at position 612 of SEQ ID NO: 315800
ggucauaugcaaugacaaa

SEQ ID NO: 366782 - RNA, 19 nt, Artificial Sequence
  Description of Artificial Sequence: Synthetic oligonucleotide
  Antisense Strand to SEQ ID NO: 366781
uuugucauugcauaugacc

SEQ ID NO: 366783 - RNA, 19 nt, Artificial Sequence
  Description of Artificial Sequence: Synthetic oligonucleotide
  Sense Strand Starting at position 612 of SEQ ID NO: 315856
cugguuucugaucauugua

SEQ ID NO: 366784 - RNA, 19 nt, Artificial Sequence
  Description of Artificial Sequence: Synthetic oligonucleotide
  Antisense Strand to SEQ ID NO: 366783
uacaaugaucagaaaccag

SEQ ID NO: 366785 - RNA, 19 nt, Artificial Sequence
  Description of Artificial Sequence: Synthetic oligonucleotide
  Sense Strand Starting at position 612 of SEQ ID NO: 315895
gccugugauuuccugacau

SEQ ID NO: 366786 - RNA, 19 nt, Artificial Sequence
  Description of Artificial Sequence: Synthetic oligonucleotide
  Antisense Strand to SEQ ID NO: 366785
augucaggaaaucacaggc

SEQ ID NO: 366787 - RNA, 19 nt, Artificial Sequence
  Description of Artificial Sequence: Synthetic oligonucleotide
  Sense Strand Starting at position 612 of SEQ ID NO: 316201
cucuuacucugcuuaggaa

SEQ ID NO: 366788 - RNA, 19 nt, Artificial Sequence
  Description of Artificial Sequence: Synthetic oligonucleotide
  Antisense Strand to SEQ ID NO: 366787
uuccuaagcagaguaagag

SEQ ID NO: 366789 - RNA, 19 nt, Artificial Sequence
  Description of Artificial Sequence: Synthetic oligonucleotide
  Sense Strand Starting at position 612 of SEQ ID NO: 316202
ucuuacucugcuuaggaaa

SEQ ID NO: 366790 - RNA, 19 nt, Artificial Sequence
  Description of Artificial Sequence: Synthetic oligonucleotide
  Antisense Strand to SEQ ID NO: 366789
uuuccuaagcagaguaaga

SEQ ID NO: 366791 - RNA, 19 nt, Artificial Sequence
  Description of Artificial Sequence: Synthetic oligonucleotide
  Sense Strand Starting at position 612 of SEQ ID NO: 316305
aggaaauaguucuuuguca

SEQ ID NO: 366792 - RNA, 19 nt, Artificial Sequence
  Description of Artificial Sequence: Synthetic oligonucleotide
  Antisense Strand to SEQ ID NO: 366791
ugacaaagaacuauuuccu

SEQ ID NO: 366793 - RNA, 19 nt, Artificial Sequence
  Description of Artificial Sequence: Synthetic oligonucleotide
  Sense Strand Starting at position 612 of SEQ ID NO: 316306
ggaaauaguucuuugucag

SEQ ID NO: 366794 - RNA, 19 nt, Artificial Sequence
  Description of Artificial Sequence: Synthetic oligonucleotide
  Antisense Strand to SEQ ID NO: 366793
cugacaaagaacuauuucc

SEQ ID NO: 366795 - RNA, 19 nt, Artificial Sequence
  Description of Artificial Sequence: Synthetic oligonucleotide
  Sense Strand Starting at position 612 of SEQ ID NO: 316307
gaaauaguucuuugucagg

SEQ ID NO: 366796 - RNA, 19 nt, Artificial Sequence
  Description of Artificial Sequence: Synthetic oligonucleotide
  Antisense Strand to SEQ ID NO: 366795
ccugacaaagaacuauuuc

SEQ ID NO: 366797 - RNA, 19 nt, Artificial Sequence
  Description of Artificial Sequence: Synthetic oligonucleotide
  Sense Strand Starting at position 612 of SEQ ID NO: 316309
aauaguucuuugucaggga

SEQ ID NO: 366798 - RNA, 19 nt, Artificial Sequence
  Description of Artificial Sequence: Synthetic oligonucleotide
  Antisense Strand to SEQ ID NO: 366797
ucccugacaaagaacuauu

SEQ ID NO: 366799 - RNA, 19 nt, Artificial Sequence
  Description of Artificial Sequence: Synthetic oligonucleotide
  Sense Strand Starting at position 612 of SEQ ID NO: 316425
aggacagcuuccucuuuau

SEQ ID NO: 366800 - RNA, 19 nt, Artificial Sequence
  Description of Artificial Sequence: Synthetic oligonucleotide
  Antisense Strand to SEQ ID NO: 366799
auaaagaggaagcuguccu

SEQ ID NO: 366801 - RNA, 19 nt, Artificial Sequence
  Description of Artificial Sequence: Synthetic oligonucleotide
  Sense Strand Starting at position 612 of SEQ ID NO: 317449
aaauaaguguucucuggag

SEQ ID NO: 366802 - RNA, 19 nt, Artificial Sequence
  Description of Artificial Sequence: Synthetic oligonucleotide
  Antisense Strand to SEQ ID NO: 366801
cuccagagaacacuuauuu

SEQ ID NO: 366803 - RNA, 19 nt, Artificial Sequence
  Description of Artificial Sequence: Synthetic oligonucleotide
  Sense Strand Starting at position 612 of SEQ ID NO: 317453
aaguguucucuggaguuag

SEQ ID NO: 366804 - RNA, 19 nt, Artificial Sequence
  Description of Artificial Sequence: Synthetic oligonucleotide
  Antisense Strand to SEQ ID NO: 366803
cuaacuccagagaacacuu

SEQ ID NO: 366805 - RNA, 19 nt, Artificial Sequence
  Description of Artificial Sequence: Synthetic oligonucleotide
  Sense Strand Starting at position 612 of SEQ ID NO: 317457
guucucuggaguuagguau

SEQ ID NO: 366806 - RNA, 19 nt, Artificial Sequence
  Description of Artificial Sequence: Synthetic oligonucleotide
  Antisense Strand to SEQ ID NO: 366805
auaccuaacuccagagaac

SEQ ID NO: 366807 - RNA, 19 nt, Artificial Sequence
  Description of Artificial Sequence: Synthetic oligonucleotide
  Sense Strand Starting at position 612 of SEQ ID NO: 317661
acugucaaacggcaagaau

SEQ ID NO: 366808 - RNA, 19 nt, Artificial Sequence
  Description of Artificial Sequence: Synthetic oligonucleotide
  Antisense Strand to SEQ ID NO: 366807
auucuugccguuugacagu

SEQ ID NO: 366809 - RNA, 19 nt, Artificial Sequence
  Description of Artificial Sequence: Synthetic oligonucleotide
  Sense Strand Starting at position 612 of SEQ ID NO: 317765
ucuuaacauuggucagaga

SEQ ID NO: 366810 - RNA, 19 nt, Artificial Sequence
  Description of Artificial Sequence: Synthetic oligonucleotide
  Antisense Strand to SEQ ID NO: 366809
ucucugaccaauguuaaga

SEQ ID NO: 366811 - RNA, 19 nt, Artificial Sequence
  Description of Artificial Sequence: Synthetic oligonucleotide
  Sense Strand Starting at position 612 of SEQ ID NO: 317787
ggguaucaguuagcuggaa

SEQ ID NO: 366812 - RNA, 19 nt, Artificial Sequence
  Description of Artificial Sequence: Synthetic oligonucleotide
  Antisense Strand to SEQ ID NO: 366811
uuccagcuaacugauaccc

SEQ ID NO: 366813 - RNA, 19 nt, Artificial Sequence
  Description of Artificial Sequence: Synthetic oligonucleotide
  Sense Strand Starting at position 612 of SEQ ID NO: 317847
cggagaaaguucuuaauag

SEQ ID NO: 366814 - RNA, 19 nt, Artificial Sequence
  Description of Artificial Sequence: Synthetic oligonucleotide
  Antisense Strand to SEQ ID NO: 366813
cuauuaagaacuuucuccg

SEQ ID NO: 366815 - RNA, 19 nt, Artificial Sequence
  Description of Artificial Sequence: Synthetic oligonucleotide
  Sense Strand Starting at position 612 of SEQ ID NO: 317908
cugcuacuccaggagcaau

SEQ ID NO: 366816 - RNA, 19 nt, Artificial Sequence
  Description of Artificial Sequence: Synthetic oligonucleotide
  Antisense Strand to SEQ ID NO: 366815
auugcuccuggaguagcag

SEQ ID NO: 366817 - RNA, 19 nt, Artificial Sequence
  Description of Artificial Sequence: Synthetic oligonucleotide
  Sense Strand Starting at position 612 of SEQ ID NO: 317936
guaguuacuacggaaacua

SEQ ID NO: 366818 - RNA, 19 nt, Artificial Sequence
  Description of Artificial Sequence: Synthetic oligonucleotide
  Antisense Strand to SEQ ID NO: 366817
uaguuuccguaguaacuac

SEQ ID NO: 366819 - RNA, 19 nt, Artificial Sequence
  Description of Artificial Sequence: Synthetic oligonucleotide
  Sense Strand Starting at position 612 of SEQ ID NO: 317955
gauggugugcuccagggaa

SEQ ID NO: 366820 - RNA, 19 nt, Artificial Sequence
  Description of Artificial Sequence: Synthetic oligonucleotide
  Antisense Strand to SEQ ID NO: 366819
uucccuggagcacaccauc

SEQ ID NO: 366821 - RNA, 19 nt, Artificial Sequence
  Description of Artificial Sequence: Synthetic oligonucleotide
  Sense Strand Starting at position 612 of SEQ ID NO: 318156
uaaugaucgggucauagca

SEQ ID NO: 366822 - RNA, 19 nt, Artificial Sequence
  Description of Artificial Sequence: Synthetic oligonucleotide
  Antisense Strand to SEQ ID NO: 366821
ugcuaugacccgaucauua

SEQ ID NO: 366823 - RNA, 19 nt, Artificial Sequence
  Description of Artificial Sequence: Synthetic oligonucleotide
  Sense Strand Starting at position 612 of SEQ ID NO: 318204
auaucugaauugcucagau

SEQ ID NO: 366824 - RNA, 19 nt, Artificial Sequence
  Description of Artificial Sequence: Synthetic oligonucleotide
  Antisense Strand to SEQ ID NO: 366823
aucugagcaauucagauau

SEQ ID NO: 366825 - RNA, 19 nt, Artificial Sequence
  Description of Artificial Sequence: Synthetic oligonucleotide
  Sense Strand Starting at position 612 of SEQ ID NO: 318206
aucugaauugcucagaugu

SEQ ID NO: 366826 - RNA, 19 nt, Artificial Sequence
  Description of Artificial Sequence: Synthetic oligonucleotide
  Antisense Strand to SEQ ID NO: 366825
acaucugagcaauucagau

SEQ ID NO: 366827 - RNA, 19 nt, Artificial Sequence
  Description of Artificial Sequence: Synthetic oligonucleotide
  Sense Strand Starting at position 612 of SEQ ID NO: 318214
ugcucagaugucugauaaa

SEQ ID NO: 366828 - RNA, 19 nt, Artificial Sequence
  Description of Artificial Sequence: Synthetic oligonucleotide
  Antisense Strand to SEQ ID NO: 366827
uuuaucagacaucugagca

SEQ ID NO: 366829 - RNA, 19 nt, Artificial Sequence
  Description of Artificial Sequence: Synthetic oligonucleotide
  Sense Strand Starting at position 612 of SEQ ID NO: 318437
uacccaggguguucucaaa

SEQ ID NO: 366830 - RNA, 19 nt, Artificial Sequence
  Description of Artificial Sequence: Synthetic oligonucleotide
  Antisense Strand to SEQ ID NO: 366829
uuugagaacacccugggua

SEQ ID NO: 366831 - RNA, 19 nt, Artificial Sequence
  Description of Artificial Sequence: Synthetic oligonucleotide
  Sense Strand Starting at position 612 of SEQ ID NO: 318487
uugaauaugcccuaauggu

SEQ ID NO: 366832 - RNA, 19 nt, Artificial Sequence
  Description of Artificial Sequence: Synthetic oligonucleotide
  Antisense Strand to SEQ ID NO: 366831
accauuagggcauauucaa

SEQ ID NO: 366833 - RNA, 19 nt, Artificial Sequence
  Description of Artificial Sequence: Synthetic oligonucleotide
  Sense Strand Starting at position 612 of SEQ ID NO: 318556
aaacgugauuuagaggaaa

SEQ ID NO: 366834 - RNA, 19 nt, Artificial Sequence
  Description of Artificial Sequence: Synthetic oligonucleotide
  Antisense Strand to SEQ ID NO: 366833
uuuccucuaaaucacguuu

SEQ ID NO: 366835 - RNA, 19 nt, Artificial Sequence
  Description of Artificial Sequence: Synthetic oligonucleotide
  Sense Strand Starting at position 612 of SEQ ID NO: 318607
cucuuugaguauccuuaua

SEQ ID NO: 366836 - RNA, 19 nt, Artificial Sequence
  Description of Artificial Sequence: Synthetic oligonucleotide
  Antisense Strand to SEQ ID NO: 366835
uauaaggauacucaaagag

SEQ ID NO: 366837 - RNA, 19 nt, Artificial Sequence
  Description of Artificial Sequence: Synthetic oligonucleotide
  Sense Strand Starting at position 612 of SEQ ID NO: 318698
gcccauuaaauugguagga

SEQ ID NO: 366838 - RNA, 19 nt, Artificial Sequence
  Description of Artificial Sequence: Synthetic oligonucleotide
  Antisense Strand to SEQ ID NO: 366837
uccuaccaauuuaaugggc

SEQ ID NO: 366839 - RNA, 19 nt, Artificial Sequence
  Description of Artificial Sequence: Synthetic oligonucleotide
  Sense Strand Starting at position 612 of SEQ ID NO: 318699
cccauuaaauugguaggaa

SEQ ID NO: 366840 - RNA, 19 nt, Artificial Sequence
  Description of Artificial Sequence: Synthetic oligonucleotide
  Antisense Strand to SEQ ID NO: 366839
uuccuaccaauuuaauggg

SEQ ID NO: 366841 - RNA, 19 nt, Artificial Sequence
  Description of Artificial Sequence: Synthetic oligonucleotide
  Sense Strand Starting at position 612 of SEQ ID NO: 318808
gccucauggucauccaaga

SEQ ID NO: 366842 - RNA, 19 nt, Artificial Sequence
  Description of Artificial Sequence: Synthetic oligonucleotide
  Antisense Strand to SEQ ID NO: 366841
ucuuggaugaccaugaggc

SEQ ID NO: 366843 - RNA, 19 nt, Artificial Sequence
  Description of Artificial Sequence: Synthetic oligonucleotide
  Sense Strand Starting at position 612 of SEQ ID NO: 318835
uucucaccagcguaauuaa

SEQ ID NO: 366844 - RNA, 19 nt, Artificial Sequence
  Description of Artificial Sequence: Synthetic oligonucleotide
  Antisense Strand to SEQ ID NO: 366843
uuaauuacgcuggugagaa

SEQ ID NO: 366845 - RNA, 19 nt, Artificial Sequence
  Description of Artificial Sequence: Synthetic oligonucleotide
  Sense Strand Starting at position 612 of SEQ ID NO: 318867
ugaggaguccagcgaauac

SEQ ID NO: 366846 - RNA, 19 nt, Artificial Sequence
  Description of Artificial Sequence: Synthetic oligonucleotide
  Antisense Strand to SEQ ID NO: 366845
guauucgcuggacuccuca

SEQ ID NO: 366847 - RNA, 19 nt, Artificial Sequence
  Description of Artificial Sequence: Synthetic oligonucleotide
  Sense Strand Starting at position 612 of SEQ ID NO: 318915
acaguuuguaauuggagua

SEQ ID NO: 366848 - RNA, 19 nt, Artificial Sequence
  Description of Artificial Sequence: Synthetic oligonucleotide
  Antisense Strand to SEQ ID NO: 366847
uacuccaauuacaaacugu

SEQ ID NO: 366849 - RNA, 19 nt, Artificial Sequence
  Description of Artificial Sequence: Synthetic oligonucleotide
  Sense Strand Starting at position 612 of SEQ ID NO: 318940
accacugaagugugaguau

SEQ ID NO: 366850 - RNA, 19 nt, Artificial Sequence
  Description of Artificial Sequence: Synthetic oligonucleotide
  Antisense Strand to SEQ ID NO: 366849
auacucacacuucaguggu

SEQ ID NO: 366851 - RNA, 19 nt, Artificial Sequence
  Description of Artificial Sequence: Synthetic oligonucleotide
  Sense Strand Starting at position 612 of SEQ ID NO: 318943
acugaagugugaguauaaa

SEQ ID NO: 366852 - RNA, 19 nt, Artificial Sequence
  Description of Artificial Sequence: Synthetic oligonucleotide
  Antisense Strand to SEQ ID NO: 366851
uuuauacucacacuucagu

SEQ ID NO: 366853 - RNA, 19 nt, Artificial Sequence
  Description of Artificial Sequence: Synthetic oligonucleotide
  Sense Strand Starting at position 613 of SEQ ID NO: 315255
aauugugugacguauggga

SEQ ID NO: 366854 - RNA, 19 nt, Artificial Sequence
  Description of Artificial Sequence: Synthetic oligonucleotide
  Antisense Strand to SEQ ID NO: 366853
ucccauacgucacacaauu

SEQ ID NO: 366855 - RNA, 19 nt, Artificial Sequence
  Description of Artificial Sequence: Synthetic oligonucleotide
  Sense Strand Starting at position 613 of SEQ ID NO: 315281
acuuguuugcuugcauguu

SEQ ID NO: 366856 - RNA, 19 nt, Artificial Sequence
  Description of Artificial Sequence: Synthetic oligonucleotide
  Antisense Strand to SEQ ID NO: 366855
aacaugcaagcaaacaagu

SEQ ID NO: 366857 - RNA, 19 nt, Artificial Sequence
  Description of Artificial Sequence: Synthetic oligonucleotide
  Sense Strand Starting at position 613 of SEQ ID NO: 315293
gcauguuugucauuugauc

SEQ ID NO: 366858 - RNA, 19 nt, Artificial Sequence
  Description of Artificial Sequence: Synthetic oligonucleotide
  Antisense Strand to SEQ ID NO: 366857
gaucaaaugacaaacaugc

SEQ ID NO: 366859 - RNA, 19 nt, Artificial Sequence
  Description of Artificial Sequence: Synthetic oligonucleotide
  Sense Strand Starting at position 613 of SEQ ID NO: 315485
gagugcaguuaagugauaa

SEQ ID NO: 366860 - RNA, 19 nt, Artificial Sequence
  Description of Artificial Sequence: Synthetic oligonucleotide
  Antisense Strand to SEQ ID NO: 366859
uuaucacuuaacugcacuc

SEQ ID NO: 366861 - RNA, 19 nt, Artificial Sequence
  Description of Artificial Sequence: Synthetic oligonucleotide
  Sense Strand Starting at position 613 of SEQ ID NO: 315608
gagugaaccugguucugaa

SEQ ID NO: 366862 - RNA, 19 nt, Artificial Sequence
  Description of Artificial Sequence: Synthetic oligonucleotide
  Antisense Strand to SEQ ID NO: 366861
uucagaaccagguucacuc

SEQ ID NO: 366863 - RNA, 19 nt, Artificial Sequence
  Description of Artificial Sequence: Synthetic oligonucleotide
  Sense Strand Starting at position 613 of SEQ ID NO: 316149
aagaguaggguggguaaua

SEQ ID NO: 366864 - RNA, 19 nt, Artificial Sequence
  Description of Artificial Sequence: Synthetic oligonucleotide
  Antisense Strand to SEQ ID NO: 366863
uauuacccacccuacucuu

SEQ ID NO: 366865 - RNA, 19 nt, Artificial Sequence
  Description of Artificial Sequence: Synthetic oligonucleotide
  Sense Strand Starting at position 613 of SEQ ID NO: 316150
agaguaggguggguaauaa

SEQ ID NO: 366866 - RNA, 19 nt, Artificial Sequence
  Description of Artificial Sequence: Synthetic oligonucleotide
  Antisense Strand to SEQ ID NO: 366865
uuauuacccacccuacucu

SEQ ID NO: 366867 - RNA, 19 nt, Artificial Sequence
  Description of Artificial Sequence: Synthetic oligonucleotide
  Sense Strand Starting at position 613 of SEQ ID NO: 316213
ccgguauaacaguauaguu

SEQ ID NO: 366868 - RNA, 19 nt, Artificial Sequence
  Description of Artificial Sequence: Synthetic oligonucleotide
  Antisense Strand to SEQ ID NO: 366867
aacuauacuguuauaccgg

SEQ ID NO: 366869 - RNA, 19 nt, Artificial Sequence
  Description of Artificial Sequence: Synthetic oligonucleotide
  Sense Strand Starting at position 613 of SEQ ID NO: 316215
gguauaacaguauaguuua

SEQ ID NO: 366870 - RNA, 19 nt, Artificial Sequence
  Description of Artificial Sequence: Synthetic oligonucleotide
  Antisense Strand to SEQ ID NO: 366869
uaaacuauacuguuauacc

SEQ ID NO: 366871 - RNA, 19 nt, Artificial Sequence
  Description of Artificial Sequence: Synthetic oligonucleotide
  Sense Strand Starting at position 613 of SEQ ID NO: 316322
aagugacuugcccagucau

SEQ ID NO: 366872 - RNA, 19 nt, Artificial Sequence
  Description of Artificial Sequence: Synthetic oligonucleotide
  Antisense Strand to SEQ ID NO: 366871
augacugggcaagucacuu

SEQ ID NO: 366873 - RNA, 19 nt, Artificial Sequence
  Description of Artificial Sequence: Synthetic oligonucleotide
  Sense Strand Starting at position 613 of SEQ ID NO: 316413
ccagucauauggcugauua

SEQ ID NO: 366874 - RNA, 19 nt, Artificial Sequence
  Description of Artificial Sequence: Synthetic oligonucleotide
  Antisense Strand to SEQ ID NO: 366873
uaaucagccauaugacugg

SEQ ID NO: 366875 - RNA, 19 nt, Artificial Sequence
  Description of Artificial Sequence: Synthetic oligonucleotide
  Sense Strand Starting at position 613 of SEQ ID NO: 316414
cagucauauggcugauuaa

SEQ ID NO: 366876 - RNA, 19 nt, Artificial Sequence
  Description of Artificial Sequence: Synthetic oligonucleotide
  Antisense Strand to SEQ ID NO: 366875
uuaaucagccauaugacug

SEQ ID NO: 366877 - RNA, 19 nt, Artificial Sequence
  Description of Artificial Sequence: Synthetic oligonucleotide
  Sense Strand Starting at position 613 of SEQ ID NO: 316415
agucauauggcugauuaag

SEQ ID NO: 366878 - RNA, 19 nt, Artificial Sequence
  Description of Artificial Sequence: Synthetic oligonucleotide
  Antisense Strand to SEQ ID NO: 366877
cuuaaucagccauaugacu

SEQ ID NO: 366879 - RNA, 19 nt, Artificial Sequence
  Description of Artificial Sequence: Synthetic oligonucleotide
  Sense Strand Starting at position 613 of SEQ ID NO: 316485
ggaccaaaugcuggucuaa

SEQ ID NO: 366880 - RNA, 19 nt, Artificial Sequence
  Description of Artificial Sequence: Synthetic oligonucleotide
  Antisense Strand to SEQ ID NO: 366879
uuagaccagcauuuggucc

SEQ ID NO: 366881 - RNA, 19 nt, Artificial Sequence
  Description of Artificial Sequence: Synthetic oligonucleotide
  Sense Strand Starting at position 613 of SEQ ID NO: 316487
accaaaugcuggucuaauu

SEQ ID NO: 366882 - RNA, 19 nt, Artificial Sequence
  Description of Artificial Sequence: Synthetic oligonucleotide
  Antisense Strand to SEQ ID NO: 366881
aauuagaccagcauuuggu

SEQ ID NO: 366883 - RNA, 19 nt, Artificial Sequence
  Description of Artificial Sequence: Synthetic oligonucleotide
  Sense Strand Starting at position 613 of SEQ ID NO: 316577
ggagcuacaggugaguuua

SEQ ID NO: 366884 - RNA, 19 nt, Artificial Sequence
  Description of Artificial Sequence: Synthetic oligonucleotide
  Antisense Strand to SEQ ID NO: 366883
uaaacucaccuguagcucc

SEQ ID NO: 366885 - RNA, 19 nt, Artificial Sequence
  Description of Artificial Sequence: Synthetic oligonucleotide
  Sense Strand Starting at position 613 of SEQ ID NO: 316579
agcuacaggugaguuuaaa

SEQ ID NO: 366886 - RNA, 19 nt, Artificial Sequence
  Description of Artificial Sequence: Synthetic oligonucleotide
  Antisense Strand to SEQ ID NO: 366885
uuuaaacucaccuguagcu

SEQ ID NO: 366887 - RNA, 19 nt, Artificial Sequence
  Description of Artificial Sequence: Synthetic oligonucleotide
  Sense Strand Starting at position 613 of SEQ ID NO: 316599
ggucuccagucuccaagaa

SEQ ID NO: 366888 - RNA, 19 nt, Artificial Sequence
  Description of Artificial Sequence: Synthetic oligonucleotide
  Antisense Strand to SEQ ID NO: 366887
uucuuggagacuggagacc

SEQ ID NO: 366889 - RNA, 19 nt, Artificial Sequence
  Description of Artificial Sequence: Synthetic oligonucleotide
  Sense Strand Starting at position 613 of SEQ ID NO: 316856
ccugaagugugauuugcac

SEQ ID NO: 366890 - RNA, 19 nt, Artificial Sequence
  Description of Artificial Sequence: Synthetic oligonucleotide
  Antisense Strand to SEQ ID NO: 366889
gugcaaaucacacuucagg

SEQ ID NO: 366891 - RNA, 19 nt, Artificial Sequence
  Description of Artificial Sequence: Synthetic oligonucleotide
  Sense Strand Starting at position 613 of SEQ ID NO: 316965
agcuuagacauccacggaa

SEQ ID NO: 366892 - RNA, 19 nt, Artificial Sequence
  Description of Artificial Sequence: Synthetic oligonucleotide
  Antisense Strand to SEQ ID NO: 366891
uuccguggaugucuaagcu

SEQ ID NO: 366893 - RNA, 19 nt, Artificial Sequence
  Description of Artificial Sequence: Synthetic oligonucleotide
  Sense Strand Starting at position 613 of SEQ ID NO: 316967
cuuagacauccacggaagu

SEQ ID NO: 366894 - RNA, 19 nt, Artificial Sequence
  Description of Artificial Sequence: Synthetic oligonucleotide
  Antisense Strand to SEQ ID NO: 366893
acuuccguggaugucuaag

SEQ ID NO: 366895 - RNA, 19 nt, Artificial Sequence
  Description of Artificial Sequence: Synthetic oligonucleotide
  Sense Strand Starting at position 613 of SEQ ID NO: 317106
ggcggagcggucaguucua

SEQ ID NO: 366896 - RNA, 19 nt, Artificial Sequence
  Description of Artificial Sequence: Synthetic oligonucleotide
  Antisense Strand to SEQ ID NO: 366895
uagaacugaccgcuccgcc

SEQ ID NO: 366897 - RNA, 19 nt, Artificial Sequence
  Description of Artificial Sequence: Synthetic oligonucleotide
  Sense Strand Starting at position 613 of SEQ ID NO: 317113
cggucaguucuagaugauc

SEQ ID NO: 366898 - RNA, 19 nt, Artificial Sequence
  Description of Artificial Sequence: Synthetic oligonucleotide
  Antisense Strand to SEQ ID NO: 366897
gaucaucuagaacugaccg

SEQ ID NO: 366899 - RNA, 19 nt, Artificial Sequence
  Description of Artificial Sequence: Synthetic oligonucleotide
  Sense Strand Starting at position 613 of SEQ ID NO: 317292
auaauuggugagggacgua

SEQ ID NO: 366900 - RNA, 19 nt, Artificial Sequence
  Description of Artificial Sequence: Synthetic oligonucleotide
  Antisense Strand to SEQ ID NO: 366899
uacgucccucaccaauuau

SEQ ID NO: 366901 - RNA, 19 nt, Artificial Sequence
  Description of Artificial Sequence: Synthetic oligonucleotide
  Sense Strand Starting at position 613 of SEQ ID NO: 317659
uguagauguggaugacaga

SEQ ID NO: 366902 - RNA, 19 nt, Artificial Sequence
  Description of Artificial Sequence: Synthetic oligonucleotide
  Antisense Strand to SEQ ID NO: 366901
ucugucauccacaucuaca

SEQ ID NO: 366903 - RNA, 19 nt, Artificial Sequence
  Description of Artificial Sequence: Synthetic oligonucleotide
  Sense Strand Starting at position 613 of SEQ ID NO: 317711
cagucaaggcgauauuauc

SEQ ID NO: 366904 - RNA, 19 nt, Artificial Sequence
  Description of Artificial Sequence: Synthetic oligonucleotide
  Antisense Strand to SEQ ID NO: 366903
gauaauaucgccuugacug

SEQ ID NO: 366905 - RNA, 19 nt, Artificial Sequence
  Description of Artificial Sequence: Synthetic oligonucleotide
  Sense Strand Starting at position 613 of SEQ ID NO: 317717
aggcgauauuaucuuaaca

SEQ ID NO: 366906 - RNA, 19 nt, Artificial Sequence
  Description of Artificial Sequence: Synthetic oligonucleotide
  Antisense Strand to SEQ ID NO: 366905
uguuaagauaauaucgccu

SEQ ID NO: 366907 - RNA, 19 nt, Artificial Sequence
  Description of Artificial Sequence: Synthetic oligonucleotide
  Sense Strand Starting at position 613 of SEQ ID NO: 317746
uggugugggcaagaaugua

SEQ ID NO: 366908 - RNA, 19 nt, Artificial Sequence
  Description of Artificial Sequence: Synthetic oligonucleotide
  Antisense Strand to SEQ ID NO: 366907
uacauucuugcccacacca

SEQ ID NO: 366909 - RNA, 19 nt, Artificial Sequence
  Description of Artificial Sequence: Synthetic oligonucleotide
  Sense Strand Starting at position 613 of SEQ ID NO: 318222
agaugcaauuuggaauaaa

SEQ ID NO: 366910 - RNA, 19 nt, Artificial Sequence
  Description of Artificial Sequence: Synthetic oligonucleotide
  Antisense Strand to SEQ ID NO: 366909
uuuauuccaaauugcaucu

SEQ ID NO: 366911 - RNA, 19 nt, Artificial Sequence
  Description of Artificial Sequence: Synthetic oligonucleotide
  Sense Strand Starting at position 613 of SEQ ID NO: 318357
cuugguaacucucuucgaa

SEQ ID NO: 366912 - RNA, 19 nt, Artificial Sequence
  Description of Artificial Sequence: Synthetic oligonucleotide
  Antisense Strand to SEQ ID NO: 366911
uucgaagagaguuaccaag

SEQ ID NO: 366913 - RNA, 19 nt, Artificial Sequence
  Description of Artificial Sequence: Synthetic oligonucleotide
  Sense Strand Starting at position 613 of SEQ ID NO: 318359
ugguaacucucuucgaaga

SEQ ID NO: 366914 - RNA, 19 nt, Artificial Sequence
  Description of Artificial Sequence: Synthetic oligonucleotide
  Antisense Strand to SEQ ID NO: 366913
ucuucgaagagaguuacca

SEQ ID NO: 366915 - RNA, 19 nt, Artificial Sequence
  Description of Artificial Sequence: Synthetic oligonucleotide
  Sense Strand Starting at position 613 of SEQ ID NO: 318360
gguaacucucuucgaagaa

SEQ ID NO: 366916 - RNA, 19 nt, Artificial Sequence
  Description of Artificial Sequence: Synthetic oligonucleotide
  Antisense Strand to SEQ ID NO: 366915
uucuucgaagagaguuacc

SEQ ID NO: 366917 - RNA, 19 nt, Artificial Sequence
  Description of Artificial Sequence: Synthetic oligonucleotide
  Sense Strand Starting at position 613 of SEQ ID NO: 318364
acucucuucgaagaagugu

SEQ ID NO: 366918 - RNA, 19 nt, Artificial Sequence
  Description of Artificial Sequence: Synthetic oligonucleotide
  Antisense Strand to SEQ ID NO: 366917
acacuucuucgaagagagu

SEQ ID NO: 366919 - RNA, 19 nt, Artificial Sequence
  Description of Artificial Sequence: Synthetic oligonucleotide
  Sense Strand Starting at position 613 of SEQ ID NO: 318494
uggucauucuuaucuuaug

SEQ ID NO: 366920 - RNA, 19 nt, Artificial Sequence
  Description of Artificial Sequence: Synthetic oligonucleotide
  Antisense Strand to SEQ ID NO: 366919
cauaagauaagaaugacca

SEQ ID NO: 366921 - RNA, 19 nt, Artificial Sequence
  Description of Artificial Sequence: Synthetic oligonucleotide
  Sense Strand Starting at position 613 of SEQ ID NO: 318495
ggucauucuuaucuuauga

SEQ ID NO: 366922 - RNA, 19 nt, Artificial Sequence
  Description of Artificial Sequence: Synthetic oligonucleotide
  Antisense Strand to SEQ ID NO: 366921
ucauaagauaagaaugacc

SEQ ID NO: 366923 - RNA, 19 nt, Artificial Sequence
  Description of Artificial Sequence: Synthetic oligonucleotide
  Sense Strand Starting at position 613 of SEQ ID NO: 318654
cuccacucuuggccugaaa

SEQ ID NO: 366924 - RNA, 19 nt, Artificial Sequence
  Description of Artificial Sequence: Synthetic oligonucleotide
  Antisense Strand to SEQ ID NO: 366923
uuucaggccaagaguggag

SEQ ID NO: 366925 - RNA, 19 nt, Artificial Sequence
  Description of Artificial Sequence: Synthetic oligonucleotide
  Sense Strand Starting at position 613 of SEQ ID NO: 318741
ggucggugugaguugcaau

SEQ ID NO: 366926 - RNA, 19 nt, Artificial Sequence
  Description of Artificial Sequence: Synthetic oligonucleotide
  Antisense Strand to SEQ ID NO: 366925
auugcaacucacaccgacc

SEQ ID NO: 366927 - RNA, 19 nt, Artificial Sequence
  Description of Artificial Sequence: Synthetic oligonucleotide
  Sense Strand Starting at position 613 of SEQ ID NO: 318799
cuuagaaugcagugauaag

SEQ ID NO: 366928 - RNA, 19 nt, Artificial Sequence
  Description of Artificial Sequence: Synthetic oligonucleotide
  Antisense Strand to SEQ ID NO: 366927
cuuaucacugcauucuaag

SEQ ID NO: 366929 - RNA, 19 nt, Artificial Sequence
  Description of Artificial Sequence: Synthetic oligonucleotide
  Sense Strand Starting at position 613 of SEQ ID NO: 319123
agaucuauauaugaaagag

SEQ ID NO: 366930 - RNA, 19 nt, Artificial Sequence
  Description of Artificial Sequence: Synthetic oligonucleotide
  Antisense Strand to SEQ ID NO: 366929
cucuuucauauauagaucu

SEQ ID NO: 366931 - RNA, 19 nt, Artificial Sequence
  Description of Artificial Sequence: Synthetic oligonucleotide
  Sense Strand Starting at position 613 of SEQ ID NO: 319140
aggcuauuacugcaaagug

SEQ ID NO: 366932 - RNA, 19 nt, Artificial Sequence
  Description of Artificial Sequence: Synthetic oligonucleotide
  Antisense Strand to SEQ ID NO: 366931
cacuuugcaguaauagccu

SEQ ID NO: 366933 - RNA, 19 nt, Artificial Sequence
  Description of Artificial Sequence: Synthetic oligonucleotide
  Sense Strand Starting at position 614 of SEQ ID NO: 315963
ccagguagacacugucaaa

SEQ ID NO: 366934 - RNA, 19 nt, Artificial Sequence
  Description of Artificial Sequence: Synthetic oligonucleotide
  Antisense Strand to SEQ ID NO: 366933
uuugacagugucuaccugg

SEQ ID NO: 366935 - RNA, 19 nt, Artificial Sequence
  Description of Artificial Sequence: Synthetic oligonucleotide
  Sense Strand Starting at position 614 of SEQ ID NO: 316016
gcucacauacaagguuuaa

SEQ ID NO: 366936 - RNA, 19 nt, Artificial Sequence
  Description of Artificial Sequence: Synthetic oligonucleotide
  Antisense Strand to SEQ ID NO: 366935
uuaaaccuuguaugugagc

SEQ ID NO: 366937 - RNA, 19 nt, Artificial Sequence
  Description of Artificial Sequence: Synthetic oligonucleotide
  Sense Strand Starting at position 614 of SEQ ID NO: 316108
cguguuuggagguauauau

SEQ ID NO: 366938 - RNA, 19 nt, Artificial Sequence
  Description of Artificial Sequence: Synthetic oligonucleotide
  Antisense Strand to SEQ ID NO: 366937
auauauaccuccaaacacg

SEQ ID NO: 366939 - RNA, 19 nt, Artificial Sequence
  Description of Artificial Sequence: Synthetic oligonucleotide
  Sense Strand Starting at position 614 of SEQ ID NO: 316155
gggaaauaucuuugaccuu

SEQ ID NO: 366940 - RNA, 19 nt, Artificial Sequence
  Description of Artificial Sequence: Synthetic oligonucleotide
  Antisense Strand to SEQ ID NO: 366939
aaggucaaagauauuuccc

SEQ ID NO: 366941 - RNA, 19 nt, Artificial Sequence
  Description of Artificial Sequence: Synthetic oligonucleotide
  Sense Strand Starting at position 614 of SEQ ID NO: 316311
ccuggaucuuaucugaauu

SEQ ID NO: 366942 - RNA, 19 nt, Artificial Sequence
  Description of Artificial Sequence: Synthetic oligonucleotide
  Antisense Strand to SEQ ID NO: 366941
aauucagauaagauccagg

SEQ ID NO: 366943 - RNA, 19 nt, Artificial Sequence
  Description of Artificial Sequence: Synthetic oligonucleotide
  Sense Strand Starting at position 614 of SEQ ID NO: 316353
uguuucuuaccugagcaua

SEQ ID NO: 366944 - RNA, 19 nt, Artificial Sequence
  Description of Artificial Sequence: Synthetic oligonucleotide
  Antisense Strand to SEQ ID NO: 366943
uaugcucagguaagaaaca

SEQ ID NO: 366945 - RNA, 19 nt, Artificial Sequence
  Description of Artificial Sequence: Synthetic oligonucleotide
  Sense Strand Starting at position 614 of SEQ ID NO: 316386
gguuguuccgagcaagaag

SEQ ID NO: 366946 - RNA, 19 nt, Artificial Sequence
  Description of Artificial Sequence: Synthetic oligonucleotide
  Antisense Strand to SEQ ID NO: 366945
cuucuugcucggaacaacc

SEQ ID NO: 366947 - RNA, 19 nt, Artificial Sequence
  Description of Artificial Sequence: Synthetic oligonucleotide
  Sense Strand Starting at position 614 of SEQ ID NO: 316496
gugggucuccaucacugua

SEQ ID NO: 366948 - RNA, 19 nt, Artificial Sequence
  Description of Artificial Sequence: Synthetic oligonucleotide
  Antisense Strand to SEQ ID NO: 366947
uacagugauggagacccac

SEQ ID NO: 366949 - RNA, 19 nt, Artificial Sequence
  Description of Artificial Sequence: Synthetic oligonucleotide
  Sense Strand Starting at position 614 of SEQ ID NO: 316698
aguucagagcuuggugaaa

SEQ ID NO: 366950 - RNA, 19 nt, Artificial Sequence
  Description of Artificial Sequence: Synthetic oligonucleotide
  Antisense Strand to SEQ ID NO: 366949
uuucaccaagcucugaacu

SEQ ID NO: 366951 - RNA, 19 nt, Artificial Sequence
  Description of Artificial Sequence: Synthetic oligonucleotide
  Sense Strand Starting at position 614 of SEQ ID NO: 316734
uaaagugauguguaaucaa

SEQ ID NO: 366952 - RNA, 19 nt, Artificial Sequence
  Description of Artificial Sequence: Synthetic oligonucleotide
  Antisense Strand to SEQ ID NO: 366951
uugauuacacaucacuuua

SEQ ID NO: 366953 - RNA, 19 nt, Artificial Sequence
  Description of Artificial Sequence: Synthetic oligonucleotide
  Sense Strand Starting at position 614 of SEQ ID NO: 316737
agugauguguaaucaagua

SEQ ID NO: 366954 - RNA, 19 nt, Artificial Sequence
  Description of Artificial Sequence: Synthetic oligonucleotide
  Antisense Strand to SEQ ID NO: 366953
uacuugauuacacaucacu

SEQ ID NO: 366955 - RNA, 19 nt, Artificial Sequence
  Description of Artificial Sequence: Synthetic oligonucleotide
  Sense Strand Starting at position 614 of SEQ ID NO: 316784
uaagaaauguugccucaug

SEQ ID NO: 366956 - RNA, 19 nt, Artificial Sequence
  Description of Artificial Sequence: Synthetic oligonucleotide
  Antisense Strand to SEQ ID NO: 366955
caugaggcaacauuucuua

SEQ ID NO: 366957 - RNA, 19 nt, Artificial Sequence
  Description of Artificial Sequence: Synthetic oligonucleotide
  Sense Strand Starting at position 614 of SEQ ID NO: 316798
ucaugcaagucuguagaga

SEQ ID NO: 366958 - RNA, 19 nt, Artificial Sequence
  Description of Artificial Sequence: Synthetic oligonucleotide
  Antisense Strand to SEQ ID NO: 366957
ucucuacagacuugcauga

SEQ ID NO: 366959 - RNA, 19 nt, Artificial Sequence
  Description of Artificial Sequence: Synthetic oligonucleotide
  Sense Strand Starting at position 614 of SEQ ID NO: 316799
caugcaagucuguagagau

SEQ ID NO: 366960 - RNA, 19 nt, Artificial Sequence
  Description of Artificial Sequence: Synthetic oligonucleotide
  Antisense Strand to SEQ ID NO: 366959
aucucuacagacuugcaug

SEQ ID NO: 366961 - RNA, 19 nt, Artificial Sequence
  Description of Artificial Sequence: Synthetic oligonucleotide
  Sense Strand Starting at position 614 of SEQ ID NO: 316829
auaacuagagaauguugua

SEQ ID NO: 366962 - RNA, 19 nt, Artificial Sequence
  Description of Artificial Sequence: Synthetic oligonucleotide
  Antisense Strand to SEQ ID NO: 366961
uacaacauucucuaguuau

SEQ ID NO: 366963 - RNA, 19 nt, Artificial Sequence
  Description of Artificial Sequence: Synthetic oligonucleotide
  Sense Strand Starting at position 614 of SEQ ID NO: 316836
gagaauguuguauguaaau

SEQ ID NO: 366964 - RNA, 19 nt, Artificial Sequence
  Description of Artificial Sequence: Synthetic oligonucleotide
  Antisense Strand to SEQ ID NO: 366963
auuuacauacaacauucuc

SEQ ID NO: 366965 - RNA, 19 nt, Artificial Sequence
  Description of Artificial Sequence: Synthetic oligonucleotide
  Sense Strand Starting at position 614 of SEQ ID NO: 316842
guuguauguaaauaagugu

SEQ ID NO: 366966 - RNA, 19 nt, Artificial Sequence
  Description of Artificial Sequence: Synthetic oligonucleotide
  Antisense Strand to SEQ ID NO: 366965
acacuuauuuacauacaac

SEQ ID NO: 366967 - RNA, 19 nt, Artificial Sequence
  Description of Artificial Sequence: Synthetic oligonucleotide
  Sense Strand Starting at position 614 of SEQ ID NO: 316910
uguuuacauucuccuuuga

SEQ ID NO: 366968 - RNA, 19 nt, Artificial Sequence
  Description of Artificial Sequence: Synthetic oligonucleotide
  Antisense Strand to SEQ ID NO: 366967
ucaaaggagaauguaaaca

SEQ ID NO: 366969 - RNA, 19 nt, Artificial Sequence
  Description of Artificial Sequence: Synthetic oligonucleotide
  Sense Strand Starting at position 614 of SEQ ID NO: 316982
cugaacaggguuugacuua

SEQ ID NO: 366970 - RNA, 19 nt, Artificial Sequence
  Description of Artificial Sequence: Synthetic oligonucleotide
  Antisense Strand to SEQ ID NO: 366969
uaagucaaacccuguucag

SEQ ID NO: 366971 - RNA, 19 nt, Artificial Sequence
  Description of Artificial Sequence: Synthetic oligonucleotide
  Sense Strand Starting at position 614 of SEQ ID NO: 316989
ggguuugacuuauucuuuc

SEQ ID NO: 366972 - RNA, 19 nt, Artificial Sequence
  Description of Artificial Sequence: Synthetic oligonucleotide
  Antisense Strand to SEQ ID NO: 366971
gaaagaauaagucaaaccc

SEQ ID NO: 366973 - RNA, 19 nt, Artificial Sequence
  Description of Artificial Sequence: Synthetic oligonucleotide
  Sense Strand Starting at position 614 of SEQ ID NO: 317664
ugggauaacuuguuaagac

SEQ ID NO: 366974 - RNA, 19 nt, Artificial Sequence
  Description of Artificial Sequence: Synthetic oligonucleotide
  Antisense Strand to SEQ ID NO: 366973
gucuuaacaaguuauccca

SEQ ID NO: 366975 - RNA, 19 nt, Artificial Sequence
  Description of Artificial Sequence: Synthetic oligonucleotide
  Sense Strand Starting at position 614 of SEQ ID NO: 317716
gaguucugacuuuggaaau

SEQ ID NO: 366976 - RNA, 19 nt, Artificial Sequence
  Description of Artificial Sequence: Synthetic oligonucleotide
  Antisense Strand to SEQ ID NO: 366975
auuuccaaagucagaacuc

SEQ ID NO: 366977 - RNA, 19 nt, Artificial Sequence
  Description of Artificial Sequence: Synthetic oligonucleotide
  Sense Strand Starting at position 614 of SEQ ID NO: 317841
cagugucacugauuugcca

SEQ ID NO: 366978 - RNA, 19 nt, Artificial Sequence
  Description of Artificial Sequence: Synthetic oligonucleotide
  Antisense Strand to SEQ ID NO: 366977
uggcaaaucagugacacug

SEQ ID NO: 366979 - RNA, 19 nt, Artificial Sequence
  Description of Artificial Sequence: Synthetic oligonucleotide
  Sense Strand Starting at position 614 of SEQ ID NO: 318109
ccagcaacaucuuuagguu

SEQ ID NO: 366980 - RNA, 19 nt, Artificial Sequence
  Description of Artificial Sequence: Synthetic oligonucleotide
  Antisense Strand to SEQ ID NO: 366979
aaccuaaagauguugcugg

SEQ ID NO: 366981 - RNA, 19 nt, Artificial Sequence
  Description of Artificial Sequence: Synthetic oligonucleotide
  Sense Strand Starting at position 614 of SEQ ID NO: 318123
agguucuaaagcgaguaaa

SEQ ID NO: 366982 - RNA, 19 nt, Artificial Sequence
  Description of Artificial Sequence: Synthetic oligonucleotide
  Antisense Strand to SEQ ID NO: 366981
uuuacucgcuuuagaaccu

SEQ ID NO: 366983 - RNA, 19 nt, Artificial Sequence
  Description of Artificial Sequence: Synthetic oligonucleotide
  Sense Strand Starting at position 614 of SEQ ID NO: 318218
gguuaacacuucuuuggga

SEQ ID NO: 366984 - RNA, 19 nt, Artificial Sequence
  Description of Artificial Sequence: Synthetic oligonucleotide
  Antisense Strand to SEQ ID NO: 366983
ucccaaagaaguguuaacc

SEQ ID NO: 366985 - RNA, 19 nt, Artificial Sequence
  Description of Artificial Sequence: Synthetic oligonucleotide
  Sense Strand Starting at position 614 of SEQ ID NO: 318706
uaaaguagaguuugauggu

SEQ ID NO: 366986 - RNA, 19 nt, Artificial Sequence
  Description of Artificial Sequence: Synthetic oligonucleotide
  Antisense Strand to SEQ ID NO: 366985
accaucaaacucuacuuua

SEQ ID NO: 366987 - RNA, 19 nt, Artificial Sequence
  Description of Artificial Sequence: Synthetic oligonucleotide
  Sense Strand Starting at position 614 of SEQ ID NO: 318728
uguaguuuccaggacccaa

SEQ ID NO: 366988 - RNA, 19 nt, Artificial Sequence
  Description of Artificial Sequence: Synthetic oligonucleotide
  Antisense Strand to SEQ ID NO: 366987
uuggguccuggaaacuaca

SEQ ID NO: 366989 - RNA, 19 nt, Artificial Sequence
  Description of Artificial Sequence: Synthetic oligonucleotide
  Sense Strand Starting at position 614 of SEQ ID NO: 318767
gcucuaaagcuggacuuua

SEQ ID NO: 366990 - RNA, 19 nt, Artificial Sequence
  Description of Artificial Sequence: Synthetic oligonucleotide
  Antisense Strand to SEQ ID NO: 366989
uaaaguccagcuuuagagc

SEQ ID NO: 366991 - RNA, 19 nt, Artificial Sequence
  Description of Artificial Sequence: Synthetic oligonucleotide
  Sense Strand Starting at position 614 of SEQ ID NO: 318800
uaagguaucccagagguuu

SEQ ID NO: 366992 - RNA, 19 nt, Artificial Sequence
  Description of Artificial Sequence: Synthetic oligonucleotide
  Antisense Strand to SEQ ID NO: 366991
aaaccucugggauaccuua

SEQ ID NO: 366993 - RNA, 19 nt, Artificial Sequence
  Description of Artificial Sequence: Synthetic oligonucleotide
  Sense Strand Starting at position 614 of SEQ ID NO: 318802
agguaucccagagguuuau

SEQ ID NO: 366994 - RNA, 19 nt, Artificial Sequence
  Description of Artificial Sequence: Synthetic oligonucleotide
  Antisense Strand to SEQ ID NO: 366993
auaaaccucugggauaccu

SEQ ID NO: 366995 - RNA, 19 nt, Artificial Sequence
  Description of Artificial Sequence: Synthetic oligonucleotide
  Sense Strand Starting at position 614 of SEQ ID NO: 318806
aucccagagguuuauugua

SEQ ID NO: 366996 - RNA, 19 nt, Artificial Sequence
  Description of Artificial Sequence: Synthetic oligonucleotide
  Antisense Strand to SEQ ID NO: 366995
uacaauaaaccucugggau

SEQ ID NO: 366997 - RNA, 19 nt, Artificial Sequence
  Description of Artificial Sequence: Synthetic oligonucleotide
  Sense Strand Starting at position 614 of SEQ ID NO: 318808
cccagagguuuauuguaag

SEQ ID NO: 366998 - RNA, 19 nt, Artificial Sequence
  Description of Artificial Sequence: Synthetic oligonucleotide
  Antisense Strand to SEQ ID NO: 366997
cuuacaauaaaccucuggg

SEQ ID NO: 366999 - RNA, 19 nt, Artificial Sequence
  Description of Artificial Sequence: Synthetic oligonucleotide
  Sense Strand Starting at position 614 of SEQ ID NO: 318819
auuguaagauauccuugga

SEQ ID NO: 367000 - RNA, 19 nt, Artificial Sequence
  Description of Artificial Sequence: Synthetic oligonucleotide
  Antisense Strand to SEQ ID NO: 366999
uccaaggauaucuuacaau

SEQ ID NO: 367001 - RNA, 19 nt, Artificial Sequence
  Description of Artificial Sequence: Synthetic oligonucleotide
  Sense Strand Starting at position 614 of SEQ ID NO: 318822
guaagauauccuuggaauc

SEQ ID NO: 367002 - RNA, 19 nt, Artificial Sequence
  Description of Artificial Sequence: Synthetic oligonucleotide
  Antisense Strand to SEQ ID NO: 367001
gauuccaaggauaucuuac

SEQ ID NO: 367003 - RNA, 19 nt, Artificial Sequence
  Description of Artificial Sequence: Synthetic oligonucleotide
  Sense Strand Starting at position 614 of SEQ ID NO: 318832
cuuggaauccaugggugaa

SEQ ID NO: 367004 - RNA, 19 nt, Artificial Sequence
  Description of Artificial Sequence: Synthetic oligonucleotide
  Antisense Strand to SEQ ID NO: 367003
uucacccauggauuccaag

SEQ ID NO: 367005 - RNA, 19 nt, Artificial Sequence
  Description of Artificial Sequence: Synthetic oligonucleotide
  Sense Strand Starting at position 614 of SEQ ID NO: 318833
uuggaauccaugggugaag

SEQ ID NO: 367006 - RNA, 19 nt, Artificial Sequence
  Description of Artificial Sequence: Synthetic oligonucleotide
  Antisense Strand to SEQ ID NO: 367005
cuucacccauggauuccaa

SEQ ID NO: 367007 - RNA, 19 nt, Artificial Sequence
  Description of Artificial Sequence: Synthetic oligonucleotide
  Sense Strand Starting at position 614 of SEQ ID NO: 318942
acccgauucugaucuaauu

SEQ ID NO: 367008 - RNA, 19 nt, Artificial Sequence
  Description of Artificial Sequence: Synthetic oligonucleotide
  Antisense Strand to SEQ ID NO: 367007
aauuagaucagaaucgggu

SEQ ID NO: 367009 - RNA, 19 nt, Artificial Sequence
  Description of Artificial Sequence: Synthetic oligonucleotide
  Sense Strand Starting at position 614 of SEQ ID NO: 318978
uguacuguccuagacaaga

SEQ ID NO: 367010 - RNA, 19 nt, Artificial Sequence
  Description of Artificial Sequence: Synthetic oligonucleotide
  Antisense Strand to SEQ ID NO: 367009
ucuugucuaggacaguaca

SEQ ID NO: 367011 - RNA, 19 nt, Artificial Sequence
  Description of Artificial Sequence: Synthetic oligonucleotide
  Sense Strand Starting at position 614 of SEQ ID NO: 319027
guuccaaggcuuuaugaaa

SEQ ID NO: 367012 - RNA, 19 nt, Artificial Sequence
  Description of Artificial Sequence: Synthetic oligonucleotide
  Antisense Strand to SEQ ID NO: 367011
uuucauaaagccuuggaac

SEQ ID NO: 367013 - RNA, 19 nt, Artificial Sequence
  Description of Artificial Sequence: Synthetic oligonucleotide
  Sense Strand Starting at position 615 of SEQ ID NO: 315641
acaucaucagcaugaaguu

SEQ ID NO: 367014 - RNA, 19 nt, Artificial Sequence
  Description of Artificial Sequence: Synthetic oligonucleotide
  Antisense Strand to SEQ ID NO: 367013
aacuucaugcugaugaugu

SEQ ID NO: 367015 - RNA, 19 nt, Artificial Sequence
  Description of Artificial Sequence: Synthetic oligonucleotide
  Sense Strand Starting at position 615 of SEQ ID NO: 315769
ucagaccuuuacuuguuau

SEQ ID NO: 367016 - RNA, 19 nt, Artificial Sequence
  Description of Artificial Sequence: Synthetic oligonucleotide
  Antisense Strand to SEQ ID NO: 367015
auaacaaguaaaggucuga

SEQ ID NO: 367017 - RNA, 19 nt, Artificial Sequence
  Description of Artificial Sequence: Synthetic oligonucleotide
  Sense Strand Starting at position 615 of SEQ ID NO: 316042
gccuaaggcaaaugguaaa

SEQ ID NO: 367018 - RNA, 19 nt, Artificial Sequence
  Description of Artificial Sequence: Synthetic oligonucleotide
  Antisense Strand to SEQ ID NO: 367017
uuuaccauuugccuuaggc

SEQ ID NO: 367019 - RNA, 19 nt, Artificial Sequence
  Description of Artificial Sequence: Synthetic oligonucleotide
  Sense Strand Starting at position 615 of SEQ ID NO: 316095
agacauuauuguuugauac

SEQ ID NO: 367020 - RNA, 19 nt, Artificial Sequence
  Description of Artificial Sequence: Synthetic oligonucleotide
  Antisense Strand to SEQ ID NO: 367019
guaucaaacaauaaugucu

SEQ ID NO: 367021 - RNA, 19 nt, Artificial Sequence
  Description of Artificial Sequence: Synthetic oligonucleotide
  Sense Strand Starting at position 615 of SEQ ID NO: 316116
cuggauauaugcucucaau

SEQ ID NO: 367022 - RNA, 19 nt, Artificial Sequence
  Description of Artificial Sequence: Synthetic oligonucleotide
  Antisense Strand to SEQ ID NO: 367021
auugagagcauauauccag

SEQ ID NO: 367023 - RNA, 19 nt, Artificial Sequence
  Description of Artificial Sequence: Synthetic oligonucleotide
  Sense Strand Starting at position 615 of SEQ ID NO: 316162
cuuucuaaucugggugaua

SEQ ID NO: 367024 - RNA, 19 nt, Artificial Sequence
  Description of Artificial Sequence: Synthetic oligonucleotide
  Antisense Strand to SEQ ID NO: 367023
uaucacccagauuagaaag

SEQ ID NO: 367025 - RNA, 19 nt, Artificial Sequence
  Description of Artificial Sequence: Synthetic oligonucleotide
  Sense Strand Starting at position 615 of SEQ ID NO: 316163
uuucuaaucugggugauaa

SEQ ID NO: 367026 - RNA, 19 nt, Artificial Sequence
  Description of Artificial Sequence: Synthetic oligonucleotide
  Antisense Strand to SEQ ID NO: 367025
uuaucacccagauuagaaa

SEQ ID NO: 367027 - RNA, 19 nt, Artificial Sequence
  Description of Artificial Sequence: Synthetic oligonucleotide
  Sense Strand Starting at position 615 of SEQ ID NO: 316164
uucuaaucugggugauaac

SEQ ID NO: 367028 - RNA, 19 nt, Artificial Sequence
  Description of Artificial Sequence: Synthetic oligonucleotide
  Antisense Strand to SEQ ID NO: 367027
guuaucacccagauuagaa

SEQ ID NO: 367029 - RNA, 19 nt, Artificial Sequence
  Description of Artificial Sequence: Synthetic oligonucleotide
  Sense Strand Starting at position 615 of SEQ ID NO: 316231
aguagaucaccuggugauu

SEQ ID NO: 367030 - RNA, 19 nt, Artificial Sequence
  Description of Artificial Sequence: Synthetic oligonucleotide
  Antisense Strand to SEQ ID NO: 367029
aaucaccaggugaucuacu

SEQ ID NO: 367031 - RNA, 19 nt, Artificial Sequence
  Description of Artificial Sequence: Synthetic oligonucleotide
  Sense Strand Starting at position 615 of SEQ ID NO: 316237
ucaccuggugauuggcaua

SEQ ID NO: 367032 - RNA, 19 nt, Artificial Sequence
  Description of Artificial Sequence: Synthetic oligonucleotide
  Antisense Strand to SEQ ID NO: 367031
uaugccaaucaccagguga

SEQ ID NO: 367033 - RNA, 19 nt, Artificial Sequence
  Description of Artificial Sequence: Synthetic oligonucleotide
  Sense Strand Starting at position 615 of SEQ ID NO: 316422
cucugcuuucuggauugaa

SEQ ID NO: 367034 - RNA, 19 nt, Artificial Sequence
  Description of Artificial Sequence: Synthetic oligonucleotide
  Antisense Strand to SEQ ID NO: 367033
uucaauccagaaagcagag

SEQ ID NO: 367035 - RNA, 19 nt, Artificial Sequence
  Description of Artificial Sequence: Synthetic oligonucleotide
  Sense Strand Starting at position 615 of SEQ ID NO: 316517
ugacuuggauguucugaca

SEQ ID NO: 367036 - RNA, 19 nt, Artificial Sequence
  Description of Artificial Sequence: Synthetic oligonucleotide
  Antisense Strand to SEQ ID NO: 367035
ugucagaacauccaaguca

SEQ ID NO: 367037 - RNA, 19 nt, Artificial Sequence
  Description of Artificial Sequence: Synthetic oligonucleotide
  Sense Strand Starting at position 615 of SEQ ID NO: 316573
acuaauguccugugaggga

SEQ ID NO: 367038 - RNA, 19 nt, Artificial Sequence
  Description of Artificial Sequence: Synthetic oligonucleotide
  Antisense Strand to SEQ ID NO: 367037
ucccucacaggacauuagu

SEQ ID NO: 367039 - RNA, 19 nt, Artificial Sequence
  Description of Artificial Sequence: Synthetic oligonucleotide
  Sense Strand Starting at position 615 of SEQ ID NO: 316729
ugaugauugaacugugaca

SEQ ID NO: 367040 - RNA, 19 nt, Artificial Sequence
  Description of Artificial Sequence: Synthetic oligonucleotide
  Antisense Strand to SEQ ID NO: 367039
ugucacaguucaaucauca

SEQ ID NO: 367041 - RNA, 19 nt, Artificial Sequence
  Description of Artificial Sequence: Synthetic oligonucleotide
  Sense Strand Starting at position 615 of SEQ ID NO: 316731
augauugaacugugacauc

SEQ ID NO: 367042 - RNA, 19 nt, Artificial Sequence
  Description of Artificial Sequence: Synthetic oligonucleotide
  Antisense Strand to SEQ ID NO: 367041
gaugucacaguucaaucau

SEQ ID NO: 367043 - RNA, 19 nt, Artificial Sequence
  Description of Artificial Sequence: Synthetic oligonucleotide
  Sense Strand Starting at position 615 of SEQ ID NO: 316937
gacuuucugucaguagacu

SEQ ID NO: 367044 - RNA, 19 nt, Artificial Sequence
  Description of Artificial Sequence: Synthetic oligonucleotide
  Antisense Strand to SEQ ID NO: 367043
agucuacugacagaaaguc

SEQ ID NO: 367045 - RNA, 19 nt, Artificial Sequence
  Description of Artificial Sequence: Synthetic oligonucleotide
  Sense Strand Starting at position 615 of SEQ ID NO: 316938
acuuucugucaguagacuu

SEQ ID NO: 367046 - RNA, 19 nt, Artificial Sequence
  Description of Artificial Sequence: Synthetic oligonucleotide
  Antisense Strand to SEQ ID NO: 367045
aagucuacugacagaaagu

SEQ ID NO: 367047 - RNA, 19 nt, Artificial Sequence
  Description of Artificial Sequence: Synthetic oligonucleotide
  Sense Strand Starting at position 615 of SEQ ID NO: 316983
uuaaaucuguguucugaua

SEQ ID NO: 367048 - RNA, 19 nt, Artificial Sequence
  Description of Artificial Sequence: Synthetic oligonucleotide
  Antisense Strand to SEQ ID NO: 367047
uaucagaacacagauuuaa

SEQ ID NO: 367049 - RNA, 19 nt, Artificial Sequence
  Description of Artificial Sequence: Synthetic oligonucleotide
  Sense Strand Starting at position 615 of SEQ ID NO: 317228
ccaggaacuucugucuuga

SEQ ID NO: 367050 - RNA, 19 nt, Artificial Sequence
  Description of Artificial Sequence: Synthetic oligonucleotide
  Antisense Strand to SEQ ID NO: 367049
ucaagacagaaguuccugg

SEQ ID NO: 367051 - RNA, 19 nt, Artificial Sequence
  Description of Artificial Sequence: Synthetic oligonucleotide
  Sense Strand Starting at position 615 of SEQ ID NO: 317230
aggaacuucugucuugauu

SEQ ID NO: 367052 - RNA, 19 nt, Artificial Sequence
  Description of Artificial Sequence: Synthetic oligonucleotide
  Antisense Strand to SEQ ID NO: 367051
aaucaagacagaaguuccu

SEQ ID NO: 367053 - RNA, 19 nt, Artificial Sequence
  Description of Artificial Sequence: Synthetic oligonucleotide
  Sense Strand Starting at position 615 of SEQ ID NO: 317246
auugguuucucaucccuua

SEQ ID NO: 367054 - RNA, 19 nt, Artificial Sequence
  Description of Artificial Sequence: Synthetic oligonucleotide
  Antisense Strand to SEQ ID NO: 367053
uaagggaugagaaaccaau

SEQ ID NO: 367055 - RNA, 19 nt, Artificial Sequence
  Description of Artificial Sequence: Synthetic oligonucleotide
  Sense Strand Starting at position 615 of SEQ ID NO: 317356
ggugaauucuuucucuaaa

SEQ ID NO: 367056 - RNA, 19 nt, Artificial Sequence
  Description of Artificial Sequence: Synthetic oligonucleotide
  Antisense Strand to SEQ ID NO: 367055
uuuagagaaagaauucacc

SEQ ID NO: 367057 - RNA, 19 nt, Artificial Sequence
  Description of Artificial Sequence: Synthetic oligonucleotide
  Sense Strand Starting at position 615 of SEQ ID NO: 317417
auacaucugucaucaugau

SEQ ID NO: 367058 - RNA, 19 nt, Artificial Sequence
  Description of Artificial Sequence: Synthetic oligonucleotide
  Antisense Strand to SEQ ID NO: 367057
aucaugaugacagauguau

SEQ ID NO: 367059 - RNA, 19 nt, Artificial Sequence
  Description of Artificial Sequence: Synthetic oligonucleotide
  Sense Strand Starting at position 615 of SEQ ID NO: 317431
augauaaacugugucauca

SEQ ID NO: 367060 - RNA, 19 nt, Artificial Sequence
  Description of Artificial Sequence: Synthetic oligonucleotide
  Antisense Strand to SEQ ID NO: 367059
ugaugacacaguuuaucau

SEQ ID NO: 367061 - RNA, 19 nt, Artificial Sequence
  Description of Artificial Sequence: Synthetic oligonucleotide
  Sense Strand Starting at position 615 of SEQ ID NO: 317673
gaaccuguuccucauaggu

SEQ ID NO: 367062 - RNA, 19 nt, Artificial Sequence
  Description of Artificial Sequence: Synthetic oligonucleotide
  Antisense Strand to SEQ ID NO: 367061
accuaugaggaacagguuc

SEQ ID NO: 367063 - RNA, 19 nt, Artificial Sequence
  Description of Artificial Sequence: Synthetic oligonucleotide
  Sense Strand Starting at position 615 of SEQ ID NO: 317697
cugcuaagguuccuaggaa

SEQ ID NO: 367064 - RNA, 19 nt, Artificial Sequence
  Description of Artificial Sequence: Synthetic oligonucleotide
  Antisense Strand to SEQ ID NO: 367063
uuccuaggaaccuuagcag

SEQ ID NO: 367065 - RNA, 19 nt, Artificial Sequence
  Description of Artificial Sequence: Synthetic oligonucleotide
  Sense Strand Starting at position 615 of SEQ ID NO: 317735
gauuucugguccucgguau

SEQ ID NO: 367066 - RNA, 19 nt, Artificial Sequence
  Description of Artificial Sequence: Synthetic oligonucleotide
  Antisense Strand to SEQ ID NO: 367065
auaccgaggaccagaaauc

SEQ ID NO: 367067 - RNA, 19 nt, Artificial Sequence
  Description of Artificial Sequence: Synthetic oligonucleotide
  Sense Strand Starting at position 615 of SEQ ID NO: 317736
auuucugguccucgguauu

SEQ ID NO: 367068 - RNA, 19 nt, Artificial Sequence
  Description of Artificial Sequence: Synthetic oligonucleotide
  Antisense Strand to SEQ ID NO: 367067
aauaccgaggaccagaaau

SEQ ID NO: 367069 - RNA, 19 nt, Artificial Sequence
  Description of Artificial Sequence: Synthetic oligonucleotide
  Sense Strand Starting at position 615 of SEQ ID NO: 317821
cucaguauugugcaagauu

SEQ ID NO: 367070 - RNA, 19 nt, Artificial Sequence
  Description of Artificial Sequence: Synthetic oligonucleotide
  Antisense Strand to SEQ ID NO: 367069
aaucuugcacaauacugag

SEQ ID NO: 367071 - RNA, 19 nt, Artificial Sequence
  Description of Artificial Sequence: Synthetic oligonucleotide
  Sense Strand Starting at position 615 of SEQ ID NO: 318022
aggauuauuccauguuucu

SEQ ID NO: 367072 - RNA, 19 nt, Artificial Sequence
  Description of Artificial Sequence: Synthetic oligonucleotide
  Antisense Strand to SEQ ID NO: 367071
agaaacauggaauaauccu

SEQ ID NO: 367073 - RNA, 19 nt, Artificial Sequence
  Description of Artificial Sequence: Synthetic oligonucleotide
  Sense Strand Starting at position 615 of SEQ ID NO: 318040
ucgagcauuuccucuguuu

SEQ ID NO: 367074 - RNA, 19 nt, Artificial Sequence
  Description of Artificial Sequence: Synthetic oligonucleotide
  Antisense Strand to SEQ ID NO: 367073
aaacagaggaaaugcucga

SEQ ID NO: 367075 - RNA, 19 nt, Artificial Sequence
  Description of Artificial Sequence: Synthetic oligonucleotide
  Sense Strand Starting at position 615 of SEQ ID NO: 318145
ucguacugccgccuauauu

SEQ ID NO: 367076 - RNA, 19 nt, Artificial Sequence
  Description of Artificial Sequence: Synthetic oligonucleotide
  Antisense Strand to SEQ ID NO: 367075
aauauaggcggcaguacga

SEQ ID NO: 367077 - RNA, 19 nt, Artificial Sequence
  Description of Artificial Sequence: Synthetic oligonucleotide
  Sense Strand Starting at position 615 of SEQ ID NO: 318203
gggugucaacuugguaaau

SEQ ID NO: 367078 - RNA, 19 nt, Artificial Sequence
  Description of Artificial Sequence: Synthetic oligonucleotide
  Antisense Strand to SEQ ID NO: 367077
auuuaccaaguugacaccc

SEQ ID NO: 367079 - RNA, 19 nt, Artificial Sequence
  Description of Artificial Sequence: Synthetic oligonucleotide
  Sense Strand Starting at position 615 of SEQ ID NO: 318204
ggugucaacuugguaaaug

SEQ ID NO: 367080 - RNA, 19 nt, Artificial Sequence
  Description of Artificial Sequence: Synthetic oligonucleotide
  Antisense Strand to SEQ ID NO: 367079
cauuuaccaaguugacacc

SEQ ID NO: 367081 - RNA, 19 nt, Artificial Sequence
  Description of Artificial Sequence: Synthetic oligonucleotide
  Sense Strand Starting at position 615 of SEQ ID NO: 318239
ugucuaacugagcauugga

SEQ ID NO: 367082 - RNA, 19 nt, Artificial Sequence
  Description of Artificial Sequence: Synthetic oligonucleotide
  Antisense Strand to SEQ ID NO: 367081
uccaaugcucaguuagaca

SEQ ID NO: 367083 - RNA, 19 nt, Artificial Sequence
  Description of Artificial Sequence: Synthetic oligonucleotide
  Sense Strand Starting at position 615 of SEQ ID NO: 318333
gauggauauagaggugucu

SEQ ID NO: 367084 - RNA, 19 nt, Artificial Sequence
  Description of Artificial Sequence: Synthetic oligonucleotide
  Antisense Strand to SEQ ID NO: 367083
agacaccucuauauccauc

SEQ ID NO: 367085 - RNA, 19 nt, Artificial Sequence
  Description of Artificial Sequence: Synthetic oligonucleotide
  Sense Strand Starting at position 615 of SEQ ID NO: 318953
gugugaaagcaauaugaau

SEQ ID NO: 367086 - RNA, 19 nt, Artificial Sequence
  Description of Artificial Sequence: Synthetic oligonucleotide
  Antisense Strand to SEQ ID NO: 367085
auucauauugcuuucacac

SEQ ID NO: 367087 - RNA, 19 nt, Artificial Sequence
  Description of Artificial Sequence: Synthetic oligonucleotide
  Sense Strand Starting at position 615 of SEQ ID NO: 319004
gcauuauuuccugggcuag

SEQ ID NO: 367088 - RNA, 19 nt, Artificial Sequence
  Description of Artificial Sequence: Synthetic oligonucleotide
  Antisense Strand to SEQ ID NO: 367087
cuagcccaggaaauaaugc

SEQ ID NO: 367089 - RNA, 19 nt, Artificial Sequence
  Description of Artificial Sequence: Synthetic oligonucleotide
  Sense Strand Starting at position 615 of SEQ ID NO: 319032
guacccuacucucuugaga

SEQ ID NO: 367090 - RNA, 19 nt, Artificial Sequence
  Description of Artificial Sequence: Synthetic oligonucleotide
  Antisense Strand to SEQ ID NO: 367089
ucucaagagaguaggguac

SEQ ID NO: 367091 - RNA, 19 nt, Artificial Sequence
  Description of Artificial Sequence: Synthetic oligonucleotide
  Sense Strand Starting at position 615 of SEQ ID NO: 319169
auguaaucccacuguaaau

SEQ ID NO: 367092 - RNA, 19 nt, Artificial Sequence
  Description of Artificial Sequence: Synthetic oligonucleotide
  Antisense Strand to SEQ ID NO: 367091
auuuacagugggauuacau

SEQ ID NO: 367093 - RNA, 19 nt, Artificial Sequence
  Description of Artificial Sequence: Synthetic oligonucleotide
  Sense Strand Starting at position 616 of SEQ ID NO: 315721
ccagguagacacugucaaa

SEQ ID NO: 367094 - RNA, 19 nt, Artificial Sequence
  Description of Artificial Sequence: Synthetic oligonucleotide
  Antisense Strand to SEQ ID NO: 367093
uuugacagugucuaccugg

SEQ ID NO: 367095 - RNA, 19 nt, Artificial Sequence
  Description of Artificial Sequence: Synthetic oligonucleotide
  Sense Strand Starting at position 616 of SEQ ID NO: 315774
gcucacauacaagguuuaa

SEQ ID NO: 367096 - RNA, 19 nt, Artificial Sequence
  Description of Artificial Sequence: Synthetic oligonucleotide
  Antisense Strand to SEQ ID NO: 367095
uuaaaccuuguaugugagc

SEQ ID NO: 367097 - RNA, 19 nt, Artificial Sequence
  Description of Artificial Sequence: Synthetic oligonucleotide
  Sense Strand Starting at position 616 of SEQ ID NO: 315866
cguguuuggagguauauau

SEQ ID NO: 367098 - RNA, 19 nt, Artificial Sequence
  Description of Artificial Sequence: Synthetic oligonucleotide
  Antisense Strand to SEQ ID NO: 367097
auauauaccuccaaacacg

SEQ ID NO: 367099 - RNA, 19 nt, Artificial Sequence
  Description of Artificial Sequence: Synthetic oligonucleotide
  Sense Strand Starting at position 616 of SEQ ID NO: 315913
gggaaauaucuuugaccuu

SEQ ID NO: 367100 - RNA, 19 nt, Artificial Sequence
  Description of Artificial Sequence: Synthetic oligonucleotide
  Antisense Strand to SEQ ID NO: 367099
aaggucaaagauauuuccc

SEQ ID NO: 367101 - RNA, 19 nt, Artificial Sequence
  Description of Artificial Sequence: Synthetic oligonucleotide
  Sense Strand Starting at position 616 of SEQ ID NO: 316069
ccuggaucuuaucugaauu

SEQ ID NO: 367102 - RNA, 19 nt, Artificial Sequence
  Description of Artificial Sequence: Synthetic oligonucleotide
  Antisense Strand to SEQ ID NO: 367101
aauucagauaagauccagg

SEQ ID NO: 367103 - RNA, 19 nt, Artificial Sequence
  Description of Artificial Sequence: Synthetic oligonucleotide
  Sense Strand Starting at position 616 of SEQ ID NO: 316111
uguuucuuaccugagcaua

SEQ ID NO: 367104 - RNA, 19 nt, Artificial Sequence
  Description of Artificial Sequence: Synthetic oligonucleotide
  Antisense Strand to SEQ ID NO: 367103
uaugcucagguaagaaaca

SEQ ID NO: 367105 - RNA, 19 nt, Artificial Sequence
  Description of Artificial Sequence: Synthetic oligonucleotide
  Sense Strand Starting at position 616 of SEQ ID NO: 316144
gguuguuccgagcaagaag

SEQ ID NO: 367106 - RNA, 19 nt, Artificial Sequence
  Description of Artificial Sequence: Synthetic oligonucleotide
  Antisense Strand to SEQ ID NO: 367105
cuucuugcucggaacaacc

SEQ ID NO: 367107 - RNA, 19 nt, Artificial Sequence
  Description of Artificial Sequence: Synthetic oligonucleotide
  Sense Strand Starting at position 616 of SEQ ID NO: 316254
gugggucuccaucacugua

SEQ ID NO: 367108 - RNA, 19 nt, Artificial Sequence
  Description of Artificial Sequence: Synthetic oligonucleotide
  Antisense Strand to SEQ ID NO: 367107
uacagugauggagacccac

SEQ ID NO: 367109 - RNA, 19 nt, Artificial Sequence
  Description of Artificial Sequence: Synthetic oligonucleotide
  Sense Strand Starting at position 616 of SEQ ID NO: 316456
aguucagagcuuggugaaa

SEQ ID NO: 367110 - RNA, 19 nt, Artificial Sequence
  Description of Artificial Sequence: Synthetic oligonucleotide
  Antisense Strand to SEQ ID NO: 367109
uuucaccaagcucugaacu

SEQ ID NO: 367111 - RNA, 19 nt, Artificial Sequence
  Description of Artificial Sequence: Synthetic oligonucleotide
  Sense Strand Starting at position 616 of SEQ ID NO: 316492
uaaagugauguguaaucaa

SEQ ID NO: 367112 - RNA, 19 nt, Artificial Sequence
  Description of Artificial Sequence: Synthetic oligonucleotide
  Antisense Strand to SEQ ID NO: 367111
uugauuacacaucacuuua

SEQ ID NO: 367113 - RNA, 19 nt, Artificial Sequence
  Description of Artificial Sequence: Synthetic oligonucleotide
  Sense Strand Starting at position 616 of SEQ ID NO: 316495
agugauguguaaucaagua

SEQ ID NO: 367114 - RNA, 19 nt, Artificial Sequence
  Description of Artificial Sequence: Synthetic oligonucleotide
  Antisense Strand to SEQ ID NO: 367113
uacuugauuacacaucacu

SEQ ID NO: 367115 - RNA, 19 nt, Artificial Sequence
  Description of Artificial Sequence: Synthetic oligonucleotide
  Sense Strand Starting at position 616 of SEQ ID NO: 316542
uaagaaauguugccucaug

SEQ ID NO: 367116 - RNA, 19 nt, Artificial Sequence
  Description of Artificial Sequence: Synthetic oligonucleotide
  Antisense Strand to SEQ ID NO: 367115
caugaggcaacauuucuua

SEQ ID NO: 367117 - RNA, 19 nt, Artificial Sequence
  Description of Artificial Sequence: Synthetic oligonucleotide
  Sense Strand Starting at position 616 of SEQ ID NO: 316556
ucaugcaagucuguagaga

SEQ ID NO: 367118 - RNA, 19 nt, Artificial Sequence
  Description of Artificial Sequence: Synthetic oligonucleotide
  Antisense Strand to SEQ ID NO: 367117
ucucuacagacuugcauga

SEQ ID NO: 367119 - RNA, 19 nt, Artificial Sequence
  Description of Artificial Sequence: Synthetic oligonucleotide
  Sense Strand Starting at position 616 of SEQ ID NO: 316557
caugcaagucuguagagau

SEQ ID NO: 367120 - RNA, 19 nt, Artificial Sequence
  Description of Artificial Sequence: Synthetic oligonucleotide
  Antisense Strand to SEQ ID NO: 367119
aucucuacagacuugcaug

SEQ ID NO: 367121 - RNA, 19 nt, Artificial Sequence
  Description of Artificial Sequence: Synthetic oligonucleotide
  Sense Strand Starting at position 616 of SEQ ID NO: 316587
auaacuagagaauguugua

SEQ ID NO: 367122 - RNA, 19 nt, Artificial Sequence
  Description of Artificial Sequence: Synthetic oligonucleotide
  Antisense Strand to SEQ ID NO: 367121
uacaacauucucuaguuau

SEQ ID NO: 367123 - RNA, 19 nt, Artificial Sequence
  Description of Artificial Sequence: Synthetic oligonucleotide
  Sense Strand Starting at position 616 of SEQ ID NO: 316594
gagaauguuguauguaaau

SEQ ID NO: 367124 - RNA, 19 nt, Artificial Sequence
  Description of Artificial Sequence: Synthetic oligonucleotide
  Antisense Strand to SEQ ID NO: 367123
auuuacauacaacauucuc

SEQ ID NO: 367125 - RNA, 19 nt, Artificial Sequence
  Description of Artificial Sequence: Synthetic oligonucleotide
  Sense Strand Starting at position 616 of SEQ ID NO: 316600
guuguauguaaauaagugu

SEQ ID NO: 367126 - RNA, 19 nt, Artificial Sequence
  Description of Artificial Sequence: Synthetic oligonucleotide
  Antisense Strand to SEQ ID NO: 367125
acacuuauuuacauacaac

SEQ ID NO: 367127 - RNA, 19 nt, Artificial Sequence
  Description of Artificial Sequence: Synthetic oligonucleotide
  Sense Strand Starting at position 616 of SEQ ID NO: 316668
uguuuacauucuccuuuga

SEQ ID NO: 367128 - RNA, 19 nt, Artificial Sequence
  Description of Artificial Sequence: Synthetic oligonucleotide
  Antisense Strand to SEQ ID NO: 367127
ucaaaggagaauguaaaca

SEQ ID NO: 367129 - RNA, 19 nt, Artificial Sequence
  Description of Artificial Sequence: Synthetic oligonucleotide
  Sense Strand Starting at position 616 of SEQ ID NO: 316740
cugaacaggguuugacuua

SEQ ID NO: 367130 - RNA, 19 nt, Artificial Sequence
  Description of Artificial Sequence: Synthetic oligonucleotide
  Antisense Strand to SEQ ID NO: 367129
uaagucaaacccuguucag

SEQ ID NO: 367131 - RNA, 19 nt, Artificial Sequence
  Description of Artificial Sequence: Synthetic oligonucleotide
  Sense Strand Starting at position 616 of SEQ ID NO: 316747
ggguuugacuuauucuuuc

SEQ ID NO: 367132 - RNA, 19 nt, Artificial Sequence
  Description of Artificial Sequence: Synthetic oligonucleotide
  Antisense Strand to SEQ ID NO: 367131
gaaagaauaagucaaaccc

SEQ ID NO: 367133 - RNA, 19 nt, Artificial Sequence
  Description of Artificial Sequence: Synthetic oligonucleotide
  Sense Strand Starting at position 616 of SEQ ID NO: 317422
ugggauaacuuguuaagac

SEQ ID NO: 367134 - RNA, 19 nt, Artificial Sequence
  Description of Artificial Sequence: Synthetic oligonucleotide
  Antisense Strand to SEQ ID NO: 367133
gucuuaacaaguuauccca

SEQ ID NO: 367135 - RNA, 19 nt, Artificial Sequence
  Description of Artificial Sequence: Synthetic oligonucleotide
  Sense Strand Starting at position 616 of SEQ ID NO: 317474
gaguucugacuuuggaaau

SEQ ID NO: 367136 - RNA, 19 nt, Artificial Sequence
  Description of Artificial Sequence: Synthetic oligonucleotide
  Antisense Strand to SEQ ID NO: 367135
auuuccaaagucagaacuc

SEQ ID NO: 367137 - RNA, 19 nt, Artificial Sequence
  Description of Artificial Sequence: Synthetic oligonucleotide
  Sense Strand Starting at position 616 of SEQ ID NO: 317599
cagugucacugauuugcca

SEQ ID NO: 367138 - RNA, 19 nt, Artificial Sequence
  Description of Artificial Sequence: Synthetic oligonucleotide
  Antisense Strand to SEQ ID NO: 367137
uggcaaaucagugacacug

SEQ ID NO: 367139 - RNA, 19 nt, Artificial Sequence
  Description of Artificial Sequence: Synthetic oligonucleotide
  Sense Strand Starting at position 616 of SEQ ID NO: 317867
ccagcaacaucuuuagguu

SEQ ID NO: 367140 - RNA, 19 nt, Artificial Sequence
  Description of Artificial Sequence: Synthetic oligonucleotide
  Antisense Strand to SEQ ID NO: 367139
aaccuaaagauguugcugg

SEQ ID NO: 367141 - RNA, 19 nt, Artificial Sequence
  Description of Artificial Sequence: Synthetic oligonucleotide
  Sense Strand Starting at position 616 of SEQ ID NO: 317881
agguucuaaagcgaguaaa

SEQ ID NO: 367142 - RNA, 19 nt, Artificial Sequence
  Description of Artificial Sequence: Synthetic oligonucleotide
  Antisense Strand to SEQ ID NO: 367141
uuuacucgcuuuagaaccu

SEQ ID NO: 367143 - RNA, 19 nt, Artificial Sequence
  Description of Artificial Sequence: Synthetic oligonucleotide
  Sense Strand Starting at position 616 of SEQ ID NO: 317976
gguuaacacuucuuuggga

SEQ ID NO: 367144 - RNA, 19 nt, Artificial Sequence
  Description of Artificial Sequence: Synthetic oligonucleotide
  Antisense Strand to SEQ ID NO: 367143
ucccaaagaaguguuaacc

SEQ ID NO: 367145 - RNA, 19 nt, Artificial Sequence
  Description of Artificial Sequence: Synthetic oligonucleotide
  Sense Strand Starting at position 616 of SEQ ID NO: 318464
uaaaguagaguuugauggu

SEQ ID NO: 367146 - RNA, 19 nt, Artificial Sequence
  Description of Artificial Sequence: Synthetic oligonucleotide
  Antisense Strand to SEQ ID NO: 367145
accaucaaacucuacuuua

SEQ ID NO: 367147 - RNA, 19 nt, Artificial Sequence
  Description of Artificial Sequence: Synthetic oligonucleotide
  Sense Strand Starting at position 616 of SEQ ID NO: 318486
uguaguuuccaggacccaa

SEQ ID NO: 367148 - RNA, 19 nt, Artificial Sequence
  Description of Artificial Sequence: Synthetic oligonucleotide
  Antisense Strand to SEQ ID NO: 367147
uuggguccuggaaacuaca

SEQ ID NO: 367149 - RNA, 19 nt, Artificial Sequence
  Description of Artificial Sequence: Synthetic oligonucleotide
  Sense Strand Starting at position 616 of SEQ ID NO: 318525
gcucuaaagcuggacuuua

SEQ ID NO: 367150 - RNA, 19 nt, Artificial Sequence
  Description of Artificial Sequence: Synthetic oligonucleotide
  Antisense Strand to SEQ ID NO: 367149
uaaaguccagcuuuagagc

SEQ ID NO: 367151 - RNA, 19 nt, Artificial Sequence
  Description of Artificial Sequence: Synthetic oligonucleotide
  Sense Strand Starting at position 616 of SEQ ID NO: 318558
uaagguaucccagagguuu

SEQ ID NO: 367152 - RNA, 19 nt, Artificial Sequence
  Description of Artificial Sequence: Synthetic oligonucleotide
  Antisense Strand to SEQ ID NO: 367151
aaaccucugggauaccuua

SEQ ID NO: 367153 - RNA, 19 nt, Artificial Sequence
  Description of Artificial Sequence: Synthetic oligonucleotide
  Sense Strand Starting at position 616 of SEQ ID NO: 318560
agguaucccagagguuuau

SEQ ID NO: 367154 - RNA, 19 nt, Artificial Sequence
  Description of Artificial Sequence: Synthetic oligonucleotide
  Antisense Strand to SEQ ID NO: 367153
auaaaccucugggauaccu

SEQ ID NO: 367155 - RNA, 19 nt, Artificial Sequence
  Description of Artificial Sequence: Synthetic oligonucleotide
  Sense Strand Starting at position 616 of SEQ ID NO: 318564
aucccagagguuuauugua

SEQ ID NO: 367156 - RNA, 19 nt, Artificial Sequence
  Description of Artificial Sequence: Synthetic oligonucleotide
  Antisense Strand to SEQ ID NO: 367155
uacaauaaaccucugggau

SEQ ID NO: 367157 - RNA, 19 nt, Artificial Sequence
  Description of Artificial Sequence: Synthetic oligonucleotide
  Sense Strand Starting at position 616 of SEQ ID NO: 318566
cccagagguuuauuguaag

SEQ ID NO: 367158 - RNA, 19 nt, Artificial Sequence
  Description of Artificial Sequence: Synthetic oligonucleotide
  Antisense Strand to SEQ ID NO: 367157
cuuacaauaaaccucuggg

SEQ ID NO: 367159 - RNA, 19 nt, Artificial Sequence
  Description of Artificial Sequence: Synthetic oligonucleotide
  Sense Strand Starting at position 616 of SEQ ID NO: 318577
auuguaagauauccuugga

SEQ ID NO: 367160 - RNA, 19 nt, Artificial Sequence
  Description of Artificial Sequence: Synthetic oligonucleotide
  Antisense Strand to SEQ ID NO: 367159
uccaaggauaucuuacaau

SEQ ID NO: 367161 - RNA, 19 nt, Artificial Sequence
  Description of Artificial Sequence: Synthetic oligonucleotide
  Sense Strand Starting at position 616 of SEQ ID NO: 318580
guaagauauccuuggaauc

SEQ ID NO: 367162 - RNA, 19 nt, Artificial Sequence
  Description of Artificial Sequence: Synthetic oligonucleotide
  Antisense Strand to SEQ ID NO: 367161
gauuccaaggauaucuuac

SEQ ID NO: 367163 - RNA, 19 nt, Artificial Sequence
  Description of Artificial Sequence: Synthetic oligonucleotide
  Sense Strand Starting at position 616 of SEQ ID NO: 318590
cuuggaauccaugggugaa

SEQ ID NO: 367164 - RNA, 19 nt, Artificial Sequence
  Description of Artificial Sequence: Synthetic oligonucleotide
  Antisense Strand to SEQ ID NO: 367163
uucacccauggauuccaag

SEQ ID NO: 367165 - RNA, 19 nt, Artificial Sequence
  Description of Artificial Sequence: Synthetic oligonucleotide
  Sense Strand Starting at position 616 of SEQ ID NO: 318591
uuggaauccaugggugaag

SEQ ID NO: 367166 - RNA, 19 nt, Artificial Sequence
  Description of Artificial Sequence: Synthetic oligonucleotide
  Antisense Strand to SEQ ID NO: 367165
cuucacccauggauuccaa

SEQ ID NO: 367167 - RNA, 19 nt, Artificial Sequence
  Description of Artificial Sequence: Synthetic oligonucleotide
  Sense Strand Starting at position 616 of SEQ ID NO: 318700
acccgauucugaucuaauu

SEQ ID NO: 367168 - RNA, 19 nt, Artificial Sequence
  Description of Artificial Sequence: Synthetic oligonucleotide
  Antisense Strand to SEQ ID NO: 367167
aauuagaucagaaucgggu

SEQ ID NO: 367169 - RNA, 19 nt, Artificial Sequence
  Description of Artificial Sequence: Synthetic oligonucleotide
  Sense Strand Starting at position 616 of SEQ ID NO: 318736
uguacuguccuagacaaga

SEQ ID NO: 367170 - RNA, 19 nt, Artificial Sequence
  Description of Artificial Sequence: Synthetic oligonucleotide
  Antisense Strand to SEQ ID NO: 367169
ucuugucuaggacaguaca

SEQ ID NO: 367171 - RNA, 19 nt, Artificial Sequence
  Description of Artificial Sequence: Synthetic oligonucleotide
  Sense Strand Starting at position 616 of SEQ ID NO: 318785
guuccaaggcuuuaugaaa

SEQ ID NO: 367172 - RNA, 19 nt, Artificial Sequence
  Description of Artificial Sequence: Synthetic oligonucleotide
  Antisense Strand to SEQ ID NO: 367171
uuucauaaagccuuggaac

SEQ ID NO: 367173 - RNA, 19 nt, Artificial Sequence
  Description of Artificial Sequence: Synthetic oligonucleotide
  Sense Strand Starting at position 617 of SEQ ID NO: 315406
gagguccuguaguugaauu

SEQ ID NO: 367174 - RNA, 19 nt, Artificial Sequence
  Description of Artificial Sequence: Synthetic oligonucleotide
  Antisense Strand to SEQ ID NO: 367173
aauucaacuacaggaccuc

SEQ ID NO: 367175 - RNA, 19 nt, Artificial Sequence
  Description of Artificial Sequence: Synthetic oligonucleotide
  Sense Strand Starting at position 617 of SEQ ID NO: 315429
uccguuacugauuaugaga

SEQ ID NO: 367176 - RNA, 19 nt, Artificial Sequence
  Description of Artificial Sequence: Synthetic oligonucleotide
  Antisense Strand to SEQ ID NO: 367175
ucucauaaucaguaacgga

SEQ ID NO: 367177 - RNA, 19 nt, Artificial Sequence
  Description of Artificial Sequence: Synthetic oligonucleotide
  Sense Strand Starting at position 617 of SEQ ID NO: 315600
acaugagaaacuugagugu

SEQ ID NO: 367178 - RNA, 19 nt, Artificial Sequence
  Description of Artificial Sequence: Synthetic oligonucleotide
  Antisense Strand to SEQ ID NO: 367177
acacucaaguuucucaugu

SEQ ID NO: 367179 - RNA, 19 nt, Artificial Sequence
  Description of Artificial Sequence: Synthetic oligonucleotide
  Sense Strand Starting at position 617 of SEQ ID NO: 315603
ugagaaacuugagugugaa

SEQ ID NO: 367180 - RNA, 19 nt, Artificial Sequence
  Description of Artificial Sequence: Synthetic oligonucleotide
  Antisense Strand to SEQ ID NO: 367179
uucacacucaaguuucuca

SEQ ID NO: 367181 - RNA, 19 nt, Artificial Sequence
  Description of Artificial Sequence: Synthetic oligonucleotide
  Sense Strand Starting at position 617 of SEQ ID NO: 315604
gagaaacuugagugugaac

SEQ ID NO: 367182 - RNA, 19 nt, Artificial Sequence
  Description of Artificial Sequence: Synthetic oligonucleotide
  Antisense Strand to SEQ ID NO: 367181
guucacacucaaguuucuc

SEQ ID NO: 367183 - RNA, 19 nt, Artificial Sequence
  Description of Artificial Sequence: Synthetic oligonucleotide
  Sense Strand Starting at position 617 of SEQ ID NO: 315623
acaaguaauuuagagcauu

SEQ ID NO: 367184 - RNA, 19 nt, Artificial Sequence
  Description of Artificial Sequence: Synthetic oligonucleotide
  Antisense Strand to SEQ ID NO: 367183
aaugcucuaaauuacuugu

SEQ ID NO: 367185 - RNA, 19 nt, Artificial Sequence
  Description of Artificial Sequence: Synthetic oligonucleotide
  Sense Strand Starting at position 617 of SEQ ID NO: 315634
agagcauuggccuggagac

SEQ ID NO: 367186 - RNA, 19 nt, Artificial Sequence
  Description of Artificial Sequence: Synthetic oligonucleotide
  Antisense Strand to SEQ ID NO: 367185
gucuccaggccaaugcucu

SEQ ID NO: 367187 - RNA, 19 nt, Artificial Sequence
  Description of Artificial Sequence: Synthetic oligonucleotide
  Sense Strand Starting at position 617 of SEQ ID NO: 315785
cugagcuccugaucucaga

SEQ ID NO: 367188 - RNA, 19 nt, Artificial Sequence
  Description of Artificial Sequence: Synthetic oligonucleotide
  Antisense Strand to SEQ ID NO: 367187
ucugagaucaggagcucag

SEQ ID NO: 367189 - RNA, 19 nt, Artificial Sequence
  Description of Artificial Sequence: Synthetic oligonucleotide
  Sense Strand Starting at position 617 of SEQ ID NO: 315816
aaagcaugacucgggauua

SEQ ID NO: 367190 - RNA, 19 nt, Artificial Sequence
  Description of Artificial Sequence: Synthetic oligonucleotide
  Antisense Strand to SEQ ID NO: 367189
uaaucccgagucaugcuuu

SEQ ID NO: 367191 - RNA, 19 nt, Artificial Sequence
  Description of Artificial Sequence: Synthetic oligonucleotide
  Sense Strand Starting at position 617 of SEQ ID NO: 315826
ucgggauuaucuccaaguu

SEQ ID NO: 367192 - RNA, 19 nt, Artificial Sequence
  Description of Artificial Sequence: Synthetic oligonucleotide
  Antisense Strand to SEQ ID NO: 367191
aacuuggagauaaucccga

SEQ ID NO: 367193 - RNA, 19 nt, Artificial Sequence
  Description of Artificial Sequence: Synthetic oligonucleotide
  Sense Strand Starting at position 617 of SEQ ID NO: 315827
cgggauuaucuccaaguua

SEQ ID NO: 367194 - RNA, 19 nt, Artificial Sequence
  Description of Artificial Sequence: Synthetic oligonucleotide
  Antisense Strand to SEQ ID NO: 367193
uaacuuggagauaaucccg

SEQ ID NO: 367195 - RNA, 19 nt, Artificial Sequence
  Description of Artificial Sequence: Synthetic oligonucleotide
  Sense Strand Starting at position 617 of SEQ ID NO: 315939
agauuccuuuaaguaguaa

SEQ ID NO: 367196 - RNA, 19 nt, Artificial Sequence
  Description of Artificial Sequence: Synthetic oligonucleotide
  Antisense Strand to SEQ ID NO: 367195
uuacuacuuaaaggaaucu

SEQ ID NO: 367197 - RNA, 19 nt, Artificial Sequence
  Description of Artificial Sequence: Synthetic oligonucleotide
  Sense Strand Starting at position 617 of SEQ ID NO: 316064
aaucaaguaucaguaugga

SEQ ID NO: 367198 - RNA, 19 nt, Artificial Sequence
  Description of Artificial Sequence: Synthetic oligonucleotide
  Antisense Strand to SEQ ID NO: 367197
uccauacugauacuugauu

SEQ ID NO: 367199 - RNA, 19 nt, Artificial Sequence
  Description of Artificial Sequence: Synthetic oligonucleotide
  Sense Strand Starting at position 617 of SEQ ID NO: 316085
gaugguuucggccaaagag

SEQ ID NO: 367200 - RNA, 19 nt, Artificial Sequence
  Description of Artificial Sequence: Synthetic oligonucleotide
  Antisense Strand to SEQ ID NO: 367199
cucuuuggccgaaaccauc

SEQ ID NO: 367201 - RNA, 19 nt, Artificial Sequence
  Description of Artificial Sequence: Synthetic oligonucleotide
  Sense Strand Starting at position 617 of SEQ ID NO: 316229
ucuccuaucccaggaugau

SEQ ID NO: 367202 - RNA, 19 nt, Artificial Sequence
  Description of Artificial Sequence: Synthetic oligonucleotide
  Antisense Strand to SEQ ID NO: 367201
aucauccugggauaggaga

SEQ ID NO: 367203 - RNA, 19 nt, Artificial Sequence
  Description of Artificial Sequence: Synthetic oligonucleotide
  Sense Strand Starting at position 617 of SEQ ID NO: 316444
augguaacuucggcagaau

SEQ ID NO: 367204 - RNA, 19 nt, Artificial Sequence
  Description of Artificial Sequence: Synthetic oligonucleotide
  Antisense Strand to SEQ ID NO: 367203
auucugccgaaguuaccau

SEQ ID NO: 367205 - RNA, 19 nt, Artificial Sequence
  Description of Artificial Sequence: Synthetic oligonucleotide
  Sense Strand Starting at position 617 of SEQ ID NO: 316445
ugguaacuucggcagaaua

SEQ ID NO: 367206 - RNA, 19 nt, Artificial Sequence
  Description of Artificial Sequence: Synthetic oligonucleotide
  Antisense Strand to SEQ ID NO: 367205
uauucugccgaaguuacca

SEQ ID NO: 367207 - RNA, 19 nt, Artificial Sequence
  Description of Artificial Sequence: Synthetic oligonucleotide
  Sense Strand Starting at position 617 of SEQ ID NO: 316447
guaacuucggcagaauauc

SEQ ID NO: 367208 - RNA, 19 nt, Artificial Sequence
  Description of Artificial Sequence: Synthetic oligonucleotide
  Antisense Strand to SEQ ID NO: 367207
gauauucugccgaaguuac

SEQ ID NO: 367209 - RNA, 19 nt, Artificial Sequence
  Description of Artificial Sequence: Synthetic oligonucleotide
  Sense Strand Starting at position 617 of SEQ ID NO: 316705
agcuuuaaacuagggcaau

SEQ ID NO: 367210 - RNA, 19 nt, Artificial Sequence
  Description of Artificial Sequence: Synthetic oligonucleotide
  Antisense Strand to SEQ ID NO: 367209
auugcccuaguuuaaagcu

SEQ ID NO: 367211 - RNA, 19 nt, Artificial Sequence
  Description of Artificial Sequence: Synthetic oligonucleotide
  Sense Strand Starting at position 617 of SEQ ID NO: 316716
agggcaauugguggcuaau

SEQ ID NO: 367212 - RNA, 19 nt, Artificial Sequence
  Description of Artificial Sequence: Synthetic oligonucleotide
  Antisense Strand to SEQ ID NO: 367211
auuagccaccaauugcccu

SEQ ID NO: 367213 - RNA, 19 nt, Artificial Sequence
  Description of Artificial Sequence: Synthetic oligonucleotide
  Sense Strand Starting at position 617 of SEQ ID NO: 316718
ggcaauugguggcuaauaa

SEQ ID NO: 367214 - RNA, 19 nt, Artificial Sequence
  Description of Artificial Sequence: Synthetic oligonucleotide
  Antisense Strand to SEQ ID NO: 367213
uuauuagccaccaauugcc

SEQ ID NO: 367215 - RNA, 19 nt, Artificial Sequence
  Description of Artificial Sequence: Synthetic oligonucleotide
  Sense Strand Starting at position 617 of SEQ ID NO: 316719
gcaauugguggcuaauaag

SEQ ID NO: 367216 - RNA, 19 nt, Artificial Sequence
  Description of Artificial Sequence: Synthetic oligonucleotide
  Antisense Strand to SEQ ID NO: 367215
cuuauuagccaccaauugc

SEQ ID NO: 367217 - RNA, 19 nt, Artificial Sequence
  Description of Artificial Sequence: Synthetic oligonucleotide
  Sense Strand Starting at position 617 of SEQ ID NO: 317619
uguuucuccuuagucauuu

SEQ ID NO: 367218 - RNA, 19 nt, Artificial Sequence
  Description of Artificial Sequence: Synthetic oligonucleotide
  Antisense Strand to SEQ ID NO: 367217
aaaugacuaaggagaaaca

SEQ ID NO: 367219 - RNA, 19 nt, Artificial Sequence
  Description of Artificial Sequence: Synthetic oligonucleotide
  Sense Strand Starting at position 617 of SEQ ID NO: 317779
aguuauggccguaaguguu

SEQ ID NO: 367220 - RNA, 19 nt, Artificial Sequence
  Description of Artificial Sequence: Synthetic oligonucleotide
  Antisense Strand to SEQ ID NO: 367219
aacacuuacggccauaacu

SEQ ID NO: 367221 - RNA, 19 nt, Artificial Sequence
  Description of Artificial Sequence: Synthetic oligonucleotide
  Sense Strand Starting at position 617 of SEQ ID NO: 317802
gggacaugauuagaggacu

SEQ ID NO: 367222 - RNA, 19 nt, Artificial Sequence
  Description of Artificial Sequence: Synthetic oligonucleotide
  Antisense Strand to SEQ ID NO: 367221
aguccucuaaucauguccc

SEQ ID NO: 367223 - RNA, 19 nt, Artificial Sequence
  Description of Artificial Sequence: Synthetic oligonucleotide
  Sense Strand Starting at position 617 of SEQ ID NO: 317938
cgaugaggccugugaagaa

SEQ ID NO: 367224 - RNA, 19 nt, Artificial Sequence
  Description of Artificial Sequence: Synthetic oligonucleotide
  Antisense Strand to SEQ ID NO: 367223
uucuucacaggccucaucg

SEQ ID NO: 367225 - RNA, 19 nt, Artificial Sequence
  Description of Artificial Sequence: Synthetic oligonucleotide
  Sense Strand Starting at position 617 of SEQ ID NO: 318121
ggagcucgacccuagauga

SEQ ID NO: 367226 - RNA, 19 nt, Artificial Sequence
  Description of Artificial Sequence: Synthetic oligonucleotide
  Antisense Strand to SEQ ID NO: 367225
ucaucuagggucgagcucc

SEQ ID NO: 367227 - RNA, 19 nt, Artificial Sequence
  Description of Artificial Sequence: Synthetic oligonucleotide
  Sense Strand Starting at position 617 of SEQ ID NO: 318216
agggcuaauuggucuccau

SEQ ID NO: 367228 - RNA, 19 nt, Artificial Sequence
  Description of Artificial Sequence: Synthetic oligonucleotide
  Antisense Strand to SEQ ID NO: 367227
auggagaccaauuagcccu

SEQ ID NO: 367229 - RNA, 19 nt, Artificial Sequence
  Description of Artificial Sequence: Synthetic oligonucleotide
  Sense Strand Starting at position 617 of SEQ ID NO: 318296
ggaccaguuaccugaugcu

SEQ ID NO: 367230 - RNA, 19 nt, Artificial Sequence
  Description of Artificial Sequence: Synthetic oligonucleotide
  Antisense Strand to SEQ ID NO: 367229
agcaucagguaacuggucc

SEQ ID NO: 367231 - RNA, 19 nt, Artificial Sequence
  Description of Artificial Sequence: Synthetic oligonucleotide
  Sense Strand Starting at position 617 of SEQ ID NO: 318404
gaaauuguaucagcaugau

SEQ ID NO: 367232 - RNA, 19 nt, Artificial Sequence
  Description of Artificial Sequence: Synthetic oligonucleotide
  Antisense Strand to SEQ ID NO: 367231
aucaugcugauacaauuuc

SEQ ID NO: 367233 - RNA, 19 nt, Artificial Sequence
  Description of Artificial Sequence: Synthetic oligonucleotide
  Sense Strand Starting at position 617 of SEQ ID NO: 318407
auuguaucagcaugaucau

SEQ ID NO: 367234 - RNA, 19 nt, Artificial Sequence
  Description of Artificial Sequence: Synthetic oligonucleotide
  Antisense Strand to SEQ ID NO: 367233
augaucaugcugauacaau

SEQ ID NO: 367235 - RNA, 19 nt, Artificial Sequence
  Description of Artificial Sequence: Synthetic oligonucleotide
  Sense Strand Starting at position 617 of SEQ ID NO: 318413
ucagcaugaucaucacagu

SEQ ID NO: 367236 - RNA, 19 nt, Artificial Sequence
  Description of Artificial Sequence: Synthetic oligonucleotide
  Antisense Strand to SEQ ID NO: 367235
acugugaugaucaugcuga

SEQ ID NO: 367237 - RNA, 19 nt, Artificial Sequence
  Description of Artificial Sequence: Synthetic oligonucleotide
  Sense Strand Starting at position 617 of SEQ ID NO: 318534
aagacuaggugagaauaca

SEQ ID NO: 367238 - RNA, 19 nt, Artificial Sequence
  Description of Artificial Sequence: Synthetic oligonucleotide
  Antisense Strand to SEQ ID NO: 367237
uguauucucaccuagucuu

SEQ ID NO: 367239 - RNA, 19 nt, Artificial Sequence
  Description of Artificial Sequence: Synthetic oligonucleotide
  Sense Strand Starting at position 617 of SEQ ID NO: 318689
acaguaugggaauguuaau

SEQ ID NO: 367240 - RNA, 19 nt, Artificial Sequence
  Description of Artificial Sequence: Synthetic oligonucleotide
  Antisense Strand to SEQ ID NO: 367239
auuaacauucccauacugu

SEQ ID NO: 367241 - RNA, 19 nt, Artificial Sequence
  Description of Artificial Sequence: Synthetic oligonucleotide
  Sense Strand Starting at position 617 of SEQ ID NO: 318696
gggaauguuaauggcauua

SEQ ID NO: 367242 - RNA, 19 nt, Artificial Sequence
  Description of Artificial Sequence: Synthetic oligonucleotide
  Antisense Strand to SEQ ID NO: 367241
uaaugccauuaacauuccc

SEQ ID NO: 367243 - RNA, 19 nt, Artificial Sequence
  Description of Artificial Sequence: Synthetic oligonucleotide
  Sense Strand Starting at position 617 of SEQ ID NO: 318717
ucauaacguucuucugaau

SEQ ID NO: 367244 - RNA, 19 nt, Artificial Sequence
  Description of Artificial Sequence: Synthetic oligonucleotide
  Antisense Strand to SEQ ID NO: 367243
auucagaagaacguuauga

SEQ ID NO: 367245 - RNA, 19 nt, Artificial Sequence
  Description of Artificial Sequence: Synthetic oligonucleotide
  Sense Strand Starting at position 617 of SEQ ID NO: 318921
agaauuuggugccacugaa

SEQ ID NO: 367246 - RNA, 19 nt, Artificial Sequence
  Description of Artificial Sequence: Synthetic oligonucleotide
  Antisense Strand to SEQ ID NO: 367245
uucaguggcaccaaauucu

SEQ ID NO: 367247 - RNA, 19 nt, Artificial Sequence
  Description of Artificial Sequence: Synthetic oligonucleotide
  Sense Strand Starting at position 617 of SEQ ID NO: 318945
agaauugccucugauuuac

SEQ ID NO: 367248 - RNA, 19 nt, Artificial Sequence
  Description of Artificial Sequence: Synthetic oligonucleotide
  Antisense Strand to SEQ ID NO: 367247
guaaaucagaggcaauucu

SEQ ID NO: 367249 - RNA, 19 nt, Artificial Sequence
  Description of Artificial Sequence: Synthetic oligonucleotide
  Sense Strand Starting at position 617 of SEQ ID NO: 319123
auugauagauggcuauuga

SEQ ID NO: 367250 - RNA, 19 nt, Artificial Sequence
  Description of Artificial Sequence: Synthetic oligonucleotide
  Antisense Strand to SEQ ID NO: 367249
ucaauagccaucuaucaau

SEQ ID NO: 367251 - RNA, 19 nt, Artificial Sequence
  Description of Artificial Sequence: Synthetic oligonucleotide
  Sense Strand Starting at position 617 of SEQ ID NO: 319205
uuuguagguucucuugaau

SEQ ID NO: 367252 - RNA, 19 nt, Artificial Sequence
  Description of Artificial Sequence: Synthetic oligonucleotide
  Antisense Strand to SEQ ID NO: 367251
auucaagagaaccuacaaa

SEQ ID NO: 367253 - RNA, 19 nt, Artificial Sequence
  Description of Artificial Sequence: Synthetic oligonucleotide
  Sense Strand Starting at position 618 of SEQ ID NO: 315331
gugugguggccugaguagu

SEQ ID NO: 367254 - RNA, 19 nt, Artificial Sequence
  Description of Artificial Sequence: Synthetic oligonucleotide
  Antisense Strand to SEQ ID NO: 367253
acuacucaggccaccacac

SEQ ID NO: 367255 - RNA, 19 nt, Artificial Sequence
  Description of Artificial Sequence: Synthetic oligonucleotide
  Sense Strand Starting at position 618 of SEQ ID NO: 315508
agaccuaaucuugguaacu

SEQ ID NO: 367256 - RNA, 19 nt, Artificial Sequence
  Description of Artificial Sequence: Synthetic oligonucleotide
  Antisense Strand to SEQ ID NO: 367255
aguuaccaagauuaggucu

SEQ ID NO: 367257 - RNA, 19 nt, Artificial Sequence
  Description of Artificial Sequence: Synthetic oligonucleotide
  Sense Strand Starting at position 618 of SEQ ID NO: 315675
gcugcaaucuggccuuuaa

SEQ ID NO: 367258 - RNA, 19 nt, Artificial Sequence
  Description of Artificial Sequence: Synthetic oligonucleotide
  Antisense Strand to SEQ ID NO: 367257
uuaaaggccagauugcagc

SEQ ID NO: 367259 - RNA, 19 nt, Artificial Sequence
  Description of Artificial Sequence: Synthetic oligonucleotide
  Sense Strand Starting at position 618 of SEQ ID NO: 315688
cuuuaauucugagaagcaa

SEQ ID NO: 367260 - RNA, 19 nt, Artificial Sequence
  Description of Artificial Sequence: Synthetic oligonucleotide
  Antisense Strand to SEQ ID NO: 367259
uugcuucucagaauuaaag

SEQ ID NO: 367261 - RNA, 19 nt, Artificial Sequence
  Description of Artificial Sequence: Synthetic oligonucleotide
  Sense Strand Starting at position 618 of SEQ ID NO: 315951
gggacaaucaccugagcuu

SEQ ID NO: 367262 - RNA, 19 nt, Artificial Sequence
  Description of Artificial Sequence: Synthetic oligonucleotide
  Antisense Strand to SEQ ID NO: 367261
aagcucaggugauuguccc

SEQ ID NO: 367263 - RNA, 19 nt, Artificial Sequence
  Description of Artificial Sequence: Synthetic oligonucleotide
  Sense Strand Starting at position 618 of SEQ ID NO: 315973
aagucaugagccgagauca

SEQ ID NO: 367264 - RNA, 19 nt, Artificial Sequence
  Description of Artificial Sequence: Synthetic oligonucleotide
  Antisense Strand to SEQ ID NO: 367263
ugaucucggcucaugacuu

SEQ ID NO: 367265 - RNA, 19 nt, Artificial Sequence
  Description of Artificial Sequence: Synthetic oligonucleotide
  Sense Strand Starting at position 618 of SEQ ID NO: 316230
cucacuagaucccuuugua

SEQ ID NO: 367266 - RNA, 19 nt, Artificial Sequence
  Description of Artificial Sequence: Synthetic oligonucleotide
  Antisense Strand to SEQ ID NO: 367265
uacaaagggaucuagugag

SEQ ID NO: 367267 - RNA, 19 nt, Artificial Sequence
  Description of Artificial Sequence: Synthetic oligonucleotide
  Sense Strand Starting at position 618 of SEQ ID NO: 316233
acuagaucccuuuguaguc

SEQ ID NO: 367268 - RNA, 19 nt, Artificial Sequence
  Description of Artificial Sequence: Synthetic oligonucleotide
  Antisense Strand to SEQ ID NO: 367267
gacuacaaagggaucuagu

SEQ ID NO: 367269 - RNA, 19 nt, Artificial Sequence
  Description of Artificial Sequence: Synthetic oligonucleotide
  Sense Strand Starting at position 618 of SEQ ID NO: 316238
aucccuuuguagucacuau

SEQ ID NO: 367270 - RNA, 19 nt, Artificial Sequence
  Description of Artificial Sequence: Synthetic oligonucleotide
  Antisense Strand to SEQ ID NO: 367269
auagugacuacaaagggau

SEQ ID NO: 367271 - RNA, 19 nt, Artificial Sequence
  Description of Artificial Sequence: Synthetic oligonucleotide
  Sense Strand Starting at position 618 of SEQ ID NO: 316305
cacguuaccucuccaguga

SEQ ID NO: 367272 - RNA, 19 nt, Artificial Sequence
  Description of Artificial Sequence: Synthetic oligonucleotide
  Antisense Strand to SEQ ID NO: 367271
ucacuggagagguaacgug

SEQ ID NO: 367273 - RNA, 19 nt, Artificial Sequence
  Description of Artificial Sequence: Synthetic oligonucleotide
  Sense Strand Starting at position 618 of SEQ ID NO: 316306
acguuaccucuccagugau

SEQ ID NO: 367274 - RNA, 19 nt, Artificial Sequence
  Description of Artificial Sequence: Synthetic oligonucleotide
  Antisense Strand to SEQ ID NO: 367273
aucacuggagagguaacgu

SEQ ID NO: 367275 - RNA, 19 nt, Artificial Sequence
  Description of Artificial Sequence: Synthetic oligonucleotide
  Sense Strand Starting at position 618 of SEQ ID NO: 316309
uuaccucuccagugauuau

SEQ ID NO: 367276 - RNA, 19 nt, Artificial Sequence
  Description of Artificial Sequence: Synthetic oligonucleotide
  Antisense Strand to SEQ ID NO: 367275
auaaucacuggagagguaa

SEQ ID NO: 367277 - RNA, 19 nt, Artificial Sequence
  Description of Artificial Sequence: Synthetic oligonucleotide
  Sense Strand Starting at position 618 of SEQ ID NO: 317678
agccaaucaccugaguaaa

SEQ ID NO: 367278 - RNA, 19 nt, Artificial Sequence
  Description of Artificial Sequence: Synthetic oligonucleotide
  Antisense Strand to SEQ ID NO: 367277
uuuacucaggugauuggcu

SEQ ID NO: 367279 - RNA, 19 nt, Artificial Sequence
  Description of Artificial Sequence: Synthetic oligonucleotide
  Sense Strand Starting at position 618 of SEQ ID NO: 317745
agaaauacaucagaauggu

SEQ ID NO: 367280 - RNA, 19 nt, Artificial Sequence
  Description of Artificial Sequence: Synthetic oligonucleotide
  Antisense Strand to SEQ ID NO: 367279
accauucugauguauuucu

SEQ ID NO: 367281 - RNA, 19 nt, Artificial Sequence
  Description of Artificial Sequence: Synthetic oligonucleotide
  Sense Strand Starting at position 618 of SEQ ID NO: 317751
acaucagaaugguauuuau

SEQ ID NO: 367282 - RNA, 19 nt, Artificial Sequence
  Description of Artificial Sequence: Synthetic oligonucleotide
  Antisense Strand to SEQ ID NO: 367281
auaaauaccauucugaugu

SEQ ID NO: 367283 - RNA, 19 nt, Artificial Sequence
  Description of Artificial Sequence: Synthetic oligonucleotide
  Sense Strand Starting at position 618 of SEQ ID NO: 317811
uguauuucucuuuguacaa

SEQ ID NO: 367284 - RNA, 19 nt, Artificial Sequence
  Description of Artificial Sequence: Synthetic oligonucleotide
  Antisense Strand to SEQ ID NO: 367283
uuguacaaagagaaauaca

SEQ ID NO: 367285 - RNA, 19 nt, Artificial Sequence
  Description of Artificial Sequence: Synthetic oligonucleotide
  Sense Strand Starting at position 618 of SEQ ID NO: 317859
cgaaguguuaaagagcaca

SEQ ID NO: 367286 - RNA, 19 nt, Artificial Sequence
  Description of Artificial Sequence: Synthetic oligonucleotide
  Antisense Strand to SEQ ID NO: 367285
ugugcucuuuaacacuucg

SEQ ID NO: 367287 - RNA, 19 nt, Artificial Sequence
  Description of Artificial Sequence: Synthetic oligonucleotide
  Sense Strand Starting at position 618 of SEQ ID NO: 317862
aguguuaaagagcacaauu

SEQ ID NO: 367288 - RNA, 19 nt, Artificial Sequence
  Description of Artificial Sequence: Synthetic oligonucleotide
  Antisense Strand to SEQ ID NO: 367287
aauugugcucuuuaacacu

SEQ ID NO: 367289 - RNA, 19 nt, Artificial Sequence
  Description of Artificial Sequence: Synthetic oligonucleotide
  Sense Strand Starting at position 618 of SEQ ID NO: 317901
cgauauagaugagagucaa

SEQ ID NO: 367290 - RNA, 19 nt, Artificial Sequence
  Description of Artificial Sequence: Synthetic oligonucleotide
  Antisense Strand to SEQ ID NO: 367289
uugacucucaucuauaucg

SEQ ID NO: 367291 - RNA, 19 nt, Artificial Sequence
  Description of Artificial Sequence: Synthetic oligonucleotide
  Sense Strand Starting at position 618 of SEQ ID NO: 317944
gccuuaagacacugagaaa

SEQ ID NO: 367292 - RNA, 19 nt, Artificial Sequence
  Description of Artificial Sequence: Synthetic oligonucleotide
  Antisense Strand to SEQ ID NO: 367291
uuucucagugucuuaaggc

SEQ ID NO: 367293 - RNA, 19 nt, Artificial Sequence
  Description of Artificial Sequence: Synthetic oligonucleotide
  Sense Strand Starting at position 618 of SEQ ID NO: 317977
ugaugccaaugugaauuua

SEQ ID NO: 367294 - RNA, 19 nt, Artificial Sequence
  Description of Artificial Sequence: Synthetic oligonucleotide
  Antisense Strand to SEQ ID NO: 367293
uaaauucacauuggcauca

SEQ ID NO: 367295 - RNA, 19 nt, Artificial Sequence
  Description of Artificial Sequence: Synthetic oligonucleotide
  Sense Strand Starting at position 618 of SEQ ID NO: 318109
agagcaaauuucuaaagcu

SEQ ID NO: 367296 - RNA, 19 nt, Artificial Sequence
  Description of Artificial Sequence: Synthetic oligonucleotide
  Antisense Strand to SEQ ID NO: 367295
agcuuuagaaauuugcucu

SEQ ID NO: 367297 - RNA, 19 nt, Artificial Sequence
  Description of Artificial Sequence: Synthetic oligonucleotide
  Sense Strand Starting at position 618 of SEQ ID NO: 318128
cuggcaagacaugguaaga

SEQ ID NO: 367298 - RNA, 19 nt, Artificial Sequence
  Description of Artificial Sequence: Synthetic oligonucleotide
  Antisense Strand to SEQ ID NO: 367297
ucuuaccaugucuugccag

SEQ ID NO: 367299 - RNA, 19 nt, Artificial Sequence
  Description of Artificial Sequence: Synthetic oligonucleotide
  Sense Strand Starting at position 618 of SEQ ID NO: 318229
agaggaaucuggcacagaa

SEQ ID NO: 367300 - RNA, 19 nt, Artificial Sequence
  Description of Artificial Sequence: Synthetic oligonucleotide
  Antisense Strand to SEQ ID NO: 367299
uucugugccagauuccucu

SEQ ID NO: 367301 - RNA, 19 nt, Artificial Sequence
  Description of Artificial Sequence: Synthetic oligonucleotide
  Sense Strand Starting at position 618 of SEQ ID NO: 318315
agagaacauuugcauagca

SEQ ID NO: 367302 - RNA, 19 nt, Artificial Sequence
  Description of Artificial Sequence: Synthetic oligonucleotide
  Antisense Strand to SEQ ID NO: 367301
ugcuaugcaaauguucucu

SEQ ID NO: 367303 - RNA, 19 nt, Artificial Sequence
  Description of Artificial Sequence: Synthetic oligonucleotide
  Sense Strand Starting at position 618 of SEQ ID NO: 318447
cacucagcaguuggauaua

SEQ ID NO: 367304 - RNA, 19 nt, Artificial Sequence
  Description of Artificial Sequence: Synthetic oligonucleotide
  Antisense Strand to SEQ ID NO: 367303
uauauccaacugcugagug

SEQ ID NO: 367305 - RNA, 19 nt, Artificial Sequence
  Description of Artificial Sequence: Synthetic oligonucleotide
  Sense Strand Starting at position 618 of SEQ ID NO: 318555
cacaaauaguauccgaagu

SEQ ID NO: 367306 - RNA, 19 nt, Artificial Sequence
  Description of Artificial Sequence: Synthetic oligonucleotide
  Antisense Strand to SEQ ID NO: 367305
acuucggauacuauuugug

SEQ ID NO: 367307 - RNA, 19 nt, Artificial Sequence
  Description of Artificial Sequence: Synthetic oligonucleotide
  Sense Strand Starting at position 618 of SEQ ID NO: 318585
agaaaugggcuuugccaau

SEQ ID NO: 367308 - RNA, 19 nt, Artificial Sequence
  Description of Artificial Sequence: Synthetic oligonucleotide
  Antisense Strand to SEQ ID NO: 367307
auuggcaaagcccauuucu

SEQ ID NO: 367309 - RNA, 19 nt, Artificial Sequence
  Description of Artificial Sequence: Synthetic oligonucleotide
  Sense Strand Starting at position 618 of SEQ ID NO: 318604
uugucuugccaggaucuga

SEQ ID NO: 367310 - RNA, 19 nt, Artificial Sequence
  Description of Artificial Sequence: Synthetic oligonucleotide
  Antisense Strand to SEQ ID NO: 367309
ucagauccuggcaagacaa

SEQ ID NO: 367311 - RNA, 19 nt, Artificial Sequence
  Description of Artificial Sequence: Synthetic oligonucleotide
  Sense Strand Starting at position 618 of SEQ ID NO: 318637
acaacagauuaguaacuga

SEQ ID NO: 367312 - RNA, 19 nt, Artificial Sequence
  Description of Artificial Sequence: Synthetic oligonucleotide
  Antisense Strand to SEQ ID NO: 367311
ucaguuacuaaucuguugu

SEQ ID NO: 367313 - RNA, 19 nt, Artificial Sequence
  Description of Artificial Sequence: Synthetic oligonucleotide
  Sense Strand Starting at position 618 of SEQ ID NO: 318686
cugguaagaugcucaucuu

SEQ ID NO: 367314 - RNA, 19 nt, Artificial Sequence
  Description of Artificial Sequence: Synthetic oligonucleotide
  Antisense Strand to SEQ ID NO: 367313
aagaugagcaucuuaccag

SEQ ID NO: 367315 - RNA, 19 nt, Artificial Sequence
  Description of Artificial Sequence: Synthetic oligonucleotide
  Sense Strand Starting at position 618 of SEQ ID NO: 318687
ugguaagaugcucaucuuu

SEQ ID NO: 367316 - RNA, 19 nt, Artificial Sequence
  Description of Artificial Sequence: Synthetic oligonucleotide
  Antisense Strand to SEQ ID NO: 367315
aaagaugagcaucuuacca

SEQ ID NO: 367317 - RNA, 19 nt, Artificial Sequence
  Description of Artificial Sequence: Synthetic oligonucleotide
  Sense Strand Starting at position 618 of SEQ ID NO: 318693
gaugcucaucuuuggcauu

SEQ ID NO: 367318 - RNA, 19 nt, Artificial Sequence
  Description of Artificial Sequence: Synthetic oligonucleotide
  Antisense Strand to SEQ ID NO: 367317
aaugccaaagaugagcauc

SEQ ID NO: 367319 - RNA, 19 nt, Artificial Sequence
  Description of Artificial Sequence: Synthetic oligonucleotide
  Sense Strand Starting at position 618 of SEQ ID NO: 318768
caauuauugugggucaccu

SEQ ID NO: 367320 - RNA, 19 nt, Artificial Sequence
  Description of Artificial Sequence: Synthetic oligonucleotide
  Antisense Strand to SEQ ID NO: 367319
aggugacccacaauaauug

SEQ ID NO: 367321 - RNA, 19 nt, Artificial Sequence
  Description of Artificial Sequence: Synthetic oligonucleotide
  Sense Strand Starting at position 618 of SEQ ID NO: 318770
auuauugugggucaccuau

SEQ ID NO: 367322 - RNA, 19 nt, Artificial Sequence
  Description of Artificial Sequence: Synthetic oligonucleotide
  Antisense Strand to SEQ ID NO: 367321
auaggugacccacaauaau

SEQ ID NO: 367323 - RNA, 19 nt, Artificial Sequence
  Description of Artificial Sequence: Synthetic oligonucleotide
  Sense Strand Starting at position 618 of SEQ ID NO: 318861
gcuuuccaucuauaaugga

SEQ ID NO: 367324 - RNA, 19 nt, Artificial Sequence
  Description of Artificial Sequence: Synthetic oligonucleotide
  Antisense Strand to SEQ ID NO: 367323
uccauuauagauggaaagc

SEQ ID NO: 367325 - RNA, 19 nt, Artificial Sequence
  Description of Artificial Sequence: Synthetic oligonucleotide
  Sense Strand Starting at position 618 of SEQ ID NO: 318885
acaugcaaugacugaagua

SEQ ID NO: 367326 - RNA, 19 nt, Artificial Sequence
  Description of Artificial Sequence: Synthetic oligonucleotide
  Antisense Strand to SEQ ID NO: 367325
uacuucagucauugcaugu

SEQ ID NO: 367327 - RNA, 19 nt, Artificial Sequence
  Description of Artificial Sequence: Synthetic oligonucleotide
  Sense Strand Starting at position 618 of SEQ ID NO: 318916
caaagugcuguauaacaga

SEQ ID NO: 367328 - RNA, 19 nt, Artificial Sequence
  Description of Artificial Sequence: Synthetic oligonucleotide
  Antisense Strand to SEQ ID NO: 367327
ucuguuauacagcacuuug

SEQ ID NO: 367329 - RNA, 19 nt, Artificial Sequence
  Description of Artificial Sequence: Synthetic oligonucleotide
  Sense Strand Starting at position 618 of SEQ ID NO: 319011
ucaguugaauccuugaaag

SEQ ID NO: 367330 - RNA, 19 nt, Artificial Sequence
  Description of Artificial Sequence: Synthetic oligonucleotide
  Antisense Strand to SEQ ID NO: 367329
cuuucaaggauucaacuga

SEQ ID NO: 367331 - RNA, 19 nt, Artificial Sequence
  Description of Artificial Sequence: Synthetic oligonucleotide
  Sense Strand Starting at position 618 of SEQ ID NO: 319141
agggauuacuauccucauc

SEQ ID NO: 367332 - RNA, 19 nt, Artificial Sequence
  Description of Artificial Sequence: Synthetic oligonucleotide
  Antisense Strand to SEQ ID NO: 367331
gaugaggauaguaaucccu

SEQ ID NO: 367333 - RNA, 19 nt, Artificial Sequence
  Description of Artificial Sequence: Synthetic oligonucleotide
  Sense Strand Starting at position 619 of SEQ ID NO: 315240
agaaguuauuucuagugac

SEQ ID NO: 367334 - RNA, 19 nt, Artificial Sequence
  Description of Artificial Sequence: Synthetic oligonucleotide
  Antisense Strand to SEQ ID NO: 367333
gucacuagaaauaacuucu

SEQ ID NO: 367335 - RNA, 19 nt, Artificial Sequence
  Description of Artificial Sequence: Synthetic oligonucleotide
  Sense Strand Starting at position 619 of SEQ ID NO: 315280
augacuugugcuuagagga

SEQ ID NO: 367336 - RNA, 19 nt, Artificial Sequence
  Description of Artificial Sequence: Synthetic oligonucleotide
  Antisense Strand to SEQ ID NO: 367335
uccucuaagcacaagucau

SEQ ID NO: 367337 - RNA, 19 nt, Artificial Sequence
  Description of Artificial Sequence: Synthetic oligonucleotide
  Sense Strand Starting at position 619 of SEQ ID NO: 315760
gcgugagccaguuucucua

SEQ ID NO: 367338 - RNA, 19 nt, Artificial Sequence
  Description of Artificial Sequence: Synthetic oligonucleotide
  Antisense Strand to SEQ ID NO: 367337
uagagaaacuggcucacgc

SEQ ID NO: 367339 - RNA, 19 nt, Artificial Sequence
  Description of Artificial Sequence: Synthetic oligonucleotide
  Sense Strand Starting at position 619 of SEQ ID NO: 315782
uuuagcaguccagacaaau

SEQ ID NO: 367340 - RNA, 19 nt, Artificial Sequence
  Description of Artificial Sequence: Synthetic oligonucleotide
  Antisense Strand to SEQ ID NO: 367339
auuugucuggacugcuaaa

SEQ ID NO: 367341 - RNA, 19 nt, Artificial Sequence
  Description of Artificial Sequence: Synthetic oligonucleotide
  Sense Strand Starting at position 619 of SEQ ID NO: 315859
ugauauucuccuugacaug

SEQ ID NO: 367342 - RNA, 19 nt, Artificial Sequence
  Description of Artificial Sequence: Synthetic oligonucleotide
  Antisense Strand to SEQ ID NO: 367341
caugucaaggagaauauca

SEQ ID NO: 367343 - RNA, 19 nt, Artificial Sequence
  Description of Artificial Sequence: Synthetic oligonucleotide
  Sense Strand Starting at position 619 of SEQ ID NO: 315876
ugccaaauauuguucuuga

SEQ ID NO: 367344 - RNA, 19 nt, Artificial Sequence
  Description of Artificial Sequence: Synthetic oligonucleotide
  Antisense Strand to SEQ ID NO: 367343
ucaagaacaauauuuggca

SEQ ID NO: 367345 - RNA, 19 nt, Artificial Sequence
  Description of Artificial Sequence: Synthetic oligonucleotide
  Sense Strand Starting at position 619 of SEQ ID NO: 315877
gccaaauauuguucuugag

SEQ ID NO: 367346 - RNA, 19 nt, Artificial Sequence
  Description of Artificial Sequence: Synthetic oligonucleotide
  Antisense Strand to SEQ ID NO: 367345
cucaagaacaauauuuggc

SEQ ID NO: 367347 - RNA, 19 nt, Artificial Sequence
  Description of Artificial Sequence: Synthetic oligonucleotide
  Sense Strand Starting at position 619 of SEQ ID NO: 316129
ggaaacauaaucuguguga

SEQ ID NO: 367348 - RNA, 19 nt, Artificial Sequence
  Description of Artificial Sequence: Synthetic oligonucleotide
  Antisense Strand to SEQ ID NO: 367347
ucacacagauuauguuucc

SEQ ID NO: 367349 - RNA, 19 nt, Artificial Sequence
  Description of Artificial Sequence: Synthetic oligonucleotide
  Sense Strand Starting at position 619 of SEQ ID NO: 316130
gaaacauaaucugugugaa

SEQ ID NO: 367350 - RNA, 19 nt, Artificial Sequence
  Description of Artificial Sequence: Synthetic oligonucleotide
  Antisense Strand to SEQ ID NO: 367349
uucacacagauuauguuuc

SEQ ID NO: 367351 - RNA, 19 nt, Artificial Sequence
  Description of Artificial Sequence: Synthetic oligonucleotide
  Sense Strand Starting at position 619 of SEQ ID NO: 316131
aaacauaaucugugugaag

SEQ ID NO: 367352 - RNA, 19 nt, Artificial Sequence
  Description of Artificial Sequence: Synthetic oligonucleotide
  Antisense Strand to SEQ ID NO: 367351
cuucacacagauuauguuu

SEQ ID NO: 367353 - RNA, 19 nt, Artificial Sequence
  Description of Artificial Sequence: Synthetic oligonucleotide
  Sense Strand Starting at position 619 of SEQ ID NO: 316132
aacauaaucugugugaaga

SEQ ID NO: 367354 - RNA, 19 nt, Artificial Sequence
  Description of Artificial Sequence: Synthetic oligonucleotide
  Antisense Strand to SEQ ID NO: 367353
ucuucacacagauuauguu

SEQ ID NO: 367355 - RNA, 19 nt, Artificial Sequence
  Description of Artificial Sequence: Synthetic oligonucleotide
  Sense Strand Starting at position 619 of SEQ ID NO: 316133
acauaaucugugugaagac

SEQ ID NO: 367356 - RNA, 19 nt, Artificial Sequence
  Description of Artificial Sequence: Synthetic oligonucleotide
  Antisense Strand to SEQ ID NO: 367355
gucuucacacagauuaugu

SEQ ID NO: 367357 - RNA, 19 nt, Artificial Sequence
  Description of Artificial Sequence: Synthetic oligonucleotide
  Sense Strand Starting at position 619 of SEQ ID NO: 316269
uggaacagcuggcuuuaau

SEQ ID NO: 367358 - RNA, 19 nt, Artificial Sequence
  Description of Artificial Sequence: Synthetic oligonucleotide
  Antisense Strand to SEQ ID NO: 367357
auuaaagccagcuguucca

SEQ ID NO: 367359 - RNA, 19 nt, Artificial Sequence
  Description of Artificial Sequence: Synthetic oligonucleotide
  Sense Strand Starting at position 619 of SEQ ID NO: 316294
gugugacaugcauaagaaa

SEQ ID NO: 367360 - RNA, 19 nt, Artificial Sequence
  Description of Artificial Sequence: Synthetic oligonucleotide
  Antisense Strand to SEQ ID NO: 367359
uuucuuaugcaugucacac

SEQ ID NO: 367361 - RNA, 19 nt, Artificial Sequence
  Description of Artificial Sequence: Synthetic oligonucleotide
  Sense Strand Starting at position 619 of SEQ ID NO: 316377
gccacaugacauugugaca

SEQ ID NO: 367362 - RNA, 19 nt, Artificial Sequence
  Description of Artificial Sequence: Synthetic oligonucleotide
  Antisense Strand to SEQ ID NO: 367361
ugucacaaugucauguggc

SEQ ID NO: 367363 - RNA, 19 nt, Artificial Sequence
  Description of Artificial Sequence: Synthetic oligonucleotide
  Sense Strand Starting at position 619 of SEQ ID NO: 316427
ugagauggcugguuuccau

SEQ ID NO: 367364 - RNA, 19 nt, Artificial Sequence
  Description of Artificial Sequence: Synthetic oligonucleotide
  Antisense Strand to SEQ ID NO: 367363
auggaaaccagccaucuca

SEQ ID NO: 367365 - RNA, 19 nt, Artificial Sequence
  Description of Artificial Sequence: Synthetic oligonucleotide
  Sense Strand Starting at position 619 of SEQ ID NO: 316520
cugguauuguccuuagaug

SEQ ID NO: 367366 - RNA, 19 nt, Artificial Sequence
  Description of Artificial Sequence: Synthetic oligonucleotide
  Antisense Strand to SEQ ID NO: 367365
caucuaaggacaauaccag

SEQ ID NO: 367367 - RNA, 19 nt, Artificial Sequence
  Description of Artificial Sequence: Synthetic oligonucleotide
  Sense Strand Starting at position 619 of SEQ ID NO: 316521
ugguauuguccuuagaugu

SEQ ID NO: 367368 - RNA, 19 nt, Artificial Sequence
  Description of Artificial Sequence: Synthetic oligonucleotide
  Antisense Strand to SEQ ID NO: 367367
acaucuaaggacaauacca

SEQ ID NO: 367369 - RNA, 19 nt, Artificial Sequence
  Description of Artificial Sequence: Synthetic oligonucleotide
  Sense Strand Starting at position 619 of SEQ ID NO: 316534
agauguaaauauccgagau

SEQ ID NO: 367370 - RNA, 19 nt, Artificial Sequence
  Description of Artificial Sequence: Synthetic oligonucleotide
  Antisense Strand to SEQ ID NO: 367369
aucucggauauuuacaucu

SEQ ID NO: 367371 - RNA, 19 nt, Artificial Sequence
  Description of Artificial Sequence: Synthetic oligonucleotide
  Sense Strand Starting at position 619 of SEQ ID NO: 316538
guaaauauccgagauaguu

SEQ ID NO: 367372 - RNA, 19 nt, Artificial Sequence
  Description of Artificial Sequence: Synthetic oligonucleotide
  Antisense Strand to SEQ ID NO: 367371
aacuaucucggauauuuac

SEQ ID NO: 367373 - RNA, 19 nt, Artificial Sequence
  Description of Artificial Sequence: Synthetic oligonucleotide
  Sense Strand Starting at position 619 of SEQ ID NO: 316561
gcuguaugagggugauaua

SEQ ID NO: 367374 - RNA, 19 nt, Artificial Sequence
  Description of Artificial Sequence: Synthetic oligonucleotide
  Antisense Strand to SEQ ID NO: 367373
uauaucacccucauacagc

SEQ ID NO: 367375 - RNA, 19 nt, Artificial Sequence
  Description of Artificial Sequence: Synthetic oligonucleotide
  Sense Strand Starting at position 619 of SEQ ID NO: 316639
agguaaauaccguauguug

SEQ ID NO: 367376 - RNA, 19 nt, Artificial Sequence
  Description of Artificial Sequence: Synthetic oligonucleotide
  Antisense Strand to SEQ ID NO: 367375
caacauacgguauuuaccu

SEQ ID NO: 367377 - RNA, 19 nt, Artificial Sequence
  Description of Artificial Sequence: Synthetic oligonucleotide
  Sense Strand Starting at position 619 of SEQ ID NO: 316670
aguuaucaugcaggaauuc

SEQ ID NO: 367378 - RNA, 19 nt, Artificial Sequence
  Description of Artificial Sequence: Synthetic oligonucleotide
  Antisense Strand to SEQ ID NO: 367377
gaauuccugcaugauaacu

SEQ ID NO: 367379 - RNA, 19 nt, Artificial Sequence
  Description of Artificial Sequence: Synthetic oligonucleotide
  Sense Strand Starting at position 619 of SEQ ID NO: 316758
gcaaaugaauuagaagaaa

SEQ ID NO: 367380 - RNA, 19 nt, Artificial Sequence
  Description of Artificial Sequence: Synthetic oligonucleotide
  Antisense Strand to SEQ ID NO: 367379
uuucuucuaauucauuugc

SEQ ID NO: 367381 - RNA, 19 nt, Artificial Sequence
  Description of Artificial Sequence: Synthetic oligonucleotide
  Sense Strand Starting at position 619 of SEQ ID NO: 316825
gucuuauuaggguagugaa

SEQ ID NO: 367382 - RNA, 19 nt, Artificial Sequence
  Description of Artificial Sequence: Synthetic oligonucleotide
  Antisense Strand to SEQ ID NO: 367381
uucacuacccuaauaagac

SEQ ID NO: 367383 - RNA, 19 nt, Artificial Sequence
  Description of Artificial Sequence: Synthetic oligonucleotide
  Sense Strand Starting at position 619 of SEQ ID NO: 316862
gagagugccgauugagaga

SEQ ID NO: 367384 - RNA, 19 nt, Artificial Sequence
  Description of Artificial Sequence: Synthetic oligonucleotide
  Antisense Strand to SEQ ID NO: 367383
ucucucaaucggcacucuc

SEQ ID NO: 367385 - RNA, 19 nt, Artificial Sequence
  Description of Artificial Sequence: Synthetic oligonucleotide
  Sense Strand Starting at position 619 of SEQ ID NO: 316867
ugccgauugagagaaggua

SEQ ID NO: 367386 - RNA, 19 nt, Artificial Sequence
  Description of Artificial Sequence: Synthetic oligonucleotide
  Antisense Strand to SEQ ID NO: 367385
uaccuucucucaaucggca

SEQ ID NO: 367387 - RNA, 19 nt, Artificial Sequence
  Description of Artificial Sequence: Synthetic oligonucleotide
  Sense Strand Starting at position 619 of SEQ ID NO: 316892
cgggaaacguuagcauuua

SEQ ID NO: 367388 - RNA, 19 nt, Artificial Sequence
  Description of Artificial Sequence: Synthetic oligonucleotide
  Antisense Strand to SEQ ID NO: 367387
uaaaugcuaacguuucccg

SEQ ID NO: 367389 - RNA, 19 nt, Artificial Sequence
  Description of Artificial Sequence: Synthetic oligonucleotide
  Sense Strand Starting at position 619 of SEQ ID NO: 316949
guuugcuuugcguucagau

SEQ ID NO: 367390 - RNA, 19 nt, Artificial Sequence
  Description of Artificial Sequence: Synthetic oligonucleotide
  Antisense Strand to SEQ ID NO: 367389
aucugaacgcaaagcaaac

SEQ ID NO: 367391 - RNA, 19 nt, Artificial Sequence
  Description of Artificial Sequence: Synthetic oligonucleotide
  Sense Strand Starting at position 619 of SEQ ID NO: 316950
uuugcuuugcguucagaug

SEQ ID NO: 367392 - RNA, 19 nt, Artificial Sequence
  Description of Artificial Sequence: Synthetic oligonucleotide
  Antisense Strand to SEQ ID NO: 367391
caucugaacgcaaagcaaa

SEQ ID NO: 367393 - RNA, 19 nt, Artificial Sequence
  Description of Artificial Sequence: Synthetic oligonucleotide
  Sense Strand Starting at position 619 of SEQ ID NO: 317086
cgcgaaaggcucgugugua

SEQ ID NO: 367394 - RNA, 19 nt, Artificial Sequence
  Description of Artificial Sequence: Synthetic oligonucleotide
  Antisense Strand to SEQ ID NO: 367393
uacacacgagccuuucgcg

SEQ ID NO: 367395 - RNA, 19 nt, Artificial Sequence
  Description of Artificial Sequence: Synthetic oligonucleotide
  Sense Strand Starting at position 619 of SEQ ID NO: 318427
ggagguuggugauuccauu

SEQ ID NO: 367396 - RNA, 19 nt, Artificial Sequence
  Description of Artificial Sequence: Synthetic oligonucleotide
  Antisense Strand to SEQ ID NO: 367395
aauggaaucaccaaccucc

SEQ ID NO: 367397 - RNA, 19 nt, Artificial Sequence
  Description of Artificial Sequence: Synthetic oligonucleotide
  Sense Strand Starting at position 619 of SEQ ID NO: 318546
guguaagucagcucugcca

SEQ ID NO: 367398 - RNA, 19 nt, Artificial Sequence
  Description of Artificial Sequence: Synthetic oligonucleotide
  Antisense Strand to SEQ ID NO: 367397
uggcagagcugacuuacac

SEQ ID NO: 367399 - RNA, 19 nt, Artificial Sequence
  Description of Artificial Sequence: Synthetic oligonucleotide
  Sense Strand Starting at position 619 of SEQ ID NO: 318635
ccaggacggucuuuagagu

SEQ ID NO: 367400 - RNA, 19 nt, Artificial Sequence
  Description of Artificial Sequence: Synthetic oligonucleotide
  Antisense Strand to SEQ ID NO: 367399
acucuaaagaccguccugg

SEQ ID NO: 367401 - RNA, 19 nt, Artificial Sequence
  Description of Artificial Sequence: Synthetic oligonucleotide
  Sense Strand Starting at position 619 of SEQ ID NO: 318641
cggucuuuagagugauaac

SEQ ID NO: 367402 - RNA, 19 nt, Artificial Sequence
  Description of Artificial Sequence: Synthetic oligonucleotide
  Antisense Strand to SEQ ID NO: 367401
guuaucacucuaaagaccg

SEQ ID NO: 367403 - RNA, 19 nt, Artificial Sequence
  Description of Artificial Sequence: Synthetic oligonucleotide
  Sense Strand Starting at position 619 of SEQ ID NO: 318642
ggucuuuagagugauaacu

SEQ ID NO: 367404 - RNA, 19 nt, Artificial Sequence
  Description of Artificial Sequence: Synthetic oligonucleotide
  Antisense Strand to SEQ ID NO: 367403
aguuaucacucuaaagacc

SEQ ID NO: 367405 - RNA, 19 nt, Artificial Sequence
  Description of Artificial Sequence: Synthetic oligonucleotide
  Sense Strand Starting at position 619 of SEQ ID NO: 318739
uuugguuccaggugagaug

SEQ ID NO: 367406 - RNA, 19 nt, Artificial Sequence
  Description of Artificial Sequence: Synthetic oligonucleotide
  Antisense Strand to SEQ ID NO: 367405
caucucaccuggaaccaaa

SEQ ID NO: 367407 - RNA, 19 nt, Artificial Sequence
  Description of Artificial Sequence: Synthetic oligonucleotide
  Sense Strand Starting at position 619 of SEQ ID NO: 318761
acuauugauuucuacgauu

SEQ ID NO: 367408 - RNA, 19 nt, Artificial Sequence
  Description of Artificial Sequence: Synthetic oligonucleotide
  Antisense Strand to SEQ ID NO: 367407
aaucguagaaaucaauagu

SEQ ID NO: 367409 - RNA, 19 nt, Artificial Sequence
  Description of Artificial Sequence: Synthetic oligonucleotide
  Sense Strand Starting at position 619 of SEQ ID NO: 318786
gucagaauccaguauguga

SEQ ID NO: 367410 - RNA, 19 nt, Artificial Sequence
  Description of Artificial Sequence: Synthetic oligonucleotide
  Antisense Strand to SEQ ID NO: 367409
ucacauacuggauucugac

SEQ ID NO: 367411 - RNA, 19 nt, Artificial Sequence
  Description of Artificial Sequence: Synthetic oligonucleotide
  Sense Strand Starting at position 619 of SEQ ID NO: 318824
auaauagguuuggccucaa

SEQ ID NO: 367412 - RNA, 19 nt, Artificial Sequence
  Description of Artificial Sequence: Synthetic oligonucleotide
  Antisense Strand to SEQ ID NO: 367411
uugaggccaaaccuauuau

SEQ ID NO: 367413 - RNA, 19 nt, Artificial Sequence
  Description of Artificial Sequence: Synthetic oligonucleotide
  Sense Strand Starting at position 620 of SEQ ID NO: 315330
agagguaaauauucugcuu

SEQ ID NO: 367414 - RNA, 19 nt, Artificial Sequence
  Description of Artificial Sequence: Synthetic oligonucleotide
  Antisense Strand to SEQ ID NO: 367413
aagcagaauauuuaccucu

SEQ ID NO: 367415 - RNA, 19 nt, Artificial Sequence
  Description of Artificial Sequence: Synthetic oligonucleotide
  Sense Strand Starting at position 620 of SEQ ID NO: 315333
gguaaauauucugcuucua

SEQ ID NO: 367416 - RNA, 19 nt, Artificial Sequence
  Description of Artificial Sequence: Synthetic oligonucleotide
  Antisense Strand to SEQ ID NO: 367415
uagaagcagaauauuuacc

SEQ ID NO: 367417 - RNA, 19 nt, Artificial Sequence
  Description of Artificial Sequence: Synthetic oligonucleotide
  Sense Strand Starting at position 620 of SEQ ID NO: 315391
cugaaacuguuucuaaaug

SEQ ID NO: 367418 - RNA, 19 nt, Artificial Sequence
  Description of Artificial Sequence: Synthetic oligonucleotide
  Antisense Strand to SEQ ID NO: 367417
cauuuagaaacaguuucag

SEQ ID NO: 367419 - RNA, 19 nt, Artificial Sequence
  Description of Artificial Sequence: Synthetic oligonucleotide
  Sense Strand Starting at position 620 of SEQ ID NO: 315403
cuaaaugucaagugagguc

SEQ ID NO: 367420 - RNA, 19 nt, Artificial Sequence
  Description of Artificial Sequence: Synthetic oligonucleotide
  Antisense Strand to SEQ ID NO: 367419
gaccucacuugacauuuag

SEQ ID NO: 367421 - RNA, 19 nt, Artificial Sequence
  Description of Artificial Sequence: Synthetic oligonucleotide
  Sense Strand Starting at position 620 of SEQ ID NO: 315615
guauaaucgcuugagccca

SEQ ID NO: 367422 - RNA, 19 nt, Artificial Sequence
  Description of Artificial Sequence: Synthetic oligonucleotide
  Antisense Strand to SEQ ID NO: 367421
ugggcucaagcgauuauac

SEQ ID NO: 367423 - RNA, 19 nt, Artificial Sequence
  Description of Artificial Sequence: Synthetic oligonucleotide
  Sense Strand Starting at position 620 of SEQ ID NO: 315742
guaugacucccuuaagcca

SEQ ID NO: 367424 - RNA, 19 nt, Artificial Sequence
  Description of Artificial Sequence: Synthetic oligonucleotide
  Antisense Strand to SEQ ID NO: 367423
uggcuuaagggagucauac

SEQ ID NO: 367425 - RNA, 19 nt, Artificial Sequence
  Description of Artificial Sequence: Synthetic oligonucleotide
  Sense Strand Starting at position 620 of SEQ ID NO: 316251
cugacaugguuccauauaa

SEQ ID NO: 367426 - RNA, 19 nt, Artificial Sequence
  Description of Artificial Sequence: Synthetic oligonucleotide
  Antisense Strand to SEQ ID NO: 367425
uuauauggaaccaugucag

SEQ ID NO: 367427 - RNA, 19 nt, Artificial Sequence
  Description of Artificial Sequence: Synthetic oligonucleotide
  Sense Strand Starting at position 620 of SEQ ID NO: 316274
augugaacuugcuuaguuu

SEQ ID NO: 367428 - RNA, 19 nt, Artificial Sequence
  Description of Artificial Sequence: Synthetic oligonucleotide
  Antisense Strand to SEQ ID NO: 367427
aaacuaagcaaguucacau

SEQ ID NO: 367429 - RNA, 19 nt, Artificial Sequence
  Description of Artificial Sequence: Synthetic oligonucleotide
  Sense Strand Starting at position 620 of SEQ ID NO: 316365
gggauucggcaaugacaaa

SEQ ID NO: 367430 - RNA, 19 nt, Artificial Sequence
  Description of Artificial Sequence: Synthetic oligonucleotide
  Antisense Strand to SEQ ID NO: 367429
uuugucauugccgaauccc

SEQ ID NO: 367431 - RNA, 19 nt, Artificial Sequence
  Description of Artificial Sequence: Synthetic oligonucleotide
  Sense Strand Starting at position 620 of SEQ ID NO: 316387
cagaguuucuggucucauu

SEQ ID NO: 367432 - RNA, 19 nt, Artificial Sequence
  Description of Artificial Sequence: Synthetic oligonucleotide
  Antisense Strand to SEQ ID NO: 367431
aaugagaccagaaacucug

SEQ ID NO: 367433 - RNA, 19 nt, Artificial Sequence
  Description of Artificial Sequence: Synthetic oligonucleotide
  Sense Strand Starting at position 620 of SEQ ID NO: 316618
uauagacucuggccuguaa

SEQ ID NO: 367434 - RNA, 19 nt, Artificial Sequence
  Description of Artificial Sequence: Synthetic oligonucleotide
  Antisense Strand to SEQ ID NO: 367433
uuacaggccagagucuaua

SEQ ID NO: 367435 - RNA, 19 nt, Artificial Sequence
  Description of Artificial Sequence: Synthetic oligonucleotide
  Sense Strand Starting at position 620 of SEQ ID NO: 316803
cguccuuccucugcgaaau

SEQ ID NO: 367436 - RNA, 19 nt, Artificial Sequence
  Description of Artificial Sequence: Synthetic oligonucleotide
  Antisense Strand to SEQ ID NO: 367435
auuucgcagaggaaggacg

SEQ ID NO: 367437 - RNA, 19 nt, Artificial Sequence
  Description of Artificial Sequence: Synthetic oligonucleotide
  Sense Strand Starting at position 620 of SEQ ID NO: 316804
guccuuccucugcgaaaug

SEQ ID NO: 367438 - RNA, 19 nt, Artificial Sequence
  Description of Artificial Sequence: Synthetic oligonucleotide
  Antisense Strand to SEQ ID NO: 367437
cauuucgcagaggaaggac

SEQ ID NO: 367439 - RNA, 19 nt, Artificial Sequence
  Description of Artificial Sequence: Synthetic oligonucleotide
  Sense Strand Starting at position 620 of SEQ ID NO: 316815
gcgaaaugcuucccaaaca

SEQ ID NO: 367440 - RNA, 19 nt, Artificial Sequence
  Description of Artificial Sequence: Synthetic oligonucleotide
  Antisense Strand to SEQ ID NO: 367439
uguuugggaagcauuucgc

SEQ ID NO: 367441 - RNA, 19 nt, Artificial Sequence
  Description of Artificial Sequence: Synthetic oligonucleotide
  Sense Strand Starting at position 620 of SEQ ID NO: 317044
cgccucuucgcccaagaga

SEQ ID NO: 367442 - RNA, 19 nt, Artificial Sequence
  Description of Artificial Sequence: Synthetic oligonucleotide
  Antisense Strand to SEQ ID NO: 367441
ucucuugggcgaagaggcg

SEQ ID NO: 367443 - RNA, 19 nt, Artificial Sequence
  Description of Artificial Sequence: Synthetic oligonucleotide
  Sense Strand Starting at position 620 of SEQ ID NO: 317275
gcaggacgcguccuccaau

SEQ ID NO: 367444 - RNA, 19 nt, Artificial Sequence
  Description of Artificial Sequence: Synthetic oligonucleotide
  Antisense Strand to SEQ ID NO: 367443
auuggaggacgcguccugc

SEQ ID NO: 367445 - RNA, 19 nt, Artificial Sequence
  Description of Artificial Sequence: Synthetic oligonucleotide
  Sense Strand Starting at position 620 of SEQ ID NO: 317400
ccgcgcucguggauuacua

SEQ ID NO: 367446 - RNA, 19 nt, Artificial Sequence
  Description of Artificial Sequence: Synthetic oligonucleotide
  Antisense Strand to SEQ ID NO: 367445
uaguaauccacgagcgcgg

SEQ ID NO: 367447 - RNA, 19 nt, Artificial Sequence
  Description of Artificial Sequence: Synthetic oligonucleotide
  Sense Strand Starting at position 620 of SEQ ID NO: 317459
ggaccuuggucucaggaau

SEQ ID NO: 367448 - RNA, 19 nt, Artificial Sequence
  Description of Artificial Sequence: Synthetic oligonucleotide
  Antisense Strand to SEQ ID NO: 367447
auuccugagaccaaggucc

SEQ ID NO: 367449 - RNA, 19 nt, Artificial Sequence
  Description of Artificial Sequence: Synthetic oligonucleotide
  Sense Strand Starting at position 620 of SEQ ID NO: 317531
aacucaguccgagauguag

SEQ ID NO: 367450 - RNA, 19 nt, Artificial Sequence
  Description of Artificial Sequence: Synthetic oligonucleotide
  Antisense Strand to SEQ ID NO: 367449
cuacaucucggacugaguu

SEQ ID NO: 367451 - RNA, 19 nt, Artificial Sequence
  Description of Artificial Sequence: Synthetic oligonucleotide
  Sense Strand Starting at position 620 of SEQ ID NO: 317540
cgagauguagacuaggcaa

SEQ ID NO: 367452 - RNA, 19 nt, Artificial Sequence
  Description of Artificial Sequence: Synthetic oligonucleotide
  Antisense Strand to SEQ ID NO: 367451
uugccuagucuacaucucg

SEQ ID NO: 367453 - RNA, 19 nt, Artificial Sequence
  Description of Artificial Sequence: Synthetic oligonucleotide
  Sense Strand Starting at position 620 of SEQ ID NO: 317542
agauguagacuaggcaaua

SEQ ID NO: 367454 - RNA, 19 nt, Artificial Sequence
  Description of Artificial Sequence: Synthetic oligonucleotide
  Antisense Strand to SEQ ID NO: 367453
uauugccuagucuacaucu

SEQ ID NO: 367455 - RNA, 19 nt, Artificial Sequence
  Description of Artificial Sequence: Synthetic oligonucleotide
  Sense Strand Starting at position 620 of SEQ ID NO: 317543
gauguagacuaggcaauaa

SEQ ID NO: 367456 - RNA, 19 nt, Artificial Sequence
  Description of Artificial Sequence: Synthetic oligonucleotide
  Antisense Strand to SEQ ID NO: 367455
uuauugccuagucuacauc

SEQ ID NO: 367457 - RNA, 19 nt, Artificial Sequence
  Description of Artificial Sequence: Synthetic oligonucleotide
  Sense Strand Starting at position 620 of SEQ ID NO: 317553
aggcaauaacgcuaaucua

SEQ ID NO: 367458 - RNA, 19 nt, Artificial Sequence
  Description of Artificial Sequence: Synthetic oligonucleotide
  Antisense Strand to SEQ ID NO: 367457
uagauuagcguuauugccu

SEQ ID NO: 367459 - RNA, 19 nt, Artificial Sequence
  Description of Artificial Sequence: Synthetic oligonucleotide
  Sense Strand Starting at position 620 of SEQ ID NO: 317565
uaaucuaaucccgguacga

SEQ ID NO: 367460 - RNA, 19 nt, Artificial Sequence
  Description of Artificial Sequence: Synthetic oligonucleotide
  Antisense Strand to SEQ ID NO: 367459
ucguaccgggauuagauua

SEQ ID NO: 367461 - RNA, 19 nt, Artificial Sequence
  Description of Artificial Sequence: Synthetic oligonucleotide
  Sense Strand Starting at position 620 of SEQ ID NO: 317567
aucuaaucccgguacgauu

SEQ ID NO: 367462 - RNA, 19 nt, Artificial Sequence
  Description of Artificial Sequence: Synthetic oligonucleotide
  Antisense Strand to SEQ ID NO: 367461
aaucguaccgggauuagau

SEQ ID NO: 367463 - RNA, 19 nt, Artificial Sequence
  Description of Artificial Sequence: Synthetic oligonucleotide
  Sense Strand Starting at position 620 of SEQ ID NO: 317628
uuuggagaccucgagcauu

SEQ ID NO: 367464 - RNA, 19 nt, Artificial Sequence
  Description of Artificial Sequence: Synthetic oligonucleotide
  Antisense Strand to SEQ ID NO: 367463
aaugcucgaggucuccaaa

SEQ ID NO: 367465 - RNA, 19 nt, Artificial Sequence
  Description of Artificial Sequence: Synthetic oligonucleotide
  Sense Strand Starting at position 620 of SEQ ID NO: 317726
ucggaagauggaugucaac

SEQ ID NO: 367466 - RNA, 19 nt, Artificial Sequence
  Description of Artificial Sequence: Synthetic oligonucleotide
  Antisense Strand to SEQ ID NO: 367465
guugacauccaucuuccga

SEQ ID NO: 367467 - RNA, 19 nt, Artificial Sequence
  Description of Artificial Sequence: Synthetic oligonucleotide
  Sense Strand Starting at position 620 of SEQ ID NO: 317766
acggguuagccaggagaaa

SEQ ID NO: 367468 - RNA, 19 nt, Artificial Sequence
  Description of Artificial Sequence: Synthetic oligonucleotide
  Antisense Strand to SEQ ID NO: 367467
uuucuccuggcuaacccgu

SEQ ID NO: 367469 - RNA, 19 nt, Artificial Sequence
  Description of Artificial Sequence: Synthetic oligonucleotide
  Sense Strand Starting at position 620 of SEQ ID NO: 317971
gcaaaucaagcauaugcaa

SEQ ID NO: 367470 - RNA, 19 nt, Artificial Sequence
  Description of Artificial Sequence: Synthetic oligonucleotide
  Antisense Strand to SEQ ID NO: 367469
uugcauaugcuugauuugc

SEQ ID NO: 367471 - RNA, 19 nt, Artificial Sequence
  Description of Artificial Sequence: Synthetic oligonucleotide
  Sense Strand Starting at position 620 of SEQ ID NO: 318003
uugaucgaaucugaugaga

SEQ ID NO: 367472 - RNA, 19 nt, Artificial Sequence
  Description of Artificial Sequence: Synthetic oligonucleotide
  Antisense Strand to SEQ ID NO: 367471
ucucaucagauucgaucaa

SEQ ID NO: 367473 - RNA, 19 nt, Artificial Sequence
  Description of Artificial Sequence: Synthetic oligonucleotide
  Sense Strand Starting at position 620 of SEQ ID NO: 318005
gaucgaaucugaugagaaa

SEQ ID NO: 367474 - RNA, 19 nt, Artificial Sequence
  Description of Artificial Sequence: Synthetic oligonucleotide
  Antisense Strand to SEQ ID NO: 367473
uuucucaucagauucgauc

SEQ ID NO: 367475 - RNA, 19 nt, Artificial Sequence
  Description of Artificial Sequence: Synthetic oligonucleotide
  Sense Strand Starting at position 620 of SEQ ID NO: 318066
acuauauugagguaacggu

SEQ ID NO: 367476 - RNA, 19 nt, Artificial Sequence
  Description of Artificial Sequence: Synthetic oligonucleotide
  Antisense Strand to SEQ ID NO: 367475
accguuaccucaauauagu

SEQ ID NO: 367477 - RNA, 19 nt, Artificial Sequence
  Description of Artificial Sequence: Synthetic oligonucleotide
  Sense Strand Starting at position 620 of SEQ ID NO: 318098
ggagacuggucauccuuau

SEQ ID NO: 367478 - RNA, 19 nt, Artificial Sequence
  Description of Artificial Sequence: Synthetic oligonucleotide
  Antisense Strand to SEQ ID NO: 367477
auaaggaugaccagucucc

SEQ ID NO: 367479 - RNA, 19 nt, Artificial Sequence
  Description of Artificial Sequence: Synthetic oligonucleotide
  Sense Strand Starting at position 620 of SEQ ID NO: 318128
aaguaaugcuaagaaguga

SEQ ID NO: 367480 - RNA, 19 nt, Artificial Sequence
  Description of Artificial Sequence: Synthetic oligonucleotide
  Antisense Strand to SEQ ID NO: 367479
ucacuucuuagcauuacuu

SEQ ID NO: 367481 - RNA, 19 nt, Artificial Sequence
  Description of Artificial Sequence: Synthetic oligonucleotide
  Sense Strand Starting at position 620 of SEQ ID NO: 318505
uugaguugcuaguuugcaa

SEQ ID NO: 367482 - RNA, 19 nt, Artificial Sequence
  Description of Artificial Sequence: Synthetic oligonucleotide
  Antisense Strand to SEQ ID NO: 367481
uugcaaacuagcaacucaa

SEQ ID NO: 367483 - RNA, 19 nt, Artificial Sequence
  Description of Artificial Sequence: Synthetic oligonucleotide
  Sense Strand Starting at position 620 of SEQ ID NO: 318559
caaggaggcucagauuaca

SEQ ID NO: 367484 - RNA, 19 nt, Artificial Sequence
  Description of Artificial Sequence: Synthetic oligonucleotide
  Antisense Strand to SEQ ID NO: 367483
uguaaucugagccuccuug

SEQ ID NO: 367485 - RNA, 19 nt, Artificial Sequence
  Description of Artificial Sequence: Synthetic oligonucleotide
  Sense Strand Starting at position 620 of SEQ ID NO: 318570
agauuacagcaaugugaag

SEQ ID NO: 367486 - RNA, 19 nt, Artificial Sequence
  Description of Artificial Sequence: Synthetic oligonucleotide
  Antisense Strand to SEQ ID NO: 367485
cuucacauugcuguaaucu

SEQ ID NO: 367487 - RNA, 19 nt, Artificial Sequence
  Description of Artificial Sequence: Synthetic oligonucleotide
  Sense Strand Starting at position 620 of SEQ ID NO: 318837
cgauuauacuucuuuaaga

SEQ ID NO: 367488 - RNA, 19 nt, Artificial Sequence
  Description of Artificial Sequence: Synthetic oligonucleotide
  Antisense Strand to SEQ ID NO: 367487
ucuuaaagaaguauaaucg

SEQ ID NO: 367489 - RNA, 19 nt, Artificial Sequence
  Description of Artificial Sequence: Synthetic oligonucleotide
  Sense Strand Starting at position 620 of SEQ ID NO: 318892
cugugacuuucuucucuuu

SEQ ID NO: 367490 - RNA, 19 nt, Artificial Sequence
  Description of Artificial Sequence: Synthetic oligonucleotide
  Antisense Strand to SEQ ID NO: 367489
aaagagaagaaagucacag

SEQ ID NO: 367491 - RNA, 19 nt, Artificial Sequence
  Description of Artificial Sequence: Synthetic oligonucleotide
  Sense Strand Starting at position 620 of SEQ ID NO: 319206
cuucuaguucuauaaaugu

SEQ ID NO: 367492 - RNA, 19 nt, Artificial Sequence
  Description of Artificial Sequence: Synthetic oligonucleotide
  Antisense Strand to SEQ ID NO: 367491
acauuuauagaacuagaag

SEQ ID NO: 367493 - RNA, 19 nt, Artificial Sequence
  Description of Artificial Sequence: Synthetic oligonucleotide
  Sense Strand Starting at position 621 of SEQ ID NO: 315310
gcguuaguucaugccugua

SEQ ID NO: 367494 - RNA, 19 nt, Artificial Sequence
  Description of Artificial Sequence: Synthetic oligonucleotide
  Antisense Strand to SEQ ID NO: 367493
uacaggcaugaacuaacgc

SEQ ID NO: 367495 - RNA, 19 nt, Artificial Sequence
  Description of Artificial Sequence: Synthetic oligonucleotide
  Sense Strand Starting at position 621 of SEQ ID NO: 315549
cuaucuuagcuagaucuga

SEQ ID NO: 367496 - RNA, 19 nt, Artificial Sequence
  Description of Artificial Sequence: Synthetic oligonucleotide
  Antisense Strand to SEQ ID NO: 367495
ucagaucuagcuaagauag

SEQ ID NO: 367497 - RNA, 19 nt, Artificial Sequence
  Description of Artificial Sequence: Synthetic oligonucleotide
  Sense Strand Starting at position 621 of SEQ ID NO: 315720
uagauuaggcuuugguuaa

SEQ ID NO: 367498 - RNA, 19 nt, Artificial Sequence
  Description of Artificial Sequence: Synthetic oligonucleotide
  Antisense Strand to SEQ ID NO: 367497
uuaaccaaagccuaaucua

SEQ ID NO: 367499 - RNA, 19 nt, Artificial Sequence
  Description of Artificial Sequence: Synthetic oligonucleotide
  Sense Strand Starting at position 621 of SEQ ID NO: 316599
aggacauuccuccgaagac

SEQ ID NO: 367500 - RNA, 19 nt, Artificial Sequence
  Description of Artificial Sequence: Synthetic oligonucleotide
  Antisense Strand to SEQ ID NO: 367499
gucuucggaggaauguccu

SEQ ID NO: 367501 - RNA, 19 nt, Artificial Sequence
  Description of Artificial Sequence: Synthetic oligonucleotide
  Sense Strand Starting at position 621 of SEQ ID NO: 316625
acucgaguccuaggacaug

SEQ ID NO: 367502 - RNA, 19 nt, Artificial Sequence
  Description of Artificial Sequence: Synthetic oligonucleotide
  Antisense Strand to SEQ ID NO: 367501
cauguccuaggacucgagu

SEQ ID NO: 367503 - RNA, 19 nt, Artificial Sequence
  Description of Artificial Sequence: Synthetic oligonucleotide
  Sense Strand Starting at position 621 of SEQ ID NO: 316674
cuguguccuuaucuggaau

SEQ ID NO: 367504 - RNA, 19 nt, Artificial Sequence
  Description of Artificial Sequence: Synthetic oligonucleotide
  Antisense Strand to SEQ ID NO: 367503
auuccagauaaggacacag

SEQ ID NO: 367505 - RNA, 19 nt, Artificial Sequence
  Description of Artificial Sequence: Synthetic oligonucleotide
  Sense Strand Starting at position 621 of SEQ ID NO: 316773
agugaucuuucuuuaccau

SEQ ID NO: 367506 - RNA, 19 nt, Artificial Sequence
  Description of Artificial Sequence: Synthetic oligonucleotide
  Antisense Strand to SEQ ID NO: 367505
augguaaagaaagaucacu

SEQ ID NO: 367507 - RNA, 19 nt, Artificial Sequence
  Description of Artificial Sequence: Synthetic oligonucleotide
  Sense Strand Starting at position 621 of SEQ ID NO: 316774
gugaucuuucuuuaccauc

SEQ ID NO: 367508 - RNA, 19 nt, Artificial Sequence
  Description of Artificial Sequence: Synthetic oligonucleotide
  Antisense Strand to SEQ ID NO: 367507
gaugguaaagaaagaucac

SEQ ID NO: 367509 - RNA, 19 nt, Artificial Sequence
  Description of Artificial Sequence: Synthetic oligonucleotide
  Sense Strand Starting at position 621 of SEQ ID NO: 317155
augguagcucuggguaaag

SEQ ID NO: 367510 - RNA, 19 nt, Artificial Sequence
  Description of Artificial Sequence: Synthetic oligonucleotide
  Antisense Strand to SEQ ID NO: 367509
cuuuacccagagcuaccau

SEQ ID NO: 367511 - RNA, 19 nt, Artificial Sequence
  Description of Artificial Sequence: Synthetic oligonucleotide
  Sense Strand Starting at position 621 of SEQ ID NO: 317581
ccgcucugucgcucaaaga

SEQ ID NO: 367512 - RNA, 19 nt, Artificial Sequence
  Description of Artificial Sequence: Synthetic oligonucleotide
  Antisense Strand to SEQ ID NO: 367511
ucuuugagcgacagagcgg

SEQ ID NO: 367513 - RNA, 19 nt, Artificial Sequence
  Description of Artificial Sequence: Synthetic oligonucleotide
  Sense Strand Starting at position 621 of SEQ ID NO: 317654
ggagucuggcgcaguucua

SEQ ID NO: 367514 - RNA, 19 nt, Artificial Sequence
  Description of Artificial Sequence: Synthetic oligonucleotide
  Antisense Strand to SEQ ID NO: 367513
uagaacugcgccagacucc

SEQ ID NO: 367515 - RNA, 19 nt, Artificial Sequence
  Description of Artificial Sequence: Synthetic oligonucleotide
  Sense Strand Starting at position 621 of SEQ ID NO: 317764
agggcuaccucucuagaua

SEQ ID NO: 367516 - RNA, 19 nt, Artificial Sequence
  Description of Artificial Sequence: Synthetic oligonucleotide
  Antisense Strand to SEQ ID NO: 367515
uaucuagagagguagcccu

SEQ ID NO: 367517 - RNA, 19 nt, Artificial Sequence
  Description of Artificial Sequence: Synthetic oligonucleotide
  Sense Strand Starting at position 621 of SEQ ID NO: 317765
gggcuaccucucuagauau

SEQ ID NO: 367518 - RNA, 19 nt, Artificial Sequence
  Description of Artificial Sequence: Synthetic oligonucleotide
  Antisense Strand to SEQ ID NO: 367517
auaucuagagagguagccc

SEQ ID NO: 367519 - RNA, 19 nt, Artificial Sequence
  Description of Artificial Sequence: Synthetic oligonucleotide
  Sense Strand Starting at position 621 of SEQ ID NO: 317775
ucuagauauccuugucuca

SEQ ID NO: 367520 - RNA, 19 nt, Artificial Sequence
  Description of Artificial Sequence: Synthetic oligonucleotide
  Antisense Strand to SEQ ID NO: 367519
ugagacaaggauaucuaga

SEQ ID NO: 367521 - RNA, 19 nt, Artificial Sequence
  Description of Artificial Sequence: Synthetic oligonucleotide
  Sense Strand Starting at position 621 of SEQ ID NO: 317777
uagauauccuugucucagg

SEQ ID NO: 367522 - RNA, 19 nt, Artificial Sequence
  Description of Artificial Sequence: Synthetic oligonucleotide
  Antisense Strand to SEQ ID NO: 367521
ccugagacaaggauaucua

SEQ ID NO: 367523 - RNA, 19 nt, Artificial Sequence
  Description of Artificial Sequence: Synthetic oligonucleotide
  Sense Strand Starting at position 621 of SEQ ID NO: 317778
agauauccuugucucagga

SEQ ID NO: 367524 - RNA, 19 nt, Artificial Sequence
  Description of Artificial Sequence: Synthetic oligonucleotide
  Antisense Strand to SEQ ID NO: 367523
uccugagacaaggauaucu

SEQ ID NO: 367525 - RNA, 19 nt, Artificial Sequence
  Description of Artificial Sequence: Synthetic oligonucleotide
  Sense Strand Starting at position 621 of SEQ ID NO: 317816
gcuucugcguauuucuaca

SEQ ID NO: 367526 - RNA, 19 nt, Artificial Sequence
  Description of Artificial Sequence: Synthetic oligonucleotide
  Antisense Strand to SEQ ID NO: 367525
uguagaaauacgcagaagc

SEQ ID NO: 367527 - RNA, 19 nt, Artificial Sequence
  Description of Artificial Sequence: Synthetic oligonucleotide
  Sense Strand Starting at position 621 of SEQ ID NO: 317846
ccuauagggaaggguuuau

SEQ ID NO: 367528 - RNA, 19 nt, Artificial Sequence
  Description of Artificial Sequence: Synthetic oligonucleotide
  Antisense Strand to SEQ ID NO: 367527
auaaacccuucccuauagg

SEQ ID NO: 367529 - RNA, 19 nt, Artificial Sequence
  Description of Artificial Sequence: Synthetic oligonucleotide
  Sense Strand Starting at position 621 of SEQ ID NO: 317856
aggguuuauuuauauucca

SEQ ID NO: 367530 - RNA, 19 nt, Artificial Sequence
  Description of Artificial Sequence: Synthetic oligonucleotide
  Antisense Strand to SEQ ID NO: 367529
uggaauauaaauaaacccu

SEQ ID NO: 367531 - RNA, 19 nt, Artificial Sequence
  Description of Artificial Sequence: Synthetic oligonucleotide
  Sense Strand Starting at position 621 of SEQ ID NO: 318003
ggaggagagcacugucauu

SEQ ID NO: 367532 - RNA, 19 nt, Artificial Sequence
  Description of Artificial Sequence: Synthetic oligonucleotide
  Antisense Strand to SEQ ID NO: 367531
aaugacagugcucuccucc

SEQ ID NO: 367533 - RNA, 19 nt, Artificial Sequence
  Description of Artificial Sequence: Synthetic oligonucleotide
  Sense Strand Starting at position 621 of SEQ ID NO: 318125
uuguaaaccugauuaugag

SEQ ID NO: 367534 - RNA, 19 nt, Artificial Sequence
  Description of Artificial Sequence: Synthetic oligonucleotide
  Antisense Strand to SEQ ID NO: 367533
cucauaaucagguuuacaa

SEQ ID NO: 367535 - RNA, 19 nt, Artificial Sequence
  Description of Artificial Sequence: Synthetic oligonucleotide
  Sense Strand Starting at position 621 of SEQ ID NO: 318131
accugauuaugagcugauu

SEQ ID NO: 367536 - RNA, 19 nt, Artificial Sequence
  Description of Artificial Sequence: Synthetic oligonucleotide
  Antisense Strand to SEQ ID NO: 367535
aaucagcucauaaucaggu

SEQ ID NO: 367537 - RNA, 19 nt, Artificial Sequence
  Description of Artificial Sequence: Synthetic oligonucleotide
  Sense Strand Starting at position 621 of SEQ ID NO: 318144
cugauuuaaugggaucuuu

SEQ ID NO: 367538 - RNA, 19 nt, Artificial Sequence
  Description of Artificial Sequence: Synthetic oligonucleotide
  Antisense Strand to SEQ ID NO: 367537
aaagaucccauuaaaucag

SEQ ID NO: 367539 - RNA, 19 nt, Artificial Sequence
  Description of Artificial Sequence: Synthetic oligonucleotide
  Sense Strand Starting at position 621 of SEQ ID NO: 318166
aguggucugaaugguaaug

SEQ ID NO: 367540 - RNA, 19 nt, Artificial Sequence
  Description of Artificial Sequence: Synthetic oligonucleotide
  Antisense Strand to SEQ ID NO: 367539
cauuaccauucagaccacu

SEQ ID NO: 367541 - RNA, 19 nt, Artificial Sequence
  Description of Artificial Sequence: Synthetic oligonucleotide
  Sense Strand Starting at position 621 of SEQ ID NO: 318207
uuaagaauuugugaacuuc

SEQ ID NO: 367542 - RNA, 19 nt, Artificial Sequence
  Description of Artificial Sequence: Synthetic oligonucleotide
  Antisense Strand to SEQ ID NO: 367541
gaaguucacaaauucuuaa

SEQ ID NO: 367543 - RNA, 19 nt, Artificial Sequence
  Description of Artificial Sequence: Synthetic oligonucleotide
  Sense Strand Starting at position 621 of SEQ ID NO: 318215
uugugaacuucugucauuu

SEQ ID NO: 367544 - RNA, 19 nt, Artificial Sequence
  Description of Artificial Sequence: Synthetic oligonucleotide
  Antisense Strand to SEQ ID NO: 367543
aaaugacagaaguucacaa

SEQ ID NO: 367545 - RNA, 19 nt, Artificial Sequence
  Description of Artificial Sequence: Synthetic oligonucleotide
  Sense Strand Starting at position 621 of SEQ ID NO: 318246
gccguuaauguuucuagcu

SEQ ID NO: 367546 - RNA, 19 nt, Artificial Sequence
  Description of Artificial Sequence: Synthetic oligonucleotide
  Antisense Strand to SEQ ID NO: 367545
agcuagaaacauuaacggc

SEQ ID NO: 367547 - RNA, 19 nt, Artificial Sequence
  Description of Artificial Sequence: Synthetic oligonucleotide
  Sense Strand Starting at position 621 of SEQ ID NO: 318267
cugucaauuguagucguuu

SEQ ID NO: 367548 - RNA, 19 nt, Artificial Sequence
  Description of Artificial Sequence: Synthetic oligonucleotide
  Antisense Strand to SEQ ID NO: 367547
aaacgacuacaauugacag

SEQ ID NO: 367549 - RNA, 19 nt, Artificial Sequence
  Description of Artificial Sequence: Synthetic oligonucleotide
  Sense Strand Starting at position 621 of SEQ ID NO: 318335
ggaacaccuccuuaugcua

SEQ ID NO: 367550 - RNA, 19 nt, Artificial Sequence
  Description of Artificial Sequence: Synthetic oligonucleotide
  Antisense Strand to SEQ ID NO: 367549
uagcauaaggagguguucc

SEQ ID NO: 367551 - RNA, 19 nt, Artificial Sequence
  Description of Artificial Sequence: Synthetic oligonucleotide
  Sense Strand Starting at position 621 of SEQ ID NO: 318422
aaugguaccuuauuggaga

SEQ ID NO: 367552 - RNA, 19 nt, Artificial Sequence
  Description of Artificial Sequence: Synthetic oligonucleotide
  Antisense Strand to SEQ ID NO: 367551
ucuccaauaagguaccauu

SEQ ID NO: 367553 - RNA, 19 nt, Artificial Sequence
  Description of Artificial Sequence: Synthetic oligonucleotide
  Sense Strand Starting at position 621 of SEQ ID NO: 318493
cuuuauggaucagucacua

SEQ ID NO: 367554 - RNA, 19 nt, Artificial Sequence
  Description of Artificial Sequence: Synthetic oligonucleotide
  Antisense Strand to SEQ ID NO: 367553
uagugacugauccauaaag

SEQ ID NO: 367555 - RNA, 19 nt, Artificial Sequence
  Description of Artificial Sequence: Synthetic oligonucleotide
  Sense Strand Starting at position 621 of SEQ ID NO: 318497
auggaucagucacuaaauc

SEQ ID NO: 367556 - RNA, 19 nt, Artificial Sequence
  Description of Artificial Sequence: Synthetic oligonucleotide
  Antisense Strand to SEQ ID NO: 367555
gauuuagugacugauccau

SEQ ID NO: 367557 - RNA, 19 nt, Artificial Sequence
  Description of Artificial Sequence: Synthetic oligonucleotide
  Sense Strand Starting at position 621 of SEQ ID NO: 318574
gagauauauguaugugacu

SEQ ID NO: 367558 - RNA, 19 nt, Artificial Sequence
  Description of Artificial Sequence: Synthetic oligonucleotide
  Antisense Strand to SEQ ID NO: 367557
agucacauacauauaucuc

SEQ ID NO: 367559 - RNA, 19 nt, Artificial Sequence
  Description of Artificial Sequence: Synthetic oligonucleotide
  Sense Strand Starting at position 621 of SEQ ID NO: 318618
uugagaaccuuucuaaagu

SEQ ID NO: 367560 - RNA, 19 nt, Artificial Sequence
  Description of Artificial Sequence: Synthetic oligonucleotide
  Antisense Strand to SEQ ID NO: 367559
acuuuagaaagguucucaa

SEQ ID NO: 367561 - RNA, 19 nt, Artificial Sequence
  Description of Artificial Sequence: Synthetic oligonucleotide
  Sense Strand Starting at position 621 of SEQ ID NO: 318641
ggagcacucuccuuuauga

SEQ ID NO: 367562 - RNA, 19 nt, Artificial Sequence
  Description of Artificial Sequence: Synthetic oligonucleotide
  Antisense Strand to SEQ ID NO: 367561
ucauaaaggagagugcucc

SEQ ID NO: 367563 - RNA, 19 nt, Artificial Sequence
  Description of Artificial Sequence: Synthetic oligonucleotide
  Sense Strand Starting at position 621 of SEQ ID NO: 318643
agcacucuccuuuaugaug

SEQ ID NO: 367564 - RNA, 19 nt, Artificial Sequence
  Description of Artificial Sequence: Synthetic oligonucleotide
  Antisense Strand to SEQ ID NO: 367563
caucauaaaggagagugcu

SEQ ID NO: 367565 - RNA, 19 nt, Artificial Sequence
  Description of Artificial Sequence: Synthetic oligonucleotide
  Sense Strand Starting at position 621 of SEQ ID NO: 318717
guugaugacuucccaguua

SEQ ID NO: 367566 - RNA, 19 nt, Artificial Sequence
  Description of Artificial Sequence: Synthetic oligonucleotide
  Antisense Strand to SEQ ID NO: 367565
uaacugggaagucaucaac

SEQ ID NO: 367567 - RNA, 19 nt, Artificial Sequence
  Description of Artificial Sequence: Synthetic oligonucleotide
  Sense Strand Starting at position 621 of SEQ ID NO: 318807
cgugcaguggucuuugcaa

SEQ ID NO: 367568 - RNA, 19 nt, Artificial Sequence
  Description of Artificial Sequence: Synthetic oligonucleotide
  Antisense Strand to SEQ ID NO: 367567
uugcaaagaccacugcacg

SEQ ID NO: 367569 - RNA, 19 nt, Artificial Sequence
  Description of Artificial Sequence: Synthetic oligonucleotide
  Sense Strand Starting at position 621 of SEQ ID NO: 319189
augaguugcugacugugaa

SEQ ID NO: 367570 - RNA, 19 nt, Artificial Sequence
  Description of Artificial Sequence: Synthetic oligonucleotide
  Antisense Strand to SEQ ID NO: 367569
uucacagucagcaacucau

SEQ ID NO: 367571 - RNA, 19 nt, Artificial Sequence
  Description of Artificial Sequence: Synthetic oligonucleotide
  Sense Strand Starting at position 621 of SEQ ID NO: 319190
ugaguugcugacugugaaa

SEQ ID NO: 367572 - RNA, 19 nt, Artificial Sequence
  Description of Artificial Sequence: Synthetic oligonucleotide
  Antisense Strand to SEQ ID NO: 367571
uuucacagucagcaacuca

SEQ ID NO: 367573 - RNA, 19 nt, Artificial Sequence
  Description of Artificial Sequence: Synthetic oligonucleotide
  Sense Strand Starting at position 622 of SEQ ID NO: 315279
ggguuuguugcaccgcauu

SEQ ID NO: 367574 - RNA, 19 nt, Artificial Sequence
  Description of Artificial Sequence: Synthetic oligonucleotide
  Antisense Strand to SEQ ID NO: 367573
aaugcggugcaacaaaccc

SEQ ID NO: 367575 - RNA, 19 nt, Artificial Sequence
  Description of Artificial Sequence: Synthetic oligonucleotide
  Sense Strand Starting at position 622 of SEQ ID NO: 315809
caagguauuaggugaugca

SEQ ID NO: 367576 - RNA, 19 nt, Artificial Sequence
  Description of Artificial Sequence: Synthetic oligonucleotide
  Antisense Strand to SEQ ID NO: 367575
ugcaucaccuaauaccuug

SEQ ID NO: 367577 - RNA, 19 nt, Artificial Sequence
  Description of Artificial Sequence: Synthetic oligonucleotide
  Sense Strand Starting at position 622 of SEQ ID NO: 315824
ugcacaagcgcuuaugaga

SEQ ID NO: 367578 - RNA, 19 nt, Artificial Sequence
  Description of Artificial Sequence: Synthetic oligonucleotide
  Antisense Strand to SEQ ID NO: 367577
ucucauaagcgcuugugca

SEQ ID NO: 367579 - RNA, 19 nt, Artificial Sequence
  Description of Artificial Sequence: Synthetic oligonucleotide
  Sense Strand Starting at position 622 of SEQ ID NO: 315906
gcuuuaggguuguugagag

SEQ ID NO: 367580 - RNA, 19 nt, Artificial Sequence
  Description of Artificial Sequence: Synthetic oligonucleotide
  Antisense Strand to SEQ ID NO: 367579
cucucaacaacccuaaagc

SEQ ID NO: 367581 - RNA, 19 nt, Artificial Sequence
  Description of Artificial Sequence: Synthetic oligonucleotide
  Sense Strand Starting at position 622 of SEQ ID NO: 315922
gaggauuaaguaugugaag

SEQ ID NO: 367582 - RNA, 19 nt, Artificial Sequence
  Description of Artificial Sequence: Synthetic oligonucleotide
  Antisense Strand to SEQ ID NO: 367581
cuucacauacuuaauccuc

SEQ ID NO: 367583 - RNA, 19 nt, Artificial Sequence
  Description of Artificial Sequence: Synthetic oligonucleotide
  Sense Strand Starting at position 622 of SEQ ID NO: 315924
ggauuaaguaugugaagcu

SEQ ID NO: 367584 - RNA, 19 nt, Artificial Sequence
  Description of Artificial Sequence: Synthetic oligonucleotide
  Antisense Strand to SEQ ID NO: 367583
agcuucacauacuuaaucc

SEQ ID NO: 367585 - RNA, 19 nt, Artificial Sequence
  Description of Artificial Sequence: Synthetic oligonucleotide
  Sense Strand Starting at position 622 of SEQ ID NO: 316054
gguguaugcgcccuaaacu

SEQ ID NO: 367586 - RNA, 19 nt, Artificial Sequence
  Description of Artificial Sequence: Synthetic oligonucleotide
  Antisense Strand to SEQ ID NO: 367585
aguuuagggcgcauacacc

SEQ ID NO: 367587 - RNA, 19 nt, Artificial Sequence
  Description of Artificial Sequence: Synthetic oligonucleotide
  Sense Strand Starting at position 622 of SEQ ID NO: 316288
gguguuccuccacgucaca

SEQ ID NO: 367588 - RNA, 19 nt, Artificial Sequence
  Description of Artificial Sequence: Synthetic oligonucleotide
  Antisense Strand to SEQ ID NO: 367587
ugugacguggaggaacacc

SEQ ID NO: 367589 - RNA, 19 nt, Artificial Sequence
  Description of Artificial Sequence: Synthetic oligonucleotide
  Sense Strand Starting at position 622 of SEQ ID NO: 316308
ucgcucguggacugguaaa

SEQ ID NO: 367590 - RNA, 19 nt, Artificial Sequence
  Description of Artificial Sequence: Synthetic oligonucleotide
  Antisense Strand to SEQ ID NO: 367589
uuuaccaguccacgagcga

SEQ ID NO: 367591 - RNA, 19 nt, Artificial Sequence
  Description of Artificial Sequence: Synthetic oligonucleotide
  Sense Strand Starting at position 622 of SEQ ID NO: 316340
ggagaugggcucuaugcuu

SEQ ID NO: 367592 - RNA, 19 nt, Artificial Sequence
  Description of Artificial Sequence: Synthetic oligonucleotide
  Antisense Strand to SEQ ID NO: 367591
aagcauagagcccaucucc

SEQ ID NO: 367593 - RNA, 19 nt, Artificial Sequence
  Description of Artificial Sequence: Synthetic oligonucleotide
  Sense Strand Starting at position 622 of SEQ ID NO: 316585
ucgguacucaaucgacuua

SEQ ID NO: 367594 - RNA, 19 nt, Artificial Sequence
  Description of Artificial Sequence: Synthetic oligonucleotide
  Antisense Strand to SEQ ID NO: 367593
uaagucgauugaguaccga

SEQ ID NO: 367595 - RNA, 19 nt, Artificial Sequence
  Description of Artificial Sequence: Synthetic oligonucleotide
  Sense Strand Starting at position 622 of SEQ ID NO: 316794
gcacaagaugcguuugcua

SEQ ID NO: 367596 - RNA, 19 nt, Artificial Sequence
  Description of Artificial Sequence: Synthetic oligonucleotide
  Antisense Strand to SEQ ID NO: 367595
uagcaaacgcaucuugugc

SEQ ID NO: 367597 - RNA, 19 nt, Artificial Sequence
  Description of Artificial Sequence: Synthetic oligonucleotide
  Sense Strand Starting at position 622 of SEQ ID NO: 316796
acaagaugcguuugcuauu

SEQ ID NO: 367598 - RNA, 19 nt, Artificial Sequence
  Description of Artificial Sequence: Synthetic oligonucleotide
  Antisense Strand to SEQ ID NO: 367597
aauagcaaacgcaucuugu

SEQ ID NO: 367599 - RNA, 19 nt, Artificial Sequence
  Description of Artificial Sequence: Synthetic oligonucleotide
  Sense Strand Starting at position 622 of SEQ ID NO: 316797
caagaugcguuugcuauuu

SEQ ID NO: 367600 - RNA, 19 nt, Artificial Sequence
  Description of Artificial Sequence: Synthetic oligonucleotide
  Antisense Strand to SEQ ID NO: 367599
aaauagcaaacgcaucuug

SEQ ID NO: 367601 - RNA, 19 nt, Artificial Sequence
  Description of Artificial Sequence: Synthetic oligonucleotide
  Sense Strand Starting at position 622 of SEQ ID NO: 317382
aggaguuucuacucggaac

SEQ ID NO: 367602 - RNA, 19 nt, Artificial Sequence
  Description of Artificial Sequence: Synthetic oligonucleotide
  Antisense Strand to SEQ ID NO: 367601
guuccgaguagaaacuccu

SEQ ID NO: 367603 - RNA, 19 nt, Artificial Sequence
  Description of Artificial Sequence: Synthetic oligonucleotide
  Sense Strand Starting at position 622 of SEQ ID NO: 317384
gaguuucuacucggaacgu

SEQ ID NO: 367604 - RNA, 19 nt, Artificial Sequence
  Description of Artificial Sequence: Synthetic oligonucleotide
  Antisense Strand to SEQ ID NO: 367603
acguuccgaguagaaacuc

SEQ ID NO: 367605 - RNA, 19 nt, Artificial Sequence
  Description of Artificial Sequence: Synthetic oligonucleotide
  Sense Strand Starting at position 622 of SEQ ID NO: 317548
cgaucccucucauuagauu

SEQ ID NO: 367606 - RNA, 19 nt, Artificial Sequence
  Description of Artificial Sequence: Synthetic oligonucleotide
  Antisense Strand to SEQ ID NO: 367605
aaucuaaugagagggaucg

SEQ ID NO: 367607 - RNA, 19 nt, Artificial Sequence
  Description of Artificial Sequence: Synthetic oligonucleotide
  Sense Strand Starting at position 622 of SEQ ID NO: 317638
ugucgcugauguccuuaaa

SEQ ID NO: 367608 - RNA, 19 nt, Artificial Sequence
  Description of Artificial Sequence: Synthetic oligonucleotide
  Antisense Strand to SEQ ID NO: 367607
uuuaaggacaucagcgaca

SEQ ID NO: 367609 - RNA, 19 nt, Artificial Sequence
  Description of Artificial Sequence: Synthetic oligonucleotide
  Sense Strand Starting at position 622 of SEQ ID NO: 317660
gcaugagaauucuuguuag

SEQ ID NO: 367610 - RNA, 19 nt, Artificial Sequence
  Description of Artificial Sequence: Synthetic oligonucleotide
  Antisense Strand to SEQ ID NO: 367609
cuaacaagaauucucaugc

SEQ ID NO: 367611 - RNA, 19 nt, Artificial Sequence
  Description of Artificial Sequence: Synthetic oligonucleotide
  Sense Strand Starting at position 622 of SEQ ID NO: 317663
ugagaauucuuguuaguga

SEQ ID NO: 367612 - RNA, 19 nt, Artificial Sequence
  Description of Artificial Sequence: Synthetic oligonucleotide
  Antisense Strand to SEQ ID NO: 367611
ucacuaacaagaauucuca

SEQ ID NO: 367613 - RNA, 19 nt, Artificial Sequence
  Description of Artificial Sequence: Synthetic oligonucleotide
  Sense Strand Starting at position 622 of SEQ ID NO: 317666
gaauucuuguuagugauca

SEQ ID NO: 367614 - RNA, 19 nt, Artificial Sequence
  Description of Artificial Sequence: Synthetic oligonucleotide
  Antisense Strand to SEQ ID NO: 367613
ugaucacuaacaagaauuc

SEQ ID NO: 367615 - RNA, 19 nt, Artificial Sequence
  Description of Artificial Sequence: Synthetic oligonucleotide
  Sense Strand Starting at position 622 of SEQ ID NO: 317670
ucuuguuagugaucaugag

SEQ ID NO: 367616 - RNA, 19 nt, Artificial Sequence
  Description of Artificial Sequence: Synthetic oligonucleotide
  Antisense Strand to SEQ ID NO: 367615
cucaugaucacuaacaaga

SEQ ID NO: 367617 - RNA, 19 nt, Artificial Sequence
  Description of Artificial Sequence: Synthetic oligonucleotide
  Sense Strand Starting at position 622 of SEQ ID NO: 317676
uagugaucaugagcgccaa

SEQ ID NO: 367618 - RNA, 19 nt, Artificial Sequence
  Description of Artificial Sequence: Synthetic oligonucleotide
  Antisense Strand to SEQ ID NO: 367617
uuggcgcucaugaucacua

SEQ ID NO: 367619 - RNA, 19 nt, Artificial Sequence
  Description of Artificial Sequence: Synthetic oligonucleotide
  Sense Strand Starting at position 622 of SEQ ID NO: 317689
cgccaacucagagaucaga

SEQ ID NO: 367620 - RNA, 19 nt, Artificial Sequence
  Description of Artificial Sequence: Synthetic oligonucleotide
  Antisense Strand to SEQ ID NO: 367619
ucugaucucugaguuggcg

SEQ ID NO: 367621 - RNA, 19 nt, Artificial Sequence
  Description of Artificial Sequence: Synthetic oligonucleotide
  Sense Strand Starting at position 622 of SEQ ID NO: 317729
agcgauucgcccgagguca

SEQ ID NO: 367622 - RNA, 19 nt, Artificial Sequence
  Description of Artificial Sequence: Synthetic oligonucleotide
  Antisense Strand to SEQ ID NO: 367621
ugaccucgggcgaaucgcu

SEQ ID NO: 367623 - RNA, 19 nt, Artificial Sequence
  Description of Artificial Sequence: Synthetic oligonucleotide
  Sense Strand Starting at position 622 of SEQ ID NO: 318210
acacaagcuuggcuauuaa

SEQ ID NO: 367624 - RNA, 19 nt, Artificial Sequence
  Description of Artificial Sequence: Synthetic oligonucleotide
  Antisense Strand to SEQ ID NO: 367623
uuaauagccaagcuugugu

SEQ ID NO: 367625 - RNA, 19 nt, Artificial Sequence
  Description of Artificial Sequence: Synthetic oligonucleotide
  Sense Strand Starting at position 622 of SEQ ID NO: 318241
ugaguugagcuaugaccua

SEQ ID NO: 367626 - RNA, 19 nt, Artificial Sequence
  Description of Artificial Sequence: Synthetic oligonucleotide
  Antisense Strand to SEQ ID NO: 367625
uaggucauagcucaacuca

SEQ ID NO: 367627 - RNA, 19 nt, Artificial Sequence
  Description of Artificial Sequence: Synthetic oligonucleotide
  Sense Strand Starting at position 622 of SEQ ID NO: 318254
gaccuacuuugugucaaag

SEQ ID NO: 367628 - RNA, 19 nt, Artificial Sequence
  Description of Artificial Sequence: Synthetic oligonucleotide
  Antisense Strand to SEQ ID NO: 367627
cuuugacacaaaguagguc

SEQ ID NO: 367629 - RNA, 19 nt, Artificial Sequence
  Description of Artificial Sequence: Synthetic oligonucleotide
  Sense Strand Starting at position 622 of SEQ ID NO: 318369
aauacugggugcuccaaua

SEQ ID NO: 367630 - RNA, 19 nt, Artificial Sequence
  Description of Artificial Sequence: Synthetic oligonucleotide
  Antisense Strand to SEQ ID NO: 367629
uauuggagcacccaguauu

SEQ ID NO: 367631 - RNA, 19 nt, Artificial Sequence
  Description of Artificial Sequence: Synthetic oligonucleotide
  Sense Strand Starting at position 622 of SEQ ID NO: 318380
cuccaauacuccucggguu

SEQ ID NO: 367632 - RNA, 19 nt, Artificial Sequence
  Description of Artificial Sequence: Synthetic oligonucleotide
  Antisense Strand to SEQ ID NO: 367631
aacccgaggaguauuggag

SEQ ID NO: 367633 - RNA, 19 nt, Artificial Sequence
  Description of Artificial Sequence: Synthetic oligonucleotide
  Sense Strand Starting at position 622 of SEQ ID NO: 318534
gacugcugucuguaugcca

SEQ ID NO: 367634 - RNA, 19 nt, Artificial Sequence
  Description of Artificial Sequence: Synthetic oligonucleotide
  Antisense Strand to SEQ ID NO: 367633
uggcauacagacagcaguc

SEQ ID NO: 367635 - RNA, 19 nt, Artificial Sequence
  Description of Artificial Sequence: Synthetic oligonucleotide
  Sense Strand Starting at position 622 of SEQ ID NO: 318713
cugguuucccuccaaaggu

SEQ ID NO: 367636 - RNA, 19 nt, Artificial Sequence
  Description of Artificial Sequence: Synthetic oligonucleotide
  Antisense Strand to SEQ ID NO: 367635
accuuuggagggaaaccag

SEQ ID NO: 367637 - RNA, 19 nt, Artificial Sequence
  Description of Artificial Sequence: Synthetic oligonucleotide
  Sense Strand Starting at position 622 of SEQ ID NO: 318723
uccaaagguuccuagauca

SEQ ID NO: 367638 - RNA, 19 nt, Artificial Sequence
  Description of Artificial Sequence: Synthetic oligonucleotide
  Antisense Strand to SEQ ID NO: 367637
ugaucuaggaaccuuugga

SEQ ID NO: 367639 - RNA, 19 nt, Artificial Sequence
  Description of Artificial Sequence: Synthetic oligonucleotide
  Sense Strand Starting at position 622 of SEQ ID NO: 318793
gccagaggucuuggaccaa

SEQ ID NO: 367640 - RNA, 19 nt, Artificial Sequence
  Description of Artificial Sequence: Synthetic oligonucleotide
  Antisense Strand to SEQ ID NO: 367639
uugguccaagaccucuggc

SEQ ID NO: 367641 - RNA, 19 nt, Artificial Sequence
  Description of Artificial Sequence: Synthetic oligonucleotide
  Sense Strand Starting at position 622 of SEQ ID NO: 318880
auuaaagaccuguggaagu

SEQ ID NO: 367642 - RNA, 19 nt, Artificial Sequence
  Description of Artificial Sequence: Synthetic oligonucleotide
  Antisense Strand to SEQ ID NO: 367641
acuuccacaggucuuuaau

SEQ ID NO: 367643 - RNA, 19 nt, Artificial Sequence
  Description of Artificial Sequence: Synthetic oligonucleotide
  Sense Strand Starting at position 622 of SEQ ID NO: 318979
auaaucuuccggcaggcau

SEQ ID NO: 367644 - RNA, 19 nt, Artificial Sequence
  Description of Artificial Sequence: Synthetic oligonucleotide
  Antisense Strand to SEQ ID NO: 367643
augccugccggaagauuau

SEQ ID NO: 367645 - RNA, 19 nt, Artificial Sequence
  Description of Artificial Sequence: Synthetic oligonucleotide
  Sense Strand Starting at position 622 of SEQ ID NO: 319034
cuagucuccuucucuggaa

SEQ ID NO: 367646 - RNA, 19 nt, Artificial Sequence
  Description of Artificial Sequence: Synthetic oligonucleotide
  Antisense Strand to SEQ ID NO: 367645
uuccagagaaggagacuag

SEQ ID NO: 367647 - RNA, 19 nt, Artificial Sequence
  Description of Artificial Sequence: Synthetic oligonucleotide
  Sense Strand Starting at position 622 of SEQ ID NO: 319055
ugggcagaccucugugacu

SEQ ID NO: 367648 - RNA, 19 nt, Artificial Sequence
  Description of Artificial Sequence: Synthetic oligonucleotide
  Antisense Strand to SEQ ID NO: 367647
agucacagaggucugccca

SEQ ID NO: 367649 - RNA, 19 nt, Artificial Sequence
  Description of Artificial Sequence: Synthetic oligonucleotide
  Sense Strand Starting at position 622 of SEQ ID NO: 319066
cugugacuggcucagucaa

SEQ ID NO: 367650 - RNA, 19 nt, Artificial Sequence
  Description of Artificial Sequence: Synthetic oligonucleotide
  Antisense Strand to SEQ ID NO: 367649
uugacugagccagucacag

SEQ ID NO: 367651 - RNA, 19 nt, Artificial Sequence
  Description of Artificial Sequence: Synthetic oligonucleotide
  Sense Strand Starting at position 622 of SEQ ID NO: 319119
gaggccaggucauauaaau

SEQ ID NO: 367652 - RNA, 19 nt, Artificial Sequence
  Description of Artificial Sequence: Synthetic oligonucleotide
  Antisense Strand to SEQ ID NO: 367651
auuuauaugaccuggccuc

SEQ ID NO: 367653 - RNA, 19 nt, Artificial Sequence
  Description of Artificial Sequence: Synthetic oligonucleotide
  Sense Strand Starting at position 623 of SEQ ID NO: 315436
cugaaacucccagaagcuu

SEQ ID NO: 367654 - RNA, 19 nt, Artificial Sequence
  Description of Artificial Sequence: Synthetic oligonucleotide
  Antisense Strand to SEQ ID NO: 367653
aagcuucugggaguuucag

SEQ ID NO: 367655 - RNA, 19 nt, Artificial Sequence
  Description of Artificial Sequence: Synthetic oligonucleotide
  Sense Strand Starting at position 623 of SEQ ID NO: 315549
uugucauuggagcacuaaa

SEQ ID NO: 367656 - RNA, 19 nt, Artificial Sequence
  Description of Artificial Sequence: Synthetic oligonucleotide
  Antisense Strand to SEQ ID NO: 367655
uuuagugcuccaaugacaa

SEQ ID NO: 367657 - RNA, 19 nt, Artificial Sequence
  Description of Artificial Sequence: Synthetic oligonucleotide
  Sense Strand Starting at position 623 of SEQ ID NO: 315761
cgcagcuguacugcuuaau

SEQ ID NO: 367658 - RNA, 19 nt, Artificial Sequence
  Description of Artificial Sequence: Synthetic oligonucleotide
  Antisense Strand to SEQ ID NO: 367657
auuaagcaguacagcugcg

SEQ ID NO: 367659 - RNA, 19 nt, Artificial Sequence
  Description of Artificial Sequence: Synthetic oligonucleotide
  Sense Strand Starting at position 623 of SEQ ID NO: 315862
uucucuaggcaguaauaau

SEQ ID NO: 367660 - RNA, 19 nt, Artificial Sequence
  Description of Artificial Sequence: Synthetic oligonucleotide
  Antisense Strand to SEQ ID NO: 367659
auuauuacugccuagagaa

SEQ ID NO: 367661 - RNA, 19 nt, Artificial Sequence
  Description of Artificial Sequence: Synthetic oligonucleotide
  Sense Strand Starting at position 623 of SEQ ID NO: 316061
uaguaucuagggcaacaua

SEQ ID NO: 367662 - RNA, 19 nt, Artificial Sequence
  Description of Artificial Sequence: Synthetic oligonucleotide
  Antisense Strand to SEQ ID NO: 367661
uauguugcccuagauacua

SEQ ID NO: 367663 - RNA, 19 nt, Artificial Sequence
  Description of Artificial Sequence: Synthetic oligonucleotide
  Sense Strand Starting at position 623 of SEQ ID NO: 316072
gcaacauauuugucaugug

SEQ ID NO: 367664 - RNA, 19 nt, Artificial Sequence
  Description of Artificial Sequence: Synthetic oligonucleotide
  Antisense Strand to SEQ ID NO: 367663
cacaugacaaauauguugc

SEQ ID NO: 367665 - RNA, 19 nt, Artificial Sequence
  Description of Artificial Sequence: Synthetic oligonucleotide
  Sense Strand Starting at position 623 of SEQ ID NO: 316088
guggaauauguccaaugca

SEQ ID NO: 367666 - RNA, 19 nt, Artificial Sequence
  Description of Artificial Sequence: Synthetic oligonucleotide
  Antisense Strand to SEQ ID NO: 367665
ugcauuggacauauuccac

SEQ ID NO: 367667 - RNA, 19 nt, Artificial Sequence
  Description of Artificial Sequence: Synthetic oligonucleotide
  Sense Strand Starting at position 623 of SEQ ID NO: 316100
caaugcauuuagcugguaa

SEQ ID NO: 367668 - RNA, 19 nt, Artificial Sequence
  Description of Artificial Sequence: Synthetic oligonucleotide
  Antisense Strand to SEQ ID NO: 367667
uuaccagcuaaaugcauug

SEQ ID NO: 367669 - RNA, 19 nt, Artificial Sequence
  Description of Artificial Sequence: Synthetic oligonucleotide
  Sense Strand Starting at position 623 of SEQ ID NO: 316102
augcauuuagcugguaaau

SEQ ID NO: 367670 - RNA, 19 nt, Artificial Sequence
  Description of Artificial Sequence: Synthetic oligonucleotide
  Antisense Strand to SEQ ID NO: 367669
auuuaccagcuaaaugcau

SEQ ID NO: 367671 - RNA, 19 nt, Artificial Sequence
  Description of Artificial Sequence: Synthetic oligonucleotide
  Sense Strand Starting at position 623 of SEQ ID NO: 316197
guauaacuuaagggugaaa

SEQ ID NO: 367672 - RNA, 19 nt, Artificial Sequence
  Description of Artificial Sequence: Synthetic oligonucleotide
  Antisense Strand to SEQ ID NO: 367671
uuucacccuuaaguuauac

SEQ ID NO: 367673 - RNA, 19 nt, Artificial Sequence
  Description of Artificial Sequence: Synthetic oligonucleotide
  Sense Strand Starting at position 623 of SEQ ID NO: 316311
aaagguagucuguggaaag

SEQ ID NO: 367674 - RNA, 19 nt, Artificial Sequence
  Description of Artificial Sequence: Synthetic oligonucleotide
  Antisense Strand to SEQ ID NO: 367673
cuuuccacagacuaccuuu

SEQ ID NO: 367675 - RNA, 19 nt, Artificial Sequence
  Description of Artificial Sequence: Synthetic oligonucleotide
  Sense Strand Starting at position 623 of SEQ ID NO: 316457
uuugaaaguugguugaauu

SEQ ID NO: 367676 - RNA, 19 nt, Artificial Sequence
  Description of Artificial Sequence: Synthetic oligonucleotide
  Antisense Strand to SEQ ID NO: 367675
aauucaaccaacuuucaaa

SEQ ID NO: 367677 - RNA, 19 nt, Artificial Sequence
  Description of Artificial Sequence: Synthetic oligonucleotide
  Sense Strand Starting at position 623 of SEQ ID NO: 316569
ggaauauaggcaggguauu

SEQ ID NO: 367678 - RNA, 19 nt, Artificial Sequence
  Description of Artificial Sequence: Synthetic oligonucleotide
  Antisense Strand to SEQ ID NO: 367677
aauacccugccuauauucc

SEQ ID NO: 367679 - RNA, 19 nt, Artificial Sequence
  Description of Artificial Sequence: Synthetic oligonucleotide
  Sense Strand Starting at position 623 of SEQ ID NO: 316663
gaaagaaaugugcgagaag

SEQ ID NO: 367680 - RNA, 19 nt, Artificial Sequence
  Description of Artificial Sequence: Synthetic oligonucleotide
  Antisense Strand to SEQ ID NO: 367679
cuucucgcacauuucuuuc

SEQ ID NO: 367681 - RNA, 19 nt, Artificial Sequence
  Description of Artificial Sequence: Synthetic oligonucleotide
  Sense Strand Starting at position 623 of SEQ ID NO: 316666
agaaaugugcgagaaguuu

SEQ ID NO: 367682 - RNA, 19 nt, Artificial Sequence
  Description of Artificial Sequence: Synthetic oligonucleotide
  Antisense Strand to SEQ ID NO: 367681
aaacuucucgcacauuucu

SEQ ID NO: 367683 - RNA, 19 nt, Artificial Sequence
  Description of Artificial Sequence: Synthetic oligonucleotide
  Sense Strand Starting at position 623 of SEQ ID NO: 316886
gcgugucagcucaggauga

SEQ ID NO: 367684 - RNA, 19 nt, Artificial Sequence
  Description of Artificial Sequence: Synthetic oligonucleotide
  Antisense Strand to SEQ ID NO: 367683
ucauccugagcugacacgc

SEQ ID NO: 367685 - RNA, 19 nt, Artificial Sequence
  Description of Artificial Sequence: Synthetic oligonucleotide
  Sense Strand Starting at position 623 of SEQ ID NO: 316989
uugggaucaccuugggacu

SEQ ID NO: 367686 - RNA, 19 nt, Artificial Sequence
  Description of Artificial Sequence: Synthetic oligonucleotide
  Antisense Strand to SEQ ID NO: 367685
agucccaaggugaucccaa

SEQ ID NO: 367687 - RNA, 19 nt, Artificial Sequence
  Description of Artificial Sequence: Synthetic oligonucleotide
  Sense Strand Starting at position 623 of SEQ ID NO: 317289
ucgcucuugccgucaucaa

SEQ ID NO: 367688 - RNA, 19 nt, Artificial Sequence
  Description of Artificial Sequence: Synthetic oligonucleotide
  Antisense Strand to SEQ ID NO: 367687
uugaugacggcaagagcga

SEQ ID NO: 367689 - RNA, 19 nt, Artificial Sequence
  Description of Artificial Sequence: Synthetic oligonucleotide
  Sense Strand Starting at position 623 of SEQ ID NO: 317515
ggagcugcuagagauggau

SEQ ID NO: 367690 - RNA, 19 nt, Artificial Sequence
  Description of Artificial Sequence: Synthetic oligonucleotide
  Antisense Strand to SEQ ID NO: 367689
auccaucucuagcagcucc

SEQ ID NO: 367691 - RNA, 19 nt, Artificial Sequence
  Description of Artificial Sequence: Synthetic oligonucleotide
  Sense Strand Starting at position 623 of SEQ ID NO: 317521
gcuagagauggaugaguca

SEQ ID NO: 367692 - RNA, 19 nt, Artificial Sequence
  Description of Artificial Sequence: Synthetic oligonucleotide
  Antisense Strand to SEQ ID NO: 367691
ugacucauccaucucuagc

SEQ ID NO: 367693 - RNA, 19 nt, Artificial Sequence
  Description of Artificial Sequence: Synthetic oligonucleotide
  Sense Strand Starting at position 623 of SEQ ID NO: 317901
gggugauaaaugggcuuau

SEQ ID NO: 367694 - RNA, 19 nt, Artificial Sequence
  Description of Artificial Sequence: Synthetic oligonucleotide
  Antisense Strand to SEQ ID NO: 367693
auaagcccauuuaucaccc

SEQ ID NO: 367695 - RNA, 19 nt, Artificial Sequence
  Description of Artificial Sequence: Synthetic oligonucleotide
  Sense Strand Starting at position 623 of SEQ ID NO: 317902
ggugauaaaugggcuuaua

SEQ ID NO: 367696 - RNA, 19 nt, Artificial Sequence
  Description of Artificial Sequence: Synthetic oligonucleotide
  Antisense Strand to SEQ ID NO: 367695
uauaagcccauuuaucacc

SEQ ID NO: 367697 - RNA, 19 nt, Artificial Sequence
  Description of Artificial Sequence: Synthetic oligonucleotide
  Sense Strand Starting at position 623 of SEQ ID NO: 317912
gggcuuauaaagcagagua

SEQ ID NO: 367698 - RNA, 19 nt, Artificial Sequence
  Description of Artificial Sequence: Synthetic oligonucleotide
  Antisense Strand to SEQ ID NO: 367697
uacucugcuuuauaagccc

SEQ ID NO: 367699 - RNA, 19 nt, Artificial Sequence
  Description of Artificial Sequence: Synthetic oligonucleotide
  Sense Strand Starting at position 623 of SEQ ID NO: 317914
gcuuauaaagcagaguaaa

SEQ ID NO: 367700 - RNA, 19 nt, Artificial Sequence
  Description of Artificial Sequence: Synthetic oligonucleotide
  Antisense Strand to SEQ ID NO: 367699
uuuacucugcuuuauaagc

SEQ ID NO: 367701 - RNA, 19 nt, Artificial Sequence
  Description of Artificial Sequence: Synthetic oligonucleotide
  Sense Strand Starting at position 623 of SEQ ID NO: 317960
cuacuuuguggcuauauga

SEQ ID NO: 367702 - RNA, 19 nt, Artificial Sequence
  Description of Artificial Sequence: Synthetic oligonucleotide
  Antisense Strand to SEQ ID NO: 367701
ucauauagccacaaaguag

SEQ ID NO: 367703 - RNA, 19 nt, Artificial Sequence
  Description of Artificial Sequence: Synthetic oligonucleotide
  Sense Strand Starting at position 623 of SEQ ID NO: 317970
gcuauaugacccuaggcaa

SEQ ID NO: 367704 - RNA, 19 nt, Artificial Sequence
  Description of Artificial Sequence: Synthetic oligonucleotide
  Antisense Strand to SEQ ID NO: 367703
uugccuagggucauauagc

SEQ ID NO: 367705 - RNA, 19 nt, Artificial Sequence
  Description of Artificial Sequence: Synthetic oligonucleotide
  Sense Strand Starting at position 623 of SEQ ID NO: 317983
aggcaacuuguuuaauaac

SEQ ID NO: 367706 - RNA, 19 nt, Artificial Sequence
  Description of Artificial Sequence: Synthetic oligonucleotide
  Antisense Strand to SEQ ID NO: 367705
guuauuaaacaaguugccu

SEQ ID NO: 367707 - RNA, 19 nt, Artificial Sequence
  Description of Artificial Sequence: Synthetic oligonucleotide
  Sense Strand Starting at position 623 of SEQ ID NO: 318032
ggacgauaauaccugaauc

SEQ ID NO: 367708 - RNA, 19 nt, Artificial Sequence
  Description of Artificial Sequence: Synthetic oligonucleotide
  Antisense Strand to SEQ ID NO: 367707
gauucagguauuaucgucc

SEQ ID NO: 367709 - RNA, 19 nt, Artificial Sequence
  Description of Artificial Sequence: Synthetic oligonucleotide
  Sense Strand Starting at position 623 of SEQ ID NO: 318043
ccugaaucacuggaguguu

SEQ ID NO: 367710 - RNA, 19 nt, Artificial Sequence
  Description of Artificial Sequence: Synthetic oligonucleotide
  Antisense Strand to SEQ ID NO: 367709
aacacuccagugauucagg

SEQ ID NO: 367711 - RNA, 19 nt, Artificial Sequence
  Description of Artificial Sequence: Synthetic oligonucleotide
  Sense Strand Starting at position 623 of SEQ ID NO: 318219
ugaauaaauugugcucaua

SEQ ID NO: 367712 - RNA, 19 nt, Artificial Sequence
  Description of Artificial Sequence: Synthetic oligonucleotide
  Antisense Strand to SEQ ID NO: 367711
uaugagcacaauuuauuca

SEQ ID NO: 367713 - RNA, 19 nt, Artificial Sequence
  Description of Artificial Sequence: Synthetic oligonucleotide
  Sense Strand Starting at position 623 of SEQ ID NO: 318303
aggaaagacgucuaauguu

SEQ ID NO: 367714 - RNA, 19 nt, Artificial Sequence
  Description of Artificial Sequence: Synthetic oligonucleotide
  Antisense Strand to SEQ ID NO: 367713
aacauuagacgucuuuccu

SEQ ID NO: 367715 - RNA, 19 nt, Artificial Sequence
  Description of Artificial Sequence: Synthetic oligonucleotide
  Sense Strand Starting at position 623 of SEQ ID NO: 318336
aagcaaauugcagagaagu

SEQ ID NO: 367716 - RNA, 19 nt, Artificial Sequence
  Description of Artificial Sequence: Synthetic oligonucleotide
  Antisense Strand to SEQ ID NO: 367715
acuucucugcaauuugcuu

SEQ ID NO: 367717 - RNA, 19 nt, Artificial Sequence
  Description of Artificial Sequence: Synthetic oligonucleotide
  Sense Strand Starting at position 623 of SEQ ID NO: 318344
ugcagagaagugcauauau

SEQ ID NO: 367718 - RNA, 19 nt, Artificial Sequence
  Description of Artificial Sequence: Synthetic oligonucleotide
  Antisense Strand to SEQ ID NO: 367717
auauaugcacuucucugca

SEQ ID NO: 367719 - RNA, 19 nt, Artificial Sequence
  Description of Artificial Sequence: Synthetic oligonucleotide
  Sense Strand Starting at position 623 of SEQ ID NO: 318440
auauuuguaugagaaugga

SEQ ID NO: 367720 - RNA, 19 nt, Artificial Sequence
  Description of Artificial Sequence: Synthetic oligonucleotide
  Antisense Strand to SEQ ID NO: 367719
uccauucucauacaaauau

SEQ ID NO: 367721 - RNA, 19 nt, Artificial Sequence
  Description of Artificial Sequence: Synthetic oligonucleotide
  Sense Strand Starting at position 623 of SEQ ID NO: 318557
gcuuguguaccagauggaa

SEQ ID NO: 367722 - RNA, 19 nt, Artificial Sequence
  Description of Artificial Sequence: Synthetic oligonucleotide
  Antisense Strand to SEQ ID NO: 367721
uuccaucugguacacaagc

SEQ ID NO: 367723 - RNA, 19 nt, Artificial Sequence
  Description of Artificial Sequence: Synthetic oligonucleotide
  Sense Strand Starting at position 623 of SEQ ID NO: 318781
guaaauacccgauaaaugu

SEQ ID NO: 367724 - RNA, 19 nt, Artificial Sequence
  Description of Artificial Sequence: Synthetic oligonucleotide
  Antisense Strand to SEQ ID NO: 367723
acauuuaucggguauuuac

SEQ ID NO: 367725 - RNA, 19 nt, Artificial Sequence
  Description of Artificial Sequence: Synthetic oligonucleotide
  Sense Strand Starting at position 623 of SEQ ID NO: 318811
auugucuuucuauauguga

SEQ ID NO: 367726 - RNA, 19 nt, Artificial Sequence
  Description of Artificial Sequence: Synthetic oligonucleotide
  Antisense Strand to SEQ ID NO: 367725
ucacauauagaaagacaau

SEQ ID NO: 367727 - RNA, 19 nt, Artificial Sequence
  Description of Artificial Sequence: Synthetic oligonucleotide
  Sense Strand Starting at position 623 of SEQ ID NO: 319053
aaguuuaacgucgucguua

SEQ ID NO: 367728 - RNA, 19 nt, Artificial Sequence
  Description of Artificial Sequence: Synthetic oligonucleotide
  Antisense Strand to SEQ ID NO: 367727
uaacgacgacguuaaacuu

SEQ ID NO: 367729 - RNA, 19 nt, Artificial Sequence
  Description of Artificial Sequence: Synthetic oligonucleotide
  Sense Strand Starting at position 623 of SEQ ID NO: 319084
uaccaaaugguguaacgau

SEQ ID NO: 367730 - RNA, 19 nt, Artificial Sequence
  Description of Artificial Sequence: Synthetic oligonucleotide
  Antisense Strand to SEQ ID NO: 367729
aucguuacaccauuuggua

SEQ ID NO: 367731 - RNA, 19 nt, Artificial Sequence
  Description of Artificial Sequence: Synthetic oligonucleotide
  Sense Strand Starting at position 623 of SEQ ID NO: 319093
guguaacgauuuccgaaug

SEQ ID NO: 367732 - RNA, 19 nt, Artificial Sequence
  Description of Artificial Sequence: Synthetic oligonucleotide
  Antisense Strand to SEQ ID NO: 367731
cauucggaaaucguuacac

SEQ ID NO: 367733 - RNA, 19 nt, Artificial Sequence
  Description of Artificial Sequence: Synthetic oligonucleotide
  Sense Strand Starting at position 624 of SEQ ID NO: 315431
uggagcgaucucuacuuau

SEQ ID NO: 367734 - RNA, 19 nt, Artificial Sequence
  Description of Artificial Sequence: Synthetic oligonucleotide
  Antisense Strand to SEQ ID NO: 367733
auaaguagagaucgcucca

SEQ ID NO: 367735 - RNA, 19 nt, Artificial Sequence
  Description of Artificial Sequence: Synthetic oligonucleotide
  Sense Strand Starting at position 624 of SEQ ID NO: 316008
gcucuacuacuggaaauca

SEQ ID NO: 367736 - RNA, 19 nt, Artificial Sequence
  Description of Artificial Sequence: Synthetic oligonucleotide
  Antisense Strand to SEQ ID NO: 367735
ugauuuccaguaguagagc

SEQ ID NO: 367737 - RNA, 19 nt, Artificial Sequence
  Description of Artificial Sequence: Synthetic oligonucleotide
  Sense Strand Starting at position 624 of SEQ ID NO: 316137
agcugugacacagagaguu

SEQ ID NO: 367738 - RNA, 19 nt, Artificial Sequence
  Description of Artificial Sequence: Synthetic oligonucleotide
  Antisense Strand to SEQ ID NO: 367737
aacucucugugucacagcu

SEQ ID NO: 367739 - RNA, 19 nt, Artificial Sequence
  Description of Artificial Sequence: Synthetic oligonucleotide
  Sense Strand Starting at position 624 of SEQ ID NO: 316189
aacugaggucaauguuagu

SEQ ID NO: 367740 - RNA, 19 nt, Artificial Sequence
  Description of Artificial Sequence: Synthetic oligonucleotide
  Antisense Strand to SEQ ID NO: 367739
acuaacauugaccucaguu

SEQ ID NO: 367741 - RNA, 19 nt, Artificial Sequence
  Description of Artificial Sequence: Synthetic oligonucleotide
  Sense Strand Starting at position 624 of SEQ ID NO: 316194
aggucaauguuaguuugaa

SEQ ID NO: 367742 - RNA, 19 nt, Artificial Sequence
  Description of Artificial Sequence: Synthetic oligonucleotide
  Antisense Strand to SEQ ID NO: 367741
uucaaacuaacauugaccu

SEQ ID NO: 367743 - RNA, 19 nt, Artificial Sequence
  Description of Artificial Sequence: Synthetic oligonucleotide
  Sense Strand Starting at position 624 of SEQ ID NO: 316264
cggaaucgucuggacacau

SEQ ID NO: 367744 - RNA, 19 nt, Artificial Sequence
  Description of Artificial Sequence: Synthetic oligonucleotide
  Antisense Strand to SEQ ID NO: 367743
auguguccagacgauuccg

SEQ ID NO: 367745 - RNA, 19 nt, Artificial Sequence
  Description of Artificial Sequence: Synthetic oligonucleotide
  Sense Strand Starting at position 624 of SEQ ID NO: 316361
ggauuacgcuuacuaggaa

SEQ ID NO: 367746 - RNA, 19 nt, Artificial Sequence
  Description of Artificial Sequence: Synthetic oligonucleotide
  Antisense Strand to SEQ ID NO: 367745
uuccuaguaagcguaaucc

SEQ ID NO: 367747 - RNA, 19 nt, Artificial Sequence
  Description of Artificial Sequence: Synthetic oligonucleotide
  Sense Strand Starting at position 624 of SEQ ID NO: 316505
gacuuuccgucacugagaa

SEQ ID NO: 367748 - RNA, 19 nt, Artificial Sequence
  Description of Artificial Sequence: Synthetic oligonucleotide
  Antisense Strand to SEQ ID NO: 367747
uucucagugacggaaaguc

SEQ ID NO: 367749 - RNA, 19 nt, Artificial Sequence
  Description of Artificial Sequence: Synthetic oligonucleotide
  Sense Strand Starting at position 624 of SEQ ID NO: 316506
acuuuccgucacugagaau

SEQ ID NO: 367750 - RNA, 19 nt, Artificial Sequence
  Description of Artificial Sequence: Synthetic oligonucleotide
  Antisense Strand to SEQ ID NO: 367749
auucucagugacggaaagu

SEQ ID NO: 367751 - RNA, 19 nt, Artificial Sequence
  Description of Artificial Sequence: Synthetic oligonucleotide
  Sense Strand Starting at position 624 of SEQ ID NO: 316515
cacugagaauaguugugua

SEQ ID NO: 367752 - RNA, 19 nt, Artificial Sequence
  Description of Artificial Sequence: Synthetic oligonucleotide
  Antisense Strand to SEQ ID NO: 367751
uacacaacuauucucagug

SEQ ID NO: 367753 - RNA, 19 nt, Artificial Sequence
  Description of Artificial Sequence: Synthetic oligonucleotide
  Sense Strand Starting at position 624 of SEQ ID NO: 316519
gagaauaguuguguauuga

SEQ ID NO: 367754 - RNA, 19 nt, Artificial Sequence
  Description of Artificial Sequence: Synthetic oligonucleotide
  Antisense Strand to SEQ ID NO: 367753
ucaauacacaacuauucuc

SEQ ID NO: 367755 - RNA, 19 nt, Artificial Sequence
  Description of Artificial Sequence: Synthetic oligonucleotide
  Sense Strand Starting at position 624 of SEQ ID NO: 316520
agaauaguuguguauugag

SEQ ID NO: 367756 - RNA, 19 nt, Artificial Sequence
  Description of Artificial Sequence: Synthetic oligonucleotide
  Antisense Strand to SEQ ID NO: 367755
cucaauacacaacuauucu

SEQ ID NO: 367757 - RNA, 19 nt, Artificial Sequence
  Description of Artificial Sequence: Synthetic oligonucleotide
  Sense Strand Starting at position 624 of SEQ ID NO: 316603
cguuaccuacucgaaacaa

SEQ ID NO: 367758 - RNA, 19 nt, Artificial Sequence
  Description of Artificial Sequence: Synthetic oligonucleotide
  Antisense Strand to SEQ ID NO: 367757
uuguuucgaguagguaacg

SEQ ID NO: 367759 - RNA, 19 nt, Artificial Sequence
  Description of Artificial Sequence: Synthetic oligonucleotide
  Sense Strand Starting at position 624 of SEQ ID NO: 316721
agccuuuaccaguacgaaa

SEQ ID NO: 367760 - RNA, 19 nt, Artificial Sequence
  Description of Artificial Sequence: Synthetic oligonucleotide
  Antisense Strand to SEQ ID NO: 367759
uuucguacugguaaaggcu

SEQ ID NO: 367761 - RNA, 19 nt, Artificial Sequence
  Description of Artificial Sequence: Synthetic oligonucleotide
  Sense Strand Starting at position 624 of SEQ ID NO: 316756
gaaggacuguccuuucuuu

SEQ ID NO: 367762 - RNA, 19 nt, Artificial Sequence
  Description of Artificial Sequence: Synthetic oligonucleotide
  Antisense Strand to SEQ ID NO: 367761
aaagaaaggacaguccuuc

SEQ ID NO: 367763 - RNA, 19 nt, Artificial Sequence
  Description of Artificial Sequence: Synthetic oligonucleotide
  Sense Strand Starting at position 624 of SEQ ID NO: 317604
ucacauuuauucgagaaga

SEQ ID NO: 367764 - RNA, 19 nt, Artificial Sequence
  Description of Artificial Sequence: Synthetic oligonucleotide
  Antisense Strand to SEQ ID NO: 367763
ucuucucgaauaaauguga

SEQ ID NO: 367765 - RNA, 19 nt, Artificial Sequence
  Description of Artificial Sequence: Synthetic oligonucleotide
  Sense Strand Starting at position 624 of SEQ ID NO: 317706
uucucucuggcaugauuga

SEQ ID NO: 367766 - RNA, 19 nt, Artificial Sequence
  Description of Artificial Sequence: Synthetic oligonucleotide
  Antisense Strand to SEQ ID NO: 367765
ucaaucaugccagagagaa

SEQ ID NO: 367767 - RNA, 19 nt, Artificial Sequence
  Description of Artificial Sequence: Synthetic oligonucleotide
  Sense Strand Starting at position 624 of SEQ ID NO: 317707
ucucucuggcaugauugau

SEQ ID NO: 367768 - RNA, 19 nt, Artificial Sequence
  Description of Artificial Sequence: Synthetic oligonucleotide
  Antisense Strand to SEQ ID NO: 367767
aucaaucaugccagagaga

SEQ ID NO: 367769 - RNA, 19 nt, Artificial Sequence
  Description of Artificial Sequence: Synthetic oligonucleotide
  Sense Strand Starting at position 624 of SEQ ID NO: 317729
uuuauaauucucgaugucu

SEQ ID NO: 367770 - RNA, 19 nt, Artificial Sequence
  Description of Artificial Sequence: Synthetic oligonucleotide
  Antisense Strand to SEQ ID NO: 367769
agacaucgagaauuauaaa

SEQ ID NO: 367771 - RNA, 19 nt, Artificial Sequence
  Description of Artificial Sequence: Synthetic oligonucleotide
  Sense Strand Starting at position 624 of SEQ ID NO: 317735
auucucgaugucuacgaaa

SEQ ID NO: 367772 - RNA, 19 nt, Artificial Sequence
  Description of Artificial Sequence: Synthetic oligonucleotide
  Antisense Strand to SEQ ID NO: 367771
uuucguagacaucgagaau

SEQ ID NO: 367773 - RNA, 19 nt, Artificial Sequence
  Description of Artificial Sequence: Synthetic oligonucleotide
  Sense Strand Starting at position 624 of SEQ ID NO: 317776
uuaaaucggagauagcuua

SEQ ID NO: 367774 - RNA, 19 nt, Artificial Sequence
  Description of Artificial Sequence: Synthetic oligonucleotide
  Antisense Strand to SEQ ID NO: 367773
uaagcuaucuccgauuuaa

SEQ ID NO: 367775 - RNA, 19 nt, Artificial Sequence
  Description of Artificial Sequence: Synthetic oligonucleotide
  Sense Strand Starting at position 624 of SEQ ID NO: 317851
gcuuaauauuuccuaacgu

SEQ ID NO: 367776 - RNA, 19 nt, Artificial Sequence
  Description of Artificial Sequence: Synthetic oligonucleotide
  Antisense Strand to SEQ ID NO: 367775
acguuaggaaauauuaagc

SEQ ID NO: 367777 - RNA, 19 nt, Artificial Sequence
  Description of Artificial Sequence: Synthetic oligonucleotide
  Sense Strand Starting at position 624 of SEQ ID NO: 317859
uuuccuaacgucgaauaaa

SEQ ID NO: 367778 - RNA, 19 nt, Artificial Sequence
  Description of Artificial Sequence: Synthetic oligonucleotide
  Antisense Strand to SEQ ID NO: 367777
uuuauucgacguuaggaaa

SEQ ID NO: 367779 - RNA, 19 nt, Artificial Sequence
  Description of Artificial Sequence: Synthetic oligonucleotide
  Sense Strand Starting at position 624 of SEQ ID NO: 318218
cugucuaguaagggaaaca

SEQ ID NO: 367780 - RNA, 19 nt, Artificial Sequence
  Description of Artificial Sequence: Synthetic oligonucleotide
  Antisense Strand to SEQ ID NO: 367779
uguuucccuuacuagacag

SEQ ID NO: 367781 - RNA, 19 nt, Artificial Sequence
  Description of Artificial Sequence: Synthetic oligonucleotide
  Sense Strand Starting at position 624 of SEQ ID NO: 318414
ggagauaccugguucauag

SEQ ID NO: 367782 - RNA, 19 nt, Artificial Sequence
  Description of Artificial Sequence: Synthetic oligonucleotide
  Antisense Strand to SEQ ID NO: 367781
cuaugaaccagguaucucc

SEQ ID NO: 367783 - RNA, 19 nt, Artificial Sequence
  Description of Artificial Sequence: Synthetic oligonucleotide
  Sense Strand Starting at position 624 of SEQ ID NO: 318460
gagaaucuacaaugugcua

SEQ ID NO: 367784 - RNA, 19 nt, Artificial Sequence
  Description of Artificial Sequence: Synthetic oligonucleotide
  Antisense Strand to SEQ ID NO: 367783
uagcacauuguagauucuc

SEQ ID NO: 367785 - RNA, 19 nt, Artificial Sequence
  Description of Artificial Sequence: Synthetic oligonucleotide
  Sense Strand Starting at position 624 of SEQ ID NO: 318609
agacguuauuacucuagaa

SEQ ID NO: 367786 - RNA, 19 nt, Artificial Sequence
  Description of Artificial Sequence: Synthetic oligonucleotide
  Antisense Strand to SEQ ID NO: 367785
uucuagaguaauaacgucu

SEQ ID NO: 367787 - RNA, 19 nt, Artificial Sequence
  Description of Artificial Sequence: Synthetic oligonucleotide
  Sense Strand Starting at position 624 of SEQ ID NO: 318611
acguuauuacucuagaaua

SEQ ID NO: 367788 - RNA, 19 nt, Artificial Sequence
  Description of Artificial Sequence: Synthetic oligonucleotide
  Antisense Strand to SEQ ID NO: 367787
uauucuagaguaauaacgu

SEQ ID NO: 367789 - RNA, 19 nt, Artificial Sequence
  Description of Artificial Sequence: Synthetic oligonucleotide
  Sense Strand Starting at position 624 of SEQ ID NO: 318624
agaauaauguugguaauug

SEQ ID NO: 367790 - RNA, 19 nt, Artificial Sequence
  Description of Artificial Sequence: Synthetic oligonucleotide
  Antisense Strand to SEQ ID NO: 367789
caauuaccaacauuauucu

SEQ ID NO: 367791 - RNA, 19 nt, Artificial Sequence
  Description of Artificial Sequence: Synthetic oligonucleotide
  Sense Strand Starting at position 624 of SEQ ID NO: 318652
augggaaggugaccucauu

SEQ ID NO: 367792 - RNA, 19 nt, Artificial Sequence
  Description of Artificial Sequence: Synthetic oligonucleotide
  Antisense Strand to SEQ ID NO: 367791
aaugaggucaccuucccau

SEQ ID NO: 367793 - RNA, 19 nt, Artificial Sequence
  Description of Artificial Sequence: Synthetic oligonucleotide
  Sense Strand Starting at position 624 of SEQ ID NO: 318716
agccauauucuaugggaaa

SEQ ID NO: 367794 - RNA, 19 nt, Artificial Sequence
  Description of Artificial Sequence: Synthetic oligonucleotide
  Antisense Strand to SEQ ID NO: 367793
uuucccauagaauauggcu

SEQ ID NO: 367795 - RNA, 19 nt, Artificial Sequence
  Description of Artificial Sequence: Synthetic oligonucleotide
  Sense Strand Starting at position 624 of SEQ ID NO: 318776
ugggauacuguaugccaga

SEQ ID NO: 367796 - RNA, 19 nt, Artificial Sequence
  Description of Artificial Sequence: Synthetic oligonucleotide
  Antisense Strand to SEQ ID NO: 367795
ucuggcauacaguauccca

SEQ ID NO: 367797 - RNA, 19 nt, Artificial Sequence
  Description of Artificial Sequence: Synthetic oligonucleotide
  Sense Strand Starting at position 624 of SEQ ID NO: 318777
gggauacuguaugccagaa

SEQ ID NO: 367798 - RNA, 19 nt, Artificial Sequence
  Description of Artificial Sequence: Synthetic oligonucleotide
  Antisense Strand to SEQ ID NO: 367797
uucuggcauacaguauccc

SEQ ID NO: 367799 - RNA, 19 nt, Artificial Sequence
  Description of Artificial Sequence: Synthetic oligonucleotide
  Sense Strand Starting at position 624 of SEQ ID NO: 318809
guggcuaguguagaaagaa

SEQ ID NO: 367800 - RNA, 19 nt, Artificial Sequence
  Description of Artificial Sequence: Synthetic oligonucleotide
  Antisense Strand to SEQ ID NO: 367799
uucuuucuacacuagccac

SEQ ID NO: 367801 - RNA, 19 nt, Artificial Sequence
  Description of Artificial Sequence: Synthetic oligonucleotide
  Sense Strand Starting at position 624 of SEQ ID NO: 318862
ggucuuggagaugguuaaa

SEQ ID NO: 367802 - RNA, 19 nt, Artificial Sequence
  Description of Artificial Sequence: Synthetic oligonucleotide
  Antisense Strand to SEQ ID NO: 367801
uuuaaccaucuccaagacc

SEQ ID NO: 367803 - RNA, 19 nt, Artificial Sequence
  Description of Artificial Sequence: Synthetic oligonucleotide
  Sense Strand Starting at position 624 of SEQ ID NO: 318906
ugucaucuggcauaauuaa

SEQ ID NO: 367804 - RNA, 19 nt, Artificial Sequence
  Description of Artificial Sequence: Synthetic oligonucleotide
  Antisense Strand to SEQ ID NO: 367803
uuaauuaugccagaugaca

SEQ ID NO: 367805 - RNA, 19 nt, Artificial Sequence
  Description of Artificial Sequence: Synthetic oligonucleotide
  Sense Strand Starting at position 624 of SEQ ID NO: 318913
uggcauaauuaaguucuca

SEQ ID NO: 367806 - RNA, 19 nt, Artificial Sequence
  Description of Artificial Sequence: Synthetic oligonucleotide
  Antisense Strand to SEQ ID NO: 367805
ugagaacuuaauuaugcca

SEQ ID NO: 367807 - RNA, 19 nt, Artificial Sequence
  Description of Artificial Sequence: Synthetic oligonucleotide
  Sense Strand Starting at position 624 of SEQ ID NO: 318964
gugaucagaguuugauagu

SEQ ID NO: 367808 - RNA, 19 nt, Artificial Sequence
  Description of Artificial Sequence: Synthetic oligonucleotide
  Antisense Strand to SEQ ID NO: 367807
acuaucaaacucugaucac

SEQ ID NO: 367809 - RNA, 19 nt, Artificial Sequence
  Description of Artificial Sequence: Synthetic oligonucleotide
  Sense Strand Starting at position 624 of SEQ ID NO: 319056
gugcuaucagugccaucuu

SEQ ID NO: 367810 - RNA, 19 nt, Artificial Sequence
  Description of Artificial Sequence: Synthetic oligonucleotide
  Antisense Strand to SEQ ID NO: 367809
aagauggcacugauagcac

SEQ ID NO: 367811 - RNA, 19 nt, Artificial Sequence
  Description of Artificial Sequence: Synthetic oligonucleotide
  Sense Strand Starting at position 624 of SEQ ID NO: 319178
uuuaguaagagggaucguu

SEQ ID NO: 367812 - RNA, 19 nt, Artificial Sequence
  Description of Artificial Sequence: Synthetic oligonucleotide
  Antisense Strand to SEQ ID NO: 367811
aacgaucccucuuacuaaa

SEQ ID NO: 367813 - RNA, 19 nt, Artificial Sequence
  Description of Artificial Sequence: Synthetic oligonucleotide
  Sense Strand Starting at position 625 of SEQ ID NO: 315739
cugcuuuaggauuaagcau

SEQ ID NO: 367814 - RNA, 19 nt, Artificial Sequence
  Description of Artificial Sequence: Synthetic oligonucleotide
  Antisense Strand to SEQ ID NO: 367813
augcuuaauccuaaagcag

SEQ ID NO: 367815 - RNA, 19 nt, Artificial Sequence
  Description of Artificial Sequence: Synthetic oligonucleotide
  Sense Strand Starting at position 625 of SEQ ID NO: 315758
ucauucuugcauggauaca

SEQ ID NO: 367816 - RNA, 19 nt, Artificial Sequence
  Description of Artificial Sequence: Synthetic oligonucleotide
  Antisense Strand to SEQ ID NO: 367815
uguauccaugcaagaauga

SEQ ID NO: 367817 - RNA, 19 nt, Artificial Sequence
  Description of Artificial Sequence: Synthetic oligonucleotide
  Sense Strand Starting at position 625 of SEQ ID NO: 315800
gugcaauuacaauguauuu

SEQ ID NO: 367818 - RNA, 19 nt, Artificial Sequence
  Description of Artificial Sequence: Synthetic oligonucleotide
  Antisense Strand to SEQ ID NO: 367817
aaauacauuguaauugcac

SEQ ID NO: 367819 - RNA, 19 nt, Artificial Sequence
  Description of Artificial Sequence: Synthetic oligonucleotide
  Sense Strand Starting at position 625 of SEQ ID NO: 316035
cauguaacucaccguaaga

SEQ ID NO: 367820 - RNA, 19 nt, Artificial Sequence
  Description of Artificial Sequence: Synthetic oligonucleotide
  Antisense Strand to SEQ ID NO: 367819
ucuuacggugaguuacaug

SEQ ID NO: 367821 - RNA, 19 nt, Artificial Sequence
  Description of Artificial Sequence: Synthetic oligonucleotide
  Sense Strand Starting at position 625 of SEQ ID NO: 316037
uguaacucaccguaagauu

SEQ ID NO: 367822 - RNA, 19 nt, Artificial Sequence
  Description of Artificial Sequence: Synthetic oligonucleotide
  Antisense Strand to SEQ ID NO: 367821
aaucuuacggugaguuaca

SEQ ID NO: 367823 - RNA, 19 nt, Artificial Sequence
  Description of Artificial Sequence: Synthetic oligonucleotide
  Sense Strand Starting at position 625 of SEQ ID NO: 316059
ucaagaaaucuguacguug

SEQ ID NO: 367824 - RNA, 19 nt, Artificial Sequence
  Description of Artificial Sequence: Synthetic oligonucleotide
  Antisense Strand to SEQ ID NO: 367823
caacguacagauuucuuga

SEQ ID NO: 367825 - RNA, 19 nt, Artificial Sequence
  Description of Artificial Sequence: Synthetic oligonucleotide
  Sense Strand Starting at position 625 of SEQ ID NO: 316074
guuguuuauagguaaggaa

SEQ ID NO: 367826 - RNA, 19 nt, Artificial Sequence
  Description of Artificial Sequence: Synthetic oligonucleotide
  Antisense Strand to SEQ ID NO: 367825
uuccuuaccuauaaacaac

SEQ ID NO: 367827 - RNA, 19 nt, Artificial Sequence
  Description of Artificial Sequence: Synthetic oligonucleotide
  Sense Strand Starting at position 625 of SEQ ID NO: 316152
cuguaucuacuugauggua

SEQ ID NO: 367828 - RNA, 19 nt, Artificial Sequence
  Description of Artificial Sequence: Synthetic oligonucleotide
  Antisense Strand to SEQ ID NO: 367827
uaccaucaaguagauacag

SEQ ID NO: 367829 - RNA, 19 nt, Artificial Sequence
  Description of Artificial Sequence: Synthetic oligonucleotide
  Sense Strand Starting at position 625 of SEQ ID NO: 316190
aguugaaauucugcacuuu

SEQ ID NO: 367830 - RNA, 19 nt, Artificial Sequence
  Description of Artificial Sequence: Synthetic oligonucleotide
  Antisense Strand to SEQ ID NO: 367829
aaagugcagaauuucaacu

SEQ ID NO: 367831 - RNA, 19 nt, Artificial Sequence
  Description of Artificial Sequence: Synthetic oligonucleotide
  Sense Strand Starting at position 625 of SEQ ID NO: 316191
guugaaauucugcacuuug

SEQ ID NO: 367832 - RNA, 19 nt, Artificial Sequence
  Description of Artificial Sequence: Synthetic oligonucleotide
  Antisense Strand to SEQ ID NO: 367831
caaagugcagaauuucaac

SEQ ID NO: 367833 - RNA, 19 nt, Artificial Sequence
  Description of Artificial Sequence: Synthetic oligonucleotide
  Sense Strand Starting at position 625 of SEQ ID NO: 316464
agccuaacacuucgacaga

SEQ ID NO: 367834 - RNA, 19 nt, Artificial Sequence
  Description of Artificial Sequence: Synthetic oligonucleotide
  Antisense Strand to SEQ ID NO: 367833
ucugucgaaguguuaggcu

SEQ ID NO: 367835 - RNA, 19 nt, Artificial Sequence
  Description of Artificial Sequence: Synthetic oligonucleotide
  Sense Strand Starting at position 625 of SEQ ID NO: 316504
gccacaugagucugacgaa

SEQ ID NO: 367836 - RNA, 19 nt, Artificial Sequence
  Description of Artificial Sequence: Synthetic oligonucleotide
  Antisense Strand to SEQ ID NO: 367835
uucgucagacucauguggc

SEQ ID NO: 367837 - RNA, 19 nt, Artificial Sequence
  Description of Artificial Sequence: Synthetic oligonucleotide
  Sense Strand Starting at position 625 of SEQ ID NO: 317360
cgugguagccaauaagaag

SEQ ID NO: 367838 - RNA, 19 nt, Artificial Sequence
  Description of Artificial Sequence: Synthetic oligonucleotide
  Antisense Strand to SEQ ID NO: 367837
cuucuuauuggcuaccacg

SEQ ID NO: 367839 - RNA, 19 nt, Artificial Sequence
  Description of Artificial Sequence: Synthetic oligonucleotide
  Sense Strand Starting at position 625 of SEQ ID NO: 317486
gcaaguuggguugaagaaa

SEQ ID NO: 367840 - RNA, 19 nt, Artificial Sequence
  Description of Artificial Sequence: Synthetic oligonucleotide
  Antisense Strand to SEQ ID NO: 367839
uuucuucaacccaacuugc

SEQ ID NO: 367841 - RNA, 19 nt, Artificial Sequence
  Description of Artificial Sequence: Synthetic oligonucleotide
  Sense Strand Starting at position 625 of SEQ ID NO: 317664
ucgucuuucgguaggaguu

SEQ ID NO: 367842 - RNA, 19 nt, Artificial Sequence
  Description of Artificial Sequence: Synthetic oligonucleotide
  Antisense Strand to SEQ ID NO: 367841
aacuccuaccgaaagacga

SEQ ID NO: 367843 - RNA, 19 nt, Artificial Sequence
  Description of Artificial Sequence: Synthetic oligonucleotide
  Sense Strand Starting at position 625 of SEQ ID NO: 317674
guaggaguuuggaagugga

SEQ ID NO: 367844 - RNA, 19 nt, Artificial Sequence
  Description of Artificial Sequence: Synthetic oligonucleotide
  Antisense Strand to SEQ ID NO: 367843
uccacuuccaaacuccuac

SEQ ID NO: 367845 - RNA, 19 nt, Artificial Sequence
  Description of Artificial Sequence: Synthetic oligonucleotide
  Sense Strand Starting at position 625 of SEQ ID NO: 317719
agucuuucggaauaguuag

SEQ ID NO: 367846 - RNA, 19 nt, Artificial Sequence
  Description of Artificial Sequence: Synthetic oligonucleotide
  Antisense Strand to SEQ ID NO: 367845
cuaacuauuccgaaagacu

SEQ ID NO: 367847 - RNA, 19 nt, Artificial Sequence
  Description of Artificial Sequence: Synthetic oligonucleotide
  Sense Strand Starting at position 625 of SEQ ID NO: 317770
agauacgucuuaguaaaug

SEQ ID NO: 367848 - RNA, 19 nt, Artificial Sequence
  Description of Artificial Sequence: Synthetic oligonucleotide
  Antisense Strand to SEQ ID NO: 367847
cauuuacuaagacguaucu

SEQ ID NO: 367849 - RNA, 19 nt, Artificial Sequence
  Description of Artificial Sequence: Synthetic oligonucleotide
  Sense Strand Starting at position 625 of SEQ ID NO: 317811
uuccgacuucucgauaacu

SEQ ID NO: 367850 - RNA, 19 nt, Artificial Sequence
  Description of Artificial Sequence: Synthetic oligonucleotide
  Antisense Strand to SEQ ID NO: 367849
aguuaucgagaagucggaa

SEQ ID NO: 367851 - RNA, 19 nt, Artificial Sequence
  Description of Artificial Sequence: Synthetic oligonucleotide
  Sense Strand Starting at position 625 of SEQ ID NO: 317827
acuggaagauuguugcuga

SEQ ID NO: 367852 - RNA, 19 nt, Artificial Sequence
  Description of Artificial Sequence: Synthetic oligonucleotide
  Antisense Strand to SEQ ID NO: 367851
ucagcaacaaucuuccagu

SEQ ID NO: 367853 - RNA, 19 nt, Artificial Sequence
  Description of Artificial Sequence: Synthetic oligonucleotide
  Sense Strand Starting at position 625 of SEQ ID NO: 317830
ggaagauuguugcugacuu

SEQ ID NO: 367854 - RNA, 19 nt, Artificial Sequence
  Description of Artificial Sequence: Synthetic oligonucleotide
  Antisense Strand to SEQ ID NO: 367853
aagucagcaacaaucuucc

SEQ ID NO: 367855 - RNA, 19 nt, Artificial Sequence
  Description of Artificial Sequence: Synthetic oligonucleotide
  Sense Strand Starting at position 625 of SEQ ID NO: 317832
aagauuguugcugacuuga

SEQ ID NO: 367856 - RNA, 19 nt, Artificial Sequence
  Description of Artificial Sequence: Synthetic oligonucleotide
  Antisense Strand to SEQ ID NO: 367855
ucaagucagcaacaaucuu

SEQ ID NO: 367857 - RNA, 19 nt, Artificial Sequence
  Description of Artificial Sequence: Synthetic oligonucleotide
  Sense Strand Starting at position 625 of SEQ ID NO: 317906
acagauuucugugaauugg

SEQ ID NO: 367858 - RNA, 19 nt, Artificial Sequence
  Description of Artificial Sequence: Synthetic oligonucleotide
  Antisense Strand to SEQ ID NO: 367857
ccaauucacagaaaucugu

SEQ ID NO: 367859 - RNA, 19 nt, Artificial Sequence
  Description of Artificial Sequence: Synthetic oligonucleotide
  Sense Strand Starting at position 625 of SEQ ID NO: 317916
gugaauuggagauggccau

SEQ ID NO: 367860 - RNA, 19 nt, Artificial Sequence
  Description of Artificial Sequence: Synthetic oligonucleotide
  Antisense Strand to SEQ ID NO: 367859
auggccaucuccaauucac

SEQ ID NO: 367861 - RNA, 19 nt, Artificial Sequence
  Description of Artificial Sequence: Synthetic oligonucleotide
  Sense Strand Starting at position 625 of SEQ ID NO: 318001
agaucucaagccuggguua

SEQ ID NO: 367862 - RNA, 19 nt, Artificial Sequence
  Description of Artificial Sequence: Synthetic oligonucleotide
  Antisense Strand to SEQ ID NO: 367861
uaacccaggcuugagaucu

SEQ ID NO: 367863 - RNA, 19 nt, Artificial Sequence
  Description of Artificial Sequence: Synthetic oligonucleotide
  Sense Strand Starting at position 625 of SEQ ID NO: 318008
aagccuggguuacuaaaua

SEQ ID NO: 367864 - RNA, 19 nt, Artificial Sequence
  Description of Artificial Sequence: Synthetic oligonucleotide
  Antisense Strand to SEQ ID NO: 367863
uauuuaguaacccaggcuu

SEQ ID NO: 367865 - RNA, 19 nt, Artificial Sequence
  Description of Artificial Sequence: Synthetic oligonucleotide
  Sense Strand Starting at position 625 of SEQ ID NO: 318219
acaaccagauuuggaaaua

SEQ ID NO: 367866 - RNA, 19 nt, Artificial Sequence
  Description of Artificial Sequence: Synthetic oligonucleotide
  Antisense Strand to SEQ ID NO: 367865
uauuuccaaaucugguugu

SEQ ID NO: 367867 - RNA, 19 nt, Artificial Sequence
  Description of Artificial Sequence: Synthetic oligonucleotide
  Sense Strand Starting at position 625 of SEQ ID NO: 318297
augggaauuacuugagccu

SEQ ID NO: 367868 - RNA, 19 nt, Artificial Sequence
  Description of Artificial Sequence: Synthetic oligonucleotide
  Antisense Strand to SEQ ID NO: 367867
aggcucaaguaauucccau

SEQ ID NO: 367869 - RNA, 19 nt, Artificial Sequence
  Description of Artificial Sequence: Synthetic oligonucleotide
  Sense Strand Starting at position 625 of SEQ ID NO: 318300
ggaauuacuugagccugua

SEQ ID NO: 367870 - RNA, 19 nt, Artificial Sequence
  Description of Artificial Sequence: Synthetic oligonucleotide
  Antisense Strand to SEQ ID NO: 367869
uacaggcucaaguaauucc

SEQ ID NO: 367871 - RNA, 19 nt, Artificial Sequence
  Description of Artificial Sequence: Synthetic oligonucleotide
  Sense Strand Starting at position 625 of SEQ ID NO: 318303
auuacuugagccuguauac

SEQ ID NO: 367872 - RNA, 19 nt, Artificial Sequence
  Description of Artificial Sequence: Synthetic oligonucleotide
  Antisense Strand to SEQ ID NO: 367871
guauacaggcucaaguaau

SEQ ID NO: 367873 - RNA, 19 nt, Artificial Sequence
  Description of Artificial Sequence: Synthetic oligonucleotide
  Sense Strand Starting at position 625 of SEQ ID NO: 318331
agacaucgcauugagcaaa

SEQ ID NO: 367874 - RNA, 19 nt, Artificial Sequence
  Description of Artificial Sequence: Synthetic oligonucleotide
  Antisense Strand to SEQ ID NO: 367873
uuugcucaaugcgaugucu

SEQ ID NO: 367875 - RNA, 19 nt, Artificial Sequence
  Description of Artificial Sequence: Synthetic oligonucleotide
  Sense Strand Starting at position 625 of SEQ ID NO: 318381
guuuguacagcagauugaa

SEQ ID NO: 367876 - RNA, 19 nt, Artificial Sequence
  Description of Artificial Sequence: Synthetic oligonucleotide
  Antisense Strand to SEQ ID NO: 367875
uucaaucugcuguacaaac

SEQ ID NO: 367877 - RNA, 19 nt, Artificial Sequence
  Description of Artificial Sequence: Synthetic oligonucleotide
  Sense Strand Starting at position 625 of SEQ ID NO: 318413
acggaaggccuguaauguu

SEQ ID NO: 367878 - RNA, 19 nt, Artificial Sequence
  Description of Artificial Sequence: Synthetic oligonucleotide
  Antisense Strand to SEQ ID NO: 367877
aacauuacaggccuuccgu

SEQ ID NO: 367879 - RNA, 19 nt, Artificial Sequence
  Description of Artificial Sequence: Synthetic oligonucleotide
  Sense Strand Starting at position 625 of SEQ ID NO: 318499
aguucuaauuagccuuuga

SEQ ID NO: 367880 - RNA, 19 nt, Artificial Sequence
  Description of Artificial Sequence: Synthetic oligonucleotide
  Antisense Strand to SEQ ID NO: 367879
ucaaaggcuaauuagaacu

SEQ ID NO: 367881 - RNA, 19 nt, Artificial Sequence
  Description of Artificial Sequence: Synthetic oligonucleotide
  Sense Strand Starting at position 625 of SEQ ID NO: 318503
cuaauuagccuuugaacag

SEQ ID NO: 367882 - RNA, 19 nt, Artificial Sequence
  Description of Artificial Sequence: Synthetic oligonucleotide
  Antisense Strand to SEQ ID NO: 367881
cuguucaaaggcuaauuag

SEQ ID NO: 367883 - RNA, 19 nt, Artificial Sequence
  Description of Artificial Sequence: Synthetic oligonucleotide
  Sense Strand Starting at position 625 of SEQ ID NO: 318564
acgagucagagccauaaua

SEQ ID NO: 367884 - RNA, 19 nt, Artificial Sequence
  Description of Artificial Sequence: Synthetic oligonucleotide
  Antisense Strand to SEQ ID NO: 367883
uauuauggcucugacucgu

SEQ ID NO: 367885 - RNA, 19 nt, Artificial Sequence
  Description of Artificial Sequence: Synthetic oligonucleotide
  Sense Strand Starting at position 625 of SEQ ID NO: 318698
gggugugcaugauuuccua

SEQ ID NO: 367886 - RNA, 19 nt, Artificial Sequence
  Description of Artificial Sequence: Synthetic oligonucleotide
  Antisense Strand to SEQ ID NO: 367885
uaggaaaucaugcacaccc

SEQ ID NO: 367887 - RNA, 19 nt, Artificial Sequence
  Description of Artificial Sequence: Synthetic oligonucleotide
  Sense Strand Starting at position 625 of SEQ ID NO: 318832
gcacgauauagacguagaa

SEQ ID NO: 367888 - RNA, 19 nt, Artificial Sequence
  Description of Artificial Sequence: Synthetic oligonucleotide
  Antisense Strand to SEQ ID NO: 367887
uucuacgucuauaucgugc

SEQ ID NO: 367889 - RNA, 19 nt, Artificial Sequence
  Description of Artificial Sequence: Synthetic oligonucleotide
  Sense Strand Starting at position 625 of SEQ ID NO: 318912
accuaaguguagccuaaau

SEQ ID NO: 367890 - RNA, 19 nt, Artificial Sequence
  Description of Artificial Sequence: Synthetic oligonucleotide
  Antisense Strand to SEQ ID NO: 367889
auuuaggcuacacuuaggu

SEQ ID NO: 367891 - RNA, 19 nt, Artificial Sequence
  Description of Artificial Sequence: Synthetic oligonucleotide
  Sense Strand Starting at position 625 of SEQ ID NO: 319170
ccacaugcccggcaauuau

SEQ ID NO: 367892 - RNA, 19 nt, Artificial Sequence
  Description of Artificial Sequence: Synthetic oligonucleotide
  Antisense Strand to SEQ ID NO: 367891
auaauugccgggcaugugg

SEQ ID NO: 367893 - RNA, 19 nt, Artificial Sequence
  Description of Artificial Sequence: Synthetic oligonucleotide
  Sense Strand Starting at position 626 of SEQ ID NO: 315765
agcacuuuaacugggaagu

SEQ ID NO: 367894 - RNA, 19 nt, Artificial Sequence
  Description of Artificial Sequence: Synthetic oligonucleotide
  Antisense Strand to SEQ ID NO: 367893
acuucccaguuaaagugcu

SEQ ID NO: 367895 - RNA, 19 nt, Artificial Sequence
  Description of Artificial Sequence: Synthetic oligonucleotide
  Sense Strand Starting at position 626 of SEQ ID NO: 315766
gcacuuuaacugggaaguc

SEQ ID NO: 367896 - RNA, 19 nt, Artificial Sequence
  Description of Artificial Sequence: Synthetic oligonucleotide
  Antisense Strand to SEQ ID NO: 367895
gacuucccaguuaaagugc

SEQ ID NO: 367897 - RNA, 19 nt, Artificial Sequence
  Description of Artificial Sequence: Synthetic oligonucleotide
  Sense Strand Starting at position 626 of SEQ ID NO: 315874
uuagaaagguucucaaauu

SEQ ID NO: 367898 - RNA, 19 nt, Artificial Sequence
  Description of Artificial Sequence: Synthetic oligonucleotide
  Antisense Strand to SEQ ID NO: 367897
aauuugagaaccuuucuaa

SEQ ID NO: 367899 - RNA, 19 nt, Artificial Sequence
  Description of Artificial Sequence: Synthetic oligonucleotide
  Sense Strand Starting at position 626 of SEQ ID NO: 315994
uuuagugacugauccauaa

SEQ ID NO: 367900 - RNA, 19 nt, Artificial Sequence
  Description of Artificial Sequence: Synthetic oligonucleotide
  Antisense Strand to SEQ ID NO: 367899
uuauggaucagucacuaaa

SEQ ID NO: 367901 - RNA, 19 nt, Artificial Sequence
  Description of Artificial Sequence: Synthetic oligonucleotide
  Sense Strand Starting at position 626 of SEQ ID NO: 316025
gaacaaacaguaugauugu

SEQ ID NO: 367902 - RNA, 19 nt, Artificial Sequence
  Description of Artificial Sequence: Synthetic oligonucleotide
  Antisense Strand to SEQ ID NO: 367901
acaaucauacuguuuguuc

SEQ ID NO: 367903 - RNA, 19 nt, Artificial Sequence
  Description of Artificial Sequence: Synthetic oligonucleotide
  Sense Strand Starting at position 626 of SEQ ID NO: 316088
gugagcucauaguccuuga

SEQ ID NO: 367904 - RNA, 19 nt, Artificial Sequence
  Description of Artificial Sequence: Synthetic oligonucleotide
  Antisense Strand to SEQ ID NO: 367903
ucaaggacuaugagcucac

SEQ ID NO: 367905 - RNA, 19 nt, Artificial Sequence
  Description of Artificial Sequence: Synthetic oligonucleotide
  Sense Strand Starting at position 626 of SEQ ID NO: 316091
agcucauaguccuugaaua

SEQ ID NO: 367906 - RNA, 19 nt, Artificial Sequence
  Description of Artificial Sequence: Synthetic oligonucleotide
  Antisense Strand to SEQ ID NO: 367905
uauucaaggacuaugagcu

SEQ ID NO: 367907 - RNA, 19 nt, Artificial Sequence
  Description of Artificial Sequence: Synthetic oligonucleotide
  Sense Strand Starting at position 626 of SEQ ID NO: 316164
agguguuccgauuaggugu

SEQ ID NO: 367908 - RNA, 19 nt, Artificial Sequence
  Description of Artificial Sequence: Synthetic oligonucleotide
  Antisense Strand to SEQ ID NO: 367907
acaccuaaucggaacaccu

SEQ ID NO: 367909 - RNA, 19 nt, Artificial Sequence
  Description of Artificial Sequence: Synthetic oligonucleotide
  Sense Strand Starting at position 626 of SEQ ID NO: 316170
uccgauuaggugugaucga

SEQ ID NO: 367910 - RNA, 19 nt, Artificial Sequence
  Description of Artificial Sequence: Synthetic oligonucleotide
  Antisense Strand to SEQ ID NO: 367909
ucgaucacaccuaaucgga

SEQ ID NO: 367911 - RNA, 19 nt, Artificial Sequence
  Description of Artificial Sequence: Synthetic oligonucleotide
  Sense Strand Starting at position 626 of SEQ ID NO: 316175
uuaggugugaucgaccuaa

SEQ ID NO: 367912 - RNA, 19 nt, Artificial Sequence
  Description of Artificial Sequence: Synthetic oligonucleotide
  Antisense Strand to SEQ ID NO: 367911
uuaggucgaucacaccuaa

SEQ ID NO: 367913 - RNA, 19 nt, Artificial Sequence
  Description of Artificial Sequence: Synthetic oligonucleotide
  Sense Strand Starting at position 626 of SEQ ID NO: 316391
cuccuuaagagauguggca

SEQ ID NO: 367914 - RNA, 19 nt, Artificial Sequence
  Description of Artificial Sequence: Synthetic oligonucleotide
  Antisense Strand to SEQ ID NO: 367913
ugccacaucucuuaaggag

SEQ ID NO: 367915 - RNA, 19 nt, Artificial Sequence
  Description of Artificial Sequence: Synthetic oligonucleotide
  Sense Strand Starting at position 626 of SEQ ID NO: 316393
ccuuaagagauguggcaau

SEQ ID NO: 367916 - RNA, 19 nt, Artificial Sequence
  Description of Artificial Sequence: Synthetic oligonucleotide
  Antisense Strand to SEQ ID NO: 367915
auugccacaucucuuaagg

SEQ ID NO: 367917 - RNA, 19 nt, Artificial Sequence
  Description of Artificial Sequence: Synthetic oligonucleotide
  Sense Strand Starting at position 626 of SEQ ID NO: 316443
aaaugacuacguuagugaa

SEQ ID NO: 367918 - RNA, 19 nt, Artificial Sequence
  Description of Artificial Sequence: Synthetic oligonucleotide
  Antisense Strand to SEQ ID NO: 367917
uucacuaacguagucauuu

SEQ ID NO: 367919 - RNA, 19 nt, Artificial Sequence
  Description of Artificial Sequence: Synthetic oligonucleotide
  Sense Strand Starting at position 626 of SEQ ID NO: 316462
aacuguaggguuuaucaua

SEQ ID NO: 367920 - RNA, 19 nt, Artificial Sequence
  Description of Artificial Sequence: Synthetic oligonucleotide
  Antisense Strand to SEQ ID NO: 367919
uaugauaaacccuacaguu

SEQ ID NO: 367921 - RNA, 19 nt, Artificial Sequence
  Description of Artificial Sequence: Synthetic oligonucleotide
  Sense Strand Starting at position 626 of SEQ ID NO: 316527
acgggucuccuuuaaguga

SEQ ID NO: 367922 - RNA, 19 nt, Artificial Sequence
  Description of Artificial Sequence: Synthetic oligonucleotide
  Antisense Strand to SEQ ID NO: 367921
ucacuuaaaggagacccgu

SEQ ID NO: 367923 - RNA, 19 nt, Artificial Sequence
  Description of Artificial Sequence: Synthetic oligonucleotide
  Sense Strand Starting at position 626 of SEQ ID NO: 316549
uagagacugugagaacaua

SEQ ID NO: 367924 - RNA, 19 nt, Artificial Sequence
  Description of Artificial Sequence: Synthetic oligonucleotide
  Antisense Strand to SEQ ID NO: 367923
uauguucucacagucucua

SEQ ID NO: 367925 - RNA, 19 nt, Artificial Sequence
  Description of Artificial Sequence: Synthetic oligonucleotide
  Sense Strand Starting at position 626 of SEQ ID NO: 316657
auaggaaggucagaaaugu

SEQ ID NO: 367926 - RNA, 19 nt, Artificial Sequence
  Description of Artificial Sequence: Synthetic oligonucleotide
  Antisense Strand to SEQ ID NO: 367925
acauuucugaccuuccuau

SEQ ID NO: 367927 - RNA, 19 nt, Artificial Sequence
  Description of Artificial Sequence: Synthetic oligonucleotide
  Sense Strand Starting at position 626 of SEQ ID NO: 316756
ggaagaggccugcgaagaa

SEQ ID NO: 367928 - RNA, 19 nt, Artificial Sequence
  Description of Artificial Sequence: Synthetic oligonucleotide
  Antisense Strand to SEQ ID NO: 367927
uucuucgcaggccucuucc

SEQ ID NO: 367929 - RNA, 19 nt, Artificial Sequence
  Description of Artificial Sequence: Synthetic oligonucleotide
  Sense Strand Starting at position 626 of SEQ ID NO: 316904
auugucuuugagcgacaga

SEQ ID NO: 367930 - RNA, 19 nt, Artificial Sequence
  Description of Artificial Sequence: Synthetic oligonucleotide
  Antisense Strand to SEQ ID NO: 367929
ucugucgcucaaagacaau

SEQ ID NO: 367931 - RNA, 19 nt, Artificial Sequence
  Description of Artificial Sequence: Synthetic oligonucleotide
  Sense Strand Starting at position 626 of SEQ ID NO: 317293
cucuguaucgucgcgaauc

SEQ ID NO: 367932 - RNA, 19 nt, Artificial Sequence
  Description of Artificial Sequence: Synthetic oligonucleotide
  Antisense Strand to SEQ ID NO: 367931
gauucgcgacgauacagag

SEQ ID NO: 367933 - RNA, 19 nt, Artificial Sequence
  Description of Artificial Sequence: Synthetic oligonucleotide
  Sense Strand Starting at position 626 of SEQ ID NO: 317358
agcggaaccagguaucgua

SEQ ID NO: 367934 - RNA, 19 nt, Artificial Sequence
  Description of Artificial Sequence: Synthetic oligonucleotide
  Antisense Strand to SEQ ID NO: 367933
uacgauaccugguuccgcu

SEQ ID NO: 367935 - RNA, 19 nt, Artificial Sequence
  Description of Artificial Sequence: Synthetic oligonucleotide
  Sense Strand Starting at position 626 of SEQ ID NO: 317476
guguuucuucggaagcgca

SEQ ID NO: 367936 - RNA, 19 nt, Artificial Sequence
  Description of Artificial Sequence: Synthetic oligonucleotide
  Antisense Strand to SEQ ID NO: 367935
ugcgcuuccgaagaaacac

SEQ ID NO: 367937 - RNA, 19 nt, Artificial Sequence
  Description of Artificial Sequence: Synthetic oligonucleotide
  Sense Strand Starting at position 626 of SEQ ID NO: 317572
acccaauuccgguggaacu

SEQ ID NO: 367938 - RNA, 19 nt, Artificial Sequence
  Description of Artificial Sequence: Synthetic oligonucleotide
  Antisense Strand to SEQ ID NO: 367937
aguuccaccggaauugggu

SEQ ID NO: 367939 - RNA, 19 nt, Artificial Sequence
  Description of Artificial Sequence: Synthetic oligonucleotide
  Sense Strand Starting at position 626 of SEQ ID NO: 317637
ccaggaagcucuguaguuu

SEQ ID NO: 367940 - RNA, 19 nt, Artificial Sequence
  Description of Artificial Sequence: Synthetic oligonucleotide
  Antisense Strand to SEQ ID NO: 367939
aaacuacagagcuuccugg

SEQ ID NO: 367941 - RNA, 19 nt, Artificial Sequence
  Description of Artificial Sequence: Synthetic oligonucleotide
  Sense Strand Starting at position 626 of SEQ ID NO: 317662
cgcugcuguguuccugaaa

SEQ ID NO: 367942 - RNA, 19 nt, Artificial Sequence
  Description of Artificial Sequence: Synthetic oligonucleotide
  Antisense Strand to SEQ ID NO: 367941
uuucaggaacacagcagcg

SEQ ID NO: 367943 - RNA, 19 nt, Artificial Sequence
  Description of Artificial Sequence: Synthetic oligonucleotide
  Sense Strand Starting at position 626 of SEQ ID NO: 317682
ugaacugacguguaaacca

SEQ ID NO: 367944 - RNA, 19 nt, Artificial Sequence
  Description of Artificial Sequence: Synthetic oligonucleotide
  Antisense Strand to SEQ ID NO: 367943
ugguuuacacgucaguuca

SEQ ID NO: 367945 - RNA, 19 nt, Artificial Sequence
  Description of Artificial Sequence: Synthetic oligonucleotide
  Sense Strand Starting at position 626 of SEQ ID NO: 317698
ccaccugguccuugguaga

SEQ ID NO: 367946 - RNA, 19 nt, Artificial Sequence
  Description of Artificial Sequence: Synthetic oligonucleotide
  Antisense Strand to SEQ ID NO: 367945
ucuaccaaggaccaggugg

SEQ ID NO: 367947 - RNA, 19 nt, Artificial Sequence
  Description of Artificial Sequence: Synthetic oligonucleotide
  Sense Strand Starting at position 626 of SEQ ID NO: 317705
guccuugguagaugguaaa

SEQ ID NO: 367948 - RNA, 19 nt, Artificial Sequence
  Description of Artificial Sequence: Synthetic oligonucleotide
  Antisense Strand to SEQ ID NO: 367947
uuuaccaucuaccaaggac

SEQ ID NO: 367949 - RNA, 19 nt, Artificial Sequence
  Description of Artificial Sequence: Synthetic oligonucleotide
  Sense Strand Starting at position 626 of SEQ ID NO: 317772
cugugaguucgcaggguga

SEQ ID NO: 367950 - RNA, 19 nt, Artificial Sequence
  Description of Artificial Sequence: Synthetic oligonucleotide
  Antisense Strand to SEQ ID NO: 367949
ucacccugcgaacucacag

SEQ ID NO: 367951 - RNA, 19 nt, Artificial Sequence
  Description of Artificial Sequence: Synthetic oligonucleotide
  Sense Strand Starting at position 626 of SEQ ID NO: 317811
ccguauuccagauaaggac

SEQ ID NO: 367952 - RNA, 19 nt, Artificial Sequence
  Description of Artificial Sequence: Synthetic oligonucleotide
  Antisense Strand to SEQ ID NO: 367951
guccuuaucuggaauacgg

SEQ ID NO: 367953 - RNA, 19 nt, Artificial Sequence
  Description of Artificial Sequence: Synthetic oligonucleotide
  Sense Strand Starting at position 626 of SEQ ID NO: 317887
aacgucuucggaggaaugu

SEQ ID NO: 367954 - RNA, 19 nt, Artificial Sequence
  Description of Artificial Sequence: Synthetic oligonucleotide
  Antisense Strand to SEQ ID NO: 367953
acauuccuccgaagacguu

SEQ ID NO: 367955 - RNA, 19 nt, Artificial Sequence
  Description of Artificial Sequence: Synthetic oligonucleotide
  Sense Strand Starting at position 626 of SEQ ID NO: 317903
uguccugaaucuguuucua

SEQ ID NO: 367956 - RNA, 19 nt, Artificial Sequence
  Description of Artificial Sequence: Synthetic oligonucleotide
  Antisense Strand to SEQ ID NO: 367955
uagaaacagauucaggaca

SEQ ID NO: 367957 - RNA, 19 nt, Artificial Sequence
  Description of Artificial Sequence: Synthetic oligonucleotide
  Sense Strand Starting at position 626 of SEQ ID NO: 318568
guaagcagaagccguaaau

SEQ ID NO: 367958 - RNA, 19 nt, Artificial Sequence
  Description of Artificial Sequence: Synthetic oligonucleotide
  Antisense Strand to SEQ ID NO: 367957
auuuacggcuucugcuuac

SEQ ID NO: 367959 - RNA, 19 nt, Artificial Sequence
  Description of Artificial Sequence: Synthetic oligonucleotide
  Sense Strand Starting at position 626 of SEQ ID NO: 318580
cguaaauauccugggucua

SEQ ID NO: 367960 - RNA, 19 nt, Artificial Sequence
  Description of Artificial Sequence: Synthetic oligonucleotide
  Antisense Strand to SEQ ID NO: 367959
uagacccaggauauuuacg

SEQ ID NO: 367961 - RNA, 19 nt, Artificial Sequence
  Description of Artificial Sequence: Synthetic oligonucleotide
  Sense Strand Starting at position 626 of SEQ ID NO: 318581
guaaauauccugggucuaa

SEQ ID NO: 367962 - RNA, 19 nt, Artificial Sequence
  Description of Artificial Sequence: Synthetic oligonucleotide
  Antisense Strand to SEQ ID NO: 367961
uuagacccaggauauuuac

SEQ ID NO: 367963 - RNA, 19 nt, Artificial Sequence
  Description of Artificial Sequence: Synthetic oligonucleotide
  Sense Strand Starting at position 626 of SEQ ID NO: 318632
accugacuauuguugucua

SEQ ID NO: 367964 - RNA, 19 nt, Artificial Sequence
  Description of Artificial Sequence: Synthetic oligonucleotide
  Antisense Strand to SEQ ID NO: 367963
uagacaacaauagucaggu

SEQ ID NO: 367965 - RNA, 19 nt, Artificial Sequence
  Description of Artificial Sequence: Synthetic oligonucleotide
  Sense Strand Starting at position 626 of SEQ ID NO: 318803
ucuuaaauccugugaaguc

SEQ ID NO: 367966 - RNA, 19 nt, Artificial Sequence
  Description of Artificial Sequence: Synthetic oligonucleotide
  Antisense Strand to SEQ ID NO: 367965
gacuucacaggauuuaaga

SEQ ID NO: 367967 - RNA, 19 nt, Artificial Sequence
  Description of Artificial Sequence: Synthetic oligonucleotide
  Sense Strand Starting at position 626 of SEQ ID NO: 318810
uccugugaagucugagaca

SEQ ID NO: 367968 - RNA, 19 nt, Artificial Sequence
  Description of Artificial Sequence: Synthetic oligonucleotide
  Antisense Strand to SEQ ID NO: 367967
ugucucagacuucacagga

SEQ ID NO: 367969 - RNA, 19 nt, Artificial Sequence
  Description of Artificial Sequence: Synthetic oligonucleotide
  Sense Strand Starting at position 626 of SEQ ID NO: 318817
aagucugagacaugugaga

SEQ ID NO: 367970 - RNA, 19 nt, Artificial Sequence
  Description of Artificial Sequence: Synthetic oligonucleotide
  Antisense Strand to SEQ ID NO: 367969
ucucacaugucucagacuu

SEQ ID NO: 367971 - RNA, 19 nt, Artificial Sequence
  Description of Artificial Sequence: Synthetic oligonucleotide
  Sense Strand Starting at position 626 of SEQ ID NO: 318819
gucugagacaugugagaaa

SEQ ID NO: 367972 - RNA, 19 nt, Artificial Sequence
  Description of Artificial Sequence: Synthetic oligonucleotide
  Antisense Strand to SEQ ID NO: 367971
uuucucacaugucucagac

SEQ ID NO: 367973 - RNA, 19 nt, Artificial Sequence
  Description of Artificial Sequence: Synthetic oligonucleotide
  Sense Strand Starting at position 627 of SEQ ID NO: 315241
gcaauaaagucuuccuuug

SEQ ID NO: 367974 - RNA, 19 nt, Artificial Sequence
  Description of Artificial Sequence: Synthetic oligonucleotide
  Antisense Strand to SEQ ID NO: 367973
caaaggaagacuuuauugc

SEQ ID NO: 367975 - RNA, 19 nt, Artificial Sequence
  Description of Artificial Sequence: Synthetic oligonucleotide
  Sense Strand Starting at position 627 of SEQ ID NO: 315339
cugaaauacugcuuguuac

SEQ ID NO: 367976 - RNA, 19 nt, Artificial Sequence
  Description of Artificial Sequence: Synthetic oligonucleotide
  Antisense Strand to SEQ ID NO: 367975
guaacaagcaguauuucag

SEQ ID NO: 367977 - RNA, 19 nt, Artificial Sequence
  Description of Artificial Sequence: Synthetic oligonucleotide
  Sense Strand Starting at position 627 of SEQ ID NO: 315370
gcuucauuugaguggguuu

SEQ ID NO: 367978 - RNA, 19 nt, Artificial Sequence
  Description of Artificial Sequence: Synthetic oligonucleotide
  Antisense Strand to SEQ ID NO: 367977
aaacccacucaaaugaagc

SEQ ID NO: 367979 - RNA, 19 nt, Artificial Sequence
  Description of Artificial Sequence: Synthetic oligonucleotide
  Sense Strand Starting at position 627 of SEQ ID NO: 315519
gaugguaauggcuggaagu

SEQ ID NO: 367980 - RNA, 19 nt, Artificial Sequence
  Description of Artificial Sequence: Synthetic oligonucleotide
  Antisense Strand to SEQ ID NO: 367979
acuuccagccauuaccauc

SEQ ID NO: 367981 - RNA, 19 nt, Artificial Sequence
  Description of Artificial Sequence: Synthetic oligonucleotide
  Sense Strand Starting at position 627 of SEQ ID NO: 315521
ugguaauggcuggaaguca

SEQ ID NO: 367982 - RNA, 19 nt, Artificial Sequence
  Description of Artificial Sequence: Synthetic oligonucleotide
  Antisense Strand to SEQ ID NO: 367981
ugacuuccagccauuacca

SEQ ID NO: 367983 - RNA, 19 nt, Artificial Sequence
  Description of Artificial Sequence: Synthetic oligonucleotide
  Sense Strand Starting at position 627 of SEQ ID NO: 316082
ggaaccacccuuugauauu

SEQ ID NO: 367984 - RNA, 19 nt, Artificial Sequence
  Description of Artificial Sequence: Synthetic oligonucleotide
  Antisense Strand to SEQ ID NO: 367983
aauaucaaagggugguucc

SEQ ID NO: 367985 - RNA, 19 nt, Artificial Sequence
  Description of Artificial Sequence: Synthetic oligonucleotide
  Sense Strand Starting at position 627 of SEQ ID NO: 316091
cuuugauauuucugguaua

SEQ ID NO: 367986 - RNA, 19 nt, Artificial Sequence
  Description of Artificial Sequence: Synthetic oligonucleotide
  Antisense Strand to SEQ ID NO: 367985
uauaccagaaauaucaaag

SEQ ID NO: 367987 - RNA, 19 nt, Artificial Sequence
  Description of Artificial Sequence: Synthetic oligonucleotide
  Sense Strand Starting at position 627 of SEQ ID NO: 316094
ugauauuucugguauaaca

SEQ ID NO: 367988 - RNA, 19 nt, Artificial Sequence
  Description of Artificial Sequence: Synthetic oligonucleotide
  Antisense Strand to SEQ ID NO: 367987
uguuauaccagaaauauca

SEQ ID NO: 367989 - RNA, 19 nt, Artificial Sequence
  Description of Artificial Sequence: Synthetic oligonucleotide
  Sense Strand Starting at position 627 of SEQ ID NO: 316136
aggagacuucuguguuaag

SEQ ID NO: 367990 - RNA, 19 nt, Artificial Sequence
  Description of Artificial Sequence: Synthetic oligonucleotide
  Antisense Strand to SEQ ID NO: 367989
cuuaacacagaagucuccu

SEQ ID NO: 367991 - RNA, 19 nt, Artificial Sequence
  Description of Artificial Sequence: Synthetic oligonucleotide
  Sense Strand Starting at position 627 of SEQ ID NO: 316137
ggagacuucuguguuaagg

SEQ ID NO: 367992 - RNA, 19 nt, Artificial Sequence
  Description of Artificial Sequence: Synthetic oligonucleotide
  Antisense Strand to SEQ ID NO: 367991
ccuuaacacagaagucucc

SEQ ID NO: 367993 - RNA, 19 nt, Artificial Sequence
  Description of Artificial Sequence: Synthetic oligonucleotide
  Sense Strand Starting at position 627 of SEQ ID NO: 316157
gcucgagguuuccucauuu

SEQ ID NO: 367994 - RNA, 19 nt, Artificial Sequence
  Description of Artificial Sequence: Synthetic oligonucleotide
  Antisense Strand to SEQ ID NO: 367993
aaaugaggaaaccucgagc

SEQ ID NO: 367995 - RNA, 19 nt, Artificial Sequence
  Description of Artificial Sequence: Synthetic oligonucleotide
  Sense Strand Starting at position 627 of SEQ ID NO: 316161
gagguuuccucauuugucu

SEQ ID NO: 367996 - RNA, 19 nt, Artificial Sequence
  Description of Artificial Sequence: Synthetic oligonucleotide
  Antisense Strand to SEQ ID NO: 367995
agacaaaugaggaaaccuc

SEQ ID NO: 367997 - RNA, 19 nt, Artificial Sequence
  Description of Artificial Sequence: Synthetic oligonucleotide
  Sense Strand Starting at position 627 of SEQ ID NO: 316174
uugucuuuagugggaauga

SEQ ID NO: 367998 - RNA, 19 nt, Artificial Sequence
  Description of Artificial Sequence: Synthetic oligonucleotide
  Antisense Strand to SEQ ID NO: 367997
ucauucccacuaaagacaa

SEQ ID NO: 367999 - RNA, 19 nt, Artificial Sequence
  Description of Artificial Sequence: Synthetic oligonucleotide
  Sense Strand Starting at position 627 of SEQ ID NO: 316515
gagguuuccucaccuguaa

SEQ ID NO: 368000 - RNA, 19 nt, Artificial Sequence
  Description of Artificial Sequence: Synthetic oligonucleotide
  Antisense Strand to SEQ ID NO: 367999
uuacaggugaggaaaccuc

SEQ ID NO: 368001 - RNA, 19 nt, Artificial Sequence
  Description of Artificial Sequence: Synthetic oligonucleotide
  Sense Strand Starting at position 627 of SEQ ID NO: 316544
uccgacuggugaucccaaa

SEQ ID NO: 368002 - RNA, 19 nt, Artificial Sequence
  Description of Artificial Sequence: Synthetic oligonucleotide
  Antisense Strand to SEQ ID NO: 368001
uuugggaucaccagucgga

SEQ ID NO: 368003 - RNA, 19 nt, Artificial Sequence
  Description of Artificial Sequence: Synthetic oligonucleotide
  Sense Strand Starting at position 627 of SEQ ID NO: 316582
cugacuaguacggaagagu

SEQ ID NO: 368004 - RNA, 19 nt, Artificial Sequence
  Description of Artificial Sequence: Synthetic oligonucleotide
  Antisense Strand to SEQ ID NO: 368003
acucuuccguacuagucag

SEQ ID NO: 368005 - RNA, 19 nt, Artificial Sequence
  Description of Artificial Sequence: Synthetic oligonucleotide
  Sense Strand Starting at position 627 of SEQ ID NO: 316676
gaacauuagcuccgaagac

SEQ ID NO: 368006 - RNA, 19 nt, Artificial Sequence
  Description of Artificial Sequence: Synthetic oligonucleotide
  Antisense Strand to SEQ ID NO: 368005
gucuucggagcuaauguuc

SEQ ID NO: 368007 - RNA, 19 nt, Artificial Sequence
  Description of Artificial Sequence: Synthetic oligonucleotide
  Sense Strand Starting at position 627 of SEQ ID NO: 316750
ggguuucagagaugagcga

SEQ ID NO: 368008 - RNA, 19 nt, Artificial Sequence
  Description of Artificial Sequence: Synthetic oligonucleotide
  Antisense Strand to SEQ ID NO: 368007
ucgcucaucucugaaaccc

SEQ ID NO: 368009 - RNA, 19 nt, Artificial Sequence
  Description of Artificial Sequence: Synthetic oligonucleotide
  Sense Strand Starting at position 627 of SEQ ID NO: 317027
aaugaaguccgagguccua

SEQ ID NO: 368010 - RNA, 19 nt, Artificial Sequence
  Description of Artificial Sequence: Synthetic oligonucleotide
  Antisense Strand to SEQ ID NO: 368009
uaggaccucggacuucauu

SEQ ID NO: 368011 - RNA, 19 nt, Artificial Sequence
  Description of Artificial Sequence: Synthetic oligonucleotide
  Sense Strand Starting at position 627 of SEQ ID NO: 317038
agguccuacgucgaggaua

SEQ ID NO: 368012 - RNA, 19 nt, Artificial Sequence
  Description of Artificial Sequence: Synthetic oligonucleotide
  Antisense Strand to SEQ ID NO: 368011
uauccucgacguaggaccu

SEQ ID NO: 368013 - RNA, 19 nt, Artificial Sequence
  Description of Artificial Sequence: Synthetic oligonucleotide
  Sense Strand Starting at position 627 of SEQ ID NO: 317134
cgaagucaaggucgagaua

SEQ ID NO: 368014 - RNA, 19 nt, Artificial Sequence
  Description of Artificial Sequence: Synthetic oligonucleotide
  Antisense Strand to SEQ ID NO: 368013
uaucucgaccuugacuucg

SEQ ID NO: 368015 - RNA, 19 nt, Artificial Sequence
  Description of Artificial Sequence: Synthetic oligonucleotide
  Sense Strand Starting at position 627 of SEQ ID NO: 317467
cgacgugacccucaaggua

SEQ ID NO: 368016 - RNA, 19 nt, Artificial Sequence
  Description of Artificial Sequence: Synthetic oligonucleotide
  Antisense Strand to SEQ ID NO: 368015
uaccuugagggucacgucg

SEQ ID NO: 368017 - RNA, 19 nt, Artificial Sequence
  Description of Artificial Sequence: Synthetic oligonucleotide
  Sense Strand Starting at position 627 of SEQ ID NO: 317619
gagagaggugccgagcaaa

SEQ ID NO: 368018 - RNA, 19 nt, Artificial Sequence
  Description of Artificial Sequence: Synthetic oligonucleotide
  Antisense Strand to SEQ ID NO: 368017
uuugcucggcaccucucuc

SEQ ID NO: 368019 - RNA, 19 nt, Artificial Sequence
  Description of Artificial Sequence: Synthetic oligonucleotide
  Sense Strand Starting at position 627 of SEQ ID NO: 317848
cuucucuugucacuacaga

SEQ ID NO: 368020 - RNA, 19 nt, Artificial Sequence
  Description of Artificial Sequence: Synthetic oligonucleotide
  Antisense Strand to SEQ ID NO: 368019
ucuguagugacaagagaag

SEQ ID NO: 368021 - RNA, 19 nt, Artificial Sequence
  Description of Artificial Sequence: Synthetic oligonucleotide
  Sense Strand Starting at position 627 of SEQ ID NO: 317849
uucucuugucacuacagau

SEQ ID NO: 368022 - RNA, 19 nt, Artificial Sequence
  Description of Artificial Sequence: Synthetic oligonucleotide
  Antisense Strand to SEQ ID NO: 368021
aucuguagugacaagagaa

SEQ ID NO: 368023 - RNA, 19 nt, Artificial Sequence
  Description of Artificial Sequence: Synthetic oligonucleotide
  Sense Strand Starting at position 627 of SEQ ID NO: 317894
ugugcuguucuagaagaga

SEQ ID NO: 368024 - RNA, 19 nt, Artificial Sequence
  Description of Artificial Sequence: Synthetic oligonucleotide
  Antisense Strand to SEQ ID NO: 368023
ucucuucuagaacagcaca

SEQ ID NO: 368025 - RNA, 19 nt, Artificial Sequence
  Description of Artificial Sequence: Synthetic oligonucleotide
  Sense Strand Starting at position 627 of SEQ ID NO: 317908
agagaaggcuucuccuuag

SEQ ID NO: 368026 - RNA, 19 nt, Artificial Sequence
  Description of Artificial Sequence: Synthetic oligonucleotide
  Antisense Strand to SEQ ID NO: 368025
cuaaggagaagccuucucu

SEQ ID NO: 368027 - RNA, 19 nt, Artificial Sequence
  Description of Artificial Sequence: Synthetic oligonucleotide
  Sense Strand Starting at position 627 of SEQ ID NO: 317911
gaaggcuucuccuuaggaa

SEQ ID NO: 368028 - RNA, 19 nt, Artificial Sequence
  Description of Artificial Sequence: Synthetic oligonucleotide
  Antisense Strand to SEQ ID NO: 368027
uuccuaaggagaagccuuc

SEQ ID NO: 368029 - RNA, 19 nt, Artificial Sequence
  Description of Artificial Sequence: Synthetic oligonucleotide
  Sense Strand Starting at position 627 of SEQ ID NO: 317925
aggaaucauugcccuuaau

SEQ ID NO: 368030 - RNA, 19 nt, Artificial Sequence
  Description of Artificial Sequence: Synthetic oligonucleotide
  Antisense Strand to SEQ ID NO: 368029
auuaagggcaaugauuccu

SEQ ID NO: 368031 - RNA, 19 nt, Artificial Sequence
  Description of Artificial Sequence: Synthetic oligonucleotide
  Sense Strand Starting at position 627 of SEQ ID NO: 317934
ugcccuuaauuguugaauu

SEQ ID NO: 368032 - RNA, 19 nt, Artificial Sequence
  Description of Artificial Sequence: Synthetic oligonucleotide
  Antisense Strand to SEQ ID NO: 368031
aauucaacaauuaagggca

SEQ ID NO: 368033 - RNA, 19 nt, Artificial Sequence
  Description of Artificial Sequence: Synthetic oligonucleotide
  Sense Strand Starting at position 627 of SEQ ID NO: 318099
gacugauauuaagagggaa

SEQ ID NO: 368034 - RNA, 19 nt, Artificial Sequence
  Description of Artificial Sequence: Synthetic oligonucleotide
  Antisense Strand to SEQ ID NO: 368033
uucccucuuaauaucaguc

SEQ ID NO: 368035 - RNA, 19 nt, Artificial Sequence
  Description of Artificial Sequence: Synthetic oligonucleotide
  Sense Strand Starting at position 627 of SEQ ID NO: 318287
gggcuuuagcuggaaagcu

SEQ ID NO: 368036 - RNA, 19 nt, Artificial Sequence
  Description of Artificial Sequence: Synthetic oligonucleotide
  Antisense Strand to SEQ ID NO: 368035
agcuuuccagcuaaagccc

SEQ ID NO: 368037 - RNA, 19 nt, Artificial Sequence
  Description of Artificial Sequence: Synthetic oligonucleotide
  Sense Strand Starting at position 627 of SEQ ID NO: 318299
gaaagcucucagcaucugu

SEQ ID NO: 368038 - RNA, 19 nt, Artificial Sequence
  Description of Artificial Sequence: Synthetic oligonucleotide
  Antisense Strand to SEQ ID NO: 368037
acagaugcugagagcuuuc

SEQ ID NO: 368039 - RNA, 19 nt, Artificial Sequence
  Description of Artificial Sequence: Synthetic oligonucleotide
  Sense Strand Starting at position 627 of SEQ ID NO: 319078
gagucagaccucuggagau

SEQ ID NO: 368040 - RNA, 19 nt, Artificial Sequence
  Description of Artificial Sequence: Synthetic oligonucleotide
  Antisense Strand to SEQ ID NO: 368039
aucuccagaggucugacuc

SEQ ID NO: 368041 - RNA, 19 nt, Artificial Sequence
  Description of Artificial Sequence: Synthetic oligonucleotide
  Sense Strand Starting at position 627 of SEQ ID NO: 319100
agaguaggaugguugagua

SEQ ID NO: 368042 - RNA, 19 nt, Artificial Sequence
  Description of Artificial Sequence: Synthetic oligonucleotide
  Antisense Strand to SEQ ID NO: 368041
uacucaaccauccuacucu

SEQ ID NO: 368043 - RNA, 19 nt, Artificial Sequence
  Description of Artificial Sequence: Synthetic oligonucleotide
  Sense Strand Starting at position 627 of SEQ ID NO: 319110
gguugaguauggcuuugaa

SEQ ID NO: 368044 - RNA, 19 nt, Artificial Sequence
  Description of Artificial Sequence: Synthetic oligonucleotide
  Antisense Strand to SEQ ID NO: 368043
uucaaagccauacucaacc

SEQ ID NO: 368045 - RNA, 19 nt, Artificial Sequence
  Description of Artificial Sequence: Synthetic oligonucleotide
  Sense Strand Starting at position 627 of SEQ ID NO: 319113
ugaguauggcuuugaaagc

SEQ ID NO: 368046 - RNA, 19 nt, Artificial Sequence
  Description of Artificial Sequence: Synthetic oligonucleotide
  Antisense Strand to SEQ ID NO: 368045
gcuuucaaagccauacuca

SEQ ID NO: 368047 - RNA, 19 nt, Artificial Sequence
  Description of Artificial Sequence: Synthetic oligonucleotide
  Sense Strand Starting at position 627 of SEQ ID NO: 319130
gcagaaggauuuggauuaa

SEQ ID NO: 368048 - RNA, 19 nt, Artificial Sequence
  Description of Artificial Sequence: Synthetic oligonucleotide
  Antisense Strand to SEQ ID NO: 368047
uuaauccaaauccuucugc

SEQ ID NO: 368049 - RNA, 19 nt, Artificial Sequence
  Description of Artificial Sequence: Synthetic oligonucleotide
  Sense Strand Starting at position 627 of SEQ ID NO: 319155
aguuguaaccuugagcaag

SEQ ID NO: 368050 - RNA, 19 nt, Artificial Sequence
  Description of Artificial Sequence: Synthetic oligonucleotide
  Antisense Strand to SEQ ID NO: 368049
cuugcucaagguuacaacu

SEQ ID NO: 368051 - RNA, 19 nt, Artificial Sequence
  Description of Artificial Sequence: Synthetic oligonucleotide
  Sense Strand Starting at position 627 of SEQ ID NO: 319173
guuacuuaaucucuguaag

SEQ ID NO: 368052 - RNA, 19 nt, Artificial Sequence
  Description of Artificial Sequence: Synthetic oligonucleotide
  Antisense Strand to SEQ ID NO: 368051
cuuacagagauuaaguaac

SEQ ID NO: 368053 - RNA, 19 nt, Artificial Sequence
  Description of Artificial Sequence: Synthetic oligonucleotide
  Sense Strand Starting at position 628 of SEQ ID NO: 315322
gggagcugcuuaguuagau

SEQ ID NO: 368054 - RNA, 19 nt, Artificial Sequence
  Description of Artificial Sequence: Synthetic oligonucleotide
  Antisense Strand to SEQ ID NO: 368053
aucuaacuaagcagcuccc

SEQ ID NO: 368055 - RNA, 19 nt, Artificial Sequence
  Description of Artificial Sequence: Synthetic oligonucleotide
  Sense Strand Starting at position 628 of SEQ ID NO: 315323
ggagcugcuuaguuagauc

SEQ ID NO: 368056 - RNA, 19 nt, Artificial Sequence
  Description of Artificial Sequence: Synthetic oligonucleotide
  Antisense Strand to SEQ ID NO: 368055
gaucuaacuaagcagcucc

SEQ ID NO: 368057 - RNA, 19 nt, Artificial Sequence
  Description of Artificial Sequence: Synthetic oligonucleotide
  Sense Strand Starting at position 628 of SEQ ID NO: 315336
uagaucucggcucagaagu

SEQ ID NO: 368058 - RNA, 19 nt, Artificial Sequence
  Description of Artificial Sequence: Synthetic oligonucleotide
  Antisense Strand to SEQ ID NO: 368057
acuucugagccgagaucua

SEQ ID NO: 368059 - RNA, 19 nt, Artificial Sequence
  Description of Artificial Sequence: Synthetic oligonucleotide
  Sense Strand Starting at position 628 of SEQ ID NO: 315416
caguuucuacugugggaaa

SEQ ID NO: 368060 - RNA, 19 nt, Artificial Sequence
  Description of Artificial Sequence: Synthetic oligonucleotide
  Antisense Strand to SEQ ID NO: 368059
uuucccacaguagaaacug

SEQ ID NO: 368061 - RNA, 19 nt, Artificial Sequence
  Description of Artificial Sequence: Synthetic oligonucleotide
  Sense Strand Starting at position 628 of SEQ ID NO: 315418
guuucuacugugggaaacu

SEQ ID NO: 368062 - RNA, 19 nt, Artificial Sequence
  Description of Artificial Sequence: Synthetic oligonucleotide
  Antisense Strand to SEQ ID NO: 368061
aguuucccacaguagaaac

SEQ ID NO: 368063 - RNA, 19 nt, Artificial Sequence
  Description of Artificial Sequence: Synthetic oligonucleotide
  Sense Strand Starting at position 628 of SEQ ID NO: 315430
ggaaacuaucuuggugaug

SEQ ID NO: 368064 - RNA, 19 nt, Artificial Sequence
  Description of Artificial Sequence: Synthetic oligonucleotide
  Antisense Strand to SEQ ID NO: 368063
caucaccaagauaguuucc

SEQ ID NO: 368065 - RNA, 19 nt, Artificial Sequence
  Description of Artificial Sequence: Synthetic oligonucleotide
  Sense Strand Starting at position 628 of SEQ ID NO: 315431
gaaacuaucuuggugaugu

SEQ ID NO: 368066 - RNA, 19 nt, Artificial Sequence
  Description of Artificial Sequence: Synthetic oligonucleotide
  Antisense Strand to SEQ ID NO: 368065
acaucaccaagauaguuuc

SEQ ID NO: 368067 - RNA, 19 nt, Artificial Sequence
  Description of Artificial Sequence: Synthetic oligonucleotide
  Sense Strand Starting at position 628 of SEQ ID NO: 315517
ggccauaucccagagucua

SEQ ID NO: 368068 - RNA, 19 nt, Artificial Sequence
  Description of Artificial Sequence: Synthetic oligonucleotide
  Antisense Strand to SEQ ID NO: 368067
uagacucugggauauggcc

SEQ ID NO: 368069 - RNA, 19 nt, Artificial Sequence
  Description of Artificial Sequence: Synthetic oligonucleotide
  Sense Strand Starting at position 628 of SEQ ID NO: 315637
ggucuuaaugcugggcuga

SEQ ID NO: 368070 - RNA, 19 nt, Artificial Sequence
  Description of Artificial Sequence: Synthetic oligonucleotide
  Antisense Strand to SEQ ID NO: 368069
ucagcccagcauuaagacc

SEQ ID NO: 368071 - RNA, 19 nt, Artificial Sequence
  Description of Artificial Sequence: Synthetic oligonucleotide
  Sense Strand Starting at position 628 of SEQ ID NO: 315638
gucuuaaugcugggcugaa

SEQ ID NO: 368072 - RNA, 19 nt, Artificial Sequence
  Description of Artificial Sequence: Synthetic oligonucleotide
  Antisense Strand to SEQ ID NO: 368071
uucagcccagcauuaagac

SEQ ID NO: 368073 - RNA, 19 nt, Artificial Sequence
  Description of Artificial Sequence: Synthetic oligonucleotide
  Sense Strand Starting at position 628 of SEQ ID NO: 315934
acauguaauugauaacaag

SEQ ID NO: 368074 - RNA, 19 nt, Artificial Sequence
  Description of Artificial Sequence: Synthetic oligonucleotide
  Antisense Strand to SEQ ID NO: 368073
cuuguuaucaauuacaugu

SEQ ID NO: 368075 - RNA, 19 nt, Artificial Sequence
  Description of Artificial Sequence: Synthetic oligonucleotide
  Sense Strand Starting at position 628 of SEQ ID NO: 316153
auuugaggcucucaaacaa

SEQ ID NO: 368076 - RNA, 19 nt, Artificial Sequence
  Description of Artificial Sequence: Synthetic oligonucleotide
  Antisense Strand to SEQ ID NO: 368075
uuguuugagagccucaaau

SEQ ID NO: 368077 - RNA, 19 nt, Artificial Sequence
  Description of Artificial Sequence: Synthetic oligonucleotide
  Sense Strand Starting at position 628 of SEQ ID NO: 316338
aggccauggcuuugguaau

SEQ ID NO: 368078 - RNA, 19 nt, Artificial Sequence
  Description of Artificial Sequence: Synthetic oligonucleotide
  Antisense Strand to SEQ ID NO: 368077
auuaccaaagccauggccu

SEQ ID NO: 368079 - RNA, 19 nt, Artificial Sequence
  Description of Artificial Sequence: Synthetic oligonucleotide
  Sense Strand Starting at position 628 of SEQ ID NO: 316426
gugugaguuccugucgugu

SEQ ID NO: 368080 - RNA, 19 nt, Artificial Sequence
  Description of Artificial Sequence: Synthetic oligonucleotide
  Antisense Strand to SEQ ID NO: 368079
acacgacaggaacucacac

SEQ ID NO: 368081 - RNA, 19 nt, Artificial Sequence
  Description of Artificial Sequence: Synthetic oligonucleotide
  Sense Strand Starting at position 628 of SEQ ID NO: 316548
gggaaacgugcgugggaaa

SEQ ID NO: 368082 - RNA, 19 nt, Artificial Sequence
  Description of Artificial Sequence: Synthetic oligonucleotide
  Antisense Strand to SEQ ID NO: 368081
uuucccacgcacguuuccc

SEQ ID NO: 368083 - RNA, 19 nt, Artificial Sequence
  Description of Artificial Sequence: Synthetic oligonucleotide
  Sense Strand Starting at position 628 of SEQ ID NO: 316549
ggaaacgugcgugggaaau

SEQ ID NO: 368084 - RNA, 19 nt, Artificial Sequence
  Description of Artificial Sequence: Synthetic oligonucleotide
  Antisense Strand to SEQ ID NO: 368083
auuucccacgcacguuucc

SEQ ID NO: 368085 - RNA, 19 nt, Artificial Sequence
  Description of Artificial Sequence: Synthetic oligonucleotide
  Sense Strand Starting at position 628 of SEQ ID NO: 316942
ccgacauuccuccagcacu

SEQ ID NO: 368086 - RNA, 19 nt, Artificial Sequence
  Description of Artificial Sequence: Synthetic oligonucleotide
  Antisense Strand to SEQ ID NO: 368085
agugcuggaggaaugucgg

SEQ ID NO: 368087 - RNA, 19 nt, Artificial Sequence
  Description of Artificial Sequence: Synthetic oligonucleotide
  Sense Strand Starting at position 628 of SEQ ID NO: 317580
cucgguucccaaggugaga

SEQ ID NO: 368088 - RNA, 19 nt, Artificial Sequence
  Description of Artificial Sequence: Synthetic oligonucleotide
  Antisense Strand to SEQ ID NO: 368087
ucucaccuugggaaccgag

SEQ ID NO: 368089 - RNA, 19 nt, Artificial Sequence
  Description of Artificial Sequence: Synthetic oligonucleotide
  Sense Strand Starting at position 628 of SEQ ID NO: 317794
uuuggauaaauacgguauu

SEQ ID NO: 368090 - RNA, 19 nt, Artificial Sequence
  Description of Artificial Sequence: Synthetic oligonucleotide
  Antisense Strand to SEQ ID NO: 368089
aauaccguauuuauccaaa

SEQ ID NO: 368091 - RNA, 19 nt, Artificial Sequence
  Description of Artificial Sequence: Synthetic oligonucleotide
  Sense Strand Starting at position 628 of SEQ ID NO: 317831
ucaguuacccuccggaaau

SEQ ID NO: 368092 - RNA, 19 nt, Artificial Sequence
  Description of Artificial Sequence: Synthetic oligonucleotide
  Antisense Strand to SEQ ID NO: 368091
auuuccggaggguaacuga

SEQ ID NO: 368093 - RNA, 19 nt, Artificial Sequence
  Description of Artificial Sequence: Synthetic oligonucleotide
  Sense Strand Starting at position 628 of SEQ ID NO: 317995
guucguagacugcuuuagu

SEQ ID NO: 368094 - RNA, 19 nt, Artificial Sequence
  Description of Artificial Sequence: Synthetic oligonucleotide
  Antisense Strand to SEQ ID NO: 368093
acuaaagcagucuacgaac

SEQ ID NO: 368095 - RNA, 19 nt, Artificial Sequence
  Description of Artificial Sequence: Synthetic oligonucleotide
  Sense Strand Starting at position 628 of SEQ ID NO: 318351
uccugcuucuucuugaaga

SEQ ID NO: 368096 - RNA, 19 nt, Artificial Sequence
  Description of Artificial Sequence: Synthetic oligonucleotide
  Antisense Strand to SEQ ID NO: 368095
ucuucaagaagaagcagga

SEQ ID NO: 368097 - RNA, 19 nt, Artificial Sequence
  Description of Artificial Sequence: Synthetic oligonucleotide
  Sense Strand Starting at position 628 of SEQ ID NO: 318353
cugcuucuucuugaagaca

SEQ ID NO: 368098 - RNA, 19 nt, Artificial Sequence
  Description of Artificial Sequence: Synthetic oligonucleotide
  Antisense Strand to SEQ ID NO: 368097
ugucuucaagaagaagcag

SEQ ID NO: 368099 - RNA, 19 nt, Artificial Sequence
  Description of Artificial Sequence: Synthetic oligonucleotide
  Sense Strand Starting at position 628 of SEQ ID NO: 318361
ucuugaagacauugcuaga

SEQ ID NO: 368100 - RNA, 19 nt, Artificial Sequence
  Description of Artificial Sequence: Synthetic oligonucleotide
  Antisense Strand to SEQ ID NO: 368099
ucuagcaaugucuucaaga

SEQ ID NO: 368101 - RNA, 19 nt, Artificial Sequence
  Description of Artificial Sequence: Synthetic oligonucleotide
  Sense Strand Starting at position 628 of SEQ ID NO: 318402
uuuccaggcucucuggaau

SEQ ID NO: 368102 - RNA, 19 nt, Artificial Sequence
  Description of Artificial Sequence: Synthetic oligonucleotide
  Antisense Strand to SEQ ID NO: 368101
auuccagagagccuggaaa

SEQ ID NO: 368103 - RNA, 19 nt, Artificial Sequence
  Description of Artificial Sequence: Synthetic oligonucleotide
  Sense Strand Starting at position 628 of SEQ ID NO: 318408
ggcucucuggaaugcuaua

SEQ ID NO: 368104 - RNA, 19 nt, Artificial Sequence
  Description of Artificial Sequence: Synthetic oligonucleotide
  Antisense Strand to SEQ ID NO: 368103
uauagcauuccagagagcc

SEQ ID NO: 368105 - RNA, 19 nt, Artificial Sequence
  Description of Artificial Sequence: Synthetic oligonucleotide
  Sense Strand Starting at position 628 of SEQ ID NO: 318413
ucuggaaugcuauaggucu

SEQ ID NO: 368106 - RNA, 19 nt, Artificial Sequence
  Description of Artificial Sequence: Synthetic oligonucleotide
  Antisense Strand to SEQ ID NO: 368105
agaccuauagcauuccaga

SEQ ID NO: 368107 - RNA, 19 nt, Artificial Sequence
  Description of Artificial Sequence: Synthetic oligonucleotide
  Sense Strand Starting at position 628 of SEQ ID NO: 318512
aaaccaaugcguugccaga

SEQ ID NO: 368108 - RNA, 19 nt, Artificial Sequence
  Description of Artificial Sequence: Synthetic oligonucleotide
  Antisense Strand to SEQ ID NO: 368107
ucuggcaacgcauugguuu

SEQ ID NO: 368109 - RNA, 19 nt, Artificial Sequence
  Description of Artificial Sequence: Synthetic oligonucleotide
  Sense Strand Starting at position 628 of SEQ ID NO: 318560
gugagaggcuuucuaguuc

SEQ ID NO: 368110 - RNA, 19 nt, Artificial Sequence
  Description of Artificial Sequence: Synthetic oligonucleotide
  Antisense Strand to SEQ ID NO: 368109
gaacuagaaagccucucac

SEQ ID NO: 368111 - RNA, 19 nt, Artificial Sequence
  Description of Artificial Sequence: Synthetic oligonucleotide
  Sense Strand Starting at position 628 of SEQ ID NO: 318627
ugggcagaacaguggaauu

SEQ ID NO: 368112 - RNA, 19 nt, Artificial Sequence
  Description of Artificial Sequence: Synthetic oligonucleotide
  Antisense Strand to SEQ ID NO: 368111
aauuccacuguucugccca

SEQ ID NO: 368113 - RNA, 19 nt, Artificial Sequence
  Description of Artificial Sequence: Synthetic oligonucleotide
  Sense Strand Starting at position 628 of SEQ ID NO: 318666
gagauagaggccuguauuc

SEQ ID NO: 368114 - RNA, 19 nt, Artificial Sequence
  Description of Artificial Sequence: Synthetic oligonucleotide
  Antisense Strand to SEQ ID NO: 368113
gaauacaggccucuaucuc

SEQ ID NO: 368115 - RNA, 19 nt, Artificial Sequence
  Description of Artificial Sequence: Synthetic oligonucleotide
  Sense Strand Starting at position 628 of SEQ ID NO: 318790
cucccaucuccuuggugaa

SEQ ID NO: 368116 - RNA, 19 nt, Artificial Sequence
  Description of Artificial Sequence: Synthetic oligonucleotide
  Antisense Strand to SEQ ID NO: 368115
uucaccaaggagaugggag

SEQ ID NO: 368117 - RNA, 19 nt, Artificial Sequence
  Description of Artificial Sequence: Synthetic oligonucleotide
  Sense Strand Starting at position 628 of SEQ ID NO: 318791
ucccaucuccuuggugaaa

SEQ ID NO: 368118 - RNA, 19 nt, Artificial Sequence
  Description of Artificial Sequence: Synthetic oligonucleotide
  Antisense Strand to SEQ ID NO: 368117
uuucaccaaggagauggga

SEQ ID NO: 368119 - RNA, 19 nt, Artificial Sequence
  Description of Artificial Sequence: Synthetic oligonucleotide
  Sense Strand Starting at position 628 of SEQ ID NO: 318802
uggugaaagcugcagcaaa

SEQ ID NO: 368120 - RNA, 19 nt, Artificial Sequence
  Description of Artificial Sequence: Synthetic oligonucleotide
  Antisense Strand to SEQ ID NO: 368119
uuugcugcagcuuucacca

SEQ ID NO: 368121 - RNA, 19 nt, Artificial Sequence
  Description of Artificial Sequence: Synthetic oligonucleotide
  Sense Strand Starting at position 628 of SEQ ID NO: 318944
ggucccuucuggguucaga

SEQ ID NO: 368122 - RNA, 19 nt, Artificial Sequence
  Description of Artificial Sequence: Synthetic oligonucleotide
  Antisense Strand to SEQ ID NO: 368121
ucugaacccagaagggacc

SEQ ID NO: 368123 - RNA, 19 nt, Artificial Sequence
  Description of Artificial Sequence: Synthetic oligonucleotide
  Sense Strand Starting at position 628 of SEQ ID NO: 318992
guaaguaaagcccaaguuu

SEQ ID NO: 368124 - RNA, 19 nt, Artificial Sequence
  Description of Artificial Sequence: Synthetic oligonucleotide
  Antisense Strand to SEQ ID NO: 368123
aaacuugggcuuuacuuac

SEQ ID NO: 368125 - RNA, 19 nt, Artificial Sequence
  Description of Artificial Sequence: Synthetic oligonucleotide
  Sense Strand Starting at position 628 of SEQ ID NO: 319095
gggagaaucuaucauugag

SEQ ID NO: 368126 - RNA, 19 nt, Artificial Sequence
  Description of Artificial Sequence: Synthetic oligonucleotide
  Antisense Strand to SEQ ID NO: 368125
cucaaugauagauucuccc

SEQ ID NO: 368127 - RNA, 19 nt, Artificial Sequence
  Description of Artificial Sequence: Synthetic oligonucleotide
  Sense Strand Starting at position 628 of SEQ ID NO: 319107
cauugagauuccuuggcag

SEQ ID NO: 368128 - RNA, 19 nt, Artificial Sequence
  Description of Artificial Sequence: Synthetic oligonucleotide
  Antisense Strand to SEQ ID NO: 368127
cugccaaggaaucucaaug

SEQ ID NO: 368129 - RNA, 19 nt, Artificial Sequence
  Description of Artificial Sequence: Synthetic oligonucleotide
  Sense Strand Starting at position 628 of SEQ ID NO: 319109
uugagauuccuuggcagaa

SEQ ID NO: 368130 - RNA, 19 nt, Artificial Sequence
  Description of Artificial Sequence: Synthetic oligonucleotide
  Antisense Strand to SEQ ID NO: 368129
uucugccaaggaaucucaa

SEQ ID NO: 368131 - RNA, 19 nt, Artificial Sequence
  Description of Artificial Sequence: Synthetic oligonucleotide
  Sense Strand Starting at position 628 of SEQ ID NO: 319110
ugagauuccuuggcagaaa

SEQ ID NO: 368132 - RNA, 19 nt, Artificial Sequence
  Description of Artificial Sequence: Synthetic oligonucleotide
  Antisense Strand to SEQ ID NO: 368131
uuucugccaaggaaucuca

SEQ ID NO: 368133 - RNA, 19 nt, Artificial Sequence
  Description of Artificial Sequence: Synthetic oligonucleotide
  Sense Strand Starting at position 629 of SEQ ID NO: 315362
uuuauaacccugggaguca

SEQ ID NO: 368134 - RNA, 19 nt, Artificial Sequence
  Description of Artificial Sequence: Synthetic oligonucleotide
  Antisense Strand to SEQ ID NO: 368133
ugacucccaggguuauaaa

SEQ ID NO: 368135 - RNA, 19 nt, Artificial Sequence
  Description of Artificial Sequence: Synthetic oligonucleotide
  Sense Strand Starting at position 629 of SEQ ID NO: 315363
uuauaacccugggagucau

SEQ ID NO: 368136 - RNA, 19 nt, Artificial Sequence
  Description of Artificial Sequence: Synthetic oligonucleotide
  Antisense Strand to SEQ ID NO: 368135
augacucccaggguuauaa

SEQ ID NO: 368137 - RNA, 19 nt, Artificial Sequence
  Description of Artificial Sequence: Synthetic oligonucleotide
  Sense Strand Starting at position 629 of SEQ ID NO: 315375
gagucauuaggccauccca

SEQ ID NO: 368138 - RNA, 19 nt, Artificial Sequence
  Description of Artificial Sequence: Synthetic oligonucleotide
  Antisense Strand to SEQ ID NO: 368137
ugggauggccuaaugacuc

SEQ ID NO: 368139 - RNA, 19 nt, Artificial Sequence
  Description of Artificial Sequence: Synthetic oligonucleotide
  Sense Strand Starting at position 629 of SEQ ID NO: 315514
agcucaaaucuagguugga

SEQ ID NO: 368140 - RNA, 19 nt, Artificial Sequence
  Description of Artificial Sequence: Synthetic oligonucleotide
  Antisense Strand to SEQ ID NO: 368139
uccaaccuagauuugagcu

SEQ ID NO: 368141 - RNA, 19 nt, Artificial Sequence
  Description of Artificial Sequence: Synthetic oligonucleotide
  Sense Strand Starting at position 629 of SEQ ID NO: 315515
gcucaaaucuagguuggaa

SEQ ID NO: 368142 - RNA, 19 nt, Artificial Sequence
  Description of Artificial Sequence: Synthetic oligonucleotide
  Antisense Strand to SEQ ID NO: 368141
uuccaaccuagauuugagc

SEQ ID NO: 368143 - RNA, 19 nt, Artificial Sequence
  Description of Artificial Sequence: Synthetic oligonucleotide
  Sense Strand Starting at position 629 of SEQ ID NO: 315608
gggacuaagucaggaaaua

SEQ ID NO: 368144 - RNA, 19 nt, Artificial Sequence
  Description of Artificial Sequence: Synthetic oligonucleotide
  Antisense Strand to SEQ ID NO: 368143
uauuuccugacuuaguccc

SEQ ID NO: 368145 - RNA, 19 nt, Artificial Sequence
  Description of Artificial Sequence: Synthetic oligonucleotide
  Sense Strand Starting at position 629 of SEQ ID NO: 316454
gggucaaaucugggucuag

SEQ ID NO: 368146 - RNA, 19 nt, Artificial Sequence
  Description of Artificial Sequence: Synthetic oligonucleotide
  Antisense Strand to SEQ ID NO: 368145
cuagacccagauuugaccc

SEQ ID NO: 368147 - RNA, 19 nt, Artificial Sequence
  Description of Artificial Sequence: Synthetic oligonucleotide
  Sense Strand Starting at position 629 of SEQ ID NO: 316480
guaguaaggugacuagaac

SEQ ID NO: 368148 - RNA, 19 nt, Artificial Sequence
  Description of Artificial Sequence: Synthetic oligonucleotide
  Antisense Strand to SEQ ID NO: 368147
guucuagucaccuuacuac

SEQ ID NO: 368149 - RNA, 19 nt, Artificial Sequence
  Description of Artificial Sequence: Synthetic oligonucleotide
  Sense Strand Starting at position 629 of SEQ ID NO: 316660
ggccauuccacaggguuaa

SEQ ID NO: 368150 - RNA, 19 nt, Artificial Sequence
  Description of Artificial Sequence: Synthetic oligonucleotide
  Antisense Strand to SEQ ID NO: 368149
uuaacccuguggaauggcc

SEQ ID NO: 368151 - RNA, 19 nt, Artificial Sequence
  Description of Artificial Sequence: Synthetic oligonucleotide
  Sense Strand Starting at position 629 of SEQ ID NO: 316661
gccauuccacaggguuaau

SEQ ID NO: 368152 - RNA, 19 nt, Artificial Sequence
  Description of Artificial Sequence: Synthetic oligonucleotide
  Antisense Strand to SEQ ID NO: 368151
auuaacccuguggaauggc

SEQ ID NO: 368153 - RNA, 19 nt, Artificial Sequence
  Description of Artificial Sequence: Synthetic oligonucleotide
  Sense Strand Starting at position 629 of SEQ ID NO: 316707
agagucaggguguguuuca

SEQ ID NO: 368154 - RNA, 19 nt, Artificial Sequence
  Description of Artificial Sequence: Synthetic oligonucleotide
  Antisense Strand to SEQ ID NO: 368153
ugaaacacacccugacucu

SEQ ID NO: 368155 - RNA, 19 nt, Artificial Sequence
  Description of Artificial Sequence: Synthetic oligonucleotide
  Sense Strand Starting at position 629 of SEQ ID NO: 316861
ggagaaaucucaugaccac

SEQ ID NO: 368156 - RNA, 19 nt, Artificial Sequence
  Description of Artificial Sequence: Synthetic oligonucleotide
  Antisense Strand to SEQ ID NO: 368155
guggucaugagauuucucc

SEQ ID NO: 368157 - RNA, 19 nt, Artificial Sequence
  Description of Artificial Sequence: Synthetic oligonucleotide
  Sense Strand Starting at position 629 of SEQ ID NO: 316902
gggcguuuccaccaggaau

SEQ ID NO: 368158 - RNA, 19 nt, Artificial Sequence
  Description of Artificial Sequence: Synthetic oligonucleotide
  Antisense Strand to SEQ ID NO: 368157
auuccugguggaaacgccc

SEQ ID NO: 368159 - RNA, 19 nt, Artificial Sequence
  Description of Artificial Sequence: Synthetic oligonucleotide
  Sense Strand Starting at position 629 of SEQ ID NO: 317412
gacagaauuuagcguccga

SEQ ID NO: 368160 - RNA, 19 nt, Artificial Sequence
  Description of Artificial Sequence: Synthetic oligonucleotide
  Antisense Strand to SEQ ID NO: 368159
ucggacgcuaaauucuguc

SEQ ID NO: 368161 - RNA, 19 nt, Artificial Sequence
  Description of Artificial Sequence: Synthetic oligonucleotide
  Sense Strand Starting at position 629 of SEQ ID NO: 317685
gcccuuaccugggcauaaa

SEQ ID NO: 368162 - RNA, 19 nt, Artificial Sequence
  Description of Artificial Sequence: Synthetic oligonucleotide
  Antisense Strand to SEQ ID NO: 368161
uuuaugcccagguaagggc

SEQ ID NO: 368163 - RNA, 19 nt, Artificial Sequence
  Description of Artificial Sequence: Synthetic oligonucleotide
  Sense Strand Starting at position 629 of SEQ ID NO: 317706
aggaauaggucuuacagug

SEQ ID NO: 368164 - RNA, 19 nt, Artificial Sequence
  Description of Artificial Sequence: Synthetic oligonucleotide
  Antisense Strand to SEQ ID NO: 368163
cacuguaagaccuauuccu

SEQ ID NO: 368165 - RNA, 19 nt, Artificial Sequence
  Description of Artificial Sequence: Synthetic oligonucleotide
  Sense Strand Starting at position 629 of SEQ ID NO: 317803
gagugauacugagcagaga

SEQ ID NO: 368166 - RNA, 19 nt, Artificial Sequence
  Description of Artificial Sequence: Synthetic oligonucleotide
  Antisense Strand to SEQ ID NO: 368165
ucucugcucaguaucacuc

SEQ ID NO: 368167 - RNA, 19 nt, Artificial Sequence
  Description of Artificial Sequence: Synthetic oligonucleotide
  Sense Strand Starting at position 629 of SEQ ID NO: 317818
gagaaugugcuggaagagu

SEQ ID NO: 368168 - RNA, 19 nt, Artificial Sequence
  Description of Artificial Sequence: Synthetic oligonucleotide
  Antisense Strand to SEQ ID NO: 368167
acucuuccagcacauucuc

SEQ ID NO: 368169 - RNA, 19 nt, Artificial Sequence
  Description of Artificial Sequence: Synthetic oligonucleotide
  Sense Strand Starting at position 629 of SEQ ID NO: 317877
uccuguagggccugagaga

SEQ ID NO: 368170 - RNA, 19 nt, Artificial Sequence
  Description of Artificial Sequence: Synthetic oligonucleotide
  Antisense Strand to SEQ ID NO: 368169
ucucucaggcccuacagga

SEQ ID NO: 368171 - RNA, 19 nt, Artificial Sequence
  Description of Artificial Sequence: Synthetic oligonucleotide
  Sense Strand Starting at position 629 of SEQ ID NO: 317886
gccugagagaccugggcua

SEQ ID NO: 368172 - RNA, 19 nt, Artificial Sequence
  Description of Artificial Sequence: Synthetic oligonucleotide
  Antisense Strand to SEQ ID NO: 368171
uagcccaggucucucaggc

SEQ ID NO: 368173 - RNA, 19 nt, Artificial Sequence
  Description of Artificial Sequence: Synthetic oligonucleotide
  Sense Strand Starting at position 629 of SEQ ID NO: 317949
ugagcuugccucuaaccaa

SEQ ID NO: 368174 - RNA, 19 nt, Artificial Sequence
  Description of Artificial Sequence: Synthetic oligonucleotide
  Antisense Strand to SEQ ID NO: 368173
uugguuagaggcaagcuca

SEQ ID NO: 368175 - RNA, 19 nt, Artificial Sequence
  Description of Artificial Sequence: Synthetic oligonucleotide
  Sense Strand Starting at position 629 of SEQ ID NO: 318086
cccauuuguacaggucagu

SEQ ID NO: 368176 - RNA, 19 nt, Artificial Sequence
  Description of Artificial Sequence: Synthetic oligonucleotide
  Antisense Strand to SEQ ID NO: 368175
acugaccuguacaaauggg

SEQ ID NO: 368177 - RNA, 19 nt, Artificial Sequence
  Description of Artificial Sequence: Synthetic oligonucleotide
  Sense Strand Starting at position 629 of SEQ ID NO: 318099
gucagugguaccuguggga

SEQ ID NO: 368178 - RNA, 19 nt, Artificial Sequence
  Description of Artificial Sequence: Synthetic oligonucleotide
  Antisense Strand to SEQ ID NO: 368177
ucccacagguaccacugac

SEQ ID NO: 368179 - RNA, 19 nt, Artificial Sequence
  Description of Artificial Sequence: Synthetic oligonucleotide
  Sense Strand Starting at position 629 of SEQ ID NO: 318115
ggaagagguccuugcaguu

SEQ ID NO: 368180 - RNA, 19 nt, Artificial Sequence
  Description of Artificial Sequence: Synthetic oligonucleotide
  Antisense Strand to SEQ ID NO: 368179
aacugcaaggaccucuucc

SEQ ID NO: 368181 - RNA, 19 nt, Artificial Sequence
  Description of Artificial Sequence: Synthetic oligonucleotide
  Sense Strand Starting at position 629 of SEQ ID NO: 318166
cauggacagugcuuaucuu

SEQ ID NO: 368182 - RNA, 19 nt, Artificial Sequence
  Description of Artificial Sequence: Synthetic oligonucleotide
  Antisense Strand to SEQ ID NO: 368181
aagauaagcacuguccaug

SEQ ID NO: 368183 - RNA, 19 nt, Artificial Sequence
  Description of Artificial Sequence: Synthetic oligonucleotide
  Sense Strand Starting at position 629 of SEQ ID NO: 318167
auggacagugcuuaucuua

SEQ ID NO: 368184 - RNA, 19 nt, Artificial Sequence
  Description of Artificial Sequence: Synthetic oligonucleotide
  Antisense Strand to SEQ ID NO: 368183
uaagauaagcacuguccau

SEQ ID NO: 368185 - RNA, 19 nt, Artificial Sequence
  Description of Artificial Sequence: Synthetic oligonucleotide
  Sense Strand Starting at position 629 of SEQ ID NO: 318170
gacagugcuuaucuuaguu

SEQ ID NO: 368186 - RNA, 19 nt, Artificial Sequence
  Description of Artificial Sequence: Synthetic oligonucleotide
  Antisense Strand to SEQ ID NO: 368185
aacuaagauaagcacuguc

SEQ ID NO: 368187 - RNA, 19 nt, Artificial Sequence
  Description of Artificial Sequence: Synthetic oligonucleotide
  Sense Strand Starting at position 629 of SEQ ID NO: 318218
acaugcauauaguuaguau

SEQ ID NO: 368188 - RNA, 19 nt, Artificial Sequence
  Description of Artificial Sequence: Synthetic oligonucleotide
  Antisense Strand to SEQ ID NO: 368187
auacuaacuauaugcaugu

SEQ ID NO: 368189 - RNA, 19 nt, Artificial Sequence
  Description of Artificial Sequence: Synthetic oligonucleotide
  Sense Strand Starting at position 629 of SEQ ID NO: 318294
aaggaagugucaucaagca

SEQ ID NO: 368190 - RNA, 19 nt, Artificial Sequence
  Description of Artificial Sequence: Synthetic oligonucleotide
  Antisense Strand to SEQ ID NO: 368189
ugcuugaugacacuuccuu

SEQ ID NO: 368191 - RNA, 19 nt, Artificial Sequence
  Description of Artificial Sequence: Synthetic oligonucleotide
  Sense Strand Starting at position 629 of SEQ ID NO: 318437
uccauuagucauggguuga

SEQ ID NO: 368192 - RNA, 19 nt, Artificial Sequence
  Description of Artificial Sequence: Synthetic oligonucleotide
  Antisense Strand to SEQ ID NO: 368191
ucaacccaugacuaaugga

SEQ ID NO: 368193 - RNA, 19 nt, Artificial Sequence
  Description of Artificial Sequence: Synthetic oligonucleotide
  Sense Strand Starting at position 629 of SEQ ID NO: 318438
ccauuagucauggguugag

SEQ ID NO: 368194 - RNA, 19 nt, Artificial Sequence
  Description of Artificial Sequence: Synthetic oligonucleotide
  Antisense Strand to SEQ ID NO: 368193
cucaacccaugacuaaugg

SEQ ID NO: 368195 - RNA, 19 nt, Artificial Sequence
  Description of Artificial Sequence: Synthetic oligonucleotide
  Sense Strand Starting at position 629 of SEQ ID NO: 318511
cccagaagucuauggguag

SEQ ID NO: 368196 - RNA, 19 nt, Artificial Sequence
  Description of Artificial Sequence: Synthetic oligonucleotide
  Antisense Strand to SEQ ID NO: 368195
cuacccauagacuucuggg

SEQ ID NO: 368197 - RNA, 19 nt, Artificial Sequence
  Description of Artificial Sequence: Synthetic oligonucleotide
  Sense Strand Starting at position 629 of SEQ ID NO: 318512
ccagaagucuauggguaga

SEQ ID NO: 368198 - RNA, 19 nt, Artificial Sequence
  Description of Artificial Sequence: Synthetic oligonucleotide
  Antisense Strand to SEQ ID NO: 368197
ucuacccauagacuucugg

SEQ ID NO: 368199 - RNA, 19 nt, Artificial Sequence
  Description of Artificial Sequence: Synthetic oligonucleotide
  Sense Strand Starting at position 629 of SEQ ID NO: 318570
cagggacugucaguuggau

SEQ ID NO: 368200 - RNA, 19 nt, Artificial Sequence
  Description of Artificial Sequence: Synthetic oligonucleotide
  Antisense Strand to SEQ ID NO: 368199
auccaacugacagucccug

SEQ ID NO: 368201 - RNA, 19 nt, Artificial Sequence
  Description of Artificial Sequence: Synthetic oligonucleotide
  Sense Strand Starting at position 629 of SEQ ID NO: 318572
gggacugucaguuggauuc

SEQ ID NO: 368202 - RNA, 19 nt, Artificial Sequence
  Description of Artificial Sequence: Synthetic oligonucleotide
  Antisense Strand to SEQ ID NO: 368201
gaauccaacugacaguccc

SEQ ID NO: 368203 - RNA, 19 nt, Artificial Sequence
  Description of Artificial Sequence: Synthetic oligonucleotide
  Sense Strand Starting at position 629 of SEQ ID NO: 318726
acccucuugugauugccaa

SEQ ID NO: 368204 - RNA, 19 nt, Artificial Sequence
  Description of Artificial Sequence: Synthetic oligonucleotide
  Antisense Strand to SEQ ID NO: 368203
uuggcaaucacaagagggu

SEQ ID NO: 368205 - RNA, 19 nt, Artificial Sequence
  Description of Artificial Sequence: Synthetic oligonucleotide
  Sense Strand Starting at position 629 of SEQ ID NO: 318727
cccucuugugauugccaau

SEQ ID NO: 368206 - RNA, 19 nt, Artificial Sequence
  Description of Artificial Sequence: Synthetic oligonucleotide
  Antisense Strand to SEQ ID NO: 368205
auuggcaaucacaagaggg

SEQ ID NO: 368207 - RNA, 19 nt, Artificial Sequence
  Description of Artificial Sequence: Synthetic oligonucleotide
  Sense Strand Starting at position 629 of SEQ ID NO: 318849
gccacuugccuuuagauac

SEQ ID NO: 368208 - RNA, 19 nt, Artificial Sequence
  Description of Artificial Sequence: Synthetic oligonucleotide
  Antisense Strand to SEQ ID NO: 368207
guaucuaaaggcaaguggc

SEQ ID NO: 368209 - RNA, 19 nt, Artificial Sequence
  Description of Artificial Sequence: Synthetic oligonucleotide
  Sense Strand Starting at position 629 of SEQ ID NO: 318956
uguuacuugucaccucaau

SEQ ID NO: 368210 - RNA, 19 nt, Artificial Sequence
  Description of Artificial Sequence: Synthetic oligonucleotide
  Antisense Strand to SEQ ID NO: 368209
auugaggugacaaguaaca

SEQ ID NO: 368211 - RNA, 19 nt, Artificial Sequence
  Description of Artificial Sequence: Synthetic oligonucleotide
  Sense Strand Starting at position 629 of SEQ ID NO: 319048
gccugugguccuuaacuaa

SEQ ID NO: 368212 - RNA, 19 nt, Artificial Sequence
  Description of Artificial Sequence: Synthetic oligonucleotide
  Antisense Strand to SEQ ID NO: 368211
uuaguuaaggaccacaggc

SEQ ID NO: 368213 - RNA, 19 nt, Artificial Sequence
  Description of Artificial Sequence: Synthetic oligonucleotide
  Sense Strand Starting at position 630 of SEQ ID NO: 315265
aaccgaggcuuacagagau

SEQ ID NO: 368214 - RNA, 19 nt, Artificial Sequence
  Description of Artificial Sequence: Synthetic oligonucleotide
  Antisense Strand to SEQ ID NO: 368213
aucucuguaagccucgguu

SEQ ID NO: 368215 - RNA, 19 nt, Artificial Sequence
  Description of Artificial Sequence: Synthetic oligonucleotide
  Sense Strand Starting at position 630 of SEQ ID NO: 315383
acucaacuauguugcagaa

SEQ ID NO: 368216 - RNA, 19 nt, Artificial Sequence
  Description of Artificial Sequence: Synthetic oligonucleotide
  Antisense Strand to SEQ ID NO: 368215
uucugcaacauaguugagu

SEQ ID NO: 368217 - RNA, 19 nt, Artificial Sequence
  Description of Artificial Sequence: Synthetic oligonucleotide
  Sense Strand Starting at position 630 of SEQ ID NO: 315385
ucaacuauguugcagaaga

SEQ ID NO: 368218 - RNA, 19 nt, Artificial Sequence
  Description of Artificial Sequence: Synthetic oligonucleotide
  Antisense Strand to SEQ ID NO: 368217
ucuucugcaacauaguuga

SEQ ID NO: 368219 - RNA, 19 nt, Artificial Sequence
  Description of Artificial Sequence: Synthetic oligonucleotide
  Sense Strand Starting at position 630 of SEQ ID NO: 315451
gugacucacgcguguaauu

SEQ ID NO: 368220 - RNA, 19 nt, Artificial Sequence
  Description of Artificial Sequence: Synthetic oligonucleotide
  Antisense Strand to SEQ ID NO: 368219
aauuacacgcgugagucac

SEQ ID NO: 368221 - RNA, 19 nt, Artificial Sequence
  Description of Artificial Sequence: Synthetic oligonucleotide
  Sense Strand Starting at position 630 of SEQ ID NO: 315453
gacucacgcguguaauucu

SEQ ID NO: 368222 - RNA, 19 nt, Artificial Sequence
  Description of Artificial Sequence: Synthetic oligonucleotide
  Antisense Strand to SEQ ID NO: 368221
agaauuacacgcgugaguc

SEQ ID NO: 368223 - RNA, 19 nt, Artificial Sequence
  Description of Artificial Sequence: Synthetic oligonucleotide
  Sense Strand Starting at position 630 of SEQ ID NO: 316146
cacagaugcugagagcuuu

SEQ ID NO: 368224 - RNA, 19 nt, Artificial Sequence
  Description of Artificial Sequence: Synthetic oligonucleotide
  Antisense Strand to SEQ ID NO: 368223
aaagcucucagcaucugug

SEQ ID NO: 368225 - RNA, 19 nt, Artificial Sequence
  Description of Artificial Sequence: Synthetic oligonucleotide
  Sense Strand Starting at position 630 of SEQ ID NO: 316154
cugagagcuuuccagcuaa

SEQ ID NO: 368226 - RNA, 19 nt, Artificial Sequence
  Description of Artificial Sequence: Synthetic oligonucleotide
  Antisense Strand to SEQ ID NO: 368225
uuagcuggaaagcucucag

SEQ ID NO: 368227 - RNA, 19 nt, Artificial Sequence
  Description of Artificial Sequence: Synthetic oligonucleotide
  Sense Strand Starting at position 630 of SEQ ID NO: 316324
gggaacaggugguuaagau

SEQ ID NO: 368228 - RNA, 19 nt, Artificial Sequence
  Description of Artificial Sequence: Synthetic oligonucleotide
  Antisense Strand to SEQ ID NO: 368227
aucuuaaccaccuguuccc

SEQ ID NO: 368229 - RNA, 19 nt, Artificial Sequence
  Description of Artificial Sequence: Synthetic oligonucleotide
  Sense Strand Starting at position 630 of SEQ ID NO: 316407
gaccuuugugguggugagu

SEQ ID NO: 368230 - RNA, 19 nt, Artificial Sequence
  Description of Artificial Sequence: Synthetic oligonucleotide
  Antisense Strand to SEQ ID NO: 368229
acucaccaccacaaagguc

SEQ ID NO: 368231 - RNA, 19 nt, Artificial Sequence
  Description of Artificial Sequence: Synthetic oligonucleotide
  Sense Strand Starting at position 630 of SEQ ID NO: 316526
gggcaaugauuccuaagga

SEQ ID NO: 368232 - RNA, 19 nt, Artificial Sequence
  Description of Artificial Sequence: Synthetic oligonucleotide
  Antisense Strand to SEQ ID NO: 368231
uccuuaggaaucauugccc

SEQ ID NO: 368233 - RNA, 19 nt, Artificial Sequence
  Description of Artificial Sequence: Synthetic oligonucleotide
  Sense Strand Starting at position 630 of SEQ ID NO: 316527
ggcaaugauuccuaaggag

SEQ ID NO: 368234 - RNA, 19 nt, Artificial Sequence
  Description of Artificial Sequence: Synthetic oligonucleotide
  Antisense Strand to SEQ ID NO: 368233
cuccuuaggaaucauugcc

SEQ ID NO: 368235 - RNA, 19 nt, Artificial Sequence
  Description of Artificial Sequence: Synthetic oligonucleotide
  Sense Strand Starting at position 630 of SEQ ID NO: 316530
aaugauuccuaaggagaag

SEQ ID NO: 368236 - RNA, 19 nt, Artificial Sequence
  Description of Artificial Sequence: Synthetic oligonucleotide
  Antisense Strand to SEQ ID NO: 368235
cuucuccuuaggaaucauu

SEQ ID NO: 368237 - RNA, 19 nt, Artificial Sequence
  Description of Artificial Sequence: Synthetic oligonucleotide
  Sense Strand Starting at position 630 of SEQ ID NO: 316542
ggagaagccuucucuucua

SEQ ID NO: 368238 - RNA, 19 nt, Artificial Sequence
  Description of Artificial Sequence: Synthetic oligonucleotide
  Antisense Strand to SEQ ID NO: 368237
uagaagagaaggcuucucc

SEQ ID NO: 368239 - RNA, 19 nt, Artificial Sequence
  Description of Artificial Sequence: Synthetic oligonucleotide
  Sense Strand Starting at position 630 of SEQ ID NO: 316593
aaauaucuguagugacaag

SEQ ID NO: 368240 - RNA, 19 nt, Artificial Sequence
  Description of Artificial Sequence: Synthetic oligonucleotide
  Antisense Strand to SEQ ID NO: 368239
cuugucacuacagauauuu

SEQ ID NO: 368241 - RNA, 19 nt, Artificial Sequence
  Description of Artificial Sequence: Synthetic oligonucleotide
  Sense Strand Starting at position 630 of SEQ ID NO: 316687
uucucuugucugcaugaca

SEQ ID NO: 368242 - RNA, 19 nt, Artificial Sequence
  Description of Artificial Sequence: Synthetic oligonucleotide
  Antisense Strand to SEQ ID NO: 368241
ugucaugcagacaagagaa

SEQ ID NO: 368243 - RNA, 19 nt, Artificial Sequence
  Description of Artificial Sequence: Synthetic oligonucleotide
  Sense Strand Starting at position 630 of SEQ ID NO: 316781
gcugaaagguuguccucuu

SEQ ID NO: 368244 - RNA, 19 nt, Artificial Sequence
  Description of Artificial Sequence: Synthetic oligonucleotide
  Antisense Strand to SEQ ID NO: 368243
aagaggacaaccuuucagc

SEQ ID NO: 368245 - RNA, 19 nt, Artificial Sequence
  Description of Artificial Sequence: Synthetic oligonucleotide
  Sense Strand Starting at position 630 of SEQ ID NO: 317321
cuugacuucgcaugugcau

SEQ ID NO: 368246 - RNA, 19 nt, Artificial Sequence
  Description of Artificial Sequence: Synthetic oligonucleotide
  Antisense Strand to SEQ ID NO: 368245
augcacaugcgaagucaag

SEQ ID NO: 368247 - RNA, 19 nt, Artificial Sequence
  Description of Artificial Sequence: Synthetic oligonucleotide
  Sense Strand Starting at position 630 of SEQ ID NO: 317342
gccgaagucuuucuagauc

SEQ ID NO: 368248 - RNA, 19 nt, Artificial Sequence
  Description of Artificial Sequence: Synthetic oligonucleotide
  Antisense Strand to SEQ ID NO: 368247
gaucuagaaagacuucggc

SEQ ID NO: 368249 - RNA, 19 nt, Artificial Sequence
  Description of Artificial Sequence: Synthetic oligonucleotide
  Sense Strand Starting at position 630 of SEQ ID NO: 317769
ggucuucggagcuaauguu

SEQ ID NO: 368250 - RNA, 19 nt, Artificial Sequence
  Description of Artificial Sequence: Synthetic oligonucleotide
  Antisense Strand to SEQ ID NO: 368249
aacauuagcuccgaagacc

SEQ ID NO: 368251 - RNA, 19 nt, Artificial Sequence
  Description of Artificial Sequence: Synthetic oligonucleotide
  Sense Strand Starting at position 630 of SEQ ID NO: 317861
uggacucuuccguacuagu

SEQ ID NO: 368252 - RNA, 19 nt, Artificial Sequence
  Description of Artificial Sequence: Synthetic oligonucleotide
  Antisense Strand to SEQ ID NO: 368251
acuaguacggaagagucca

SEQ ID NO: 368253 - RNA, 19 nt, Artificial Sequence
  Description of Artificial Sequence: Synthetic oligonucleotide
  Sense Strand Starting at position 630 of SEQ ID NO: 317898
gggcuuugggaucaccagu

SEQ ID NO: 368254 - RNA, 19 nt, Artificial Sequence
  Description of Artificial Sequence: Synthetic oligonucleotide
  Antisense Strand to SEQ ID NO: 368253
acuggugaucccaaagccc

SEQ ID NO: 368255 - RNA, 19 nt, Artificial Sequence
  Description of Artificial Sequence: Synthetic oligonucleotide
  Sense Strand Starting at position 630 of SEQ ID NO: 317915
gucggagcccuucguguua

SEQ ID NO: 368256 - RNA, 19 nt, Artificial Sequence
  Description of Artificial Sequence: Synthetic oligonucleotide
  Antisense Strand to SEQ ID NO: 368255
uaacacgaagggcuccgac

SEQ ID NO: 368257 - RNA, 19 nt, Artificial Sequence
  Description of Artificial Sequence: Synthetic oligonucleotide
  Sense Strand Starting at position 630 of SEQ ID NO: 318010
cggcacauugggugagaaa

SEQ ID NO: 368258 - RNA, 19 nt, Artificial Sequence
  Description of Artificial Sequence: Synthetic oligonucleotide
  Antisense Strand to SEQ ID NO: 368257
uuucucacccaaugugccg

SEQ ID NO: 368259 - RNA, 19 nt, Artificial Sequence
  Description of Artificial Sequence: Synthetic oligonucleotide
  Sense Strand Starting at position 630 of SEQ ID NO: 318340
agagacuugcuuuguuaua

SEQ ID NO: 368260 - RNA, 19 nt, Artificial Sequence
  Description of Artificial Sequence: Synthetic oligonucleotide
  Antisense Strand to SEQ ID NO: 368259
uauaacaaagcaagucucu

SEQ ID NO: 368261 - RNA, 19 nt, Artificial Sequence
  Description of Artificial Sequence: Synthetic oligonucleotide
  Sense Strand Starting at position 630 of SEQ ID NO: 318341
gagacuugcuuuguuauac

SEQ ID NO: 368262 - RNA, 19 nt, Artificial Sequence
  Description of Artificial Sequence: Synthetic oligonucleotide
  Antisense Strand to SEQ ID NO: 368261
guauaacaaagcaagucuc

SEQ ID NO: 368263 - RNA, 19 nt, Artificial Sequence
  Description of Artificial Sequence: Synthetic oligonucleotide
  Sense Strand Starting at position 630 of SEQ ID NO: 318345
cuugcuuuguuauaccaga

SEQ ID NO: 368264 - RNA, 19 nt, Artificial Sequence
  Description of Artificial Sequence: Synthetic oligonucleotide
  Antisense Strand to SEQ ID NO: 368263
ucugguauaacaaagcaag

SEQ ID NO: 368265 - RNA, 19 nt, Artificial Sequence
  Description of Artificial Sequence: Synthetic oligonucleotide
  Sense Strand Starting at position 630 of SEQ ID NO: 318822
uuugguuggaguugucaug

SEQ ID NO: 368266 - RNA, 19 nt, Artificial Sequence
  Description of Artificial Sequence: Synthetic oligonucleotide
  Antisense Strand to SEQ ID NO: 368265
caugacaacuccaaccaaa

SEQ ID NO: 368267 - RNA, 19 nt, Artificial Sequence
  Description of Artificial Sequence: Synthetic oligonucleotide
  Sense Strand Starting at position 630 of SEQ ID NO: 318866
uugggacucucucaguagu

SEQ ID NO: 368268 - RNA, 19 nt, Artificial Sequence
  Description of Artificial Sequence: Synthetic oligonucleotide
  Antisense Strand to SEQ ID NO: 368267
acuacugagagagucccaa

SEQ ID NO: 368269 - RNA, 19 nt, Artificial Sequence
  Description of Artificial Sequence: Synthetic oligonucleotide
  Sense Strand Starting at position 630 of SEQ ID NO: 318868
gggacucucucaguaguga

SEQ ID NO: 368270 - RNA, 19 nt, Artificial Sequence
  Description of Artificial Sequence: Synthetic oligonucleotide
  Antisense Strand to SEQ ID NO: 368269
ucacuacugagagaguccc

SEQ ID NO: 368271 - RNA, 19 nt, Artificial Sequence
  Description of Artificial Sequence: Synthetic oligonucleotide
  Sense Strand Starting at position 630 of SEQ ID NO: 318876
cucaguagugacugaagau

SEQ ID NO: 368272 - RNA, 19 nt, Artificial Sequence
  Description of Artificial Sequence: Synthetic oligonucleotide
  Antisense Strand to SEQ ID NO: 368271
aucuucagucacuacugag

SEQ ID NO: 368273 - RNA, 19 nt, Artificial Sequence
  Description of Artificial Sequence: Synthetic oligonucleotide
  Sense Strand Starting at position 630 of SEQ ID NO: 318984
gggcucugcccuggacauu

SEQ ID NO: 368274 - RNA, 19 nt, Artificial Sequence
  Description of Artificial Sequence: Synthetic oligonucleotide
  Antisense Strand to SEQ ID NO: 368273
aauguccagggcagagccc

SEQ ID NO: 368275 - RNA, 19 nt, Artificial Sequence
  Description of Artificial Sequence: Synthetic oligonucleotide
  Sense Strand Starting at position 630 of SEQ ID NO: 319044
ucaagcagcuuguaauuua

SEQ ID NO: 368276 - RNA, 19 nt, Artificial Sequence
  Description of Artificial Sequence: Synthetic oligonucleotide
  Antisense Strand to SEQ ID NO: 368275
uaaauuacaagcugcuuga

SEQ ID NO: 368277 - RNA, 19 nt, Artificial Sequence
  Description of Artificial Sequence: Synthetic oligonucleotide
  Sense Strand Starting at position 630 of SEQ ID NO: 319047
agcagcuuguaauuuaauu

SEQ ID NO: 368278 - RNA, 19 nt, Artificial Sequence
  Description of Artificial Sequence: Synthetic oligonucleotide
  Antisense Strand to SEQ ID NO: 368277
aauuaaauuacaagcugcu

SEQ ID NO: 368279 - RNA, 19 nt, Artificial Sequence
  Description of Artificial Sequence: Synthetic oligonucleotide
  Sense Strand Starting at position 630 of SEQ ID NO: 319087
aaugaagcgacguaagaau

SEQ ID NO: 368280 - RNA, 19 nt, Artificial Sequence
  Description of Artificial Sequence: Synthetic oligonucleotide
  Antisense Strand to SEQ ID NO: 368279
auucuuacgucgcuucauu

SEQ ID NO: 368281 - RNA, 19 nt, Artificial Sequence
  Description of Artificial Sequence: Synthetic oligonucleotide
  Sense Strand Starting at position 630 of SEQ ID NO: 319094
cgacguaagaaugguaaca

SEQ ID NO: 368282 - RNA, 19 nt, Artificial Sequence
  Description of Artificial Sequence: Synthetic oligonucleotide
  Antisense Strand to SEQ ID NO: 368281
uguuaccauucuuacgucg

SEQ ID NO: 368283 - RNA, 19 nt, Artificial Sequence
  Description of Artificial Sequence: Synthetic oligonucleotide
  Sense Strand Starting at position 630 of SEQ ID NO: 319096
acguaagaaugguaacaag

SEQ ID NO: 368284 - RNA, 19 nt, Artificial Sequence
  Description of Artificial Sequence: Synthetic oligonucleotide
  Antisense Strand to SEQ ID NO: 368283
cuuguuaccauucuuacgu

SEQ ID NO: 368285 - RNA, 19 nt, Artificial Sequence
  Description of Artificial Sequence: Synthetic oligonucleotide
  Sense Strand Starting at position 630 of SEQ ID NO: 319150
cuaaauguuuggguguuaa

SEQ ID NO: 368286 - RNA, 19 nt, Artificial Sequence
  Description of Artificial Sequence: Synthetic oligonucleotide
  Antisense Strand to SEQ ID NO: 368285
uuaacacccaaacauuuag

SEQ ID NO: 368287 - RNA, 19 nt, Artificial Sequence
  Description of Artificial Sequence: Synthetic oligonucleotide
  Sense Strand Starting at position 630 of SEQ ID NO: 319209
ggaagacuuuauugcaggu

SEQ ID NO: 368288 - RNA, 19 nt, Artificial Sequence
  Description of Artificial Sequence: Synthetic oligonucleotide
  Antisense Strand to SEQ ID NO: 368287
accugcaauaaagucuucc

SEQ ID NO: 368289 - RNA, 19 nt, Artificial Sequence
  Description of Artificial Sequence: Synthetic oligonucleotide
  Sense Strand Starting at position 630 of SEQ ID NO: 319213
gacuuuauugcagguggau

SEQ ID NO: 368290 - RNA, 19 nt, Artificial Sequence
  Description of Artificial Sequence: Synthetic oligonucleotide
  Antisense Strand to SEQ ID NO: 368289
auccaccugcaauaaaguc

SEQ ID NO: 368291 - RNA, 19 nt, Artificial Sequence
  Description of Artificial Sequence: Synthetic oligonucleotide
  Sense Strand Starting at position 630 of SEQ ID NO: 319215
cuuuauugcagguggauau

SEQ ID NO: 368292 - RNA, 19 nt, Artificial Sequence
  Description of Artificial Sequence: Synthetic oligonucleotide
  Antisense Strand to SEQ ID NO: 368291
auauccaccugcaauaaag

SEQ ID NO: 368293 - RNA, 19 nt, Artificial Sequence
  Description of Artificial Sequence: Synthetic oligonucleotide
  Sense Strand Starting at position 631 of SEQ ID NO: 315236
uuccuauaucugcagaaga

SEQ ID NO: 368294 - RNA, 19 nt, Artificial Sequence
  Description of Artificial Sequence: Synthetic oligonucleotide
  Antisense Strand to SEQ ID NO: 368293
ucuucugcagauauaggaa

SEQ ID NO: 368295 - RNA, 19 nt, Artificial Sequence
  Description of Artificial Sequence: Synthetic oligonucleotide
  Sense Strand Starting at position 631 of SEQ ID NO: 315411
uuugaauuaccacgggaau

SEQ ID NO: 368296 - RNA, 19 nt, Artificial Sequence
  Description of Artificial Sequence: Synthetic oligonucleotide
  Antisense Strand to SEQ ID NO: 368295
auucccgugguaauucaaa

SEQ ID NO: 368297 - RNA, 19 nt, Artificial Sequence
  Description of Artificial Sequence: Synthetic oligonucleotide
  Sense Strand Starting at position 631 of SEQ ID NO: 315412
uugaauuaccacgggaauu

SEQ ID NO: 368298 - RNA, 19 nt, Artificial Sequence
  Description of Artificial Sequence: Synthetic oligonucleotide
  Antisense Strand to SEQ ID NO: 368297
aauucccgugguaauucaa

SEQ ID NO: 368299 - RNA, 19 nt, Artificial Sequence
  Description of Artificial Sequence: Synthetic oligonucleotide
  Sense Strand Starting at position 631 of SEQ ID NO: 315435
cauagaagugugugaccua

SEQ ID NO: 368300 - RNA, 19 nt, Artificial Sequence
  Description of Artificial Sequence: Synthetic oligonucleotide
  Antisense Strand to SEQ ID NO: 368299
uaggucacacacuucuaug

SEQ ID NO: 368301 - RNA, 19 nt, Artificial Sequence
  Description of Artificial Sequence: Synthetic oligonucleotide
  Sense Strand Starting at position 631 of SEQ ID NO: 315694
gcaagugauuaaucauuaa

SEQ ID NO: 368302 - RNA, 19 nt, Artificial Sequence
  Description of Artificial Sequence: Synthetic oligonucleotide
  Antisense Strand to SEQ ID NO: 368301
uuaaugauuaaucacuugc

SEQ ID NO: 368303 - RNA, 19 nt, Artificial Sequence
  Description of Artificial Sequence: Synthetic oligonucleotide
  Sense Strand Starting at position 631 of SEQ ID NO: 315776
guggcacugugaucuauau

SEQ ID NO: 368304 - RNA, 19 nt, Artificial Sequence
  Description of Artificial Sequence: Synthetic oligonucleotide
  Antisense Strand to SEQ ID NO: 368303
auauagaucacagugccac

SEQ ID NO: 368305 - RNA, 19 nt, Artificial Sequence
  Description of Artificial Sequence: Synthetic oligonucleotide
  Sense Strand Starting at position 631 of SEQ ID NO: 315861
ggcagauaacgcgacacua

SEQ ID NO: 368306 - RNA, 19 nt, Artificial Sequence
  Description of Artificial Sequence: Synthetic oligonucleotide
  Antisense Strand to SEQ ID NO: 368305
uagugucgcguuaucugcc

SEQ ID NO: 368307 - RNA, 19 nt, Artificial Sequence
  Description of Artificial Sequence: Synthetic oligonucleotide
  Sense Strand Starting at position 631 of SEQ ID NO: 315863
cagauaacgcgacacuagu

SEQ ID NO: 368308 - RNA, 19 nt, Artificial Sequence
  Description of Artificial Sequence: Synthetic oligonucleotide
  Antisense Strand to SEQ ID NO: 368307
acuagugucgcguuaucug

SEQ ID NO: 368309 - RNA, 19 nt, Artificial Sequence
  Description of Artificial Sequence: Synthetic oligonucleotide
  Sense Strand Starting at position 631 of SEQ ID NO: 315877
cuaguuaaaggguguuaau

SEQ ID NO: 368310 - RNA, 19 nt, Artificial Sequence
  Description of Artificial Sequence: Synthetic oligonucleotide
  Antisense Strand to SEQ ID NO: 368309
auuaacacccuuuaacuag

SEQ ID NO: 368311 - RNA, 19 nt, Artificial Sequence
  Description of Artificial Sequence: Synthetic oligonucleotide
  Sense Strand Starting at position 631 of SEQ ID NO: 316312
gaguccuggagugguaaga

SEQ ID NO: 368312 - RNA, 19 nt, Artificial Sequence
  Description of Artificial Sequence: Synthetic oligonucleotide
  Antisense Strand to SEQ ID NO: 368311
ucuuaccacuccaggacuc

SEQ ID NO: 368313 - RNA, 19 nt, Artificial Sequence
  Description of Artificial Sequence: Synthetic oligonucleotide
  Sense Strand Starting at position 631 of SEQ ID NO: 316421
gucgcgaucgugguaaaca

SEQ ID NO: 368314 - RNA, 19 nt, Artificial Sequence
  Description of Artificial Sequence: Synthetic oligonucleotide
  Antisense Strand to SEQ ID NO: 368313
uguuuaccacgaucgcgac

SEQ ID NO: 368315 - RNA, 19 nt, Artificial Sequence
  Description of Artificial Sequence: Synthetic oligonucleotide
  Sense Strand Starting at position 631 of SEQ ID NO: 316477
gugacagugccgagugcau

SEQ ID NO: 368316 - RNA, 19 nt, Artificial Sequence
  Description of Artificial Sequence: Synthetic oligonucleotide
  Antisense Strand to SEQ ID NO: 368315
augcacucggcacugucac

SEQ ID NO: 368317 - RNA, 19 nt, Artificial Sequence
  Description of Artificial Sequence: Synthetic oligonucleotide
  Sense Strand Starting at position 631 of SEQ ID NO: 316492
gcauuucgcaaucgcuuua

SEQ ID NO: 368318 - RNA, 19 nt, Artificial Sequence
  Description of Artificial Sequence: Synthetic oligonucleotide
  Antisense Strand to SEQ ID NO: 368317
uaaagcgauugcgaaaugc

SEQ ID NO: 368319 - RNA, 19 nt, Artificial Sequence
  Description of Artificial Sequence: Synthetic oligonucleotide
  Sense Strand Starting at position 631 of SEQ ID NO: 316557
gucauuccucccggacaga

SEQ ID NO: 368320 - RNA, 19 nt, Artificial Sequence
  Description of Artificial Sequence: Synthetic oligonucleotide
  Antisense Strand to SEQ ID NO: 368319
ucuguccgggaggaaugac

SEQ ID NO: 368321 - RNA, 19 nt, Artificial Sequence
  Description of Artificial Sequence: Synthetic oligonucleotide
  Sense Strand Starting at position 631 of SEQ ID NO: 316558
ucauuccucccggacagaa

SEQ ID NO: 368322 - RNA, 19 nt, Artificial Sequence
  Description of Artificial Sequence: Synthetic oligonucleotide
  Antisense Strand to SEQ ID NO: 368321
uucuguccgggaggaauga

SEQ ID NO: 368323 - RNA, 19 nt, Artificial Sequence
  Description of Artificial Sequence: Synthetic oligonucleotide
  Sense Strand Starting at position 631 of SEQ ID NO: 317328
ggagauguaguucacgcuu

SEQ ID NO: 368324 - RNA, 19 nt, Artificial Sequence
  Description of Artificial Sequence: Synthetic oligonucleotide
  Antisense Strand to SEQ ID NO: 368323
aagcgugaacuacaucucc

SEQ ID NO: 368325 - RNA, 19 nt, Artificial Sequence
  Description of Artificial Sequence: Synthetic oligonucleotide
  Sense Strand Starting at position 631 of SEQ ID NO: 317498
gugagaagccagagucguu

SEQ ID NO: 368326 - RNA, 19 nt, Artificial Sequence
  Description of Artificial Sequence: Synthetic oligonucleotide
  Antisense Strand to SEQ ID NO: 368325
aacgacucuggcuucucac

SEQ ID NO: 368327 - RNA, 19 nt, Artificial Sequence
  Description of Artificial Sequence: Synthetic oligonucleotide
  Sense Strand Starting at position 631 of SEQ ID NO: 317564
gcgaucagcccuucgacuu

SEQ ID NO: 368328 - RNA, 19 nt, Artificial Sequence
  Description of Artificial Sequence: Synthetic oligonucleotide
  Antisense Strand to SEQ ID NO: 368327
aagucgaagggcugaucgc

SEQ ID NO: 368329 - RNA, 19 nt, Artificial Sequence
  Description of Artificial Sequence: Synthetic oligonucleotide
  Sense Strand Starting at position 631 of SEQ ID NO: 317627
gauagacaaucggaaauca

SEQ ID NO: 368330 - RNA, 19 nt, Artificial Sequence
  Description of Artificial Sequence: Synthetic oligonucleotide
  Antisense Strand to SEQ ID NO: 368329
ugauuuccgauugucuauc

SEQ ID NO: 368331 - RNA, 19 nt, Artificial Sequence
  Description of Artificial Sequence: Synthetic oligonucleotide
  Sense Strand Starting at position 631 of SEQ ID NO: 317832
ggaguuccuaaaggacauu

SEQ ID NO: 368332 - RNA, 19 nt, Artificial Sequence
  Description of Artificial Sequence: Synthetic oligonucleotide
  Antisense Strand to SEQ ID NO: 368331
aauguccuuuaggaacucc

SEQ ID NO: 368333 - RNA, 19 nt, Artificial Sequence
  Description of Artificial Sequence: Synthetic oligonucleotide
  Sense Strand Starting at position 631 of SEQ ID NO: 317844
ggacauuguguugucguuu

SEQ ID NO: 368334 - RNA, 19 nt, Artificial Sequence
  Description of Artificial Sequence: Synthetic oligonucleotide
  Antisense Strand to SEQ ID NO: 368333
aaacgacaacacaaugucc

SEQ ID NO: 368335 - RNA, 19 nt, Artificial Sequence
  Description of Artificial Sequence: Synthetic oligonucleotide
  Sense Strand Starting at position 631 of SEQ ID NO: 318216
gguuucugauaccaaauuu

SEQ ID NO: 368336 - RNA, 19 nt, Artificial Sequence
  Description of Artificial Sequence: Synthetic oligonucleotide
  Antisense Strand to SEQ ID NO: 368335
aaauuugguaucagaaacc

SEQ ID NO: 368337 - RNA, 19 nt, Artificial Sequence
  Description of Artificial Sequence: Synthetic oligonucleotide
  Sense Strand Starting at position 631 of SEQ ID NO: 318266
ccgucaugccucuauuaaa

SEQ ID NO: 368338 - RNA, 19 nt, Artificial Sequence
  Description of Artificial Sequence: Synthetic oligonucleotide
  Antisense Strand to SEQ ID NO: 368337
uuuaauagaggcaugacgg

SEQ ID NO: 368339 - RNA, 19 nt, Artificial Sequence
  Description of Artificial Sequence: Synthetic oligonucleotide
  Sense Strand Starting at position 631 of SEQ ID NO: 318292
uuguguucugaugaccaga

SEQ ID NO: 368340 - RNA, 19 nt, Artificial Sequence
  Description of Artificial Sequence: Synthetic oligonucleotide
  Antisense Strand to SEQ ID NO: 368339
ucuggucaucagaacacaa

SEQ ID NO: 368341 - RNA, 19 nt, Artificial Sequence
  Description of Artificial Sequence: Synthetic oligonucleotide
  Sense Strand Starting at position 631 of SEQ ID NO: 318393
ugagcuauuucuucuggua

SEQ ID NO: 368342 - RNA, 19 nt, Artificial Sequence
  Description of Artificial Sequence: Synthetic oligonucleotide
  Antisense Strand to SEQ ID NO: 368341
uaccagaagaaauagcuca

SEQ ID NO: 368343 - RNA, 19 nt, Artificial Sequence
  Description of Artificial Sequence: Synthetic oligonucleotide
  Sense Strand Starting at position 631 of SEQ ID NO: 318473
cugguuaaaucauuaaugu

SEQ ID NO: 368344 - RNA, 19 nt, Artificial Sequence
  Description of Artificial Sequence: Synthetic oligonucleotide
  Antisense Strand to SEQ ID NO: 368343
acauuaaugauuuaaccag

SEQ ID NO: 368345 - RNA, 19 nt, Artificial Sequence
  Description of Artificial Sequence: Synthetic oligonucleotide
  Sense Strand Starting at position 631 of SEQ ID NO: 318481
aucauuaauguuuacgcua

SEQ ID NO: 368346 - RNA, 19 nt, Artificial Sequence
  Description of Artificial Sequence: Synthetic oligonucleotide
  Antisense Strand to SEQ ID NO: 368345
uagcguaaacauuaaugau

SEQ ID NO: 368347 - RNA, 19 nt, Artificial Sequence
  Description of Artificial Sequence: Synthetic oligonucleotide
  Sense Strand Starting at position 631 of SEQ ID NO: 318486
uaauguuuacgcuaaugag

SEQ ID NO: 368348 - RNA, 19 nt, Artificial Sequence
  Description of Artificial Sequence: Synthetic oligonucleotide
  Antisense Strand to SEQ ID NO: 368347
cucauuagcguaaacauua

SEQ ID NO: 368349 - RNA, 19 nt, Artificial Sequence
  Description of Artificial Sequence: Synthetic oligonucleotide
  Sense Strand Starting at position 631 of SEQ ID NO: 318495
cgcuaaugagaccauguau

SEQ ID NO: 368350 - RNA, 19 nt, Artificial Sequence
  Description of Artificial Sequence: Synthetic oligonucleotide
  Antisense Strand to SEQ ID NO: 368349
auacauggucucauuagcg

SEQ ID NO: 368351 - RNA, 19 nt, Artificial Sequence
  Description of Artificial Sequence: Synthetic oligonucleotide
  Sense Strand Starting at position 631 of SEQ ID NO: 318627
aucacaauguccucuuagu

SEQ ID NO: 368352 - RNA, 19 nt, Artificial Sequence
  Description of Artificial Sequence: Synthetic oligonucleotide
  Antisense Strand to SEQ ID NO: 368351
acuaagaggacauugugau

SEQ ID NO: 368353 - RNA, 19 nt, Artificial Sequence
  Description of Artificial Sequence: Synthetic oligonucleotide
  Sense Strand Starting at position 631 of SEQ ID NO: 318877
cgagcauugccucauauuu

SEQ ID NO: 368354 - RNA, 19 nt, Artificial Sequence
  Description of Artificial Sequence: Synthetic oligonucleotide
  Antisense Strand to SEQ ID NO: 368353
aaauaugaggcaaugcucg

SEQ ID NO: 368355 - RNA, 19 nt, Artificial Sequence
  Description of Artificial Sequence: Synthetic oligonucleotide
  Sense Strand Starting at position 631 of SEQ ID NO: 319005
ugaugauguugccuaauca

SEQ ID NO: 368356 - RNA, 19 nt, Artificial Sequence
  Description of Artificial Sequence: Synthetic oligonucleotide
  Antisense Strand to SEQ ID NO: 368355
ugauuaggcaacaucauca

SEQ ID NO: 368357 - RNA, 19 nt, Artificial Sequence
  Description of Artificial Sequence: Synthetic oligonucleotide
  Sense Strand Starting at position 631 of SEQ ID NO: 319006
gaugauguugccuaaucau

SEQ ID NO: 368358 - RNA, 19 nt, Artificial Sequence
  Description of Artificial Sequence: Synthetic oligonucleotide
  Antisense Strand to SEQ ID NO: 368357
augauuaggcaacaucauc

SEQ ID NO: 368359 - RNA, 19 nt, Artificial Sequence
  Description of Artificial Sequence: Synthetic oligonucleotide
  Sense Strand Starting at position 631 of SEQ ID NO: 319043
uauauuuauucgggauuuc

SEQ ID NO: 368360 - RNA, 19 nt, Artificial Sequence
  Description of Artificial Sequence: Synthetic oligonucleotide
  Antisense Strand to SEQ ID NO: 368359
gaaaucccgaauaaauaua

SEQ ID NO: 368361 - RNA, 19 nt, Artificial Sequence
  Description of Artificial Sequence: Synthetic oligonucleotide
  Sense Strand Starting at position 631 of SEQ ID NO: 319061
cgaagauacugcuuuauua

SEQ ID NO: 368362 - RNA, 19 nt, Artificial Sequence
  Description of Artificial Sequence: Synthetic oligonucleotide
  Antisense Strand to SEQ ID NO: 368361
uaauaaagcaguaucuucg

SEQ ID NO: 368363 - RNA, 19 nt, Artificial Sequence
  Description of Artificial Sequence: Synthetic oligonucleotide
  Sense Strand Starting at position 631 of SEQ ID NO: 319093
gguauugcugucgagaagu

SEQ ID NO: 368364 - RNA, 19 nt, Artificial Sequence
  Description of Artificial Sequence: Synthetic oligonucleotide
  Antisense Strand to SEQ ID NO: 368363
acuucucgacagcaauacc

SEQ ID NO: 368365 - RNA, 19 nt, Artificial Sequence
  Description of Artificial Sequence: Synthetic oligonucleotide
  Sense Strand Starting at position 631 of SEQ ID NO: 319095
uauugcugucgagaaguac

SEQ ID NO: 368366 - RNA, 19 nt, Artificial Sequence
  Description of Artificial Sequence: Synthetic oligonucleotide
  Antisense Strand to SEQ ID NO: 368365
guacuucucgacagcaaua

SEQ ID NO: 368367 - RNA, 19 nt, Artificial Sequence
  Description of Artificial Sequence: Synthetic oligonucleotide
  Sense Strand Starting at position 631 of SEQ ID NO: 319104
cgagaaguacaaugcuguu

SEQ ID NO: 368368 - RNA, 19 nt, Artificial Sequence
  Description of Artificial Sequence: Synthetic oligonucleotide
  Antisense Strand to SEQ ID NO: 368367
aacagcauuguacuucucg

SEQ ID NO: 368369 - RNA, 19 nt, Artificial Sequence
  Description of Artificial Sequence: Synthetic oligonucleotide
  Sense Strand Starting at position 631 of SEQ ID NO: 319110
guacaaugcuguucuuaca

SEQ ID NO: 368370 - RNA, 19 nt, Artificial Sequence
  Description of Artificial Sequence: Synthetic oligonucleotide
  Antisense Strand to SEQ ID NO: 368369
uguaagaacagcauuguac

SEQ ID NO: 368371 - RNA, 19 nt, Artificial Sequence
  Description of Artificial Sequence: Synthetic oligonucleotide
  Sense Strand Starting at position 631 of SEQ ID NO: 319145
guugauguaugcuuaauaa

SEQ ID NO: 368372 - RNA, 19 nt, Artificial Sequence
  Description of Artificial Sequence: Synthetic oligonucleotide
  Antisense Strand to SEQ ID NO: 368371
uuauuaagcauacaucaac

SEQ ID NO: 368373 - RNA, 19 nt, Artificial Sequence
  Description of Artificial Sequence: Synthetic oligonucleotide
  Sense Strand Starting at position 632 of SEQ ID NO: 315272
ccguaaggccugugagcuu

SEQ ID NO: 368374 - RNA, 19 nt, Artificial Sequence
  Description of Artificial Sequence: Synthetic oligonucleotide
  Antisense Strand to SEQ ID NO: 368373
aagcucacaggccuuacgg

SEQ ID NO: 368375 - RNA, 19 nt, Artificial Sequence
  Description of Artificial Sequence: Synthetic oligonucleotide
  Sense Strand Starting at position 632 of SEQ ID NO: 315387
cguuccuuggccggaaaca

SEQ ID NO: 368376 - RNA, 19 nt, Artificial Sequence
  Description of Artificial Sequence: Synthetic oligonucleotide
  Antisense Strand to SEQ ID NO: 368375
uguuuccggccaaggaacg

SEQ ID NO: 368377 - RNA, 19 nt, Artificial Sequence
  Description of Artificial Sequence: Synthetic oligonucleotide
  Sense Strand Starting at position 632 of SEQ ID NO: 315485
gucucugcccuuugagauc

SEQ ID NO: 368378 - RNA, 19 nt, Artificial Sequence
  Description of Artificial Sequence: Synthetic oligonucleotide
  Antisense Strand to SEQ ID NO: 368377
gaucucaaagggcagagac

SEQ ID NO: 368379 - RNA, 19 nt, Artificial Sequence
  Description of Artificial Sequence: Synthetic oligonucleotide
  Sense Strand Starting at position 632 of SEQ ID NO: 315531
gcacuccacucugcugaua

SEQ ID NO: 368380 - RNA, 19 nt, Artificial Sequence
  Description of Artificial Sequence: Synthetic oligonucleotide
  Antisense Strand to SEQ ID NO: 368379
uaucagcagaguggagugc

SEQ ID NO: 368381 - RNA, 19 nt, Artificial Sequence
  Description of Artificial Sequence: Synthetic oligonucleotide
  Sense Strand Starting at position 632 of SEQ ID NO: 315595
caggauuguuccuuugucu

SEQ ID NO: 368382 - RNA, 19 nt, Artificial Sequence
  Description of Artificial Sequence: Synthetic oligonucleotide
  Antisense Strand to SEQ ID NO: 368381
agacaaaggaacaauccug

SEQ ID NO: 368383 - RNA, 19 nt, Artificial Sequence
  Description of Artificial Sequence: Synthetic oligonucleotide
  Sense Strand Starting at position 632 of SEQ ID NO: 315601
uguuccuuugucugggaca

SEQ ID NO: 368384 - RNA, 19 nt, Artificial Sequence
  Description of Artificial Sequence: Synthetic oligonucleotide
  Antisense Strand to SEQ ID NO: 368383
ugucccagacaaaggaaca

SEQ ID NO: 368385 - RNA, 19 nt, Artificial Sequence
  Description of Artificial Sequence: Synthetic oligonucleotide
  Sense Strand Starting at position 632 of SEQ ID NO: 315603
uuccuuugucugggacacu

SEQ ID NO: 368386 - RNA, 19 nt, Artificial Sequence
  Description of Artificial Sequence: Synthetic oligonucleotide
  Antisense Strand to SEQ ID NO: 368385
agugucccagacaaaggaa

SEQ ID NO: 368387 - RNA, 19 nt, Artificial Sequence
  Description of Artificial Sequence: Synthetic oligonucleotide
  Sense Strand Starting at position 632 of SEQ ID NO: 317382
cugggcccuucugaaagau

SEQ ID NO: 368388 - RNA, 19 nt, Artificial Sequence
  Description of Artificial Sequence: Synthetic oligonucleotide
  Antisense Strand to SEQ ID NO: 368387
aucuuucagaagggcccag

SEQ ID NO: 368389 - RNA, 19 nt, Artificial Sequence
  Description of Artificial Sequence: Synthetic oligonucleotide
  Sense Strand Starting at position 632 of SEQ ID NO: 317407
cuggcugccucauuucuaa

SEQ ID NO: 368390 - RNA, 19 nt, Artificial Sequence
  Description of Artificial Sequence: Synthetic oligonucleotide
  Antisense Strand to SEQ ID NO: 368389
uuagaaaugaggcagccag

SEQ ID NO: 368391 - RNA, 19 nt, Artificial Sequence
  Description of Artificial Sequence: Synthetic oligonucleotide
  Sense Strand Starting at position 632 of SEQ ID NO: 317450
cuggauucuuuggucagga

SEQ ID NO: 368392 - RNA, 19 nt, Artificial Sequence
  Description of Artificial Sequence: Synthetic oligonucleotide
  Antisense Strand to SEQ ID NO: 368391
uccugaccaaagaauccag

SEQ ID NO: 368393 - RNA, 19 nt, Artificial Sequence
  Description of Artificial Sequence: Synthetic oligonucleotide
  Sense Strand Starting at position 632 of SEQ ID NO: 317560
ucaugcuuucugggaacuu

SEQ ID NO: 368394 - RNA, 19 nt, Artificial Sequence
  Description of Artificial Sequence: Synthetic oligonucleotide
  Antisense Strand to SEQ ID NO: 368393
aaguucccagaaagcauga

SEQ ID NO: 368395 - RNA, 19 nt, Artificial Sequence
  Description of Artificial Sequence: Synthetic oligonucleotide
  Sense Strand Starting at position 632 of SEQ ID NO: 317606
cggaauaugucucacucca

SEQ ID NO: 368396 - RNA, 19 nt, Artificial Sequence
  Description of Artificial Sequence: Synthetic oligonucleotide
  Antisense Strand to SEQ ID NO: 368395
uggagugagacauauuccg

SEQ ID NO: 368397 - RNA, 19 nt, Artificial Sequence
  Description of Artificial Sequence: Synthetic oligonucleotide
  Sense Strand Starting at position 632 of SEQ ID NO: 317872
gucccuccuccuugcaaga

SEQ ID NO: 368398 - RNA, 19 nt, Artificial Sequence
  Description of Artificial Sequence: Synthetic oligonucleotide
  Antisense Strand to SEQ ID NO: 368397
ucuugcaaggaggagggac

SEQ ID NO: 368399 - RNA, 19 nt, Artificial Sequence
  Description of Artificial Sequence: Synthetic oligonucleotide
  Sense Strand Starting at position 632 of SEQ ID NO: 317897
gaagguaccuuagguaaac

SEQ ID NO: 368400 - RNA, 19 nt, Artificial Sequence
  Description of Artificial Sequence: Synthetic oligonucleotide
  Antisense Strand to SEQ ID NO: 368399
guuuaccuaagguaccuuc

SEQ ID NO: 368401 - RNA, 19 nt, Artificial Sequence
  Description of Artificial Sequence: Synthetic oligonucleotide
  Sense Strand Starting at position 632 of SEQ ID NO: 317947
agggcaugucgcucuguua

SEQ ID NO: 368402 - RNA, 19 nt, Artificial Sequence
  Description of Artificial Sequence: Synthetic oligonucleotide
  Antisense Strand to SEQ ID NO: 368401
uaacagagcgacaugcccu

SEQ ID NO: 368403 - RNA, 19 nt, Artificial Sequence
  Description of Artificial Sequence: Synthetic oligonucleotide
  Sense Strand Starting at position 632 of SEQ ID NO: 317948
gggcaugucgcucuguuaa

SEQ ID NO: 368404 - RNA, 19 nt, Artificial Sequence
  Description of Artificial Sequence: Synthetic oligonucleotide
  Antisense Strand to SEQ ID NO: 368403
uuaacagagcgacaugccc

SEQ ID NO: 368405 - RNA, 19 nt, Artificial Sequence
  Description of Artificial Sequence: Synthetic oligonucleotide
  Sense Strand Starting at position 632 of SEQ ID NO: 317967
gccacaguuucccuuccua

SEQ ID NO: 368406 - RNA, 19 nt, Artificial Sequence
  Description of Artificial Sequence: Synthetic oligonucleotide
  Antisense Strand to SEQ ID NO: 368405
uaggaagggaaacuguggc

SEQ ID NO: 368407 - RNA, 19 nt, Artificial Sequence
  Description of Artificial Sequence: Synthetic oligonucleotide
  Sense Strand Starting at position 632 of SEQ ID NO: 318000
ggcaaaguuagaugcuaag

SEQ ID NO: 368408 - RNA, 19 nt, Artificial Sequence
  Description of Artificial Sequence: Synthetic oligonucleotide
  Antisense Strand to SEQ ID NO: 368407
cuuagcaucuaacuuugcc

SEQ ID NO: 368409 - RNA, 19 nt, Artificial Sequence
  Description of Artificial Sequence: Synthetic oligonucleotide
  Sense Strand Starting at position 632 of SEQ ID NO: 318028
ucaacucugcuggaaguuu

SEQ ID NO: 368410 - RNA, 19 nt, Artificial Sequence
  Description of Artificial Sequence: Synthetic oligonucleotide
  Antisense Strand to SEQ ID NO: 368409
aaacuuccagcagaguuga

SEQ ID NO: 368411 - RNA, 19 nt, Artificial Sequence
  Description of Artificial Sequence: Synthetic oligonucleotide
  Sense Strand Starting at position 632 of SEQ ID NO: 318069
cugggaguacacuauuagu

SEQ ID NO: 368412 - RNA, 19 nt, Artificial Sequence
  Description of Artificial Sequence: Synthetic oligonucleotide
  Antisense Strand to SEQ ID NO: 368411
acuaauaguguacucccag

SEQ ID NO: 368413 - RNA, 19 nt, Artificial Sequence
  Description of Artificial Sequence: Synthetic oligonucleotide
  Sense Strand Starting at position 632 of SEQ ID NO: 318099
uaaggugucagaugugcua

SEQ ID NO: 368414 - RNA, 19 nt, Artificial Sequence
  Description of Artificial Sequence: Synthetic oligonucleotide
  Antisense Strand to SEQ ID NO: 368413
uagcacaucugacaccuua

SEQ ID NO: 368415 - RNA, 19 nt, Artificial Sequence
  Description of Artificial Sequence: Synthetic oligonucleotide
  Sense Strand Starting at position 632 of SEQ ID NO: 318134
ggauucuacuauucuaggu

SEQ ID NO: 368416 - RNA, 19 nt, Artificial Sequence
  Description of Artificial Sequence: Synthetic oligonucleotide
  Antisense Strand to SEQ ID NO: 368415
accuagaauaguagaaucc

SEQ ID NO: 368417 - RNA, 19 nt, Artificial Sequence
  Description of Artificial Sequence: Synthetic oligonucleotide
  Sense Strand Starting at position 632 of SEQ ID NO: 318171
uuaacauucuagggaguga

SEQ ID NO: 368418 - RNA, 19 nt, Artificial Sequence
  Description of Artificial Sequence: Synthetic oligonucleotide
  Antisense Strand to SEQ ID NO: 368417
ucacucccuagaauguuaa

SEQ ID NO: 368419 - RNA, 19 nt, Artificial Sequence
  Description of Artificial Sequence: Synthetic oligonucleotide
  Sense Strand Starting at position 632 of SEQ ID NO: 318175
cauucuagggagugacauu

SEQ ID NO: 368420 - RNA, 19 nt, Artificial Sequence
  Description of Artificial Sequence: Synthetic oligonucleotide
  Antisense Strand to SEQ ID NO: 368419
aaugucacucccuagaaug

SEQ ID NO: 368421 - RNA, 19 nt, Artificial Sequence
  Description of Artificial Sequence: Synthetic oligonucleotide
  Sense Strand Starting at position 632 of SEQ ID NO: 318184
gagugacauucugaauucu

SEQ ID NO: 368422 - RNA, 19 nt, Artificial Sequence
  Description of Artificial Sequence: Synthetic oligonucleotide
  Antisense Strand to SEQ ID NO: 368421
agaauucagaaugucacuc

SEQ ID NO: 368423 - RNA, 19 nt, Artificial Sequence
  Description of Artificial Sequence: Synthetic oligonucleotide
  Sense Strand Starting at position 632 of SEQ ID NO: 318237
ucaggacuuuagcuaucua

SEQ ID NO: 368424 - RNA, 19 nt, Artificial Sequence
  Description of Artificial Sequence: Synthetic oligonucleotide
  Antisense Strand to SEQ ID NO: 368423
uagauagcuaaaguccuga

SEQ ID NO: 368425 - RNA, 19 nt, Artificial Sequence
  Description of Artificial Sequence: Synthetic oligonucleotide
  Sense Strand Starting at position 632 of SEQ ID NO: 318258
cucacuauucuuggugcau

SEQ ID NO: 368426 - RNA, 19 nt, Artificial Sequence
  Description of Artificial Sequence: Synthetic oligonucleotide
  Antisense Strand to SEQ ID NO: 368425
augcaccaagaauagugag

SEQ ID NO: 368427 - RNA, 19 nt, Artificial Sequence
  Description of Artificial Sequence: Synthetic oligonucleotide
  Sense Strand Starting at position 632 of SEQ ID NO: 318259
ucacuauucuuggugcaua

SEQ ID NO: 368428 - RNA, 19 nt, Artificial Sequence
  Description of Artificial Sequence: Synthetic oligonucleotide
  Antisense Strand to SEQ ID NO: 368427
uaugcaccaagaauaguga

SEQ ID NO: 368429 - RNA, 19 nt, Artificial Sequence
  Description of Artificial Sequence: Synthetic oligonucleotide
  Sense Strand Starting at position 632 of SEQ ID NO: 318262
cuauucuuggugcauauua

SEQ ID NO: 368430 - RNA, 19 nt, Artificial Sequence
  Description of Artificial Sequence: Synthetic oligonucleotide
  Antisense Strand to SEQ ID NO: 368429
uaauaugcaccaagaauag

SEQ ID NO: 368431 - RNA, 19 nt, Artificial Sequence
  Description of Artificial Sequence: Synthetic oligonucleotide
  Sense Strand Starting at position 632 of SEQ ID NO: 318321
uugucuauggucugaggga

SEQ ID NO: 368432 - RNA, 19 nt, Artificial Sequence
  Description of Artificial Sequence: Synthetic oligonucleotide
  Antisense Strand to SEQ ID NO: 368431
ucccucagaccauagacaa

SEQ ID NO: 368433 - RNA, 19 nt, Artificial Sequence
  Description of Artificial Sequence: Synthetic oligonucleotide
  Sense Strand Starting at position 632 of SEQ ID NO: 318374
ccuaccuuguucuagacua

SEQ ID NO: 368434 - RNA, 19 nt, Artificial Sequence
  Description of Artificial Sequence: Synthetic oligonucleotide
  Antisense Strand to SEQ ID NO: 368433
uagucuagaacaagguagg

SEQ ID NO: 368435 - RNA, 19 nt, Artificial Sequence
  Description of Artificial Sequence: Synthetic oligonucleotide
  Sense Strand Starting at position 632 of SEQ ID NO: 318468
agccucagucaccaagauu

SEQ ID NO: 368436 - RNA, 19 nt, Artificial Sequence
  Description of Artificial Sequence: Synthetic oligonucleotide
  Antisense Strand to SEQ ID NO: 368435
aaucuuggugacugaggcu

SEQ ID NO: 368437 - RNA, 19 nt, Artificial Sequence
  Description of Artificial Sequence: Synthetic oligonucleotide
  Sense Strand Starting at position 632 of SEQ ID NO: 318484
auuaacuuguucccaaagu

SEQ ID NO: 368438 - RNA, 19 nt, Artificial Sequence
  Description of Artificial Sequence: Synthetic oligonucleotide
  Antisense Strand to SEQ ID NO: 368437
acuuugggaacaaguuaau

SEQ ID NO: 368439 - RNA, 19 nt, Artificial Sequence
  Description of Artificial Sequence: Synthetic oligonucleotide
  Sense Strand Starting at position 632 of SEQ ID NO: 318512
ugcagcuguguguuaaauu

SEQ ID NO: 368440 - RNA, 19 nt, Artificial Sequence
  Description of Artificial Sequence: Synthetic oligonucleotide
  Antisense Strand to SEQ ID NO: 368439
aauuuaacacacagcugca

SEQ ID NO: 368441 - RNA, 19 nt, Artificial Sequence
  Description of Artificial Sequence: Synthetic oligonucleotide
  Sense Strand Starting at position 632 of SEQ ID NO: 318573
ccaucauuccucugaguca

SEQ ID NO: 368442 - RNA, 19 nt, Artificial Sequence
  Description of Artificial Sequence: Synthetic oligonucleotide
  Antisense Strand to SEQ ID NO: 368441
ugacucagaggaaugaugg

SEQ ID NO: 368443 - RNA, 19 nt, Artificial Sequence
  Description of Artificial Sequence: Synthetic oligonucleotide
  Sense Strand Starting at position 632 of SEQ ID NO: 318580
uccucugagucacuuguuu

SEQ ID NO: 368444 - RNA, 19 nt, Artificial Sequence
  Description of Artificial Sequence: Synthetic oligonucleotide
  Antisense Strand to SEQ ID NO: 368443
aaacaagugacucagagga

SEQ ID NO: 368445 - RNA, 19 nt, Artificial Sequence
  Description of Artificial Sequence: Synthetic oligonucleotide
  Sense Strand Starting at position 632 of SEQ ID NO: 318584
cugagucacuuguuuauaa

SEQ ID NO: 368446 - RNA, 19 nt, Artificial Sequence
  Description of Artificial Sequence: Synthetic oligonucleotide
  Antisense Strand to SEQ ID NO: 368445
uuauaaacaagugacucag

SEQ ID NO: 368447 - RNA, 19 nt, Artificial Sequence
  Description of Artificial Sequence: Synthetic oligonucleotide
  Sense Strand Starting at position 632 of SEQ ID NO: 318585
ugagucacuuguuuauaac

SEQ ID NO: 368448 - RNA, 19 nt, Artificial Sequence
  Description of Artificial Sequence: Synthetic oligonucleotide
  Antisense Strand to SEQ ID NO: 368447
guuauaaacaagugacuca

SEQ ID NO: 368449 - RNA, 19 nt, Artificial Sequence
  Description of Artificial Sequence: Synthetic oligonucleotide
  Sense Strand Starting at position 632 of SEQ ID NO: 318682
uugugaucucagcaauauc

SEQ ID NO: 368450 - RNA, 19 nt, Artificial Sequence
  Description of Artificial Sequence: Synthetic oligonucleotide
  Antisense Strand to SEQ ID NO: 368449
gauauugcugagaucacaa

SEQ ID NO: 368451 - RNA, 19 nt, Artificial Sequence
  Description of Artificial Sequence: Synthetic oligonucleotide
  Sense Strand Starting at position 632 of SEQ ID NO: 319040
ggugcaucugaucaucacu

SEQ ID NO: 368452 - RNA, 19 nt, Artificial Sequence
  Description of Artificial Sequence: Synthetic oligonucleotide
  Antisense Strand to SEQ ID NO: 368451
agugaugaucagaugcacc

SEQ ID NO: 368453 - RNA, 19 nt, Artificial Sequence
  Description of Artificial Sequence: Synthetic oligonucleotide
  Sense Strand Starting at position 633 of SEQ ID NO: 315345
aucagauaacuaugucugu

SEQ ID NO: 368454 - RNA, 19 nt, Artificial Sequence
  Description of Artificial Sequence: Synthetic oligonucleotide
  Antisense Strand to SEQ ID NO: 368453
acagacauaguuaucugau

SEQ ID NO: 368455 - RNA, 19 nt, Artificial Sequence
  Description of Artificial Sequence: Synthetic oligonucleotide
  Sense Strand Starting at position 633 of SEQ ID NO: 315453
cugauccugcucuaugaau

SEQ ID NO: 368456 - RNA, 19 nt, Artificial Sequence
  Description of Artificial Sequence: Synthetic oligonucleotide
  Antisense Strand to SEQ ID NO: 368455
auucauagagcaggaucag

SEQ ID NO: 368457 - RNA, 19 nt, Artificial Sequence
  Description of Artificial Sequence: Synthetic oligonucleotide
  Sense Strand Starting at position 633 of SEQ ID NO: 315789
auaagucauccuuagcuga

SEQ ID NO: 368458 - RNA, 19 nt, Artificial Sequence
  Description of Artificial Sequence: Synthetic oligonucleotide
  Antisense Strand to SEQ ID NO: 368457
ucagcuaaggaugacuuau

SEQ ID NO: 368459 - RNA, 19 nt, Artificial Sequence
  Description of Artificial Sequence: Synthetic oligonucleotide
  Sense Strand Starting at position 633 of SEQ ID NO: 315915
agcccugaaaggugaucau

SEQ ID NO: 368460 - RNA, 19 nt, Artificial Sequence
  Description of Artificial Sequence: Synthetic oligonucleotide
  Antisense Strand to SEQ ID NO: 368459
augaucaccuuucagggcu

SEQ ID NO: 368461 - RNA, 19 nt, Artificial Sequence
  Description of Artificial Sequence: Synthetic oligonucleotide
  Sense Strand Starting at position 633 of SEQ ID NO: 315918
ccugaaaggugaucaucau

SEQ ID NO: 368462 - RNA, 19 nt, Artificial Sequence
  Description of Artificial Sequence: Synthetic oligonucleotide
  Antisense Strand to SEQ ID NO: 368461
augaugaucaccuuucagg

SEQ ID NO: 368463 - RNA, 19 nt, Artificial Sequence
  Description of Artificial Sequence: Synthetic oligonucleotide
  Sense Strand Starting at position 633 of SEQ ID NO: 315936
uugugcucaccuuacagau

SEQ ID NO: 368464 - RNA, 19 nt, Artificial Sequence
  Description of Artificial Sequence: Synthetic oligonucleotide
  Antisense Strand to SEQ ID NO: 368463
aucuguaaggugagcacaa

SEQ ID NO: 368465 - RNA, 19 nt, Artificial Sequence
  Description of Artificial Sequence: Synthetic oligonucleotide
  Sense Strand Starting at position 633 of SEQ ID NO: 315977
cuuugugacuugccuaaag

SEQ ID NO: 368466 - RNA, 19 nt, Artificial Sequence
  Description of Artificial Sequence: Synthetic oligonucleotide
  Antisense Strand to SEQ ID NO: 368465
cuuuaggcaagucacaaag

SEQ ID NO: 368467 - RNA, 19 nt, Artificial Sequence
  Description of Artificial Sequence: Synthetic oligonucleotide
  Sense Strand Starting at position 633 of SEQ ID NO: 315979
uugugacuugccuaaaguu

SEQ ID NO: 368468 - RNA, 19 nt, Artificial Sequence
  Description of Artificial Sequence: Synthetic oligonucleotide
  Antisense Strand to SEQ ID NO: 368467
aacuuuaggcaagucacaa

SEQ ID NO: 368469 - RNA, 19 nt, Artificial Sequence
  Description of Artificial Sequence: Synthetic oligonucleotide
  Sense Strand Starting at position 633 of SEQ ID NO: 316032
aggccuucccacuaugaga

SEQ ID NO: 368470 - RNA, 19 nt, Artificial Sequence
  Description of Artificial Sequence: Synthetic oligonucleotide
  Antisense Strand to SEQ ID NO: 368469
ucucauagugggaaggccu

SEQ ID NO: 368471 - RNA, 19 nt, Artificial Sequence
  Description of Artificial Sequence: Synthetic oligonucleotide
  Sense Strand Starting at position 633 of SEQ ID NO: 316201
augucuguugauuaacaaa

SEQ ID NO: 368472 - RNA, 19 nt, Artificial Sequence
  Description of Artificial Sequence: Synthetic oligonucleotide
  Antisense Strand to SEQ ID NO: 368471
uuuguuaaucaacagacau

SEQ ID NO: 368473 - RNA, 19 nt, Artificial Sequence
  Description of Artificial Sequence: Synthetic oligonucleotide
  Sense Strand Starting at position 633 of SEQ ID NO: 316872
uaggcaugcugaccugaaa

SEQ ID NO: 368474 - RNA, 19 nt, Artificial Sequence
  Description of Artificial Sequence: Synthetic oligonucleotide
  Antisense Strand to SEQ ID NO: 368473
uuucaggucagcaugccua

SEQ ID NO: 368475 - RNA, 19 nt, Artificial Sequence
  Description of Artificial Sequence: Synthetic oligonucleotide
  Sense Strand Starting at position 633 of SEQ ID NO: 316923
gcaggagaauuccugaaug

SEQ ID NO: 368476 - RNA, 19 nt, Artificial Sequence
  Description of Artificial Sequence: Synthetic oligonucleotide
  Antisense Strand to SEQ ID NO: 368475
cauucaggaauucuccugc

SEQ ID NO: 368477 - RNA, 19 nt, Artificial Sequence
  Description of Artificial Sequence: Synthetic oligonucleotide
  Sense Strand Starting at position 633 of SEQ ID NO: 317014
gagagucccgcgucgucaa

SEQ ID NO: 368478 - RNA, 19 nt, Artificial Sequence
  Description of Artificial Sequence: Synthetic oligonucleotide
  Antisense Strand to SEQ ID NO: 368477
uugacgacgcgggacucuc

SEQ ID NO: 368479 - RNA, 19 nt, Artificial Sequence
  Description of Artificial Sequence: Synthetic oligonucleotide
  Sense Strand Starting at position 633 of SEQ ID NO: 317083
gagggcucaucuguagaag

SEQ ID NO: 368480 - RNA, 19 nt, Artificial Sequence
  Description of Artificial Sequence: Synthetic oligonucleotide
  Antisense Strand to SEQ ID NO: 368479
cuucuacagaugagcccuc

SEQ ID NO: 368481 - RNA, 19 nt, Artificial Sequence
  Description of Artificial Sequence: Synthetic oligonucleotide
  Sense Strand Starting at position 633 of SEQ ID NO: 317341
uucuuucugugaguaauca

SEQ ID NO: 368482 - RNA, 19 nt, Artificial Sequence
  Description of Artificial Sequence: Synthetic oligonucleotide
  Antisense Strand to SEQ ID NO: 368481
ugauuacucacagaaagaa

SEQ ID NO: 368483 - RNA, 19 nt, Artificial Sequence
  Description of Artificial Sequence: Synthetic oligonucleotide
  Sense Strand Starting at position 633 of SEQ ID NO: 317342
ucuuucugugaguaaucac

SEQ ID NO: 368484 - RNA, 19 nt, Artificial Sequence
  Description of Artificial Sequence: Synthetic oligonucleotide
  Antisense Strand to SEQ ID NO: 368483
gugauuacucacagaaaga

SEQ ID NO: 368485 - RNA, 19 nt, Artificial Sequence
  Description of Artificial Sequence: Synthetic oligonucleotide
  Sense Strand Starting at position 633 of SEQ ID NO: 317350
ugaguaaucacaggguuag

SEQ ID NO: 368486 - RNA, 19 nt, Artificial Sequence
  Description of Artificial Sequence: Synthetic oligonucleotide
  Antisense Strand to SEQ ID NO: 368485
cuaacccugugauuacuca

SEQ ID NO: 368487 - RNA, 19 nt, Artificial Sequence
  Description of Artificial Sequence: Synthetic oligonucleotide
  Sense Strand Starting at position 633 of SEQ ID NO: 317351
gaguaaucacaggguuaga

SEQ ID NO: 368488 - RNA, 19 nt, Artificial Sequence
  Description of Artificial Sequence: Synthetic oligonucleotide
  Antisense Strand to SEQ ID NO: 368487
ucuaacccugugauuacuc

SEQ ID NO: 368489 - RNA, 19 nt, Artificial Sequence
  Description of Artificial Sequence: Synthetic oligonucleotide
  Sense Strand Starting at position 633 of SEQ ID NO: 317376
uuagaauagguguguggga

SEQ ID NO: 368490 - RNA, 19 nt, Artificial Sequence
  Description of Artificial Sequence: Synthetic oligonucleotide
  Antisense Strand to SEQ ID NO: 368489
ucccacacaccuauucuaa

SEQ ID NO: 368491 - RNA, 19 nt, Artificial Sequence
  Description of Artificial Sequence: Synthetic oligonucleotide
  Sense Strand Starting at position 633 of SEQ ID NO: 317407
agaggaguguccucucaga

SEQ ID NO: 368492 - RNA, 19 nt, Artificial Sequence
  Description of Artificial Sequence: Synthetic oligonucleotide
  Antisense Strand to SEQ ID NO: 368491
ucugagaggacacuccucu

SEQ ID NO: 368493 - RNA, 19 nt, Artificial Sequence
  Description of Artificial Sequence: Synthetic oligonucleotide
  Sense Strand Starting at position 633 of SEQ ID NO: 317470
ucauauccgugagcaggaa

SEQ ID NO: 368494 - RNA, 19 nt, Artificial Sequence
  Description of Artificial Sequence: Synthetic oligonucleotide
  Antisense Strand to SEQ ID NO: 368493
uuccugcucacggauauga

SEQ ID NO: 368495 - RNA, 19 nt, Artificial Sequence
  Description of Artificial Sequence: Synthetic oligonucleotide
  Sense Strand Starting at position 633 of SEQ ID NO: 317533
uaacccaagucgucaauga

SEQ ID NO: 368496 - RNA, 19 nt, Artificial Sequence
  Description of Artificial Sequence: Synthetic oligonucleotide
  Antisense Strand to SEQ ID NO: 368495
ucauugacgacuuggguua

SEQ ID NO: 368497 - RNA, 19 nt, Artificial Sequence
  Description of Artificial Sequence: Synthetic oligonucleotide
  Sense Strand Starting at position 633 of SEQ ID NO: 317599
cuccuaguggcucaauaac

SEQ ID NO: 368498 - RNA, 19 nt, Artificial Sequence
  Description of Artificial Sequence: Synthetic oligonucleotide
  Antisense Strand to SEQ ID NO: 368497
guuauugagccacuaggag

SEQ ID NO: 368499 - RNA, 19 nt, Artificial Sequence
  Description of Artificial Sequence: Synthetic oligonucleotide
  Sense Strand Starting at position 633 of SEQ ID NO: 317650
agucuaugauccucccacu

SEQ ID NO: 368500 - RNA, 19 nt, Artificial Sequence
  Description of Artificial Sequence: Synthetic oligonucleotide
  Antisense Strand to SEQ ID NO: 368499
agugggaggaucauagacu

SEQ ID NO: 368501 - RNA, 19 nt, Artificial Sequence
  Description of Artificial Sequence: Synthetic oligonucleotide
  Sense Strand Starting at position 633 of SEQ ID NO: 317715
cuuuguaaaccauggaaac

SEQ ID NO: 368502 - RNA, 19 nt, Artificial Sequence
  Description of Artificial Sequence: Synthetic oligonucleotide
  Antisense Strand to SEQ ID NO: 368501
guuuccaugguuuacaaag

SEQ ID NO: 368503 - RNA, 19 nt, Artificial Sequence
  Description of Artificial Sequence: Synthetic oligonucleotide
  Sense Strand Starting at position 633 of SEQ ID NO: 317853
aaaugucuauuguuucgaa

SEQ ID NO: 368504 - RNA, 19 nt, Artificial Sequence
  Description of Artificial Sequence: Synthetic oligonucleotide
  Antisense Strand to SEQ ID NO: 368503
uucgaaacaauagacauuu

SEQ ID NO: 368505 - RNA, 19 nt, Artificial Sequence
  Description of Artificial Sequence: Synthetic oligonucleotide
  Sense Strand Starting at position 633 of SEQ ID NO: 317860
uauuguuucgaauaugcuu

SEQ ID NO: 368506 - RNA, 19 nt, Artificial Sequence
  Description of Artificial Sequence: Synthetic oligonucleotide
  Antisense Strand to SEQ ID NO: 368505
aagcauauucgaaacaaua

SEQ ID NO: 368507 - RNA, 19 nt, Artificial Sequence
  Description of Artificial Sequence: Synthetic oligonucleotide
  Sense Strand Starting at position 633 of SEQ ID NO: 318042
gcaugucucaguuaaguag

SEQ ID NO: 368508 - RNA, 19 nt, Artificial Sequence
  Description of Artificial Sequence: Synthetic oligonucleotide
  Antisense Strand to SEQ ID NO: 368507
cuacuuaacugagacaugc

SEQ ID NO: 368509 - RNA, 19 nt, Artificial Sequence
  Description of Artificial Sequence: Synthetic oligonucleotide
  Sense Strand Starting at position 633 of SEQ ID NO: 318046
gucucaguuaaguaguaau

SEQ ID NO: 368510 - RNA, 19 nt, Artificial Sequence
  Description of Artificial Sequence: Synthetic oligonucleotide
  Antisense Strand to SEQ ID NO: 368509
auuacuacuuaacugagac

SEQ ID NO: 368511 - RNA, 19 nt, Artificial Sequence
  Description of Artificial Sequence: Synthetic oligonucleotide
  Sense Strand Starting at position 633 of SEQ ID NO: 318113
guaucaguuagcguucucu

SEQ ID NO: 368512 - RNA, 19 nt, Artificial Sequence
  Description of Artificial Sequence: Synthetic oligonucleotide
  Antisense Strand to SEQ ID NO: 368511
agagaacgcuaacugauac

SEQ ID NO: 368513 - RNA, 19 nt, Artificial Sequence
  Description of Artificial Sequence: Synthetic oligonucleotide
  Sense Strand Starting at position 633 of SEQ ID NO: 318165
gguauuucuuagcccagca

SEQ ID NO: 368514 - RNA, 19 nt, Artificial Sequence
  Description of Artificial Sequence: Synthetic oligonucleotide
  Antisense Strand to SEQ ID NO: 368513
ugcugggcuaagaaauacc

SEQ ID NO: 368515 - RNA, 19 nt, Artificial Sequence
  Description of Artificial Sequence: Synthetic oligonucleotide
  Sense Strand Starting at position 633 of SEQ ID NO: 318217
agucauacccagcauaaug

SEQ ID NO: 368516 - RNA, 19 nt, Artificial Sequence
  Description of Artificial Sequence: Synthetic oligonucleotide
  Antisense Strand to SEQ ID NO: 368515
cauuaugcuggguaugacu

SEQ ID NO: 368517 - RNA, 19 nt, Artificial Sequence
  Description of Artificial Sequence: Synthetic oligonucleotide
  Sense Strand Starting at position 633 of SEQ ID NO: 318291
ggcauagcagagggaaauu

SEQ ID NO: 368518 - RNA, 19 nt, Artificial Sequence
  Description of Artificial Sequence: Synthetic oligonucleotide
  Antisense Strand to SEQ ID NO: 368517
aauuucccucugcuaugcc

SEQ ID NO: 368519 - RNA, 19 nt, Artificial Sequence
  Description of Artificial Sequence: Synthetic oligonucleotide
  Sense Strand Starting at position 633 of SEQ ID NO: 318343
ugagaagucgcaugacaga

SEQ ID NO: 368520 - RNA, 19 nt, Artificial Sequence
  Description of Artificial Sequence: Synthetic oligonucleotide
  Antisense Strand to SEQ ID NO: 368519
ucugucaugcgacuucuca

SEQ ID NO: 368521 - RNA, 19 nt, Artificial Sequence
  Description of Artificial Sequence: Synthetic oligonucleotide
  Sense Strand Starting at position 633 of SEQ ID NO: 318428
aagccaaaggccugagaau

SEQ ID NO: 368522 - RNA, 19 nt, Artificial Sequence
  Description of Artificial Sequence: Synthetic oligonucleotide
  Antisense Strand to SEQ ID NO: 368521
auucucaggccuuuggcuu

SEQ ID NO: 368523 - RNA, 19 nt, Artificial Sequence
  Description of Artificial Sequence: Synthetic oligonucleotide
  Sense Strand Starting at position 633 of SEQ ID NO: 318623
gagaguguaucuucucuac

SEQ ID NO: 368524 - RNA, 19 nt, Artificial Sequence
  Description of Artificial Sequence: Synthetic oligonucleotide
  Antisense Strand to SEQ ID NO: 368523
guagagaagauacacucuc

SEQ ID NO: 368525 - RNA, 19 nt, Artificial Sequence
  Description of Artificial Sequence: Synthetic oligonucleotide
  Sense Strand Starting at position 633 of SEQ ID NO: 318721
agguauuucuuagcccagu

SEQ ID NO: 368526 - RNA, 19 nt, Artificial Sequence
  Description of Artificial Sequence: Synthetic oligonucleotide
  Antisense Strand to SEQ ID NO: 368525
acugggcuaagaaauaccu

SEQ ID NO: 368527 - RNA, 19 nt, Artificial Sequence
  Description of Artificial Sequence: Synthetic oligonucleotide
  Sense Strand Starting at position 633 of SEQ ID NO: 318722
gguauuucuuagcccagua

SEQ ID NO: 368528 - RNA, 19 nt, Artificial Sequence
  Description of Artificial Sequence: Synthetic oligonucleotide
  Antisense Strand to SEQ ID NO: 368527
uacugggcuaagaaauacc

SEQ ID NO: 368529 - RNA, 19 nt, Artificial Sequence
  Description of Artificial Sequence: Synthetic oligonucleotide
  Sense Strand Starting at position 633 of SEQ ID NO: 318819
auacaauuguggucccaaa

SEQ ID NO: 368530 - RNA, 19 nt, Artificial Sequence
  Description of Artificial Sequence: Synthetic oligonucleotide
  Antisense Strand to SEQ ID NO: 368529
uuugggaccacaauuguau

SEQ ID NO: 368531 - RNA, 19 nt, Artificial Sequence
  Description of Artificial Sequence: Synthetic oligonucleotide
  Sense Strand Starting at position 633 of SEQ ID NO: 319206
auauguaaaugccuagcaa

SEQ ID NO: 368532 - RNA, 19 nt, Artificial Sequence
  Description of Artificial Sequence: Synthetic oligonucleotide
  Antisense Strand to SEQ ID NO: 368531
uugcuaggcauuuacauau

SEQ ID NO: 368533 - RNA, 19 nt, Artificial Sequence
  Description of Artificial Sequence: Synthetic oligonucleotide
  Sense Strand Starting at position 634 of SEQ ID NO: 315387
aauaaacuguugcuugaga

SEQ ID NO: 368534 - RNA, 19 nt, Artificial Sequence
  Description of Artificial Sequence: Synthetic oligonucleotide
  Antisense Strand to SEQ ID NO: 368533
ucucaagcaacaguuuauu

SEQ ID NO: 368535 - RNA, 19 nt, Artificial Sequence
  Description of Artificial Sequence: Synthetic oligonucleotide
  Sense Strand Starting at position 634 of SEQ ID NO: 315388
auaaacuguugcuugagau

SEQ ID NO: 368536 - RNA, 19 nt, Artificial Sequence
  Description of Artificial Sequence: Synthetic oligonucleotide
  Antisense Strand to SEQ ID NO: 368535
aucucaagcaacaguuuau

SEQ ID NO: 368537 - RNA, 19 nt, Artificial Sequence
  Description of Artificial Sequence: Synthetic oligonucleotide
  Sense Strand Starting at position 634 of SEQ ID NO: 315389
uaaacuguugcuugagauc

SEQ ID NO: 368538 - RNA, 19 nt, Artificial Sequence
  Description of Artificial Sequence: Synthetic oligonucleotide
  Antisense Strand to SEQ ID NO: 368537
gaucucaagcaacaguuua

SEQ ID NO: 368539 - RNA, 19 nt, Artificial Sequence
  Description of Artificial Sequence: Synthetic oligonucleotide
  Sense Strand Starting at position 634 of SEQ ID NO: 315400
uugagaucaccaugaagca

SEQ ID NO: 368540 - RNA, 19 nt, Artificial Sequence
  Description of Artificial Sequence: Synthetic oligonucleotide
  Antisense Strand to SEQ ID NO: 368539
ugcuucauggugaucucaa

SEQ ID NO: 368541 - RNA, 19 nt, Artificial Sequence
  Description of Artificial Sequence: Synthetic oligonucleotide
  Sense Strand Starting at position 634 of SEQ ID NO: 315415
agcagaauuucucacauga

SEQ ID NO: 368542 - RNA, 19 nt, Artificial Sequence
  Description of Artificial Sequence: Synthetic oligonucleotide
  Antisense Strand to SEQ ID NO: 368541
ucaugugagaaauucugcu

SEQ ID NO: 368543 - RNA, 19 nt, Artificial Sequence
  Description of Artificial Sequence: Synthetic oligonucleotide
  Sense Strand Starting at position 634 of SEQ ID NO: 315436
guacuagauuaugaaagaa

SEQ ID NO: 368544 - RNA, 19 nt, Artificial Sequence
  Description of Artificial Sequence: Synthetic oligonucleotide
  Antisense Strand to SEQ ID NO: 368543
uucuuucauaaucuaguac

SEQ ID NO: 368545 - RNA, 19 nt, Artificial Sequence
  Description of Artificial Sequence: Synthetic oligonucleotide
  Sense Strand Starting at position 634 of SEQ ID NO: 315555
guaaccaauugcuugacau

SEQ ID NO: 368546 - RNA, 19 nt, Artificial Sequence
  Description of Artificial Sequence: Synthetic oligonucleotide
  Antisense Strand to SEQ ID NO: 368545
augucaagcaauugguuac

SEQ ID NO: 368547 - RNA, 19 nt, Artificial Sequence
  Description of Artificial Sequence: Synthetic oligonucleotide
  Sense Strand Starting at position 634 of SEQ ID NO: 315620
uugaaagauugguauuucu

SEQ ID NO: 368548 - RNA, 19 nt, Artificial Sequence
  Description of Artificial Sequence: Synthetic oligonucleotide
  Antisense Strand to SEQ ID NO: 368547
agaaauaccaaucuuucaa

SEQ ID NO: 368549 - RNA, 19 nt, Artificial Sequence
  Description of Artificial Sequence: Synthetic oligonucleotide
  Sense Strand Starting at position 634 of SEQ ID NO: 315629
ugguauuucuuugaaccau

SEQ ID NO: 368550 - RNA, 19 nt, Artificial Sequence
  Description of Artificial Sequence: Synthetic oligonucleotide
  Antisense Strand to SEQ ID NO: 368549
augguucaaagaaauacca

SEQ ID NO: 368551 - RNA, 19 nt, Artificial Sequence
  Description of Artificial Sequence: Synthetic oligonucleotide
  Sense Strand Starting at position 634 of SEQ ID NO: 315674
uggagugcaucauugcaau

SEQ ID NO: 368552 - RNA, 19 nt, Artificial Sequence
  Description of Artificial Sequence: Synthetic oligonucleotide
  Antisense Strand to SEQ ID NO: 368551
auugcaaugaugcacucca

SEQ ID NO: 368553 - RNA, 19 nt, Artificial Sequence
  Description of Artificial Sequence: Synthetic oligonucleotide
  Sense Strand Starting at position 634 of SEQ ID NO: 315753
cugucuaauuccguagaau

SEQ ID NO: 368554 - RNA, 19 nt, Artificial Sequence
  Description of Artificial Sequence: Synthetic oligonucleotide
  Antisense Strand to SEQ ID NO: 368553
auucuacggaauuagacag

SEQ ID NO: 368555 - RNA, 19 nt, Artificial Sequence
  Description of Artificial Sequence: Synthetic oligonucleotide
  Sense Strand Starting at position 634 of SEQ ID NO: 315754
ugucuaauuccguagaauc

SEQ ID NO: 368556 - RNA, 19 nt, Artificial Sequence
  Description of Artificial Sequence: Synthetic oligonucleotide
  Antisense Strand to SEQ ID NO: 368555
gauucuacggaauuagaca

SEQ ID NO: 368557 - RNA, 19 nt, Artificial Sequence
  Description of Artificial Sequence: Synthetic oligonucleotide
  Sense Strand Starting at position 634 of SEQ ID NO: 315826
ccauuaaagguuuggaguu

SEQ ID NO: 368558 - RNA, 19 nt, Artificial Sequence
  Description of Artificial Sequence: Synthetic oligonucleotide
  Antisense Strand to SEQ ID NO: 368557
aacuccaaaccuuuaaugg

SEQ ID NO: 368559 - RNA, 19 nt, Artificial Sequence
  Description of Artificial Sequence: Synthetic oligonucleotide
  Sense Strand Starting at position 634 of SEQ ID NO: 315888
gcugcagucuaacuaaauu

SEQ ID NO: 368560 - RNA, 19 nt, Artificial Sequence
  Description of Artificial Sequence: Synthetic oligonucleotide
  Antisense Strand to SEQ ID NO: 368559
aauuuaguuagacugcagc

SEQ ID NO: 368561 - RNA, 19 nt, Artificial Sequence
  Description of Artificial Sequence: Synthetic oligonucleotide
  Sense Strand Starting at position 634 of SEQ ID NO: 316051
gagagugguaucugucuuu

SEQ ID NO: 368562 - RNA, 19 nt, Artificial Sequence
  Description of Artificial Sequence: Synthetic oligonucleotide
  Antisense Strand to SEQ ID NO: 368561
aaagacagauaccacucuc

SEQ ID NO: 368563 - RNA, 19 nt, Artificial Sequence
  Description of Artificial Sequence: Synthetic oligonucleotide
  Sense Strand Starting at position 634 of SEQ ID NO: 316056
ugguaucugucuuuccaca

SEQ ID NO: 368564 - RNA, 19 nt, Artificial Sequence
  Description of Artificial Sequence: Synthetic oligonucleotide
  Antisense Strand to SEQ ID NO: 368563
uguggaaagacagauacca

SEQ ID NO: 368565 - RNA, 19 nt, Artificial Sequence
  Description of Artificial Sequence: Synthetic oligonucleotide
  Sense Strand Starting at position 634 of SEQ ID NO: 316058
guaucugucuuuccacaag

SEQ ID NO: 368566 - RNA, 19 nt, Artificial Sequence
  Description of Artificial Sequence: Synthetic oligonucleotide
  Antisense Strand to SEQ ID NO: 368565
cuuguggaaagacagauac

SEQ ID NO: 368567 - RNA, 19 nt, Artificial Sequence
  Description of Artificial Sequence: Synthetic oligonucleotide
  Sense Strand Starting at position 634 of SEQ ID NO: 316079
guaagcuucuaccuuugau

SEQ ID NO: 368568 - RNA, 19 nt, Artificial Sequence
  Description of Artificial Sequence: Synthetic oligonucleotide
  Antisense Strand to SEQ ID NO: 368567
aucaaagguagaagcuuac

SEQ ID NO: 368569 - RNA, 19 nt, Artificial Sequence
  Description of Artificial Sequence: Synthetic oligonucleotide
  Sense Strand Starting at position 634 of SEQ ID NO: 316082
agcuucuaccuuugaugau

SEQ ID NO: 368570 - RNA, 19 nt, Artificial Sequence
  Description of Artificial Sequence: Synthetic oligonucleotide
  Antisense Strand to SEQ ID NO: 368569
aucaucaaagguagaagcu

SEQ ID NO: 368571 - RNA, 19 nt, Artificial Sequence
  Description of Artificial Sequence: Synthetic oligonucleotide
  Sense Strand Starting at position 634 of SEQ ID NO: 316748
uggacuccuagugauagua

SEQ ID NO: 368572 - RNA, 19 nt, Artificial Sequence
  Description of Artificial Sequence: Synthetic oligonucleotide
  Antisense Strand to SEQ ID NO: 368571
uacuaucacuaggagucca

SEQ ID NO: 368573 - RNA, 19 nt, Artificial Sequence
  Description of Artificial Sequence: Synthetic oligonucleotide
  Sense Strand Starting at position 634 of SEQ ID NO: 317350
ggaaacaagugccuacuaa

SEQ ID NO: 368574 - RNA, 19 nt, Artificial Sequence
  Description of Artificial Sequence: Synthetic oligonucleotide
  Antisense Strand to SEQ ID NO: 368573
uuaguaggcacuuguuucc

SEQ ID NO: 368575 - RNA, 19 nt, Artificial Sequence
  Description of Artificial Sequence: Synthetic oligonucleotide
  Sense Strand Starting at position 634 of SEQ ID NO: 317409
aggucacuacauggguaaa

SEQ ID NO: 368576 - RNA, 19 nt, Artificial Sequence
  Description of Artificial Sequence: Synthetic oligonucleotide
  Antisense Strand to SEQ ID NO: 368575
uuuacccauguagugaccu

SEQ ID NO: 368577 - RNA, 19 nt, Artificial Sequence
  Description of Artificial Sequence: Synthetic oligonucleotide
  Sense Strand Starting at position 634 of SEQ ID NO: 317411
gucacuacauggguaaaca

SEQ ID NO: 368578 - RNA, 19 nt, Artificial Sequence
  Description of Artificial Sequence: Synthetic oligonucleotide
  Antisense Strand to SEQ ID NO: 368577
uguuuacccauguagugac

SEQ ID NO: 368579 - RNA, 19 nt, Artificial Sequence
  Description of Artificial Sequence: Synthetic oligonucleotide
  Sense Strand Starting at position 634 of SEQ ID NO: 317419
auggguaaacaaugcaaga

SEQ ID NO: 368580 - RNA, 19 nt, Artificial Sequence
  Description of Artificial Sequence: Synthetic oligonucleotide
  Antisense Strand to SEQ ID NO: 368579
ucuugcauuguuuacccau

SEQ ID NO: 368581 - RNA, 19 nt, Artificial Sequence
  Description of Artificial Sequence: Synthetic oligonucleotide
  Sense Strand Starting at position 634 of SEQ ID NO: 317430
augcaagaaugaguacaau

SEQ ID NO: 368582 - RNA, 19 nt, Artificial Sequence
  Description of Artificial Sequence: Synthetic oligonucleotide
  Antisense Strand to SEQ ID NO: 368581
auuguacucauucuugcau

SEQ ID NO: 368583 - RNA, 19 nt, Artificial Sequence
  Description of Artificial Sequence: Synthetic oligonucleotide
  Sense Strand Starting at position 634 of SEQ ID NO: 317442
guacaaugugcagacacau

SEQ ID NO: 368584 - RNA, 19 nt, Artificial Sequence
  Description of Artificial Sequence: Synthetic oligonucleotide
  Antisense Strand to SEQ ID NO: 368583
augugucugcacauuguac

SEQ ID NO: 368585 - RNA, 19 nt, Artificial Sequence
  Description of Artificial Sequence: Synthetic oligonucleotide
  Sense Strand Starting at position 634 of SEQ ID NO: 317467
caaaguuucuuugcaggau

SEQ ID NO: 368586 - RNA, 19 nt, Artificial Sequence
  Description of Artificial Sequence: Synthetic oligonucleotide
  Antisense Strand to SEQ ID NO: 368585
auccugcaaagaaacuuug

SEQ ID NO: 368587 - RNA, 19 nt, Artificial Sequence
  Description of Artificial Sequence: Synthetic oligonucleotide
  Sense Strand Starting at position 634 of SEQ ID NO: 317822
ugccgaguacuuugaacug

SEQ ID NO: 368588 - RNA, 19 nt, Artificial Sequence
  Description of Artificial Sequence: Synthetic oligonucleotide
  Antisense Strand to SEQ ID NO: 368587
caguucaaaguacucggca

SEQ ID NO: 368589 - RNA, 19 nt, Artificial Sequence
  Description of Artificial Sequence: Synthetic oligonucleotide
  Sense Strand Starting at position 634 of SEQ ID NO: 318037
gggaaacuauauuacagaa

SEQ ID NO: 368590 - RNA, 19 nt, Artificial Sequence
  Description of Artificial Sequence: Synthetic oligonucleotide
  Antisense Strand to SEQ ID NO: 368589
uucuguaauauaguuuccc

SEQ ID NO: 368591 - RNA, 19 nt, Artificial Sequence
  Description of Artificial Sequence: Synthetic oligonucleotide
  Sense Strand Starting at position 634 of SEQ ID NO: 318093
uugauaaucucagcagaag

SEQ ID NO: 368592 - RNA, 19 nt, Artificial Sequence
  Description of Artificial Sequence: Synthetic oligonucleotide
  Antisense Strand to SEQ ID NO: 368591
cuucugcugagauuaucaa

SEQ ID NO: 368593 - RNA, 19 nt, Artificial Sequence
  Description of Artificial Sequence: Synthetic oligonucleotide
  Sense Strand Starting at position 634 of SEQ ID NO: 318094
ugauaaucucagcagaagu

SEQ ID NO: 368594 - RNA, 19 nt, Artificial Sequence
  Description of Artificial Sequence: Synthetic oligonucleotide
  Antisense Strand to SEQ ID NO: 368593
acuucugcugagauuauca

SEQ ID NO: 368595 - RNA, 19 nt, Artificial Sequence
  Description of Artificial Sequence: Synthetic oligonucleotide
  Sense Strand Starting at position 634 of SEQ ID NO: 318109
aagugugaggcuugauggu

SEQ ID NO: 368596 - RNA, 19 nt, Artificial Sequence
  Description of Artificial Sequence: Synthetic oligonucleotide
  Antisense Strand to SEQ ID NO: 368595
accaucaagccucacacuu

SEQ ID NO: 368597 - RNA, 19 nt, Artificial Sequence
  Description of Artificial Sequence: Synthetic oligonucleotide
  Sense Strand Starting at position 634 of SEQ ID NO: 318315
aauccuaguugcucgggaa

SEQ ID NO: 368598 - RNA, 19 nt, Artificial Sequence
  Description of Artificial Sequence: Synthetic oligonucleotide
  Antisense Strand to SEQ ID NO: 368597
uucccgagcaacuaggauu

SEQ ID NO: 368599 - RNA, 19 nt, Artificial Sequence
  Description of Artificial Sequence: Synthetic oligonucleotide
  Sense Strand Starting at position 634 of SEQ ID NO: 318585
ggacauagauguuuggacu

SEQ ID NO: 368600 - RNA, 19 nt, Artificial Sequence
  Description of Artificial Sequence: Synthetic oligonucleotide
  Antisense Strand to SEQ ID NO: 368599
aguccaaacaucuaugucc

SEQ ID NO: 368601 - RNA, 19 nt, Artificial Sequence
  Description of Artificial Sequence: Synthetic oligonucleotide
  Sense Strand Starting at position 634 of SEQ ID NO: 318586
gacauagauguuuggacua

SEQ ID NO: 368602 - RNA, 19 nt, Artificial Sequence
  Description of Artificial Sequence: Synthetic oligonucleotide
  Antisense Strand to SEQ ID NO: 368601
uaguccaaacaucuauguc

SEQ ID NO: 368603 - RNA, 19 nt, Artificial Sequence
  Description of Artificial Sequence: Synthetic oligonucleotide
  Sense Strand Starting at position 634 of SEQ ID NO: 319063
cccagaugcuaugucuaau

SEQ ID NO: 368604 - RNA, 19 nt, Artificial Sequence
  Description of Artificial Sequence: Synthetic oligonucleotide
  Antisense Strand to SEQ ID NO: 368603
auuagacauagcaucuggg

SEQ ID NO: 368605 - RNA, 19 nt, Artificial Sequence
  Description of Artificial Sequence: Synthetic oligonucleotide
  Sense Strand Starting at position 634 of SEQ ID NO: 319066
agaugcuaugucuaauauu

SEQ ID NO: 368606 - RNA, 19 nt, Artificial Sequence
  Description of Artificial Sequence: Synthetic oligonucleotide
  Antisense Strand to SEQ ID NO: 368605
aauauuagacauagcaucu

SEQ ID NO: 368607 - RNA, 19 nt, Artificial Sequence
  Description of Artificial Sequence: Synthetic oligonucleotide
  Sense Strand Starting at position 634 of SEQ ID NO: 319154
gguugauugaauuggauau

SEQ ID NO: 368608 - RNA, 19 nt, Artificial Sequence
  Description of Artificial Sequence: Synthetic oligonucleotide
  Antisense Strand to SEQ ID NO: 368607
auauccaauucaaucaacc

SEQ ID NO: 368609 - RNA, 19 nt, Artificial Sequence
  Description of Artificial Sequence: Synthetic oligonucleotide
  Sense Strand Starting at position 634 of SEQ ID NO: 319155
guugauugaauuggauaug

SEQ ID NO: 368610 - RNA, 19 nt, Artificial Sequence
  Description of Artificial Sequence: Synthetic oligonucleotide
  Antisense Strand to SEQ ID NO: 368609
cauauccaauucaaucaac

SEQ ID NO: 368611 - RNA, 19 nt, Artificial Sequence
  Description of Artificial Sequence: Synthetic oligonucleotide
  Sense Strand Starting at position 634 of SEQ ID NO: 319156
uugauugaauuggauauga

SEQ ID NO: 368612 - RNA, 19 nt, Artificial Sequence
  Description of Artificial Sequence: Synthetic oligonucleotide
  Antisense Strand to SEQ ID NO: 368611
ucauauccaauucaaucaa

SEQ ID NO: 368613 - RNA, 19 nt, Artificial Sequence
  Description of Artificial Sequence: Synthetic oligonucleotide
  Sense Strand Starting at position 635 of SEQ ID NO: 315337
ucuagaagaucacucugua

SEQ ID NO: 368614 - RNA, 19 nt, Artificial Sequence
  Description of Artificial Sequence: Synthetic oligonucleotide
  Antisense Strand to SEQ ID NO: 368613
uacagagugaucuucuaga

SEQ ID NO: 368615 - RNA, 19 nt, Artificial Sequence
  Description of Artificial Sequence: Synthetic oligonucleotide
  Sense Strand Starting at position 635 of SEQ ID NO: 315340
agaagaucacucuguaagu

SEQ ID NO: 368616 - RNA, 19 nt, Artificial Sequence
  Description of Artificial Sequence: Synthetic oligonucleotide
  Antisense Strand to SEQ ID NO: 368615
acuuacagagugaucuucu

SEQ ID NO: 368617 - RNA, 19 nt, Artificial Sequence
  Description of Artificial Sequence: Synthetic oligonucleotide
  Sense Strand Starting at position 635 of SEQ ID NO: 315354
uaaguauucgcugauugaa

SEQ ID NO: 368618 - RNA, 19 nt, Artificial Sequence
  Description of Artificial Sequence: Synthetic oligonucleotide
  Antisense Strand to SEQ ID NO: 368617
uucaaucagcgaauacuua

SEQ ID NO: 368619 - RNA, 19 nt, Artificial Sequence
  Description of Artificial Sequence: Synthetic oligonucleotide
  Sense Strand Starting at position 635 of SEQ ID NO: 315362
cgcugauugaacggauuaa

SEQ ID NO: 368620 - RNA, 19 nt, Artificial Sequence
  Description of Artificial Sequence: Synthetic oligonucleotide
  Antisense Strand to SEQ ID NO: 368619
uuaauccguucaaucagcg

SEQ ID NO: 368621 - RNA, 19 nt, Artificial Sequence
  Description of Artificial Sequence: Synthetic oligonucleotide
  Sense Strand Starting at position 635 of SEQ ID NO: 315421
uuuaaauggcaguaacuuu

SEQ ID NO: 368622 - RNA, 19 nt, Artificial Sequence
  Description of Artificial Sequence: Synthetic oligonucleotide
  Antisense Strand to SEQ ID NO: 368621
aaaguuacugccauuuaaa

SEQ ID NO: 368623 - RNA, 19 nt, Artificial Sequence
  Description of Artificial Sequence: Synthetic oligonucleotide
  Sense Strand Starting at position 635 of SEQ ID NO: 315430
caguaacuuuggguucuaa

SEQ ID NO: 368624 - RNA, 19 nt, Artificial Sequence
  Description of Artificial Sequence: Synthetic oligonucleotide
  Antisense Strand to SEQ ID NO: 368623
uuagaacccaaaguuacug

SEQ ID NO: 368625 - RNA, 19 nt, Artificial Sequence
  Description of Artificial Sequence: Synthetic oligonucleotide
  Sense Strand Starting at position 635 of SEQ ID NO: 315442
guucuaagguuguucucaa

SEQ ID NO: 368626 - RNA, 19 nt, Artificial Sequence
  Description of Artificial Sequence: Synthetic oligonucleotide
  Antisense Strand to SEQ ID NO: 368625
uugagaacaaccuuagaac

SEQ ID NO: 368627 - RNA, 19 nt, Artificial Sequence
  Description of Artificial Sequence: Synthetic oligonucleotide
  Sense Strand Starting at position 635 of SEQ ID NO: 315449
gguuguucucaacaagaac

SEQ ID NO: 368628 - RNA, 19 nt, Artificial Sequence
  Description of Artificial Sequence: Synthetic oligonucleotide
  Antisense Strand to SEQ ID NO: 368627
guucuuguugagaacaacc

SEQ ID NO: 368629 - RNA, 19 nt, Artificial Sequence
  Description of Artificial Sequence: Synthetic oligonucleotide
  Sense Strand Starting at position 635 of SEQ ID NO: 315469
ggaagaccuuagguaaguu

SEQ ID NO: 368630 - RNA, 19 nt, Artificial Sequence
  Description of Artificial Sequence: Synthetic oligonucleotide
  Antisense Strand to SEQ ID NO: 368629
aacuuaccuaaggucuucc

SEQ ID NO: 368631 - RNA, 19 nt, Artificial Sequence
  Description of Artificial Sequence: Synthetic oligonucleotide
  Sense Strand Starting at position 635 of SEQ ID NO: 315896
uccagaucagcccgggaaa

SEQ ID NO: 368632 - RNA, 19 nt, Artificial Sequence
  Description of Artificial Sequence: Synthetic oligonucleotide
  Antisense Strand to SEQ ID NO: 368631
uuucccgggcugaucugga

SEQ ID NO: 368633 - RNA, 19 nt, Artificial Sequence
  Description of Artificial Sequence: Synthetic oligonucleotide
  Sense Strand Starting at position 635 of SEQ ID NO: 316033
aguuaauauuacuugacag

SEQ ID NO: 368634 - RNA, 19 nt, Artificial Sequence
  Description of Artificial Sequence: Synthetic oligonucleotide
  Antisense Strand to SEQ ID NO: 368633
cugucaaguaauauuaacu

SEQ ID NO: 368635 - RNA, 19 nt, Artificial Sequence
  Description of Artificial Sequence: Synthetic oligonucleotide
  Sense Strand Starting at position 635 of SEQ ID NO: 316089
gugguugcccaagacuagu

SEQ ID NO: 368636 - RNA, 19 nt, Artificial Sequence
  Description of Artificial Sequence: Synthetic oligonucleotide
  Antisense Strand to SEQ ID NO: 368635
acuagucuugggcaaccac

SEQ ID NO: 368637 - RNA, 19 nt, Artificial Sequence
  Description of Artificial Sequence: Synthetic oligonucleotide
  Sense Strand Starting at position 635 of SEQ ID NO: 316145
gagcucaggaguuggagua

SEQ ID NO: 368638 - RNA, 19 nt, Artificial Sequence
  Description of Artificial Sequence: Synthetic oligonucleotide
  Antisense Strand to SEQ ID NO: 368637
uacuccaacuccugagcuc

SEQ ID NO: 368639 - RNA, 19 nt, Artificial Sequence
  Description of Artificial Sequence: Synthetic oligonucleotide
  Sense Strand Starting at position 635 of SEQ ID NO: 316320
cuuccuugacuccagucau

SEQ ID NO: 368640 - RNA, 19 nt, Artificial Sequence
  Description of Artificial Sequence: Synthetic oligonucleotide
  Antisense Strand to SEQ ID NO: 368639
augacuggagucaaggaag

SEQ ID NO: 368641 - RNA, 19 nt, Artificial Sequence
  Description of Artificial Sequence: Synthetic oligonucleotide
  Sense Strand Starting at position 635 of SEQ ID NO: 316472
uuguuaugacaucgguaaa

SEQ ID NO: 368642 - RNA, 19 nt, Artificial Sequence
  Description of Artificial Sequence: Synthetic oligonucleotide
  Antisense Strand to SEQ ID NO: 368641
uuuaccgaugucauaacaa

SEQ ID NO: 368643 - RNA, 19 nt, Artificial Sequence
  Description of Artificial Sequence: Synthetic oligonucleotide
  Sense Strand Starting at position 635 of SEQ ID NO: 316473
uguuaugacaucgguaaac

SEQ ID NO: 368644 - RNA, 19 nt, Artificial Sequence
  Description of Artificial Sequence: Synthetic oligonucleotide
  Antisense Strand to SEQ ID NO: 368643
guuuaccgaugucauaaca

SEQ ID NO: 368645 - RNA, 19 nt, Artificial Sequence
  Description of Artificial Sequence: Synthetic oligonucleotide
  Sense Strand Starting at position 635 of SEQ ID NO: 316475
uuaugacaucgguaaacug

SEQ ID NO: 368646 - RNA, 19 nt, Artificial Sequence
  Description of Artificial Sequence: Synthetic oligonucleotide
  Antisense Strand to SEQ ID NO: 368645
caguuuaccgaugucauaa

SEQ ID NO: 368647 - RNA, 19 nt, Artificial Sequence
  Description of Artificial Sequence: Synthetic oligonucleotide
  Sense Strand Starting at position 635 of SEQ ID NO: 317418
ggcaaagguuggagaaagu

SEQ ID NO: 368648 - RNA, 19 nt, Artificial Sequence
  Description of Artificial Sequence: Synthetic oligonucleotide
  Antisense Strand to SEQ ID NO: 368647
acuuucuccaaccuuugcc

SEQ ID NO: 368649 - RNA, 19 nt, Artificial Sequence
  Description of Artificial Sequence: Synthetic oligonucleotide
  Sense Strand Starting at position 635 of SEQ ID NO: 317425
guuggagaaaguuauaugu

SEQ ID NO: 368650 - RNA, 19 nt, Artificial Sequence
  Description of Artificial Sequence: Synthetic oligonucleotide
  Antisense Strand to SEQ ID NO: 368649
acauauaacuuucuccaac

SEQ ID NO: 368651 - RNA, 19 nt, Artificial Sequence
  Description of Artificial Sequence: Synthetic oligonucleotide
  Sense Strand Starting at position 635 of SEQ ID NO: 317511
cuaauacgcguugauggaa

SEQ ID NO: 368652 - RNA, 19 nt, Artificial Sequence
  Description of Artificial Sequence: Synthetic oligonucleotide
  Antisense Strand to SEQ ID NO: 368651
uuccaucaacgcguauuag

SEQ ID NO: 368653 - RNA, 19 nt, Artificial Sequence
  Description of Artificial Sequence: Synthetic oligonucleotide
  Sense Strand Starting at position 635 of SEQ ID NO: 317600
gcucacaugcagcaugaau

SEQ ID NO: 368654 - RNA, 19 nt, Artificial Sequence
  Description of Artificial Sequence: Synthetic oligonucleotide
  Antisense Strand to SEQ ID NO: 368653
auucaugcugcaugugagc

SEQ ID NO: 368655 - RNA, 19 nt, Artificial Sequence
  Description of Artificial Sequence: Synthetic oligonucleotide
  Sense Strand Starting at position 635 of SEQ ID NO: 318083
uggagcaaaugauugcuaa

SEQ ID NO: 368656 - RNA, 19 nt, Artificial Sequence
  Description of Artificial Sequence: Synthetic oligonucleotide
  Antisense Strand to SEQ ID NO: 368655
uuagcaaucauuugcucca

SEQ ID NO: 368657 - RNA, 19 nt, Artificial Sequence
  Description of Artificial Sequence: Synthetic oligonucleotide
  Sense Strand Starting at position 635 of SEQ ID NO: 318084
ggagcaaaugauugcuaau

SEQ ID NO: 368658 - RNA, 19 nt, Artificial Sequence
  Description of Artificial Sequence: Synthetic oligonucleotide
  Antisense Strand to SEQ ID NO: 368657
auuagcaaucauuugcucc

SEQ ID NO: 368659 - RNA, 19 nt, Artificial Sequence
  Description of Artificial Sequence: Synthetic oligonucleotide
  Sense Strand Starting at position 635 of SEQ ID NO: 318086
agcaaaugauugcuaaugu

SEQ ID NO: 368660 - RNA, 19 nt, Artificial Sequence
  Description of Artificial Sequence: Synthetic oligonucleotide
  Antisense Strand to SEQ ID NO: 368659
acauuagcaaucauuugcu

SEQ ID NO: 368661 - RNA, 19 nt, Artificial Sequence
  Description of Artificial Sequence: Synthetic oligonucleotide
  Sense Strand Starting at position 635 of SEQ ID NO: 318240
gagguagauuaauacauuu

SEQ ID NO: 368662 - RNA, 19 nt, Artificial Sequence
  Description of Artificial Sequence: Synthetic oligonucleotide
  Antisense Strand to SEQ ID NO: 368661
aaauguauuaaucuaccuc

SEQ ID NO: 368663 - RNA, 19 nt, Artificial Sequence
  Description of Artificial Sequence: Synthetic oligonucleotide
  Sense Strand Starting at position 635 of SEQ ID NO: 318300
accugaauccuagguuaug

SEQ ID NO: 368664 - RNA, 19 nt, Artificial Sequence
  Description of Artificial Sequence: Synthetic oligonucleotide
  Antisense Strand to SEQ ID NO: 368663
cauaaccuaggauucaggu

SEQ ID NO: 368665 - RNA, 19 nt, Artificial Sequence
  Description of Artificial Sequence: Synthetic oligonucleotide
  Sense Strand Starting at position 635 of SEQ ID NO: 318303
ugaauccuagguuaugcaa

SEQ ID NO: 368666 - RNA, 19 nt, Artificial Sequence
  Description of Artificial Sequence: Synthetic oligonucleotide
  Antisense Strand to SEQ ID NO: 368665
uugcauaaccuaggauuca

SEQ ID NO: 368667 - RNA, 19 nt, Artificial Sequence
  Description of Artificial Sequence: Synthetic oligonucleotide
  Sense Strand Starting at position 635 of SEQ ID NO: 318369
ugauguuguguuuacuaag

SEQ ID NO: 368668 - RNA, 19 nt, Artificial Sequence
  Description of Artificial Sequence: Synthetic oligonucleotide
  Antisense Strand to SEQ ID NO: 368667
cuuaguaaacacaacauca

SEQ ID NO: 368669 - RNA, 19 nt, Artificial Sequence
  Description of Artificial Sequence: Synthetic oligonucleotide
  Sense Strand Starting at position 635 of SEQ ID NO: 318378
guuuacuaagaucagaguu

SEQ ID NO: 368670 - RNA, 19 nt, Artificial Sequence
  Description of Artificial Sequence: Synthetic oligonucleotide
  Antisense Strand to SEQ ID NO: 368669
aacucugaucuuaguaaac

SEQ ID NO: 368671 - RNA, 19 nt, Artificial Sequence
  Description of Artificial Sequence: Synthetic oligonucleotide
  Sense Strand Starting at position 635 of SEQ ID NO: 318427
agguguguucaacaggaga

SEQ ID NO: 368672 - RNA, 19 nt, Artificial Sequence
  Description of Artificial Sequence: Synthetic oligonucleotide
  Antisense Strand to SEQ ID NO: 368671
ucuccuguugaacacaccu

SEQ ID NO: 368673 - RNA, 19 nt, Artificial Sequence
  Description of Artificial Sequence: Synthetic oligonucleotide
  Sense Strand Starting at position 635 of SEQ ID NO: 318453
gggcaaguuugccugacca

SEQ ID NO: 368674 - RNA, 19 nt, Artificial Sequence
  Description of Artificial Sequence: Synthetic oligonucleotide
  Antisense Strand to SEQ ID NO: 368673
uggucaggcaaacuugccc

SEQ ID NO: 368675 - RNA, 19 nt, Artificial Sequence
  Description of Artificial Sequence: Synthetic oligonucleotide
  Sense Strand Starting at position 635 of SEQ ID NO: 318455
gcaaguuugccugaccaca

SEQ ID NO: 368676 - RNA, 19 nt, Artificial Sequence
  Description of Artificial Sequence: Synthetic oligonucleotide
  Antisense Strand to SEQ ID NO: 368675
uguggucaggcaaacuugc

SEQ ID NO: 368677 - RNA, 19 nt, Artificial Sequence
  Description of Artificial Sequence: Synthetic oligonucleotide
  Sense Strand Starting at position 635 of SEQ ID NO: 318534
ggucuucagucuuugggaa

SEQ ID NO: 368678 - RNA, 19 nt, Artificial Sequence
  Description of Artificial Sequence: Synthetic oligonucleotide
  Antisense Strand to SEQ ID NO: 368677
uucccaaagacugaagacc

SEQ ID NO: 368679 - RNA, 19 nt, Artificial Sequence
  Description of Artificial Sequence: Synthetic oligonucleotide
  Sense Strand Starting at position 635 of SEQ ID NO: 318856
aguuguucucuguagugga

SEQ ID NO: 368680 - RNA, 19 nt, Artificial Sequence
  Description of Artificial Sequence: Synthetic oligonucleotide
  Antisense Strand to SEQ ID NO: 368679
uccacuacagagaacaacu

SEQ ID NO: 368681 - RNA, 19 nt, Artificial Sequence
  Description of Artificial Sequence: Synthetic oligonucleotide
  Sense Strand Starting at position 635 of SEQ ID NO: 318909
gaaguugaauuccuaugua

SEQ ID NO: 368682 - RNA, 19 nt, Artificial Sequence
  Description of Artificial Sequence: Synthetic oligonucleotide
  Antisense Strand to SEQ ID NO: 368681
uacauaggaauucaacuuc

SEQ ID NO: 368683 - RNA, 19 nt, Artificial Sequence
  Description of Artificial Sequence: Synthetic oligonucleotide
  Sense Strand Starting at position 635 of SEQ ID NO: 318913
uugaauuccuauguauguu

SEQ ID NO: 368684 - RNA, 19 nt, Artificial Sequence
  Description of Artificial Sequence: Synthetic oligonucleotide
  Antisense Strand to SEQ ID NO: 368683
aacauacauaggaauucaa

SEQ ID NO: 368685 - RNA, 19 nt, Artificial Sequence
  Description of Artificial Sequence: Synthetic oligonucleotide
  Sense Strand Starting at position 635 of SEQ ID NO: 318975
gcuacugucucucugacaa

SEQ ID NO: 368686 - RNA, 19 nt, Artificial Sequence
  Description of Artificial Sequence: Synthetic oligonucleotide
  Antisense Strand to SEQ ID NO: 368685
uugucagagagacaguagc

SEQ ID NO: 368687 - RNA, 19 nt, Artificial Sequence
  Description of Artificial Sequence: Synthetic oligonucleotide
  Sense Strand Starting at position 635 of SEQ ID NO: 319140
auguaucaggcagaaaucu

SEQ ID NO: 368688 - RNA, 19 nt, Artificial Sequence
  Description of Artificial Sequence: Synthetic oligonucleotide
  Antisense Strand to SEQ ID NO: 368687
agauuucugccugauacau

SEQ ID NO: 368689 - RNA, 19 nt, Artificial Sequence
  Description of Artificial Sequence: Synthetic oligonucleotide
  Sense Strand Starting at position 635 of SEQ ID NO: 319184
ccugguguugccuauauaa

SEQ ID NO: 368690 - RNA, 19 nt, Artificial Sequence
  Description of Artificial Sequence: Synthetic oligonucleotide
  Antisense Strand to SEQ ID NO: 368689
uuauauaggcaacaccagg

SEQ ID NO: 368691 - RNA, 19 nt, Artificial Sequence
  Description of Artificial Sequence: Synthetic oligonucleotide
  Sense Strand Starting at position 635 of SEQ ID NO: 319186
ugguguugccuauauaauc

SEQ ID NO: 368692 - RNA, 19 nt, Artificial Sequence
  Description of Artificial Sequence: Synthetic oligonucleotide
  Antisense Strand to SEQ ID NO: 368691
gauuauauaggcaacacca

SEQ ID NO: 368693 - RNA, 19 nt, Artificial Sequence
  Description of Artificial Sequence: Synthetic oligonucleotide
  Sense Strand Starting at position 636 of SEQ ID NO: 315535
uuagucgucccucaaauua

SEQ ID NO: 368694 - RNA, 19 nt, Artificial Sequence
  Description of Artificial Sequence: Synthetic oligonucleotide
  Antisense Strand to SEQ ID NO: 368693
uaauuugagggacgacuaa

SEQ ID NO: 368695 - RNA, 19 nt, Artificial Sequence
  Description of Artificial Sequence: Synthetic oligonucleotide
  Sense Strand Starting at position 636 of SEQ ID NO: 315649
cagaaaugccaugggaagu

SEQ ID NO: 368696 - RNA, 19 nt, Artificial Sequence
  Description of Artificial Sequence: Synthetic oligonucleotide
  Antisense Strand to SEQ ID NO: 368695
acuucccauggcauuucug

SEQ ID NO: 368697 - RNA, 19 nt, Artificial Sequence
  Description of Artificial Sequence: Synthetic oligonucleotide
  Sense Strand Starting at position 636 of SEQ ID NO: 315650
agaaaugccaugggaaguu

SEQ ID NO: 368698 - RNA, 19 nt, Artificial Sequence
  Description of Artificial Sequence: Synthetic oligonucleotide
  Antisense Strand to SEQ ID NO: 368697
aacuucccauggcauuucu

SEQ ID NO: 368699 - RNA, 19 nt, Artificial Sequence
  Description of Artificial Sequence: Synthetic oligonucleotide
  Sense Strand Starting at position 636 of SEQ ID NO: 315735
agcuaaacucgugauuaag

SEQ ID NO: 368700 - RNA, 19 nt, Artificial Sequence
  Description of Artificial Sequence: Synthetic oligonucleotide
  Antisense Strand to SEQ ID NO: 368699
cuuaaucacgaguuuagcu

SEQ ID NO: 368701 - RNA, 19 nt, Artificial Sequence
  Description of Artificial Sequence: Synthetic oligonucleotide
  Sense Strand Starting at position 636 of SEQ ID NO: 315737
cuaaacucgugauuaagau

SEQ ID NO: 368702 - RNA, 19 nt, Artificial Sequence
  Description of Artificial Sequence: Synthetic oligonucleotide
  Antisense Strand to SEQ ID NO: 368701
aucuuaaucacgaguuuag

SEQ ID NO: 368703 - RNA, 19 nt, Artificial Sequence
  Description of Artificial Sequence: Synthetic oligonucleotide
  Sense Strand Starting at position 636 of SEQ ID NO: 315743
ucgugauuaagaugcagaa

SEQ ID NO: 368704 - RNA, 19 nt, Artificial Sequence
  Description of Artificial Sequence: Synthetic oligonucleotide
  Antisense Strand to SEQ ID NO: 368703
uucugcaucuuaaucacga

SEQ ID NO: 368705 - RNA, 19 nt, Artificial Sequence
  Description of Artificial Sequence: Synthetic oligonucleotide
  Sense Strand Starting at position 636 of SEQ ID NO: 316036
ggaugacagcuuuguauaa

SEQ ID NO: 368706 - RNA, 19 nt, Artificial Sequence
  Description of Artificial Sequence: Synthetic oligonucleotide
  Antisense Strand to SEQ ID NO: 368705
uuauacaaagcugucaucc

SEQ ID NO: 368707 - RNA, 19 nt, Artificial Sequence
  Description of Artificial Sequence: Synthetic oligonucleotide
  Sense Strand Starting at position 636 of SEQ ID NO: 316037
gaugacagcuuuguauaac

SEQ ID NO: 368708 - RNA, 19 nt, Artificial Sequence
  Description of Artificial Sequence: Synthetic oligonucleotide
  Antisense Strand to SEQ ID NO: 368707
guuauacaaagcugucauc

SEQ ID NO: 368709 - RNA, 19 nt, Artificial Sequence
  Description of Artificial Sequence: Synthetic oligonucleotide
  Sense Strand Starting at position 636 of SEQ ID NO: 316055
cccuuuagacuuuauaugu

SEQ ID NO: 368710 - RNA, 19 nt, Artificial Sequence
  Description of Artificial Sequence: Synthetic oligonucleotide
  Antisense Strand to SEQ ID NO: 368709
acauauaaagucuaaaggg

SEQ ID NO: 368711 - RNA, 19 nt, Artificial Sequence
  Description of Artificial Sequence: Synthetic oligonucleotide
  Sense Strand Starting at position 636 of SEQ ID NO: 316109
uaaagagauuuguggacaa

SEQ ID NO: 368712 - RNA, 19 nt, Artificial Sequence
  Description of Artificial Sequence: Synthetic oligonucleotide
  Antisense Strand to SEQ ID NO: 368711
uuguccacaaaucucuuua

SEQ ID NO: 368713 - RNA, 19 nt, Artificial Sequence
  Description of Artificial Sequence: Synthetic oligonucleotide
  Sense Strand Starting at position 636 of SEQ ID NO: 316142
uauccuuugccuggaagag

SEQ ID NO: 368714 - RNA, 19 nt, Artificial Sequence
  Description of Artificial Sequence: Synthetic oligonucleotide
  Antisense Strand to SEQ ID NO: 368713
cucuuccaggcaaaggaua

SEQ ID NO: 368715 - RNA, 19 nt, Artificial Sequence
  Description of Artificial Sequence: Synthetic oligonucleotide
  Sense Strand Starting at position 636 of SEQ ID NO: 316873
gccuuuguucuugaaauuc

SEQ ID NO: 368716 - RNA, 19 nt, Artificial Sequence
  Description of Artificial Sequence: Synthetic oligonucleotide
  Antisense Strand to SEQ ID NO: 368715
gaauuucaagaacaaaggc

SEQ ID NO: 368717 - RNA, 19 nt, Artificial Sequence
  Description of Artificial Sequence: Synthetic oligonucleotide
  Sense Strand Starting at position 636 of SEQ ID NO: 317286
cggugcguucgaccaauca

SEQ ID NO: 368718 - RNA, 19 nt, Artificial Sequence
  Description of Artificial Sequence: Synthetic oligonucleotide
  Antisense Strand to SEQ ID NO: 368717
ugauuggucgaacgcaccg

SEQ ID NO: 368719 - RNA, 19 nt, Artificial Sequence
  Description of Artificial Sequence: Synthetic oligonucleotide
  Sense Strand Starting at position 636 of SEQ ID NO: 317566
gucgaggcugcguuaaagu

SEQ ID NO: 368720 - RNA, 19 nt, Artificial Sequence
  Description of Artificial Sequence: Synthetic oligonucleotide
  Antisense Strand to SEQ ID NO: 368719
acuuuaacgcagccucgac

SEQ ID NO: 368721 - RNA, 19 nt, Artificial Sequence
  Description of Artificial Sequence: Synthetic oligonucleotide
  Sense Strand Starting at position 636 of SEQ ID NO: 317568
cgaggcugcguuaaaguaa

SEQ ID NO: 368722 - RNA, 19 nt, Artificial Sequence
  Description of Artificial Sequence: Synthetic oligonucleotide
  Antisense Strand to SEQ ID NO: 368721
uuacuuuaacgcagccucg

SEQ ID NO: 368723 - RNA, 19 nt, Artificial Sequence
  Description of Artificial Sequence: Synthetic oligonucleotide
  Sense Strand Starting at position 636 of SEQ ID NO: 317649
ugcagagagaucugagcuu

SEQ ID NO: 368724 - RNA, 19 nt, Artificial Sequence
  Description of Artificial Sequence: Synthetic oligonucleotide
  Antisense Strand to SEQ ID NO: 368723
aagcucagaucucucugca

SEQ ID NO: 368725 - RNA, 19 nt, Artificial Sequence
  Description of Artificial Sequence: Synthetic oligonucleotide
  Sense Strand Starting at position 636 of SEQ ID NO: 317754
cugggaugacgugaguuga

SEQ ID NO: 368726 - RNA, 19 nt, Artificial Sequence
  Description of Artificial Sequence: Synthetic oligonucleotide
  Antisense Strand to SEQ ID NO: 368725
ucaacucacgucaucccag

SEQ ID NO: 368727 - RNA, 19 nt, Artificial Sequence
  Description of Artificial Sequence: Synthetic oligonucleotide
  Sense Strand Starting at position 636 of SEQ ID NO: 317887
gcuggugauccugggacaa

SEQ ID NO: 368728 - RNA, 19 nt, Artificial Sequence
  Description of Artificial Sequence: Synthetic oligonucleotide
  Antisense Strand to SEQ ID NO: 368727
uugucccaggaucaccagc

SEQ ID NO: 368729 - RNA, 19 nt, Artificial Sequence
  Description of Artificial Sequence: Synthetic oligonucleotide
  Sense Strand Starting at position 636 of SEQ ID NO: 317945
gcugcuugaccacaaagua

SEQ ID NO: 368730 - RNA, 19 nt, Artificial Sequence
  Description of Artificial Sequence: Synthetic oligonucleotide
  Antisense Strand to SEQ ID NO: 368729
uacuuuguggucaagcagc

SEQ ID NO: 368731 - RNA, 19 nt, Artificial Sequence
  Description of Artificial Sequence: Synthetic oligonucleotide
  Sense Strand Starting at position 636 of SEQ ID NO: 317990
gcagcugacagggaauauu

SEQ ID NO: 368732 - RNA, 19 nt, Artificial Sequence
  Description of Artificial Sequence: Synthetic oligonucleotide
  Antisense Strand to SEQ ID NO: 368731
aauauucccugucagcugc

SEQ ID NO: 368733 - RNA, 19 nt, Artificial Sequence
  Description of Artificial Sequence: Synthetic oligonucleotide
  Sense Strand Starting at position 636 of SEQ ID NO: 317999
agggaauauuguguguuga

SEQ ID NO: 368734 - RNA, 19 nt, Artificial Sequence
  Description of Artificial Sequence: Synthetic oligonucleotide
  Antisense Strand to SEQ ID NO: 368733
ucaacacacaauauucccu

SEQ ID NO: 368735 - RNA, 19 nt, Artificial Sequence
  Description of Artificial Sequence: Synthetic oligonucleotide
  Sense Strand Starting at position 636 of SEQ ID NO: 318000
gggaauauuguguguugag

SEQ ID NO: 368736 - RNA, 19 nt, Artificial Sequence
  Description of Artificial Sequence: Synthetic oligonucleotide
  Antisense Strand to SEQ ID NO: 368735
cucaacacacaauauuccc

SEQ ID NO: 368737 - RNA, 19 nt, Artificial Sequence
  Description of Artificial Sequence: Synthetic oligonucleotide
  Sense Strand Starting at position 636 of SEQ ID NO: 318001
ggaauauuguguguugaga

SEQ ID NO: 368738 - RNA, 19 nt, Artificial Sequence
  Description of Artificial Sequence: Synthetic oligonucleotide
  Antisense Strand to SEQ ID NO: 368737
ucucaacacacaauauucc

SEQ ID NO: 368739 - RNA, 19 nt, Artificial Sequence
  Description of Artificial Sequence: Synthetic oligonucleotide
  Sense Strand Starting at position 636 of SEQ ID NO: 318063
gcagaaaugacacgagaua

SEQ ID NO: 368740 - RNA, 19 nt, Artificial Sequence
  Description of Artificial Sequence: Synthetic oligonucleotide
  Antisense Strand to SEQ ID NO: 368739
uaucucgugucauuucugc

SEQ ID NO: 368741 - RNA, 19 nt, Artificial Sequence
  Description of Artificial Sequence: Synthetic oligonucleotide
  Sense Strand Starting at position 636 of SEQ ID NO: 318215
gaggcguuggguguguuua

SEQ ID NO: 368742 - RNA, 19 nt, Artificial Sequence
  Description of Artificial Sequence: Synthetic oligonucleotide
  Antisense Strand to SEQ ID NO: 368741
uaaacacacccaacgccuc

SEQ ID NO: 368743 - RNA, 19 nt, Artificial Sequence
  Description of Artificial Sequence: Synthetic oligonucleotide
  Sense Strand Starting at position 636 of SEQ ID NO: 318321
gaacaacgugcagauaagu

SEQ ID NO: 368744 - RNA, 19 nt, Artificial Sequence
  Description of Artificial Sequence: Synthetic oligonucleotide
  Antisense Strand to SEQ ID NO: 368743
acuuaucugcacguuguuc

SEQ ID NO: 368745 - RNA, 19 nt, Artificial Sequence
  Description of Artificial Sequence: Synthetic oligonucleotide
  Sense Strand Starting at position 636 of SEQ ID NO: 318413
gaagaaguuaguggguuua

SEQ ID NO: 368746 - RNA, 19 nt, Artificial Sequence
  Description of Artificial Sequence: Synthetic oligonucleotide
  Antisense Strand to SEQ ID NO: 368745
uaaacccacuaacuucuuc

SEQ ID NO: 368747 - RNA, 19 nt, Artificial Sequence
  Description of Artificial Sequence: Synthetic oligonucleotide
  Sense Strand Starting at position 636 of SEQ ID NO: 318415
agaaguuaguggguuuaac

SEQ ID NO: 368748 - RNA, 19 nt, Artificial Sequence
  Description of Artificial Sequence: Synthetic oligonucleotide
  Antisense Strand to SEQ ID NO: 368747
guuaaacccacuaacuucu

SEQ ID NO: 368749 - RNA, 19 nt, Artificial Sequence
  Description of Artificial Sequence: Synthetic oligonucleotide
  Sense Strand Starting at position 636 of SEQ ID NO: 318480
gccggaguacuuuagggau

SEQ ID NO: 368750 - RNA, 19 nt, Artificial Sequence
  Description of Artificial Sequence: Synthetic oligonucleotide
  Antisense Strand to SEQ ID NO: 368749
aucccuaaaguacuccggc

SEQ ID NO: 368751 - RNA, 19 nt, Artificial Sequence
  Description of Artificial Sequence: Synthetic oligonucleotide
  Sense Strand Starting at position 636 of SEQ ID NO: 318570
ucgucaguacuuuauauac

SEQ ID NO: 368752 - RNA, 19 nt, Artificial Sequence
  Description of Artificial Sequence: Synthetic oligonucleotide
  Antisense Strand to SEQ ID NO: 368751
guauauaaaguacugacga

SEQ ID NO: 368753 - RNA, 19 nt, Artificial Sequence
  Description of Artificial Sequence: Synthetic oligonucleotide
  Sense Strand Starting at position 636 of SEQ ID NO: 318637
acugaagguuaacuugaau

SEQ ID NO: 368754 - RNA, 19 nt, Artificial Sequence
  Description of Artificial Sequence: Synthetic oligonucleotide
  Antisense Strand to SEQ ID NO: 368753
auucaaguuaaccuucagu

SEQ ID NO: 368755 - RNA, 19 nt, Artificial Sequence
  Description of Artificial Sequence: Synthetic oligonucleotide
  Sense Strand Starting at position 636 of SEQ ID NO: 318869
acaaauuaccagcgaauuc

SEQ ID NO: 368756 - RNA, 19 nt, Artificial Sequence
  Description of Artificial Sequence: Synthetic oligonucleotide
  Antisense Strand to SEQ ID NO: 368755
gaauucgcugguaauuugu

SEQ ID NO: 368757 - RNA, 19 nt, Artificial Sequence
  Description of Artificial Sequence: Synthetic oligonucleotide
  Sense Strand Starting at position 636 of SEQ ID NO: 318937
uuuguacuucuuggaauac

SEQ ID NO: 368758 - RNA, 19 nt, Artificial Sequence
  Description of Artificial Sequence: Synthetic oligonucleotide
  Antisense Strand to SEQ ID NO: 368757
guauuccaagaaguacaaa

SEQ ID NO: 368759 - RNA, 19 nt, Artificial Sequence
  Description of Artificial Sequence: Synthetic oligonucleotide
  Sense Strand Starting at position 636 of SEQ ID NO: 318963
gguagcuuucaugaugaag

SEQ ID NO: 368760 - RNA, 19 nt, Artificial Sequence
  Description of Artificial Sequence: Synthetic oligonucleotide
  Antisense Strand to SEQ ID NO: 368759
cuucaucaugaaagcuacc

SEQ ID NO: 368761 - RNA, 19 nt, Artificial Sequence
  Description of Artificial Sequence: Synthetic oligonucleotide
  Sense Strand Starting at position 636 of SEQ ID NO: 319022
acaacugagugucucugau

SEQ ID NO: 368762 - RNA, 19 nt, Artificial Sequence
  Description of Artificial Sequence: Synthetic oligonucleotide
  Antisense Strand to SEQ ID NO: 368761
aucagagacacucaguugu

SEQ ID NO: 368763 - RNA, 19 nt, Artificial Sequence
  Description of Artificial Sequence: Synthetic oligonucleotide
  Sense Strand Starting at position 636 of SEQ ID NO: 319024
aacugagugucucugauga

SEQ ID NO: 368764 - RNA, 19 nt, Artificial Sequence
  Description of Artificial Sequence: Synthetic oligonucleotide
  Antisense Strand to SEQ ID NO: 368763
ucaucagagacacucaguu

SEQ ID NO: 368765 - RNA, 19 nt, Artificial Sequence
  Description of Artificial Sequence: Synthetic oligonucleotide
  Sense Strand Starting at position 636 of SEQ ID NO: 319029
agugucucugaugauuaaa

SEQ ID NO: 368766 - RNA, 19 nt, Artificial Sequence
  Description of Artificial Sequence: Synthetic oligonucleotide
  Antisense Strand to SEQ ID NO: 368765
uuuaaucaucagagacacu

SEQ ID NO: 368767 - RNA, 19 nt, Artificial Sequence
  Description of Artificial Sequence: Synthetic oligonucleotide
  Sense Strand Starting at position 636 of SEQ ID NO: 319031
ugucucugaugauuaaaca

SEQ ID NO: 368768 - RNA, 19 nt, Artificial Sequence
  Description of Artificial Sequence: Synthetic oligonucleotide
  Antisense Strand to SEQ ID NO: 368767
uguuuaaucaucagagaca

SEQ ID NO: 368769 - RNA, 19 nt, Artificial Sequence
  Description of Artificial Sequence: Synthetic oligonucleotide
  Sense Strand Starting at position 636 of SEQ ID NO: 319061
uuucucucugcagaagacu

SEQ ID NO: 368770 - RNA, 19 nt, Artificial Sequence
  Description of Artificial Sequence: Synthetic oligonucleotide
  Antisense Strand to SEQ ID NO: 368769
agucuucugcagagagaaa

SEQ ID NO: 368771 - RNA, 19 nt, Artificial Sequence
  Description of Artificial Sequence: Synthetic oligonucleotide
  Sense Strand Starting at position 636 of SEQ ID NO: 319202
agucaagaaccauaguugu

SEQ ID NO: 368772 - RNA, 19 nt, Artificial Sequence
  Description of Artificial Sequence: Synthetic oligonucleotide
  Antisense Strand to SEQ ID NO: 368771
acaacuaugguucuugacu

SEQ ID NO: 368773 - RNA, 19 nt, Artificial Sequence
  Description of Artificial Sequence: Synthetic oligonucleotide
  Sense Strand Starting at position 637 of SEQ ID NO: 315763
ugacucuucuuagugaauc

SEQ ID NO: 368774 - RNA, 19 nt, Artificial Sequence
  Description of Artificial Sequence: Synthetic oligonucleotide
  Antisense Strand to SEQ ID NO: 368773
gauucacuaagaagaguca

SEQ ID NO: 368775 - RNA, 19 nt, Artificial Sequence
  Description of Artificial Sequence: Synthetic oligonucleotide
  Sense Strand Starting at position 637 of SEQ ID NO: 315969
gaugguuucuguccaagaa

SEQ ID NO: 368776 - RNA, 19 nt, Artificial Sequence
  Description of Artificial Sequence: Synthetic oligonucleotide
  Antisense Strand to SEQ ID NO: 368775
uucuuggacagaaaccauc

SEQ ID NO: 368777 - RNA, 19 nt, Artificial Sequence
  Description of Artificial Sequence: Synthetic oligonucleotide
  Sense Strand Starting at position 637 of SEQ ID NO: 315970
augguuucuguccaagaaa

SEQ ID NO: 368778 - RNA, 19 nt, Artificial Sequence
  Description of Artificial Sequence: Synthetic oligonucleotide
  Antisense Strand to SEQ ID NO: 368777
uuucuuggacagaaaccau

SEQ ID NO: 368779 - RNA, 19 nt, Artificial Sequence
  Description of Artificial Sequence: Synthetic oligonucleotide
  Sense Strand Starting at position 637 of SEQ ID NO: 316031
cuuguaauuguggaaucua

SEQ ID NO: 368780 - RNA, 19 nt, Artificial Sequence
  Description of Artificial Sequence: Synthetic oligonucleotide
  Antisense Strand to SEQ ID NO: 368779
uagauuccacaauuacaag

SEQ ID NO: 368781 - RNA, 19 nt, Artificial Sequence
  Description of Artificial Sequence: Synthetic oligonucleotide
  Sense Strand Starting at position 637 of SEQ ID NO: 316039
uguggaaucuaauucucua

SEQ ID NO: 368782 - RNA, 19 nt, Artificial Sequence
  Description of Artificial Sequence: Synthetic oligonucleotide
  Antisense Strand to SEQ ID NO: 368781
uagagaauuagauuccaca

SEQ ID NO: 368783 - RNA, 19 nt, Artificial Sequence
  Description of Artificial Sequence: Synthetic oligonucleotide
  Sense Strand Starting at position 637 of SEQ ID NO: 316086
guaaaugucccuuacagug

SEQ ID NO: 368784 - RNA, 19 nt, Artificial Sequence
  Description of Artificial Sequence: Synthetic oligonucleotide
  Antisense Strand to SEQ ID NO: 368783
cacuguaagggacauuuac

SEQ ID NO: 368785 - RNA, 19 nt, Artificial Sequence
  Description of Artificial Sequence: Synthetic oligonucleotide
  Sense Strand Starting at position 637 of SEQ ID NO: 316108
acuuaauaggauuagcgua

SEQ ID NO: 368786 - RNA, 19 nt, Artificial Sequence
  Description of Artificial Sequence: Synthetic oligonucleotide
  Antisense Strand to SEQ ID NO: 368785
uacgcuaauccuauuaagu

SEQ ID NO: 368787 - RNA, 19 nt, Artificial Sequence
  Description of Artificial Sequence: Synthetic oligonucleotide
  Sense Strand Starting at position 637 of SEQ ID NO: 316113
auaggauuagcguaucaaa

SEQ ID NO: 368788 - RNA, 19 nt, Artificial Sequence
  Description of Artificial Sequence: Synthetic oligonucleotide
  Antisense Strand to SEQ ID NO: 368787
uuugauacgcuaauccuau

SEQ ID NO: 368789 - RNA, 19 nt, Artificial Sequence
  Description of Artificial Sequence: Synthetic oligonucleotide
  Sense Strand Starting at position 637 of SEQ ID NO: 316265
gggaaagcuaaguggagau

SEQ ID NO: 368790 - RNA, 19 nt, Artificial Sequence
  Description of Artificial Sequence: Synthetic oligonucleotide
  Antisense Strand to SEQ ID NO: 368789
aucuccacuuagcuuuccc

SEQ ID NO: 368791 - RNA, 19 nt, Artificial Sequence
  Description of Artificial Sequence: Synthetic oligonucleotide
  Sense Strand Starting at position 637 of SEQ ID NO: 316336
ugacuaauggcagggacau

SEQ ID NO: 368792 - RNA, 19 nt, Artificial Sequence
  Description of Artificial Sequence: Synthetic oligonucleotide
  Antisense Strand to SEQ ID NO: 368791
augucccugccauuaguca

SEQ ID NO: 368793 - RNA, 19 nt, Artificial Sequence
  Description of Artificial Sequence: Synthetic oligonucleotide
  Sense Strand Starting at position 637 of SEQ ID NO: 316347
agggacaucgaauguuauc

SEQ ID NO: 368794 - RNA, 19 nt, Artificial Sequence
  Description of Artificial Sequence: Synthetic oligonucleotide
  Antisense Strand to SEQ ID NO: 368793
gauaacauucgaugucccu

SEQ ID NO: 368795 - RNA, 19 nt, Artificial Sequence
  Description of Artificial Sequence: Synthetic oligonucleotide
  Sense Strand Starting at position 637 of SEQ ID NO: 316353
aucgaauguuauccuauga

SEQ ID NO: 368796 - RNA, 19 nt, Artificial Sequence
  Description of Artificial Sequence: Synthetic oligonucleotide
  Antisense Strand to SEQ ID NO: 368795
ucauaggauaacauucgau

SEQ ID NO: 368797 - RNA, 19 nt, Artificial Sequence
  Description of Artificial Sequence: Synthetic oligonucleotide
  Sense Strand Starting at position 637 of SEQ ID NO: 316384
aaauuaugacaguggagua

SEQ ID NO: 368798 - RNA, 19 nt, Artificial Sequence
  Description of Artificial Sequence: Synthetic oligonucleotide
  Antisense Strand to SEQ ID NO: 368797
uacuccacugucauaauuu

SEQ ID NO: 368799 - RNA, 19 nt, Artificial Sequence
  Description of Artificial Sequence: Synthetic oligonucleotide
  Sense Strand Starting at position 637 of SEQ ID NO: 316526
gacggauacgaucagucuu

SEQ ID NO: 368800 - RNA, 19 nt, Artificial Sequence
  Description of Artificial Sequence: Synthetic oligonucleotide
  Antisense Strand to SEQ ID NO: 368799
aagacugaucguauccguc

SEQ ID NO: 368801 - RNA, 19 nt, Artificial Sequence
  Description of Artificial Sequence: Synthetic oligonucleotide
  Sense Strand Starting at position 637 of SEQ ID NO: 316625
gggaauacaauucgguauu

SEQ ID NO: 368802 - RNA, 19 nt, Artificial Sequence
  Description of Artificial Sequence: Synthetic oligonucleotide
  Antisense Strand to SEQ ID NO: 368801
aauaccgaauuguauuccc

SEQ ID NO: 368803 - RNA, 19 nt, Artificial Sequence
  Description of Artificial Sequence: Synthetic oligonucleotide
  Sense Strand Starting at position 637 of SEQ ID NO: 316627
gaauacaauucgguauucu

SEQ ID NO: 368804 - RNA, 19 nt, Artificial Sequence
  Description of Artificial Sequence: Synthetic oligonucleotide
  Antisense Strand to SEQ ID NO: 368803
agaauaccgaauuguauuc

SEQ ID NO: 368805 - RNA, 19 nt, Artificial Sequence
  Description of Artificial Sequence: Synthetic oligonucleotide
  Sense Strand Starting at position 637 of SEQ ID NO: 316631
acaauucgguauucucaaa

SEQ ID NO: 368806 - RNA, 19 nt, Artificial Sequence
  Description of Artificial Sequence: Synthetic oligonucleotide
  Antisense Strand to SEQ ID NO: 368805
uuugagaauaccgaauugu

SEQ ID NO: 368807 - RNA, 19 nt, Artificial Sequence
  Description of Artificial Sequence: Synthetic oligonucleotide
  Sense Strand Starting at position 637 of SEQ ID NO: 316680
ucaagacugguguacacua

SEQ ID NO: 368808 - RNA, 19 nt, Artificial Sequence
  Description of Artificial Sequence: Synthetic oligonucleotide
  Antisense Strand to SEQ ID NO: 368807
uaguguacaccagucuuga

SEQ ID NO: 368809 - RNA, 19 nt, Artificial Sequence
  Description of Artificial Sequence: Synthetic oligonucleotide
  Sense Strand Starting at position 637 of SEQ ID NO: 316831
gcauguucuguugauagaa

SEQ ID NO: 368810 - RNA, 19 nt, Artificial Sequence
  Description of Artificial Sequence: Synthetic oligonucleotide
  Antisense Strand to SEQ ID NO: 368809
uucuaucaacagaacaugc

SEQ ID NO: 368811 - RNA, 19 nt, Artificial Sequence
  Description of Artificial Sequence: Synthetic oligonucleotide
  Sense Strand Starting at position 637 of SEQ ID NO: 316900
ugcgaaugugugucaguau

SEQ ID NO: 368812 - RNA, 19 nt, Artificial Sequence
  Description of Artificial Sequence: Synthetic oligonucleotide
  Antisense Strand to SEQ ID NO: 368811
auacugacacacauucgca

SEQ ID NO: 368813 - RNA, 19 nt, Artificial Sequence
  Description of Artificial Sequence: Synthetic oligonucleotide
  Sense Strand Starting at position 637 of SEQ ID NO: 317323
ccuaauucccgugaggaaa

SEQ ID NO: 368814 - RNA, 19 nt, Artificial Sequence
  Description of Artificial Sequence: Synthetic oligonucleotide
  Antisense Strand to SEQ ID NO: 368813
uuuccucacgggaauuagg

SEQ ID NO: 368815 - RNA, 19 nt, Artificial Sequence
  Description of Artificial Sequence: Synthetic oligonucleotide
  Sense Strand Starting at position 637 of SEQ ID NO: 317612
cuugaauugcuguaaugau

SEQ ID NO: 368816 - RNA, 19 nt, Artificial Sequence
  Description of Artificial Sequence: Synthetic oligonucleotide
  Antisense Strand to SEQ ID NO: 368815
aucauuacagcaauucaag

SEQ ID NO: 368817 - RNA, 19 nt, Artificial Sequence
  Description of Artificial Sequence: Synthetic oligonucleotide
  Sense Strand Starting at position 637 of SEQ ID NO: 317934
uagaguaacugcuuugaug

SEQ ID NO: 368818 - RNA, 19 nt, Artificial Sequence
  Description of Artificial Sequence: Synthetic oligonucleotide
  Antisense Strand to SEQ ID NO: 368817
caucaaagcaguuacucua

SEQ ID NO: 368819 - RNA, 19 nt, Artificial Sequence
  Description of Artificial Sequence: Synthetic oligonucleotide
  Sense Strand Starting at position 637 of SEQ ID NO: 317957
cagcgaagggugugaagaa

SEQ ID NO: 368820 - RNA, 19 nt, Artificial Sequence
  Description of Artificial Sequence: Synthetic oligonucleotide
  Antisense Strand to SEQ ID NO: 368819
uucuucacacccuucgcug

SEQ ID NO: 368821 - RNA, 19 nt, Artificial Sequence
  Description of Artificial Sequence: Synthetic oligonucleotide
  Sense Strand Starting at position 637 of SEQ ID NO: 318027
gcaguaucacuguaggaag

SEQ ID NO: 368822 - RNA, 19 nt, Artificial Sequence
  Description of Artificial Sequence: Synthetic oligonucleotide
  Antisense Strand to SEQ ID NO: 368821
cuuccuacagugauacugc

SEQ ID NO: 368823 - RNA, 19 nt, Artificial Sequence
  Description of Artificial Sequence: Synthetic oligonucleotide
  Sense Strand Starting at position 637 of SEQ ID NO: 318264
accuucucacgauguagaa

SEQ ID NO: 368824 - RNA, 19 nt, Artificial Sequence
  Description of Artificial Sequence: Synthetic oligonucleotide
  Antisense Strand to SEQ ID NO: 368823
uucuacaucgugagaaggu

SEQ ID NO: 368825 - RNA, 19 nt, Artificial Sequence
  Description of Artificial Sequence: Synthetic oligonucleotide
  Sense Strand Starting at position 637 of SEQ ID NO: 318420
ucaagaagagaugguugua

SEQ ID NO: 368826 - RNA, 19 nt, Artificial Sequence
  Description of Artificial Sequence: Synthetic oligonucleotide
  Antisense Strand to SEQ ID NO: 368825
uacaaccaucucuucuuga

SEQ ID NO: 368827 - RNA, 19 nt, Artificial Sequence
  Description of Artificial Sequence: Synthetic oligonucleotide
  Sense Strand Starting at position 637 of SEQ ID NO: 318534
guuggcuagccugagaaua

SEQ ID NO: 368828 - RNA, 19 nt, Artificial Sequence
  Description of Artificial Sequence: Synthetic oligonucleotide
  Antisense Strand to SEQ ID NO: 368827
uauucucaggcuagccaac

SEQ ID NO: 368829 - RNA, 19 nt, Artificial Sequence
  Description of Artificial Sequence: Synthetic oligonucleotide
  Sense Strand Starting at position 637 of SEQ ID NO: 318561
acagaacuccugugaacca

SEQ ID NO: 368830 - RNA, 19 nt, Artificial Sequence
  Description of Artificial Sequence: Synthetic oligonucleotide
  Antisense Strand to SEQ ID NO: 368829
ugguucacaggaguucugu

SEQ ID NO: 368831 - RNA, 19 nt, Artificial Sequence
  Description of Artificial Sequence: Synthetic oligonucleotide
  Sense Strand Starting at position 637 of SEQ ID NO: 318608
guauauucuucucuaugga

SEQ ID NO: 368832 - RNA, 19 nt, Artificial Sequence
  Description of Artificial Sequence: Synthetic oligonucleotide
  Antisense Strand to SEQ ID NO: 368831
uccauagagaagaauauac

SEQ ID NO: 368833 - RNA, 19 nt, Artificial Sequence
  Description of Artificial Sequence: Synthetic oligonucleotide
  Sense Strand Starting at position 637 of SEQ ID NO: 318803
acccuuagggacugguuaa

SEQ ID NO: 368834 - RNA, 19 nt, Artificial Sequence
  Description of Artificial Sequence: Synthetic oligonucleotide
  Antisense Strand to SEQ ID NO: 368833
uuaaccagucccuaagggu

SEQ ID NO: 368835 - RNA, 19 nt, Artificial Sequence
  Description of Artificial Sequence: Synthetic oligonucleotide
  Sense Strand Starting at position 637 of SEQ ID NO: 318870
acgaaauagcgguagaauu

SEQ ID NO: 368836 - RNA, 19 nt, Artificial Sequence
  Description of Artificial Sequence: Synthetic oligonucleotide
  Antisense Strand to SEQ ID NO: 368835
aauucuaccgcuauuucgu

SEQ ID NO: 368837 - RNA, 19 nt, Artificial Sequence
  Description of Artificial Sequence: Synthetic oligonucleotide
  Sense Strand Starting at position 637 of SEQ ID NO: 318909
ggagguguccuacagcuga

SEQ ID NO: 368838 - RNA, 19 nt, Artificial Sequence
  Description of Artificial Sequence: Synthetic oligonucleotide
  Antisense Strand to SEQ ID NO: 368837
ucagcuguaggacaccucc

SEQ ID NO: 368839 - RNA, 19 nt, Artificial Sequence
  Description of Artificial Sequence: Synthetic oligonucleotide
  Sense Strand Starting at position 637 of SEQ ID NO: 318914
uguccuacagcugaggaua

SEQ ID NO: 368840 - RNA, 19 nt, Artificial Sequence
  Description of Artificial Sequence: Synthetic oligonucleotide
  Antisense Strand to SEQ ID NO: 368839
uauccucagcuguaggaca

SEQ ID NO: 368841 - RNA, 19 nt, Artificial Sequence
  Description of Artificial Sequence: Synthetic oligonucleotide
  Sense Strand Starting at position 637 of SEQ ID NO: 318932
agggcaacaucacuuaaua

SEQ ID NO: 368842 - RNA, 19 nt, Artificial Sequence
  Description of Artificial Sequence: Synthetic oligonucleotide
  Antisense Strand to SEQ ID NO: 368841
uauuaagugauguugcccu

SEQ ID NO: 368843 - RNA, 19 nt, Artificial Sequence
  Description of Artificial Sequence: Synthetic oligonucleotide
  Sense Strand Starting at position 637 of SEQ ID NO: 319042
auaucaaaugcugagucaa

SEQ ID NO: 368844 - RNA, 19 nt, Artificial Sequence
  Description of Artificial Sequence: Synthetic oligonucleotide
  Antisense Strand to SEQ ID NO: 368843
uugacucagcauuugauau

SEQ ID NO: 368845 - RNA, 19 nt, Artificial Sequence
  Description of Artificial Sequence: Synthetic oligonucleotide
  Sense Strand Starting at position 637 of SEQ ID NO: 319044
aucaaaugcugagucaaua

SEQ ID NO: 368846 - RNA, 19 nt, Artificial Sequence
  Description of Artificial Sequence: Synthetic oligonucleotide
  Antisense Strand to SEQ ID NO: 368845
uauugacucagcauuugau

SEQ ID NO: 368847 - RNA, 19 nt, Artificial Sequence
  Description of Artificial Sequence: Synthetic oligonucleotide
  Sense Strand Starting at position 637 of SEQ ID NO: 319145
aaagguaagaguggugcaa

SEQ ID NO: 368848 - RNA, 19 nt, Artificial Sequence
  Description of Artificial Sequence: Synthetic oligonucleotide
  Antisense Strand to SEQ ID NO: 368847
uugcaccacucuuaccuuu

SEQ ID NO: 368849 - RNA, 19 nt, Artificial Sequence
  Description of Artificial Sequence: Synthetic oligonucleotide
  Sense Strand Starting at position 637 of SEQ ID NO: 319149
guaagaguggugcaaacau

SEQ ID NO: 368850 - RNA, 19 nt, Artificial Sequence
  Description of Artificial Sequence: Synthetic oligonucleotide
  Antisense Strand to SEQ ID NO: 368849
auguuugcaccacucuuac

SEQ ID NO: 368851 - RNA, 19 nt, Artificial Sequence
  Description of Artificial Sequence: Synthetic oligonucleotide
  Sense Strand Starting at position 637 of SEQ ID NO: 319156
uggugcaaacauugagaaa

SEQ ID NO: 368852 - RNA, 19 nt, Artificial Sequence
  Description of Artificial Sequence: Synthetic oligonucleotide
  Antisense Strand to SEQ ID NO: 368851
uuucucaauguuugcacca

SEQ ID NO: 368853 - RNA, 19 nt, Artificial Sequence
  Description of Artificial Sequence: Synthetic oligonucleotide
  Sense Strand Starting at position 638 of SEQ ID NO: 315321
ucugguugugaauaaguga

SEQ ID NO: 368854 - RNA, 19 nt, Artificial Sequence
  Description of Artificial Sequence: Synthetic oligonucleotide
  Antisense Strand to SEQ ID NO: 368853
ucacuuauucacaaccaga

SEQ ID NO: 368855 - RNA, 19 nt, Artificial Sequence
  Description of Artificial Sequence: Synthetic oligonucleotide
  Sense Strand Starting at position 638 of SEQ ID NO: 315343
agaucucuacacugucauu

SEQ ID NO: 368856 - RNA, 19 nt, Artificial Sequence
  Description of Artificial Sequence: Synthetic oligonucleotide
  Antisense Strand to SEQ ID NO: 368855
aaugacaguguagagaucu

SEQ ID NO: 368857 - RNA, 19 nt, Artificial Sequence
  Description of Artificial Sequence: Synthetic oligonucleotide
  Sense Strand Starting at position 638 of SEQ ID NO: 315360
uucauagcaucggugagaa

SEQ ID NO: 368858 - RNA, 19 nt, Artificial Sequence
  Description of Artificial Sequence: Synthetic oligonucleotide
  Antisense Strand to SEQ ID NO: 368857
uucucaccgaugcuaugaa

SEQ ID NO: 368859 - RNA, 19 nt, Artificial Sequence
  Description of Artificial Sequence: Synthetic oligonucleotide
  Sense Strand Starting at position 638 of SEQ ID NO: 315372
gugagaaacggccaucaga

SEQ ID NO: 368860 - RNA, 19 nt, Artificial Sequence
  Description of Artificial Sequence: Synthetic oligonucleotide
  Antisense Strand to SEQ ID NO: 368859
ucugauggccguuucucac

SEQ ID NO: 368861 - RNA, 19 nt, Artificial Sequence
  Description of Artificial Sequence: Synthetic oligonucleotide
  Sense Strand Starting at position 638 of SEQ ID NO: 315493
cgaguuugugcuagguguu

SEQ ID NO: 368862 - RNA, 19 nt, Artificial Sequence
  Description of Artificial Sequence: Synthetic oligonucleotide
  Antisense Strand to SEQ ID NO: 368861
aacaccuagcacaaacucg

SEQ ID NO: 368863 - RNA, 19 nt, Artificial Sequence
  Description of Artificial Sequence: Synthetic oligonucleotide
  Sense Strand Starting at position 638 of SEQ ID NO: 315588
gccuuuagaagugauguga

SEQ ID NO: 368864 - RNA, 19 nt, Artificial Sequence
  Description of Artificial Sequence: Synthetic oligonucleotide
  Antisense Strand to SEQ ID NO: 368863
ucacaucacuucuaaaggc

SEQ ID NO: 368865 - RNA, 19 nt, Artificial Sequence
  Description of Artificial Sequence: Synthetic oligonucleotide
  Sense Strand Starting at position 638 of SEQ ID NO: 315592
uuagaagugaugugaucag

SEQ ID NO: 368866 - RNA, 19 nt, Artificial Sequence
  Description of Artificial Sequence: Synthetic oligonucleotide
  Antisense Strand to SEQ ID NO: 368865
cugaucacaucacuucuaa

SEQ ID NO: 368867 - RNA, 19 nt, Artificial Sequence
  Description of Artificial Sequence: Synthetic oligonucleotide
  Sense Strand Starting at position 638 of SEQ ID NO: 315847
aggaaucagcccugagacu

SEQ ID NO: 368868 - RNA, 19 nt, Artificial Sequence
  Description of Artificial Sequence: Synthetic oligonucleotide
  Antisense Strand to SEQ ID NO: 368867
agucucagggcugauuccu

SEQ ID NO: 368869 - RNA, 19 nt, Artificial Sequence
  Description of Artificial Sequence: Synthetic oligonucleotide
  Sense Strand Starting at position 638 of SEQ ID NO: 316016
guggaagguggauguucaa

SEQ ID NO: 368870 - RNA, 19 nt, Artificial Sequence
  Description of Artificial Sequence: Synthetic oligonucleotide
  Antisense Strand to SEQ ID NO: 368869
uugaacauccaccuuccac

SEQ ID NO: 368871 - RNA, 19 nt, Artificial Sequence
  Description of Artificial Sequence: Synthetic oligonucleotide
  Sense Strand Starting at position 638 of SEQ ID NO: 316126
agaagucauucuccugcau

SEQ ID NO: 368872 - RNA, 19 nt, Artificial Sequence
  Description of Artificial Sequence: Synthetic oligonucleotide
  Antisense Strand to SEQ ID NO: 368871
augcaggagaaugacuucu

SEQ ID NO: 368873 - RNA, 19 nt, Artificial Sequence
  Description of Artificial Sequence: Synthetic oligonucleotide
  Sense Strand Starting at position 638 of SEQ ID NO: 316303
uuguguucugucgucugga

SEQ ID NO: 368874 - RNA, 19 nt, Artificial Sequence
  Description of Artificial Sequence: Synthetic oligonucleotide
  Antisense Strand to SEQ ID NO: 368873
uccagacgacagaacacaa

SEQ ID NO: 368875 - RNA, 19 nt, Artificial Sequence
  Description of Artificial Sequence: Synthetic oligonucleotide
  Sense Strand Starting at position 638 of SEQ ID NO: 316308
uucugucgucuggagaaca

SEQ ID NO: 368876 - RNA, 19 nt, Artificial Sequence
  Description of Artificial Sequence: Synthetic oligonucleotide
  Antisense Strand to SEQ ID NO: 368875
uguucuccagacgacagaa

SEQ ID NO: 368877 - RNA, 19 nt, Artificial Sequence
  Description of Artificial Sequence: Synthetic oligonucleotide
  Sense Strand Starting at position 638 of SEQ ID NO: 316336
ggauccugcuuuccacaau

SEQ ID NO: 368878 - RNA, 19 nt, Artificial Sequence
  Description of Artificial Sequence: Synthetic oligonucleotide
  Antisense Strand to SEQ ID NO: 368877
auuguggaaagcaggaucc

SEQ ID NO: 368879 - RNA, 19 nt, Artificial Sequence
  Description of Artificial Sequence: Synthetic oligonucleotide
  Sense Strand Starting at position 638 of SEQ ID NO: 316406
ccagaaaguguguaggaca

SEQ ID NO: 368880 - RNA, 19 nt, Artificial Sequence
  Description of Artificial Sequence: Synthetic oligonucleotide
  Antisense Strand to SEQ ID NO: 368879
uguccuacacacuuucugg

SEQ ID NO: 368881 - RNA, 19 nt, Artificial Sequence
  Description of Artificial Sequence: Synthetic oligonucleotide
  Sense Strand Starting at position 638 of SEQ ID NO: 316411
aaguguguaggacaaguaa

SEQ ID NO: 368882 - RNA, 19 nt, Artificial Sequence
  Description of Artificial Sequence: Synthetic oligonucleotide
  Antisense Strand to SEQ ID NO: 368881
uuacuuguccuacacacuu

SEQ ID NO: 368883 - RNA, 19 nt, Artificial Sequence
  Description of Artificial Sequence: Synthetic oligonucleotide
  Sense Strand Starting at position 638 of SEQ ID NO: 316532
gggagaaagucucaagaaa

SEQ ID NO: 368884 - RNA, 19 nt, Artificial Sequence
  Description of Artificial Sequence: Synthetic oligonucleotide
  Antisense Strand to SEQ ID NO: 368883
uuucuugagacuuucuccc

SEQ ID NO: 368885 - RNA, 19 nt, Artificial Sequence
  Description of Artificial Sequence: Synthetic oligonucleotide
  Sense Strand Starting at position 638 of SEQ ID NO: 316553
agaaacugaggcuguaaau

SEQ ID NO: 368886 - RNA, 19 nt, Artificial Sequence
  Description of Artificial Sequence: Synthetic oligonucleotide
  Antisense Strand to SEQ ID NO: 368885
auuuacagccucaguuucu

SEQ ID NO: 368887 - RNA, 19 nt, Artificial Sequence
  Description of Artificial Sequence: Synthetic oligonucleotide
  Sense Strand Starting at position 638 of SEQ ID NO: 317128
gcagcaugucgauagauac

SEQ ID NO: 368888 - RNA, 19 nt, Artificial Sequence
  Description of Artificial Sequence: Synthetic oligonucleotide
  Antisense Strand to SEQ ID NO: 368887
guaucuaucgacaugcugc

SEQ ID NO: 368889 - RNA, 19 nt, Artificial Sequence
  Description of Artificial Sequence: Synthetic oligonucleotide
  Sense Strand Starting at position 638 of SEQ ID NO: 317387
ggcucuaagucaccuuuga

SEQ ID NO: 368890 - RNA, 19 nt, Artificial Sequence
  Description of Artificial Sequence: Synthetic oligonucleotide
  Antisense Strand to SEQ ID NO: 368889
ucaaaggugacuuagagcc

SEQ ID NO: 368891 - RNA, 19 nt, Artificial Sequence
  Description of Artificial Sequence: Synthetic oligonucleotide
  Sense Strand Starting at position 638 of SEQ ID NO: 317639
cgcacagugcugucaacau

SEQ ID NO: 368892 - RNA, 19 nt, Artificial Sequence
  Description of Artificial Sequence: Synthetic oligonucleotide
  Antisense Strand to SEQ ID NO: 368891
auguugacagcacugugcg

SEQ ID NO: 368893 - RNA, 19 nt, Artificial Sequence
  Description of Artificial Sequence: Synthetic oligonucleotide
  Sense Strand Starting at position 638 of SEQ ID NO: 317647
gcugucaacauugagagua

SEQ ID NO: 368894 - RNA, 19 nt, Artificial Sequence
  Description of Artificial Sequence: Synthetic oligonucleotide
  Antisense Strand to SEQ ID NO: 368893
uacucucaauguugacagc

SEQ ID NO: 368895 - RNA, 19 nt, Artificial Sequence
  Description of Artificial Sequence: Synthetic oligonucleotide
  Sense Strand Starting at position 638 of SEQ ID NO: 317710
gcaagaugugcagagauug

SEQ ID NO: 368896 - RNA, 19 nt, Artificial Sequence
  Description of Artificial Sequence: Synthetic oligonucleotide
  Antisense Strand to SEQ ID NO: 368895
caaucucugcacaucuugc

SEQ ID NO: 368897 - RNA, 19 nt, Artificial Sequence
  Description of Artificial Sequence: Synthetic oligonucleotide
  Sense Strand Starting at position 638 of SEQ ID NO: 317715
augugcagagauuguccaa

SEQ ID NO: 368898 - RNA, 19 nt, Artificial Sequence
  Description of Artificial Sequence: Synthetic oligonucleotide
  Antisense Strand to SEQ ID NO: 368897
uuggacaaucucugcacau

SEQ ID NO: 368899 - RNA, 19 nt, Artificial Sequence
  Description of Artificial Sequence: Synthetic oligonucleotide
  Sense Strand Starting at position 638 of SEQ ID NO: 317718
ugcagagauuguccaaguu

SEQ ID NO: 368900 - RNA, 19 nt, Artificial Sequence
  Description of Artificial Sequence: Synthetic oligonucleotide
  Antisense Strand to SEQ ID NO: 368899
aacuuggacaaucucugca

SEQ ID NO: 368901 - RNA, 19 nt, Artificial Sequence
  Description of Artificial Sequence: Synthetic oligonucleotide
  Sense Strand Starting at position 638 of SEQ ID NO: 317849
ccuguagaacuuggaacau

SEQ ID NO: 368902 - RNA, 19 nt, Artificial Sequence
  Description of Artificial Sequence: Synthetic oligonucleotide
  Antisense Strand to SEQ ID NO: 368901
auguuccaaguucuacagg

SEQ ID NO: 368903 - RNA, 19 nt, Artificial Sequence
  Description of Artificial Sequence: Synthetic oligonucleotide
  Sense Strand Starting at position 638 of SEQ ID NO: 317862
gaacaugcccauugaguau

SEQ ID NO: 368904 - RNA, 19 nt, Artificial Sequence
  Description of Artificial Sequence: Synthetic oligonucleotide
  Antisense Strand to SEQ ID NO: 368903
auacucaaugggcauguuc

SEQ ID NO: 368905 - RNA, 19 nt, Artificial Sequence
  Description of Artificial Sequence: Synthetic oligonucleotide
  Sense Strand Starting at position 638 of SEQ ID NO: 317874
ugaguaucaagcuaacgau

SEQ ID NO: 368906 - RNA, 19 nt, Artificial Sequence
  Description of Artificial Sequence: Synthetic oligonucleotide
  Antisense Strand to SEQ ID NO: 368905
aucguuagcuugauacuca

SEQ ID NO: 368907 - RNA, 19 nt, Artificial Sequence
  Description of Artificial Sequence: Synthetic oligonucleotide
  Sense Strand Starting at position 638 of SEQ ID NO: 317883
agcuaacgauccucuuuga

SEQ ID NO: 368908 - RNA, 19 nt, Artificial Sequence
  Description of Artificial Sequence: Synthetic oligonucleotide
  Antisense Strand to SEQ ID NO: 368907
ucaaagaggaucguuagcu

SEQ ID NO: 368909 - RNA, 19 nt, Artificial Sequence
  Description of Artificial Sequence: Synthetic oligonucleotide
  Sense Strand Starting at position 638 of SEQ ID NO: 317897
uuugaucugaaacgaaagu

SEQ ID NO: 368910 - RNA, 19 nt, Artificial Sequence
  Description of Artificial Sequence: Synthetic oligonucleotide
  Antisense Strand to SEQ ID NO: 368909
acuuucguuucagaucaaa

SEQ ID NO: 368911 - RNA, 19 nt, Artificial Sequence
  Description of Artificial Sequence: Synthetic oligonucleotide
  Sense Strand Starting at position 638 of SEQ ID NO: 318247
uagcaugguccugagaguu

SEQ ID NO: 368912 - RNA, 19 nt, Artificial Sequence
  Description of Artificial Sequence: Synthetic oligonucleotide
  Antisense Strand to SEQ ID NO: 368911
aacucucaggaccaugcua

SEQ ID NO: 368913 - RNA, 19 nt, Artificial Sequence
  Description of Artificial Sequence: Synthetic oligonucleotide
  Sense Strand Starting at position 638 of SEQ ID NO: 318255
uccugagaguucccagauc

SEQ ID NO: 368914 - RNA, 19 nt, Artificial Sequence
  Description of Artificial Sequence: Synthetic oligonucleotide
  Antisense Strand to SEQ ID NO: 368913
gaucugggaacucucagga

SEQ ID NO: 368915 - RNA, 19 nt, Artificial Sequence
  Description of Artificial Sequence: Synthetic oligonucleotide
  Sense Strand Starting at position 638 of SEQ ID NO: 318417
gugagaauggcaugaaugu

SEQ ID NO: 368916 - RNA, 19 nt, Artificial Sequence
  Description of Artificial Sequence: Synthetic oligonucleotide
  Antisense Strand to SEQ ID NO: 368915
acauucaugccauucucac

SEQ ID NO: 368917 - RNA, 19 nt, Artificial Sequence
  Description of Artificial Sequence: Synthetic oligonucleotide
  Sense Strand Starting at position 638 of SEQ ID NO: 318438
ggcgccugguguauagaaa

SEQ ID NO: 368918 - RNA, 19 nt, Artificial Sequence
  Description of Artificial Sequence: Synthetic oligonucleotide
  Antisense Strand to SEQ ID NO: 368917
uuucuauacaccaggcgcc

SEQ ID NO: 368919 - RNA, 19 nt, Artificial Sequence
  Description of Artificial Sequence: Synthetic oligonucleotide
  Sense Strand Starting at position 638 of SEQ ID NO: 318521
gugacaagugacugaugga

SEQ ID NO: 368920 - RNA, 19 nt, Artificial Sequence
  Description of Artificial Sequence: Synthetic oligonucleotide
  Antisense Strand to SEQ ID NO: 368919
uccaucagucacuugucac

SEQ ID NO: 368921 - RNA, 19 nt, Artificial Sequence
  Description of Artificial Sequence: Synthetic oligonucleotide
  Sense Strand Starting at position 638 of SEQ ID NO: 318587
gucuuccuccaauaacagu

SEQ ID NO: 368922 - RNA, 19 nt, Artificial Sequence
  Description of Artificial Sequence: Synthetic oligonucleotide
  Antisense Strand to SEQ ID NO: 368921
acuguuauuggaggaagac

SEQ ID NO: 368923 - RNA, 19 nt, Artificial Sequence
  Description of Artificial Sequence: Synthetic oligonucleotide
  Sense Strand Starting at position 638 of SEQ ID NO: 318598
auaacaguggcucagaguu

SEQ ID NO: 368924 - RNA, 19 nt, Artificial Sequence
  Description of Artificial Sequence: Synthetic oligonucleotide
  Antisense Strand to SEQ ID NO: 368923
aacucugagccacuguuau

SEQ ID NO: 368925 - RNA, 19 nt, Artificial Sequence
  Description of Artificial Sequence: Synthetic oligonucleotide
  Sense Strand Starting at position 638 of SEQ ID NO: 318779
ggagauggcugacuuccaa

SEQ ID NO: 368926 - RNA, 19 nt, Artificial Sequence
  Description of Artificial Sequence: Synthetic oligonucleotide
  Antisense Strand to SEQ ID NO: 368925
uuggaagucagccaucucc

SEQ ID NO: 368927 - RNA, 19 nt, Artificial Sequence
  Description of Artificial Sequence: Synthetic oligonucleotide
  Sense Strand Starting at position 638 of SEQ ID NO: 318801
agguuuccuucugcuaaag

SEQ ID NO: 368928 - RNA, 19 nt, Artificial Sequence
  Description of Artificial Sequence: Synthetic oligonucleotide
  Antisense Strand to SEQ ID NO: 368927
cuuuagcagaaggaaaccu

SEQ ID NO: 368929 - RNA, 19 nt, Artificial Sequence
  Description of Artificial Sequence: Synthetic oligonucleotide
  Sense Strand Starting at position 638 of SEQ ID NO: 318930
agaacuaugcauuaugcaa

SEQ ID NO: 368930 - RNA, 19 nt, Artificial Sequence
  Description of Artificial Sequence: Synthetic oligonucleotide
  Antisense Strand to SEQ ID NO: 368929
uugcauaaugcauaguucu

SEQ ID NO: 368931 - RNA, 19 nt, Artificial Sequence
  Description of Artificial Sequence: Synthetic oligonucleotide
  Sense Strand Starting at position 638 of SEQ ID NO: 319195
uggaaagugucauugcuag

SEQ ID NO: 368932 - RNA, 19 nt, Artificial Sequence
  Description of Artificial Sequence: Synthetic oligonucleotide
  Antisense Strand to SEQ ID NO: 368931
cuagcaaugacacuuucca

SEQ ID NO: 368933 - RNA, 19 nt, Artificial Sequence
  Description of Artificial Sequence: Synthetic oligonucleotide
  Sense Strand Starting at position 639 of SEQ ID NO: 315413
cggacugugccagacucaa

SEQ ID NO: 368934 - RNA, 19 nt, Artificial Sequence
  Description of Artificial Sequence: Synthetic oligonucleotide
  Antisense Strand to SEQ ID NO: 368933
uugagucuggcacaguccg

SEQ ID NO: 368935 - RNA, 19 nt, Artificial Sequence
  Description of Artificial Sequence: Synthetic oligonucleotide
  Sense Strand Starting at position 639 of SEQ ID NO: 315490
gguccagcacacgauagau

SEQ ID NO: 368936 - RNA, 19 nt, Artificial Sequence
  Description of Artificial Sequence: Synthetic oligonucleotide
  Antisense Strand to SEQ ID NO: 368935
aucuaucgugugcuggacc

SEQ ID NO: 368937 - RNA, 19 nt, Artificial Sequence
  Description of Artificial Sequence: Synthetic oligonucleotide
  Sense Strand Starting at position 639 of SEQ ID NO: 315618
auggcucaaucucugagua

SEQ ID NO: 368938 - RNA, 19 nt, Artificial Sequence
  Description of Artificial Sequence: Synthetic oligonucleotide
  Antisense Strand to SEQ ID NO: 368937
uacucagagauugagccau

SEQ ID NO: 368939 - RNA, 19 nt, Artificial Sequence
  Description of Artificial Sequence: Synthetic oligonucleotide
  Sense Strand Starting at position 639 of SEQ ID NO: 315714
aggagaaauaucgguacac

SEQ ID NO: 368940 - RNA, 19 nt, Artificial Sequence
  Description of Artificial Sequence: Synthetic oligonucleotide
  Antisense Strand to SEQ ID NO: 368939
guguaccgauauuucuccu

SEQ ID NO: 368941 - RNA, 19 nt, Artificial Sequence
  Description of Artificial Sequence: Synthetic oligonucleotide
  Sense Strand Starting at position 639 of SEQ ID NO: 315715
ggagaaauaucgguacaca

SEQ ID NO: 368942 - RNA, 19 nt, Artificial Sequence
  Description of Artificial Sequence: Synthetic oligonucleotide
  Antisense Strand to SEQ ID NO: 368941
uguguaccgauauuucucc

SEQ ID NO: 368943 - RNA, 19 nt, Artificial Sequence
  Description of Artificial Sequence: Synthetic oligonucleotide
  Sense Strand Starting at position 639 of SEQ ID NO: 315782
gggcgaaaugucuggguag

SEQ ID NO: 368944 - RNA, 19 nt, Artificial Sequence
  Description of Artificial Sequence: Synthetic oligonucleotide
  Antisense Strand to SEQ ID NO: 368943
cuacccagacauuucgccc

SEQ ID NO: 368945 - RNA, 19 nt, Artificial Sequence
  Description of Artificial Sequence: Synthetic oligonucleotide
  Sense Strand Starting at position 639 of SEQ ID NO: 315868
gcccaagacugcccucaaa

SEQ ID NO: 368946 - RNA, 19 nt, Artificial Sequence
  Description of Artificial Sequence: Synthetic oligonucleotide
  Antisense Strand to SEQ ID NO: 368945
uuugagggcagucuugggc

SEQ ID NO: 368947 - RNA, 19 nt, Artificial Sequence
  Description of Artificial Sequence: Synthetic oligonucleotide
  Sense Strand Starting at position 639 of SEQ ID NO: 315919
gccagauaaugaccagcaa

SEQ ID NO: 368948 - RNA, 19 nt, Artificial Sequence
  Description of Artificial Sequence: Synthetic oligonucleotide
  Antisense Strand to SEQ ID NO: 368947
uugcuggucauuaucuggc

SEQ ID NO: 368949 - RNA, 19 nt, Artificial Sequence
  Description of Artificial Sequence: Synthetic oligonucleotide
  Sense Strand Starting at position 639 of SEQ ID NO: 316192
gucauaaugagguguguga

SEQ ID NO: 368950 - RNA, 19 nt, Artificial Sequence
  Description of Artificial Sequence: Synthetic oligonucleotide
  Antisense Strand to SEQ ID NO: 368949
ucacacaccucauuaugac

SEQ ID NO: 368951 - RNA, 19 nt, Artificial Sequence
  Description of Artificial Sequence: Synthetic oligonucleotide
  Sense Strand Starting at position 639 of SEQ ID NO: 316194
cauaaugaggugugugaaa

SEQ ID NO: 368952 - RNA, 19 nt, Artificial Sequence
  Description of Artificial Sequence: Synthetic oligonucleotide
  Antisense Strand to SEQ ID NO: 368951
uuucacacaccucauuaug

SEQ ID NO: 368953 - RNA, 19 nt, Artificial Sequence
  Description of Artificial Sequence: Synthetic oligonucleotide
  Sense Strand Starting at position 639 of SEQ ID NO: 316196
uaaugaggugugugaaaug

SEQ ID NO: 368954 - RNA, 19 nt, Artificial Sequence
  Description of Artificial Sequence: Synthetic oligonucleotide
  Antisense Strand to SEQ ID NO: 368953
cauuucacacaccucauua

SEQ ID NO: 368955 - RNA, 19 nt, Artificial Sequence
  Description of Artificial Sequence: Synthetic oligonucleotide
  Sense Strand Starting at position 639 of SEQ ID NO: 316201
aggugugugaaaugaaacu

SEQ ID NO: 368956 - RNA, 19 nt, Artificial Sequence
  Description of Artificial Sequence: Synthetic oligonucleotide
  Antisense Strand to SEQ ID NO: 368955
aguuucauuucacacaccu

SEQ ID NO: 368957 - RNA, 19 nt, Artificial Sequence
  Description of Artificial Sequence: Synthetic oligonucleotide
  Sense Strand Starting at position 639 of SEQ ID NO: 316414
guggguugucucuagcaga

SEQ ID NO: 368958 - RNA, 19 nt, Artificial Sequence
  Description of Artificial Sequence: Synthetic oligonucleotide
  Antisense Strand to SEQ ID NO: 368957
ucugcuagagacaacccac

SEQ ID NO: 368959 - RNA, 19 nt, Artificial Sequence
  Description of Artificial Sequence: Synthetic oligonucleotide
  Sense Strand Starting at position 639 of SEQ ID NO: 316748
cagucaguuccgcugaguu

SEQ ID NO: 368960 - RNA, 19 nt, Artificial Sequence
  Description of Artificial Sequence: Synthetic oligonucleotide
  Antisense Strand to SEQ ID NO: 368959
aacucagcggaacugacug

SEQ ID NO: 368961 - RNA, 19 nt, Artificial Sequence
  Description of Artificial Sequence: Synthetic oligonucleotide
  Sense Strand Starting at position 639 of SEQ ID NO: 317107
agcgacuuugagcaaaguu

SEQ ID NO: 368962 - RNA, 19 nt, Artificial Sequence
  Description of Artificial Sequence: Synthetic oligonucleotide
  Antisense Strand to SEQ ID NO: 368961
aacuuugcucaaagucgcu

SEQ ID NO: 368963 - RNA, 19 nt, Artificial Sequence
  Description of Artificial Sequence: Synthetic oligonucleotide
  Sense Strand Starting at position 639 of SEQ ID NO: 317334
gcuuuaaacuauccuugga

SEQ ID NO: 368964 - RNA, 19 nt, Artificial Sequence
  Description of Artificial Sequence: Synthetic oligonucleotide
  Antisense Strand to SEQ ID NO: 368963
uccaaggauaguuuaaagc

SEQ ID NO: 368965 - RNA, 19 nt, Artificial Sequence
  Description of Artificial Sequence: Synthetic oligonucleotide
  Sense Strand Starting at position 639 of SEQ ID NO: 317389
augagagaucuucgggauc

SEQ ID NO: 368966 - RNA, 19 nt, Artificial Sequence
  Description of Artificial Sequence: Synthetic oligonucleotide
  Antisense Strand to SEQ ID NO: 368965
gaucccgaagaucucucau

SEQ ID NO: 368967 - RNA, 19 nt, Artificial Sequence
  Description of Artificial Sequence: Synthetic oligonucleotide
  Sense Strand Starting at position 639 of SEQ ID NO: 317673
cccacuagucacuacggua

SEQ ID NO: 368968 - RNA, 19 nt, Artificial Sequence
  Description of Artificial Sequence: Synthetic oligonucleotide
  Antisense Strand to SEQ ID NO: 368967
uaccguagugacuaguggg

SEQ ID NO: 368969 - RNA, 19 nt, Artificial Sequence
  Description of Artificial Sequence: Synthetic oligonucleotide
  Sense Strand Starting at position 639 of SEQ ID NO: 317689
guaaguaggcacgagaagu

SEQ ID NO: 368970 - RNA, 19 nt, Artificial Sequence
  Description of Artificial Sequence: Synthetic oligonucleotide
  Antisense Strand to SEQ ID NO: 368969
acuucucgugccuacuuac

SEQ ID NO: 368971 - RNA, 19 nt, Artificial Sequence
  Description of Artificial Sequence: Synthetic oligonucleotide
  Sense Strand Starting at position 639 of SEQ ID NO: 317712
cggguuucccuguauggaa

SEQ ID NO: 368972 - RNA, 19 nt, Artificial Sequence
  Description of Artificial Sequence: Synthetic oligonucleotide
  Antisense Strand to SEQ ID NO: 368971
uuccauacagggaaacccg

SEQ ID NO: 368973 - RNA, 19 nt, Artificial Sequence
  Description of Artificial Sequence: Synthetic oligonucleotide
  Sense Strand Starting at position 639 of SEQ ID NO: 317714
gguuucccuguauggaaau

SEQ ID NO: 368974 - RNA, 19 nt, Artificial Sequence
  Description of Artificial Sequence: Synthetic oligonucleotide
  Antisense Strand to SEQ ID NO: 368973
auuuccauacagggaaacc

SEQ ID NO: 368975 - RNA, 19 nt, Artificial Sequence
  Description of Artificial Sequence: Synthetic oligonucleotide
  Sense Strand Starting at position 639 of SEQ ID NO: 317772
cggaucuuguggcuauuua

SEQ ID NO: 368976 - RNA, 19 nt, Artificial Sequence
  Description of Artificial Sequence: Synthetic oligonucleotide
  Antisense Strand to SEQ ID NO: 368975
uaaauagccacaagauccg

SEQ ID NO: 368977 - RNA, 19 nt, Artificial Sequence
  Description of Artificial Sequence: Synthetic oligonucleotide
  Sense Strand Starting at position 639 of SEQ ID NO: 318123
agucaauccguuggacuuu

SEQ ID NO: 368978 - RNA, 19 nt, Artificial Sequence
  Description of Artificial Sequence: Synthetic oligonucleotide
  Antisense Strand to SEQ ID NO: 368977
aaaguccaacggauugacu

SEQ ID NO: 368979 - RNA, 19 nt, Artificial Sequence
  Description of Artificial Sequence: Synthetic oligonucleotide
  Sense Strand Starting at position 639 of SEQ ID NO: 318143
ggcaucgcugggaguuauu

SEQ ID NO: 368980 - RNA, 19 nt, Artificial Sequence
  Description of Artificial Sequence: Synthetic oligonucleotide
  Antisense Strand to SEQ ID NO: 368979
aauaacucccagcgaugcc

SEQ ID NO: 368981 - RNA, 19 nt, Artificial Sequence
  Description of Artificial Sequence: Synthetic oligonucleotide
  Sense Strand Starting at position 639 of SEQ ID NO: 318161
ucuggauauccggaguaga

SEQ ID NO: 368982 - RNA, 19 nt, Artificial Sequence
  Description of Artificial Sequence: Synthetic oligonucleotide
  Antisense Strand to SEQ ID NO: 368981
ucuacuccggauauccaga

SEQ ID NO: 368983 - RNA, 19 nt, Artificial Sequence
  Description of Artificial Sequence: Synthetic oligonucleotide
  Sense Strand Starting at position 639 of SEQ ID NO: 318526
acaggcaugagccaguaaa

SEQ ID NO: 368984 - RNA, 19 nt, Artificial Sequence
  Description of Artificial Sequence: Synthetic oligonucleotide
  Antisense Strand to SEQ ID NO: 368983
uuuacuggcucaugccugu

SEQ ID NO: 368985 - RNA, 19 nt, Artificial Sequence
  Description of Artificial Sequence: Synthetic oligonucleotide
  Sense Strand Starting at position 639 of SEQ ID NO: 318576
ggagaaugccagcacugua

SEQ ID NO: 368986 - RNA, 19 nt, Artificial Sequence
  Description of Artificial Sequence: Synthetic oligonucleotide
  Antisense Strand to SEQ ID NO: 368985
uacagugcuggcauucucc

SEQ ID NO: 368987 - RNA, 19 nt, Artificial Sequence
  Description of Artificial Sequence: Synthetic oligonucleotide
  Sense Strand Starting at position 639 of SEQ ID NO: 318606
uuagaucacucagagauaa

SEQ ID NO: 368988 - RNA, 19 nt, Artificial Sequence
  Description of Artificial Sequence: Synthetic oligonucleotide
  Antisense Strand to SEQ ID NO: 368987
uuaucucugagugaucuaa

SEQ ID NO: 368989 - RNA, 19 nt, Artificial Sequence
  Description of Artificial Sequence: Synthetic oligonucleotide
  Sense Strand Starting at position 639 of SEQ ID NO: 318614
cucagagauaaagguguau

SEQ ID NO: 368990 - RNA, 19 nt, Artificial Sequence
  Description of Artificial Sequence: Synthetic oligonucleotide
  Antisense Strand to SEQ ID NO: 368989
auacaccuuuaucucugag

SEQ ID NO: 368991 - RNA, 19 nt, Artificial Sequence
  Description of Artificial Sequence: Synthetic oligonucleotide
  Sense Strand Starting at position 639 of SEQ ID NO: 318661
ggaguuacaugaucugucu

SEQ ID NO: 368992 - RNA, 19 nt, Artificial Sequence
  Description of Artificial Sequence: Synthetic oligonucleotide
  Antisense Strand to SEQ ID NO: 368991
agacagaucauguaacucc

SEQ ID NO: 368993 - RNA, 19 nt, Artificial Sequence
  Description of Artificial Sequence: Synthetic oligonucleotide
  Sense Strand Starting at position 639 of SEQ ID NO: 318678
cugcuuucucaaggucaga

SEQ ID NO: 368994 - RNA, 19 nt, Artificial Sequence
  Description of Artificial Sequence: Synthetic oligonucleotide
  Antisense Strand to SEQ ID NO: 368993
ucugaccuugagaaagcag

SEQ ID NO: 368995 - RNA, 19 nt, Artificial Sequence
  Description of Artificial Sequence: Synthetic oligonucleotide
  Sense Strand Starting at position 639 of SEQ ID NO: 318811
cuuugaguuacccagguga

SEQ ID NO: 368996 - RNA, 19 nt, Artificial Sequence
  Description of Artificial Sequence: Synthetic oligonucleotide
  Antisense Strand to SEQ ID NO: 368995
ucaccuggguaacucaaag

SEQ ID NO: 368997 - RNA, 19 nt, Artificial Sequence
  Description of Artificial Sequence: Synthetic oligonucleotide
  Sense Strand Starting at position 639 of SEQ ID NO: 318813
uugaguuacccaggugauc

SEQ ID NO: 368998 - RNA, 19 nt, Artificial Sequence
  Description of Artificial Sequence: Synthetic oligonucleotide
  Antisense Strand to SEQ ID NO: 368997
gaucaccuggguaacucaa

SEQ ID NO: 368999 - RNA, 19 nt, Artificial Sequence
  Description of Artificial Sequence: Synthetic oligonucleotide
  Sense Strand Starting at position 639 of SEQ ID NO: 318877
gcauacuuauugguggcaa

SEQ ID NO: 369000 - RNA, 19 nt, Artificial Sequence
  Description of Artificial Sequence: Synthetic oligonucleotide
  Antisense Strand to SEQ ID NO: 368999
uugccaccaauaaguaugc

SEQ ID NO: 369001 - RNA, 19 nt, Artificial Sequence
  Description of Artificial Sequence: Synthetic oligonucleotide
  Sense Strand Starting at position 639 of SEQ ID NO: 319059
ggucccagucucuaucaca

SEQ ID NO: 369002 - RNA, 19 nt, Artificial Sequence
  Description of Artificial Sequence: Synthetic oligonucleotide
  Antisense Strand to SEQ ID NO: 369001
ugugauagagacugggacc

SEQ ID NO: 369003 - RNA, 19 nt, Artificial Sequence
  Description of Artificial Sequence: Synthetic oligonucleotide
  Sense Strand Starting at position 639 of SEQ ID NO: 319128
acacuugaucccuggucua

SEQ ID NO: 369004 - RNA, 19 nt, Artificial Sequence
  Description of Artificial Sequence: Synthetic oligonucleotide
  Antisense Strand to SEQ ID NO: 369003
uagaccagggaucaagugu

SEQ ID NO: 369005 - RNA, 19 nt, Artificial Sequence
  Description of Artificial Sequence: Synthetic oligonucleotide
  Sense Strand Starting at position 639 of SEQ ID NO: 319131
cuugaucccuggucuaaac

SEQ ID NO: 369006 - RNA, 19 nt, Artificial Sequence
  Description of Artificial Sequence: Synthetic oligonucleotide
  Antisense Strand to SEQ ID NO: 369005
guuuagaccagggaucaag

SEQ ID NO: 369007 - RNA, 19 nt, Artificial Sequence
  Description of Artificial Sequence: Synthetic oligonucleotide
  Sense Strand Starting at position 639 of SEQ ID NO: 319141
ggucuaaaccuugacccua

SEQ ID NO: 369008 - RNA, 19 nt, Artificial Sequence
  Description of Artificial Sequence: Synthetic oligonucleotide
  Antisense Strand to SEQ ID NO: 369007
uagggucaagguuuagacc

SEQ ID NO: 369009 - RNA, 19 nt, Artificial Sequence
  Description of Artificial Sequence: Synthetic oligonucleotide
  Sense Strand Starting at position 639 of SEQ ID NO: 319159
agcccugaucccuacauga

SEQ ID NO: 369010 - RNA, 19 nt, Artificial Sequence
  Description of Artificial Sequence: Synthetic oligonucleotide
  Antisense Strand to SEQ ID NO: 369009
ucauguagggaucagggcu

SEQ ID NO: 369011 - RNA, 19 nt, Artificial Sequence
  Description of Artificial Sequence: Synthetic oligonucleotide
  Sense Strand Starting at position 639 of SEQ ID NO: 319161
cccugaucccuacaugagu

SEQ ID NO: 369012 - RNA, 19 nt, Artificial Sequence
  Description of Artificial Sequence: Synthetic oligonucleotide
  Antisense Strand to SEQ ID NO: 369011
acucauguagggaucaggg

SEQ ID NO: 369013 - RNA, 19 nt, Artificial Sequence
  Description of Artificial Sequence: Synthetic oligonucleotide
  Sense Strand Starting at position 640 of SEQ ID NO: 315270
ggaagccauguccaucauu

SEQ ID NO: 369014 - RNA, 19 nt, Artificial Sequence
  Description of Artificial Sequence: Synthetic oligonucleotide
  Antisense Strand to SEQ ID NO: 369013
aaugauggacauggcuucc

SEQ ID NO: 369015 - RNA, 19 nt, Artificial Sequence
  Description of Artificial Sequence: Synthetic oligonucleotide
  Sense Strand Starting at position 640 of SEQ ID NO: 315273
agccauguccaucauuguu

SEQ ID NO: 369016 - RNA, 19 nt, Artificial Sequence
  Description of Artificial Sequence: Synthetic oligonucleotide
  Antisense Strand to SEQ ID NO: 369015
aacaaugauggacauggcu

SEQ ID NO: 369017 - RNA, 19 nt, Artificial Sequence
  Description of Artificial Sequence: Synthetic oligonucleotide
  Sense Strand Starting at position 640 of SEQ ID NO: 315275
ccauguccaucauuguuaa

SEQ ID NO: 369018 - RNA, 19 nt, Artificial Sequence
  Description of Artificial Sequence: Synthetic oligonucleotide
  Antisense Strand to SEQ ID NO: 369017
uuaacaaugauggacaugg

SEQ ID NO: 369019 - RNA, 19 nt, Artificial Sequence
  Description of Artificial Sequence: Synthetic oligonucleotide
  Sense Strand Starting at position 640 of SEQ ID NO: 315278
uguccaucauuguuaauua

SEQ ID NO: 369020 - RNA, 19 nt, Artificial Sequence
  Description of Artificial Sequence: Synthetic oligonucleotide
  Antisense Strand to SEQ ID NO: 369019
uaauuaacaaugauggaca

SEQ ID NO: 369021 - RNA, 19 nt, Artificial Sequence
  Description of Artificial Sequence: Synthetic oligonucleotide
  Sense Strand Starting at position 640 of SEQ ID NO: 315309
gagcccuguacugagugaa

SEQ ID NO: 369022 - RNA, 19 nt, Artificial Sequence
  Description of Artificial Sequence: Synthetic oligonucleotide
  Antisense Strand to SEQ ID NO: 369021
uucacucaguacagggcuc

SEQ ID NO: 369023 - RNA, 19 nt, Artificial Sequence
  Description of Artificial Sequence: Synthetic oligonucleotide
  Sense Strand Starting at position 640 of SEQ ID NO: 315312
cccuguacugagugaagaa

SEQ ID NO: 369024 - RNA, 19 nt, Artificial Sequence
  Description of Artificial Sequence: Synthetic oligonucleotide
  Antisense Strand to SEQ ID NO: 369023
uucuucacucaguacaggg

SEQ ID NO: 369025 - RNA, 19 nt, Artificial Sequence
  Description of Artificial Sequence: Synthetic oligonucleotide
  Sense Strand Starting at position 640 of SEQ ID NO: 315393
gaguuaacaucacugagca

SEQ ID NO: 369026 - RNA, 19 nt, Artificial Sequence
  Description of Artificial Sequence: Synthetic oligonucleotide
  Antisense Strand to SEQ ID NO: 369025
ugcucagugauguuaacuc

SEQ ID NO: 369027 - RNA, 19 nt, Artificial Sequence
  Description of Artificial Sequence: Synthetic oligonucleotide
  Sense Strand Starting at position 640 of SEQ ID NO: 315394
aguuaacaucacugagcaa

SEQ ID NO: 369028 - RNA, 19 nt, Artificial Sequence
  Description of Artificial Sequence: Synthetic oligonucleotide
  Antisense Strand to SEQ ID NO: 369027
uugcucagugauguuaacu

SEQ ID NO: 369029 - RNA, 19 nt, Artificial Sequence
  Description of Artificial Sequence: Synthetic oligonucleotide
  Sense Strand Starting at position 640 of SEQ ID NO: 315425
aauugcuguccaggugcua

SEQ ID NO: 369030 - RNA, 19 nt, Artificial Sequence
  Description of Artificial Sequence: Synthetic oligonucleotide
  Antisense Strand to SEQ ID NO: 369029
uagcaccuggacagcaauu

SEQ ID NO: 369031 - RNA, 19 nt, Artificial Sequence
  Description of Artificial Sequence: Synthetic oligonucleotide
  Sense Strand Starting at position 640 of SEQ ID NO: 315437
ggugcuaccucauuuguuu

SEQ ID NO: 369032 - RNA, 19 nt, Artificial Sequence
  Description of Artificial Sequence: Synthetic oligonucleotide
  Antisense Strand to SEQ ID NO: 369031
aaacaaaugagguagcacc

SEQ ID NO: 369033 - RNA, 19 nt, Artificial Sequence
  Description of Artificial Sequence: Synthetic oligonucleotide
  Sense Strand Starting at position 640 of SEQ ID NO: 315461
guacuccuagcagaggaua

SEQ ID NO: 369034 - RNA, 19 nt, Artificial Sequence
  Description of Artificial Sequence: Synthetic oligonucleotide
  Antisense Strand to SEQ ID NO: 369033
uauccucugcuaggaguac

SEQ ID NO: 369035 - RNA, 19 nt, Artificial Sequence
  Description of Artificial Sequence: Synthetic oligonucleotide
  Sense Strand Starting at position 640 of SEQ ID NO: 315514
acccgaaagguugggugau

SEQ ID NO: 369036 - RNA, 19 nt, Artificial Sequence
  Description of Artificial Sequence: Synthetic oligonucleotide
  Antisense Strand to SEQ ID NO: 369035
aucacccaaccuuucgggu

SEQ ID NO: 369037 - RNA, 19 nt, Artificial Sequence
  Description of Artificial Sequence: Synthetic oligonucleotide
  Sense Strand Starting at position 640 of SEQ ID NO: 315618
ggaagaaaccucugaugca

SEQ ID NO: 369038 - RNA, 19 nt, Artificial Sequence
  Description of Artificial Sequence: Synthetic oligonucleotide
  Antisense Strand to SEQ ID NO: 369037
ugcaucagagguuucuucc

SEQ ID NO: 369039 - RNA, 19 nt, Artificial Sequence
  Description of Artificial Sequence: Synthetic oligonucleotide
  Sense Strand Starting at position 640 of SEQ ID NO: 315645
cuagcucaccucugagaau

SEQ ID NO: 369040 - RNA, 19 nt, Artificial Sequence
  Description of Artificial Sequence: Synthetic oligonucleotide
  Antisense Strand to SEQ ID NO: 369039
auucucagaggugagcuag

SEQ ID NO: 369041 - RNA, 19 nt, Artificial Sequence
  Description of Artificial Sequence: Synthetic oligonucleotide
  Sense Strand Starting at position 640 of SEQ ID NO: 315662
auuuguagcucagaaagga

SEQ ID NO: 369042 - RNA, 19 nt, Artificial Sequence
  Description of Artificial Sequence: Synthetic oligonucleotide
  Antisense Strand to SEQ ID NO: 369041
uccuuucugagcuacaaau

SEQ ID NO: 369043 - RNA, 19 nt, Artificial Sequence
  Description of Artificial Sequence: Synthetic oligonucleotide
  Sense Strand Starting at position 640 of SEQ ID NO: 315671
ucagaaaggaaccgguaau

SEQ ID NO: 369044 - RNA, 19 nt, Artificial Sequence
  Description of Artificial Sequence: Synthetic oligonucleotide
  Antisense Strand to SEQ ID NO: 369043
auuaccgguuccuuucuga

SEQ ID NO: 369045 - RNA, 19 nt, Artificial Sequence
  Description of Artificial Sequence: Synthetic oligonucleotide
  Sense Strand Starting at position 640 of SEQ ID NO: 315711
gcccuugcauuugucaaua

SEQ ID NO: 369046 - RNA, 19 nt, Artificial Sequence
  Description of Artificial Sequence: Synthetic oligonucleotide
  Antisense Strand to SEQ ID NO: 369045
uauugacaaaugcaagggc

SEQ ID NO: 369047 - RNA, 19 nt, Artificial Sequence
  Description of Artificial Sequence: Synthetic oligonucleotide
  Sense Strand Starting at position 640 of SEQ ID NO: 315722
ugucaauacucacuguauu

SEQ ID NO: 369048 - RNA, 19 nt, Artificial Sequence
  Description of Artificial Sequence: Synthetic oligonucleotide
  Antisense Strand to SEQ ID NO: 369047
aauacagugaguauugaca

SEQ ID NO: 369049 - RNA, 19 nt, Artificial Sequence
  Description of Artificial Sequence: Synthetic oligonucleotide
  Sense Strand Starting at position 640 of SEQ ID NO: 315779
cacuguuaccuagguugga

SEQ ID NO: 369050 - RNA, 19 nt, Artificial Sequence
  Description of Artificial Sequence: Synthetic oligonucleotide
  Antisense Strand to SEQ ID NO: 369049
uccaaccuagguaacagug

SEQ ID NO: 369051 - RNA, 19 nt, Artificial Sequence
  Description of Artificial Sequence: Synthetic oligonucleotide
  Sense Strand Starting at position 640 of SEQ ID NO: 316045
ugucaauaccauuguguuu

SEQ ID NO: 369052 - RNA, 19 nt, Artificial Sequence
  Description of Artificial Sequence: Synthetic oligonucleotide
  Antisense Strand to SEQ ID NO: 369051
aaacacaaugguauugaca

SEQ ID NO: 369053 - RNA, 19 nt, Artificial Sequence
  Description of Artificial Sequence: Synthetic oligonucleotide
  Sense Strand Starting at position 640 of SEQ ID NO: 316056
uuguguuucugagccuauc

SEQ ID NO: 369054 - RNA, 19 nt, Artificial Sequence
  Description of Artificial Sequence: Synthetic oligonucleotide
  Antisense Strand to SEQ ID NO: 369053
gauaggcucagaaacacaa

SEQ ID NO: 369055 - RNA, 19 nt, Artificial Sequence
  Description of Artificial Sequence: Synthetic oligonucleotide
  Sense Strand Starting at position 640 of SEQ ID NO: 316155
cccuguggagcgugaugau

SEQ ID NO: 369056 - RNA, 19 nt, Artificial Sequence
  Description of Artificial Sequence: Synthetic oligonucleotide
  Antisense Strand to SEQ ID NO: 369055
aucaucacgcuccacaggg

SEQ ID NO: 369057 - RNA, 19 nt, Artificial Sequence
  Description of Artificial Sequence: Synthetic oligonucleotide
  Sense Strand Starting at position 640 of SEQ ID NO: 316233
gggagaacugccuaggcaa

SEQ ID NO: 369058 - RNA, 19 nt, Artificial Sequence
  Description of Artificial Sequence: Synthetic oligonucleotide
  Antisense Strand to SEQ ID NO: 369057
uugccuaggcaguucuccc

SEQ ID NO: 369059 - RNA, 19 nt, Artificial Sequence
  Description of Artificial Sequence: Synthetic oligonucleotide
  Sense Strand Starting at position 640 of SEQ ID NO: 316361
cggagacaguucucucaug

SEQ ID NO: 369060 - RNA, 19 nt, Artificial Sequence
  Description of Artificial Sequence: Synthetic oligonucleotide
  Antisense Strand to SEQ ID NO: 369059
caugagagaacugucuccg

SEQ ID NO: 369061 - RNA, 19 nt, Artificial Sequence
  Description of Artificial Sequence: Synthetic oligonucleotide
  Sense Strand Starting at position 640 of SEQ ID NO: 316362
ggagacaguucucucauga

SEQ ID NO: 369062 - RNA, 19 nt, Artificial Sequence
  Description of Artificial Sequence: Synthetic oligonucleotide
  Antisense Strand to SEQ ID NO: 369061
ucaugagagaacugucucc

SEQ ID NO: 369063 - RNA, 19 nt, Artificial Sequence
  Description of Artificial Sequence: Synthetic oligonucleotide
  Sense Strand Starting at position 640 of SEQ ID NO: 316373
ucucaugacguucgaguaa

SEQ ID NO: 369064 - RNA, 19 nt, Artificial Sequence
  Description of Artificial Sequence: Synthetic oligonucleotide
  Antisense Strand to SEQ ID NO: 369063
uuacucgaacgucaugaga

SEQ ID NO: 369065 - RNA, 19 nt, Artificial Sequence
  Description of Artificial Sequence: Synthetic oligonucleotide
  Sense Strand Starting at position 640 of SEQ ID NO: 316701
cuuaaauccgagugaccuc

SEQ ID NO: 369066 - RNA, 19 nt, Artificial Sequence
  Description of Artificial Sequence: Synthetic oligonucleotide
  Antisense Strand to SEQ ID NO: 369065
gaggucacucggauuuaag

SEQ ID NO: 369067 - RNA, 19 nt, Artificial Sequence
  Description of Artificial Sequence: Synthetic oligonucleotide
  Sense Strand Starting at position 640 of SEQ ID NO: 316708
ccgagugaccucuacaaac

SEQ ID NO: 369068 - RNA, 19 nt, Artificial Sequence
  Description of Artificial Sequence: Synthetic oligonucleotide
  Antisense Strand to SEQ ID NO: 369067
guuuguagaggucacucgg

SEQ ID NO: 369069 - RNA, 19 nt, Artificial Sequence
  Description of Artificial Sequence: Synthetic oligonucleotide
  Sense Strand Starting at position 640 of SEQ ID NO: 316765
gggacagugucacugucuu

SEQ ID NO: 369070 - RNA, 19 nt, Artificial Sequence
  Description of Artificial Sequence: Synthetic oligonucleotide
  Antisense Strand to SEQ ID NO: 369069
aagacagugacacuguccc

SEQ ID NO: 369071 - RNA, 19 nt, Artificial Sequence
  Description of Artificial Sequence: Synthetic oligonucleotide
  Sense Strand Starting at position 640 of SEQ ID NO: 316788
guugacaccugcucugagu

SEQ ID NO: 369072 - RNA, 19 nt, Artificial Sequence
  Description of Artificial Sequence: Synthetic oligonucleotide
  Antisense Strand to SEQ ID NO: 369071
acucagagcaggugucaac

SEQ ID NO: 369073 - RNA, 19 nt, Artificial Sequence
  Description of Artificial Sequence: Synthetic oligonucleotide
  Sense Strand Starting at position 640 of SEQ ID NO: 316790
ugacaccugcucugaguaa

SEQ ID NO: 369074 - RNA, 19 nt, Artificial Sequence
  Description of Artificial Sequence: Synthetic oligonucleotide
  Antisense Strand to SEQ ID NO: 369073
uuacucagagcagguguca

SEQ ID NO: 369075 - RNA, 19 nt, Artificial Sequence
  Description of Artificial Sequence: Synthetic oligonucleotide
  Sense Strand Starting at position 640 of SEQ ID NO: 316794
accugcucugaguaacuca

SEQ ID NO: 369076 - RNA, 19 nt, Artificial Sequence
  Description of Artificial Sequence: Synthetic oligonucleotide
  Antisense Strand to SEQ ID NO: 369075
ugaguuacucagagcaggu

SEQ ID NO: 369077 - RNA, 19 nt, Artificial Sequence
  Description of Artificial Sequence: Synthetic oligonucleotide
  Sense Strand Starting at position 640 of SEQ ID NO: 316799
cucugaguaacucacggaa

SEQ ID NO: 369078 - RNA, 19 nt, Artificial Sequence
  Description of Artificial Sequence: Synthetic oligonucleotide
  Antisense Strand to SEQ ID NO: 369077
uuccgugaguuacucagag

SEQ ID NO: 369079 - RNA, 19 nt, Artificial Sequence
  Description of Artificial Sequence: Synthetic oligonucleotide
  Sense Strand Starting at position 640 of SEQ ID NO: 317082
ccuaccugugccggagaaa

SEQ ID NO: 369080 - RNA, 19 nt, Artificial Sequence
  Description of Artificial Sequence: Synthetic oligonucleotide
  Antisense Strand to SEQ ID NO: 369079
uuucuccggcacagguagg

SEQ ID NO: 369081 - RNA, 19 nt, Artificial Sequence
  Description of Artificial Sequence: Synthetic oligonucleotide
  Sense Strand Starting at position 640 of SEQ ID NO: 317968
ucggguaccuuucugggaa

SEQ ID NO: 369082 - RNA, 19 nt, Artificial Sequence
  Description of Artificial Sequence: Synthetic oligonucleotide
  Antisense Strand to SEQ ID NO: 369081
uucccagaaagguacccga

SEQ ID NO: 369083 - RNA, 19 nt, Artificial Sequence
  Description of Artificial Sequence: Synthetic oligonucleotide
  Sense Strand Starting at position 640 of SEQ ID NO: 317996
gcuucucagccgggagaaa

SEQ ID NO: 369084 - RNA, 19 nt, Artificial Sequence
  Description of Artificial Sequence: Synthetic oligonucleotide
  Antisense Strand to SEQ ID NO: 369083
uuucucccggcugagaagc

SEQ ID NO: 369085 - RNA, 19 nt, Artificial Sequence
  Description of Artificial Sequence: Synthetic oligonucleotide
  Sense Strand Starting at position 640 of SEQ ID NO: 318122
cgcgguuugcgggaagcaa

SEQ ID NO: 369086 - RNA, 19 nt, Artificial Sequence
  Description of Artificial Sequence: Synthetic oligonucleotide
  Antisense Strand to SEQ ID NO: 369085
uugcuucccgcaaaccgcg

SEQ ID NO: 369087 - RNA, 19 nt, Artificial Sequence
  Description of Artificial Sequence: Synthetic oligonucleotide
  Sense Strand Starting at position 640 of SEQ ID NO: 318921
uuagccaaccauugggauu

SEQ ID NO: 369088 - RNA, 19 nt, Artificial Sequence
  Description of Artificial Sequence: Synthetic oligonucleotide
  Antisense Strand to SEQ ID NO: 369087
aaucccaaugguuggcuaa

SEQ ID NO: 369089 - RNA, 19 nt, Artificial Sequence
  Description of Artificial Sequence: Synthetic oligonucleotide
  Sense Strand Starting at position 640 of SEQ ID NO: 319011
uauuaauuggauugucugu

SEQ ID NO: 369090 - RNA, 19 nt, Artificial Sequence
  Description of Artificial Sequence: Synthetic oligonucleotide
  Antisense Strand to SEQ ID NO: 369089
acagacaauccaauuaaua

SEQ ID NO: 369091 - RNA, 19 nt, Artificial Sequence
  Description of Artificial Sequence: Synthetic oligonucleotide
  Sense Strand Starting at position 640 of SEQ ID NO: 319013
uuaauuggauugucuguca

SEQ ID NO: 369092 - RNA, 19 nt, Artificial Sequence
  Description of Artificial Sequence: Synthetic oligonucleotide
  Antisense Strand to SEQ ID NO: 369091
ugacagacaauccaauuaa

SEQ ID NO: 369093 - RNA, 19 nt, Artificial Sequence
  Description of Artificial Sequence: Synthetic oligonucleotide
  Sense Strand Starting at position 641 of SEQ ID NO: 315643
uaguuuccagauuggcaaa

SEQ ID NO: 369094 - RNA, 19 nt, Artificial Sequence
  Description of Artificial Sequence: Synthetic oligonucleotide
  Antisense Strand to SEQ ID NO: 369093
uuugccaaucuggaaacua

SEQ ID NO: 369095 - RNA, 19 nt, Artificial Sequence
  Description of Artificial Sequence: Synthetic oligonucleotide
  Sense Strand Starting at position 641 of SEQ ID NO: 315744
cugauaaccuguguuagga

SEQ ID NO: 369096 - RNA, 19 nt, Artificial Sequence
  Description of Artificial Sequence: Synthetic oligonucleotide
  Antisense Strand to SEQ ID NO: 369095
uccuaacacagguuaucag

SEQ ID NO: 369097 - RNA, 19 nt, Artificial Sequence
  Description of Artificial Sequence: Synthetic oligonucleotide
  Sense Strand Starting at position 641 of SEQ ID NO: 315849
aucaacauauagucaguau

SEQ ID NO: 369098 - RNA, 19 nt, Artificial Sequence
  Description of Artificial Sequence: Synthetic oligonucleotide
  Antisense Strand to SEQ ID NO: 369097
auacugacuauauguugau

SEQ ID NO: 369099 - RNA, 19 nt, Artificial Sequence
  Description of Artificial Sequence: Synthetic oligonucleotide
  Sense Strand Starting at position 641 of SEQ ID NO: 316014
uuauuagacggcugugaga

SEQ ID NO: 369100 - RNA, 19 nt, Artificial Sequence
  Description of Artificial Sequence: Synthetic oligonucleotide
  Antisense Strand to SEQ ID NO: 369099
ucucacagccgucuaauaa

SEQ ID NO: 369101 - RNA, 19 nt, Artificial Sequence
  Description of Artificial Sequence: Synthetic oligonucleotide
  Sense Strand Starting at position 641 of SEQ ID NO: 316016
auuagacggcugugagaau

SEQ ID NO: 369102 - RNA, 19 nt, Artificial Sequence
  Description of Artificial Sequence: Synthetic oligonucleotide
  Antisense Strand to SEQ ID NO: 369101
auucucacagccgucuaau

SEQ ID NO: 369103 - RNA, 19 nt, Artificial Sequence
  Description of Artificial Sequence: Synthetic oligonucleotide
  Sense Strand Starting at position 641 of SEQ ID NO: 316120
guccuuagaugcucagaau

SEQ ID NO: 369104 - RNA, 19 nt, Artificial Sequence
  Description of Artificial Sequence: Synthetic oligonucleotide
  Antisense Strand to SEQ ID NO: 369103
auucugagcaucuaaggac

SEQ ID NO: 369105 - RNA, 19 nt, Artificial Sequence
  Description of Artificial Sequence: Synthetic oligonucleotide
  Sense Strand Starting at position 641 of SEQ ID NO: 316121
uccuuagaugcucagaauc

SEQ ID NO: 369106 - RNA, 19 nt, Artificial Sequence
  Description of Artificial Sequence: Synthetic oligonucleotide
  Antisense Strand to SEQ ID NO: 369105
gauucugagcaucuaagga

SEQ ID NO: 369107 - RNA, 19 nt, Artificial Sequence
  Description of Artificial Sequence: Synthetic oligonucleotide
  Sense Strand Starting at position 641 of SEQ ID NO: 316444
cagugaugccuugagaagg

SEQ ID NO: 369108 - RNA, 19 nt, Artificial Sequence
  Description of Artificial Sequence: Synthetic oligonucleotide
  Antisense Strand to SEQ ID NO: 369107
ccuucucaaggcaucacug

SEQ ID NO: 369109 - RNA, 19 nt, Artificial Sequence
  Description of Artificial Sequence: Synthetic oligonucleotide
  Sense Strand Starting at position 641 of SEQ ID NO: 316591
cgaggacaucuguguacaa

SEQ ID NO: 369110 - RNA, 19 nt, Artificial Sequence
  Description of Artificial Sequence: Synthetic oligonucleotide
  Antisense Strand to SEQ ID NO: 369109
uuguacacagauguccucg

SEQ ID NO: 369111 - RNA, 19 nt, Artificial Sequence
  Description of Artificial Sequence: Synthetic oligonucleotide
  Sense Strand Starting at position 641 of SEQ ID NO: 316592
gaggacaucuguguacaac

SEQ ID NO: 369112 - RNA, 19 nt, Artificial Sequence
  Description of Artificial Sequence: Synthetic oligonucleotide
  Antisense Strand to SEQ ID NO: 369111
guuguacacagauguccuc

SEQ ID NO: 369113 - RNA, 19 nt, Artificial Sequence
  Description of Artificial Sequence: Synthetic oligonucleotide
  Sense Strand Starting at position 641 of SEQ ID NO: 316725
gcggauuucucgucuggaa

SEQ ID NO: 369114 - RNA, 19 nt, Artificial Sequence
  Description of Artificial Sequence: Synthetic oligonucleotide
  Antisense Strand to SEQ ID NO: 369113
uuccagacgagaaauccgc

SEQ ID NO: 369115 - RNA, 19 nt, Artificial Sequence
  Description of Artificial Sequence: Synthetic oligonucleotide
  Sense Strand Starting at position 641 of SEQ ID NO: 317433
acgucugggacucaaauua

SEQ ID NO: 369116 - RNA, 19 nt, Artificial Sequence
  Description of Artificial Sequence: Synthetic oligonucleotide
  Antisense Strand to SEQ ID NO: 369115
uaauuugagucccagacgu

SEQ ID NO: 369117 - RNA, 19 nt, Artificial Sequence
  Description of Artificial Sequence: Synthetic oligonucleotide
  Sense Strand Starting at position 641 of SEQ ID NO: 317440
ggacucaaauuauuacagu

SEQ ID NO: 369118 - RNA, 19 nt, Artificial Sequence
  Description of Artificial Sequence: Synthetic oligonucleotide
  Antisense Strand to SEQ ID NO: 369117
acuguaauaauuugagucc

SEQ ID NO: 369119 - RNA, 19 nt, Artificial Sequence
  Description of Artificial Sequence: Synthetic oligonucleotide
  Sense Strand Starting at position 641 of SEQ ID NO: 317454
acaguuauagcagacggau

SEQ ID NO: 369120 - RNA, 19 nt, Artificial Sequence
  Description of Artificial Sequence: Synthetic oligonucleotide
  Antisense Strand to SEQ ID NO: 369119
auccgucugcuauaacugu

SEQ ID NO: 369121 - RNA, 19 nt, Artificial Sequence
  Description of Artificial Sequence: Synthetic oligonucleotide
  Sense Strand Starting at position 641 of SEQ ID NO: 317456
aguuauagcagacggauga

SEQ ID NO: 369122 - RNA, 19 nt, Artificial Sequence
  Description of Artificial Sequence: Synthetic oligonucleotide
  Antisense Strand to SEQ ID NO: 369121
ucauccgucugcuauaacu

SEQ ID NO: 369123 - RNA, 19 nt, Artificial Sequence
  Description of Artificial Sequence: Synthetic oligonucleotide
  Sense Strand Starting at position 641 of SEQ ID NO: 317467
acggaugaaagucguugau

SEQ ID NO: 369124 - RNA, 19 nt, Artificial Sequence
  Description of Artificial Sequence: Synthetic oligonucleotide
  Antisense Strand to SEQ ID NO: 369123
aucaacgacuuucauccgu

SEQ ID NO: 369125 - RNA, 19 nt, Artificial Sequence
  Description of Artificial Sequence: Synthetic oligonucleotide
  Sense Strand Starting at position 641 of SEQ ID NO: 317473
gaaagucguugauuuagug

SEQ ID NO: 369126 - RNA, 19 nt, Artificial Sequence
  Description of Artificial Sequence: Synthetic oligonucleotide
  Antisense Strand to SEQ ID NO: 369125
cacuaaaucaacgacuuuc

SEQ ID NO: 369127 - RNA, 19 nt, Artificial Sequence
  Description of Artificial Sequence: Synthetic oligonucleotide
  Sense Strand Starting at position 641 of SEQ ID NO: 317479
cguugauuuaguggccuca

SEQ ID NO: 369128 - RNA, 19 nt, Artificial Sequence
  Description of Artificial Sequence: Synthetic oligonucleotide
  Antisense Strand to SEQ ID NO: 369127
ugaggccacuaaaucaacg

SEQ ID NO: 369129 - RNA, 19 nt, Artificial Sequence
  Description of Artificial Sequence: Synthetic oligonucleotide
  Sense Strand Starting at position 641 of SEQ ID NO: 317489
guggccucagaauaaacua

SEQ ID NO: 369130 - RNA, 19 nt, Artificial Sequence
  Description of Artificial Sequence: Synthetic oligonucleotide
  Antisense Strand to SEQ ID NO: 369129
uaguuuauucugaggccac

SEQ ID NO: 369131 - RNA, 19 nt, Artificial Sequence
  Description of Artificial Sequence: Synthetic oligonucleotide
  Sense Strand Starting at position 641 of SEQ ID NO: 317603
ucgaccucuugauuccuaa

SEQ ID NO: 369132 - RNA, 19 nt, Artificial Sequence
  Description of Artificial Sequence: Synthetic oligonucleotide
  Antisense Strand to SEQ ID NO: 369131
uuaggaaucaagaggucga

SEQ ID NO: 369133 - RNA, 19 nt, Artificial Sequence
  Description of Artificial Sequence: Synthetic oligonucleotide
  Sense Strand Starting at position 641 of SEQ ID NO: 317615
uuccuaauugacugcauga

SEQ ID NO: 369134 - RNA, 19 nt, Artificial Sequence
  Description of Artificial Sequence: Synthetic oligonucleotide
  Antisense Strand to SEQ ID NO: 369133
ucaugcagucaauuaggaa

SEQ ID NO: 369135 - RNA, 19 nt, Artificial Sequence
  Description of Artificial Sequence: Synthetic oligonucleotide
  Sense Strand Starting at position 641 of SEQ ID NO: 317620
aauugacugcaugaugagu

SEQ ID NO: 369136 - RNA, 19 nt, Artificial Sequence
  Description of Artificial Sequence: Synthetic oligonucleotide
  Antisense Strand to SEQ ID NO: 369135
acucaucaugcagucaauu

SEQ ID NO: 369137 - RNA, 19 nt, Artificial Sequence
  Description of Artificial Sequence: Synthetic oligonucleotide
  Sense Strand Starting at position 641 of SEQ ID NO: 317689
gguggaauuaccuggccaa

SEQ ID NO: 369138 - RNA, 19 nt, Artificial Sequence
  Description of Artificial Sequence: Synthetic oligonucleotide
  Antisense Strand to SEQ ID NO: 369137
uuggccagguaauuccacc

SEQ ID NO: 369139 - RNA, 19 nt, Artificial Sequence
  Description of Artificial Sequence: Synthetic oligonucleotide
  Sense Strand Starting at position 641 of SEQ ID NO: 317690
guggaauuaccuggccaag

SEQ ID NO: 369140 - RNA, 19 nt, Artificial Sequence
  Description of Artificial Sequence: Synthetic oligonucleotide
  Antisense Strand to SEQ ID NO: 369139
cuuggccagguaauuccac

SEQ ID NO: 369141 - RNA, 19 nt, Artificial Sequence
  Description of Artificial Sequence: Synthetic oligonucleotide
  Sense Strand Starting at position 641 of SEQ ID NO: 317692
ggaauuaccuggccaagaa

SEQ ID NO: 369142 - RNA, 19 nt, Artificial Sequence
  Description of Artificial Sequence: Synthetic oligonucleotide
  Antisense Strand to SEQ ID NO: 369141
uucuuggccagguaauucc

SEQ ID NO: 369143 - RNA, 19 nt, Artificial Sequence
  Description of Artificial Sequence: Synthetic oligonucleotide
  Sense Strand Starting at position 641 of SEQ ID NO: 317776
uucccuuuccucgaggagu

SEQ ID NO: 369144 - RNA, 19 nt, Artificial Sequence
  Description of Artificial Sequence: Synthetic oligonucleotide
  Antisense Strand to SEQ ID NO: 369143
acuccucgaggaaagggaa

SEQ ID NO: 369145 - RNA, 19 nt, Artificial Sequence
  Description of Artificial Sequence: Synthetic oligonucleotide
  Sense Strand Starting at position 641 of SEQ ID NO: 317861
aucaaagaauugcaaagaa

SEQ ID NO: 369146 - RNA, 19 nt, Artificial Sequence
  Description of Artificial Sequence: Synthetic oligonucleotide
  Antisense Strand to SEQ ID NO: 369145
uucuuugcaauucuuugau

SEQ ID NO: 369147 - RNA, 19 nt, Artificial Sequence
  Description of Artificial Sequence: Synthetic oligonucleotide
  Sense Strand Starting at position 641 of SEQ ID NO: 317943
ucauauaugugggcaguca

SEQ ID NO: 369148 - RNA, 19 nt, Artificial Sequence
  Description of Artificial Sequence: Synthetic oligonucleotide
  Antisense Strand to SEQ ID NO: 369147
ugacugcccacauauauga

SEQ ID NO: 369149 - RNA, 19 nt, Artificial Sequence
  Description of Artificial Sequence: Synthetic oligonucleotide
  Sense Strand Starting at position 641 of SEQ ID NO: 317944
cauauaugugggcagucaa

SEQ ID NO: 369150 - RNA, 19 nt, Artificial Sequence
  Description of Artificial Sequence: Synthetic oligonucleotide
  Antisense Strand to SEQ ID NO: 369149
uugacugcccacauauaug

SEQ ID NO: 369151 - RNA, 19 nt, Artificial Sequence
  Description of Artificial Sequence: Synthetic oligonucleotide
  Sense Strand Starting at position 641 of SEQ ID NO: 317951
gugggcagucaagaauacu

SEQ ID NO: 369152 - RNA, 19 nt, Artificial Sequence
  Description of Artificial Sequence: Synthetic oligonucleotide
  Antisense Strand to SEQ ID NO: 369151
aguauucuugacugcccac

SEQ ID NO: 369153 - RNA, 19 nt, Artificial Sequence
  Description of Artificial Sequence: Synthetic oligonucleotide
  Sense Strand Starting at position 641 of SEQ ID NO: 318047
uuccuacaggcuugaaauc

SEQ ID NO: 369154 - RNA, 19 nt, Artificial Sequence
  Description of Artificial Sequence: Synthetic oligonucleotide
  Antisense Strand to SEQ ID NO: 369153
gauuucaagccuguaggaa

SEQ ID NO: 369155 - RNA, 19 nt, Artificial Sequence
  Description of Artificial Sequence: Synthetic oligonucleotide
  Sense Strand Starting at position 641 of SEQ ID NO: 318110
uccuauucucacgagacau

SEQ ID NO: 369156 - RNA, 19 nt, Artificial Sequence
  Description of Artificial Sequence: Synthetic oligonucleotide
  Antisense Strand to SEQ ID NO: 369155
augucucgugagaauagga

SEQ ID NO: 369157 - RNA, 19 nt, Artificial Sequence
  Description of Artificial Sequence: Synthetic oligonucleotide
  Sense Strand Starting at position 641 of SEQ ID NO: 318112
cuauucucacgagacaugu

SEQ ID NO: 369158 - RNA, 19 nt, Artificial Sequence
  Description of Artificial Sequence: Synthetic oligonucleotide
  Antisense Strand to SEQ ID NO: 369157
acaugucucgugagaauag

SEQ ID NO: 369159 - RNA, 19 nt, Artificial Sequence
  Description of Artificial Sequence: Synthetic oligonucleotide
  Sense Strand Starting at position 641 of SEQ ID NO: 318308
aaguuauaugacugugguc

SEQ ID NO: 369160 - RNA, 19 nt, Artificial Sequence
  Description of Artificial Sequence: Synthetic oligonucleotide
  Antisense Strand to SEQ ID NO: 369159
gaccacagucauauaacuu

SEQ ID NO: 369161 - RNA, 19 nt, Artificial Sequence
  Description of Artificial Sequence: Synthetic oligonucleotide
  Sense Strand Starting at position 641 of SEQ ID NO: 318330
cuugaaacagcuuauugua

SEQ ID NO: 369162 - RNA, 19 nt, Artificial Sequence
  Description of Artificial Sequence: Synthetic oligonucleotide
  Antisense Strand to SEQ ID NO: 369161
uacaauaagcuguuucaag

SEQ ID NO: 369163 - RNA, 19 nt, Artificial Sequence
  Description of Artificial Sequence: Synthetic oligonucleotide
  Sense Strand Starting at position 641 of SEQ ID NO: 318396
uacuaaguuggguagcuau

SEQ ID NO: 369164 - RNA, 19 nt, Artificial Sequence
  Description of Artificial Sequence: Synthetic oligonucleotide
  Antisense Strand to SEQ ID NO: 369163
auagcuacccaacuuagua

SEQ ID NO: 369165 - RNA, 19 nt, Artificial Sequence
  Description of Artificial Sequence: Synthetic oligonucleotide
  Sense Strand Starting at position 641 of SEQ ID NO: 318399
uaaguuggguagcuauaua

SEQ ID NO: 369166 - RNA, 19 nt, Artificial Sequence
  Description of Artificial Sequence: Synthetic oligonucleotide
  Antisense Strand to SEQ ID NO: 369165
uauauagcuacccaacuua

SEQ ID NO: 369167 - RNA, 19 nt, Artificial Sequence
  Description of Artificial Sequence: Synthetic oligonucleotide
  Sense Strand Starting at position 641 of SEQ ID NO: 318620
ggacuacuguauccauauu

SEQ ID NO: 369168 - RNA, 19 nt, Artificial Sequence
  Description of Artificial Sequence: Synthetic oligonucleotide
  Antisense Strand to SEQ ID NO: 369167
aauauggauacaguagucc

SEQ ID NO: 369169 - RNA, 19 nt, Artificial Sequence
  Description of Artificial Sequence: Synthetic oligonucleotide
  Sense Strand Starting at position 641 of SEQ ID NO: 318984
gaugaacaauagcuaguua

SEQ ID NO: 369170 - RNA, 19 nt, Artificial Sequence
  Description of Artificial Sequence: Synthetic oligonucleotide
  Antisense Strand to SEQ ID NO: 369169
uaacuagcuauuguucauc

SEQ ID NO: 369171 - RNA, 19 nt, Artificial Sequence
  Description of Artificial Sequence: Synthetic oligonucleotide
  Sense Strand Starting at position 641 of SEQ ID NO: 319088
ugcccauuuccaugucuuu

SEQ ID NO: 369172 - RNA, 19 nt, Artificial Sequence
  Description of Artificial Sequence: Synthetic oligonucleotide
  Antisense Strand to SEQ ID NO: 369171
aaagacauggaaaugggca

SEQ ID NO: 369173 - RNA, 19 nt, Artificial Sequence
  Description of Artificial Sequence: Synthetic oligonucleotide
  Sense Strand Starting at position 642 of SEQ ID NO: 315323
aagagaagauuccuuguuc

SEQ ID NO: 369174 - RNA, 19 nt, Artificial Sequence
  Description of Artificial Sequence: Synthetic oligonucleotide
  Antisense Strand to SEQ ID NO: 369173
gaacaaggaaucuucucuu

SEQ ID NO: 369175 - RNA, 19 nt, Artificial Sequence
  Description of Artificial Sequence: Synthetic oligonucleotide
  Sense Strand Starting at position 642 of SEQ ID NO: 315393
acuaaugagcuuuaugucu

SEQ ID NO: 369176 - RNA, 19 nt, Artificial Sequence
  Description of Artificial Sequence: Synthetic oligonucleotide
  Antisense Strand to SEQ ID NO: 369175
agacauaaagcucauuagu

SEQ ID NO: 369177 - RNA, 19 nt, Artificial Sequence
  Description of Artificial Sequence: Synthetic oligonucleotide
  Sense Strand Starting at position 642 of SEQ ID NO: 315428
auaugacaugugugguaaa

SEQ ID NO: 369178 - RNA, 19 nt, Artificial Sequence
  Description of Artificial Sequence: Synthetic oligonucleotide
  Antisense Strand to SEQ ID NO: 369177
uuuaccacacaugucauau

SEQ ID NO: 369179 - RNA, 19 nt, Artificial Sequence
  Description of Artificial Sequence: Synthetic oligonucleotide
  Sense Strand Starting at position 642 of SEQ ID NO: 315441
gguaaaguuaacugagguc

SEQ ID NO: 369180 - RNA, 19 nt, Artificial Sequence
  Description of Artificial Sequence: Synthetic oligonucleotide
  Antisense Strand to SEQ ID NO: 369179
gaccucaguuaacuuuacc

SEQ ID NO: 369181 - RNA, 19 nt, Artificial Sequence
  Description of Artificial Sequence: Synthetic oligonucleotide
  Sense Strand Starting at position 642 of SEQ ID NO: 315546
ccagaaggcucauuauucu

SEQ ID NO: 369182 - RNA, 19 nt, Artificial Sequence
  Description of Artificial Sequence: Synthetic oligonucleotide
  Antisense Strand to SEQ ID NO: 369181
agaauaaugagccuucugg

SEQ ID NO: 369183 - RNA, 19 nt, Artificial Sequence
  Description of Artificial Sequence: Synthetic oligonucleotide
  Sense Strand Starting at position 642 of SEQ ID NO: 315572
gucauuuaaugguggauuu

SEQ ID NO: 369184 - RNA, 19 nt, Artificial Sequence
  Description of Artificial Sequence: Synthetic oligonucleotide
  Antisense Strand to SEQ ID NO: 369183
aaauccaccauuaaaugac

SEQ ID NO: 369185 - RNA, 19 nt, Artificial Sequence
  Description of Artificial Sequence: Synthetic oligonucleotide
  Sense Strand Starting at position 642 of SEQ ID NO: 315688
aucugagagcacggaucua

SEQ ID NO: 369186 - RNA, 19 nt, Artificial Sequence
  Description of Artificial Sequence: Synthetic oligonucleotide
  Antisense Strand to SEQ ID NO: 369185
uagauccgugcucucagau

SEQ ID NO: 369187 - RNA, 19 nt, Artificial Sequence
  Description of Artificial Sequence: Synthetic oligonucleotide
  Sense Strand Starting at position 642 of SEQ ID NO: 315744
uguguagugccuucauugu

SEQ ID NO: 369188 - RNA, 19 nt, Artificial Sequence
  Description of Artificial Sequence: Synthetic oligonucleotide
  Antisense Strand to SEQ ID NO: 369187
acaaugaaggcacuacaca

SEQ ID NO: 369189 - RNA, 19 nt, Artificial Sequence
  Description of Artificial Sequence: Synthetic oligonucleotide
  Sense Strand Starting at position 642 of SEQ ID NO: 315779
acuuuauggccuuagcaua

SEQ ID NO: 369190 - RNA, 19 nt, Artificial Sequence
  Description of Artificial Sequence: Synthetic oligonucleotide
  Antisense Strand to SEQ ID NO: 369189
uaugcuaaggccauaaagu

SEQ ID NO: 369191 - RNA, 19 nt, Artificial Sequence
  Description of Artificial Sequence: Synthetic oligonucleotide
  Sense Strand Starting at position 642 of SEQ ID NO: 315910
ucaacuagacuuugaugca

SEQ ID NO: 369192 - RNA, 19 nt, Artificial Sequence
  Description of Artificial Sequence: Synthetic oligonucleotide
  Antisense Strand to SEQ ID NO: 369191
ugcaucaaagucuaguuga

SEQ ID NO: 369193 - RNA, 19 nt, Artificial Sequence
  Description of Artificial Sequence: Synthetic oligonucleotide
  Sense Strand Starting at position 642 of SEQ ID NO: 316048
gagggcuuaacauaguguu

SEQ ID NO: 369194 - RNA, 19 nt, Artificial Sequence
  Description of Artificial Sequence: Synthetic oligonucleotide
  Antisense Strand to SEQ ID NO: 369193
aacacuauguuaagcccuc

SEQ ID NO: 369195 - RNA, 19 nt, Artificial Sequence
  Description of Artificial Sequence: Synthetic oligonucleotide
  Sense Strand Starting at position 642 of SEQ ID NO: 316054
uuaacauaguguucuauac

SEQ ID NO: 369196 - RNA, 19 nt, Artificial Sequence
  Description of Artificial Sequence: Synthetic oligonucleotide
  Antisense Strand to SEQ ID NO: 369195
guauagaacacuauguuaa

SEQ ID NO: 369197 - RNA, 19 nt, Artificial Sequence
  Description of Artificial Sequence: Synthetic oligonucleotide
  Sense Strand Starting at position 642 of SEQ ID NO: 316168
cgaaacagguguuuacaau

SEQ ID NO: 369198 - RNA, 19 nt, Artificial Sequence
  Description of Artificial Sequence: Synthetic oligonucleotide
  Antisense Strand to SEQ ID NO: 369197
auuguaaacaccuguuucg

SEQ ID NO: 369199 - RNA, 19 nt, Artificial Sequence
  Description of Artificial Sequence: Synthetic oligonucleotide
  Sense Strand Starting at position 642 of SEQ ID NO: 316372
aaagaagggucuuucccuu

SEQ ID NO: 369200 - RNA, 19 nt, Artificial Sequence
  Description of Artificial Sequence: Synthetic oligonucleotide
  Antisense Strand to SEQ ID NO: 369199
aagggaaagacccuucuuu

SEQ ID NO: 369201 - RNA, 19 nt, Artificial Sequence
  Description of Artificial Sequence: Synthetic oligonucleotide
  Sense Strand Starting at position 642 of SEQ ID NO: 317582
acuguucuugagcagagga

SEQ ID NO: 369202 - RNA, 19 nt, Artificial Sequence
  Description of Artificial Sequence: Synthetic oligonucleotide
  Antisense Strand to SEQ ID NO: 369201
uccucugcucaagaacagu

SEQ ID NO: 369203 - RNA, 19 nt, Artificial Sequence
  Description of Artificial Sequence: Synthetic oligonucleotide
  Sense Strand Starting at position 642 of SEQ ID NO: 317603
aagagaugccuguagaggu

SEQ ID NO: 369204 - RNA, 19 nt, Artificial Sequence
  Description of Artificial Sequence: Synthetic oligonucleotide
  Antisense Strand to SEQ ID NO: 369203
accucuacaggcaucucuu

SEQ ID NO: 369205 - RNA, 19 nt, Artificial Sequence
  Description of Artificial Sequence: Synthetic oligonucleotide
  Sense Strand Starting at position 642 of SEQ ID NO: 317616
agaggucauggguguaaag

SEQ ID NO: 369206 - RNA, 19 nt, Artificial Sequence
  Description of Artificial Sequence: Synthetic oligonucleotide
  Antisense Strand to SEQ ID NO: 369205
cuuuacacccaugaccucu

SEQ ID NO: 369207 - RNA, 19 nt, Artificial Sequence
  Description of Artificial Sequence: Synthetic oligonucleotide
  Sense Strand Starting at position 642 of SEQ ID NO: 317697
uccauucuaguccaaagua

SEQ ID NO: 369208 - RNA, 19 nt, Artificial Sequence
  Description of Artificial Sequence: Synthetic oligonucleotide
  Antisense Strand to SEQ ID NO: 369207
uacuuuggacuagaaugga

SEQ ID NO: 369209 - RNA, 19 nt, Artificial Sequence
  Description of Artificial Sequence: Synthetic oligonucleotide
  Sense Strand Starting at position 642 of SEQ ID NO: 317706
guccaaaguagugaagauu

SEQ ID NO: 369210 - RNA, 19 nt, Artificial Sequence
  Description of Artificial Sequence: Synthetic oligonucleotide
  Antisense Strand to SEQ ID NO: 369209
aaucuucacuacuuuggac

SEQ ID NO: 369211 - RNA, 19 nt, Artificial Sequence
  Description of Artificial Sequence: Synthetic oligonucleotide
  Sense Strand Starting at position 642 of SEQ ID NO: 317889
gggugauacucugugacug

SEQ ID NO: 369212 - RNA, 19 nt, Artificial Sequence
  Description of Artificial Sequence: Synthetic oligonucleotide
  Antisense Strand to SEQ ID NO: 369211
cagucacagaguaucaccc

SEQ ID NO: 369213 - RNA, 19 nt, Artificial Sequence
  Description of Artificial Sequence: Synthetic oligonucleotide
  Sense Strand Starting at position 642 of SEQ ID NO: 317894
auacucugugacuggucaa

SEQ ID NO: 369214 - RNA, 19 nt, Artificial Sequence
  Description of Artificial Sequence: Synthetic oligonucleotide
  Antisense Strand to SEQ ID NO: 369213
uugaccagucacagaguau

SEQ ID NO: 369215 - RNA, 19 nt, Artificial Sequence
  Description of Artificial Sequence: Synthetic oligonucleotide
  Sense Strand Starting at position 642 of SEQ ID NO: 317921
cagccauugguguaauuag

SEQ ID NO: 369216 - RNA, 19 nt, Artificial Sequence
  Description of Artificial Sequence: Synthetic oligonucleotide
  Antisense Strand to SEQ ID NO: 369215
cuaauuacaccaauggcug

SEQ ID NO: 369217 - RNA, 19 nt, Artificial Sequence
  Description of Artificial Sequence: Synthetic oligonucleotide
  Sense Strand Starting at position 642 of SEQ ID NO: 317962
gaucuugccuuucugagga

SEQ ID NO: 369218 - RNA, 19 nt, Artificial Sequence
  Description of Artificial Sequence: Synthetic oligonucleotide
  Antisense Strand to SEQ ID NO: 369217
uccucagaaaggcaagauc

SEQ ID NO: 369219 - RNA, 19 nt, Artificial Sequence
  Description of Artificial Sequence: Synthetic oligonucleotide
  Sense Strand Starting at position 642 of SEQ ID NO: 317967
ugccuuucugaggauuaua

SEQ ID NO: 369220 - RNA, 19 nt, Artificial Sequence
  Description of Artificial Sequence: Synthetic oligonucleotide
  Antisense Strand to SEQ ID NO: 369219
uauaauccucagaaaggca

SEQ ID NO: 369221 - RNA, 19 nt, Artificial Sequence
  Description of Artificial Sequence: Synthetic oligonucleotide
  Sense Strand Starting at position 642 of SEQ ID NO: 317980
auuauauaaggucgaagua

SEQ ID NO: 369222 - RNA, 19 nt, Artificial Sequence
  Description of Artificial Sequence: Synthetic oligonucleotide
  Antisense Strand to SEQ ID NO: 369221
uacuucgaccuuauauaau

SEQ ID NO: 369223 - RNA, 19 nt, Artificial Sequence
  Description of Artificial Sequence: Synthetic oligonucleotide
  Sense Strand Starting at position 642 of SEQ ID NO: 317993
gaaguacaguucuuccaag

SEQ ID NO: 369224 - RNA, 19 nt, Artificial Sequence
  Description of Artificial Sequence: Synthetic oligonucleotide
  Antisense Strand to SEQ ID NO: 369223
cuuggaagaacuguacuuc

SEQ ID NO: 369225 - RNA, 19 nt, Artificial Sequence
  Description of Artificial Sequence: Synthetic oligonucleotide
  Sense Strand Starting at position 642 of SEQ ID NO: 318045
caaagagacugguuugcua

SEQ ID NO: 369226 - RNA, 19 nt, Artificial Sequence
  Description of Artificial Sequence: Synthetic oligonucleotide
  Antisense Strand to SEQ ID NO: 369225
uagcaaaccagucucuuug

SEQ ID NO: 369227 - RNA, 19 nt, Artificial Sequence
  Description of Artificial Sequence: Synthetic oligonucleotide
  Sense Strand Starting at position 642 of SEQ ID NO: 318047
aagagacugguuugcuauu

SEQ ID NO: 369228 - RNA, 19 nt, Artificial Sequence
  Description of Artificial Sequence: Synthetic oligonucleotide
  Antisense Strand to SEQ ID NO: 369227
aauagcaaaccagucucuu

SEQ ID NO: 369229 - RNA, 19 nt, Artificial Sequence
  Description of Artificial Sequence: Synthetic oligonucleotide
  Sense Strand Starting at position 642 of SEQ ID NO: 318108
ccuauagauuuagagaagu

SEQ ID NO: 369230 - RNA, 19 nt, Artificial Sequence
  Description of Artificial Sequence: Synthetic oligonucleotide
  Antisense Strand to SEQ ID NO: 369229
acuucucuaaaucuauagg

SEQ ID NO: 369231 - RNA, 19 nt, Artificial Sequence
  Description of Artificial Sequence: Synthetic oligonucleotide
  Sense Strand Starting at position 642 of SEQ ID NO: 318143
gcaguaucgguacaccaaa

SEQ ID NO: 369232 - RNA, 19 nt, Artificial Sequence
  Description of Artificial Sequence: Synthetic oligonucleotide
  Antisense Strand to SEQ ID NO: 369231
uuugguguaccgauacugc

SEQ ID NO: 369233 - RNA, 19 nt, Artificial Sequence
  Description of Artificial Sequence: Synthetic oligonucleotide
  Sense Strand Starting at position 642 of SEQ ID NO: 318747
ucauauuuaucugagagau

SEQ ID NO: 369234 - RNA, 19 nt, Artificial Sequence
  Description of Artificial Sequence: Synthetic oligonucleotide
  Antisense Strand to SEQ ID NO: 369233
aucucucagauaaauauga

SEQ ID NO: 369235 - RNA, 19 nt, Artificial Sequence
  Description of Artificial Sequence: Synthetic oligonucleotide
  Sense Strand Starting at position 642 of SEQ ID NO: 318749
auauuuaucugagagauag

SEQ ID NO: 369236 - RNA, 19 nt, Artificial Sequence
  Description of Artificial Sequence: Synthetic oligonucleotide
  Antisense Strand to SEQ ID NO: 369235
cuaucucucagauaaauau

SEQ ID NO: 369237 - RNA, 19 nt, Artificial Sequence
  Description of Artificial Sequence: Synthetic oligonucleotide
  Sense Strand Starting at position 642 of SEQ ID NO: 318900
gaguacuuuguuuauagga

SEQ ID NO: 369238 - RNA, 19 nt, Artificial Sequence
  Description of Artificial Sequence: Synthetic oligonucleotide
  Antisense Strand to SEQ ID NO: 369237
uccuauaaacaaaguacuc

SEQ ID NO: 369239 - RNA, 19 nt, Artificial Sequence
  Description of Artificial Sequence: Synthetic oligonucleotide
  Sense Strand Starting at position 642 of SEQ ID NO: 318997
guguuuauuugucugcaua

SEQ ID NO: 369240 - RNA, 19 nt, Artificial Sequence
  Description of Artificial Sequence: Synthetic oligonucleotide
  Antisense Strand to SEQ ID NO: 369239
uaugcagacaaauaaacac

SEQ ID NO: 369241 - RNA, 19 nt, Artificial Sequence
  Description of Artificial Sequence: Synthetic oligonucleotide
  Sense Strand Starting at position 642 of SEQ ID NO: 318998
uguuuauuugucugcauau

SEQ ID NO: 369242 - RNA, 19 nt, Artificial Sequence
  Description of Artificial Sequence: Synthetic oligonucleotide
  Antisense Strand to SEQ ID NO: 369241
auaugcagacaaauaaaca

SEQ ID NO: 369243 - RNA, 19 nt, Artificial Sequence
  Description of Artificial Sequence: Synthetic oligonucleotide
  Sense Strand Starting at position 642 of SEQ ID NO: 318999
guuuauuugucugcauauu

SEQ ID NO: 369244 - RNA, 19 nt, Artificial Sequence
  Description of Artificial Sequence: Synthetic oligonucleotide
  Antisense Strand to SEQ ID NO: 369243
aauaugcagacaaauaaac

SEQ ID NO: 369245 - RNA, 19 nt, Artificial Sequence
  Description of Artificial Sequence: Synthetic oligonucleotide
  Sense Strand Starting at position 642 of SEQ ID NO: 319078
gguggccucauguaacuaa

SEQ ID NO: 369246 - RNA, 19 nt, Artificial Sequence
  Description of Artificial Sequence: Synthetic oligonucleotide
  Antisense Strand to SEQ ID NO: 369245
uuaguuacaugaggccacc

SEQ ID NO: 369247 - RNA, 19 nt, Artificial Sequence
  Description of Artificial Sequence: Synthetic oligonucleotide
  Sense Strand Starting at position 642 of SEQ ID NO: 319154
uuaaguacucaguagucau

SEQ ID NO: 369248 - RNA, 19 nt, Artificial Sequence
  Description of Artificial Sequence: Synthetic oligonucleotide
  Antisense Strand to SEQ ID NO: 369247
augacuacugaguacuuaa

SEQ ID NO: 369249 - RNA, 19 nt, Artificial Sequence
  Description of Artificial Sequence: Synthetic oligonucleotide
  Sense Strand Starting at position 642 of SEQ ID NO: 319162
ucaguagucauguagguaa

SEQ ID NO: 369250 - RNA, 19 nt, Artificial Sequence
  Description of Artificial Sequence: Synthetic oligonucleotide
  Antisense Strand to SEQ ID NO: 369249
uuaccuacaugacuacuga

SEQ ID NO: 369251 - RNA, 19 nt, Artificial Sequence
  Description of Artificial Sequence: Synthetic oligonucleotide
  Sense Strand Starting at position 642 of SEQ ID NO: 319173
guagguaauguaugauaca

SEQ ID NO: 369252 - RNA, 19 nt, Artificial Sequence
  Description of Artificial Sequence: Synthetic oligonucleotide
  Antisense Strand to SEQ ID NO: 369251
uguaucauacauuaccuac

SEQ ID NO: 369253 - RNA, 19 nt, Artificial Sequence
  Description of Artificial Sequence: Synthetic oligonucleotide
  Sense Strand Starting at position 643 of SEQ ID NO: 315257
agcaaaguacucuaucaga

SEQ ID NO: 369254 - RNA, 19 nt, Artificial Sequence
  Description of Artificial Sequence: Synthetic oligonucleotide
  Antisense Strand to SEQ ID NO: 369253
ucugauagaguacuuugcu

SEQ ID NO: 369255 - RNA, 19 nt, Artificial Sequence
  Description of Artificial Sequence: Synthetic oligonucleotide
  Sense Strand Starting at position 643 of SEQ ID NO: 315375
aagagaagauuccuuguuc

SEQ ID NO: 369256 - RNA, 19 nt, Artificial Sequence
  Description of Artificial Sequence: Synthetic oligonucleotide
  Antisense Strand to SEQ ID NO: 369255
gaacaaggaaucuucucuu

SEQ ID NO: 369257 - RNA, 19 nt, Artificial Sequence
  Description of Artificial Sequence: Synthetic oligonucleotide
  Sense Strand Starting at position 643 of SEQ ID NO: 315445
acuaaugagcuuuaugucu

SEQ ID NO: 369258 - RNA, 19 nt, Artificial Sequence
  Description of Artificial Sequence: Synthetic oligonucleotide
  Antisense Strand to SEQ ID NO: 369257
agacauaaagcucauuagu

SEQ ID NO: 369259 - RNA, 19 nt, Artificial Sequence
  Description of Artificial Sequence: Synthetic oligonucleotide
  Sense Strand Starting at position 643 of SEQ ID NO: 315480
auaugacaugugugguaaa

SEQ ID NO: 369260 - RNA, 19 nt, Artificial Sequence
  Description of Artificial Sequence: Synthetic oligonucleotide
  Antisense Strand to SEQ ID NO: 369259
uuuaccacacaugucauau

SEQ ID NO: 369261 - RNA, 19 nt, Artificial Sequence
  Description of Artificial Sequence: Synthetic oligonucleotide
  Sense Strand Starting at position 643 of SEQ ID NO: 315493
gguaaaguuaacugagguc

SEQ ID NO: 369262 - RNA, 19 nt, Artificial Sequence
  Description of Artificial Sequence: Synthetic oligonucleotide
  Antisense Strand to SEQ ID NO: 369261
gaccucaguuaacuuuacc

SEQ ID NO: 369263 - RNA, 19 nt, Artificial Sequence
  Description of Artificial Sequence: Synthetic oligonucleotide
  Sense Strand Starting at position 643 of SEQ ID NO: 315598
ccagaaggcucauuauucu

SEQ ID NO: 369264 - RNA, 19 nt, Artificial Sequence
  Description of Artificial Sequence: Synthetic oligonucleotide
  Antisense Strand to SEQ ID NO: 369263
agaauaaugagccuucugg

SEQ ID NO: 369265 - RNA, 19 nt, Artificial Sequence
  Description of Artificial Sequence: Synthetic oligonucleotide
  Sense Strand Starting at position 643 of SEQ ID NO: 315624
gucauuuaaugguggauuu

SEQ ID NO: 369266 - RNA, 19 nt, Artificial Sequence
  Description of Artificial Sequence: Synthetic oligonucleotide
  Antisense Strand to SEQ ID NO: 369265
aaauccaccauuaaaugac

SEQ ID NO: 369267 - RNA, 19 nt, Artificial Sequence
  Description of Artificial Sequence: Synthetic oligonucleotide
  Sense Strand Starting at position 643 of SEQ ID NO: 315740
aucugagagcacggaucua

SEQ ID NO: 369268 - RNA, 19 nt, Artificial Sequence
  Description of Artificial Sequence: Synthetic oligonucleotide
  Antisense Strand to SEQ ID NO: 369267
uagauccgugcucucagau

SEQ ID NO: 369269 - RNA, 19 nt, Artificial Sequence
  Description of Artificial Sequence: Synthetic oligonucleotide
  Sense Strand Starting at position 643 of SEQ ID NO: 315796
uguguagugccuucauugu

SEQ ID NO: 369270 - RNA, 19 nt, Artificial Sequence
  Description of Artificial Sequence: Synthetic oligonucleotide
  Antisense Strand to SEQ ID NO: 369269
acaaugaaggcacuacaca

SEQ ID NO: 369271 - RNA, 19 nt, Artificial Sequence
  Description of Artificial Sequence: Synthetic oligonucleotide
  Sense Strand Starting at position 643 of SEQ ID NO: 315831
acuuuauggccuuagcaua

SEQ ID NO: 369272 - RNA, 19 nt, Artificial Sequence
  Description of Artificial Sequence: Synthetic oligonucleotide
  Antisense Strand to SEQ ID NO: 369271
uaugcuaaggccauaaagu

SEQ ID NO: 369273 - RNA, 19 nt, Artificial Sequence
  Description of Artificial Sequence: Synthetic oligonucleotide
  Sense Strand Starting at position 643 of SEQ ID NO: 315962
ucaacuagacuuugaugca

SEQ ID NO: 369274 - RNA, 19 nt, Artificial Sequence
  Description of Artificial Sequence: Synthetic oligonucleotide
  Antisense Strand to SEQ ID NO: 369273
ugcaucaaagucuaguuga

SEQ ID NO: 369275 - RNA, 19 nt, Artificial Sequence
  Description of Artificial Sequence: Synthetic oligonucleotide
  Sense Strand Starting at position 643 of SEQ ID NO: 316100
gagggcuuaacauaguguu

SEQ ID NO: 369276 - RNA, 19 nt, Artificial Sequence
  Description of Artificial Sequence: Synthetic oligonucleotide
  Antisense Strand to SEQ ID NO: 369275
aacacuauguuaagcccuc

SEQ ID NO: 369277 - RNA, 19 nt, Artificial Sequence
  Description of Artificial Sequence: Synthetic oligonucleotide
  Sense Strand Starting at position 643 of SEQ ID NO: 316106
uuaacauaguguucuauac

SEQ ID NO: 369278 - RNA, 19 nt, Artificial Sequence
  Description of Artificial Sequence: Synthetic oligonucleotide
  Antisense Strand to SEQ ID NO: 369277
guauagaacacuauguuaa

SEQ ID NO: 369279 - RNA, 19 nt, Artificial Sequence
  Description of Artificial Sequence: Synthetic oligonucleotide
  Sense Strand Starting at position 643 of SEQ ID NO: 316220
cgaaacagguguuuacaau

SEQ ID NO: 369280 - RNA, 19 nt, Artificial Sequence
  Description of Artificial Sequence: Synthetic oligonucleotide
  Antisense Strand to SEQ ID NO: 369279
auuguaaacaccuguuucg

SEQ ID NO: 369281 - RNA, 19 nt, Artificial Sequence
  Description of Artificial Sequence: Synthetic oligonucleotide
  Sense Strand Starting at position 643 of SEQ ID NO: 316424
aaagaagggucuuucccuu

SEQ ID NO: 369282 - RNA, 19 nt, Artificial Sequence
  Description of Artificial Sequence: Synthetic oligonucleotide
  Antisense Strand to SEQ ID NO: 369281
aagggaaagacccuucuuu

SEQ ID NO: 369283 - RNA, 19 nt, Artificial Sequence
  Description of Artificial Sequence: Synthetic oligonucleotide
  Sense Strand Starting at position 643 of SEQ ID NO: 317634
acuguucuugagcagagga

SEQ ID NO: 369284 - RNA, 19 nt, Artificial Sequence
  Description of Artificial Sequence: Synthetic oligonucleotide
  Antisense Strand to SEQ ID NO: 369283
uccucugcucaagaacagu

SEQ ID NO: 369285 - RNA, 19 nt, Artificial Sequence
  Description of Artificial Sequence: Synthetic oligonucleotide
  Sense Strand Starting at position 643 of SEQ ID NO: 317655
aagagaugccuguagaggu

SEQ ID NO: 369286 - RNA, 19 nt, Artificial Sequence
  Description of Artificial Sequence: Synthetic oligonucleotide
  Antisense Strand to SEQ ID NO: 369285
accucuacaggcaucucuu

SEQ ID NO: 369287 - RNA, 19 nt, Artificial Sequence
  Description of Artificial Sequence: Synthetic oligonucleotide
  Sense Strand Starting at position 643 of SEQ ID NO: 317668
agaggucauggguguaaag

SEQ ID NO: 369288 - RNA, 19 nt, Artificial Sequence
  Description of Artificial Sequence: Synthetic oligonucleotide
  Antisense Strand to SEQ ID NO: 369287
cuuuacacccaugaccucu

SEQ ID NO: 369289 - RNA, 19 nt, Artificial Sequence
  Description of Artificial Sequence: Synthetic oligonucleotide
  Sense Strand Starting at position 643 of SEQ ID NO: 317749
uccauucuaguccaaagua

SEQ ID NO: 369290 - RNA, 19 nt, Artificial Sequence
  Description of Artificial Sequence: Synthetic oligonucleotide
  Antisense Strand to SEQ ID NO: 369289
uacuuuggacuagaaugga

SEQ ID NO: 369291 - RNA, 19 nt, Artificial Sequence
  Description of Artificial Sequence: Synthetic oligonucleotide
  Sense Strand Starting at position 643 of SEQ ID NO: 317758
guccaaaguagugaagauu

SEQ ID NO: 369292 - RNA, 19 nt, Artificial Sequence
  Description of Artificial Sequence: Synthetic oligonucleotide
  Antisense Strand to SEQ ID NO: 369291
aaucuucacuacuuuggac

SEQ ID NO: 369293 - RNA, 19 nt, Artificial Sequence
  Description of Artificial Sequence: Synthetic oligonucleotide
  Sense Strand Starting at position 643 of SEQ ID NO: 317941
gggugauacucugugacug

SEQ ID NO: 369294 - RNA, 19 nt, Artificial Sequence
  Description of Artificial Sequence: Synthetic oligonucleotide
  Antisense Strand to SEQ ID NO: 369293
cagucacagaguaucaccc

SEQ ID NO: 369295 - RNA, 19 nt, Artificial Sequence
  Description of Artificial Sequence: Synthetic oligonucleotide
  Sense Strand Starting at position 643 of SEQ ID NO: 317946
auacucugugacuggucaa

SEQ ID NO: 369296 - RNA, 19 nt, Artificial Sequence
  Description of Artificial Sequence: Synthetic oligonucleotide
  Antisense Strand to SEQ ID NO: 369295
uugaccagucacagaguau

SEQ ID NO: 369297 - RNA, 19 nt, Artificial Sequence
  Description of Artificial Sequence: Synthetic oligonucleotide
  Sense Strand Starting at position 643 of SEQ ID NO: 317973
cagccauugguguaauuag

SEQ ID NO: 369298 - RNA, 19 nt, Artificial Sequence
  Description of Artificial Sequence: Synthetic oligonucleotide
  Antisense Strand to SEQ ID NO: 369297
cuaauuacaccaauggcug

SEQ ID NO: 369299 - RNA, 19 nt, Artificial Sequence
  Description of Artificial Sequence: Synthetic oligonucleotide
  Sense Strand Starting at position 643 of SEQ ID NO: 318014
gaucuugccuuucugagga

SEQ ID NO: 369300 - RNA, 19 nt, Artificial Sequence
  Description of Artificial Sequence: Synthetic oligonucleotide
  Antisense Strand to SEQ ID NO: 369299
uccucagaaaggcaagauc

SEQ ID NO: 369301 - RNA, 19 nt, Artificial Sequence
  Description of Artificial Sequence: Synthetic oligonucleotide
  Sense Strand Starting at position 643 of SEQ ID NO: 318019
ugccuuucugaggauuaua

SEQ ID NO: 369302 - RNA, 19 nt, Artificial Sequence
  Description of Artificial Sequence: Synthetic oligonucleotide
  Antisense Strand to SEQ ID NO: 369301
uauaauccucagaaaggca

SEQ ID NO: 369303 - RNA, 19 nt, Artificial Sequence
  Description of Artificial Sequence: Synthetic oligonucleotide
  Sense Strand Starting at position 643 of SEQ ID NO: 318032
auuauauaaggucgaagua

SEQ ID NO: 369304 - RNA, 19 nt, Artificial Sequence
  Description of Artificial Sequence: Synthetic oligonucleotide
  Antisense Strand to SEQ ID NO: 369303
uacuucgaccuuauauaau

SEQ ID NO: 369305 - RNA, 19 nt, Artificial Sequence
  Description of Artificial Sequence: Synthetic oligonucleotide
  Sense Strand Starting at position 643 of SEQ ID NO: 318045
gaaguacaguucuuccaag

SEQ ID NO: 369306 - RNA, 19 nt, Artificial Sequence
  Description of Artificial Sequence: Synthetic oligonucleotide
  Antisense Strand to SEQ ID NO: 369305
cuuggaagaacuguacuuc

SEQ ID NO: 369307 - RNA, 19 nt, Artificial Sequence
  Description of Artificial Sequence: Synthetic oligonucleotide
  Sense Strand Starting at position 643 of SEQ ID NO: 318097
caaagagacugguuugcua

SEQ ID NO: 369308 - RNA, 19 nt, Artificial Sequence
  Description of Artificial Sequence: Synthetic oligonucleotide
  Antisense Strand to SEQ ID NO: 369307
uagcaaaccagucucuuug

SEQ ID NO: 369309 - RNA, 19 nt, Artificial Sequence
  Description of Artificial Sequence: Synthetic oligonucleotide
  Sense Strand Starting at position 643 of SEQ ID NO: 318099
aagagacugguuugcuauu

SEQ ID NO: 369310 - RNA, 19 nt, Artificial Sequence
  Description of Artificial Sequence: Synthetic oligonucleotide
  Antisense Strand to SEQ ID NO: 369309
aauagcaaaccagucucuu

SEQ ID NO: 369311 - RNA, 19 nt, Artificial Sequence
  Description of Artificial Sequence: Synthetic oligonucleotide
  Sense Strand Starting at position 643 of SEQ ID NO: 318160
ccuauagauuuagagaagu

SEQ ID NO: 369312 - RNA, 19 nt, Artificial Sequence
  Description of Artificial Sequence: Synthetic oligonucleotide
  Antisense Strand to SEQ ID NO: 369311
acuucucuaaaucuauagg

SEQ ID NO: 369313 - RNA, 19 nt, Artificial Sequence
  Description of Artificial Sequence: Synthetic oligonucleotide
  Sense Strand Starting at position 643 of SEQ ID NO: 318195
gcaguaucgguacaccaaa

SEQ ID NO: 369314 - RNA, 19 nt, Artificial Sequence
  Description of Artificial Sequence: Synthetic oligonucleotide
  Antisense Strand to SEQ ID NO: 369313
uuugguguaccgauacugc

SEQ ID NO: 369315 - RNA, 19 nt, Artificial Sequence
  Description of Artificial Sequence: Synthetic oligonucleotide
  Sense Strand Starting at position 643 of SEQ ID NO: 318799
ucauauuuaucugagagau

SEQ ID NO: 369316 - RNA, 19 nt, Artificial Sequence
  Description of Artificial Sequence: Synthetic oligonucleotide
  Antisense Strand to SEQ ID NO: 369315
aucucucagauaaauauga

SEQ ID NO: 369317 - RNA, 19 nt, Artificial Sequence
  Description of Artificial Sequence: Synthetic oligonucleotide
  Sense Strand Starting at position 643 of SEQ ID NO: 318801
auauuuaucugagagauag

SEQ ID NO: 369318 - RNA, 19 nt, Artificial Sequence
  Description of Artificial Sequence: Synthetic oligonucleotide
  Antisense Strand to SEQ ID NO: 369317
cuaucucucagauaaauau

SEQ ID NO: 369319 - RNA, 19 nt, Artificial Sequence
  Description of Artificial Sequence: Synthetic oligonucleotide
  Sense Strand Starting at position 643 of SEQ ID NO: 318952
gaguacuuuguuuauagga

SEQ ID NO: 369320 - RNA, 19 nt, Artificial Sequence
  Description of Artificial Sequence: Synthetic oligonucleotide
  Antisense Strand to SEQ ID NO: 369319
uccuauaaacaaaguacuc

SEQ ID NO: 369321 - RNA, 19 nt, Artificial Sequence
  Description of Artificial Sequence: Synthetic oligonucleotide
  Sense Strand Starting at position 643 of SEQ ID NO: 319049
guguuuauuugucugcaua

SEQ ID NO: 369322 - RNA, 19 nt, Artificial Sequence
  Description of Artificial Sequence: Synthetic oligonucleotide
  Antisense Strand to SEQ ID NO: 369321
uaugcagacaaauaaacac

SEQ ID NO: 369323 - RNA, 19 nt, Artificial Sequence
  Description of Artificial Sequence: Synthetic oligonucleotide
  Sense Strand Starting at position 643 of SEQ ID NO: 319050
uguuuauuugucugcauau

SEQ ID NO: 369324 - RNA, 19 nt, Artificial Sequence
  Description of Artificial Sequence: Synthetic oligonucleotide
  Antisense Strand to SEQ ID NO: 369323
auaugcagacaaauaaaca

SEQ ID NO: 369325 - RNA, 19 nt, Artificial Sequence
  Description of Artificial Sequence: Synthetic oligonucleotide
  Sense Strand Starting at position 643 of SEQ ID NO: 319051
guuuauuugucugcauauu

SEQ ID NO: 369326 - RNA, 19 nt, Artificial Sequence
  Description of Artificial Sequence: Synthetic oligonucleotide
  Antisense Strand to SEQ ID NO: 369325
aauaugcagacaaauaaac

SEQ ID NO: 369327 - RNA, 19 nt, Artificial Sequence
  Description of Artificial Sequence: Synthetic oligonucleotide
  Sense Strand Starting at position 643 of SEQ ID NO: 319130
gguggccucauguaacuaa

SEQ ID NO: 369328 - RNA, 19 nt, Artificial Sequence
  Description of Artificial Sequence: Synthetic oligonucleotide
  Antisense Strand to SEQ ID NO: 369327
uuaguuacaugaggccacc

SEQ ID NO: 369329 - RNA, 19 nt, Artificial Sequence
  Description of Artificial Sequence: Synthetic oligonucleotide
  Sense Strand Starting at position 643 of SEQ ID NO: 319206
uuaaguacucaguagucau

SEQ ID NO: 369330 - RNA, 19 nt, Artificial Sequence
  Description of Artificial Sequence: Synthetic oligonucleotide
  Antisense Strand to SEQ ID NO: 369329
augacuacugaguacuuaa

SEQ ID NO: 369331 - RNA, 19 nt, Artificial Sequence
  Description of Artificial Sequence: Synthetic oligonucleotide
  Sense Strand Starting at position 643 of SEQ ID NO: 319214
ucaguagucauguagguaa

SEQ ID NO: 369332 - RNA, 19 nt, Artificial Sequence
  Description of Artificial Sequence: Synthetic oligonucleotide
  Antisense Strand to SEQ ID NO: 369331
uuaccuacaugacuacuga

SEQ ID NO: 369333 - RNA, 19 nt, Artificial Sequence
  Description of Artificial Sequence: Synthetic oligonucleotide
  Sense Strand Starting at position 644 of SEQ ID NO: 315905
uguacaaguggauaguauu

SEQ ID NO: 369334 - RNA, 19 nt, Artificial Sequence
  Description of Artificial Sequence: Synthetic oligonucleotide
  Antisense Strand to SEQ ID NO: 369333
aauacuauccacuuguaca

SEQ ID NO: 369335 - RNA, 19 nt, Artificial Sequence
  Description of Artificial Sequence: Synthetic oligonucleotide
  Sense Strand Starting at position 644 of SEQ ID NO: 315963
agguuagggccuuaaucau

SEQ ID NO: 369336 - RNA, 19 nt, Artificial Sequence
  Description of Artificial Sequence: Synthetic oligonucleotide
  Antisense Strand to SEQ ID NO: 369335
augauuaaggcccuaaccu

SEQ ID NO: 369337 - RNA, 19 nt, Artificial Sequence
  Description of Artificial Sequence: Synthetic oligonucleotide
  Sense Strand Starting at position 644 of SEQ ID NO: 316115
cguguaucccggaacguaa

SEQ ID NO: 369338 - RNA, 19 nt, Artificial Sequence
  Description of Artificial Sequence: Synthetic oligonucleotide
  Antisense Strand to SEQ ID NO: 369337
uuacguuccgggauacacg

SEQ ID NO: 369339 - RNA, 19 nt, Artificial Sequence
  Description of Artificial Sequence: Synthetic oligonucleotide
  Sense Strand Starting at position 644 of SEQ ID NO: 316238
augcauagagcugagaagu

SEQ ID NO: 369340 - RNA, 19 nt, Artificial Sequence
  Description of Artificial Sequence: Synthetic oligonucleotide
  Antisense Strand to SEQ ID NO: 369339
acuucucagcucuaugcau

SEQ ID NO: 369341 - RNA, 19 nt, Artificial Sequence
  Description of Artificial Sequence: Synthetic oligonucleotide
  Sense Strand Starting at position 644 of SEQ ID NO: 316320
agguuucucccuuaccuuu

SEQ ID NO: 369342 - RNA, 19 nt, Artificial Sequence
  Description of Artificial Sequence: Synthetic oligonucleotide
  Antisense Strand to SEQ ID NO: 369341
aaagguaagggagaaaccu

SEQ ID NO: 369343 - RNA, 19 nt, Artificial Sequence
  Description of Artificial Sequence: Synthetic oligonucleotide
  Sense Strand Starting at position 644 of SEQ ID NO: 317020
ugcaucaaucuaggaauga

SEQ ID NO: 369344 - RNA, 19 nt, Artificial Sequence
  Description of Artificial Sequence: Synthetic oligonucleotide
  Antisense Strand to SEQ ID NO: 369343
ucauuccuagauugaugca

SEQ ID NO: 369345 - RNA, 19 nt, Artificial Sequence
  Description of Artificial Sequence: Synthetic oligonucleotide
  Sense Strand Starting at position 644 of SEQ ID NO: 317046
gacagaaaugguugccaga

SEQ ID NO: 369346 - RNA, 19 nt, Artificial Sequence
  Description of Artificial Sequence: Synthetic oligonucleotide
  Antisense Strand to SEQ ID NO: 369345
ucuggcaaccauuucuguc

SEQ ID NO: 369347 - RNA, 19 nt, Artificial Sequence
  Description of Artificial Sequence: Synthetic oligonucleotide
  Sense Strand Starting at position 644 of SEQ ID NO: 317048
cagaaaugguugccagauu

SEQ ID NO: 369348 - RNA, 19 nt, Artificial Sequence
  Description of Artificial Sequence: Synthetic oligonucleotide
  Antisense Strand to SEQ ID NO: 369347
aaucuggcaaccauuucug

SEQ ID NO: 369349 - RNA, 19 nt, Artificial Sequence
  Description of Artificial Sequence: Synthetic oligonucleotide
  Sense Strand Starting at position 644 of SEQ ID NO: 317104
cuccucugucacgaauaca

SEQ ID NO: 369350 - RNA, 19 nt, Artificial Sequence
  Description of Artificial Sequence: Synthetic oligonucleotide
  Antisense Strand to SEQ ID NO: 369349
uguauucgugacagaggag

SEQ ID NO: 369351 - RNA, 19 nt, Artificial Sequence
  Description of Artificial Sequence: Synthetic oligonucleotide
  Sense Strand Starting at position 644 of SEQ ID NO: 317214
ggaggcauuucuguggucu

SEQ ID NO: 369352 - RNA, 19 nt, Artificial Sequence
  Description of Artificial Sequence: Synthetic oligonucleotide
  Antisense Strand to SEQ ID NO: 369351
agaccacagaaaugccucc

SEQ ID NO: 369353 - RNA, 19 nt, Artificial Sequence
  Description of Artificial Sequence: Synthetic oligonucleotide
  Sense Strand Starting at position 644 of SEQ ID NO: 317215
gaggcauuucuguggucuu

SEQ ID NO: 369354 - RNA, 19 nt, Artificial Sequence
  Description of Artificial Sequence: Synthetic oligonucleotide
  Antisense Strand to SEQ ID NO: 369353
aagaccacagaaaugccuc

SEQ ID NO: 369355 - RNA, 19 nt, Artificial Sequence
  Description of Artificial Sequence: Synthetic oligonucleotide
  Sense Strand Starting at position 644 of SEQ ID NO: 317218
gcauuucuguggucuucua

SEQ ID NO: 369356 - RNA, 19 nt, Artificial Sequence
  Description of Artificial Sequence: Synthetic oligonucleotide
  Antisense Strand to SEQ ID NO: 369355
uagaagaccacagaaaugc

SEQ ID NO: 369357 - RNA, 19 nt, Artificial Sequence
  Description of Artificial Sequence: Synthetic oligonucleotide
  Sense Strand Starting at position 644 of SEQ ID NO: 317243
gugagaaucucaucagucu

SEQ ID NO: 369358 - RNA, 19 nt, Artificial Sequence
  Description of Artificial Sequence: Synthetic oligonucleotide
  Antisense Strand to SEQ ID NO: 369357
agacugaugagauucucac

SEQ ID NO: 369359 - RNA, 19 nt, Artificial Sequence
  Description of Artificial Sequence: Synthetic oligonucleotide
  Sense Strand Starting at position 644 of SEQ ID NO: 317244
ugagaaucucaucagucuu

SEQ ID NO: 369360 - RNA, 19 nt, Artificial Sequence
  Description of Artificial Sequence: Synthetic oligonucleotide
  Antisense Strand to SEQ ID NO: 369359
aagacugaugagauucuca

SEQ ID NO: 369361 - RNA, 19 nt, Artificial Sequence
  Description of Artificial Sequence: Synthetic oligonucleotide
  Sense Strand Starting at position 644 of SEQ ID NO: 317513
acuaauucggcucauauca

SEQ ID NO: 369362 - RNA, 19 nt, Artificial Sequence
  Description of Artificial Sequence: Synthetic oligonucleotide
  Antisense Strand to SEQ ID NO: 369361
ugauaugagccgaauuagu

SEQ ID NO: 369363 - RNA, 19 nt, Artificial Sequence
  Description of Artificial Sequence: Synthetic oligonucleotide
  Sense Strand Starting at position 644 of SEQ ID NO: 317521
ggcucauaucacugaugaa

SEQ ID NO: 369364 - RNA, 19 nt, Artificial Sequence
  Description of Artificial Sequence: Synthetic oligonucleotide
  Antisense Strand to SEQ ID NO: 369363
uucaucagugauaugagcc

SEQ ID NO: 369365 - RNA, 19 nt, Artificial Sequence
  Description of Artificial Sequence: Synthetic oligonucleotide
  Sense Strand Starting at position 644 of SEQ ID NO: 317547
caguuuggagcugaaugua

SEQ ID NO: 369366 - RNA, 19 nt, Artificial Sequence
  Description of Artificial Sequence: Synthetic oligonucleotide
  Antisense Strand to SEQ ID NO: 369365
uacauucagcuccaaacug

SEQ ID NO: 369367 - RNA, 19 nt, Artificial Sequence
  Description of Artificial Sequence: Synthetic oligonucleotide
  Sense Strand Starting at position 644 of SEQ ID NO: 317584
gucaguguuccagaauuag

SEQ ID NO: 369368 - RNA, 19 nt, Artificial Sequence
  Description of Artificial Sequence: Synthetic oligonucleotide
  Antisense Strand to SEQ ID NO: 369367
cuaauucuggaacacugac

SEQ ID NO: 369369 - RNA, 19 nt, Artificial Sequence
  Description of Artificial Sequence: Synthetic oligonucleotide
  Sense Strand Starting at position 644 of SEQ ID NO: 317593
ccagaauuagcacaucagu

SEQ ID NO: 369370 - RNA, 19 nt, Artificial Sequence
  Description of Artificial Sequence: Synthetic oligonucleotide
  Antisense Strand to SEQ ID NO: 369369
acugaugugcuaauucugg

SEQ ID NO: 369371 - RNA, 19 nt, Artificial Sequence
  Description of Artificial Sequence: Synthetic oligonucleotide
  Sense Strand Starting at position 644 of SEQ ID NO: 317854
guaaauauucuaggugaaa

SEQ ID NO: 369372 - RNA, 19 nt, Artificial Sequence
  Description of Artificial Sequence: Synthetic oligonucleotide
  Antisense Strand to SEQ ID NO: 369371
uuucaccuagaauauuuac

SEQ ID NO: 369373 - RNA, 19 nt, Artificial Sequence
  Description of Artificial Sequence: Synthetic oligonucleotide
  Sense Strand Starting at position 644 of SEQ ID NO: 317888
gauucuuaccuuugggaag

SEQ ID NO: 369374 - RNA, 19 nt, Artificial Sequence
  Description of Artificial Sequence: Synthetic oligonucleotide
  Antisense Strand to SEQ ID NO: 369373
cuucccaaagguaagaauc

SEQ ID NO: 369375 - RNA, 19 nt, Artificial Sequence
  Description of Artificial Sequence: Synthetic oligonucleotide
  Sense Strand Starting at position 644 of SEQ ID NO: 317902
ggaagcucacaguacugua

SEQ ID NO: 369376 - RNA, 19 nt, Artificial Sequence
  Description of Artificial Sequence: Synthetic oligonucleotide
  Antisense Strand to SEQ ID NO: 369375
uacaguacugugagcuucc

SEQ ID NO: 369377 - RNA, 19 nt, Artificial Sequence
  Description of Artificial Sequence: Synthetic oligonucleotide
  Sense Strand Starting at position 644 of SEQ ID NO: 317954
gcuauaauacaagguagaa

SEQ ID NO: 369378 - RNA, 19 nt, Artificial Sequence
  Description of Artificial Sequence: Synthetic oligonucleotide
  Antisense Strand to SEQ ID NO: 369377
uucuaccuuguauuauagc

SEQ ID NO: 369379 - RNA, 19 nt, Artificial Sequence
  Description of Artificial Sequence: Synthetic oligonucleotide
  Sense Strand Starting at position 644 of SEQ ID NO: 317974
gugguacguguuagauuag

SEQ ID NO: 369380 - RNA, 19 nt, Artificial Sequence
  Description of Artificial Sequence: Synthetic oligonucleotide
  Antisense Strand to SEQ ID NO: 369379
cuaaucuaacacguaccac

SEQ ID NO: 369381 - RNA, 19 nt, Artificial Sequence
  Description of Artificial Sequence: Synthetic oligonucleotide
  Sense Strand Starting at position 644 of SEQ ID NO: 317983
guuagauuagauugaaagu

SEQ ID NO: 369382 - RNA, 19 nt, Artificial Sequence
  Description of Artificial Sequence: Synthetic oligonucleotide
  Antisense Strand to SEQ ID NO: 369381
acuuucaaucuaaucuaac

SEQ ID NO: 369383 - RNA, 19 nt, Artificial Sequence
  Description of Artificial Sequence: Synthetic oligonucleotide
  Sense Strand Starting at position 644 of SEQ ID NO: 318359
agcuucuggcuagaaggau

SEQ ID NO: 369384 - RNA, 19 nt, Artificial Sequence
  Description of Artificial Sequence: Synthetic oligonucleotide
  Antisense Strand to SEQ ID NO: 369383
auccuucuagccagaagcu

SEQ ID NO: 369385 - RNA, 19 nt, Artificial Sequence
  Description of Artificial Sequence: Synthetic oligonucleotide
  Sense Strand Starting at position 644 of SEQ ID NO: 318416
gucaauagccuauagaaug

SEQ ID NO: 369386 - RNA, 19 nt, Artificial Sequence
  Description of Artificial Sequence: Synthetic oligonucleotide
  Antisense Strand to SEQ ID NO: 369385
cauucuauaggcuauugac

SEQ ID NO: 369387 - RNA, 19 nt, Artificial Sequence
  Description of Artificial Sequence: Synthetic oligonucleotide
  Sense Strand Starting at position 644 of SEQ ID NO: 318523
guaguaaguaaguaauaug

SEQ ID NO: 369388 - RNA, 19 nt, Artificial Sequence
  Description of Artificial Sequence: Synthetic oligonucleotide
  Antisense Strand to SEQ ID NO: 369387
cauauuacuuacuuacuac

SEQ ID NO: 369389 - RNA, 19 nt, Artificial Sequence
  Description of Artificial Sequence: Synthetic oligonucleotide
  Sense Strand Starting at position 644 of SEQ ID NO: 318610
uugcuugaacauuagaauc

SEQ ID NO: 369390 - RNA, 19 nt, Artificial Sequence
  Description of Artificial Sequence: Synthetic oligonucleotide
  Antisense Strand to SEQ ID NO: 369389
gauucuaauguucaagcaa

SEQ ID NO: 369391 - RNA, 19 nt, Artificial Sequence
  Description of Artificial Sequence: Synthetic oligonucleotide
  Sense Strand Starting at position 644 of SEQ ID NO: 318654
cugaaagauucugauuuau

SEQ ID NO: 369392 - RNA, 19 nt, Artificial Sequence
  Description of Artificial Sequence: Synthetic oligonucleotide
  Antisense Strand to SEQ ID NO: 369391
auaaaucagaaucuuucag

SEQ ID NO: 369393 - RNA, 19 nt, Artificial Sequence
  Description of Artificial Sequence: Synthetic oligonucleotide
  Sense Strand Starting at position 644 of SEQ ID NO: 318668
uuuauuggucugggauaug

SEQ ID NO: 369394 - RNA, 19 nt, Artificial Sequence
  Description of Artificial Sequence: Synthetic oligonucleotide
  Antisense Strand to SEQ ID NO: 369393
cauaucccagaccaauaaa

SEQ ID NO: 369395 - RNA, 19 nt, Artificial Sequence
  Description of Artificial Sequence: Synthetic oligonucleotide
  Sense Strand Starting at position 644 of SEQ ID NO: 318678
ugggauaugaccugagcga

SEQ ID NO: 369396 - RNA, 19 nt, Artificial Sequence
  Description of Artificial Sequence: Synthetic oligonucleotide
  Antisense Strand to SEQ ID NO: 369395
ucgcucaggucauauccca

SEQ ID NO: 369397 - RNA, 19 nt, Artificial Sequence
  Description of Artificial Sequence: Synthetic oligonucleotide
  Sense Strand Starting at position 644 of SEQ ID NO: 318679
gggauaugaccugagcgau

SEQ ID NO: 369398 - RNA, 19 nt, Artificial Sequence
  Description of Artificial Sequence: Synthetic oligonucleotide
  Antisense Strand to SEQ ID NO: 369397
aucgcucaggucauauccc

SEQ ID NO: 369399 - RNA, 19 nt, Artificial Sequence
  Description of Artificial Sequence: Synthetic oligonucleotide
  Sense Strand Starting at position 644 of SEQ ID NO: 318707
agaaguuucccaggugauu

SEQ ID NO: 369400 - RNA, 19 nt, Artificial Sequence
  Description of Artificial Sequence: Synthetic oligonucleotide
  Antisense Strand to SEQ ID NO: 369399
aaucaccugggaaacuucu

SEQ ID NO: 369401 - RNA, 19 nt, Artificial Sequence
  Description of Artificial Sequence: Synthetic oligonucleotide
  Sense Strand Starting at position 644 of SEQ ID NO: 318710
aguuucccaggugauuaua

SEQ ID NO: 369402 - RNA, 19 nt, Artificial Sequence
  Description of Artificial Sequence: Synthetic oligonucleotide
  Antisense Strand to SEQ ID NO: 369401
uauaaucaccugggaaacu

SEQ ID NO: 369403 - RNA, 19 nt, Artificial Sequence
  Description of Artificial Sequence: Synthetic oligonucleotide
  Sense Strand Starting at position 644 of SEQ ID NO: 318712
uuucccaggugauuauaau

SEQ ID NO: 369404 - RNA, 19 nt, Artificial Sequence
  Description of Artificial Sequence: Synthetic oligonucleotide
  Antisense Strand to SEQ ID NO: 369403
auuauaaucaccugggaaa

SEQ ID NO: 369405 - RNA, 19 nt, Artificial Sequence
  Description of Artificial Sequence: Synthetic oligonucleotide
  Sense Strand Starting at position 644 of SEQ ID NO: 318781
agaauaagucuaugaguug

SEQ ID NO: 369406 - RNA, 19 nt, Artificial Sequence
  Description of Artificial Sequence: Synthetic oligonucleotide
  Antisense Strand to SEQ ID NO: 369405
caacucauagacuuauucu

SEQ ID NO: 369407 - RNA, 19 nt, Artificial Sequence
  Description of Artificial Sequence: Synthetic oligonucleotide
  Sense Strand Starting at position 644 of SEQ ID NO: 318829
guagguaggguuuggagaa

SEQ ID NO: 369408 - RNA, 19 nt, Artificial Sequence
  Description of Artificial Sequence: Synthetic oligonucleotide
  Antisense Strand to SEQ ID NO: 369407
uucuccaaacccuaccuac

SEQ ID NO: 369409 - RNA, 19 nt, Artificial Sequence
  Description of Artificial Sequence: Synthetic oligonucleotide
  Sense Strand Starting at position 644 of SEQ ID NO: 319169
cuaacuuguuccuugauga

SEQ ID NO: 369410 - RNA, 19 nt, Artificial Sequence
  Description of Artificial Sequence: Synthetic oligonucleotide
  Antisense Strand to SEQ ID NO: 369409
ucaucaaggaacaaguuag

SEQ ID NO: 369411 - RNA, 19 nt, Artificial Sequence
  Description of Artificial Sequence: Synthetic oligonucleotide
  Sense Strand Starting at position 644 of SEQ ID NO: 319210
cugauuucuuaggaacaau

SEQ ID NO: 369412 - RNA, 19 nt, Artificial Sequence
  Description of Artificial Sequence: Synthetic oligonucleotide
  Antisense Strand to SEQ ID NO: 369411
auuguuccuaagaaaucag

SEQ ID NO: 369413 - RNA, 19 nt, Artificial Sequence
  Description of Artificial Sequence: Synthetic oligonucleotide
  Sense Strand Starting at position 645 of SEQ ID NO: 315422
ccgguagcuguagaagaua

SEQ ID NO: 369414 - RNA, 19 nt, Artificial Sequence
  Description of Artificial Sequence: Synthetic oligonucleotide
  Antisense Strand to SEQ ID NO: 369413
uaucuucuacagcuaccgg

SEQ ID NO: 369415 - RNA, 19 nt, Artificial Sequence
  Description of Artificial Sequence: Synthetic oligonucleotide
  Sense Strand Starting at position 645 of SEQ ID NO: 315472
aaggguuaagagugucaau

SEQ ID NO: 369416 - RNA, 19 nt, Artificial Sequence
  Description of Artificial Sequence: Synthetic oligonucleotide
  Antisense Strand to SEQ ID NO: 369415
auugacacucuuaacccuu

SEQ ID NO: 369417 - RNA, 19 nt, Artificial Sequence
  Description of Artificial Sequence: Synthetic oligonucleotide
  Sense Strand Starting at position 645 of SEQ ID NO: 315481
gagugucaauuugaaggaa

SEQ ID NO: 369418 - RNA, 19 nt, Artificial Sequence
  Description of Artificial Sequence: Synthetic oligonucleotide
  Antisense Strand to SEQ ID NO: 369417
uuccuucaaauugacacuc

SEQ ID NO: 369419 - RNA, 19 nt, Artificial Sequence
  Description of Artificial Sequence: Synthetic oligonucleotide
  Sense Strand Starting at position 645 of SEQ ID NO: 315572
caaaguuauggaugugaac

SEQ ID NO: 369420 - RNA, 19 nt, Artificial Sequence
  Description of Artificial Sequence: Synthetic oligonucleotide
  Antisense Strand to SEQ ID NO: 369419
guucacauccauaacuuug

SEQ ID NO: 369421 - RNA, 19 nt, Artificial Sequence
  Description of Artificial Sequence: Synthetic oligonucleotide
  Sense Strand Starting at position 645 of SEQ ID NO: 315584
ugugaacaauaugucaaua

SEQ ID NO: 369422 - RNA, 19 nt, Artificial Sequence
  Description of Artificial Sequence: Synthetic oligonucleotide
  Antisense Strand to SEQ ID NO: 369421
uauugacauauuguucaca

SEQ ID NO: 369423 - RNA, 19 nt, Artificial Sequence
  Description of Artificial Sequence: Synthetic oligonucleotide
  Sense Strand Starting at position 645 of SEQ ID NO: 315632
aggcaaguuaggcauacaa

SEQ ID NO: 369424 - RNA, 19 nt, Artificial Sequence
  Description of Artificial Sequence: Synthetic oligonucleotide
  Antisense Strand to SEQ ID NO: 369423
uuguaugccuaacuugccu

SEQ ID NO: 369425 - RNA, 19 nt, Artificial Sequence
  Description of Artificial Sequence: Synthetic oligonucleotide
  Sense Strand Starting at position 645 of SEQ ID NO: 315668
gaggacugaugccuaguaa

SEQ ID NO: 369426 - RNA, 19 nt, Artificial Sequence
  Description of Artificial Sequence: Synthetic oligonucleotide
  Antisense Strand to SEQ ID NO: 369425
uuacuaggcaucaguccuc

SEQ ID NO: 369427 - RNA, 19 nt, Artificial Sequence
  Description of Artificial Sequence: Synthetic oligonucleotide
  Sense Strand Starting at position 645 of SEQ ID NO: 315669
aggacugaugccuaguaac

SEQ ID NO: 369428 - RNA, 19 nt, Artificial Sequence
  Description of Artificial Sequence: Synthetic oligonucleotide
  Antisense Strand to SEQ ID NO: 369427
guuacuaggcaucaguccu

SEQ ID NO: 369429 - RNA, 19 nt, Artificial Sequence
  Description of Artificial Sequence: Synthetic oligonucleotide
  Sense Strand Starting at position 645 of SEQ ID NO: 315713
acguaagcccucuaucaaa

SEQ ID NO: 369430 - RNA, 19 nt, Artificial Sequence
  Description of Artificial Sequence: Synthetic oligonucleotide
  Antisense Strand to SEQ ID NO: 369429
uuugauagagggcuuacgu

SEQ ID NO: 369431 - RNA, 19 nt, Artificial Sequence
  Description of Artificial Sequence: Synthetic oligonucleotide
  Sense Strand Starting at position 645 of SEQ ID NO: 316071
uugucaaugccucaugaau

SEQ ID NO: 369432 - RNA, 19 nt, Artificial Sequence
  Description of Artificial Sequence: Synthetic oligonucleotide
  Antisense Strand to SEQ ID NO: 369431
auucaugaggcauugacaa

SEQ ID NO: 369433 - RNA, 19 nt, Artificial Sequence
  Description of Artificial Sequence: Synthetic oligonucleotide
  Sense Strand Starting at position 645 of SEQ ID NO: 316095
cugaauggguacuuuaaac

SEQ ID NO: 369434 - RNA, 19 nt, Artificial Sequence
  Description of Artificial Sequence: Synthetic oligonucleotide
  Antisense Strand to SEQ ID NO: 369433
guuuaaaguacccauucag

SEQ ID NO: 369435 - RNA, 19 nt, Artificial Sequence
  Description of Artificial Sequence: Synthetic oligonucleotide
  Sense Strand Starting at position 645 of SEQ ID NO: 316147
agaagcuggcucugagaaa

SEQ ID NO: 369436 - RNA, 19 nt, Artificial Sequence
  Description of Artificial Sequence: Synthetic oligonucleotide
  Antisense Strand to SEQ ID NO: 369435
uuucucagagccagcuucu

SEQ ID NO: 369437 - RNA, 19 nt, Artificial Sequence
  Description of Artificial Sequence: Synthetic oligonucleotide
  Sense Strand Starting at position 645 of SEQ ID NO: 316192
ucaauuguugcauacagag

SEQ ID NO: 369438 - RNA, 19 nt, Artificial Sequence
  Description of Artificial Sequence: Synthetic oligonucleotide
  Antisense Strand to SEQ ID NO: 369437
cucuguaugcaacaauuga

SEQ ID NO: 369439 - RNA, 19 nt, Artificial Sequence
  Description of Artificial Sequence: Synthetic oligonucleotide
  Sense Strand Starting at position 645 of SEQ ID NO: 316216
gccaccagauaucuggauu

SEQ ID NO: 369440 - RNA, 19 nt, Artificial Sequence
  Description of Artificial Sequence: Synthetic oligonucleotide
  Antisense Strand to SEQ ID NO: 369439
aauccagauaucugguggc

SEQ ID NO: 369441 - RNA, 19 nt, Artificial Sequence
  Description of Artificial Sequence: Synthetic oligonucleotide
  Sense Strand Starting at position 645 of SEQ ID NO: 317223
uguacaaguggauaguauu

SEQ ID NO: 369442 - RNA, 19 nt, Artificial Sequence
  Description of Artificial Sequence: Synthetic oligonucleotide
  Antisense Strand to SEQ ID NO: 369441
aauacuauccacuuguaca

SEQ ID NO: 369443 - RNA, 19 nt, Artificial Sequence
  Description of Artificial Sequence: Synthetic oligonucleotide
  Sense Strand Starting at position 645 of SEQ ID NO: 317281
agguuagggccuuaaucau

SEQ ID NO: 369444 - RNA, 19 nt, Artificial Sequence
  Description of Artificial Sequence: Synthetic oligonucleotide
  Antisense Strand to SEQ ID NO: 369443
augauuaaggcccuaaccu

SEQ ID NO: 369445 - RNA, 19 nt, Artificial Sequence
  Description of Artificial Sequence: Synthetic oligonucleotide
  Sense Strand Starting at position 645 of SEQ ID NO: 317433
cguguaucccggaacguaa

SEQ ID NO: 369446 - RNA, 19 nt, Artificial Sequence
  Description of Artificial Sequence: Synthetic oligonucleotide
  Antisense Strand to SEQ ID NO: 369445
uuacguuccgggauacacg

SEQ ID NO: 369447 - RNA, 19 nt, Artificial Sequence
  Description of Artificial Sequence: Synthetic oligonucleotide
  Sense Strand Starting at position 645 of SEQ ID NO: 317556
augcauagagcugagaagu

SEQ ID NO: 369448 - RNA, 19 nt, Artificial Sequence
  Description of Artificial Sequence: Synthetic oligonucleotide
  Antisense Strand to SEQ ID NO: 369447
acuucucagcucuaugcau

SEQ ID NO: 369449 - RNA, 19 nt, Artificial Sequence
  Description of Artificial Sequence: Synthetic oligonucleotide
  Sense Strand Starting at position 645 of SEQ ID NO: 317638
agguuucucccuuaccuuu

SEQ ID NO: 369450 - RNA, 19 nt, Artificial Sequence
  Description of Artificial Sequence: Synthetic oligonucleotide
  Antisense Strand to SEQ ID NO: 369449
aaagguaagggagaaaccu

SEQ ID NO: 369451 - RNA, 19 nt, Artificial Sequence
  Description of Artificial Sequence: Synthetic oligonucleotide
  Sense Strand Starting at position 645 of SEQ ID NO: 318338
ugcaucaaucuaggaauga

SEQ ID NO: 369452 - RNA, 19 nt, Artificial Sequence
  Description of Artificial Sequence: Synthetic oligonucleotide
  Antisense Strand to SEQ ID NO: 369451
ucauuccuagauugaugca

SEQ ID NO: 369453 - RNA, 19 nt, Artificial Sequence
  Description of Artificial Sequence: Synthetic oligonucleotide
  Sense Strand Starting at position 645 of SEQ ID NO: 318364
gacagaaaugguugccaga

SEQ ID NO: 369454 - RNA, 19 nt, Artificial Sequence
  Description of Artificial Sequence: Synthetic oligonucleotide
  Antisense Strand to SEQ ID NO: 369453
ucuggcaaccauuucuguc

SEQ ID NO: 369455 - RNA, 19 nt, Artificial Sequence
  Description of Artificial Sequence: Synthetic oligonucleotide
  Sense Strand Starting at position 645 of SEQ ID NO: 318366
cagaaaugguugccagauu

SEQ ID NO: 369456 - RNA, 19 nt, Artificial Sequence
  Description of Artificial Sequence: Synthetic oligonucleotide
  Antisense Strand to SEQ ID NO: 369455
aaucuggcaaccauuucug

SEQ ID NO: 369457 - RNA, 19 nt, Artificial Sequence
  Description of Artificial Sequence: Synthetic oligonucleotide
  Sense Strand Starting at position 645 of SEQ ID NO: 318422
cuccucugucacgaauaca

SEQ ID NO: 369458 - RNA, 19 nt, Artificial Sequence
  Description of Artificial Sequence: Synthetic oligonucleotide
  Antisense Strand to SEQ ID NO: 369457
uguauucgugacagaggag

SEQ ID NO: 369459 - RNA, 19 nt, Artificial Sequence
  Description of Artificial Sequence: Synthetic oligonucleotide
  Sense Strand Starting at position 645 of SEQ ID NO: 318432
acgaauacauucuuagcca

SEQ ID NO: 369460 - RNA, 19 nt, Artificial Sequence
  Description of Artificial Sequence: Synthetic oligonucleotide
  Antisense Strand to SEQ ID NO: 369459
uggcuaagaauguauucgu

SEQ ID NO: 369461 - RNA, 19 nt, Artificial Sequence
  Description of Artificial Sequence: Synthetic oligonucleotide
  Sense Strand Starting at position 645 of SEQ ID NO: 318532
ggaggcauuucuguggucu

SEQ ID NO: 369462 - RNA, 19 nt, Artificial Sequence
  Description of Artificial Sequence: Synthetic oligonucleotide
  Antisense Strand to SEQ ID NO: 369461
agaccacagaaaugccucc

SEQ ID NO: 369463 - RNA, 19 nt, Artificial Sequence
  Description of Artificial Sequence: Synthetic oligonucleotide
  Sense Strand Starting at position 645 of SEQ ID NO: 318533
gaggcauuucuguggucuu

SEQ ID NO: 369464 - RNA, 19 nt, Artificial Sequence
  Description of Artificial Sequence: Synthetic oligonucleotide
  Antisense Strand to SEQ ID NO: 369463
aagaccacagaaaugccuc

SEQ ID NO: 369465 - RNA, 19 nt, Artificial Sequence
  Description of Artificial Sequence: Synthetic oligonucleotide
  Sense Strand Starting at position 645 of SEQ ID NO: 318536
gcauuucuguggucuucua

SEQ ID NO: 369466 - RNA, 19 nt, Artificial Sequence
  Description of Artificial Sequence: Synthetic oligonucleotide
  Antisense Strand to SEQ ID NO: 369465
uagaagaccacagaaaugc

SEQ ID NO: 369467 - RNA, 19 nt, Artificial Sequence
  Description of Artificial Sequence: Synthetic oligonucleotide
  Sense Strand Starting at position 645 of SEQ ID NO: 318561
gugagaaucucaucagucu

SEQ ID NO: 369468 - RNA, 19 nt, Artificial Sequence
  Description of Artificial Sequence: Synthetic oligonucleotide
  Antisense Strand to SEQ ID NO: 369467
agacugaugagauucucac

SEQ ID NO: 369469 - RNA, 19 nt, Artificial Sequence
  Description of Artificial Sequence: Synthetic oligonucleotide
  Sense Strand Starting at position 645 of SEQ ID NO: 318562
ugagaaucucaucagucuu

SEQ ID NO: 369470 - RNA, 19 nt, Artificial Sequence
  Description of Artificial Sequence: Synthetic oligonucleotide
  Antisense Strand to SEQ ID NO: 369469
aagacugaugagauucuca

SEQ ID NO: 369471 - RNA, 19 nt, Artificial Sequence
  Description of Artificial Sequence: Synthetic oligonucleotide
  Sense Strand Starting at position 645 of SEQ ID NO: 318831
acuaauucggcucauauca

SEQ ID NO: 369472 - RNA, 19 nt, Artificial Sequence
  Description of Artificial Sequence: Synthetic oligonucleotide
  Antisense Strand to SEQ ID NO: 369471
ugauaugagccgaauuagu

SEQ ID NO: 369473 - RNA, 19 nt, Artificial Sequence
  Description of Artificial Sequence: Synthetic oligonucleotide
  Sense Strand Starting at position 645 of SEQ ID NO: 318838
cggcucauaucacugauga

SEQ ID NO: 369474 - RNA, 19 nt, Artificial Sequence
  Description of Artificial Sequence: Synthetic oligonucleotide
  Antisense Strand to SEQ ID NO: 369473
ucaucagugauaugagccg

SEQ ID NO: 369475 - RNA, 19 nt, Artificial Sequence
  Description of Artificial Sequence: Synthetic oligonucleotide
  Sense Strand Starting at position 645 of SEQ ID NO: 318839
ggcucauaucacugaugaa

SEQ ID NO: 369476 - RNA, 19 nt, Artificial Sequence
  Description of Artificial Sequence: Synthetic oligonucleotide
  Antisense Strand to SEQ ID NO: 369475
uucaucagugauaugagcc

SEQ ID NO: 369477 - RNA, 19 nt, Artificial Sequence
  Description of Artificial Sequence: Synthetic oligonucleotide
  Sense Strand Starting at position 645 of SEQ ID NO: 318865
caguuuggagcugaaugua

SEQ ID NO: 369478 - RNA, 19 nt, Artificial Sequence
  Description of Artificial Sequence: Synthetic oligonucleotide
  Antisense Strand to SEQ ID NO: 369477
uacauucagcuccaaacug

SEQ ID NO: 369479 - RNA, 19 nt, Artificial Sequence
  Description of Artificial Sequence: Synthetic oligonucleotide
  Sense Strand Starting at position 645 of SEQ ID NO: 318868
uuuggagcugaauguauau

SEQ ID NO: 369480 - RNA, 19 nt, Artificial Sequence
  Description of Artificial Sequence: Synthetic oligonucleotide
  Antisense Strand to SEQ ID NO: 369479
auauacauucagcuccaaa

SEQ ID NO: 369481 - RNA, 19 nt, Artificial Sequence
  Description of Artificial Sequence: Synthetic oligonucleotide
  Sense Strand Starting at position 645 of SEQ ID NO: 318898
gauggucaguguuccagaa

SEQ ID NO: 369482 - RNA, 19 nt, Artificial Sequence
  Description of Artificial Sequence: Synthetic oligonucleotide
  Antisense Strand to SEQ ID NO: 369481
uucuggaacacugaccauc

SEQ ID NO: 369483 - RNA, 19 nt, Artificial Sequence
  Description of Artificial Sequence: Synthetic oligonucleotide
  Sense Strand Starting at position 645 of SEQ ID NO: 318902
gucaguguuccagaauuag

SEQ ID NO: 369484 - RNA, 19 nt, Artificial Sequence
  Description of Artificial Sequence: Synthetic oligonucleotide
  Antisense Strand to SEQ ID NO: 369483
cuaauucuggaacacugac

SEQ ID NO: 369485 - RNA, 19 nt, Artificial Sequence
  Description of Artificial Sequence: Synthetic oligonucleotide
  Sense Strand Starting at position 645 of SEQ ID NO: 318911
ccagaauuagcacaucagu

SEQ ID NO: 369486 - RNA, 19 nt, Artificial Sequence
  Description of Artificial Sequence: Synthetic oligonucleotide
  Antisense Strand to SEQ ID NO: 369485
acugaugugcuaauucugg

SEQ ID NO: 369487 - RNA, 19 nt, Artificial Sequence
  Description of Artificial Sequence: Synthetic oligonucleotide
  Sense Strand Starting at position 645 of SEQ ID NO: 318995
ggguuaucaguccacuugu

SEQ ID NO: 369488 - RNA, 19 nt, Artificial Sequence
  Description of Artificial Sequence: Synthetic oligonucleotide
  Antisense Strand to SEQ ID NO: 369487
acaaguggacugauaaccc

SEQ ID NO: 369489 - RNA, 19 nt, Artificial Sequence
  Description of Artificial Sequence: Synthetic oligonucleotide
  Sense Strand Starting at position 645 of SEQ ID NO: 319172
guaaauauucuaggugaaa

SEQ ID NO: 369490 - RNA, 19 nt, Artificial Sequence
  Description of Artificial Sequence: Synthetic oligonucleotide
  Antisense Strand to SEQ ID NO: 369489
uuucaccuagaauauuuac

SEQ ID NO: 369491 - RNA, 19 nt, Artificial Sequence
  Description of Artificial Sequence: Synthetic oligonucleotide
  Sense Strand Starting at position 645 of SEQ ID NO: 319206
gauucuuaccuuugggaag

SEQ ID NO: 369492 - RNA, 19 nt, Artificial Sequence
  Description of Artificial Sequence: Synthetic oligonucleotide
  Antisense Strand to SEQ ID NO: 369491
cuucccaaagguaagaauc

SEQ ID NO: 369493 - RNA, 19 nt, Artificial Sequence
  Description of Artificial Sequence: Synthetic oligonucleotide
  Sense Strand Starting at position 646 of SEQ ID NO: 315246
ccgagccucagagaaguaa

SEQ ID NO: 369494 - RNA, 19 nt, Artificial Sequence
  Description of Artificial Sequence: Synthetic oligonucleotide
  Antisense Strand to SEQ ID NO: 369493
uuacuucucugaggcucgg

SEQ ID NO: 369495 - RNA, 19 nt, Artificial Sequence
  Description of Artificial Sequence: Synthetic oligonucleotide
  Sense Strand Starting at position 646 of SEQ ID NO: 315442
augcuaaccgagcaauaaa

SEQ ID NO: 369496 - RNA, 19 nt, Artificial Sequence
  Description of Artificial Sequence: Synthetic oligonucleotide
  Antisense Strand to SEQ ID NO: 369495
uuuauugcucgguuagcau

SEQ ID NO: 369497 - RNA, 19 nt, Artificial Sequence
  Description of Artificial Sequence: Synthetic oligonucleotide
  Sense Strand Starting at position 646 of SEQ ID NO: 315582
caaagaggugagugucuua

SEQ ID NO: 369498 - RNA, 19 nt, Artificial Sequence
  Description of Artificial Sequence: Synthetic oligonucleotide
  Antisense Strand to SEQ ID NO: 369497
uaagacacucaccucuuug

SEQ ID NO: 369499 - RNA, 19 nt, Artificial Sequence
  Description of Artificial Sequence: Synthetic oligonucleotide
  Sense Strand Starting at position 646 of SEQ ID NO: 315585
agaggugagugucuuaaca

SEQ ID NO: 369500 - RNA, 19 nt, Artificial Sequence
  Description of Artificial Sequence: Synthetic oligonucleotide
  Antisense Strand to SEQ ID NO: 369499
uguuaagacacucaccucu

SEQ ID NO: 369501 - RNA, 19 nt, Artificial Sequence
  Description of Artificial Sequence: Synthetic oligonucleotide
  Sense Strand Starting at position 646 of SEQ ID NO: 315729
gcagaucuuguagaccgua

SEQ ID NO: 369502 - RNA, 19 nt, Artificial Sequence
  Description of Artificial Sequence: Synthetic oligonucleotide
  Antisense Strand to SEQ ID NO: 369501
uacggucuacaagaucugc

SEQ ID NO: 369503 - RNA, 19 nt, Artificial Sequence
  Description of Artificial Sequence: Synthetic oligonucleotide
  Sense Strand Starting at position 646 of SEQ ID NO: 315750
cguguugcagaagaagaaa

SEQ ID NO: 369504 - RNA, 19 nt, Artificial Sequence
  Description of Artificial Sequence: Synthetic oligonucleotide
  Antisense Strand to SEQ ID NO: 369503
uuucuucuucugcaacacg

SEQ ID NO: 369505 - RNA, 19 nt, Artificial Sequence
  Description of Artificial Sequence: Synthetic oligonucleotide
  Sense Strand Starting at position 646 of SEQ ID NO: 315857
ugcugaagucggugaagga

SEQ ID NO: 369506 - RNA, 19 nt, Artificial Sequence
  Description of Artificial Sequence: Synthetic oligonucleotide
  Antisense Strand to SEQ ID NO: 369505
uccuucaccgacuucagca

SEQ ID NO: 369507 - RNA, 19 nt, Artificial Sequence
  Description of Artificial Sequence: Synthetic oligonucleotide
  Sense Strand Starting at position 646 of SEQ ID NO: 316298
gggucaugagaguguugag

SEQ ID NO: 369508 - RNA, 19 nt, Artificial Sequence
  Description of Artificial Sequence: Synthetic oligonucleotide
  Antisense Strand to SEQ ID NO: 369507
cucaacacucucaugaccc

SEQ ID NO: 369509 - RNA, 19 nt, Artificial Sequence
  Description of Artificial Sequence: Synthetic oligonucleotide
  Sense Strand Starting at position 646 of SEQ ID NO: 316308
aguguugaggccgugucua

SEQ ID NO: 369510 - RNA, 19 nt, Artificial Sequence
  Description of Artificial Sequence: Synthetic oligonucleotide
  Antisense Strand to SEQ ID NO: 369509
uagacacggccucaacacu

SEQ ID NO: 369511 - RNA, 19 nt, Artificial Sequence
  Description of Artificial Sequence: Synthetic oligonucleotide
  Sense Strand Starting at position 646 of SEQ ID NO: 316464
ggguuugagagcugguauu

SEQ ID NO: 369512 - RNA, 19 nt, Artificial Sequence
  Description of Artificial Sequence: Synthetic oligonucleotide
  Antisense Strand to SEQ ID NO: 369511
aauaccagcucucaaaccc

SEQ ID NO: 369513 - RNA, 19 nt, Artificial Sequence
  Description of Artificial Sequence: Synthetic oligonucleotide
  Sense Strand Starting at position 646 of SEQ ID NO: 316474
gcugguauuacgggaguag

SEQ ID NO: 369514 - RNA, 19 nt, Artificial Sequence
  Description of Artificial Sequence: Synthetic oligonucleotide
  Antisense Strand to SEQ ID NO: 369513
cuacucccguaauaccagc

SEQ ID NO: 369515 - RNA, 19 nt, Artificial Sequence
  Description of Artificial Sequence: Synthetic oligonucleotide
  Sense Strand Starting at position 646 of SEQ ID NO: 316615
gguauugggugucuagcaa

SEQ ID NO: 369516 - RNA, 19 nt, Artificial Sequence
  Description of Artificial Sequence: Synthetic oligonucleotide
  Antisense Strand to SEQ ID NO: 369515
uugcuagacacccaauacc

SEQ ID NO: 369517 - RNA, 19 nt, Artificial Sequence
  Description of Artificial Sequence: Synthetic oligonucleotide
  Sense Strand Starting at position 646 of SEQ ID NO: 316700
ggugguugggaagguaaua

SEQ ID NO: 369518 - RNA, 19 nt, Artificial Sequence
  Description of Artificial Sequence: Synthetic oligonucleotide
  Antisense Strand to SEQ ID NO: 369517
uauuaccuucccaaccacc

SEQ ID NO: 369519 - RNA, 19 nt, Artificial Sequence
  Description of Artificial Sequence: Synthetic oligonucleotide
  Sense Strand Starting at position 646 of SEQ ID NO: 316773
gcagaauuaggauacagcu

SEQ ID NO: 369520 - RNA, 19 nt, Artificial Sequence
  Description of Artificial Sequence: Synthetic oligonucleotide
  Antisense Strand to SEQ ID NO: 369519
agcuguauccuaauucugc

SEQ ID NO: 369521 - RNA, 19 nt, Artificial Sequence
  Description of Artificial Sequence: Synthetic oligonucleotide
  Sense Strand Starting at position 646 of SEQ ID NO: 317537
gguauuauuugacaggauu

SEQ ID NO: 369522 - RNA, 19 nt, Artificial Sequence
  Description of Artificial Sequence: Synthetic oligonucleotide
  Antisense Strand to SEQ ID NO: 369521
aauccugucaaauaauacc

SEQ ID NO: 369523 - RNA, 19 nt, Artificial Sequence
  Description of Artificial Sequence: Synthetic oligonucleotide
  Sense Strand Starting at position 646 of SEQ ID NO: 317560
cggaucucuuacucccaau

SEQ ID NO: 369524 - RNA, 19 nt, Artificial Sequence
  Description of Artificial Sequence: Synthetic oligonucleotide
  Antisense Strand to SEQ ID NO: 369523
auugggaguaagagauccg

SEQ ID NO: 369525 - RNA, 19 nt, Artificial Sequence
  Description of Artificial Sequence: Synthetic oligonucleotide
  Sense Strand Starting at position 646 of SEQ ID NO: 317638
gggucuuggaggcguugaa

SEQ ID NO: 369526 - RNA, 19 nt, Artificial Sequence
  Description of Artificial Sequence: Synthetic oligonucleotide
  Antisense Strand to SEQ ID NO: 369525
uucaacgccuccaagaccc

SEQ ID NO: 369527 - RNA, 19 nt, Artificial Sequence
  Description of Artificial Sequence: Synthetic oligonucleotide
  Sense Strand Starting at position 646 of SEQ ID NO: 317650
cguugaagguucccagagu

SEQ ID NO: 369528 - RNA, 19 nt, Artificial Sequence
  Description of Artificial Sequence: Synthetic oligonucleotide
  Antisense Strand to SEQ ID NO: 369527
acucugggaaccuucaacg

SEQ ID NO: 369529 - RNA, 19 nt, Artificial Sequence
  Description of Artificial Sequence: Synthetic oligonucleotide
  Sense Strand Starting at position 646 of SEQ ID NO: 317661
cccagagucuccuaggaaa

SEQ ID NO: 369530 - RNA, 19 nt, Artificial Sequence
  Description of Artificial Sequence: Synthetic oligonucleotide
  Antisense Strand to SEQ ID NO: 369529
uuuccuaggagacucuggg

SEQ ID NO: 369531 - RNA, 19 nt, Artificial Sequence
  Description of Artificial Sequence: Synthetic oligonucleotide
  Sense Strand Starting at position 646 of SEQ ID NO: 317663
cagagucuccuaggaaacu

SEQ ID NO: 369532 - RNA, 19 nt, Artificial Sequence
  Description of Artificial Sequence: Synthetic oligonucleotide
  Antisense Strand to SEQ ID NO: 369531
aguuuccuaggagacucug

SEQ ID NO: 369533 - RNA, 19 nt, Artificial Sequence
  Description of Artificial Sequence: Synthetic oligonucleotide
  Sense Strand Starting at position 646 of SEQ ID NO: 317937
aggguuaggucacagaaca

SEQ ID NO: 369534 - RNA, 19 nt, Artificial Sequence
  Description of Artificial Sequence: Synthetic oligonucleotide
  Antisense Strand to SEQ ID NO: 369533
uguucugugaccuaacccu

SEQ ID NO: 369535 - RNA, 19 nt, Artificial Sequence
  Description of Artificial Sequence: Synthetic oligonucleotide
  Sense Strand Starting at position 646 of SEQ ID NO: 317981
cggcgugguucauuucuuu

SEQ ID NO: 369536 - RNA, 19 nt, Artificial Sequence
  Description of Artificial Sequence: Synthetic oligonucleotide
  Antisense Strand to SEQ ID NO: 369535
aaagaaaugaaccacgccg

SEQ ID NO: 369537 - RNA, 19 nt, Artificial Sequence
  Description of Artificial Sequence: Synthetic oligonucleotide
  Sense Strand Starting at position 646 of SEQ ID NO: 318020
uggcuuaggaucugucaag

SEQ ID NO: 369538 - RNA, 19 nt, Artificial Sequence
  Description of Artificial Sequence: Synthetic oligonucleotide
  Antisense Strand to SEQ ID NO: 369537
cuugacagauccuaagcca

SEQ ID NO: 369539 - RNA, 19 nt, Artificial Sequence
  Description of Artificial Sequence: Synthetic oligonucleotide
  Sense Strand Starting at position 646 of SEQ ID NO: 318021
ggcuuaggaucugucaaga

SEQ ID NO: 369540 - RNA, 19 nt, Artificial Sequence
  Description of Artificial Sequence: Synthetic oligonucleotide
  Antisense Strand to SEQ ID NO: 369539
ucuugacagauccuaagcc

SEQ ID NO: 369541 - RNA, 19 nt, Artificial Sequence
  Description of Artificial Sequence: Synthetic oligonucleotide
  Sense Strand Starting at position 646 of SEQ ID NO: 318035
caagaugauguggguuuga

SEQ ID NO: 369542 - RNA, 19 nt, Artificial Sequence
  Description of Artificial Sequence: Synthetic oligonucleotide
  Antisense Strand to SEQ ID NO: 369541
ucaaacccacaucaucuug

SEQ ID NO: 369543 - RNA, 19 nt, Artificial Sequence
  Description of Artificial Sequence: Synthetic oligonucleotide
  Sense Strand Starting at position 646 of SEQ ID NO: 318203
gcaggucucaaauacugga

SEQ ID NO: 369544 - RNA, 19 nt, Artificial Sequence
  Description of Artificial Sequence: Synthetic oligonucleotide
  Antisense Strand to SEQ ID NO: 369543
uccaguauuugagaccugc

SEQ ID NO: 369545 - RNA, 19 nt, Artificial Sequence
  Description of Artificial Sequence: Synthetic oligonucleotide
  Sense Strand Starting at position 646 of SEQ ID NO: 318574
uuaagaaauaguggugaua

SEQ ID NO: 369546 - RNA, 19 nt, Artificial Sequence
  Description of Artificial Sequence: Synthetic oligonucleotide
  Antisense Strand to SEQ ID NO: 369545
uaucaccacuauuucuuaa

SEQ ID NO: 369547 - RNA, 19 nt, Artificial Sequence
  Description of Artificial Sequence: Synthetic oligonucleotide
  Sense Strand Starting at position 646 of SEQ ID NO: 318577
agaaauaguggugauaguu

SEQ ID NO: 369548 - RNA, 19 nt, Artificial Sequence
  Description of Artificial Sequence: Synthetic oligonucleotide
  Antisense Strand to SEQ ID NO: 369547
aacuaucaccacuauuucu

SEQ ID NO: 369549 - RNA, 19 nt, Artificial Sequence
  Description of Artificial Sequence: Synthetic oligonucleotide
  Sense Strand Starting at position 646 of SEQ ID NO: 318589
gauaguuaacgggagguuu

SEQ ID NO: 369550 - RNA, 19 nt, Artificial Sequence
  Description of Artificial Sequence: Synthetic oligonucleotide
  Antisense Strand to SEQ ID NO: 369549
aaaccucccguuaacuauc

SEQ ID NO: 369551 - RNA, 19 nt, Artificial Sequence
  Description of Artificial Sequence: Synthetic oligonucleotide
  Sense Strand Starting at position 646 of SEQ ID NO: 318707
cugggaaccacgugaauua

SEQ ID NO: 369552 - RNA, 19 nt, Artificial Sequence
  Description of Artificial Sequence: Synthetic oligonucleotide
  Antisense Strand to SEQ ID NO: 369551
uaauucacgugguucccag

SEQ ID NO: 369553 - RNA, 19 nt, Artificial Sequence
  Description of Artificial Sequence: Synthetic oligonucleotide
  Sense Strand Starting at position 646 of SEQ ID NO: 318714
ccacgugaauuagucucau

SEQ ID NO: 369554 - RNA, 19 nt, Artificial Sequence
  Description of Artificial Sequence: Synthetic oligonucleotide
  Antisense Strand to SEQ ID NO: 369553
augagacuaauucacgugg

SEQ ID NO: 369555 - RNA, 19 nt, Artificial Sequence
  Description of Artificial Sequence: Synthetic oligonucleotide
  Sense Strand Starting at position 646 of SEQ ID NO: 318800
cuuggcuguuuccugagaa

SEQ ID NO: 369556 - RNA, 19 nt, Artificial Sequence
  Description of Artificial Sequence: Synthetic oligonucleotide
  Antisense Strand to SEQ ID NO: 369555
uucucaggaaacagccaag

SEQ ID NO: 369557 - RNA, 19 nt, Artificial Sequence
  Description of Artificial Sequence: Synthetic oligonucleotide
  Sense Strand Starting at position 646 of SEQ ID NO: 318810
uccugagaacccugugauc

SEQ ID NO: 369558 - RNA, 19 nt, Artificial Sequence
  Description of Artificial Sequence: Synthetic oligonucleotide
  Antisense Strand to SEQ ID NO: 369557
gaucacaggguucucagga

SEQ ID NO: 369559 - RNA, 19 nt, Artificial Sequence
  Description of Artificial Sequence: Synthetic oligonucleotide
  Sense Strand Starting at position 646 of SEQ ID NO: 318812
cugagaacccugugauccu

SEQ ID NO: 369560 - RNA, 19 nt, Artificial Sequence
  Description of Artificial Sequence: Synthetic oligonucleotide
  Antisense Strand to SEQ ID NO: 369559
aggaucacaggguucucag

SEQ ID NO: 369561 - RNA, 19 nt, Artificial Sequence
  Description of Artificial Sequence: Synthetic oligonucleotide
  Sense Strand Starting at position 646 of SEQ ID NO: 318819
cccugugauccuggaauca

SEQ ID NO: 369562 - RNA, 19 nt, Artificial Sequence
  Description of Artificial Sequence: Synthetic oligonucleotide
  Antisense Strand to SEQ ID NO: 369561
ugauuccaggaucacaggg

SEQ ID NO: 369563 - RNA, 19 nt, Artificial Sequence
  Description of Artificial Sequence: Synthetic oligonucleotide
  Sense Strand Starting at position 646 of SEQ ID NO: 318854
uggagaguguuucuuucua

SEQ ID NO: 369564 - RNA, 19 nt, Artificial Sequence
  Description of Artificial Sequence: Synthetic oligonucleotide
  Antisense Strand to SEQ ID NO: 369563
uagaaagaaacacucucca

SEQ ID NO: 369565 - RNA, 19 nt, Artificial Sequence
  Description of Artificial Sequence: Synthetic oligonucleotide
  Sense Strand Starting at position 646 of SEQ ID NO: 318856
gagaguguuucuuucuaua

SEQ ID NO: 369566 - RNA, 19 nt, Artificial Sequence
  Description of Artificial Sequence: Synthetic oligonucleotide
  Antisense Strand to SEQ ID NO: 369565
uauagaaagaaacacucuc

SEQ ID NO: 369567 - RNA, 19 nt, Artificial Sequence
  Description of Artificial Sequence: Synthetic oligonucleotide
  Sense Strand Starting at position 646 of SEQ ID NO: 319052
gggagaagguggucaguaa

SEQ ID NO: 369568 - RNA, 19 nt, Artificial Sequence
  Description of Artificial Sequence: Synthetic oligonucleotide
  Antisense Strand to SEQ ID NO: 369567
uuacugaccaccuucuccc

SEQ ID NO: 369569 - RNA, 19 nt, Artificial Sequence
  Description of Artificial Sequence: Synthetic oligonucleotide
  Sense Strand Starting at position 646 of SEQ ID NO: 319209
uggguccugcccugaacau

SEQ ID NO: 369570 - RNA, 19 nt, Artificial Sequence
  Description of Artificial Sequence: Synthetic oligonucleotide
  Antisense Strand to SEQ ID NO: 369569
auguucagggcaggaccca

SEQ ID NO: 369571 - RNA, 19 nt, Artificial Sequence
  Description of Artificial Sequence: Synthetic oligonucleotide
  Sense Strand Starting at position 646 of SEQ ID NO: 319210
ggguccugcccugaacaua

SEQ ID NO: 369572 - RNA, 19 nt, Artificial Sequence
  Description of Artificial Sequence: Synthetic oligonucleotide
  Antisense Strand to SEQ ID NO: 369571
uauguucagggcaggaccc

SEQ ID NO: 369573 - RNA, 19 nt, Artificial Sequence
  Description of Artificial Sequence: Synthetic oligonucleotide
  Sense Strand Starting at position 647 of SEQ ID NO: 315406
ugagaaagcuggucccacu

SEQ ID NO: 369574 - RNA, 19 nt, Artificial Sequence
  Description of Artificial Sequence: Synthetic oligonucleotide
  Antisense Strand to SEQ ID NO: 369573
agugggaccagcuuucuca

SEQ ID NO: 369575 - RNA, 19 nt, Artificial Sequence
  Description of Artificial Sequence: Synthetic oligonucleotide
  Sense Strand Starting at position 647 of SEQ ID NO: 315409
gaaagcuggucccacugaa

SEQ ID NO: 369576 - RNA, 19 nt, Artificial Sequence
  Description of Artificial Sequence: Synthetic oligonucleotide
  Antisense Strand to SEQ ID NO: 369575
uucagugggaccagcuuuc

SEQ ID NO: 369577 - RNA, 19 nt, Artificial Sequence
  Description of Artificial Sequence: Synthetic oligonucleotide
  Sense Strand Starting at position 647 of SEQ ID NO: 315430
ccuauaugagccugucacu

SEQ ID NO: 369578 - RNA, 19 nt, Artificial Sequence
  Description of Artificial Sequence: Synthetic oligonucleotide
  Antisense Strand to SEQ ID NO: 369577
agugacaggcucauauagg

SEQ ID NO: 369579 - RNA, 19 nt, Artificial Sequence
  Description of Artificial Sequence: Synthetic oligonucleotide
  Sense Strand Starting at position 647 of SEQ ID NO: 315513
gagagcagucaugagcaau

SEQ ID NO: 369580 - RNA, 19 nt, Artificial Sequence
  Description of Artificial Sequence: Synthetic oligonucleotide
  Antisense Strand to SEQ ID NO: 369579
auugcucaugacugcucuc

SEQ ID NO: 369581 - RNA, 19 nt, Artificial Sequence
  Description of Artificial Sequence: Synthetic oligonucleotide
  Sense Strand Starting at position 647 of SEQ ID NO: 317429
ggaccaaguuugcuuccaa

SEQ ID NO: 369582 - RNA, 19 nt, Artificial Sequence
  Description of Artificial Sequence: Synthetic oligonucleotide
  Antisense Strand to SEQ ID NO: 369581
uuggaagcaaacuuggucc

SEQ ID NO: 369583 - RNA, 19 nt, Artificial Sequence
  Description of Artificial Sequence: Synthetic oligonucleotide
  Sense Strand Starting at position 647 of SEQ ID NO: 318164
cugcgaguccuggaccgaa

SEQ ID NO: 369584 - RNA, 19 nt, Artificial Sequence
  Description of Artificial Sequence: Synthetic oligonucleotide
  Antisense Strand to SEQ ID NO: 369583
uucgguccaggacucgcag

SEQ ID NO: 369585 - RNA, 19 nt, Artificial Sequence
  Description of Artificial Sequence: Synthetic oligonucleotide
  Sense Strand Starting at position 647 of SEQ ID NO: 318310
gggaguuugcgaggacuuu

SEQ ID NO: 369586 - RNA, 19 nt, Artificial Sequence
  Description of Artificial Sequence: Synthetic oligonucleotide
  Antisense Strand to SEQ ID NO: 369585
aaaguccucgcaaacuccc

SEQ ID NO: 369587 - RNA, 19 nt, Artificial Sequence
  Description of Artificial Sequence: Synthetic oligonucleotide
  Sense Strand Starting at position 647 of SEQ ID NO: 318600
agaagaaagucucguugug

SEQ ID NO: 369588 - RNA, 19 nt, Artificial Sequence
  Description of Artificial Sequence: Synthetic oligonucleotide
  Antisense Strand to SEQ ID NO: 369587
cacaacgagacuuucuucu

SEQ ID NO: 369589 - RNA, 19 nt, Artificial Sequence
  Description of Artificial Sequence: Synthetic oligonucleotide
  Sense Strand Starting at position 647 of SEQ ID NO: 318662
gcccuaguaggcucguuau

SEQ ID NO: 369590 - RNA, 19 nt, Artificial Sequence
  Description of Artificial Sequence: Synthetic oligonucleotide
  Antisense Strand to SEQ ID NO: 369589
auaacgagccuacuagggc

SEQ ID NO: 369591 - RNA, 19 nt, Artificial Sequence
  Description of Artificial Sequence: Synthetic oligonucleotide
  Sense Strand Starting at position 647 of SEQ ID NO: 318669
uaggcucguuauucguaga

SEQ ID NO: 369592 - RNA, 19 nt, Artificial Sequence
  Description of Artificial Sequence: Synthetic oligonucleotide
  Antisense Strand to SEQ ID NO: 369591
ucuacgaauaacgagccua

SEQ ID NO: 369593 - RNA, 19 nt, Artificial Sequence
  Description of Artificial Sequence: Synthetic oligonucleotide
  Sense Strand Starting at position 647 of SEQ ID NO: 318674
ucguuauucguagagggac

SEQ ID NO: 369594 - RNA, 19 nt, Artificial Sequence
  Description of Artificial Sequence: Synthetic oligonucleotide
  Antisense Strand to SEQ ID NO: 369593
gucccucuacgaauaacga

SEQ ID NO: 369595 - RNA, 19 nt, Artificial Sequence
  Description of Artificial Sequence: Synthetic oligonucleotide
  Sense Strand Starting at position 647 of SEQ ID NO: 318784
aggcgauccuggagagguu

SEQ ID NO: 369596 - RNA, 19 nt, Artificial Sequence
  Description of Artificial Sequence: Synthetic oligonucleotide
  Antisense Strand to SEQ ID NO: 369595
aaccucuccaggaucgccu

SEQ ID NO: 369597 - RNA, 19 nt, Artificial Sequence
  Description of Artificial Sequence: Synthetic oligonucleotide
  Sense Strand Starting at position 647 of SEQ ID NO: 318824
ucgugauccuaaggcaaau

SEQ ID NO: 369598 - RNA, 19 nt, Artificial Sequence
  Description of Artificial Sequence: Synthetic oligonucleotide
  Antisense Strand to SEQ ID NO: 369597
auuugccuuaggaucacga

SEQ ID NO: 369599 - RNA, 19 nt, Artificial Sequence
  Description of Artificial Sequence: Synthetic oligonucleotide
  Sense Strand Starting at position 647 of SEQ ID NO: 318927
gccagaucuagggaucuuc

SEQ ID NO: 369600 - RNA, 19 nt, Artificial Sequence
  Description of Artificial Sequence: Synthetic oligonucleotide
  Antisense Strand to SEQ ID NO: 369599
gaagaucccuagaucuggc

SEQ ID NO: 369601 - RNA, 19 nt, Artificial Sequence
  Description of Artificial Sequence: Synthetic oligonucleotide
  Sense Strand Starting at position 647 of SEQ ID NO: 319006
aacugaguggcucaucuuu

SEQ ID NO: 369602 - RNA, 19 nt, Artificial Sequence
  Description of Artificial Sequence: Synthetic oligonucleotide
  Antisense Strand to SEQ ID NO: 369601
aaagaugagccacucaguu

SEQ ID NO: 369603 - RNA, 19 nt, Artificial Sequence
  Description of Artificial Sequence: Synthetic oligonucleotide
  Sense Strand Starting at position 647 of SEQ ID NO: 319064
cagagugguuccuguuguu

SEQ ID NO: 369604 - RNA, 19 nt, Artificial Sequence
  Description of Artificial Sequence: Synthetic oligonucleotide
  Antisense Strand to SEQ ID NO: 369603
aacaacaggaaccacucug

SEQ ID NO: 369605 - RNA, 19 nt, Artificial Sequence
  Description of Artificial Sequence: Synthetic oligonucleotide
  Sense Strand Starting at position 647 of SEQ ID NO: 319106
ccugcucaguucugauaac

SEQ ID NO: 369606 - RNA, 19 nt, Artificial Sequence
  Description of Artificial Sequence: Synthetic oligonucleotide
  Antisense Strand to SEQ ID NO: 369605
guuaucagaacugagcagg

SEQ ID NO: 369607 - RNA, 19 nt, Artificial Sequence
  Description of Artificial Sequence: Synthetic oligonucleotide
  Sense Strand Starting at position 647 of SEQ ID NO: 319107
cugcucaguucugauaacu

SEQ ID NO: 369608 - RNA, 19 nt, Artificial Sequence
  Description of Artificial Sequence: Synthetic oligonucleotide
  Antisense Strand to SEQ ID NO: 369607
aguuaucagaacugagcag

SEQ ID NO: 369609 - RNA, 19 nt, Artificial Sequence
  Description of Artificial Sequence: Synthetic oligonucleotide
  Sense Strand Starting at position 647 of SEQ ID NO: 319200
ugaccauaucuguaugcca

SEQ ID NO: 369610 - RNA, 19 nt, Artificial Sequence
  Description of Artificial Sequence: Synthetic oligonucleotide
  Antisense Strand to SEQ ID NO: 369609
uggcauacagauaugguca

SEQ ID NO: 369611 - RNA, 19 nt, Artificial Sequence
  Description of Artificial Sequence: Synthetic oligonucleotide
  Sense Strand Starting at position 647 of SEQ ID NO: 319213
augccaagugccugguaua

SEQ ID NO: 369612 - RNA, 19 nt, Artificial Sequence
  Description of Artificial Sequence: Synthetic oligonucleotide
  Antisense Strand to SEQ ID NO: 369611
uauaccaggcacuuggcau

SEQ ID NO: 369613 - RNA, 19 nt, Artificial Sequence
  Description of Artificial Sequence: Synthetic oligonucleotide
  Sense Strand Starting at position 647 of SEQ ID NO: 319214
ugccaagugccugguauau

SEQ ID NO: 369614 - RNA, 19 nt, Artificial Sequence
  Description of Artificial Sequence: Synthetic oligonucleotide
  Antisense Strand to SEQ ID NO: 369613
auauaccaggcacuuggca

SEQ ID NO: 369615 - RNA, 19 nt, Artificial Sequence
  Description of Artificial Sequence: Synthetic oligonucleotide
  Sense Strand Starting at position 647 of SEQ ID NO: 319216
ccaagugccugguauauau

SEQ ID NO: 369616 - RNA, 19 nt, Artificial Sequence
  Description of Artificial Sequence: Synthetic oligonucleotide
  Antisense Strand to SEQ ID NO: 369615
auauauaccaggcacuugg

SEQ ID NO: 369617 - RNA, 19 nt, Artificial Sequence
  Description of Artificial Sequence: Synthetic oligonucleotide
  Sense Strand Starting at position 648 of SEQ ID NO: 315865
aauaucgaguucucaguua

SEQ ID NO: 369618 - RNA, 19 nt, Artificial Sequence
  Description of Artificial Sequence: Synthetic oligonucleotide
  Antisense Strand to SEQ ID NO: 369617
uaacugagaacucgauauu

SEQ ID NO: 369619 - RNA, 19 nt, Artificial Sequence
  Description of Artificial Sequence: Synthetic oligonucleotide
  Sense Strand Starting at position 648 of SEQ ID NO: 315887
auaucaucauugguaugau

SEQ ID NO: 369620 - RNA, 19 nt, Artificial Sequence
  Description of Artificial Sequence: Synthetic oligonucleotide
  Antisense Strand to SEQ ID NO: 369619
aucauaccaaugaugauau

SEQ ID NO: 369621 - RNA, 19 nt, Artificial Sequence
  Description of Artificial Sequence: Synthetic oligonucleotide
  Sense Strand Starting at position 648 of SEQ ID NO: 316040
guaauuauaguuuaccaac

SEQ ID NO: 369622 - RNA, 19 nt, Artificial Sequence
  Description of Artificial Sequence: Synthetic oligonucleotide
  Antisense Strand to SEQ ID NO: 369621
guugguaaacuauaauuac

SEQ ID NO: 369623 - RNA, 19 nt, Artificial Sequence
  Description of Artificial Sequence: Synthetic oligonucleotide
  Sense Strand Starting at position 648 of SEQ ID NO: 316179
uccauuccuguauguagaa

SEQ ID NO: 369624 - RNA, 19 nt, Artificial Sequence
  Description of Artificial Sequence: Synthetic oligonucleotide
  Antisense Strand to SEQ ID NO: 369623
uucuacauacaggaaugga

SEQ ID NO: 369625 - RNA, 19 nt, Artificial Sequence
  Description of Artificial Sequence: Synthetic oligonucleotide
  Sense Strand Starting at position 648 of SEQ ID NO: 316180
ccauuccuguauguagaaa

SEQ ID NO: 369626 - RNA, 19 nt, Artificial Sequence
  Description of Artificial Sequence: Synthetic oligonucleotide
  Antisense Strand to SEQ ID NO: 369625
uuucuacauacaggaaugg

SEQ ID NO: 369627 - RNA, 19 nt, Artificial Sequence
  Description of Artificial Sequence: Synthetic oligonucleotide
  Sense Strand Starting at position 648 of SEQ ID NO: 316244
agacuuaucucugcauagg

SEQ ID NO: 369628 - RNA, 19 nt, Artificial Sequence
  Description of Artificial Sequence: Synthetic oligonucleotide
  Antisense Strand to SEQ ID NO: 369627
ccuaugcagagauaagucu

SEQ ID NO: 369629 - RNA, 19 nt, Artificial Sequence
  Description of Artificial Sequence: Synthetic oligonucleotide
  Sense Strand Starting at position 648 of SEQ ID NO: 316245
gacuuaucucugcauagga

SEQ ID NO: 369630 - RNA, 19 nt, Artificial Sequence
  Description of Artificial Sequence: Synthetic oligonucleotide
  Antisense Strand to SEQ ID NO: 369629
uccuaugcagagauaaguc

SEQ ID NO: 369631 - RNA, 19 nt, Artificial Sequence
  Description of Artificial Sequence: Synthetic oligonucleotide
  Sense Strand Starting at position 648 of SEQ ID NO: 316296
auaaauucccagcaauggu

SEQ ID NO: 369632 - RNA, 19 nt, Artificial Sequence
  Description of Artificial Sequence: Synthetic oligonucleotide
  Antisense Strand to SEQ ID NO: 369631
accauugcugggaauuuau

SEQ ID NO: 369633 - RNA, 19 nt, Artificial Sequence
  Description of Artificial Sequence: Synthetic oligonucleotide
  Sense Strand Starting at position 648 of SEQ ID NO: 316443
aagguugcaaaguguugaa

SEQ ID NO: 369634 - RNA, 19 nt, Artificial Sequence
  Description of Artificial Sequence: Synthetic oligonucleotide
  Antisense Strand to SEQ ID NO: 369633
uucaacacuuugcaaccuu

SEQ ID NO: 369635 - RNA, 19 nt, Artificial Sequence
  Description of Artificial Sequence: Synthetic oligonucleotide
  Sense Strand Starting at position 648 of SEQ ID NO: 316574
gaaccauuccaaggaguuu

SEQ ID NO: 369636 - RNA, 19 nt, Artificial Sequence
  Description of Artificial Sequence: Synthetic oligonucleotide
  Antisense Strand to SEQ ID NO: 369635
aaacuccuuggaaugguuc

SEQ ID NO: 369637 - RNA, 19 nt, Artificial Sequence
  Description of Artificial Sequence: Synthetic oligonucleotide
  Sense Strand Starting at position 648 of SEQ ID NO: 316580
uuccaaggaguuuaucuau

SEQ ID NO: 369638 - RNA, 19 nt, Artificial Sequence
  Description of Artificial Sequence: Synthetic oligonucleotide
  Antisense Strand to SEQ ID NO: 369637
auagauaaacuccuuggaa

SEQ ID NO: 369639 - RNA, 19 nt, Artificial Sequence
  Description of Artificial Sequence: Synthetic oligonucleotide
  Sense Strand Starting at position 648 of SEQ ID NO: 316788
agcauauuugauuguugua

SEQ ID NO: 369640 - RNA, 19 nt, Artificial Sequence
  Description of Artificial Sequence: Synthetic oligonucleotide
  Antisense Strand to SEQ ID NO: 369639
uacaacaaucaaauaugcu

SEQ ID NO: 369641 - RNA, 19 nt, Artificial Sequence
  Description of Artificial Sequence: Synthetic oligonucleotide
  Sense Strand Starting at position 648 of SEQ ID NO: 317185
aagaguuuccacuguggga

SEQ ID NO: 369642 - RNA, 19 nt, Artificial Sequence
  Description of Artificial Sequence: Synthetic oligonucleotide
  Antisense Strand to SEQ ID NO: 369641
ucccacaguggaaacucuu

SEQ ID NO: 369643 - RNA, 19 nt, Artificial Sequence
  Description of Artificial Sequence: Synthetic oligonucleotide
  Sense Strand Starting at position 648 of SEQ ID NO: 317187
gaguuuccacugugggauu

SEQ ID NO: 369644 - RNA, 19 nt, Artificial Sequence
  Description of Artificial Sequence: Synthetic oligonucleotide
  Antisense Strand to SEQ ID NO: 369643
aaucccacaguggaaacuc

SEQ ID NO: 369645 - RNA, 19 nt, Artificial Sequence
  Description of Artificial Sequence: Synthetic oligonucleotide
  Sense Strand Starting at position 648 of SEQ ID NO: 317415
cuucgugggcgguuuauua

SEQ ID NO: 369646 - RNA, 19 nt, Artificial Sequence
  Description of Artificial Sequence: Synthetic oligonucleotide
  Antisense Strand to SEQ ID NO: 369645
uaauaaaccgcccacgaag

SEQ ID NO: 369647 - RNA, 19 nt, Artificial Sequence
  Description of Artificial Sequence: Synthetic oligonucleotide
  Sense Strand Starting at position 648 of SEQ ID NO: 317451
guugaaaccaagugugacu

SEQ ID NO: 369648 - RNA, 19 nt, Artificial Sequence
  Description of Artificial Sequence: Synthetic oligonucleotide
  Antisense Strand to SEQ ID NO: 369647
agucacacuugguuucaac

SEQ ID NO: 369649 - RNA, 19 nt, Artificial Sequence
  Description of Artificial Sequence: Synthetic oligonucleotide
  Sense Strand Starting at position 648 of SEQ ID NO: 317456
aaccaagugugacuugaga

SEQ ID NO: 369650 - RNA, 19 nt, Artificial Sequence
  Description of Artificial Sequence: Synthetic oligonucleotide
  Antisense Strand to SEQ ID NO: 369649
ucucaagucacacuugguu

SEQ ID NO: 369651 - RNA, 19 nt, Artificial Sequence
  Description of Artificial Sequence: Synthetic oligonucleotide
  Sense Strand Starting at position 648 of SEQ ID NO: 317458
ccaagugugacuugagauc

SEQ ID NO: 369652 - RNA, 19 nt, Artificial Sequence
  Description of Artificial Sequence: Synthetic oligonucleotide
  Antisense Strand to SEQ ID NO: 369651
gaucucaagucacacuugg

SEQ ID NO: 369653 - RNA, 19 nt, Artificial Sequence
  Description of Artificial Sequence: Synthetic oligonucleotide
  Sense Strand Starting at position 648 of SEQ ID NO: 317487
gguucuugugaaugaaaua

SEQ ID NO: 369654 - RNA, 19 nt, Artificial Sequence
  Description of Artificial Sequence: Synthetic oligonucleotide
  Antisense Strand to SEQ ID NO: 369653
uauuucauucacaagaacc

SEQ ID NO: 369655 - RNA, 19 nt, Artificial Sequence
  Description of Artificial Sequence: Synthetic oligonucleotide
  Sense Strand Starting at position 648 of SEQ ID NO: 317698
uuguauuucuuccuaccga

SEQ ID NO: 369656 - RNA, 19 nt, Artificial Sequence
  Description of Artificial Sequence: Synthetic oligonucleotide
  Antisense Strand to SEQ ID NO: 369655
ucgguaggaagaaauacaa

SEQ ID NO: 369657 - RNA, 19 nt, Artificial Sequence
  Description of Artificial Sequence: Synthetic oligonucleotide
  Sense Strand Starting at position 648 of SEQ ID NO: 318022
cagagugacugucucaaac

SEQ ID NO: 369658 - RNA, 19 nt, Artificial Sequence
  Description of Artificial Sequence: Synthetic oligonucleotide
  Antisense Strand to SEQ ID NO: 369657
guuugagacagucacucug

SEQ ID NO: 369659 - RNA, 19 nt, Artificial Sequence
  Description of Artificial Sequence: Synthetic oligonucleotide
  Sense Strand Starting at position 648 of SEQ ID NO: 318098
gccagaaucuauguaucuc

SEQ ID NO: 369660 - RNA, 19 nt, Artificial Sequence
  Description of Artificial Sequence: Synthetic oligonucleotide
  Antisense Strand to SEQ ID NO: 369659
gagauacauagauucuggc

SEQ ID NO: 369661 - RNA, 19 nt, Artificial Sequence
  Description of Artificial Sequence: Synthetic oligonucleotide
  Sense Strand Starting at position 648 of SEQ ID NO: 318107
uauguaucucagggauaga

SEQ ID NO: 369662 - RNA, 19 nt, Artificial Sequence
  Description of Artificial Sequence: Synthetic oligonucleotide
  Antisense Strand to SEQ ID NO: 369661
ucuaucccugagauacaua

SEQ ID NO: 369663 - RNA, 19 nt, Artificial Sequence
  Description of Artificial Sequence: Synthetic oligonucleotide
  Sense Strand Starting at position 648 of SEQ ID NO: 318205
cuucuaguggucugaugag

SEQ ID NO: 369664 - RNA, 19 nt, Artificial Sequence
  Description of Artificial Sequence: Synthetic oligonucleotide
  Antisense Strand to SEQ ID NO: 369663
cucaucagaccacuagaag

SEQ ID NO: 369665 - RNA, 19 nt, Artificial Sequence
  Description of Artificial Sequence: Synthetic oligonucleotide
  Sense Strand Starting at position 648 of SEQ ID NO: 318211
guggucugaugagcuuaaa

SEQ ID NO: 369666 - RNA, 19 nt, Artificial Sequence
  Description of Artificial Sequence: Synthetic oligonucleotide
  Antisense Strand to SEQ ID NO: 369665
uuuaagcucaucagaccac

SEQ ID NO: 369667 - RNA, 19 nt, Artificial Sequence
  Description of Artificial Sequence: Synthetic oligonucleotide
  Sense Strand Starting at position 648 of SEQ ID NO: 318682
acagacauucuuuagugca

SEQ ID NO: 369668 - RNA, 19 nt, Artificial Sequence
  Description of Artificial Sequence: Synthetic oligonucleotide
  Antisense Strand to SEQ ID NO: 369667
ugcacuaaagaaugucugu

SEQ ID NO: 369669 - RNA, 19 nt, Artificial Sequence
  Description of Artificial Sequence: Synthetic oligonucleotide
  Sense Strand Starting at position 648 of SEQ ID NO: 318905
gucauuuagcauugucuac

SEQ ID NO: 369670 - RNA, 19 nt, Artificial Sequence
  Description of Artificial Sequence: Synthetic oligonucleotide
  Antisense Strand to SEQ ID NO: 369669
guagacaaugcuaaaugac

SEQ ID NO: 369671 - RNA, 19 nt, Artificial Sequence
  Description of Artificial Sequence: Synthetic oligonucleotide
  Sense Strand Starting at position 648 of SEQ ID NO: 318909
uuuagcauugucuaccuga

SEQ ID NO: 369672 - RNA, 19 nt, Artificial Sequence
  Description of Artificial Sequence: Synthetic oligonucleotide
  Antisense Strand to SEQ ID NO: 369671
ucagguagacaaugcuaaa

SEQ ID NO: 369673 - RNA, 19 nt, Artificial Sequence
  Description of Artificial Sequence: Synthetic oligonucleotide
  Sense Strand Starting at position 648 of SEQ ID NO: 318926
gaaguauggguuugugaag

SEQ ID NO: 369674 - RNA, 19 nt, Artificial Sequence
  Description of Artificial Sequence: Synthetic oligonucleotide
  Antisense Strand to SEQ ID NO: 369673
cuucacaaacccauacuuc

SEQ ID NO: 369675 - RNA, 19 nt, Artificial Sequence
  Description of Artificial Sequence: Synthetic oligonucleotide
  Sense Strand Starting at position 648 of SEQ ID NO: 318933
ggguuugugaaguaauagu

SEQ ID NO: 369676 - RNA, 19 nt, Artificial Sequence
  Description of Artificial Sequence: Synthetic oligonucleotide
  Antisense Strand to SEQ ID NO: 369675
acuauuacuucacaaaccc

SEQ ID NO: 369677 - RNA, 19 nt, Artificial Sequence
  Description of Artificial Sequence: Synthetic oligonucleotide
  Sense Strand Starting at position 648 of SEQ ID NO: 318997
ccauuugaguagcaggaga

SEQ ID NO: 369678 - RNA, 19 nt, Artificial Sequence
  Description of Artificial Sequence: Synthetic oligonucleotide
  Antisense Strand to SEQ ID NO: 369677
ucuccugcuacucaaaugg

SEQ ID NO: 369679 - RNA, 19 nt, Artificial Sequence
  Description of Artificial Sequence: Synthetic oligonucleotide
  Sense Strand Starting at position 648 of SEQ ID NO: 319008
gcaggagauuccuuugcag

SEQ ID NO: 369680 - RNA, 19 nt, Artificial Sequence
  Description of Artificial Sequence: Synthetic oligonucleotide
  Antisense Strand to SEQ ID NO: 369679
cugcaaaggaaucuccugc

SEQ ID NO: 369681 - RNA, 19 nt, Artificial Sequence
  Description of Artificial Sequence: Synthetic oligonucleotide
  Sense Strand Starting at position 648 of SEQ ID NO: 319010
aggagauuccuuugcagga

SEQ ID NO: 369682 - RNA, 19 nt, Artificial Sequence
  Description of Artificial Sequence: Synthetic oligonucleotide
  Antisense Strand to SEQ ID NO: 369681
uccugcaaaggaaucuccu

SEQ ID NO: 369683 - RNA, 19 nt, Artificial Sequence
  Description of Artificial Sequence: Synthetic oligonucleotide
  Sense Strand Starting at position 648 of SEQ ID NO: 319011
ggagauuccuuugcaggaa

SEQ ID NO: 369684 - RNA, 19 nt, Artificial Sequence
  Description of Artificial Sequence: Synthetic oligonucleotide
  Antisense Strand to SEQ ID NO: 369683
uuccugcaaaggaaucucc

SEQ ID NO: 369685 - RNA, 19 nt, Artificial Sequence
  Description of Artificial Sequence: Synthetic oligonucleotide
  Sense Strand Starting at position 648 of SEQ ID NO: 319014
gauuccuuugcaggaagua

SEQ ID NO: 369686 - RNA, 19 nt, Artificial Sequence
  Description of Artificial Sequence: Synthetic oligonucleotide
  Antisense Strand to SEQ ID NO: 369685
uacuuccugcaaaggaauc

SEQ ID NO: 369687 - RNA, 19 nt, Artificial Sequence
  Description of Artificial Sequence: Synthetic oligonucleotide
  Sense Strand Starting at position 648 of SEQ ID NO: 319050
ccaagaagucaguaaguca

SEQ ID NO: 369688 - RNA, 19 nt, Artificial Sequence
  Description of Artificial Sequence: Synthetic oligonucleotide
  Antisense Strand to SEQ ID NO: 369687
ugacuuacugacuucuugg

SEQ ID NO: 369689 - RNA, 19 nt, Artificial Sequence
  Description of Artificial Sequence: Synthetic oligonucleotide
  Sense Strand Starting at position 648 of SEQ ID NO: 319053
agaagucaguaagucagaa

SEQ ID NO: 369690 - RNA, 19 nt, Artificial Sequence
  Description of Artificial Sequence: Synthetic oligonucleotide
  Antisense Strand to SEQ ID NO: 369689
uucugacuuacugacuucu

SEQ ID NO: 369691 - RNA, 19 nt, Artificial Sequence
  Description of Artificial Sequence: Synthetic oligonucleotide
  Sense Strand Starting at position 648 of SEQ ID NO: 319100
ugcagauuucugugucaca

SEQ ID NO: 369692 - RNA, 19 nt, Artificial Sequence
  Description of Artificial Sequence: Synthetic oligonucleotide
  Antisense Strand to SEQ ID NO: 369691
ugugacacagaaaucugca

SEQ ID NO: 369693 - RNA, 19 nt, Artificial Sequence
  Description of Artificial Sequence: Synthetic oligonucleotide
  Sense Strand Starting at position 648 of SEQ ID NO: 319101
gcagauuucugugucacac

SEQ ID NO: 369694 - RNA, 19 nt, Artificial Sequence
  Description of Artificial Sequence: Synthetic oligonucleotide
  Antisense Strand to SEQ ID NO: 369693
gugugacacagaaaucugc

SEQ ID NO: 369695 - RNA, 19 nt, Artificial Sequence
  Description of Artificial Sequence: Synthetic oligonucleotide
  Sense Strand Starting at position 648 of SEQ ID NO: 319149
agggcugacuuauuauacu

SEQ ID NO: 369696 - RNA, 19 nt, Artificial Sequence
  Description of Artificial Sequence: Synthetic oligonucleotide
  Antisense Strand to SEQ ID NO: 369695
aguauaauaagucagcccu

SEQ ID NO: 369697 - RNA, 19 nt, Artificial Sequence
  Description of Artificial Sequence: Synthetic oligonucleotide
  Sense Strand Starting at position 649 of SEQ ID NO: 315254
accuuuagccgugaacuau

SEQ ID NO: 369698 - RNA, 19 nt, Artificial Sequence
  Description of Artificial Sequence: Synthetic oligonucleotide
  Antisense Strand to SEQ ID NO: 369697
auaguucacggcuaaaggu

SEQ ID NO: 369699 - RNA, 19 nt, Artificial Sequence
  Description of Artificial Sequence: Synthetic oligonucleotide
  Sense Strand Starting at position 649 of SEQ ID NO: 315266
gaacuauucugugucugaa

SEQ ID NO: 369700 - RNA, 19 nt, Artificial Sequence
  Description of Artificial Sequence: Synthetic oligonucleotide
  Antisense Strand to SEQ ID NO: 369699
uucagacacagaauaguuc

SEQ ID NO: 369701 - RNA, 19 nt, Artificial Sequence
  Description of Artificial Sequence: Synthetic oligonucleotide
  Sense Strand Starting at position 649 of SEQ ID NO: 315367
uggucuuagcuggacagau

SEQ ID NO: 369702 - RNA, 19 nt, Artificial Sequence
  Description of Artificial Sequence: Synthetic oligonucleotide
  Antisense Strand to SEQ ID NO: 369701
aucuguccagcuaagacca

SEQ ID NO: 369703 - RNA, 19 nt, Artificial Sequence
  Description of Artificial Sequence: Synthetic oligonucleotide
  Sense Strand Starting at position 649 of SEQ ID NO: 315369
gucuuagcuggacagauau

SEQ ID NO: 369704 - RNA, 19 nt, Artificial Sequence
  Description of Artificial Sequence: Synthetic oligonucleotide
  Antisense Strand to SEQ ID NO: 369703
auaucuguccagcuaagac

SEQ ID NO: 369705 - RNA, 19 nt, Artificial Sequence
  Description of Artificial Sequence: Synthetic oligonucleotide
  Sense Strand Starting at position 649 of SEQ ID NO: 315392
augagucacccacagguuu

SEQ ID NO: 369706 - RNA, 19 nt, Artificial Sequence
  Description of Artificial Sequence: Synthetic oligonucleotide
  Antisense Strand to SEQ ID NO: 369705
aaaccugugggugacucau

SEQ ID NO: 369707 - RNA, 19 nt, Artificial Sequence
  Description of Artificial Sequence: Synthetic oligonucleotide
  Sense Strand Starting at position 649 of SEQ ID NO: 315600
ugacuugauucugcaaaua

SEQ ID NO: 369708 - RNA, 19 nt, Artificial Sequence
  Description of Artificial Sequence: Synthetic oligonucleotide
  Antisense Strand to SEQ ID NO: 369707
uauuugcagaaucaaguca

SEQ ID NO: 369709 - RNA, 19 nt, Artificial Sequence
  Description of Artificial Sequence: Synthetic oligonucleotide
  Sense Strand Starting at position 649 of SEQ ID NO: 315650
ccagacaaaugcccagauu

SEQ ID NO: 369710 - RNA, 19 nt, Artificial Sequence
  Description of Artificial Sequence: Synthetic oligonucleotide
  Antisense Strand to SEQ ID NO: 369709
aaucugggcauuugucugg

SEQ ID NO: 369711 - RNA, 19 nt, Artificial Sequence
  Description of Artificial Sequence: Synthetic oligonucleotide
  Sense Strand Starting at position 649 of SEQ ID NO: 315673
gugacuugguacccacauu

SEQ ID NO: 369712 - RNA, 19 nt, Artificial Sequence
  Description of Artificial Sequence: Synthetic oligonucleotide
  Antisense Strand to SEQ ID NO: 369711
aauguggguaccaagucac

SEQ ID NO: 369713 - RNA, 19 nt, Artificial Sequence
  Description of Artificial Sequence: Synthetic oligonucleotide
  Sense Strand Starting at position 649 of SEQ ID NO: 315727
gcagguggucuacagaaga

SEQ ID NO: 369714 - RNA, 19 nt, Artificial Sequence
  Description of Artificial Sequence: Synthetic oligonucleotide
  Antisense Strand to SEQ ID NO: 369713
ucuucuguagaccaccugc

SEQ ID NO: 369715 - RNA, 19 nt, Artificial Sequence
  Description of Artificial Sequence: Synthetic oligonucleotide
  Sense Strand Starting at position 649 of SEQ ID NO: 315768
gcaugcugugccucugagu

SEQ ID NO: 369716 - RNA, 19 nt, Artificial Sequence
  Description of Artificial Sequence: Synthetic oligonucleotide
  Antisense Strand to SEQ ID NO: 369715
acucagaggcacagcaugc

SEQ ID NO: 369717 - RNA, 19 nt, Artificial Sequence
  Description of Artificial Sequence: Synthetic oligonucleotide
  Sense Strand Starting at position 649 of SEQ ID NO: 315788
gcuguuugugucuuuaguu

SEQ ID NO: 369718 - RNA, 19 nt, Artificial Sequence
  Description of Artificial Sequence: Synthetic oligonucleotide
  Antisense Strand to SEQ ID NO: 369717
aacuaaagacacaaacagc

SEQ ID NO: 369719 - RNA, 19 nt, Artificial Sequence
  Description of Artificial Sequence: Synthetic oligonucleotide
  Sense Strand Starting at position 649 of SEQ ID NO: 315860
gcagauauuuaaggaagac

SEQ ID NO: 369720 - RNA, 19 nt, Artificial Sequence
  Description of Artificial Sequence: Synthetic oligonucleotide
  Antisense Strand to SEQ ID NO: 369719
gucuuccuuaaauaucugc

SEQ ID NO: 369721 - RNA, 19 nt, Artificial Sequence
  Description of Artificial Sequence: Synthetic oligonucleotide
  Sense Strand Starting at position 649 of SEQ ID NO: 315919
caaugacugcuuugggaaa

SEQ ID NO: 369722 - RNA, 19 nt, Artificial Sequence
  Description of Artificial Sequence: Synthetic oligonucleotide
  Antisense Strand to SEQ ID NO: 369721
uuucccaaagcagucauug

SEQ ID NO: 369723 - RNA, 19 nt, Artificial Sequence
  Description of Artificial Sequence: Synthetic oligonucleotide
  Sense Strand Starting at position 649 of SEQ ID NO: 316042
gugaaucaugugcaguuaa

SEQ ID NO: 369724 - RNA, 19 nt, Artificial Sequence
  Description of Artificial Sequence: Synthetic oligonucleotide
  Antisense Strand to SEQ ID NO: 369723
uuaacugcacaugauucac

SEQ ID NO: 369725 - RNA, 19 nt, Artificial Sequence
  Description of Artificial Sequence: Synthetic oligonucleotide
  Sense Strand Starting at position 649 of SEQ ID NO: 316196
ucacauguucucuaagucu

SEQ ID NO: 369726 - RNA, 19 nt, Artificial Sequence
  Description of Artificial Sequence: Synthetic oligonucleotide
  Antisense Strand to SEQ ID NO: 369725
agacuuagagaacauguga

SEQ ID NO: 369727 - RNA, 19 nt, Artificial Sequence
  Description of Artificial Sequence: Synthetic oligonucleotide
  Sense Strand Starting at position 649 of SEQ ID NO: 316253
acaagugguauuggagcua

SEQ ID NO: 369728 - RNA, 19 nt, Artificial Sequence
  Description of Artificial Sequence: Synthetic oligonucleotide
  Antisense Strand to SEQ ID NO: 369727
uagcuccaauaccacuugu

SEQ ID NO: 369729 - RNA, 19 nt, Artificial Sequence
  Description of Artificial Sequence: Synthetic oligonucleotide
  Sense Strand Starting at position 649 of SEQ ID NO: 316295
gcaggaguuuacccaugac

SEQ ID NO: 369730 - RNA, 19 nt, Artificial Sequence
  Description of Artificial Sequence: Synthetic oligonucleotide
  Antisense Strand to SEQ ID NO: 369729
gucauggguaaacuccugc

SEQ ID NO: 369731 - RNA, 19 nt, Artificial Sequence
  Description of Artificial Sequence: Synthetic oligonucleotide
  Sense Strand Starting at position 649 of SEQ ID NO: 316298
ggaguuuacccaugaccuu

SEQ ID NO: 369732 - RNA, 19 nt, Artificial Sequence
  Description of Artificial Sequence: Synthetic oligonucleotide
  Antisense Strand to SEQ ID NO: 369731
aaggucauggguaaacucc

SEQ ID NO: 369733 - RNA, 19 nt, Artificial Sequence
  Description of Artificial Sequence: Synthetic oligonucleotide
  Sense Strand Starting at position 649 of SEQ ID NO: 316369
agaaaucaguucccuuaug

SEQ ID NO: 369734 - RNA, 19 nt, Artificial Sequence
  Description of Artificial Sequence: Synthetic oligonucleotide
  Antisense Strand to SEQ ID NO: 369733
cauaagggaacugauuucu

SEQ ID NO: 369735 - RNA, 19 nt, Artificial Sequence
  Description of Artificial Sequence: Synthetic oligonucleotide
  Sense Strand Starting at position 649 of SEQ ID NO: 316960
agaguucccuucucauuac

SEQ ID NO: 369736 - RNA, 19 nt, Artificial Sequence
  Description of Artificial Sequence: Synthetic oligonucleotide
  Antisense Strand to SEQ ID NO: 369735
guaaugagaagggaacucu

SEQ ID NO: 369737 - RNA, 19 nt, Artificial Sequence
  Description of Artificial Sequence: Synthetic oligonucleotide
  Sense Strand Starting at position 649 of SEQ ID NO: 316985
ggaaguuuccgcgaacaga

SEQ ID NO: 369738 - RNA, 19 nt, Artificial Sequence
  Description of Artificial Sequence: Synthetic oligonucleotide
  Antisense Strand to SEQ ID NO: 369737
ucuguucgcggaaacuucc

SEQ ID NO: 369739 - RNA, 19 nt, Artificial Sequence
  Description of Artificial Sequence: Synthetic oligonucleotide
  Sense Strand Starting at position 649 of SEQ ID NO: 317025
guaagaaucuggguaaaua

SEQ ID NO: 369740 - RNA, 19 nt, Artificial Sequence
  Description of Artificial Sequence: Synthetic oligonucleotide
  Antisense Strand to SEQ ID NO: 369739
uauuuacccagauucuuac

SEQ ID NO: 369741 - RNA, 19 nt, Artificial Sequence
  Description of Artificial Sequence: Synthetic oligonucleotide
  Sense Strand Starting at position 649 of SEQ ID NO: 317231
gcagcugggccgcuuuaau

SEQ ID NO: 369742 - RNA, 19 nt, Artificial Sequence
  Description of Artificial Sequence: Synthetic oligonucleotide
  Antisense Strand to SEQ ID NO: 369741
auuaaagcggcccagcugc

SEQ ID NO: 369743 - RNA, 19 nt, Artificial Sequence
  Description of Artificial Sequence: Synthetic oligonucleotide
  Sense Strand Starting at position 649 of SEQ ID NO: 317711
gggcgaguucuccaauauc

SEQ ID NO: 369744 - RNA, 19 nt, Artificial Sequence
  Description of Artificial Sequence: Synthetic oligonucleotide
  Antisense Strand to SEQ ID NO: 369743
gauauuggagaacucgccc

SEQ ID NO: 369745 - RNA, 19 nt, Artificial Sequence
  Description of Artificial Sequence: Synthetic oligonucleotide
  Sense Strand Starting at position 649 of SEQ ID NO: 317714
cgaguucuccaauauccag

SEQ ID NO: 369746 - RNA, 19 nt, Artificial Sequence
  Description of Artificial Sequence: Synthetic oligonucleotide
  Antisense Strand to SEQ ID NO: 369745
cuggauauuggagaacucg

SEQ ID NO: 369747 - RNA, 19 nt, Artificial Sequence
  Description of Artificial Sequence: Synthetic oligonucleotide
  Sense Strand Starting at position 649 of SEQ ID NO: 317745
auuccagcgaguuaugauu

SEQ ID NO: 369748 - RNA, 19 nt, Artificial Sequence
  Description of Artificial Sequence: Synthetic oligonucleotide
  Antisense Strand to SEQ ID NO: 369747
aaucauaacucgcuggaau

SEQ ID NO: 369749 - RNA, 19 nt, Artificial Sequence
  Description of Artificial Sequence: Synthetic oligonucleotide
  Sense Strand Starting at position 649 of SEQ ID NO: 317828
uucuuauuccaugagcaag

SEQ ID NO: 369750 - RNA, 19 nt, Artificial Sequence
  Description of Artificial Sequence: Synthetic oligonucleotide
  Antisense Strand to SEQ ID NO: 369749
cuugcucauggaauaagaa

SEQ ID NO: 369751 - RNA, 19 nt, Artificial Sequence
  Description of Artificial Sequence: Synthetic oligonucleotide
  Sense Strand Starting at position 649 of SEQ ID NO: 317830
cuuauuccaugagcaagaa

SEQ ID NO: 369752 - RNA, 19 nt, Artificial Sequence
  Description of Artificial Sequence: Synthetic oligonucleotide
  Antisense Strand to SEQ ID NO: 369751
uucuugcucauggaauaag

SEQ ID NO: 369753 - RNA, 19 nt, Artificial Sequence
  Description of Artificial Sequence: Synthetic oligonucleotide
  Sense Strand Starting at position 649 of SEQ ID NO: 317842
gcaagaaaucacuguccug

SEQ ID NO: 369754 - RNA, 19 nt, Artificial Sequence
  Description of Artificial Sequence: Synthetic oligonucleotide
  Antisense Strand to SEQ ID NO: 369753
caggacagugauuucuugc

SEQ ID NO: 369755 - RNA, 19 nt, Artificial Sequence
  Description of Artificial Sequence: Synthetic oligonucleotide
  Sense Strand Starting at position 649 of SEQ ID NO: 317845
agaaaucacuguccugauc

SEQ ID NO: 369756 - RNA, 19 nt, Artificial Sequence
  Description of Artificial Sequence: Synthetic oligonucleotide
  Antisense Strand to SEQ ID NO: 369755
gaucaggacagugauuucu

SEQ ID NO: 369757 - RNA, 19 nt, Artificial Sequence
  Description of Artificial Sequence: Synthetic oligonucleotide
  Sense Strand Starting at position 649 of SEQ ID NO: 317952
aggaaauaaucagaauaac

SEQ ID NO: 369758 - RNA, 19 nt, Artificial Sequence
  Description of Artificial Sequence: Synthetic oligonucleotide
  Antisense Strand to SEQ ID NO: 369757
guuauucugauuauuuccu

SEQ ID NO: 369759 - RNA, 19 nt, Artificial Sequence
  Description of Artificial Sequence: Synthetic oligonucleotide
  Sense Strand Starting at position 649 of SEQ ID NO: 318164
ucacaaauccauggaaugu

SEQ ID NO: 369760 - RNA, 19 nt, Artificial Sequence
  Description of Artificial Sequence: Synthetic oligonucleotide
  Antisense Strand to SEQ ID NO: 369759
acauuccauggauuuguga

SEQ ID NO: 369761 - RNA, 19 nt, Artificial Sequence
  Description of Artificial Sequence: Synthetic oligonucleotide
  Sense Strand Starting at position 649 of SEQ ID NO: 318188
ccuugcaacgcauaacaua

SEQ ID NO: 369762 - RNA, 19 nt, Artificial Sequence
  Description of Artificial Sequence: Synthetic oligonucleotide
  Antisense Strand to SEQ ID NO: 369761
uauguuaugcguugcaagg

SEQ ID NO: 369763 - RNA, 19 nt, Artificial Sequence
  Description of Artificial Sequence: Synthetic oligonucleotide
  Sense Strand Starting at position 649 of SEQ ID NO: 318328
ugcccugacagaggauuaa

SEQ ID NO: 369764 - RNA, 19 nt, Artificial Sequence
  Description of Artificial Sequence: Synthetic oligonucleotide
  Antisense Strand to SEQ ID NO: 369763
uuaauccucugucagggca

SEQ ID NO: 369765 - RNA, 19 nt, Artificial Sequence
  Description of Artificial Sequence: Synthetic oligonucleotide
  Sense Strand Starting at position 649 of SEQ ID NO: 318382
gucucuguugugagguguu

SEQ ID NO: 369766 - RNA, 19 nt, Artificial Sequence
  Description of Artificial Sequence: Synthetic oligonucleotide
  Antisense Strand to SEQ ID NO: 369765
aacaccucacaacagagac

SEQ ID NO: 369767 - RNA, 19 nt, Artificial Sequence
  Description of Artificial Sequence: Synthetic oligonucleotide
  Sense Strand Starting at position 649 of SEQ ID NO: 318483
acugaagaguggucccgaa

SEQ ID NO: 369768 - RNA, 19 nt, Artificial Sequence
  Description of Artificial Sequence: Synthetic oligonucleotide
  Antisense Strand to SEQ ID NO: 369767
uucgggaccacucuucagu

SEQ ID NO: 369769 - RNA, 19 nt, Artificial Sequence
  Description of Artificial Sequence: Synthetic oligonucleotide
  Sense Strand Starting at position 649 of SEQ ID NO: 318487
aagaguggucccgaaguac

SEQ ID NO: 369770 - RNA, 19 nt, Artificial Sequence
  Description of Artificial Sequence: Synthetic oligonucleotide
  Antisense Strand to SEQ ID NO: 369769
guacuucgggaccacucuu

SEQ ID NO: 369771 - RNA, 19 nt, Artificial Sequence
  Description of Artificial Sequence: Synthetic oligonucleotide
  Sense Strand Starting at position 649 of SEQ ID NO: 318514
ggagggauuuggugagaag

SEQ ID NO: 369772 - RNA, 19 nt, Artificial Sequence
  Description of Artificial Sequence: Synthetic oligonucleotide
  Antisense Strand to SEQ ID NO: 369771
cuucucaccaaaucccucc

SEQ ID NO: 369773 - RNA, 19 nt, Artificial Sequence
  Description of Artificial Sequence: Synthetic oligonucleotide
  Sense Strand Starting at position 649 of SEQ ID NO: 318646
gggauccugaauugugacu

SEQ ID NO: 369774 - RNA, 19 nt, Artificial Sequence
  Description of Artificial Sequence: Synthetic oligonucleotide
  Antisense Strand to SEQ ID NO: 369773
agucacaauucaggauccc

SEQ ID NO: 369775 - RNA, 19 nt, Artificial Sequence
  Description of Artificial Sequence: Synthetic oligonucleotide
  Sense Strand Starting at position 649 of SEQ ID NO: 318876
auacaucaugauuguacau

SEQ ID NO: 369776 - RNA, 19 nt, Artificial Sequence
  Description of Artificial Sequence: Synthetic oligonucleotide
  Antisense Strand to SEQ ID NO: 369775
auguacaaucaugauguau

SEQ ID NO: 369777 - RNA, 19 nt, Artificial Sequence
  Description of Artificial Sequence: Synthetic oligonucleotide
  Sense Strand Starting at position 650 of SEQ ID NO: 315315
ggagggaacgucuggagau

SEQ ID NO: 369778 - RNA, 19 nt, Artificial Sequence
  Description of Artificial Sequence: Synthetic oligonucleotide
  Antisense Strand to SEQ ID NO: 369777
aucuccagacguucccucc

SEQ ID NO: 369779 - RNA, 19 nt, Artificial Sequence
  Description of Artificial Sequence: Synthetic oligonucleotide
  Sense Strand Starting at position 650 of SEQ ID NO: 315385
ggauacauuuguggcauuu

SEQ ID NO: 369780 - RNA, 19 nt, Artificial Sequence
  Description of Artificial Sequence: Synthetic oligonucleotide
  Antisense Strand to SEQ ID NO: 369779
aaaugccacaaauguaucc

SEQ ID NO: 369781 - RNA, 19 nt, Artificial Sequence
  Description of Artificial Sequence: Synthetic oligonucleotide
  Sense Strand Starting at position 650 of SEQ ID NO: 315461
ugcggaauggcugaaagua

SEQ ID NO: 369782 - RNA, 19 nt, Artificial Sequence
  Description of Artificial Sequence: Synthetic oligonucleotide
  Antisense Strand to SEQ ID NO: 369781
uacuuucagccauuccgca

SEQ ID NO: 369783 - RNA, 19 nt, Artificial Sequence
  Description of Artificial Sequence: Synthetic oligonucleotide
  Sense Strand Starting at position 650 of SEQ ID NO: 315511
agguguuaaagcuagguga

SEQ ID NO: 369784 - RNA, 19 nt, Artificial Sequence
  Description of Artificial Sequence: Synthetic oligonucleotide
  Antisense Strand to SEQ ID NO: 369783
ucaccuagcuuuaacaccu

SEQ ID NO: 369785 - RNA, 19 nt, Artificial Sequence
  Description of Artificial Sequence: Synthetic oligonucleotide
  Sense Strand Starting at position 650 of SEQ ID NO: 315564
uuguuuguaccggcguaau

SEQ ID NO: 369786 - RNA, 19 nt, Artificial Sequence
  Description of Artificial Sequence: Synthetic oligonucleotide
  Antisense Strand to SEQ ID NO: 369785
auuacgccgguacaaacaa

SEQ ID NO: 369787 - RNA, 19 nt, Artificial Sequence
  Description of Artificial Sequence: Synthetic oligonucleotide
  Sense Strand Starting at position 650 of SEQ ID NO: 315566
guuuguaccggcguaauaa

SEQ ID NO: 369788 - RNA, 19 nt, Artificial Sequence
  Description of Artificial Sequence: Synthetic oligonucleotide
  Antisense Strand to SEQ ID NO: 369787
uuauuacgccgguacaaac

SEQ ID NO: 369789 - RNA, 19 nt, Artificial Sequence
  Description of Artificial Sequence: Synthetic oligonucleotide
  Sense Strand Starting at position 650 of SEQ ID NO: 315603
acaggcuuuaguugagaac

SEQ ID NO: 369790 - RNA, 19 nt, Artificial Sequence
  Description of Artificial Sequence: Synthetic oligonucleotide
  Antisense Strand to SEQ ID NO: 369789
guucucaacuaaagccugu

SEQ ID NO: 369791 - RNA, 19 nt, Artificial Sequence
  Description of Artificial Sequence: Synthetic oligonucleotide
  Sense Strand Starting at position 650 of SEQ ID NO: 315982
ggcucacuugguuaugaag

SEQ ID NO: 369792 - RNA, 19 nt, Artificial Sequence
  Description of Artificial Sequence: Synthetic oligonucleotide
  Antisense Strand to SEQ ID NO: 369791
cuucauaaccaagugagcc

SEQ ID NO: 369793 - RNA, 19 nt, Artificial Sequence
  Description of Artificial Sequence: Synthetic oligonucleotide
  Sense Strand Starting at position 650 of SEQ ID NO: 315988
cuugguuaugaagaguaug

SEQ ID NO: 369794 - RNA, 19 nt, Artificial Sequence
  Description of Artificial Sequence: Synthetic oligonucleotide
  Antisense Strand to SEQ ID NO: 369793
cauacucuucauaaccaag

SEQ ID NO: 369795 - RNA, 19 nt, Artificial Sequence
  Description of Artificial Sequence: Synthetic oligonucleotide
  Sense Strand Starting at position 650 of SEQ ID NO: 315991
gguuaugaagaguaugcau

SEQ ID NO: 369796 - RNA, 19 nt, Artificial Sequence
  Description of Artificial Sequence: Synthetic oligonucleotide
  Antisense Strand to SEQ ID NO: 369795
augcauacucuucauaacc

SEQ ID NO: 369797 - RNA, 19 nt, Artificial Sequence
  Description of Artificial Sequence: Synthetic oligonucleotide
  Sense Strand Starting at position 650 of SEQ ID NO: 315994
uaugaagaguaugcaugua

SEQ ID NO: 369798 - RNA, 19 nt, Artificial Sequence
  Description of Artificial Sequence: Synthetic oligonucleotide
  Antisense Strand to SEQ ID NO: 369797
uacaugcauacucuucaua

SEQ ID NO: 369799 - RNA, 19 nt, Artificial Sequence
  Description of Artificial Sequence: Synthetic oligonucleotide
  Sense Strand Starting at position 650 of SEQ ID NO: 316035
aaaugagugucuuuagauu

SEQ ID NO: 369800 - RNA, 19 nt, Artificial Sequence
  Description of Artificial Sequence: Synthetic oligonucleotide
  Antisense Strand to SEQ ID NO: 369799
aaucuaaagacacucauuu

SEQ ID NO: 369801 - RNA, 19 nt, Artificial Sequence
  Description of Artificial Sequence: Synthetic oligonucleotide
  Sense Strand Starting at position 650 of SEQ ID NO: 316058
ggcugaauugaacaugugu

SEQ ID NO: 369802 - RNA, 19 nt, Artificial Sequence
  Description of Artificial Sequence: Synthetic oligonucleotide
  Antisense Strand to SEQ ID NO: 369801
acacauguucaauucagcc

SEQ ID NO: 369803 - RNA, 19 nt, Artificial Sequence
  Description of Artificial Sequence: Synthetic oligonucleotide
  Sense Strand Starting at position 650 of SEQ ID NO: 316125
gaauauggauuaucgugga

SEQ ID NO: 369804 - RNA, 19 nt, Artificial Sequence
  Description of Artificial Sequence: Synthetic oligonucleotide
  Antisense Strand to SEQ ID NO: 369803
uccacgauaauccauauuc

SEQ ID NO: 369805 - RNA, 19 nt, Artificial Sequence
  Description of Artificial Sequence: Synthetic oligonucleotide
  Sense Strand Starting at position 650 of SEQ ID NO: 316129
auggauuaucguggaccca

SEQ ID NO: 369806 - RNA, 19 nt, Artificial Sequence
  Description of Artificial Sequence: Synthetic oligonucleotide
  Antisense Strand to SEQ ID NO: 369805
uggguccacgauaauccau

SEQ ID NO: 369807 - RNA, 19 nt, Artificial Sequence
  Description of Artificial Sequence: Synthetic oligonucleotide
  Sense Strand Starting at position 650 of SEQ ID NO: 316274
gguuaaaugccaggaggga

SEQ ID NO: 369808 - RNA, 19 nt, Artificial Sequence
  Description of Artificial Sequence: Synthetic oligonucleotide
  Antisense Strand to SEQ ID NO: 369807
ucccuccuggcauuuaacc

SEQ ID NO: 369809 - RNA, 19 nt, Artificial Sequence
  Description of Artificial Sequence: Synthetic oligonucleotide
  Sense Strand Starting at position 650 of SEQ ID NO: 316692
gcggcaauccguguuguac

SEQ ID NO: 369810 - RNA, 19 nt, Artificial Sequence
  Description of Artificial Sequence: Synthetic oligonucleotide
  Antisense Strand to SEQ ID NO: 369809
guacaacacggauugccgc

SEQ ID NO: 369811 - RNA, 19 nt, Artificial Sequence
  Description of Artificial Sequence: Synthetic oligonucleotide
  Sense Strand Starting at position 650 of SEQ ID NO: 316727
cugugaugcacgcucaagu

SEQ ID NO: 369812 - RNA, 19 nt, Artificial Sequence
  Description of Artificial Sequence: Synthetic oligonucleotide
  Antisense Strand to SEQ ID NO: 369811
acuugagcgugcaucacag

SEQ ID NO: 369813 - RNA, 19 nt, Artificial Sequence
  Description of Artificial Sequence: Synthetic oligonucleotide
  Sense Strand Starting at position 650 of SEQ ID NO: 316728
ugugaugcacgcucaaguu

SEQ ID NO: 369814 - RNA, 19 nt, Artificial Sequence
  Description of Artificial Sequence: Synthetic oligonucleotide
  Antisense Strand to SEQ ID NO: 369813
aacuugagcgugcaucaca

SEQ ID NO: 369815 - RNA, 19 nt, Artificial Sequence
  Description of Artificial Sequence: Synthetic oligonucleotide
  Sense Strand Starting at position 650 of SEQ ID NO: 316949
gggugacuuuacccugaga

SEQ ID NO: 369816 - RNA, 19 nt, Artificial Sequence
  Description of Artificial Sequence: Synthetic oligonucleotide
  Antisense Strand to SEQ ID NO: 369815
ucucaggguaaagucaccc

SEQ ID NO: 369817 - RNA, 19 nt, Artificial Sequence
  Description of Artificial Sequence: Synthetic oligonucleotide
  Sense Strand Starting at position 650 of SEQ ID NO: 316951
gugacuuuacccugagagg

SEQ ID NO: 369818 - RNA, 19 nt, Artificial Sequence
  Description of Artificial Sequence: Synthetic oligonucleotide
  Antisense Strand to SEQ ID NO: 369817
ccucucaggguaaagucac

SEQ ID NO: 369819 - RNA, 19 nt, Artificial Sequence
  Description of Artificial Sequence: Synthetic oligonucleotide
  Sense Strand Starting at position 650 of SEQ ID NO: 317532
uguuuagacguacauacaa

SEQ ID NO: 369820 - RNA, 19 nt, Artificial Sequence
  Description of Artificial Sequence: Synthetic oligonucleotide
  Antisense Strand to SEQ ID NO: 369819
uuguauguacgucuaaaca

SEQ ID NO: 369821 - RNA, 19 nt, Artificial Sequence
  Description of Artificial Sequence: Synthetic oligonucleotide
  Sense Strand Starting at position 650 of SEQ ID NO: 317571
uguaguccucuguaugaaa

SEQ ID NO: 369822 - RNA, 19 nt, Artificial Sequence
  Description of Artificial Sequence: Synthetic oligonucleotide
  Antisense Strand to SEQ ID NO: 369821
uuucauacagaggacuaca

SEQ ID NO: 369823 - RNA, 19 nt, Artificial Sequence
  Description of Artificial Sequence: Synthetic oligonucleotide
  Sense Strand Starting at position 650 of SEQ ID NO: 317610
uuuacuuauccugagucac

SEQ ID NO: 369824 - RNA, 19 nt, Artificial Sequence
  Description of Artificial Sequence: Synthetic oligonucleotide
  Antisense Strand to SEQ ID NO: 369823
gugacucaggauaaguaaa

SEQ ID NO: 369825 - RNA, 19 nt, Artificial Sequence
  Description of Artificial Sequence: Synthetic oligonucleotide
  Sense Strand Starting at position 650 of SEQ ID NO: 317733
gccacugcaccugagauaa

SEQ ID NO: 369826 - RNA, 19 nt, Artificial Sequence
  Description of Artificial Sequence: Synthetic oligonucleotide
  Antisense Strand to SEQ ID NO: 369825
uuaucucaggugcaguggc

SEQ ID NO: 369827 - RNA, 19 nt, Artificial Sequence
  Description of Artificial Sequence: Synthetic oligonucleotide
  Sense Strand Starting at position 650 of SEQ ID NO: 317770
aggaaaccuugccuucgaa

SEQ ID NO: 369828 - RNA, 19 nt, Artificial Sequence
  Description of Artificial Sequence: Synthetic oligonucleotide
  Antisense Strand to SEQ ID NO: 369827
uucgaaggcaagguuuccu

SEQ ID NO: 369829 - RNA, 19 nt, Artificial Sequence
  Description of Artificial Sequence: Synthetic oligonucleotide
  Sense Strand Starting at position 650 of SEQ ID NO: 317786
gaaacugagccgugaggaa

SEQ ID NO: 369830 - RNA, 19 nt, Artificial Sequence
  Description of Artificial Sequence: Synthetic oligonucleotide
  Antisense Strand to SEQ ID NO: 369829
uuccucacggcucaguuuc

SEQ ID NO: 369831 - RNA, 19 nt, Artificial Sequence
  Description of Artificial Sequence: Synthetic oligonucleotide
  Sense Strand Starting at position 650 of SEQ ID NO: 317826
gacaaaucccaguggcuca

SEQ ID NO: 369832 - RNA, 19 nt, Artificial Sequence
  Description of Artificial Sequence: Synthetic oligonucleotide
  Antisense Strand to SEQ ID NO: 369831
ugagccacugggauuuguc

SEQ ID NO: 369833 - RNA, 19 nt, Artificial Sequence
  Description of Artificial Sequence: Synthetic oligonucleotide
  Sense Strand Starting at position 650 of SEQ ID NO: 317912
gcuacuauacugggaaaug

SEQ ID NO: 369834 - RNA, 19 nt, Artificial Sequence
  Description of Artificial Sequence: Synthetic oligonucleotide
  Antisense Strand to SEQ ID NO: 369833
cauuucccaguauaguagc

SEQ ID NO: 369835 - RNA, 19 nt, Artificial Sequence
  Description of Artificial Sequence: Synthetic oligonucleotide
  Sense Strand Starting at position 650 of SEQ ID NO: 318037
acuaaauguguguaucauc

SEQ ID NO: 369836 - RNA, 19 nt, Artificial Sequence
  Description of Artificial Sequence: Synthetic oligonucleotide
  Antisense Strand to SEQ ID NO: 369835
gaugauacacacauuuagu

SEQ ID NO: 369837 - RNA, 19 nt, Artificial Sequence
  Description of Artificial Sequence: Synthetic oligonucleotide
  Sense Strand Starting at position 650 of SEQ ID NO: 318193
uaguguuaugcugaggaaa

SEQ ID NO: 369838 - RNA, 19 nt, Artificial Sequence
  Description of Artificial Sequence: Synthetic oligonucleotide
  Antisense Strand to SEQ ID NO: 369837
uuuccucagcauaacacua

SEQ ID NO: 369839 - RNA, 19 nt, Artificial Sequence
  Description of Artificial Sequence: Synthetic oligonucleotide
  Sense Strand Starting at position 650 of SEQ ID NO: 318525
guuucaaugguguagugga

SEQ ID NO: 369840 - RNA, 19 nt, Artificial Sequence
  Description of Artificial Sequence: Synthetic oligonucleotide
  Antisense Strand to SEQ ID NO: 369839
uccacuacaccauugaaac

SEQ ID NO: 369841 - RNA, 19 nt, Artificial Sequence
  Description of Artificial Sequence: Synthetic oligonucleotide
  Sense Strand Starting at position 650 of SEQ ID NO: 318532
ugguguaguggacaaguua

SEQ ID NO: 369842 - RNA, 19 nt, Artificial Sequence
  Description of Artificial Sequence: Synthetic oligonucleotide
  Antisense Strand to SEQ ID NO: 369841
uaacuuguccacuacacca

SEQ ID NO: 369843 - RNA, 19 nt, Artificial Sequence
  Description of Artificial Sequence: Synthetic oligonucleotide
  Sense Strand Starting at position 650 of SEQ ID NO: 318681
ugcaucaucucaguaagga

SEQ ID NO: 369844 - RNA, 19 nt, Artificial Sequence
  Description of Artificial Sequence: Synthetic oligonucleotide
  Antisense Strand to SEQ ID NO: 369843
uccuuacugagaugaugca

SEQ ID NO: 369845 - RNA, 19 nt, Artificial Sequence
  Description of Artificial Sequence: Synthetic oligonucleotide
  Sense Strand Starting at position 650 of SEQ ID NO: 318682
gcaucaucucaguaaggaa

SEQ ID NO: 369846 - RNA, 19 nt, Artificial Sequence
  Description of Artificial Sequence: Synthetic oligonucleotide
  Antisense Strand to SEQ ID NO: 369845
uuccuuacugagaugaugc

SEQ ID NO: 369847 - RNA, 19 nt, Artificial Sequence
  Description of Artificial Sequence: Synthetic oligonucleotide
  Sense Strand Starting at position 650 of SEQ ID NO: 318745
aguuacucgaguuaaaguc

SEQ ID NO: 369848 - RNA, 19 nt, Artificial Sequence
  Description of Artificial Sequence: Synthetic oligonucleotide
  Antisense Strand to SEQ ID NO: 369847
gacuuuaacucgaguaacu

SEQ ID NO: 369849 - RNA, 19 nt, Artificial Sequence
  Description of Artificial Sequence: Synthetic oligonucleotide
  Sense Strand Starting at position 650 of SEQ ID NO: 318885
cauggauauguccacaggu

SEQ ID NO: 369850 - RNA, 19 nt, Artificial Sequence
  Description of Artificial Sequence: Synthetic oligonucleotide
  Antisense Strand to SEQ ID NO: 369849
accuguggacauauccaug

SEQ ID NO: 369851 - RNA, 19 nt, Artificial Sequence
  Description of Artificial Sequence: Synthetic oligonucleotide
  Sense Strand Starting at position 650 of SEQ ID NO: 318887
uggauauguccacagguua

SEQ ID NO: 369852 - RNA, 19 nt, Artificial Sequence
  Description of Artificial Sequence: Synthetic oligonucleotide
  Antisense Strand to SEQ ID NO: 369851
uaaccuguggacauaucca

SEQ ID NO: 369853 - RNA, 19 nt, Artificial Sequence
  Description of Artificial Sequence: Synthetic oligonucleotide
  Sense Strand Starting at position 650 of SEQ ID NO: 319072
cugggaugccauugggauu

SEQ ID NO: 369854 - RNA, 19 nt, Artificial Sequence
  Description of Artificial Sequence: Synthetic oligonucleotide
  Antisense Strand to SEQ ID NO: 369853
aaucccaauggcaucccag

SEQ ID NO: 369855 - RNA, 19 nt, Artificial Sequence
  Description of Artificial Sequence: Synthetic oligonucleotide
  Sense Strand Starting at position 650 of SEQ ID NO: 319092
gaaauaaucugagcuggug

SEQ ID NO: 369856 - RNA, 19 nt, Artificial Sequence
  Description of Artificial Sequence: Synthetic oligonucleotide
  Antisense Strand to SEQ ID NO: 369855
caccagcucagauuauuuc

SEQ ID NO: 369857 - RNA, 19 nt, Artificial Sequence
  Description of Artificial Sequence: Synthetic oligonucleotide
  Sense Strand Starting at position 651 of SEQ ID NO: 315338
ugacaacugccaugauacu

SEQ ID NO: 369858 - RNA, 19 nt, Artificial Sequence
  Description of Artificial Sequence: Synthetic oligonucleotide
  Antisense Strand to SEQ ID NO: 369857
aguaucauggcaguuguca

SEQ ID NO: 369859 - RNA, 19 nt, Artificial Sequence
  Description of Artificial Sequence: Synthetic oligonucleotide
  Sense Strand Starting at position 651 of SEQ ID NO: 315355
cucugucuaggacaaguuu

SEQ ID NO: 369860 - RNA, 19 nt, Artificial Sequence
  Description of Artificial Sequence: Synthetic oligonucleotide
  Antisense Strand to SEQ ID NO: 369859
aaacuuguccuagacagag

SEQ ID NO: 369861 - RNA, 19 nt, Artificial Sequence
  Description of Artificial Sequence: Synthetic oligonucleotide
  Sense Strand Starting at position 651 of SEQ ID NO: 315439
uuaugcagacauugagaaa

SEQ ID NO: 369862 - RNA, 19 nt, Artificial Sequence
  Description of Artificial Sequence: Synthetic oligonucleotide
  Antisense Strand to SEQ ID NO: 369861
uuucucaaugucugcauaa

SEQ ID NO: 369863 - RNA, 19 nt, Artificial Sequence
  Description of Artificial Sequence: Synthetic oligonucleotide
  Sense Strand Starting at position 651 of SEQ ID NO: 315452
gagaaauaauugcuuaguc

SEQ ID NO: 369864 - RNA, 19 nt, Artificial Sequence
  Description of Artificial Sequence: Synthetic oligonucleotide
  Antisense Strand to SEQ ID NO: 369863
gacuaagcaauuauuucuc

SEQ ID NO: 369865 - RNA, 19 nt, Artificial Sequence
  Description of Artificial Sequence: Synthetic oligonucleotide
  Sense Strand Starting at position 651 of SEQ ID NO: 315453
agaaauaauugcuuagucu

SEQ ID NO: 369866 - RNA, 19 nt, Artificial Sequence
  Description of Artificial Sequence: Synthetic oligonucleotide
  Antisense Strand to SEQ ID NO: 369865
agacuaagcaauuauuucu

SEQ ID NO: 369867 - RNA, 19 nt, Artificial Sequence
  Description of Artificial Sequence: Synthetic oligonucleotide
  Sense Strand Starting at position 651 of SEQ ID NO: 315454
gaaauaauugcuuagucug

SEQ ID NO: 369868 - RNA, 19 nt, Artificial Sequence
  Description of Artificial Sequence: Synthetic oligonucleotide
  Antisense Strand to SEQ ID NO: 369867
cagacuaagcaauuauuuc

SEQ ID NO: 369869 - RNA, 19 nt, Artificial Sequence
  Description of Artificial Sequence: Synthetic oligonucleotide
  Sense Strand Starting at position 651 of SEQ ID NO: 315459
aauugcuuagucugggaaa

SEQ ID NO: 369870 - RNA, 19 nt, Artificial Sequence
  Description of Artificial Sequence: Synthetic oligonucleotide
  Antisense Strand to SEQ ID NO: 369869
uuucccagacuaagcaauu

SEQ ID NO: 369871 - RNA, 19 nt, Artificial Sequence
  Description of Artificial Sequence: Synthetic oligonucleotide
  Sense Strand Starting at position 651 of SEQ ID NO: 315546
acuugugggccucauagau

SEQ ID NO: 369872 - RNA, 19 nt, Artificial Sequence
  Description of Artificial Sequence: Synthetic oligonucleotide
  Antisense Strand to SEQ ID NO: 369871
aucuaugaggcccacaagu

SEQ ID NO: 369873 - RNA, 19 nt, Artificial Sequence
  Description of Artificial Sequence: Synthetic oligonucleotide
  Sense Strand Starting at position 651 of SEQ ID NO: 315550
gugggccucauagauauca

SEQ ID NO: 369874 - RNA, 19 nt, Artificial Sequence
  Description of Artificial Sequence: Synthetic oligonucleotide
  Antisense Strand to SEQ ID NO: 369873
ugauaucuaugaggcccac

SEQ ID NO: 369875 - RNA, 19 nt, Artificial Sequence
  Description of Artificial Sequence: Synthetic oligonucleotide
  Sense Strand Starting at position 651 of SEQ ID NO: 315570
uuugaaagccaguauagca

SEQ ID NO: 369876 - RNA, 19 nt, Artificial Sequence
  Description of Artificial Sequence: Synthetic oligonucleotide
  Antisense Strand to SEQ ID NO: 369875
ugcuauacuggcuuucaaa

SEQ ID NO: 369877 - RNA, 19 nt, Artificial Sequence
  Description of Artificial Sequence: Synthetic oligonucleotide
  Sense Strand Starting at position 651 of SEQ ID NO: 315972
agaguaauuuaacaagaug

SEQ ID NO: 369878 - RNA, 19 nt, Artificial Sequence
  Description of Artificial Sequence: Synthetic oligonucleotide
  Antisense Strand to SEQ ID NO: 369877
caucuuguuaaauuacucu

SEQ ID NO: 369879 - RNA, 19 nt, Artificial Sequence
  Description of Artificial Sequence: Synthetic oligonucleotide
  Sense Strand Starting at position 651 of SEQ ID NO: 315986
agauguaucuuuguaaaca

SEQ ID NO: 369880 - RNA, 19 nt, Artificial Sequence
  Description of Artificial Sequence: Synthetic oligonucleotide
  Antisense Strand to SEQ ID NO: 369879
uguuuacaaagauacaucu

SEQ ID NO: 369881 - RNA, 19 nt, Artificial Sequence
  Description of Artificial Sequence: Synthetic oligonucleotide
  Sense Strand Starting at position 651 of SEQ ID NO: 316019
agacuuuaccuaggaggca

SEQ ID NO: 369882 - RNA, 19 nt, Artificial Sequence
  Description of Artificial Sequence: Synthetic oligonucleotide
  Antisense Strand to SEQ ID NO: 369881
ugccuccuagguaaagucu

SEQ ID NO: 369883 - RNA, 19 nt, Artificial Sequence
  Description of Artificial Sequence: Synthetic oligonucleotide
  Sense Strand Starting at position 651 of SEQ ID NO: 316291
gacugaaauguuugacacu

SEQ ID NO: 369884 - RNA, 19 nt, Artificial Sequence
  Description of Artificial Sequence: Synthetic oligonucleotide
  Antisense Strand to SEQ ID NO: 369883
agugucaaacauuucaguc

SEQ ID NO: 369885 - RNA, 19 nt, Artificial Sequence
  Description of Artificial Sequence: Synthetic oligonucleotide
  Sense Strand Starting at position 651 of SEQ ID NO: 316366
gucauuacuuucucaaagg

SEQ ID NO: 369886 - RNA, 19 nt, Artificial Sequence
  Description of Artificial Sequence: Synthetic oligonucleotide
  Antisense Strand to SEQ ID NO: 369885
ccuuugagaaaguaaugac

SEQ ID NO: 369887 - RNA, 19 nt, Artificial Sequence
  Description of Artificial Sequence: Synthetic oligonucleotide
  Sense Strand Starting at position 651 of SEQ ID NO: 316429
uggguuaugaguuaaguca

SEQ ID NO: 369888 - RNA, 19 nt, Artificial Sequence
  Description of Artificial Sequence: Synthetic oligonucleotide
  Antisense Strand to SEQ ID NO: 369887
ugacuuaacucauaaccca

SEQ ID NO: 369889 - RNA, 19 nt, Artificial Sequence
  Description of Artificial Sequence: Synthetic oligonucleotide
  Sense Strand Starting at position 651 of SEQ ID NO: 316436
ugaguuaagucacuaagua

SEQ ID NO: 369890 - RNA, 19 nt, Artificial Sequence
  Description of Artificial Sequence: Synthetic oligonucleotide
  Antisense Strand to SEQ ID NO: 369889
uacuuagugacuuaacuca

SEQ ID NO: 369891 - RNA, 19 nt, Artificial Sequence
  Description of Artificial Sequence: Synthetic oligonucleotide
  Sense Strand Starting at position 651 of SEQ ID NO: 316437
gaguuaagucacuaaguau

SEQ ID NO: 369892 - RNA, 19 nt, Artificial Sequence
  Description of Artificial Sequence: Synthetic oligonucleotide
  Antisense Strand to SEQ ID NO: 369891
auacuuagugacuuaacuc

SEQ ID NO: 369893 - RNA, 19 nt, Artificial Sequence
  Description of Artificial Sequence: Synthetic oligonucleotide
  Sense Strand Starting at position 651 of SEQ ID NO: 316700
ccauuucucgguuguacac

SEQ ID NO: 369894 - RNA, 19 nt, Artificial Sequence
  Description of Artificial Sequence: Synthetic oligonucleotide
  Antisense Strand to SEQ ID NO: 369893
guguacaaccgagaaaugg

SEQ ID NO: 369895 - RNA, 19 nt, Artificial Sequence
  Description of Artificial Sequence: Synthetic oligonucleotide
  Sense Strand Starting at position 651 of SEQ ID NO: 316713
guacacaaaucucugguua

SEQ ID NO: 369896 - RNA, 19 nt, Artificial Sequence
  Description of Artificial Sequence: Synthetic oligonucleotide
  Antisense Strand to SEQ ID NO: 369895
uaaccagagauuuguguac

SEQ ID NO: 369897 - RNA, 19 nt, Artificial Sequence
  Description of Artificial Sequence: Synthetic oligonucleotide
  Sense Strand Starting at position 651 of SEQ ID NO: 316812
acaagagauuuaugauuga

SEQ ID NO: 369898 - RNA, 19 nt, Artificial Sequence
  Description of Artificial Sequence: Synthetic oligonucleotide
  Antisense Strand to SEQ ID NO: 369897
ucaaucauaaaucucuugu

SEQ ID NO: 369899 - RNA, 19 nt, Artificial Sequence
  Description of Artificial Sequence: Synthetic oligonucleotide
  Sense Strand Starting at position 651 of SEQ ID NO: 316851
ucaguuugaucuuucugaa

SEQ ID NO: 369900 - RNA, 19 nt, Artificial Sequence
  Description of Artificial Sequence: Synthetic oligonucleotide
  Antisense Strand to SEQ ID NO: 369899
uucagaaagaucaaacuga

SEQ ID NO: 369901 - RNA, 19 nt, Artificial Sequence
  Description of Artificial Sequence: Synthetic oligonucleotide
  Sense Strand Starting at position 651 of SEQ ID NO: 316867
gaaucauucccacgggaag

SEQ ID NO: 369902 - RNA, 19 nt, Artificial Sequence
  Description of Artificial Sequence: Synthetic oligonucleotide
  Antisense Strand to SEQ ID NO: 369901
cuucccgugggaaugauuc

SEQ ID NO: 369903 - RNA, 19 nt, Artificial Sequence
  Description of Artificial Sequence: Synthetic oligonucleotide
  Sense Strand Starting at position 651 of SEQ ID NO: 316942
cagacaaguuggccaagau

SEQ ID NO: 369904 - RNA, 19 nt, Artificial Sequence
  Description of Artificial Sequence: Synthetic oligonucleotide
  Antisense Strand to SEQ ID NO: 369903
aucuuggccaacuugucug

SEQ ID NO: 369905 - RNA, 19 nt, Artificial Sequence
  Description of Artificial Sequence: Synthetic oligonucleotide
  Sense Strand Starting at position 651 of SEQ ID NO: 316971
uuaaucuccucaucgagaa

SEQ ID NO: 369906 - RNA, 19 nt, Artificial Sequence
  Description of Artificial Sequence: Synthetic oligonucleotide
  Antisense Strand to SEQ ID NO: 369905
uucucgaugaggagauuaa

SEQ ID NO: 369907 - RNA, 19 nt, Artificial Sequence
  Description of Artificial Sequence: Synthetic oligonucleotide
  Sense Strand Starting at position 651 of SEQ ID NO: 316987
gaaguucuucuugaucuga

SEQ ID NO: 369908 - RNA, 19 nt, Artificial Sequence
  Description of Artificial Sequence: Synthetic oligonucleotide
  Antisense Strand to SEQ ID NO: 369907
ucagaucaagaagaacuuc

SEQ ID NO: 369909 - RNA, 19 nt, Artificial Sequence
  Description of Artificial Sequence: Synthetic oligonucleotide
  Sense Strand Starting at position 651 of SEQ ID NO: 316989
aguucuucuugaucugaau

SEQ ID NO: 369910 - RNA, 19 nt, Artificial Sequence
  Description of Artificial Sequence: Synthetic oligonucleotide
  Antisense Strand to SEQ ID NO: 369909
auucagaucaagaagaacu

SEQ ID NO: 369911 - RNA, 19 nt, Artificial Sequence
  Description of Artificial Sequence: Synthetic oligonucleotide
  Sense Strand Starting at position 651 of SEQ ID NO: 317192
gcagcuaggagugaucaca

SEQ ID NO: 369912 - RNA, 19 nt, Artificial Sequence
  Description of Artificial Sequence: Synthetic oligonucleotide
  Antisense Strand to SEQ ID NO: 369911
ugugaucacuccuagcugc

SEQ ID NO: 369913 - RNA, 19 nt, Artificial Sequence
  Description of Artificial Sequence: Synthetic oligonucleotide
  Sense Strand Starting at position 651 of SEQ ID NO: 317342
cuauguuugccagagacua

SEQ ID NO: 369914 - RNA, 19 nt, Artificial Sequence
  Description of Artificial Sequence: Synthetic oligonucleotide
  Antisense Strand to SEQ ID NO: 369913
uagucucuggcaaacauag

SEQ ID NO: 369915 - RNA, 19 nt, Artificial Sequence
  Description of Artificial Sequence: Synthetic oligonucleotide
  Sense Strand Starting at position 651 of SEQ ID NO: 317372
agaaucucugcaggaauaa

SEQ ID NO: 369916 - RNA, 19 nt, Artificial Sequence
  Description of Artificial Sequence: Synthetic oligonucleotide
  Antisense Strand to SEQ ID NO: 369915
uuauuccugcagagauucu

SEQ ID NO: 369917 - RNA, 19 nt, Artificial Sequence
  Description of Artificial Sequence: Synthetic oligonucleotide
  Sense Strand Starting at position 651 of SEQ ID NO: 317984
gcaauuccacuuugagaag

SEQ ID NO: 369918 - RNA, 19 nt, Artificial Sequence
  Description of Artificial Sequence: Synthetic oligonucleotide
  Antisense Strand to SEQ ID NO: 369917
cuucucaaaguggaauugc

SEQ ID NO: 369919 - RNA, 19 nt, Artificial Sequence
  Description of Artificial Sequence: Synthetic oligonucleotide
  Sense Strand Starting at position 651 of SEQ ID NO: 317993
cuuugagaaguguauccua

SEQ ID NO: 369920 - RNA, 19 nt, Artificial Sequence
  Description of Artificial Sequence: Synthetic oligonucleotide
  Antisense Strand to SEQ ID NO: 369919
uaggauacacuucucaaag

SEQ ID NO: 369921 - RNA, 19 nt, Artificial Sequence
  Description of Artificial Sequence: Synthetic oligonucleotide
  Sense Strand Starting at position 651 of SEQ ID NO: 317996
ugagaaguguauccuacag

SEQ ID NO: 369922 - RNA, 19 nt, Artificial Sequence
  Description of Artificial Sequence: Synthetic oligonucleotide
  Antisense Strand to SEQ ID NO: 369921
cuguaggauacacuucuca

SEQ ID NO: 369923 - RNA, 19 nt, Artificial Sequence
  Description of Artificial Sequence: Synthetic oligonucleotide
  Sense Strand Starting at position 651 of SEQ ID NO: 318093
gccauuauuugugugacaa

SEQ ID NO: 369924 - RNA, 19 nt, Artificial Sequence
  Description of Artificial Sequence: Synthetic oligonucleotide
  Antisense Strand to SEQ ID NO: 369923
uugucacacaaauaauggc

SEQ ID NO: 369925 - RNA, 19 nt, Artificial Sequence
  Description of Artificial Sequence: Synthetic oligonucleotide
  Sense Strand Starting at position 651 of SEQ ID NO: 318322
ggucucgaauuucugaguu

SEQ ID NO: 369926 - RNA, 19 nt, Artificial Sequence
  Description of Artificial Sequence: Synthetic oligonucleotide
  Antisense Strand to SEQ ID NO: 369925
aacucagaaauucgagacc

SEQ ID NO: 369927 - RNA, 19 nt, Artificial Sequence
  Description of Artificial Sequence: Synthetic oligonucleotide
  Sense Strand Starting at position 651 of SEQ ID NO: 318397
cgugccuggcucguaaaua

SEQ ID NO: 369928 - RNA, 19 nt, Artificial Sequence
  Description of Artificial Sequence: Synthetic oligonucleotide
  Antisense Strand to SEQ ID NO: 369927
uauuuacgagccaggcacg

SEQ ID NO: 369929 - RNA, 19 nt, Artificial Sequence
  Description of Artificial Sequence: Synthetic oligonucleotide
  Sense Strand Starting at position 651 of SEQ ID NO: 318666
cuguuaggauucuuuauau

SEQ ID NO: 369930 - RNA, 19 nt, Artificial Sequence
  Description of Artificial Sequence: Synthetic oligonucleotide
  Antisense Strand to SEQ ID NO: 369929
auauaaagaauccuaacag

SEQ ID NO: 369931 - RNA, 19 nt, Artificial Sequence
  Description of Artificial Sequence: Synthetic oligonucleotide
  Sense Strand Starting at position 651 of SEQ ID NO: 318672
ggauucuuuauauggaugu

SEQ ID NO: 369932 - RNA, 19 nt, Artificial Sequence
  Description of Artificial Sequence: Synthetic oligonucleotide
  Antisense Strand to SEQ ID NO: 369931
acauccauauaaagaaucc

SEQ ID NO: 369933 - RNA, 19 nt, Artificial Sequence
  Description of Artificial Sequence: Synthetic oligonucleotide
  Sense Strand Starting at position 651 of SEQ ID NO: 318676
ucuuuauauggauguacca

SEQ ID NO: 369934 - RNA, 19 nt, Artificial Sequence
  Description of Artificial Sequence: Synthetic oligonucleotide
  Antisense Strand to SEQ ID NO: 369933
ugguacauccauauaaaga

SEQ ID NO: 369935 - RNA, 19 nt, Artificial Sequence
  Description of Artificial Sequence: Synthetic oligonucleotide
  Sense Strand Starting at position 651 of SEQ ID NO: 318711
uccucaauuguuggauauu

SEQ ID NO: 369936 - RNA, 19 nt, Artificial Sequence
  Description of Artificial Sequence: Synthetic oligonucleotide
  Antisense Strand to SEQ ID NO: 369935
aauauccaacaauugagga

SEQ ID NO: 369937 - RNA, 19 nt, Artificial Sequence
  Description of Artificial Sequence: Synthetic oligonucleotide
  Sense Strand Starting at position 652 of SEQ ID NO: 315238
ucuuuacuauagccugaga

SEQ ID NO: 369938 - RNA, 19 nt, Artificial Sequence
  Description of Artificial Sequence: Synthetic oligonucleotide
  Antisense Strand to SEQ ID NO: 369937
ucucaggcuauaguaaaga

SEQ ID NO: 369939 - RNA, 19 nt, Artificial Sequence
  Description of Artificial Sequence: Synthetic oligonucleotide
  Sense Strand Starting at position 652 of SEQ ID NO: 315241
uuacuauagccugagaggu

SEQ ID NO: 369940 - RNA, 19 nt, Artificial Sequence
  Description of Artificial Sequence: Synthetic oligonucleotide
  Antisense Strand to SEQ ID NO: 369939
accucucaggcuauaguaa

SEQ ID NO: 369941 - RNA, 19 nt, Artificial Sequence
  Description of Artificial Sequence: Synthetic oligonucleotide
  Sense Strand Starting at position 652 of SEQ ID NO: 315249
gccugagagguagauguuu

SEQ ID NO: 369942 - RNA, 19 nt, Artificial Sequence
  Description of Artificial Sequence: Synthetic oligonucleotide
  Antisense Strand to SEQ ID NO: 369941
aaacaucuaccucucaggc

SEQ ID NO: 369943 - RNA, 19 nt, Artificial Sequence
  Description of Artificial Sequence: Synthetic oligonucleotide
  Sense Strand Starting at position 652 of SEQ ID NO: 315295
gcaucagaucaguaagguc

SEQ ID NO: 369944 - RNA, 19 nt, Artificial Sequence
  Description of Artificial Sequence: Synthetic oligonucleotide
  Antisense Strand to SEQ ID NO: 369943
gaccuuacugaucugaugc

SEQ ID NO: 369945 - RNA, 19 nt, Artificial Sequence
  Description of Artificial Sequence: Synthetic oligonucleotide
  Sense Strand Starting at position 652 of SEQ ID NO: 315410
augagauguuuaucaaagu

SEQ ID NO: 369946 - RNA, 19 nt, Artificial Sequence
  Description of Artificial Sequence: Synthetic oligonucleotide
  Antisense Strand to SEQ ID NO: 369945
acuuugauaaacaucucau

SEQ ID NO: 369947 - RNA, 19 nt, Artificial Sequence
  Description of Artificial Sequence: Synthetic oligonucleotide
  Sense Strand Starting at position 652 of SEQ ID NO: 315440
cagaacagauucguuuacu

SEQ ID NO: 369948 - RNA, 19 nt, Artificial Sequence
  Description of Artificial Sequence: Synthetic oligonucleotide
  Antisense Strand to SEQ ID NO: 369947
aguaaacgaaucuguucug

SEQ ID NO: 369949 - RNA, 19 nt, Artificial Sequence
  Description of Artificial Sequence: Synthetic oligonucleotide
  Sense Strand Starting at position 652 of SEQ ID NO: 315441
agaacagauucguuuacua

SEQ ID NO: 369950 - RNA, 19 nt, Artificial Sequence
  Description of Artificial Sequence: Synthetic oligonucleotide
  Antisense Strand to SEQ ID NO: 369949
uaguaaacgaaucuguucu

SEQ ID NO: 369951 - RNA, 19 nt, Artificial Sequence
  Description of Artificial Sequence: Synthetic oligonucleotide
  Sense Strand Starting at position 652 of SEQ ID NO: 315602
acaguaaacucuguaacuu

SEQ ID NO: 369952 - RNA, 19 nt, Artificial Sequence
  Description of Artificial Sequence: Synthetic oligonucleotide
  Antisense Strand to SEQ ID NO: 369951
aaguuacagaguuuacugu

SEQ ID NO: 369953 - RNA, 19 nt, Artificial Sequence
  Description of Artificial Sequence: Synthetic oligonucleotide
  Sense Strand Starting at position 652 of SEQ ID NO: 315623
ggaguuuaaccguaacagu

SEQ ID NO: 369954 - RNA, 19 nt, Artificial Sequence
  Description of Artificial Sequence: Synthetic oligonucleotide
  Antisense Strand to SEQ ID NO: 369953
acuguuacgguuaaacucc

SEQ ID NO: 369955 - RNA, 19 nt, Artificial Sequence
  Description of Artificial Sequence: Synthetic oligonucleotide
  Sense Strand Starting at position 652 of SEQ ID NO: 315967
gcaauuuacuaauaggaac

SEQ ID NO: 369956 - RNA, 19 nt, Artificial Sequence
  Description of Artificial Sequence: Synthetic oligonucleotide
  Antisense Strand to SEQ ID NO: 369955
guuccuauuaguaaauugc

SEQ ID NO: 369957 - RNA, 19 nt, Artificial Sequence
  Description of Artificial Sequence: Synthetic oligonucleotide
  Sense Strand Starting at position 652 of SEQ ID NO: 317227
ucccuuaacccggaaguga

SEQ ID NO: 369958 - RNA, 19 nt, Artificial Sequence
  Description of Artificial Sequence: Synthetic oligonucleotide
  Antisense Strand to SEQ ID NO: 369957
ucacuuccggguuaaggga

SEQ ID NO: 369959 - RNA, 19 nt, Artificial Sequence
  Description of Artificial Sequence: Synthetic oligonucleotide
  Sense Strand Starting at position 652 of SEQ ID NO: 317270
gguugauacuggaggagaa

SEQ ID NO: 369960 - RNA, 19 nt, Artificial Sequence
  Description of Artificial Sequence: Synthetic oligonucleotide
  Antisense Strand to SEQ ID NO: 369959
uucuccuccaguaucaacc

SEQ ID NO: 369961 - RNA, 19 nt, Artificial Sequence
  Description of Artificial Sequence: Synthetic oligonucleotide
  Sense Strand Starting at position 652 of SEQ ID NO: 317475
uugucauggccgccucuaa

SEQ ID NO: 369962 - RNA, 19 nt, Artificial Sequence
  Description of Artificial Sequence: Synthetic oligonucleotide
  Antisense Strand to SEQ ID NO: 369961
uuagaggcggccaugacaa

SEQ ID NO: 369963 - RNA, 19 nt, Artificial Sequence
  Description of Artificial Sequence: Synthetic oligonucleotide
  Sense Strand Starting at position 652 of SEQ ID NO: 318062
ccuaguguuguagauggga

SEQ ID NO: 369964 - RNA, 19 nt, Artificial Sequence
  Description of Artificial Sequence: Synthetic oligonucleotide
  Antisense Strand to SEQ ID NO: 369963
ucccaucuacaacacuagg

SEQ ID NO: 369965 - RNA, 19 nt, Artificial Sequence
  Description of Artificial Sequence: Synthetic oligonucleotide
  Sense Strand Starting at position 652 of SEQ ID NO: 318091
ugcaaaugugaugauugua

SEQ ID NO: 369966 - RNA, 19 nt, Artificial Sequence
  Description of Artificial Sequence: Synthetic oligonucleotide
  Antisense Strand to SEQ ID NO: 369965
uacaaucaucacauuugca

SEQ ID NO: 369967 - RNA, 19 nt, Artificial Sequence
  Description of Artificial Sequence: Synthetic oligonucleotide
  Sense Strand Starting at position 652 of SEQ ID NO: 318127
gcuaaauucgauuaacaau

SEQ ID NO: 369968 - RNA, 19 nt, Artificial Sequence
  Description of Artificial Sequence: Synthetic oligonucleotide
  Antisense Strand to SEQ ID NO: 369967
auuguuaaucgaauuuagc

SEQ ID NO: 369969 - RNA, 19 nt, Artificial Sequence
  Description of Artificial Sequence: Synthetic oligonucleotide
  Sense Strand Starting at position 652 of SEQ ID NO: 318161
cgaacuguuucugugauuu

SEQ ID NO: 369970 - RNA, 19 nt, Artificial Sequence
  Description of Artificial Sequence: Synthetic oligonucleotide
  Antisense Strand to SEQ ID NO: 369969
aaaucacagaaacaguucg

SEQ ID NO: 369971 - RNA, 19 nt, Artificial Sequence
  Description of Artificial Sequence: Synthetic oligonucleotide
  Sense Strand Starting at position 652 of SEQ ID NO: 318165
cuguuucugugauuuccaa

SEQ ID NO: 369972 - RNA, 19 nt, Artificial Sequence
  Description of Artificial Sequence: Synthetic oligonucleotide
  Antisense Strand to SEQ ID NO: 369971
uuggaaaucacagaaacag

SEQ ID NO: 369973 - RNA, 19 nt, Artificial Sequence
  Description of Artificial Sequence: Synthetic oligonucleotide
  Sense Strand Starting at position 652 of SEQ ID NO: 318315
uuagauggcuuucuacaua

SEQ ID NO: 369974 - RNA, 19 nt, Artificial Sequence
  Description of Artificial Sequence: Synthetic oligonucleotide
  Antisense Strand to SEQ ID NO: 369973
uauguagaaagccaucuaa

SEQ ID NO: 369975 - RNA, 19 nt, Artificial Sequence
  Description of Artificial Sequence: Synthetic oligonucleotide
  Sense Strand Starting at position 652 of SEQ ID NO: 318353
gguucuaaagagugaaaug

SEQ ID NO: 369976 - RNA, 19 nt, Artificial Sequence
  Description of Artificial Sequence: Synthetic oligonucleotide
  Antisense Strand to SEQ ID NO: 369975
cauuucacucuuuagaacc

SEQ ID NO: 369977 - RNA, 19 nt, Artificial Sequence
  Description of Artificial Sequence: Synthetic oligonucleotide
  Sense Strand Starting at position 652 of SEQ ID NO: 318358
uaaagagugaaaugguguu

SEQ ID NO: 369978 - RNA, 19 nt, Artificial Sequence
  Description of Artificial Sequence: Synthetic oligonucleotide
  Antisense Strand to SEQ ID NO: 369977
aacaccauuucacucuuua

SEQ ID NO: 369979 - RNA, 19 nt, Artificial Sequence
  Description of Artificial Sequence: Synthetic oligonucleotide
  Sense Strand Starting at position 652 of SEQ ID NO: 318433
gcucguccucucucagcaa

SEQ ID NO: 369980 - RNA, 19 nt, Artificial Sequence
  Description of Artificial Sequence: Synthetic oligonucleotide
  Antisense Strand to SEQ ID NO: 369979
uugcugagagaggacgagc

SEQ ID NO: 369981 - RNA, 19 nt, Artificial Sequence
  Description of Artificial Sequence: Synthetic oligonucleotide
  Sense Strand Starting at position 652 of SEQ ID NO: 318696
gggagugacuucuuaaacu

SEQ ID NO: 369982 - RNA, 19 nt, Artificial Sequence
  Description of Artificial Sequence: Synthetic oligonucleotide
  Antisense Strand to SEQ ID NO: 369981
aguuuaagaagucacuccc

SEQ ID NO: 369983 - RNA, 19 nt, Artificial Sequence
  Description of Artificial Sequence: Synthetic oligonucleotide
  Sense Strand Starting at position 652 of SEQ ID NO: 318776
gccuaauaugcaugauaca

SEQ ID NO: 369984 - RNA, 19 nt, Artificial Sequence
  Description of Artificial Sequence: Synthetic oligonucleotide
  Antisense Strand to SEQ ID NO: 369983
uguaucaugcauauuaggc

SEQ ID NO: 369985 - RNA, 19 nt, Artificial Sequence
  Description of Artificial Sequence: Synthetic oligonucleotide
  Sense Strand Starting at position 652 of SEQ ID NO: 318787
augauacaguuucucugau

SEQ ID NO: 369986 - RNA, 19 nt, Artificial Sequence
  Description of Artificial Sequence: Synthetic oligonucleotide
  Antisense Strand to SEQ ID NO: 369985
aucagagaaacuguaucau

SEQ ID NO: 369987 - RNA, 19 nt, Artificial Sequence
  Description of Artificial Sequence: Synthetic oligonucleotide
  Sense Strand Starting at position 652 of SEQ ID NO: 318808
gaggccaagcauuggauua

SEQ ID NO: 369988 - RNA, 19 nt, Artificial Sequence
  Description of Artificial Sequence: Synthetic oligonucleotide
  Antisense Strand to SEQ ID NO: 369987
uaauccaaugcuuggccuc

SEQ ID NO: 369989 - RNA, 19 nt, Artificial Sequence
  Description of Artificial Sequence: Synthetic oligonucleotide
  Sense Strand Starting at position 652 of SEQ ID NO: 318809
aggccaagcauuggauuau

SEQ ID NO: 369990 - RNA, 19 nt, Artificial Sequence
  Description of Artificial Sequence: Synthetic oligonucleotide
  Antisense Strand to SEQ ID NO: 369989
auaauccaaugcuuggccu

SEQ ID NO: 369991 - RNA, 19 nt, Artificial Sequence
  Description of Artificial Sequence: Synthetic oligonucleotide
  Sense Strand Starting at position 652 of SEQ ID NO: 318852
uggugaacugacuguuaaa

SEQ ID NO: 369992 - RNA, 19 nt, Artificial Sequence
  Description of Artificial Sequence: Synthetic oligonucleotide
  Antisense Strand to SEQ ID NO: 369991
uuuaacagucaguucacca

SEQ ID NO: 369993 - RNA, 19 nt, Artificial Sequence
  Description of Artificial Sequence: Synthetic oligonucleotide
  Sense Strand Starting at position 652 of SEQ ID NO: 318885
gacagcugugcagagaauu

SEQ ID NO: 369994 - RNA, 19 nt, Artificial Sequence
  Description of Artificial Sequence: Synthetic oligonucleotide
  Antisense Strand to SEQ ID NO: 369993
aauucucugcacagcuguc

SEQ ID NO: 369995 - RNA, 19 nt, Artificial Sequence
  Description of Artificial Sequence: Synthetic oligonucleotide
  Sense Strand Starting at position 652 of SEQ ID NO: 318915
auuugacaauacugggauu

SEQ ID NO: 369996 - RNA, 19 nt, Artificial Sequence
  Description of Artificial Sequence: Synthetic oligonucleotide
  Antisense Strand to SEQ ID NO: 369995
aaucccaguauugucaaau

SEQ ID NO: 369997 - RNA, 19 nt, Artificial Sequence
  Description of Artificial Sequence: Synthetic oligonucleotide
  Sense Strand Starting at position 652 of SEQ ID NO: 318957
ucuggaguuguucaauggu

SEQ ID NO: 369998 - RNA, 19 nt, Artificial Sequence
  Description of Artificial Sequence: Synthetic oligonucleotide
  Antisense Strand to SEQ ID NO: 369997
accauugaacaacuccaga

SEQ ID NO: 369999 - RNA, 19 nt, Artificial Sequence
  Description of Artificial Sequence: Synthetic oligonucleotide
  Sense Strand Starting at position 652 of SEQ ID NO: 318982
agaguaagucgaggucaga

SEQ ID NO: 370000 - RNA, 19 nt, Artificial Sequence
  Description of Artificial Sequence: Synthetic oligonucleotide
  Antisense Strand to SEQ ID NO: 369999
ucugaccucgacuuacucu

SEQ ID NO: 370001 - RNA, 19 nt, Artificial Sequence
  Description of Artificial Sequence: Synthetic oligonucleotide
  Sense Strand Starting at position 652 of SEQ ID NO: 318997
cagagaaacguuuggucaa

SEQ ID NO: 370002 - RNA, 19 nt, Artificial Sequence
  Description of Artificial Sequence: Synthetic oligonucleotide
  Antisense Strand to SEQ ID NO: 370001
uugaccaaacguuucucug

SEQ ID NO: 370003 - RNA, 19 nt, Artificial Sequence
  Description of Artificial Sequence: Synthetic oligonucleotide
  Sense Strand Starting at position 652 of SEQ ID NO: 318999
gagaaacguuuggucaaau

SEQ ID NO: 370004 - RNA, 19 nt, Artificial Sequence
  Description of Artificial Sequence: Synthetic oligonucleotide
  Antisense Strand to SEQ ID NO: 370003
auuugaccaaacguuucuc

SEQ ID NO: 370005 - RNA, 19 nt, Artificial Sequence
  Description of Artificial Sequence: Synthetic oligonucleotide
  Sense Strand Starting at position 652 of SEQ ID NO: 319000
agaaacguuuggucaaaua

SEQ ID NO: 370006 - RNA, 19 nt, Artificial Sequence
  Description of Artificial Sequence: Synthetic oligonucleotide
  Antisense Strand to SEQ ID NO: 370005
uauuugaccaaacguuucu

SEQ ID NO: 370007 - RNA, 19 nt, Artificial Sequence
  Description of Artificial Sequence: Synthetic oligonucleotide
  Sense Strand Starting at position 652 of SEQ ID NO: 319010
ggucaaauaucucccaguu

SEQ ID NO: 370008 - RNA, 19 nt, Artificial Sequence
  Description of Artificial Sequence: Synthetic oligonucleotide
  Antisense Strand to SEQ ID NO: 370007
aacugggagauauuugacc

SEQ ID NO: 370009 - RNA, 19 nt, Artificial Sequence
  Description of Artificial Sequence: Synthetic oligonucleotide
  Sense Strand Starting at position 652 of SEQ ID NO: 319038
aguauauacaguuggucaa

SEQ ID NO: 370010 - RNA, 19 nt, Artificial Sequence
  Description of Artificial Sequence: Synthetic oligonucleotide
  Antisense Strand to SEQ ID NO: 370009
uugaccaacuguauauacu

SEQ ID NO: 370011 - RNA, 19 nt, Artificial Sequence
  Description of Artificial Sequence: Synthetic oligonucleotide
  Sense Strand Starting at position 652 of SEQ ID NO: 319041
auauacaguuggucaagua

SEQ ID NO: 370012 - RNA, 19 nt, Artificial Sequence
  Description of Artificial Sequence: Synthetic oligonucleotide
  Antisense Strand to SEQ ID NO: 370011
uacuugaccaacuguauau

SEQ ID NO: 370013 - RNA, 19 nt, Artificial Sequence
  Description of Artificial Sequence: Synthetic oligonucleotide
  Sense Strand Starting at position 652 of SEQ ID NO: 319042
uauacaguuggucaaguaa

SEQ ID NO: 370014 - RNA, 19 nt, Artificial Sequence
  Description of Artificial Sequence: Synthetic oligonucleotide
  Antisense Strand to SEQ ID NO: 370013
uuacuugaccaacuguaua

SEQ ID NO: 370015 - RNA, 19 nt, Artificial Sequence
  Description of Artificial Sequence: Synthetic oligonucleotide
  Sense Strand Starting at position 652 of SEQ ID NO: 319096
guaugcaagucauuuccau

SEQ ID NO: 370016 - RNA, 19 nt, Artificial Sequence
  Description of Artificial Sequence: Synthetic oligonucleotide
  Antisense Strand to SEQ ID NO: 370015
auggaaaugacuugcauac

SEQ ID NO: 370017 - RNA, 19 nt, Artificial Sequence
  Description of Artificial Sequence: Synthetic oligonucleotide
  Sense Strand Starting at position 653 of SEQ ID NO: 315308
agucauuguccucacuaug

SEQ ID NO: 370018 - RNA, 19 nt, Artificial Sequence
  Description of Artificial Sequence: Synthetic oligonucleotide
  Antisense Strand to SEQ ID NO: 370017
cauagugaggacaaugacu

SEQ ID NO: 370019 - RNA, 19 nt, Artificial Sequence
  Description of Artificial Sequence: Synthetic oligonucleotide
  Sense Strand Starting at position 653 of SEQ ID NO: 315658
ccaagaggucaaggcuaaa

SEQ ID NO: 370020 - RNA, 19 nt, Artificial Sequence
  Description of Artificial Sequence: Synthetic oligonucleotide
  Antisense Strand to SEQ ID NO: 370019
uuuagccuugaccucuugg

SEQ ID NO: 370021 - RNA, 19 nt, Artificial Sequence
  Description of Artificial Sequence: Synthetic oligonucleotide
  Sense Strand Starting at position 653 of SEQ ID NO: 315868
cgugauaggcacugaaaug

SEQ ID NO: 370022 - RNA, 19 nt, Artificial Sequence
  Description of Artificial Sequence: Synthetic oligonucleotide
  Antisense Strand to SEQ ID NO: 370021
cauuucagugccuaucacg

SEQ ID NO: 370023 - RNA, 19 nt, Artificial Sequence
  Description of Artificial Sequence: Synthetic oligonucleotide
  Sense Strand Starting at position 653 of SEQ ID NO: 316000
agagaccugcaguggaaau

SEQ ID NO: 370024 - RNA, 19 nt, Artificial Sequence
  Description of Artificial Sequence: Synthetic oligonucleotide
  Antisense Strand to SEQ ID NO: 370023
auuuccacugcaggucucu

SEQ ID NO: 370025 - RNA, 19 nt, Artificial Sequence
  Description of Artificial Sequence: Synthetic oligonucleotide
  Sense Strand Starting at position 653 of SEQ ID NO: 316454
ccagccugugucuuguuua

SEQ ID NO: 370026 - RNA, 19 nt, Artificial Sequence
  Description of Artificial Sequence: Synthetic oligonucleotide
  Antisense Strand to SEQ ID NO: 370025
uaaacaagacacaggcugg

SEQ ID NO: 370027 - RNA, 19 nt, Artificial Sequence
  Description of Artificial Sequence: Synthetic oligonucleotide
  Sense Strand Starting at position 653 of SEQ ID NO: 316481
auuauauagcaguguacaa

SEQ ID NO: 370028 - RNA, 19 nt, Artificial Sequence
  Description of Artificial Sequence: Synthetic oligonucleotide
  Antisense Strand to SEQ ID NO: 370027
uuguacacugcuauauaau

SEQ ID NO: 370029 - RNA, 19 nt, Artificial Sequence
  Description of Artificial Sequence: Synthetic oligonucleotide
  Sense Strand Starting at position 653 of SEQ ID NO: 316551
auaaguuauuccucaguaa

SEQ ID NO: 370030 - RNA, 19 nt, Artificial Sequence
  Description of Artificial Sequence: Synthetic oligonucleotide
  Antisense Strand to SEQ ID NO: 370029
uuacugaggaauaacuuau

SEQ ID NO: 370031 - RNA, 19 nt, Artificial Sequence
  Description of Artificial Sequence: Synthetic oligonucleotide
  Sense Strand Starting at position 653 of SEQ ID NO: 316555
guuauuccucaguaaacau

SEQ ID NO: 370032 - RNA, 19 nt, Artificial Sequence
  Description of Artificial Sequence: Synthetic oligonucleotide
  Antisense Strand to SEQ ID NO: 370031
auguuuacugaggaauaac

SEQ ID NO: 370033 - RNA, 19 nt, Artificial Sequence
  Description of Artificial Sequence: Synthetic oligonucleotide
  Sense Strand Starting at position 653 of SEQ ID NO: 316585
uucuucugucuuuggacua

SEQ ID NO: 370034 - RNA, 19 nt, Artificial Sequence
  Description of Artificial Sequence: Synthetic oligonucleotide
  Antisense Strand to SEQ ID NO: 370033
uaguccaaagacagaagaa

SEQ ID NO: 370035 - RNA, 19 nt, Artificial Sequence
  Description of Artificial Sequence: Synthetic oligonucleotide
  Sense Strand Starting at position 653 of SEQ ID NO: 316590
cugucuuuggacuagaagu

SEQ ID NO: 370036 - RNA, 19 nt, Artificial Sequence
  Description of Artificial Sequence: Synthetic oligonucleotide
  Antisense Strand to SEQ ID NO: 370035
acuucuaguccaaagacag

SEQ ID NO: 370037 - RNA, 19 nt, Artificial Sequence
  Description of Artificial Sequence: Synthetic oligonucleotide
  Sense Strand Starting at position 653 of SEQ ID NO: 316634
gggagacuguuagcaucuu

SEQ ID NO: 370038 - RNA, 19 nt, Artificial Sequence
  Description of Artificial Sequence: Synthetic oligonucleotide
  Antisense Strand to SEQ ID NO: 370037
aagaugcuaacagucuccc

SEQ ID NO: 370039 - RNA, 19 nt, Artificial Sequence
  Description of Artificial Sequence: Synthetic oligonucleotide
  Sense Strand Starting at position 653 of SEQ ID NO: 316642
guuagcaucuugucauuag

SEQ ID NO: 370040 - RNA, 19 nt, Artificial Sequence
  Description of Artificial Sequence: Synthetic oligonucleotide
  Antisense Strand to SEQ ID NO: 370039
cuaaugacaagaugcuaac

SEQ ID NO: 370041 - RNA, 19 nt, Artificial Sequence
  Description of Artificial Sequence: Synthetic oligonucleotide
  Sense Strand Starting at position 653 of SEQ ID NO: 316645
agcaucuugucauuagggu

SEQ ID NO: 370042 - RNA, 19 nt, Artificial Sequence
  Description of Artificial Sequence: Synthetic oligonucleotide
  Antisense Strand to SEQ ID NO: 370041
acccuaaugacaagaugcu

SEQ ID NO: 370043 - RNA, 19 nt, Artificial Sequence
  Description of Artificial Sequence: Synthetic oligonucleotide
  Sense Strand Starting at position 653 of SEQ ID NO: 316646
gcaucuugucauuaggguu

SEQ ID NO: 370044 - RNA, 19 nt, Artificial Sequence
  Description of Artificial Sequence: Synthetic oligonucleotide
  Antisense Strand to SEQ ID NO: 370043
aacccuaaugacaagaugc

SEQ ID NO: 370045 - RNA, 19 nt, Artificial Sequence
  Description of Artificial Sequence: Synthetic oligonucleotide
  Sense Strand Starting at position 653 of SEQ ID NO: 316688
guguuuccgugaguauuug

SEQ ID NO: 370046 - RNA, 19 nt, Artificial Sequence
  Description of Artificial Sequence: Synthetic oligonucleotide
  Antisense Strand to SEQ ID NO: 370045
caaauacucacggaaacac

SEQ ID NO: 370047 - RNA, 19 nt, Artificial Sequence
  Description of Artificial Sequence: Synthetic oligonucleotide
  Sense Strand Starting at position 653 of SEQ ID NO: 316692
uuccgugaguauuuguguu

SEQ ID NO: 370048 - RNA, 19 nt, Artificial Sequence
  Description of Artificial Sequence: Synthetic oligonucleotide
  Antisense Strand to SEQ ID NO: 370047
aacacaaauacucacggaa

SEQ ID NO: 370049 - RNA, 19 nt, Artificial Sequence
  Description of Artificial Sequence: Synthetic oligonucleotide
  Sense Strand Starting at position 653 of SEQ ID NO: 316698
gaguauuuguguuucgguu

SEQ ID NO: 370050 - RNA, 19 nt, Artificial Sequence
  Description of Artificial Sequence: Synthetic oligonucleotide
  Antisense Strand to SEQ ID NO: 370049
aaccgaaacacaaauacuc

SEQ ID NO: 370051 - RNA, 19 nt, Artificial Sequence
  Description of Artificial Sequence: Synthetic oligonucleotide
  Sense Strand Starting at position 653 of SEQ ID NO: 316714
guuuccuggugucuacaau

SEQ ID NO: 370052 - RNA, 19 nt, Artificial Sequence
  Description of Artificial Sequence: Synthetic oligonucleotide
  Antisense Strand to SEQ ID NO: 370051
auuguagacaccaggaaac

SEQ ID NO: 370053 - RNA, 19 nt, Artificial Sequence
  Description of Artificial Sequence: Synthetic oligonucleotide
  Sense Strand Starting at position 653 of SEQ ID NO: 316750
cuaguagaagugugaugag

SEQ ID NO: 370054 - RNA, 19 nt, Artificial Sequence
  Description of Artificial Sequence: Synthetic oligonucleotide
  Antisense Strand to SEQ ID NO: 370053
cucaucacacuucuacuag

SEQ ID NO: 370055 - RNA, 19 nt, Artificial Sequence
  Description of Artificial Sequence: Synthetic oligonucleotide
  Sense Strand Starting at position 653 of SEQ ID NO: 316765
ugaggagacuguccauagu

SEQ ID NO: 370056 - RNA, 19 nt, Artificial Sequence
  Description of Artificial Sequence: Synthetic oligonucleotide
  Antisense Strand to SEQ ID NO: 370055
acuauggacagucuccuca

SEQ ID NO: 370057 - RNA, 19 nt, Artificial Sequence
  Description of Artificial Sequence: Synthetic oligonucleotide
  Sense Strand Starting at position 653 of SEQ ID NO: 316771
gacuguccauaguuggaaa

SEQ ID NO: 370058 - RNA, 19 nt, Artificial Sequence
  Description of Artificial Sequence: Synthetic oligonucleotide
  Antisense Strand to SEQ ID NO: 370057
uuuccaacuauggacaguc

SEQ ID NO: 370059 - RNA, 19 nt, Artificial Sequence
  Description of Artificial Sequence: Synthetic oligonucleotide
  Sense Strand Starting at position 653 of SEQ ID NO: 316784
uggaaagcucuugauaagu

SEQ ID NO: 370060 - RNA, 19 nt, Artificial Sequence
  Description of Artificial Sequence: Synthetic oligonucleotide
  Antisense Strand to SEQ ID NO: 370059
acuuaucaagagcuuucca

SEQ ID NO: 370061 - RNA, 19 nt, Artificial Sequence
  Description of Artificial Sequence: Synthetic oligonucleotide
  Sense Strand Starting at position 653 of SEQ ID NO: 316789
agcucuugauaaguaaaua

SEQ ID NO: 370062 - RNA, 19 nt, Artificial Sequence
  Description of Artificial Sequence: Synthetic oligonucleotide
  Antisense Strand to SEQ ID NO: 370061
uauuuacuuaucaagagcu

SEQ ID NO: 370063 - RNA, 19 nt, Artificial Sequence
  Description of Artificial Sequence: Synthetic oligonucleotide
  Sense Strand Starting at position 653 of SEQ ID NO: 317579
accauugaacagugcuaaa

SEQ ID NO: 370064 - RNA, 19 nt, Artificial Sequence
  Description of Artificial Sequence: Synthetic oligonucleotide
  Antisense Strand to SEQ ID NO: 370063
uuuagcacuguucaauggu

SEQ ID NO: 370065 - RNA, 19 nt, Artificial Sequence
  Description of Artificial Sequence: Synthetic oligonucleotide
  Sense Strand Starting at position 653 of SEQ ID NO: 317582
auugaacagugcuaaauuu

SEQ ID NO: 370066 - RNA, 19 nt, Artificial Sequence
  Description of Artificial Sequence: Synthetic oligonucleotide
  Antisense Strand to SEQ ID NO: 370065
aaauuuagcacuguucaau

SEQ ID NO: 370067 - RNA, 19 nt, Artificial Sequence
  Description of Artificial Sequence: Synthetic oligonucleotide
  Sense Strand Starting at position 653 of SEQ ID NO: 317736
ugcagaaugguacagguau

SEQ ID NO: 370068 - RNA, 19 nt, Artificial Sequence
  Description of Artificial Sequence: Synthetic oligonucleotide
  Antisense Strand to SEQ ID NO: 370067
auaccuguaccauucugca

SEQ ID NO: 370069 - RNA, 19 nt, Artificial Sequence
  Description of Artificial Sequence: Synthetic oligonucleotide
  Sense Strand Starting at position 653 of SEQ ID NO: 318107
ggcuguaguuucuuauaaa

SEQ ID NO: 370070 - RNA, 19 nt, Artificial Sequence
  Description of Artificial Sequence: Synthetic oligonucleotide
  Antisense Strand to SEQ ID NO: 370069
uuuauaagaaacuacagcc

SEQ ID NO: 370071 - RNA, 19 nt, Artificial Sequence
  Description of Artificial Sequence: Synthetic oligonucleotide
  Sense Strand Starting at position 653 of SEQ ID NO: 318231
ucuauucgugauugccaaa

SEQ ID NO: 370072 - RNA, 19 nt, Artificial Sequence
  Description of Artificial Sequence: Synthetic oligonucleotide
  Antisense Strand to SEQ ID NO: 370071
uuuggcaaucacgaauaga

SEQ ID NO: 370073 - RNA, 19 nt, Artificial Sequence
  Description of Artificial Sequence: Synthetic oligonucleotide
  Sense Strand Starting at position 653 of SEQ ID NO: 318312
auggaauauugugcagcaa

SEQ ID NO: 370074 - RNA, 19 nt, Artificial Sequence
  Description of Artificial Sequence: Synthetic oligonucleotide
  Antisense Strand to SEQ ID NO: 370073
uugcugcacaauauuccau

SEQ ID NO: 370075 - RNA, 19 nt, Artificial Sequence
  Description of Artificial Sequence: Synthetic oligonucleotide
  Sense Strand Starting at position 653 of SEQ ID NO: 318313
uggaauauugugcagcaau

SEQ ID NO: 370076 - RNA, 19 nt, Artificial Sequence
  Description of Artificial Sequence: Synthetic oligonucleotide
  Antisense Strand to SEQ ID NO: 370075
auugcugcacaauauucca

SEQ ID NO: 370077 - RNA, 19 nt, Artificial Sequence
  Description of Artificial Sequence: Synthetic oligonucleotide
  Sense Strand Starting at position 653 of SEQ ID NO: 318380
ggcauuaugcucgguagaa

SEQ ID NO: 370078 - RNA, 19 nt, Artificial Sequence
  Description of Artificial Sequence: Synthetic oligonucleotide
  Antisense Strand to SEQ ID NO: 370077
uucuaccgagcauaaugcc

SEQ ID NO: 370079 - RNA, 19 nt, Artificial Sequence
  Description of Artificial Sequence: Synthetic oligonucleotide
  Sense Strand Starting at position 653 of SEQ ID NO: 318382
cauuaugcucgguagaaca

SEQ ID NO: 370080 - RNA, 19 nt, Artificial Sequence
  Description of Artificial Sequence: Synthetic oligonucleotide
  Antisense Strand to SEQ ID NO: 370079
uguucuaccgagcauaaug

SEQ ID NO: 370081 - RNA, 19 nt, Artificial Sequence
  Description of Artificial Sequence: Synthetic oligonucleotide
  Sense Strand Starting at position 653 of SEQ ID NO: 318686
ugaccucauuuauauggua

SEQ ID NO: 370082 - RNA, 19 nt, Artificial Sequence
  Description of Artificial Sequence: Synthetic oligonucleotide
  Antisense Strand to SEQ ID NO: 370081
uaccauauaaaugagguca

SEQ ID NO: 370083 - RNA, 19 nt, Artificial Sequence
  Description of Artificial Sequence: Synthetic oligonucleotide
  Sense Strand Starting at position 653 of SEQ ID NO: 318725
ucaugacugccugggauua

SEQ ID NO: 370084 - RNA, 19 nt, Artificial Sequence
  Description of Artificial Sequence: Synthetic oligonucleotide
  Antisense Strand to SEQ ID NO: 370083
uaaucccaggcagucauga

SEQ ID NO: 370085 - RNA, 19 nt, Artificial Sequence
  Description of Artificial Sequence: Synthetic oligonucleotide
  Sense Strand Starting at position 653 of SEQ ID NO: 318802
uggaauuguucugcauucu

SEQ ID NO: 370086 - RNA, 19 nt, Artificial Sequence
  Description of Artificial Sequence: Synthetic oligonucleotide
  Antisense Strand to SEQ ID NO: 370085
agaaugcagaacaauucca

SEQ ID NO: 370087 - RNA, 19 nt, Artificial Sequence
  Description of Artificial Sequence: Synthetic oligonucleotide
  Sense Strand Starting at position 653 of SEQ ID NO: 318803
ggaauuguucugcauucuu

SEQ ID NO: 370088 - RNA, 19 nt, Artificial Sequence
  Description of Artificial Sequence: Synthetic oligonucleotide
  Antisense Strand to SEQ ID NO: 370087
aagaaugcagaacaauucc

SEQ ID NO: 370089 - RNA, 19 nt, Artificial Sequence
  Description of Artificial Sequence: Synthetic oligonucleotide
  Sense Strand Starting at position 653 of SEQ ID NO: 318828
ggugguuacgugaagcugu

SEQ ID NO: 370090 - RNA, 19 nt, Artificial Sequence
  Description of Artificial Sequence: Synthetic oligonucleotide
  Antisense Strand to SEQ ID NO: 370089
acagcuucacguaaccacc

SEQ ID NO: 370091 - RNA, 19 nt, Artificial Sequence
  Description of Artificial Sequence: Synthetic oligonucleotide
  Sense Strand Starting at position 653 of SEQ ID NO: 318838
ugaagcuguauguauguua

SEQ ID NO: 370092 - RNA, 19 nt, Artificial Sequence
  Description of Artificial Sequence: Synthetic oligonucleotide
  Antisense Strand to SEQ ID NO: 370091
uaacauacauacagcuuca

SEQ ID NO: 370093 - RNA, 19 nt, Artificial Sequence
  Description of Artificial Sequence: Synthetic oligonucleotide
  Sense Strand Starting at position 653 of SEQ ID NO: 318968
cucugcugauuugauaaga

SEQ ID NO: 370094 - RNA, 19 nt, Artificial Sequence
  Description of Artificial Sequence: Synthetic oligonucleotide
  Antisense Strand to SEQ ID NO: 370093
ucuuaucaaaucagcagag

SEQ ID NO: 370095 - RNA, 19 nt, Artificial Sequence
  Description of Artificial Sequence: Synthetic oligonucleotide
  Sense Strand Starting at position 653 of SEQ ID NO: 319159
agaugacuccugugcauga

SEQ ID NO: 370096 - RNA, 19 nt, Artificial Sequence
  Description of Artificial Sequence: Synthetic oligonucleotide
  Antisense Strand to SEQ ID NO: 370095
ucaugcacaggagucaucu

SEQ ID NO: 370097 - RNA, 19 nt, Artificial Sequence
  Description of Artificial Sequence: Synthetic oligonucleotide
  Sense Strand Starting at position 654 of SEQ ID NO: 315393
gccagacagucuuuaacug

SEQ ID NO: 370098 - RNA, 19 nt, Artificial Sequence
  Description of Artificial Sequence: Synthetic oligonucleotide
  Antisense Strand to SEQ ID NO: 370097
caguuaaagacugucuggc

SEQ ID NO: 370099 - RNA, 19 nt, Artificial Sequence
  Description of Artificial Sequence: Synthetic oligonucleotide
  Sense Strand Starting at position 654 of SEQ ID NO: 315445
aagagaccuuuagcugagu

SEQ ID NO: 370100 - RNA, 19 nt, Artificial Sequence
  Description of Artificial Sequence: Synthetic oligonucleotide
  Antisense Strand to SEQ ID NO: 370099
acucagcuaaaggucucuu

SEQ ID NO: 370101 - RNA, 19 nt, Artificial Sequence
  Description of Artificial Sequence: Synthetic oligonucleotide
  Sense Strand Starting at position 654 of SEQ ID NO: 315446
agagaccuuuagcugagua

SEQ ID NO: 370102 - RNA, 19 nt, Artificial Sequence
  Description of Artificial Sequence: Synthetic oligonucleotide
  Antisense Strand to SEQ ID NO: 370101
uacucagcuaaaggucucu

SEQ ID NO: 370103 - RNA, 19 nt, Artificial Sequence
  Description of Artificial Sequence: Synthetic oligonucleotide
  Sense Strand Starting at position 654 of SEQ ID NO: 315448
agaccuuuagcugaguauu

SEQ ID NO: 370104 - RNA, 19 nt, Artificial Sequence
  Description of Artificial Sequence: Synthetic oligonucleotide
  Antisense Strand to SEQ ID NO: 370103
aauacucagcuaaaggucu

SEQ ID NO: 370105 - RNA, 19 nt, Artificial Sequence
  Description of Artificial Sequence: Synthetic oligonucleotide
  Sense Strand Starting at position 654 of SEQ ID NO: 315458
cugaguauugcucacucuu

SEQ ID NO: 370106 - RNA, 19 nt, Artificial Sequence
  Description of Artificial Sequence: Synthetic oligonucleotide
  Antisense Strand to SEQ ID NO: 370105
aagagugagcaauacucag

SEQ ID NO: 370107 - RNA, 19 nt, Artificial Sequence
  Description of Artificial Sequence: Synthetic oligonucleotide
  Sense Strand Starting at position 654 of SEQ ID NO: 315658
caagacauuuguuagaggu

SEQ ID NO: 370108 - RNA, 19 nt, Artificial Sequence
  Description of Artificial Sequence: Synthetic oligonucleotide
  Antisense Strand to SEQ ID NO: 370107
accucuaacaaaugucuug

SEQ ID NO: 370109 - RNA, 19 nt, Artificial Sequence
  Description of Artificial Sequence: Synthetic oligonucleotide
  Sense Strand Starting at position 654 of SEQ ID NO: 315944
gaaauaaagcuguaggcaa

SEQ ID NO: 370110 - RNA, 19 nt, Artificial Sequence
  Description of Artificial Sequence: Synthetic oligonucleotide
  Antisense Strand to SEQ ID NO: 370109
uugccuacagcuuuauuuc

SEQ ID NO: 370111 - RNA, 19 nt, Artificial Sequence
  Description of Artificial Sequence: Synthetic oligonucleotide
  Sense Strand Starting at position 654 of SEQ ID NO: 316035
cauauuagugauggucuga

SEQ ID NO: 370112 - RNA, 19 nt, Artificial Sequence
  Description of Artificial Sequence: Synthetic oligonucleotide
  Antisense Strand to SEQ ID NO: 370111
ucagaccaucacuaauaug

SEQ ID NO: 370113 - RNA, 19 nt, Artificial Sequence
  Description of Artificial Sequence: Synthetic oligonucleotide
  Sense Strand Starting at position 654 of SEQ ID NO: 316103
aucugucuacuaugaaugu

SEQ ID NO: 370114 - RNA, 19 nt, Artificial Sequence
  Description of Artificial Sequence: Synthetic oligonucleotide
  Antisense Strand to SEQ ID NO: 370113
acauucauaguagacagau

SEQ ID NO: 370115 - RNA, 19 nt, Artificial Sequence
  Description of Artificial Sequence: Synthetic oligonucleotide
  Sense Strand Starting at position 654 of SEQ ID NO: 316165
cugcucugugaacagauaa

SEQ ID NO: 370116 - RNA, 19 nt, Artificial Sequence
  Description of Artificial Sequence: Synthetic oligonucleotide
  Antisense Strand to SEQ ID NO: 370115
uuaucuguucacagagcag

SEQ ID NO: 370117 - RNA, 19 nt, Artificial Sequence
  Description of Artificial Sequence: Synthetic oligonucleotide
  Sense Strand Starting at position 654 of SEQ ID NO: 316237
ggugauaauguguaacuua

SEQ ID NO: 370118 - RNA, 19 nt, Artificial Sequence
  Description of Artificial Sequence: Synthetic oligonucleotide
  Antisense Strand to SEQ ID NO: 370117
uaaguuacacauuaucacc

SEQ ID NO: 370119 - RNA, 19 nt, Artificial Sequence
  Description of Artificial Sequence: Synthetic oligonucleotide
  Sense Strand Starting at position 654 of SEQ ID NO: 316240
gauaauguguaacuuagau

SEQ ID NO: 370120 - RNA, 19 nt, Artificial Sequence
  Description of Artificial Sequence: Synthetic oligonucleotide
  Antisense Strand to SEQ ID NO: 370119
aucuaaguuacacauuauc

SEQ ID NO: 370121 - RNA, 19 nt, Artificial Sequence
  Description of Artificial Sequence: Synthetic oligonucleotide
  Sense Strand Starting at position 654 of SEQ ID NO: 316270
ucacguuuaccagaguaua

SEQ ID NO: 370122 - RNA, 19 nt, Artificial Sequence
  Description of Artificial Sequence: Synthetic oligonucleotide
  Antisense Strand to SEQ ID NO: 370121
uauacucugguaaacguga

SEQ ID NO: 370123 - RNA, 19 nt, Artificial Sequence
  Description of Artificial Sequence: Synthetic oligonucleotide
  Sense Strand Starting at position 654 of SEQ ID NO: 316273
cguuuaccagaguauauau

SEQ ID NO: 370124 - RNA, 19 nt, Artificial Sequence
  Description of Artificial Sequence: Synthetic oligonucleotide
  Antisense Strand to SEQ ID NO: 370123
auauauacucugguaaacg

SEQ ID NO: 370125 - RNA, 19 nt, Artificial Sequence
  Description of Artificial Sequence: Synthetic oligonucleotide
  Sense Strand Starting at position 654 of SEQ ID NO: 316538
ccaacauagugaguuugau

SEQ ID NO: 370126 - RNA, 19 nt, Artificial Sequence
  Description of Artificial Sequence: Synthetic oligonucleotide
  Antisense Strand to SEQ ID NO: 370125
aucaaacucacuauguugg

SEQ ID NO: 370127 - RNA, 19 nt, Artificial Sequence
  Description of Artificial Sequence: Synthetic oligonucleotide
  Sense Strand Starting at position 654 of SEQ ID NO: 316671
caaugagaagcuggccauu

SEQ ID NO: 370128 - RNA, 19 nt, Artificial Sequence
  Description of Artificial Sequence: Synthetic oligonucleotide
  Antisense Strand to SEQ ID NO: 370127
aauggccagcuucucauug

SEQ ID NO: 370129 - RNA, 19 nt, Artificial Sequence
  Description of Artificial Sequence: Synthetic oligonucleotide
  Sense Strand Starting at position 654 of SEQ ID NO: 316950
ucacuuggucuuggaaauu

SEQ ID NO: 370130 - RNA, 19 nt, Artificial Sequence
  Description of Artificial Sequence: Synthetic oligonucleotide
  Antisense Strand to SEQ ID NO: 370129
aauuuccaagaccaaguga

SEQ ID NO: 370131 - RNA, 19 nt, Artificial Sequence
  Description of Artificial Sequence: Synthetic oligonucleotide
  Sense Strand Starting at position 654 of SEQ ID NO: 316956
ggucuuggaaauugugaag

SEQ ID NO: 370132 - RNA, 19 nt, Artificial Sequence
  Description of Artificial Sequence: Synthetic oligonucleotide
  Antisense Strand to SEQ ID NO: 370131
cuucacaauuuccaagacc

SEQ ID NO: 370133 - RNA, 19 nt, Artificial Sequence
  Description of Artificial Sequence: Synthetic oligonucleotide
  Sense Strand Starting at position 654 of SEQ ID NO: 316972
aaggguuucuccucugaac

SEQ ID NO: 370134 - RNA, 19 nt, Artificial Sequence
  Description of Artificial Sequence: Synthetic oligonucleotide
  Antisense Strand to SEQ ID NO: 370133
guucagaggagaaacccuu

SEQ ID NO: 370135 - RNA, 19 nt, Artificial Sequence
  Description of Artificial Sequence: Synthetic oligonucleotide
  Sense Strand Starting at position 654 of SEQ ID NO: 316974
ggguuucuccucugaacag

SEQ ID NO: 370136 - RNA, 19 nt, Artificial Sequence
  Description of Artificial Sequence: Synthetic oligonucleotide
  Antisense Strand to SEQ ID NO: 370135
cuguucagaggagaaaccc

SEQ ID NO: 370137 - RNA, 19 nt, Artificial Sequence
  Description of Artificial Sequence: Synthetic oligonucleotide
  Sense Strand Starting at position 654 of SEQ ID NO: 317051
ggcuuacauuuauagaaau

SEQ ID NO: 370138 - RNA, 19 nt, Artificial Sequence
  Description of Artificial Sequence: Synthetic oligonucleotide
  Antisense Strand to SEQ ID NO: 370137
auuucuauaaauguaagcc

SEQ ID NO: 370139 - RNA, 19 nt, Artificial Sequence
  Description of Artificial Sequence: Synthetic oligonucleotide
  Sense Strand Starting at position 654 of SEQ ID NO: 317458
acuccauuccucuaguugu

SEQ ID NO: 370140 - RNA, 19 nt, Artificial Sequence
  Description of Artificial Sequence: Synthetic oligonucleotide
  Antisense Strand to SEQ ID NO: 370139
acaacuagaggaauggagu

SEQ ID NO: 370141 - RNA, 19 nt, Artificial Sequence
  Description of Artificial Sequence: Synthetic oligonucleotide
  Sense Strand Starting at position 654 of SEQ ID NO: 317617
aucaauaaccuggguuauu

SEQ ID NO: 370142 - RNA, 19 nt, Artificial Sequence
  Description of Artificial Sequence: Synthetic oligonucleotide
  Antisense Strand to SEQ ID NO: 370141
aauaacccagguuauugau

SEQ ID NO: 370143 - RNA, 19 nt, Artificial Sequence
  Description of Artificial Sequence: Synthetic oligonucleotide
  Sense Strand Starting at position 654 of SEQ ID NO: 317618
ucaauaaccuggguuauug

SEQ ID NO: 370144 - RNA, 19 nt, Artificial Sequence
  Description of Artificial Sequence: Synthetic oligonucleotide
  Antisense Strand to SEQ ID NO: 370143
caauaacccagguuauuga

SEQ ID NO: 370145 - RNA, 19 nt, Artificial Sequence
  Description of Artificial Sequence: Synthetic oligonucleotide
  Sense Strand Starting at position 654 of SEQ ID NO: 317714
uuuagaauguaagucagau

SEQ ID NO: 370146 - RNA, 19 nt, Artificial Sequence
  Description of Artificial Sequence: Synthetic oligonucleotide
  Antisense Strand to SEQ ID NO: 370145
aucugacuuacauucuaaa

SEQ ID NO: 370147 - RNA, 19 nt, Artificial Sequence
  Description of Artificial Sequence: Synthetic oligonucleotide
  Sense Strand Starting at position 654 of SEQ ID NO: 318086
auuuaugugguaugcuuau

SEQ ID NO: 370148 - RNA, 19 nt, Artificial Sequence
  Description of Artificial Sequence: Synthetic oligonucleotide
  Antisense Strand to SEQ ID NO: 370147
auaagcauaccacauaaau

SEQ ID NO: 370149 - RNA, 19 nt, Artificial Sequence
  Description of Artificial Sequence: Synthetic oligonucleotide
  Sense Strand Starting at position 654 of SEQ ID NO: 318092
gugguaugcuuauuauuua

SEQ ID NO: 370150 - RNA, 19 nt, Artificial Sequence
  Description of Artificial Sequence: Synthetic oligonucleotide
  Antisense Strand to SEQ ID NO: 370149
uaaauaauaagcauaccac

SEQ ID NO: 370151 - RNA, 19 nt, Artificial Sequence
  Description of Artificial Sequence: Synthetic oligonucleotide
  Sense Strand Starting at position 654 of SEQ ID NO: 318324
uggagcuaauaucuuagua

SEQ ID NO: 370152 - RNA, 19 nt, Artificial Sequence
  Description of Artificial Sequence: Synthetic oligonucleotide
  Antisense Strand to SEQ ID NO: 370151
uacuaagauauuagcucca

SEQ ID NO: 370153 - RNA, 19 nt, Artificial Sequence
  Description of Artificial Sequence: Synthetic oligonucleotide
  Sense Strand Starting at position 654 of SEQ ID NO: 318328
gcuaauaucuuaguaggaa

SEQ ID NO: 370154 - RNA, 19 nt, Artificial Sequence
  Description of Artificial Sequence: Synthetic oligonucleotide
  Antisense Strand to SEQ ID NO: 370153
uuccuacuaagauauuagc

SEQ ID NO: 370155 - RNA, 19 nt, Artificial Sequence
  Description of Artificial Sequence: Synthetic oligonucleotide
  Sense Strand Starting at position 654 of SEQ ID NO: 318494
uguguugaaauaugaauga

SEQ ID NO: 370156 - RNA, 19 nt, Artificial Sequence
  Description of Artificial Sequence: Synthetic oligonucleotide
  Antisense Strand to SEQ ID NO: 370155
ucauucauauuucaacaca

SEQ ID NO: 370157 - RNA, 19 nt, Artificial Sequence
  Description of Artificial Sequence: Synthetic oligonucleotide
  Sense Strand Starting at position 654 of SEQ ID NO: 318594
auaugaucggccugugaag

SEQ ID NO: 370158 - RNA, 19 nt, Artificial Sequence
  Description of Artificial Sequence: Synthetic oligonucleotide
  Antisense Strand to SEQ ID NO: 370157
cuucacaggccgaucauau

SEQ ID NO: 370159 - RNA, 19 nt, Artificial Sequence
  Description of Artificial Sequence: Synthetic oligonucleotide
  Sense Strand Starting at position 654 of SEQ ID NO: 318637
ugaugaaagucggugugga

SEQ ID NO: 370160 - RNA, 19 nt, Artificial Sequence
  Description of Artificial Sequence: Synthetic oligonucleotide
  Antisense Strand to SEQ ID NO: 370159
uccacaccgacuuucauca

SEQ ID NO: 370161 - RNA, 19 nt, Artificial Sequence
  Description of Artificial Sequence: Synthetic oligonucleotide
  Sense Strand Starting at position 654 of SEQ ID NO: 318661
gguggaaggugaguuugaa

SEQ ID NO: 370162 - RNA, 19 nt, Artificial Sequence
  Description of Artificial Sequence: Synthetic oligonucleotide
  Antisense Strand to SEQ ID NO: 370161
uucaaacucaccuuccacc

SEQ ID NO: 370163 - RNA, 19 nt, Artificial Sequence
  Description of Artificial Sequence: Synthetic oligonucleotide
  Sense Strand Starting at position 654 of SEQ ID NO: 318743
uguauaacaugacuugauu

SEQ ID NO: 370164 - RNA, 19 nt, Artificial Sequence
  Description of Artificial Sequence: Synthetic oligonucleotide
  Antisense Strand to SEQ ID NO: 370163
aaucaagucauguuauaca

SEQ ID NO: 370165 - RNA, 19 nt, Artificial Sequence
  Description of Artificial Sequence: Synthetic oligonucleotide
  Sense Strand Starting at position 654 of SEQ ID NO: 318749
acaugacuugauugauacu

SEQ ID NO: 370166 - RNA, 19 nt, Artificial Sequence
  Description of Artificial Sequence: Synthetic oligonucleotide
  Antisense Strand to SEQ ID NO: 370165
aguaucaaucaagucaugu

SEQ ID NO: 370167 - RNA, 19 nt, Artificial Sequence
  Description of Artificial Sequence: Synthetic oligonucleotide
  Sense Strand Starting at position 654 of SEQ ID NO: 318874
uggcaauaugauggcuuaa

SEQ ID NO: 370168 - RNA, 19 nt, Artificial Sequence
  Description of Artificial Sequence: Synthetic oligonucleotide
  Antisense Strand to SEQ ID NO: 370167
uuaagccaucauauugcca

SEQ ID NO: 370169 - RNA, 19 nt, Artificial Sequence
  Description of Artificial Sequence: Synthetic oligonucleotide
  Sense Strand Starting at position 654 of SEQ ID NO: 318876
gcaauaugauggcuuaaau

SEQ ID NO: 370170 - RNA, 19 nt, Artificial Sequence
  Description of Artificial Sequence: Synthetic oligonucleotide
  Antisense Strand to SEQ ID NO: 370169
auuuaagccaucauauugc

SEQ ID NO: 370171 - RNA, 19 nt, Artificial Sequence
  Description of Artificial Sequence: Synthetic oligonucleotide
  Sense Strand Starting at position 654 of SEQ ID NO: 318929
ccuucugcugaauauagua

SEQ ID NO: 370172 - RNA, 19 nt, Artificial Sequence
  Description of Artificial Sequence: Synthetic oligonucleotide
  Antisense Strand to SEQ ID NO: 370171
uacuauauucagcagaagg

SEQ ID NO: 370173 - RNA, 19 nt, Artificial Sequence
  Description of Artificial Sequence: Synthetic oligonucleotide
  Sense Strand Starting at position 654 of SEQ ID NO: 319038
uugaaaucagagugcuaag

SEQ ID NO: 370174 - RNA, 19 nt, Artificial Sequence
  Description of Artificial Sequence: Synthetic oligonucleotide
  Antisense Strand to SEQ ID NO: 370173
cuuagcacucugauuucaa

SEQ ID NO: 370175 - RNA, 19 nt, Artificial Sequence
  Description of Artificial Sequence: Synthetic oligonucleotide
  Sense Strand Starting at position 654 of SEQ ID NO: 319218
ggccacaaucucgaugaga

SEQ ID NO: 370176 - RNA, 19 nt, Artificial Sequence
  Description of Artificial Sequence: Synthetic oligonucleotide
  Antisense Strand to SEQ ID NO: 370175
ucucaucgagauuguggcc

SEQ ID NO: 370177 - RNA, 19 nt, Artificial Sequence
  Description of Artificial Sequence: Synthetic oligonucleotide
  Sense Strand Starting at position 655 of SEQ ID NO: 315420
ucuauauacuugcuaguau

SEQ ID NO: 370178 - RNA, 19 nt, Artificial Sequence
  Description of Artificial Sequence: Synthetic oligonucleotide
  Antisense Strand to SEQ ID NO: 370177
auacuagcaaguauauaga

SEQ ID NO: 370179 - RNA, 19 nt, Artificial Sequence
  Description of Artificial Sequence: Synthetic oligonucleotide
  Sense Strand Starting at position 655 of SEQ ID NO: 315421
cuauauacuugcuaguauc

SEQ ID NO: 370180 - RNA, 19 nt, Artificial Sequence
  Description of Artificial Sequence: Synthetic oligonucleotide
  Antisense Strand to SEQ ID NO: 370179
gauacuagcaaguauauag

SEQ ID NO: 370181 - RNA, 19 nt, Artificial Sequence
  Description of Artificial Sequence: Synthetic oligonucleotide
  Sense Strand Starting at position 655 of SEQ ID NO: 315763
agccgaguuccagagaaga

SEQ ID NO: 370182 - RNA, 19 nt, Artificial Sequence
  Description of Artificial Sequence: Synthetic oligonucleotide
  Antisense Strand to SEQ ID NO: 370181
ucuucucuggaacucggcu

SEQ ID NO: 370183 - RNA, 19 nt, Artificial Sequence
  Description of Artificial Sequence: Synthetic oligonucleotide
  Sense Strand Starting at position 655 of SEQ ID NO: 315960
gaaccaugucugcguggaa

SEQ ID NO: 370184 - RNA, 19 nt, Artificial Sequence
  Description of Artificial Sequence: Synthetic oligonucleotide
  Antisense Strand to SEQ ID NO: 370183
uuccacgcagacaugguuc

SEQ ID NO: 370185 - RNA, 19 nt, Artificial Sequence
  Description of Artificial Sequence: Synthetic oligonucleotide
  Sense Strand Starting at position 655 of SEQ ID NO: 315961
aaccaugucugcguggaaa

SEQ ID NO: 370186 - RNA, 19 nt, Artificial Sequence
  Description of Artificial Sequence: Synthetic oligonucleotide
  Antisense Strand to SEQ ID NO: 370185
uuuccacgcagacaugguu

SEQ ID NO: 370187 - RNA, 19 nt, Artificial Sequence
  Description of Artificial Sequence: Synthetic oligonucleotide
  Sense Strand Starting at position 655 of SEQ ID NO: 316585
uugucaaucuaguuaaugu

SEQ ID NO: 370188 - RNA, 19 nt, Artificial Sequence
  Description of Artificial Sequence: Synthetic oligonucleotide
  Antisense Strand to SEQ ID NO: 370187
acauuaacuagauugacaa

SEQ ID NO: 370189 - RNA, 19 nt, Artificial Sequence
  Description of Artificial Sequence: Synthetic oligonucleotide
  Sense Strand Starting at position 655 of SEQ ID NO: 316806
acuuguuggcaugaaugaa

SEQ ID NO: 370190 - RNA, 19 nt, Artificial Sequence
  Description of Artificial Sequence: Synthetic oligonucleotide
  Antisense Strand to SEQ ID NO: 370189
uucauucaugccaacaagu

SEQ ID NO: 370191 - RNA, 19 nt, Artificial Sequence
  Description of Artificial Sequence: Synthetic oligonucleotide
  Sense Strand Starting at position 655 of SEQ ID NO: 317059
gcacuuaacgaaggacaaa

SEQ ID NO: 370192 - RNA, 19 nt, Artificial Sequence
  Description of Artificial Sequence: Synthetic oligonucleotide
  Antisense Strand to SEQ ID NO: 370191
uuuguccuucguuaagugc

SEQ ID NO: 370193 - RNA, 19 nt, Artificial Sequence
  Description of Artificial Sequence: Synthetic oligonucleotide
  Sense Strand Starting at position 655 of SEQ ID NO: 317584
gugggaaucuguuguacuc

SEQ ID NO: 370194 - RNA, 19 nt, Artificial Sequence
  Description of Artificial Sequence: Synthetic oligonucleotide
  Antisense Strand to SEQ ID NO: 370193
gaguacaacagauucccac

SEQ ID NO: 370195 - RNA, 19 nt, Artificial Sequence
  Description of Artificial Sequence: Synthetic oligonucleotide
  Sense Strand Starting at position 655 of SEQ ID NO: 317590
aucuguuguacucagggaa

SEQ ID NO: 370196 - RNA, 19 nt, Artificial Sequence
  Description of Artificial Sequence: Synthetic oligonucleotide
  Antisense Strand to SEQ ID NO: 370195
uucccugaguacaacagau

SEQ ID NO: 370197 - RNA, 19 nt, Artificial Sequence
  Description of Artificial Sequence: Synthetic oligonucleotide
  Sense Strand Starting at position 655 of SEQ ID NO: 318155
ggucaaugcuggccagaag

SEQ ID NO: 370198 - RNA, 19 nt, Artificial Sequence
  Description of Artificial Sequence: Synthetic oligonucleotide
  Antisense Strand to SEQ ID NO: 370197
cuucuggccagcauugacc

SEQ ID NO: 370199 - RNA, 19 nt, Artificial Sequence
  Description of Artificial Sequence: Synthetic oligonucleotide
  Sense Strand Starting at position 655 of SEQ ID NO: 318156
gucaaugcuggccagaaga

SEQ ID NO: 370200 - RNA, 19 nt, Artificial Sequence
  Description of Artificial Sequence: Synthetic oligonucleotide
  Antisense Strand to SEQ ID NO: 370199
ucuucuggccagcauugac

SEQ ID NO: 370201 - RNA, 19 nt, Artificial Sequence
  Description of Artificial Sequence: Synthetic oligonucleotide
  Sense Strand Starting at position 655 of SEQ ID NO: 318351
gaggaagcgcuccaucauu

SEQ ID NO: 370202 - RNA, 19 nt, Artificial Sequence
  Description of Artificial Sequence: Synthetic oligonucleotide
  Antisense Strand to SEQ ID NO: 370201
aaugauggagcgcuuccuc

SEQ ID NO: 370203 - RNA, 19 nt, Artificial Sequence
  Description of Artificial Sequence: Synthetic oligonucleotide
  Sense Strand Starting at position 655 of SEQ ID NO: 318594
ggcgucauacucuaccaua

SEQ ID NO: 370204 - RNA, 19 nt, Artificial Sequence
  Description of Artificial Sequence: Synthetic oligonucleotide
  Antisense Strand to SEQ ID NO: 370203
uaugguagaguaugacgcc

SEQ ID NO: 370205 - RNA, 19 nt, Artificial Sequence
  Description of Artificial Sequence: Synthetic oligonucleotide
  Sense Strand Starting at position 655 of SEQ ID NO: 318796
gugaacugugguuaggaga

SEQ ID NO: 370206 - RNA, 19 nt, Artificial Sequence
  Description of Artificial Sequence: Synthetic oligonucleotide
  Antisense Strand to SEQ ID NO: 370205
ucuccuaaccacaguucac

SEQ ID NO: 370207 - RNA, 19 nt, Artificial Sequence
  Description of Artificial Sequence: Synthetic oligonucleotide
  Sense Strand Starting at position 655 of SEQ ID NO: 318966
gaagcaguccaccaucaga

SEQ ID NO: 370208 - RNA, 19 nt, Artificial Sequence
  Description of Artificial Sequence: Synthetic oligonucleotide
  Antisense Strand to SEQ ID NO: 370207
ucugaugguggacugcuuc

SEQ ID NO: 370209 - RNA, 19 nt, Artificial Sequence
  Description of Artificial Sequence: Synthetic oligonucleotide
  Sense Strand Starting at position 655 of SEQ ID NO: 319075
gagccagcuugucccauau

SEQ ID NO: 370210 - RNA, 19 nt, Artificial Sequence
  Description of Artificial Sequence: Synthetic oligonucleotide
  Antisense Strand to SEQ ID NO: 370209
auaugggacaagcuggcuc

SEQ ID NO: 370211 - RNA, 19 nt, Artificial Sequence
  Description of Artificial Sequence: Synthetic oligonucleotide
  Sense Strand Starting at position 656 of SEQ ID NO: 315667
gggaauauauuccagauca

SEQ ID NO: 370212 - RNA, 19 nt, Artificial Sequence
  Description of Artificial Sequence: Synthetic oligonucleotide
  Antisense Strand to SEQ ID NO: 370211
ugaucuggaauauauuccc

SEQ ID NO: 370213 - RNA, 19 nt, Artificial Sequence
  Description of Artificial Sequence: Synthetic oligonucleotide
  Sense Strand Starting at position 656 of SEQ ID NO: 315677
uccagaucauguuugaaau

SEQ ID NO: 370214 - RNA, 19 nt, Artificial Sequence
  Description of Artificial Sequence: Synthetic oligonucleotide
  Antisense Strand to SEQ ID NO: 370213
auuucaaacaugaucugga

SEQ ID NO: 370215 - RNA, 19 nt, Artificial Sequence
  Description of Artificial Sequence: Synthetic oligonucleotide
  Sense Strand Starting at position 656 of SEQ ID NO: 315678
ccagaucauguuugaaauu

SEQ ID NO: 370216 - RNA, 19 nt, Artificial Sequence
  Description of Artificial Sequence: Synthetic oligonucleotide
  Antisense Strand to SEQ ID NO: 370215
aauuucaaacaugaucugg

SEQ ID NO: 370217 - RNA, 19 nt, Artificial Sequence
  Description of Artificial Sequence: Synthetic oligonucleotide
  Sense Strand Starting at position 656 of SEQ ID NO: 315703
gacacuaagguuuaagcau

SEQ ID NO: 370218 - RNA, 19 nt, Artificial Sequence
  Description of Artificial Sequence: Synthetic oligonucleotide
  Antisense Strand to SEQ ID NO: 370217
augcuuaaaccuuaguguc

SEQ ID NO: 370219 - RNA, 19 nt, Artificial Sequence
  Description of Artificial Sequence: Synthetic oligonucleotide
  Sense Strand Starting at position 656 of SEQ ID NO: 315710
agguuuaagcaucaaacca

SEQ ID NO: 370220 - RNA, 19 nt, Artificial Sequence
  Description of Artificial Sequence: Synthetic oligonucleotide
  Antisense Strand to SEQ ID NO: 370219
ugguuugaugcuuaaaccu

SEQ ID NO: 370221 - RNA, 19 nt, Artificial Sequence
  Description of Artificial Sequence: Synthetic oligonucleotide
  Sense Strand Starting at position 656 of SEQ ID NO: 315911
caaauaugucaagguguau

SEQ ID NO: 370222 - RNA, 19 nt, Artificial Sequence
  Description of Artificial Sequence: Synthetic oligonucleotide
  Antisense Strand to SEQ ID NO: 370221
auacaccuugacauauuug

SEQ ID NO: 370223 - RNA, 19 nt, Artificial Sequence
  Description of Artificial Sequence: Synthetic oligonucleotide
  Sense Strand Starting at position 656 of SEQ ID NO: 315915
uaugucaagguguauuaau

SEQ ID NO: 370224 - RNA, 19 nt, Artificial Sequence
  Description of Artificial Sequence: Synthetic oligonucleotide
  Antisense Strand to SEQ ID NO: 370223
auuaauacaccuugacaua

SEQ ID NO: 370225 - RNA, 19 nt, Artificial Sequence
  Description of Artificial Sequence: Synthetic oligonucleotide
  Sense Strand Starting at position 656 of SEQ ID NO: 315924
guguauuaauuacucagua

SEQ ID NO: 370226 - RNA, 19 nt, Artificial Sequence
  Description of Artificial Sequence: Synthetic oligonucleotide
  Antisense Strand to SEQ ID NO: 370225
uacugaguaauuaauacac

SEQ ID NO: 370227 - RNA, 19 nt, Artificial Sequence
  Description of Artificial Sequence: Synthetic oligonucleotide
  Sense Strand Starting at position 656 of SEQ ID NO: 315925
uguauuaauuacucaguac

SEQ ID NO: 370228 - RNA, 19 nt, Artificial Sequence
  Description of Artificial Sequence: Synthetic oligonucleotide
  Antisense Strand to SEQ ID NO: 370227
guacugaguaauuaauaca

SEQ ID NO: 370229 - RNA, 19 nt, Artificial Sequence
  Description of Artificial Sequence: Synthetic oligonucleotide
  Sense Strand Starting at position 656 of SEQ ID NO: 315966
augaauuggccucagccaa

SEQ ID NO: 370230 - RNA, 19 nt, Artificial Sequence
  Description of Artificial Sequence: Synthetic oligonucleotide
  Antisense Strand to SEQ ID NO: 370229
uuggcugaggccaauucau

SEQ ID NO: 370231 - RNA, 19 nt, Artificial Sequence
  Description of Artificial Sequence: Synthetic oligonucleotide
  Sense Strand Starting at position 656 of SEQ ID NO: 316013
ggaagucgcacccagaauu

SEQ ID NO: 370232 - RNA, 19 nt, Artificial Sequence
  Description of Artificial Sequence: Synthetic oligonucleotide
  Antisense Strand to SEQ ID NO: 370231
aauucugggugcgacuucc

SEQ ID NO: 370233 - RNA, 19 nt, Artificial Sequence
  Description of Artificial Sequence: Synthetic oligonucleotide
  Sense Strand Starting at position 656 of SEQ ID NO: 316065
caggguauuccacacuguu

SEQ ID NO: 370234 - RNA, 19 nt, Artificial Sequence
  Description of Artificial Sequence: Synthetic oligonucleotide
  Antisense Strand to SEQ ID NO: 370233
aacaguguggaauacccug

SEQ ID NO: 370235 - RNA, 19 nt, Artificial Sequence
  Description of Artificial Sequence: Synthetic oligonucleotide
  Sense Strand Starting at position 656 of SEQ ID NO: 316068
gguauuccacacuguugau

SEQ ID NO: 370236 - RNA, 19 nt, Artificial Sequence
  Description of Artificial Sequence: Synthetic oligonucleotide
  Antisense Strand to SEQ ID NO: 370235
aucaacaguguggaauacc

SEQ ID NO: 370237 - RNA, 19 nt, Artificial Sequence
  Description of Artificial Sequence: Synthetic oligonucleotide
  Sense Strand Starting at position 656 of SEQ ID NO: 316163
gggaaaguuuaccuuaccu

SEQ ID NO: 370238 - RNA, 19 nt, Artificial Sequence
  Description of Artificial Sequence: Synthetic oligonucleotide
  Antisense Strand to SEQ ID NO: 370237
agguaagguaaacuuuccc

SEQ ID NO: 370239 - RNA, 19 nt, Artificial Sequence
  Description of Artificial Sequence: Synthetic oligonucleotide
  Sense Strand Starting at position 656 of SEQ ID NO: 316304
cccaaaggguuguuauaga

SEQ ID NO: 370240 - RNA, 19 nt, Artificial Sequence
  Description of Artificial Sequence: Synthetic oligonucleotide
  Antisense Strand to SEQ ID NO: 370239
ucuauaacaacccuuuggg

SEQ ID NO: 370241 - RNA, 19 nt, Artificial Sequence
  Description of Artificial Sequence: Synthetic oligonucleotide
  Sense Strand Starting at position 656 of SEQ ID NO: 316821
accugaaaucaucguuacu

SEQ ID NO: 370242 - RNA, 19 nt, Artificial Sequence
  Description of Artificial Sequence: Synthetic oligonucleotide
  Antisense Strand to SEQ ID NO: 370241
aguaacgaugauuucaggu

SEQ ID NO: 370243 - RNA, 19 nt, Artificial Sequence
  Description of Artificial Sequence: Synthetic oligonucleotide
  Sense Strand Starting at position 656 of SEQ ID NO: 316824
ugaaaucaucguuacucca

SEQ ID NO: 370244 - RNA, 19 nt, Artificial Sequence
  Description of Artificial Sequence: Synthetic oligonucleotide
  Antisense Strand to SEQ ID NO: 370243
uggaguaacgaugauuuca

SEQ ID NO: 370245 - RNA, 19 nt, Artificial Sequence
  Description of Artificial Sequence: Synthetic oligonucleotide
  Sense Strand Starting at position 656 of SEQ ID NO: 317006
guuacugaugcccauacuu

SEQ ID NO: 370246 - RNA, 19 nt, Artificial Sequence
  Description of Artificial Sequence: Synthetic oligonucleotide
  Antisense Strand to SEQ ID NO: 370245
aaguaugggcaucaguaac

SEQ ID NO: 370247 - RNA, 19 nt, Artificial Sequence
  Description of Artificial Sequence: Synthetic oligonucleotide
  Sense Strand Starting at position 656 of SEQ ID NO: 317016
cccauacuuuaaguggaaa

SEQ ID NO: 370248 - RNA, 19 nt, Artificial Sequence
  Description of Artificial Sequence: Synthetic oligonucleotide
  Antisense Strand to SEQ ID NO: 370247
uuuccacuuaaaguauggg

SEQ ID NO: 370249 - RNA, 19 nt, Artificial Sequence
  Description of Artificial Sequence: Synthetic oligonucleotide
  Sense Strand Starting at position 656 of SEQ ID NO: 317250
aaggguguugcuuauguau

SEQ ID NO: 370250 - RNA, 19 nt, Artificial Sequence
  Description of Artificial Sequence: Synthetic oligonucleotide
  Antisense Strand to SEQ ID NO: 370249
auacauaagcaacacccuu

SEQ ID NO: 370251 - RNA, 19 nt, Artificial Sequence
  Description of Artificial Sequence: Synthetic oligonucleotide
  Sense Strand Starting at position 656 of SEQ ID NO: 317262
uauguaucucuagggucuu

SEQ ID NO: 370252 - RNA, 19 nt, Artificial Sequence
  Description of Artificial Sequence: Synthetic oligonucleotide
  Antisense Strand to SEQ ID NO: 370251
aagacccuagagauacaua

SEQ ID NO: 370253 - RNA, 19 nt, Artificial Sequence
  Description of Artificial Sequence: Synthetic oligonucleotide
  Sense Strand Starting at position 656 of SEQ ID NO: 317444
ucuccuaguucuccuggga

SEQ ID NO: 370254 - RNA, 19 nt, Artificial Sequence
  Description of Artificial Sequence: Synthetic oligonucleotide
  Antisense Strand to SEQ ID NO: 370253
ucccaggagaacuaggaga

SEQ ID NO: 370255 - RNA, 19 nt, Artificial Sequence
  Description of Artificial Sequence: Synthetic oligonucleotide
  Sense Strand Starting at position 656 of SEQ ID NO: 317493
agaggcaagucaguuagau

SEQ ID NO: 370256 - RNA, 19 nt, Artificial Sequence
  Description of Artificial Sequence: Synthetic oligonucleotide
  Antisense Strand to SEQ ID NO: 370255
aucuaacugacuugccucu

SEQ ID NO: 370257 - RNA, 19 nt, Artificial Sequence
  Description of Artificial Sequence: Synthetic oligonucleotide
  Sense Strand Starting at position 656 of SEQ ID NO: 317495
aggcaagucaguuagauac

SEQ ID NO: 370258 - RNA, 19 nt, Artificial Sequence
  Description of Artificial Sequence: Synthetic oligonucleotide
  Antisense Strand to SEQ ID NO: 370257
guaucuaacugacuugccu

SEQ ID NO: 370259 - RNA, 19 nt, Artificial Sequence
  Description of Artificial Sequence: Synthetic oligonucleotide
  Sense Strand Starting at position 656 of SEQ ID NO: 317687
cuugacauuucccaguaag

SEQ ID NO: 370260 - RNA, 19 nt, Artificial Sequence
  Description of Artificial Sequence: Synthetic oligonucleotide
  Antisense Strand to SEQ ID NO: 370259
cuuacugggaaaugucaag

SEQ ID NO: 370261 - RNA, 19 nt, Artificial Sequence
  Description of Artificial Sequence: Synthetic oligonucleotide
  Sense Strand Starting at position 656 of SEQ ID NO: 317712
uugauaucauuuggauaug

SEQ ID NO: 370262 - RNA, 19 nt, Artificial Sequence
  Description of Artificial Sequence: Synthetic oligonucleotide
  Antisense Strand to SEQ ID NO: 370261
cauauccaaaugauaucaa

SEQ ID NO: 370263 - RNA, 19 nt, Artificial Sequence
  Description of Artificial Sequence: Synthetic oligonucleotide
  Sense Strand Starting at position 656 of SEQ ID NO: 317713
ugauaucauuuggauaugu

SEQ ID NO: 370264 - RNA, 19 nt, Artificial Sequence
  Description of Artificial Sequence: Synthetic oligonucleotide
  Antisense Strand to SEQ ID NO: 370263
acauauccaaaugauauca

SEQ ID NO: 370265 - RNA, 19 nt, Artificial Sequence
  Description of Artificial Sequence: Synthetic oligonucleotide
  Sense Strand Starting at position 656 of SEQ ID NO: 318087
uaccgagccucagcuauuu

SEQ ID NO: 370266 - RNA, 19 nt, Artificial Sequence
  Description of Artificial Sequence: Synthetic oligonucleotide
  Antisense Strand to SEQ ID NO: 370265
aaauagcugaggcucggua

SEQ ID NO: 370267 - RNA, 19 nt, Artificial Sequence
  Description of Artificial Sequence: Synthetic oligonucleotide
  Sense Strand Starting at position 656 of SEQ ID NO: 318105
ucuuuauggcaaugcuaga

SEQ ID NO: 370268 - RNA, 19 nt, Artificial Sequence
  Description of Artificial Sequence: Synthetic oligonucleotide
  Antisense Strand to SEQ ID NO: 370267
ucuagcauugccauaaaga

SEQ ID NO: 370269 - RNA, 19 nt, Artificial Sequence
  Description of Artificial Sequence: Synthetic oligonucleotide
  Sense Strand Starting at position 656 of SEQ ID NO: 318185
augauuacacaguauguau

SEQ ID NO: 370270 - RNA, 19 nt, Artificial Sequence
  Description of Artificial Sequence: Synthetic oligonucleotide
  Antisense Strand to SEQ ID NO: 370269
auacauacuguguaaucau

SEQ ID NO: 370271 - RNA, 19 nt, Artificial Sequence
  Description of Artificial Sequence: Synthetic oligonucleotide
  Sense Strand Starting at position 656 of SEQ ID NO: 318222
caaggcaagggcuguuaua

SEQ ID NO: 370272 - RNA, 19 nt, Artificial Sequence
  Description of Artificial Sequence: Synthetic oligonucleotide
  Antisense Strand to SEQ ID NO: 370271
uauaacagcccuugccuug

SEQ ID NO: 370273 - RNA, 19 nt, Artificial Sequence
  Description of Artificial Sequence: Synthetic oligonucleotide
  Sense Strand Starting at position 656 of SEQ ID NO: 318524
ggcagagggacuugugcuu

SEQ ID NO: 370274 - RNA, 19 nt, Artificial Sequence
  Description of Artificial Sequence: Synthetic oligonucleotide
  Antisense Strand to SEQ ID NO: 370273
aagcacaagucccucugcc

SEQ ID NO: 370275 - RNA, 19 nt, Artificial Sequence
  Description of Artificial Sequence: Synthetic oligonucleotide
  Sense Strand Starting at position 656 of SEQ ID NO: 318529
agggacuugugcuugguca

SEQ ID NO: 370276 - RNA, 19 nt, Artificial Sequence
  Description of Artificial Sequence: Synthetic oligonucleotide
  Antisense Strand to SEQ ID NO: 370275
ugaccaagcacaagucccu

SEQ ID NO: 370277 - RNA, 19 nt, Artificial Sequence
  Description of Artificial Sequence: Synthetic oligonucleotide
  Sense Strand Starting at position 656 of SEQ ID NO: 318658
ggaguauaaucacuaucag

SEQ ID NO: 370278 - RNA, 19 nt, Artificial Sequence
  Description of Artificial Sequence: Synthetic oligonucleotide
  Antisense Strand to SEQ ID NO: 370277
cugauagugauuauacucc

SEQ ID NO: 370279 - RNA, 19 nt, Artificial Sequence
  Description of Artificial Sequence: Synthetic oligonucleotide
  Sense Strand Starting at position 656 of SEQ ID NO: 318779
uacugagaaauggguuguu

SEQ ID NO: 370280 - RNA, 19 nt, Artificial Sequence
  Description of Artificial Sequence: Synthetic oligonucleotide
  Antisense Strand to SEQ ID NO: 370279
aacaacccauuucucagua

SEQ ID NO: 370281 - RNA, 19 nt, Artificial Sequence
  Description of Artificial Sequence: Synthetic oligonucleotide
  Sense Strand Starting at position 656 of SEQ ID NO: 318814
accugugaacaaugcaauu

SEQ ID NO: 370282 - RNA, 19 nt, Artificial Sequence
  Description of Artificial Sequence: Synthetic oligonucleotide
  Antisense Strand to SEQ ID NO: 370281
aauugcauuguucacaggu

SEQ ID NO: 370283 - RNA, 19 nt, Artificial Sequence
  Description of Artificial Sequence: Synthetic oligonucleotide
  Sense Strand Starting at position 656 of SEQ ID NO: 318949
gcaucugacuucccagauu

SEQ ID NO: 370284 - RNA, 19 nt, Artificial Sequence
  Description of Artificial Sequence: Synthetic oligonucleotide
  Antisense Strand to SEQ ID NO: 370283
aaucugggaagucagaugc

SEQ ID NO: 370285 - RNA, 19 nt, Artificial Sequence
  Description of Artificial Sequence: Synthetic oligonucleotide
  Sense Strand Starting at position 656 of SEQ ID NO: 318985
ggaagagcucuccacccuu

SEQ ID NO: 370286 - RNA, 19 nt, Artificial Sequence
  Description of Artificial Sequence: Synthetic oligonucleotide
  Antisense Strand to SEQ ID NO: 370285
aaggguggagagcucuucc

SEQ ID NO: 370287 - RNA, 19 nt, Artificial Sequence
  Description of Artificial Sequence: Synthetic oligonucleotide
  Sense Strand Starting at position 656 of SEQ ID NO: 319051
aaaugaaaguggucuccau

SEQ ID NO: 370288 - RNA, 19 nt, Artificial Sequence
  Description of Artificial Sequence: Synthetic oligonucleotide
  Antisense Strand to SEQ ID NO: 370287
auggagaccacuuucauuu

SEQ ID NO: 370289 - RNA, 19 nt, Artificial Sequence
  Description of Artificial Sequence: Synthetic oligonucleotide
  Sense Strand Starting at position 656 of SEQ ID NO: 319147
cugugaaaugauugaaguu

SEQ ID NO: 370290 - RNA, 19 nt, Artificial Sequence
  Description of Artificial Sequence: Synthetic oligonucleotide
  Antisense Strand to SEQ ID NO: 370289
aacuucaaucauuucacag

SEQ ID NO: 370291 - RNA, 19 nt, Artificial Sequence
  Description of Artificial Sequence: Synthetic oligonucleotide
  Sense Strand Starting at position 657 of SEQ ID NO: 315588
ggagcuagaugcuuuguaa

SEQ ID NO: 370292 - RNA, 19 nt, Artificial Sequence
  Description of Artificial Sequence: Synthetic oligonucleotide
  Antisense Strand to SEQ ID NO: 370291
uuacaaagcaucuagcucc

SEQ ID NO: 370293 - RNA, 19 nt, Artificial Sequence
  Description of Artificial Sequence: Synthetic oligonucleotide
  Sense Strand Starting at position 657 of SEQ ID NO: 315591
gcuagaugcuuuguaaagg

SEQ ID NO: 370294 - RNA, 19 nt, Artificial Sequence
  Description of Artificial Sequence: Synthetic oligonucleotide
  Antisense Strand to SEQ ID NO: 370293
ccuuuacaaagcaucuagc

SEQ ID NO: 370295 - RNA, 19 nt, Artificial Sequence
  Description of Artificial Sequence: Synthetic oligonucleotide
  Sense Strand Starting at position 657 of SEQ ID NO: 315671
aagguaagccauuaaguca

SEQ ID NO: 370296 - RNA, 19 nt, Artificial Sequence
  Description of Artificial Sequence: Synthetic oligonucleotide
  Antisense Strand to SEQ ID NO: 370295
ugacuuaauggcuuaccuu

SEQ ID NO: 370297 - RNA, 19 nt, Artificial Sequence
  Description of Artificial Sequence: Synthetic oligonucleotide
  Sense Strand Starting at position 657 of SEQ ID NO: 315811
cagagaagacccugaguuc

SEQ ID NO: 370298 - RNA, 19 nt, Artificial Sequence
  Description of Artificial Sequence: Synthetic oligonucleotide
  Antisense Strand to SEQ ID NO: 370297
gaacucagggucuucucug

SEQ ID NO: 370299 - RNA, 19 nt, Artificial Sequence
  Description of Artificial Sequence: Synthetic oligonucleotide
  Sense Strand Starting at position 657 of SEQ ID NO: 315820
cccugaguucucgcuaguu

SEQ ID NO: 370300 - RNA, 19 nt, Artificial Sequence
  Description of Artificial Sequence: Synthetic oligonucleotide
  Antisense Strand to SEQ ID NO: 370299
aacuagcgagaacucaggg

SEQ ID NO: 370301 - RNA, 19 nt, Artificial Sequence
  Description of Artificial Sequence: Synthetic oligonucleotide
  Sense Strand Starting at position 657 of SEQ ID NO: 315824
gaguucucgcuaguuguuu

SEQ ID NO: 370302 - RNA, 19 nt, Artificial Sequence
  Description of Artificial Sequence: Synthetic oligonucleotide
  Antisense Strand to SEQ ID NO: 370301
aaacaacuagcgagaacuc

SEQ ID NO: 370303 - RNA, 19 nt, Artificial Sequence
  Description of Artificial Sequence: Synthetic oligonucleotide
  Sense Strand Starting at position 657 of SEQ ID NO: 315860
agcaguggaucccuucuaa

SEQ ID NO: 370304 - RNA, 19 nt, Artificial Sequence
  Description of Artificial Sequence: Synthetic oligonucleotide
  Antisense Strand to SEQ ID NO: 370303
uuagaagggauccacugcu

SEQ ID NO: 370305 - RNA, 19 nt, Artificial Sequence
  Description of Artificial Sequence: Synthetic oligonucleotide
  Sense Strand Starting at position 657 of SEQ ID NO: 315958
gcacaauuccacugauuag

SEQ ID NO: 370306 - RNA, 19 nt, Artificial Sequence
  Description of Artificial Sequence: Synthetic oligonucleotide
  Antisense Strand to SEQ ID NO: 370305
cuaaucaguggaauugugc

SEQ ID NO: 370307 - RNA, 19 nt, Artificial Sequence
  Description of Artificial Sequence: Synthetic oligonucleotide
  Sense Strand Starting at position 657 of SEQ ID NO: 316081
cacgguucccucgaagaga

SEQ ID NO: 370308 - RNA, 19 nt, Artificial Sequence
  Description of Artificial Sequence: Synthetic oligonucleotide
  Antisense Strand to SEQ ID NO: 370307
ucucuucgagggaaccgug

SEQ ID NO: 370309 - RNA, 19 nt, Artificial Sequence
  Description of Artificial Sequence: Synthetic oligonucleotide
  Sense Strand Starting at position 657 of SEQ ID NO: 316095
agagaugucuuccuccaag

SEQ ID NO: 370310 - RNA, 19 nt, Artificial Sequence
  Description of Artificial Sequence: Synthetic oligonucleotide
  Antisense Strand to SEQ ID NO: 370309
cuuggaggaagacaucucu

SEQ ID NO: 370311 - RNA, 19 nt, Artificial Sequence
  Description of Artificial Sequence: Synthetic oligonucleotide
  Sense Strand Starting at position 657 of SEQ ID NO: 316357
gugcuagagaaaugcuuag

SEQ ID NO: 370312 - RNA, 19 nt, Artificial Sequence
  Description of Artificial Sequence: Synthetic oligonucleotide
  Antisense Strand to SEQ ID NO: 370311
cuaagcauuucucuagcac

SEQ ID NO: 370313 - RNA, 19 nt, Artificial Sequence
  Description of Artificial Sequence: Synthetic oligonucleotide
  Sense Strand Starting at position 657 of SEQ ID NO: 316363
gagaaaugcuuagagaaag

SEQ ID NO: 370314 - RNA, 19 nt, Artificial Sequence
  Description of Artificial Sequence: Synthetic oligonucleotide
  Antisense Strand to SEQ ID NO: 370313
cuuucucuaagcauuucuc

SEQ ID NO: 370315 - RNA, 19 nt, Artificial Sequence
  Description of Artificial Sequence: Synthetic oligonucleotide
  Sense Strand Starting at position 657 of SEQ ID NO: 316415
uggucuggccucuaguaaa

SEQ ID NO: 370316 - RNA, 19 nt, Artificial Sequence
  Description of Artificial Sequence: Synthetic oligonucleotide
  Antisense Strand to SEQ ID NO: 370315
uuuacuagaggccagacca

SEQ ID NO: 370317 - RNA, 19 nt, Artificial Sequence
  Description of Artificial Sequence: Synthetic oligonucleotide
  Sense Strand Starting at position 657 of SEQ ID NO: 316515
gcccuuuccgcugugacaa

SEQ ID NO: 370318 - RNA, 19 nt, Artificial Sequence
  Description of Artificial Sequence: Synthetic oligonucleotide
  Antisense Strand to SEQ ID NO: 370317
uugucacagcggaaagggc

SEQ ID NO: 370319 - RNA, 19 nt, Artificial Sequence
  Description of Artificial Sequence: Synthetic oligonucleotide
  Sense Strand Starting at position 657 of SEQ ID NO: 316532
aacugugauuccgcgaaag

SEQ ID NO: 370320 - RNA, 19 nt, Artificial Sequence
  Description of Artificial Sequence: Synthetic oligonucleotide
  Antisense Strand to SEQ ID NO: 370319
cuuucgcggaaucacaguu

SEQ ID NO: 370321 - RNA, 19 nt, Artificial Sequence
  Description of Artificial Sequence: Synthetic oligonucleotide
  Sense Strand Starting at position 657 of SEQ ID NO: 317304
gccugaauuccugacuuug

SEQ ID NO: 370322 - RNA, 19 nt, Artificial Sequence
  Description of Artificial Sequence: Synthetic oligonucleotide
  Antisense Strand to SEQ ID NO: 370321
caaagucaggaauucaggc

SEQ ID NO: 370323 - RNA, 19 nt, Artificial Sequence
  Description of Artificial Sequence: Synthetic oligonucleotide
  Sense Strand Starting at position 657 of SEQ ID NO: 317326
gcacgcauuuguccaugua

SEQ ID NO: 370324 - RNA, 19 nt, Artificial Sequence
  Description of Artificial Sequence: Synthetic oligonucleotide
  Antisense Strand to SEQ ID NO: 370323
uacauggacaaaugcgugc

SEQ ID NO: 370325 - RNA, 19 nt, Artificial Sequence
  Description of Artificial Sequence: Synthetic oligonucleotide
  Sense Strand Starting at position 657 of SEQ ID NO: 317327
cacgcauuuguccauguaa

SEQ ID NO: 370326 - RNA, 19 nt, Artificial Sequence
  Description of Artificial Sequence: Synthetic oligonucleotide
  Antisense Strand to SEQ ID NO: 370325
uuacauggacaaaugcgug

SEQ ID NO: 370327 - RNA, 19 nt, Artificial Sequence
  Description of Artificial Sequence: Synthetic oligonucleotide
  Sense Strand Starting at position 657 of SEQ ID NO: 317329
cgcauuuguccauguaagg

SEQ ID NO: 370328 - RNA, 19 nt, Artificial Sequence
  Description of Artificial Sequence: Synthetic oligonucleotide
  Antisense Strand to SEQ ID NO: 370327
ccuuacauggacaaaugcg

SEQ ID NO: 370329 - RNA, 19 nt, Artificial Sequence
  Description of Artificial Sequence: Synthetic oligonucleotide
  Sense Strand Starting at position 657 of SEQ ID NO: 317457
ugcauuuccugggaggaag

SEQ ID NO: 370330 - RNA, 19 nt, Artificial Sequence
  Description of Artificial Sequence: Synthetic oligonucleotide
  Antisense Strand to SEQ ID NO: 370329
cuuccucccaggaaaugca

SEQ ID NO: 370331 - RNA, 19 nt, Artificial Sequence
  Description of Artificial Sequence: Synthetic oligonucleotide
  Sense Strand Starting at position 657 of SEQ ID NO: 317613
aaagccugcgucuacuauu

SEQ ID NO: 370332 - RNA, 19 nt, Artificial Sequence
  Description of Artificial Sequence: Synthetic oligonucleotide
  Antisense Strand to SEQ ID NO: 370331
aauaguagacgcaggcuuu

SEQ ID NO: 370333 - RNA, 19 nt, Artificial Sequence
  Description of Artificial Sequence: Synthetic oligonucleotide
  Sense Strand Starting at position 657 of SEQ ID NO: 317627
cuauuaaggcgucaaauua

SEQ ID NO: 370334 - RNA, 19 nt, Artificial Sequence
  Description of Artificial Sequence: Synthetic oligonucleotide
  Antisense Strand to SEQ ID NO: 370333
uaauuugacgccuuaauag

SEQ ID NO: 370335 - RNA, 19 nt, Artificial Sequence
  Description of Artificial Sequence: Synthetic oligonucleotide
  Sense Strand Starting at position 657 of SEQ ID NO: 317717
cuggauucccagcaagacu

SEQ ID NO: 370336 - RNA, 19 nt, Artificial Sequence
  Description of Artificial Sequence: Synthetic oligonucleotide
  Antisense Strand to SEQ ID NO: 370335
agucuugcugggaauccag

SEQ ID NO: 370337 - RNA, 19 nt, Artificial Sequence
  Description of Artificial Sequence: Synthetic oligonucleotide
  Sense Strand Starting at position 657 of SEQ ID NO: 317747
aggugucagagcuggcaaa

SEQ ID NO: 370338 - RNA, 19 nt, Artificial Sequence
  Description of Artificial Sequence: Synthetic oligonucleotide
  Antisense Strand to SEQ ID NO: 370337
uuugccagcucugacaccu

SEQ ID NO: 370339 - RNA, 19 nt, Artificial Sequence
  Description of Artificial Sequence: Synthetic oligonucleotide
  Sense Strand Starting at position 657 of SEQ ID NO: 318028
gacagcgagcccugaauau

SEQ ID NO: 370340 - RNA, 19 nt, Artificial Sequence
  Description of Artificial Sequence: Synthetic oligonucleotide
  Antisense Strand to SEQ ID NO: 370339
auauucagggcucgcuguc

SEQ ID NO: 370341 - RNA, 19 nt, Artificial Sequence
  Description of Artificial Sequence: Synthetic oligonucleotide
  Sense Strand Starting at position 657 of SEQ ID NO: 318032
gcgagcccugaauaucaau

SEQ ID NO: 370342 - RNA, 19 nt, Artificial Sequence
  Description of Artificial Sequence: Synthetic oligonucleotide
  Antisense Strand to SEQ ID NO: 370341
auugauauucagggcucgc

SEQ ID NO: 370343 - RNA, 19 nt, Artificial Sequence
  Description of Artificial Sequence: Synthetic oligonucleotide
  Sense Strand Starting at position 657 of SEQ ID NO: 318080
cuguccugugcucaaauaa

SEQ ID NO: 370344 - RNA, 19 nt, Artificial Sequence
  Description of Artificial Sequence: Synthetic oligonucleotide
  Antisense Strand to SEQ ID NO: 370343
uuauuugagcacaggacag

SEQ ID NO: 370345 - RNA, 19 nt, Artificial Sequence
  Description of Artificial Sequence: Synthetic oligonucleotide
  Sense Strand Starting at position 657 of SEQ ID NO: 318095
auaaaugaaucccuggagu

SEQ ID NO: 370346 - RNA, 19 nt, Artificial Sequence
  Description of Artificial Sequence: Synthetic oligonucleotide
  Antisense Strand to SEQ ID NO: 370345
acuccagggauucauuuau

SEQ ID NO: 370347 - RNA, 19 nt, Artificial Sequence
  Description of Artificial Sequence: Synthetic oligonucleotide
  Sense Strand Starting at position 657 of SEQ ID NO: 318097
aaaugaaucccuggaguuu

SEQ ID NO: 370348 - RNA, 19 nt, Artificial Sequence
  Description of Artificial Sequence: Synthetic oligonucleotide
  Antisense Strand to SEQ ID NO: 370347
aaacuccagggauucauuu

SEQ ID NO: 370349 - RNA, 19 nt, Artificial Sequence
  Description of Artificial Sequence: Synthetic oligonucleotide
  Sense Strand Starting at position 657 of SEQ ID NO: 318110
gaguuuaacguuuacuucu

SEQ ID NO: 370350 - RNA, 19 nt, Artificial Sequence
  Description of Artificial Sequence: Synthetic oligonucleotide
  Antisense Strand to SEQ ID NO: 370349
agaaguaaacguuaaacuc

SEQ ID NO: 370351 - RNA, 19 nt, Artificial Sequence
  Description of Artificial Sequence: Synthetic oligonucleotide
  Sense Strand Starting at position 657 of SEQ ID NO: 318182
acgagaugaacugguuuga

SEQ ID NO: 370352 - RNA, 19 nt, Artificial Sequence
  Description of Artificial Sequence: Synthetic oligonucleotide
  Antisense Strand to SEQ ID NO: 370351
ucaaaccaguucaucucgu

SEQ ID NO: 370353 - RNA, 19 nt, Artificial Sequence
  Description of Artificial Sequence: Synthetic oligonucleotide
  Sense Strand Starting at position 657 of SEQ ID NO: 318186
gaugaacugguuugaauac

SEQ ID NO: 370354 - RNA, 19 nt, Artificial Sequence
  Description of Artificial Sequence: Synthetic oligonucleotide
  Antisense Strand to SEQ ID NO: 370353
guauucaaaccaguucauc

SEQ ID NO: 370355 - RNA, 19 nt, Artificial Sequence
  Description of Artificial Sequence: Synthetic oligonucleotide
  Sense Strand Starting at position 657 of SEQ ID NO: 318208
caagccugucauuggaagu

SEQ ID NO: 370356 - RNA, 19 nt, Artificial Sequence
  Description of Artificial Sequence: Synthetic oligonucleotide
  Antisense Strand to SEQ ID NO: 370355
acuuccaaugacaggcuug

SEQ ID NO: 370357 - RNA, 19 nt, Artificial Sequence
  Description of Artificial Sequence: Synthetic oligonucleotide
  Sense Strand Starting at position 657 of SEQ ID NO: 318250
cucugacaucuguaagggu

SEQ ID NO: 370358 - RNA, 19 nt, Artificial Sequence
  Description of Artificial Sequence: Synthetic oligonucleotide
  Antisense Strand to SEQ ID NO: 370357
acccuuacagaugucagag

SEQ ID NO: 370359 - RNA, 19 nt, Artificial Sequence
  Description of Artificial Sequence: Synthetic oligonucleotide
  Sense Strand Starting at position 657 of SEQ ID NO: 318454
gugaguuagauaggacaga

SEQ ID NO: 370360 - RNA, 19 nt, Artificial Sequence
  Description of Artificial Sequence: Synthetic oligonucleotide
  Antisense Strand to SEQ ID NO: 370359
ucuguccuaucuaacucac

SEQ ID NO: 370361 - RNA, 19 nt, Artificial Sequence
  Description of Artificial Sequence: Synthetic oligonucleotide
  Sense Strand Starting at position 657 of SEQ ID NO: 318511
aaacguuacucgcccaaca

SEQ ID NO: 370362 - RNA, 19 nt, Artificial Sequence
  Description of Artificial Sequence: Synthetic oligonucleotide
  Antisense Strand to SEQ ID NO: 370361
uguugggcgaguaacguuu

SEQ ID NO: 370363 - RNA, 19 nt, Artificial Sequence
  Description of Artificial Sequence: Synthetic oligonucleotide
  Sense Strand Starting at position 657 of SEQ ID NO: 318654
gagaguacaccaugagcua

SEQ ID NO: 370364 - RNA, 19 nt, Artificial Sequence
  Description of Artificial Sequence: Synthetic oligonucleotide
  Antisense Strand to SEQ ID NO: 370363
uagcucaugguguacucuc

SEQ ID NO: 370365 - RNA, 19 nt, Artificial Sequence
  Description of Artificial Sequence: Synthetic oligonucleotide
  Sense Strand Starting at position 657 of SEQ ID NO: 318789
cuuccuugugcuuaauaag

SEQ ID NO: 370366 - RNA, 19 nt, Artificial Sequence
  Description of Artificial Sequence: Synthetic oligonucleotide
  Antisense Strand to SEQ ID NO: 370365
cuuauuaagcacaaggaag

SEQ ID NO: 370367 - RNA, 19 nt, Artificial Sequence
  Description of Artificial Sequence: Synthetic oligonucleotide
  Sense Strand Starting at position 657 of SEQ ID NO: 318830
ggguaagacuacuuaaccu

SEQ ID NO: 370368 - RNA, 19 nt, Artificial Sequence
  Description of Artificial Sequence: Synthetic oligonucleotide
  Antisense Strand to SEQ ID NO: 370367
agguuaaguagucuuaccc

SEQ ID NO: 370369 - RNA, 19 nt, Artificial Sequence
  Description of Artificial Sequence: Synthetic oligonucleotide
  Sense Strand Starting at position 657 of SEQ ID NO: 318845
accucuguguuccucucaa

SEQ ID NO: 370370 - RNA, 19 nt, Artificial Sequence
  Description of Artificial Sequence: Synthetic oligonucleotide
  Antisense Strand to SEQ ID NO: 370369
uugagaggaacacagaggu

SEQ ID NO: 370371 - RNA, 19 nt, Artificial Sequence
  Description of Artificial Sequence: Synthetic oligonucleotide
  Sense Strand Starting at position 658 of SEQ ID NO: 315245
gcuauagugccacaauaau

SEQ ID NO: 370372 - RNA, 19 nt, Artificial Sequence
  Description of Artificial Sequence: Synthetic oligonucleotide
  Antisense Strand to SEQ ID NO: 370371
auuauuguggcacuauagc

SEQ ID NO: 370373 - RNA, 19 nt, Artificial Sequence
  Description of Artificial Sequence: Synthetic oligonucleotide
  Sense Strand Starting at position 658 of SEQ ID NO: 315312
gcuugucagcuguccuuau

SEQ ID NO: 370374 - RNA, 19 nt, Artificial Sequence
  Description of Artificial Sequence: Synthetic oligonucleotide
  Antisense Strand to SEQ ID NO: 370373
auaaggacagcugacaagc

SEQ ID NO: 370375 - RNA, 19 nt, Artificial Sequence
  Description of Artificial Sequence: Synthetic oligonucleotide
  Sense Strand Starting at position 658 of SEQ ID NO: 315649
accuaaugccacugguaau

SEQ ID NO: 370376 - RNA, 19 nt, Artificial Sequence
  Description of Artificial Sequence: Synthetic oligonucleotide
  Antisense Strand to SEQ ID NO: 370375
auuaccaguggcauuaggu

SEQ ID NO: 370377 - RNA, 19 nt, Artificial Sequence
  Description of Artificial Sequence: Synthetic oligonucleotide
  Sense Strand Starting at position 658 of SEQ ID NO: 316078
agaguuacuccugauggcu

SEQ ID NO: 370378 - RNA, 19 nt, Artificial Sequence
  Description of Artificial Sequence: Synthetic oligonucleotide
  Antisense Strand to SEQ ID NO: 370377
agccaucaggaguaacucu

SEQ ID NO: 370379 - RNA, 19 nt, Artificial Sequence
  Description of Artificial Sequence: Synthetic oligonucleotide
  Sense Strand Starting at position 658 of SEQ ID NO: 316084
acuccugauggcugugaaa

SEQ ID NO: 370380 - RNA, 19 nt, Artificial Sequence
  Description of Artificial Sequence: Synthetic oligonucleotide
  Antisense Strand to SEQ ID NO: 370379
uuucacagccaucaggagu

SEQ ID NO: 370381 - RNA, 19 nt, Artificial Sequence
  Description of Artificial Sequence: Synthetic oligonucleotide
  Sense Strand Starting at position 658 of SEQ ID NO: 316086
uccugauggcugugaaaca

SEQ ID NO: 370382 - RNA, 19 nt, Artificial Sequence
  Description of Artificial Sequence: Synthetic oligonucleotide
  Antisense Strand to SEQ ID NO: 370381
uguuucacagccaucagga

SEQ ID NO: 370383 - RNA, 19 nt, Artificial Sequence
  Description of Artificial Sequence: Synthetic oligonucleotide
  Sense Strand Starting at position 658 of SEQ ID NO: 316095
cugugaaacaucugaggug

SEQ ID NO: 370384 - RNA, 19 nt, Artificial Sequence
  Description of Artificial Sequence: Synthetic oligonucleotide
  Antisense Strand to SEQ ID NO: 370383
caccucagauguuucacag

SEQ ID NO: 370385 - RNA, 19 nt, Artificial Sequence
  Description of Artificial Sequence: Synthetic oligonucleotide
  Sense Strand Starting at position 658 of SEQ ID NO: 316100
aaacaucugaggugacgua

SEQ ID NO: 370386 - RNA, 19 nt, Artificial Sequence
  Description of Artificial Sequence: Synthetic oligonucleotide
  Antisense Strand to SEQ ID NO: 370385
uacgucaccucagauguuu

SEQ ID NO: 370387 - RNA, 19 nt, Artificial Sequence
  Description of Artificial Sequence: Synthetic oligonucleotide
  Sense Strand Starting at position 658 of SEQ ID NO: 316234
accuuugaaugggcauaau

SEQ ID NO: 370388 - RNA, 19 nt, Artificial Sequence
  Description of Artificial Sequence: Synthetic oligonucleotide
  Antisense Strand to SEQ ID NO: 370387
auuaugcccauucaaaggu

SEQ ID NO: 370389 - RNA, 19 nt, Artificial Sequence
  Description of Artificial Sequence: Synthetic oligonucleotide
  Sense Strand Starting at position 658 of SEQ ID NO: 316310
cugaauuucucucagggaa

SEQ ID NO: 370390 - RNA, 19 nt, Artificial Sequence
  Description of Artificial Sequence: Synthetic oligonucleotide
  Antisense Strand to SEQ ID NO: 370389
uucccugagagaaauucag

SEQ ID NO: 370391 - RNA, 19 nt, Artificial Sequence
  Description of Artificial Sequence: Synthetic oligonucleotide
  Sense Strand Starting at position 658 of SEQ ID NO: 316556
ggcaucugagcccauauau

SEQ ID NO: 370392 - RNA, 19 nt, Artificial Sequence
  Description of Artificial Sequence: Synthetic oligonucleotide
  Antisense Strand to SEQ ID NO: 370391
auauaugggcucagaugcc

SEQ ID NO: 370393 - RNA, 19 nt, Artificial Sequence
  Description of Artificial Sequence: Synthetic oligonucleotide
  Sense Strand Starting at position 658 of SEQ ID NO: 316580
cgggaagaggucugaacua

SEQ ID NO: 370394 - RNA, 19 nt, Artificial Sequence
  Description of Artificial Sequence: Synthetic oligonucleotide
  Antisense Strand to SEQ ID NO: 370393
uaguucagaccucuucccg

SEQ ID NO: 370395 - RNA, 19 nt, Artificial Sequence
  Description of Artificial Sequence: Synthetic oligonucleotide
  Sense Strand Starting at position 658 of SEQ ID NO: 316631
cuagauuaguaagugugga

SEQ ID NO: 370396 - RNA, 19 nt, Artificial Sequence
  Description of Artificial Sequence: Synthetic oligonucleotide
  Antisense Strand to SEQ ID NO: 370395
uccacacuuacuaaucuag

SEQ ID NO: 370397 - RNA, 19 nt, Artificial Sequence
  Description of Artificial Sequence: Synthetic oligonucleotide
  Sense Strand Starting at position 658 of SEQ ID NO: 316814
auuagacagaugugcugaa

SEQ ID NO: 370398 - RNA, 19 nt, Artificial Sequence
  Description of Artificial Sequence: Synthetic oligonucleotide
  Antisense Strand to SEQ ID NO: 370397
uucagcacaucugucuaau

SEQ ID NO: 370399 - RNA, 19 nt, Artificial Sequence
  Description of Artificial Sequence: Synthetic oligonucleotide
  Sense Strand Starting at position 658 of SEQ ID NO: 316815
uuagacagaugugcugaaa

SEQ ID NO: 370400 - RNA, 19 nt, Artificial Sequence
  Description of Artificial Sequence: Synthetic oligonucleotide
  Antisense Strand to SEQ ID NO: 370399
uuucagcacaucugucuaa

SEQ ID NO: 370401 - RNA, 19 nt, Artificial Sequence
  Description of Artificial Sequence: Synthetic oligonucleotide
  Sense Strand Starting at position 658 of SEQ ID NO: 316917
gugcaaaugcuacacauca

SEQ ID NO: 370402 - RNA, 19 nt, Artificial Sequence
  Description of Artificial Sequence: Synthetic oligonucleotide
  Antisense Strand to SEQ ID NO: 370401
ugauguguagcauuugcac

SEQ ID NO: 370403 - RNA, 19 nt, Artificial Sequence
  Description of Artificial Sequence: Synthetic oligonucleotide
  Sense Strand Starting at position 658 of SEQ ID NO: 317090
caaguuaggccucagauga

SEQ ID NO: 370404 - RNA, 19 nt, Artificial Sequence
  Description of Artificial Sequence: Synthetic oligonucleotide
  Antisense Strand to SEQ ID NO: 370403
ucaucugaggccuaacuug

SEQ ID NO: 370405 - RNA, 19 nt, Artificial Sequence
  Description of Artificial Sequence: Synthetic oligonucleotide
  Sense Strand Starting at position 658 of SEQ ID NO: 317298
ccaggucugugagcagaaa

SEQ ID NO: 370406 - RNA, 19 nt, Artificial Sequence
  Description of Artificial Sequence: Synthetic oligonucleotide
  Antisense Strand to SEQ ID NO: 370405
uuucugcucacagaccugg

SEQ ID NO: 370407 - RNA, 19 nt, Artificial Sequence
  Description of Artificial Sequence: Synthetic oligonucleotide
  Sense Strand Starting at position 658 of SEQ ID NO: 317299
caggucugugagcagaaau

SEQ ID NO: 370408 - RNA, 19 nt, Artificial Sequence
  Description of Artificial Sequence: Synthetic oligonucleotide
  Antisense Strand to SEQ ID NO: 370407
auuucugcucacagaccug

SEQ ID NO: 370409 - RNA, 19 nt, Artificial Sequence
  Description of Artificial Sequence: Synthetic oligonucleotide
  Sense Strand Starting at position 658 of SEQ ID NO: 317530
ggacgacuuuguuucugga

SEQ ID NO: 370410 - RNA, 19 nt, Artificial Sequence
  Description of Artificial Sequence: Synthetic oligonucleotide
  Antisense Strand to SEQ ID NO: 370409
uccagaaacaaagucgucc

SEQ ID NO: 370411 - RNA, 19 nt, Artificial Sequence
  Description of Artificial Sequence: Synthetic oligonucleotide
  Sense Strand Starting at position 658 of SEQ ID NO: 317532
acgacuuuguuucuggaaa

SEQ ID NO: 370412 - RNA, 19 nt, Artificial Sequence
  Description of Artificial Sequence: Synthetic oligonucleotide
  Antisense Strand to SEQ ID NO: 370411
uuuccagaaacaaagucgu

SEQ ID NO: 370413 - RNA, 19 nt, Artificial Sequence
  Description of Artificial Sequence: Synthetic oligonucleotide
  Sense Strand Starting at position 658 of SEQ ID NO: 317610
cagccugguggguaaacau

SEQ ID NO: 370414 - RNA, 19 nt, Artificial Sequence
  Description of Artificial Sequence: Synthetic oligonucleotide
  Antisense Strand to SEQ ID NO: 370413
auguuuacccaccaggcug

SEQ ID NO: 370415 - RNA, 19 nt, Artificial Sequence
  Description of Artificial Sequence: Synthetic oligonucleotide
  Sense Strand Starting at position 658 of SEQ ID NO: 317719
agaauuccuuacucggagu

SEQ ID NO: 370416 - RNA, 19 nt, Artificial Sequence
  Description of Artificial Sequence: Synthetic oligonucleotide
  Antisense Strand to SEQ ID NO: 370415
acuccgaguaaggaauucu

SEQ ID NO: 370417 - RNA, 19 nt, Artificial Sequence
  Description of Artificial Sequence: Synthetic oligonucleotide
  Sense Strand Starting at position 658 of SEQ ID NO: 317721
aauuccuuacucggaguaa

SEQ ID NO: 370418 - RNA, 19 nt, Artificial Sequence
  Description of Artificial Sequence: Synthetic oligonucleotide
  Antisense Strand to SEQ ID NO: 370417
uuacuccgaguaaggaauu

SEQ ID NO: 370419 - RNA, 19 nt, Artificial Sequence
  Description of Artificial Sequence: Synthetic oligonucleotide
  Sense Strand Starting at position 658 of SEQ ID NO: 317725
ccuuacucggaguaaauua

SEQ ID NO: 370420 - RNA, 19 nt, Artificial Sequence
  Description of Artificial Sequence: Synthetic oligonucleotide
  Antisense Strand to SEQ ID NO: 370419
uaauuuacuccgaguaagg

SEQ ID NO: 370421 - RNA, 19 nt, Artificial Sequence
  Description of Artificial Sequence: Synthetic oligonucleotide
  Sense Strand Starting at position 658 of SEQ ID NO: 317736
guaaauuauuaaccgcuaa

SEQ ID NO: 370422 - RNA, 19 nt, Artificial Sequence
  Description of Artificial Sequence: Synthetic oligonucleotide
  Antisense Strand to SEQ ID NO: 370421
uuagcgguuaauaauuuac

SEQ ID NO: 370423 - RNA, 19 nt, Artificial Sequence
  Description of Artificial Sequence: Synthetic oligonucleotide
  Sense Strand Starting at position 658 of SEQ ID NO: 317823
ggaagugacuggucugaaa

SEQ ID NO: 370424 - RNA, 19 nt, Artificial Sequence
  Description of Artificial Sequence: Synthetic oligonucleotide
  Antisense Strand to SEQ ID NO: 370423
uuucagaccagucacuucc

SEQ ID NO: 370425 - RNA, 19 nt, Artificial Sequence
  Description of Artificial Sequence: Synthetic oligonucleotide
  Sense Strand Starting at position 658 of SEQ ID NO: 317830
acuggucugaaaggcuuua

SEQ ID NO: 370426 - RNA, 19 nt, Artificial Sequence
  Description of Artificial Sequence: Synthetic oligonucleotide
  Antisense Strand to SEQ ID NO: 370425
uaaagccuuucagaccagu

SEQ ID NO: 370427 - RNA, 19 nt, Artificial Sequence
  Description of Artificial Sequence: Synthetic oligonucleotide
  Sense Strand Starting at position 658 of SEQ ID NO: 317841
aggcuuuaagcucaucuua

SEQ ID NO: 370428 - RNA, 19 nt, Artificial Sequence
  Description of Artificial Sequence: Synthetic oligonucleotide
  Antisense Strand to SEQ ID NO: 370427
uaagaugagcuuaaagccu

SEQ ID NO: 370429 - RNA, 19 nt, Artificial Sequence
  Description of Artificial Sequence: Synthetic oligonucleotide
  Sense Strand Starting at position 658 of SEQ ID NO: 318395
uccuccugagaauguaauu

SEQ ID NO: 370430 - RNA, 19 nt, Artificial Sequence
  Description of Artificial Sequence: Synthetic oligonucleotide
  Antisense Strand to SEQ ID NO: 370429
aauuacauucucaggagga

SEQ ID NO: 370431 - RNA, 19 nt, Artificial Sequence
  Description of Artificial Sequence: Synthetic oligonucleotide
  Sense Strand Starting at position 658 of SEQ ID NO: 318447
cuggaagacucagaauaaa

SEQ ID NO: 370432 - RNA, 19 nt, Artificial Sequence
  Description of Artificial Sequence: Synthetic oligonucleotide
  Antisense Strand to SEQ ID NO: 370431
uuuauucugagucuuccag

SEQ ID NO: 370433 - RNA, 19 nt, Artificial Sequence
  Description of Artificial Sequence: Synthetic oligonucleotide
  Sense Strand Starting at position 658 of SEQ ID NO: 318480
agaacacuguugucaggaa

SEQ ID NO: 370434 - RNA, 19 nt, Artificial Sequence
  Description of Artificial Sequence: Synthetic oligonucleotide
  Antisense Strand to SEQ ID NO: 370433
uuccugacaacaguguucu

SEQ ID NO: 370435 - RNA, 19 nt, Artificial Sequence
  Description of Artificial Sequence: Synthetic oligonucleotide
  Sense Strand Starting at position 658 of SEQ ID NO: 318505
gggugaauugcucaguuua

SEQ ID NO: 370436 - RNA, 19 nt, Artificial Sequence
  Description of Artificial Sequence: Synthetic oligonucleotide
  Antisense Strand to SEQ ID NO: 370435
uaaacugagcaauucaccc

SEQ ID NO: 370437 - RNA, 19 nt, Artificial Sequence
  Description of Artificial Sequence: Synthetic oligonucleotide
  Sense Strand Starting at position 658 of SEQ ID NO: 318544
cccuaagguucugugauga

SEQ ID NO: 370438 - RNA, 19 nt, Artificial Sequence
  Description of Artificial Sequence: Synthetic oligonucleotide
  Antisense Strand to SEQ ID NO: 370437
ucaucacagaaccuuaggg

SEQ ID NO: 370439 - RNA, 19 nt, Artificial Sequence
  Description of Artificial Sequence: Synthetic oligonucleotide
  Sense Strand Starting at position 658 of SEQ ID NO: 318661
auggugugucgggauauag

SEQ ID NO: 370440 - RNA, 19 nt, Artificial Sequence
  Description of Artificial Sequence: Synthetic oligonucleotide
  Antisense Strand to SEQ ID NO: 370439
cuauaucccgacacaccau

SEQ ID NO: 370441 - RNA, 19 nt, Artificial Sequence
  Description of Artificial Sequence: Synthetic oligonucleotide
  Sense Strand Starting at position 658 of SEQ ID NO: 318663
ggugugucgggauauagga

SEQ ID NO: 370442 - RNA, 19 nt, Artificial Sequence
  Description of Artificial Sequence: Synthetic oligonucleotide
  Antisense Strand to SEQ ID NO: 370441
uccuauaucccgacacacc

SEQ ID NO: 370443 - RNA, 19 nt, Artificial Sequence
  Description of Artificial Sequence: Synthetic oligonucleotide
  Sense Strand Starting at position 658 of SEQ ID NO: 318957
gagucagugcuccuugugu

SEQ ID NO: 370444 - RNA, 19 nt, Artificial Sequence
  Description of Artificial Sequence: Synthetic oligonucleotide
  Antisense Strand to SEQ ID NO: 370443
acacaaggagcacugacuc

SEQ ID NO: 370445 - RNA, 19 nt, Artificial Sequence
  Description of Artificial Sequence: Synthetic oligonucleotide
  Sense Strand Starting at position 658 of SEQ ID NO: 318993
uuuacaaauuaggcagaua

SEQ ID NO: 370446 - RNA, 19 nt, Artificial Sequence
  Description of Artificial Sequence: Synthetic oligonucleotide
  Antisense Strand to SEQ ID NO: 370445
uaucugccuaauuuguaaa

SEQ ID NO: 370447 - RNA, 19 nt, Artificial Sequence
  Description of Artificial Sequence: Synthetic oligonucleotide
  Sense Strand Starting at position 658 of SEQ ID NO: 319056
ggucuauccaaagggucau

SEQ ID NO: 370448 - RNA, 19 nt, Artificial Sequence
  Description of Artificial Sequence: Synthetic oligonucleotide
  Antisense Strand to SEQ ID NO: 370447
augacccuuuggauagacc

SEQ ID NO: 370449 - RNA, 19 nt, Artificial Sequence
  Description of Artificial Sequence: Synthetic oligonucleotide
  Sense Strand Starting at position 658 of SEQ ID NO: 319062
uccaaagggucauuacaca

SEQ ID NO: 370450 - RNA, 19 nt, Artificial Sequence
  Description of Artificial Sequence: Synthetic oligonucleotide
  Antisense Strand to SEQ ID NO: 370449
uguguaaugacccuuugga

SEQ ID NO: 370451 - RNA, 19 nt, Artificial Sequence
  Description of Artificial Sequence: Synthetic oligonucleotide
  Sense Strand Starting at position 659 of SEQ ID NO: 315274
uggaaagaaucgcuucuuu

SEQ ID NO: 370452 - RNA, 19 nt, Artificial Sequence
  Description of Artificial Sequence: Synthetic oligonucleotide
  Antisense Strand to SEQ ID NO: 370451
aaagaagcgauucuuucca

SEQ ID NO: 370453 - RNA, 19 nt, Artificial Sequence
  Description of Artificial Sequence: Synthetic oligonucleotide
  Sense Strand Starting at position 659 of SEQ ID NO: 315278
aagaaucgcuucuuuaguu

SEQ ID NO: 370454 - RNA, 19 nt, Artificial Sequence
  Description of Artificial Sequence: Synthetic oligonucleotide
  Antisense Strand to SEQ ID NO: 370453
aacuaaagaagcgauucuu

SEQ ID NO: 370455 - RNA, 19 nt, Artificial Sequence
  Description of Artificial Sequence: Synthetic oligonucleotide
  Sense Strand Starting at position 659 of SEQ ID NO: 315285
gcuucuuuaguuuaacagu

SEQ ID NO: 370456 - RNA, 19 nt, Artificial Sequence
  Description of Artificial Sequence: Synthetic oligonucleotide
  Antisense Strand to SEQ ID NO: 370455
acuguuaaacuaaagaagc

SEQ ID NO: 370457 - RNA, 19 nt, Artificial Sequence
  Description of Artificial Sequence: Synthetic oligonucleotide
  Sense Strand Starting at position 659 of SEQ ID NO: 315325
agugaaucauauguaauac

SEQ ID NO: 370458 - RNA, 19 nt, Artificial Sequence
  Description of Artificial Sequence: Synthetic oligonucleotide
  Antisense Strand to SEQ ID NO: 370457
guauuacauaugauucacu

SEQ ID NO: 370459 - RNA, 19 nt, Artificial Sequence
  Description of Artificial Sequence: Synthetic oligonucleotide
  Sense Strand Starting at position 659 of SEQ ID NO: 315786
agcagagauugugucauuc

SEQ ID NO: 370460 - RNA, 19 nt, Artificial Sequence
  Description of Artificial Sequence: Synthetic oligonucleotide
  Antisense Strand to SEQ ID NO: 370459
gaaugacacaaucucugcu

SEQ ID NO: 370461 - RNA, 19 nt, Artificial Sequence
  Description of Artificial Sequence: Synthetic oligonucleotide
  Sense Strand Starting at position 659 of SEQ ID NO: 315790
gagauugugucauuccacu

SEQ ID NO: 370462 - RNA, 19 nt, Artificial Sequence
  Description of Artificial Sequence: Synthetic oligonucleotide
  Antisense Strand to SEQ ID NO: 370461
aguggaaugacacaaucuc

SEQ ID NO: 370463 - RNA, 19 nt, Artificial Sequence
  Description of Artificial Sequence: Synthetic oligonucleotide
  Sense Strand Starting at position 659 of SEQ ID NO: 316079
gacacuguucgccacaacu

SEQ ID NO: 370464 - RNA, 19 nt, Artificial Sequence
  Description of Artificial Sequence: Synthetic oligonucleotide
  Antisense Strand to SEQ ID NO: 370463
aguuguggcgaacaguguc

SEQ ID NO: 370465 - RNA, 19 nt, Artificial Sequence
  Description of Artificial Sequence: Synthetic oligonucleotide
  Sense Strand Starting at position 659 of SEQ ID NO: 316281
gaaagugggcucuaguuau

SEQ ID NO: 370466 - RNA, 19 nt, Artificial Sequence
  Description of Artificial Sequence: Synthetic oligonucleotide
  Antisense Strand to SEQ ID NO: 370465
auaacuagagcccacuuuc

SEQ ID NO: 370467 - RNA, 19 nt, Artificial Sequence
  Description of Artificial Sequence: Synthetic oligonucleotide
  Sense Strand Starting at position 659 of SEQ ID NO: 316574
cugcuacucugaucuguga

SEQ ID NO: 370468 - RNA, 19 nt, Artificial Sequence
  Description of Artificial Sequence: Synthetic oligonucleotide
  Antisense Strand to SEQ ID NO: 370467
ucacagaucagaguagcag

SEQ ID NO: 370469 - RNA, 19 nt, Artificial Sequence
  Description of Artificial Sequence: Synthetic oligonucleotide
  Sense Strand Starting at position 659 of SEQ ID NO: 316576
gcuacucugaucugugaag

SEQ ID NO: 370470 - RNA, 19 nt, Artificial Sequence
  Description of Artificial Sequence: Synthetic oligonucleotide
  Antisense Strand to SEQ ID NO: 370469
cuucacagaucagaguagc

SEQ ID NO: 370471 - RNA, 19 nt, Artificial Sequence
  Description of Artificial Sequence: Synthetic oligonucleotide
  Sense Strand Starting at position 659 of SEQ ID NO: 316577
cuacucugaucugugaaga

SEQ ID NO: 370472 - RNA, 19 nt, Artificial Sequence
  Description of Artificial Sequence: Synthetic oligonucleotide
  Antisense Strand to SEQ ID NO: 370471
ucuucacagaucagaguag

SEQ ID NO: 370473 - RNA, 19 nt, Artificial Sequence
  Description of Artificial Sequence: Synthetic oligonucleotide
  Sense Strand Starting at position 659 of SEQ ID NO: 316578
uacucugaucugugaagag

SEQ ID NO: 370474 - RNA, 19 nt, Artificial Sequence
  Description of Artificial Sequence: Synthetic oligonucleotide
  Antisense Strand to SEQ ID NO: 370473
cucuucacagaucagagua

SEQ ID NO: 370475 - RNA, 19 nt, Artificial Sequence
  Description of Artificial Sequence: Synthetic oligonucleotide
  Sense Strand Starting at position 659 of SEQ ID NO: 316588
ugugaagagcucgcgcuaa

SEQ ID NO: 370476 - RNA, 19 nt, Artificial Sequence
  Description of Artificial Sequence: Synthetic oligonucleotide
  Antisense Strand to SEQ ID NO: 370475
uuagcgcgagcucuucaca

SEQ ID NO: 370477 - RNA, 19 nt, Artificial Sequence
  Description of Artificial Sequence: Synthetic oligonucleotide
  Sense Strand Starting at position 659 of SEQ ID NO: 316604
uaacguucccgucuuagca

SEQ ID NO: 370478 - RNA, 19 nt, Artificial Sequence
  Description of Artificial Sequence: Synthetic oligonucleotide
  Antisense Strand to SEQ ID NO: 370477
ugcuaagacgggaacguua

SEQ ID NO: 370479 - RNA, 19 nt, Artificial Sequence
  Description of Artificial Sequence: Synthetic oligonucleotide
  Sense Strand Starting at position 659 of SEQ ID NO: 317545
ggaggagucgacuaagcau

SEQ ID NO: 370480 - RNA, 19 nt, Artificial Sequence
  Description of Artificial Sequence: Synthetic oligonucleotide
  Antisense Strand to SEQ ID NO: 370479
augcuuagucgacuccucc

SEQ ID NO: 370481 - RNA, 19 nt, Artificial Sequence
  Description of Artificial Sequence: Synthetic oligonucleotide
  Sense Strand Starting at position 659 of SEQ ID NO: 317548
ggagucgacuaagcauuaa

SEQ ID NO: 370482 - RNA, 19 nt, Artificial Sequence
  Description of Artificial Sequence: Synthetic oligonucleotide
  Antisense Strand to SEQ ID NO: 370481
uuaaugcuuagucgacucc

SEQ ID NO: 370483 - RNA, 19 nt, Artificial Sequence
  Description of Artificial Sequence: Synthetic oligonucleotide
  Sense Strand Starting at position 659 of SEQ ID NO: 317552
ucgacuaagcauuaaauua

SEQ ID NO: 370484 - RNA, 19 nt, Artificial Sequence
  Description of Artificial Sequence: Synthetic oligonucleotide
  Antisense Strand to SEQ ID NO: 370483
uaauuuaaugcuuagucga

SEQ ID NO: 370485 - RNA, 19 nt, Artificial Sequence
  Description of Artificial Sequence: Synthetic oligonucleotide
  Sense Strand Starting at position 659 of SEQ ID NO: 317998
uuacuaugguugcuggaga

SEQ ID NO: 370486 - RNA, 19 nt, Artificial Sequence
  Description of Artificial Sequence: Synthetic oligonucleotide
  Antisense Strand to SEQ ID NO: 370485
ucuccagcaaccauaguaa

SEQ ID NO: 370487 - RNA, 19 nt, Artificial Sequence
  Description of Artificial Sequence: Synthetic oligonucleotide
  Sense Strand Starting at position 659 of SEQ ID NO: 318163
uuuauuguuggauaaagca

SEQ ID NO: 370488 - RNA, 19 nt, Artificial Sequence
  Description of Artificial Sequence: Synthetic oligonucleotide
  Antisense Strand to SEQ ID NO: 370487
ugcuuuauccaacaauaaa

SEQ ID NO: 370489 - RNA, 19 nt, Artificial Sequence
  Description of Artificial Sequence: Synthetic oligonucleotide
  Sense Strand Starting at position 659 of SEQ ID NO: 318251
cuguaaucuaaauguggga

SEQ ID NO: 370490 - RNA, 19 nt, Artificial Sequence
  Description of Artificial Sequence: Synthetic oligonucleotide
  Antisense Strand to SEQ ID NO: 370489
ucccacauuuagauuacag

SEQ ID NO: 370491 - RNA, 19 nt, Artificial Sequence
  Description of Artificial Sequence: Synthetic oligonucleotide
  Sense Strand Starting at position 659 of SEQ ID NO: 318253
guaaucuaaaugugggaau

SEQ ID NO: 370492 - RNA, 19 nt, Artificial Sequence
  Description of Artificial Sequence: Synthetic oligonucleotide
  Antisense Strand to SEQ ID NO: 370491
auucccacauuuagauuac

SEQ ID NO: 370493 - RNA, 19 nt, Artificial Sequence
  Description of Artificial Sequence: Synthetic oligonucleotide
  Sense Strand Starting at position 659 of SEQ ID NO: 318370
gcagccagucucuagcaua

SEQ ID NO: 370494 - RNA, 19 nt, Artificial Sequence
  Description of Artificial Sequence: Synthetic oligonucleotide
  Antisense Strand to SEQ ID NO: 370493
uaugcuagagacuggcugc

SEQ ID NO: 370495 - RNA, 19 nt, Artificial Sequence
  Description of Artificial Sequence: Synthetic oligonucleotide
  Sense Strand Starting at position 659 of SEQ ID NO: 318482
gaggcugucagguacaauc

SEQ ID NO: 370496 - RNA, 19 nt, Artificial Sequence
  Description of Artificial Sequence: Synthetic oligonucleotide
  Antisense Strand to SEQ ID NO: 370495
gauuguaccugacagccuc

SEQ ID NO: 370497 - RNA, 19 nt, Artificial Sequence
  Description of Artificial Sequence: Synthetic oligonucleotide
  Sense Strand Starting at position 659 of SEQ ID NO: 318493
guacaauccuuuccuagag

SEQ ID NO: 370498 - RNA, 19 nt, Artificial Sequence
  Description of Artificial Sequence: Synthetic oligonucleotide
  Antisense Strand to SEQ ID NO: 370497
cucuaggaaaggauuguac

SEQ ID NO: 370499 - RNA, 19 nt, Artificial Sequence
  Description of Artificial Sequence: Synthetic oligonucleotide
  Sense Strand Starting at position 659 of SEQ ID NO: 318505
ccuagaggaucacaaucua

SEQ ID NO: 370500 - RNA, 19 nt, Artificial Sequence
  Description of Artificial Sequence: Synthetic oligonucleotide
  Antisense Strand to SEQ ID NO: 370499
uagauugugauccucuagg

SEQ ID NO: 370501 - RNA, 19 nt, Artificial Sequence
  Description of Artificial Sequence: Synthetic oligonucleotide
  Sense Strand Starting at position 659 of SEQ ID NO: 318571
gcuuacuuaugaguccaga

SEQ ID NO: 370502 - RNA, 19 nt, Artificial Sequence
  Description of Artificial Sequence: Synthetic oligonucleotide
  Antisense Strand to SEQ ID NO: 370501
ucuggacucauaaguaagc

SEQ ID NO: 370503 - RNA, 19 nt, Artificial Sequence
  Description of Artificial Sequence: Synthetic oligonucleotide
  Sense Strand Starting at position 659 of SEQ ID NO: 318705
acgacuuaaagugguaaca

SEQ ID NO: 370504 - RNA, 19 nt, Artificial Sequence
  Description of Artificial Sequence: Synthetic oligonucleotide
  Antisense Strand to SEQ ID NO: 370503
uguuaccacuuuaagucgu

SEQ ID NO: 370505 - RNA, 19 nt, Artificial Sequence
  Description of Artificial Sequence: Synthetic oligonucleotide
  Sense Strand Starting at position 659 of SEQ ID NO: 318714
agugguaacauguggagga

SEQ ID NO: 370506 - RNA, 19 nt, Artificial Sequence
  Description of Artificial Sequence: Synthetic oligonucleotide
  Antisense Strand to SEQ ID NO: 370505
uccuccacauguuaccacu

SEQ ID NO: 370507 - RNA, 19 nt, Artificial Sequence
  Description of Artificial Sequence: Synthetic oligonucleotide
  Sense Strand Starting at position 659 of SEQ ID NO: 318755
guucgugucagagagcaaa

SEQ ID NO: 370508 - RNA, 19 nt, Artificial Sequence
  Description of Artificial Sequence: Synthetic oligonucleotide
  Antisense Strand to SEQ ID NO: 370507
uuugcucucugacacgaac

SEQ ID NO: 370509 - RNA, 19 nt, Artificial Sequence
  Description of Artificial Sequence: Synthetic oligonucleotide
  Sense Strand Starting at position 659 of SEQ ID NO: 318828
ccucaauuggcaugaauug

SEQ ID NO: 370510 - RNA, 19 nt, Artificial Sequence
  Description of Artificial Sequence: Synthetic oligonucleotide
  Antisense Strand to SEQ ID NO: 370509
caauucaugccaauugagg

SEQ ID NO: 370511 - RNA, 19 nt, Artificial Sequence
  Description of Artificial Sequence: Synthetic oligonucleotide
  Sense Strand Starting at position 659 of SEQ ID NO: 318845
ugcuaaaugcuagaaggua

SEQ ID NO: 370512 - RNA, 19 nt, Artificial Sequence
  Description of Artificial Sequence: Synthetic oligonucleotide
  Antisense Strand to SEQ ID NO: 370511
uaccuucuagcauuuagca

SEQ ID NO: 370513 - RNA, 19 nt, Artificial Sequence
  Description of Artificial Sequence: Synthetic oligonucleotide
  Sense Strand Starting at position 659 of SEQ ID NO: 318871
guuuaaucccagugccaaa

SEQ ID NO: 370514 - RNA, 19 nt, Artificial Sequence
  Description of Artificial Sequence: Synthetic oligonucleotide
  Antisense Strand to SEQ ID NO: 370513
uuuggcacugggauuaaac

SEQ ID NO: 370515 - RNA, 19 nt, Artificial Sequence
  Description of Artificial Sequence: Synthetic oligonucleotide
  Sense Strand Starting at position 659 of SEQ ID NO: 318883
ugccaaaguugauuaguaa

SEQ ID NO: 370516 - RNA, 19 nt, Artificial Sequence
  Description of Artificial Sequence: Synthetic oligonucleotide
  Antisense Strand to SEQ ID NO: 370515
uuacuaaucaacuuuggca

SEQ ID NO: 370517 - RNA, 19 nt, Artificial Sequence
  Description of Artificial Sequence: Synthetic oligonucleotide
  Sense Strand Starting at position 659 of SEQ ID NO: 318884
gccaaaguugauuaguaac

SEQ ID NO: 370518 - RNA, 19 nt, Artificial Sequence
  Description of Artificial Sequence: Synthetic oligonucleotide
  Antisense Strand to SEQ ID NO: 370517
guuacuaaucaacuuuggc

SEQ ID NO: 370519 - RNA, 19 nt, Artificial Sequence
  Description of Artificial Sequence: Synthetic oligonucleotide
  Sense Strand Starting at position 659 of SEQ ID NO: 318913
agagcuguucuauaaacuc

SEQ ID NO: 370520 - RNA, 19 nt, Artificial Sequence
  Description of Artificial Sequence: Synthetic oligonucleotide
  Antisense Strand to SEQ ID NO: 370519
gaguuuauagaacagcucu

SEQ ID NO: 370521 - RNA, 19 nt, Artificial Sequence
  Description of Artificial Sequence: Synthetic oligonucleotide
  Sense Strand Starting at position 659 of SEQ ID NO: 318985
auguuaugagcucauacau

SEQ ID NO: 370522 - RNA, 19 nt, Artificial Sequence
  Description of Artificial Sequence: Synthetic oligonucleotide
  Antisense Strand to SEQ ID NO: 370521
auguaugagcucauaacau

SEQ ID NO: 370523 - RNA, 19 nt, Artificial Sequence
  Description of Artificial Sequence: Synthetic oligonucleotide
  Sense Strand Starting at position 659 of SEQ ID NO: 319028
aggugacguauuugucauc

SEQ ID NO: 370524 - RNA, 19 nt, Artificial Sequence
  Description of Artificial Sequence: Synthetic oligonucleotide
  Antisense Strand to SEQ ID NO: 370523
gaugacaaauacgucaccu

SEQ ID NO: 370525 - RNA, 19 nt, Artificial Sequence
  Description of Artificial Sequence: Synthetic oligonucleotide
  Sense Strand Starting at position 659 of SEQ ID NO: 319106
aacuguuauucuucgaaag

SEQ ID NO: 370526 - RNA, 19 nt, Artificial Sequence
  Description of Artificial Sequence: Synthetic oligonucleotide
  Antisense Strand to SEQ ID NO: 370525
cuuucgaagaauaacaguu

SEQ ID NO: 370527 - RNA, 19 nt, Artificial Sequence
  Description of Artificial Sequence: Synthetic oligonucleotide
  Sense Strand Starting at position 659 of SEQ ID NO: 319107
acuguuauucuucgaaaga

SEQ ID NO: 370528 - RNA, 19 nt, Artificial Sequence
  Description of Artificial Sequence: Synthetic oligonucleotide
  Antisense Strand to SEQ ID NO: 370527
ucuuucgaagaauaacagu

SEQ ID NO: 370529 - RNA, 19 nt, Artificial Sequence
  Description of Artificial Sequence: Synthetic oligonucleotide
  Sense Strand Starting at position 659 of SEQ ID NO: 319214
gcuacaaugcuguagaauu

SEQ ID NO: 370530 - RNA, 19 nt, Artificial Sequence
  Description of Artificial Sequence: Synthetic oligonucleotide
  Antisense Strand to SEQ ID NO: 370529
aauucuacagcauuguagc

SEQ ID NO: 370531 - RNA, 19 nt, Artificial Sequence
  Description of Artificial Sequence: Synthetic oligonucleotide
  Sense Strand Starting at position 660 of SEQ ID NO: 315258
guuacuucuguggaacuaa

SEQ ID NO: 370532 - RNA, 19 nt, Artificial Sequence
  Description of Artificial Sequence: Synthetic oligonucleotide
  Antisense Strand to SEQ ID NO: 370531
uuaguuccacagaaguaac

SEQ ID NO: 370533 - RNA, 19 nt, Artificial Sequence
  Description of Artificial Sequence: Synthetic oligonucleotide
  Sense Strand Starting at position 660 of SEQ ID NO: 315299
gacacauggcauugggagu

SEQ ID NO: 370534 - RNA, 19 nt, Artificial Sequence
  Description of Artificial Sequence: Synthetic oligonucleotide
  Antisense Strand to SEQ ID NO: 370533
acucccaaugccauguguc

SEQ ID NO: 370535 - RNA, 19 nt, Artificial Sequence
  Description of Artificial Sequence: Synthetic oligonucleotide
  Sense Strand Starting at position 660 of SEQ ID NO: 315312
gggagucacucuuccaaca

SEQ ID NO: 370536 - RNA, 19 nt, Artificial Sequence
  Description of Artificial Sequence: Synthetic oligonucleotide
  Antisense Strand to SEQ ID NO: 370535
uguuggaagagugacuccc

SEQ ID NO: 370537 - RNA, 19 nt, Artificial Sequence
  Description of Artificial Sequence: Synthetic oligonucleotide
  Sense Strand Starting at position 660 of SEQ ID NO: 315452
ggacaauacugggcucuau

SEQ ID NO: 370538 - RNA, 19 nt, Artificial Sequence
  Description of Artificial Sequence: Synthetic oligonucleotide
  Antisense Strand to SEQ ID NO: 370537
auagagcccaguauugucc

SEQ ID NO: 370539 - RNA, 19 nt, Artificial Sequence
  Description of Artificial Sequence: Synthetic oligonucleotide
  Sense Strand Starting at position 660 of SEQ ID NO: 315667
gguacaggaucuuuacauu

SEQ ID NO: 370540 - RNA, 19 nt, Artificial Sequence
  Description of Artificial Sequence: Synthetic oligonucleotide
  Antisense Strand to SEQ ID NO: 370539
aauguaaagauccuguacc

SEQ ID NO: 370541 - RNA, 19 nt, Artificial Sequence
  Description of Artificial Sequence: Synthetic oligonucleotide
  Sense Strand Starting at position 660 of SEQ ID NO: 315804
cauagucaugccuaagguu

SEQ ID NO: 370542 - RNA, 19 nt, Artificial Sequence
  Description of Artificial Sequence: Synthetic oligonucleotide
  Antisense Strand to SEQ ID NO: 370541
aaccuuaggcaugacuaug

SEQ ID NO: 370543 - RNA, 19 nt, Artificial Sequence
  Description of Artificial Sequence: Synthetic oligonucleotide
  Sense Strand Starting at position 660 of SEQ ID NO: 315868
aaccgaaaugcggacuauu

SEQ ID NO: 370544 - RNA, 19 nt, Artificial Sequence
  Description of Artificial Sequence: Synthetic oligonucleotide
  Antisense Strand to SEQ ID NO: 370543
aauaguccgcauuucgguu

SEQ ID NO: 370545 - RNA, 19 nt, Artificial Sequence
  Description of Artificial Sequence: Synthetic oligonucleotide
  Sense Strand Starting at position 660 of SEQ ID NO: 315908
agguacuaaugguucuaca

SEQ ID NO: 370546 - RNA, 19 nt, Artificial Sequence
  Description of Artificial Sequence: Synthetic oligonucleotide
  Antisense Strand to SEQ ID NO: 370545
uguagaaccauuaguaccu

SEQ ID NO: 370547 - RNA, 19 nt, Artificial Sequence
  Description of Artificial Sequence: Synthetic oligonucleotide
  Sense Strand Starting at position 660 of SEQ ID NO: 315917
ugguucuacagagaugcua

SEQ ID NO: 370548 - RNA, 19 nt, Artificial Sequence
  Description of Artificial Sequence: Synthetic oligonucleotide
  Antisense Strand to SEQ ID NO: 370547
uagcaucucuguagaacca

SEQ ID NO: 370549 - RNA, 19 nt, Artificial Sequence
  Description of Artificial Sequence: Synthetic oligonucleotide
  Sense Strand Starting at position 660 of SEQ ID NO: 315940
cccauaacugaacgggauu

SEQ ID NO: 370550 - RNA, 19 nt, Artificial Sequence
  Description of Artificial Sequence: Synthetic oligonucleotide
  Antisense Strand to SEQ ID NO: 370549
aaucccguucaguuauggg

SEQ ID NO: 370551 - RNA, 19 nt, Artificial Sequence
  Description of Artificial Sequence: Synthetic oligonucleotide
  Sense Strand Starting at position 660 of SEQ ID NO: 315970
ccagauuuguuagaaguaa

SEQ ID NO: 370552 - RNA, 19 nt, Artificial Sequence
  Description of Artificial Sequence: Synthetic oligonucleotide
  Antisense Strand to SEQ ID NO: 370551
uuacuucuaacaaaucugg

SEQ ID NO: 370553 - RNA, 19 nt, Artificial Sequence
  Description of Artificial Sequence: Synthetic oligonucleotide
  Sense Strand Starting at position 660 of SEQ ID NO: 316043
ccugucaaaucuccuguaa

SEQ ID NO: 370554 - RNA, 19 nt, Artificial Sequence
  Description of Artificial Sequence: Synthetic oligonucleotide
  Antisense Strand to SEQ ID NO: 370553
uuacaggagauuugacagg

SEQ ID NO: 370555 - RNA, 19 nt, Artificial Sequence
  Description of Artificial Sequence: Synthetic oligonucleotide
  Sense Strand Starting at position 660 of SEQ ID NO: 316114
accucuuucgggugaaaca

SEQ ID NO: 370556 - RNA, 19 nt, Artificial Sequence
  Description of Artificial Sequence: Synthetic oligonucleotide
  Antisense Strand to SEQ ID NO: 370555
uguuucacccgaaagaggu

SEQ ID NO: 370557 - RNA, 19 nt, Artificial Sequence
  Description of Artificial Sequence: Synthetic oligonucleotide
  Sense Strand Starting at position 660 of SEQ ID NO: 316115
ccucuuucgggugaaacaa

SEQ ID NO: 370558 - RNA, 19 nt, Artificial Sequence
  Description of Artificial Sequence: Synthetic oligonucleotide
  Antisense Strand to SEQ ID NO: 370557
uuguuucacccgaaagagg

SEQ ID NO: 370559 - RNA, 19 nt, Artificial Sequence
  Description of Artificial Sequence: Synthetic oligonucleotide
  Sense Strand Starting at position 660 of SEQ ID NO: 316352
gucgccaggaacugucaaa

SEQ ID NO: 370560 - RNA, 19 nt, Artificial Sequence
  Description of Artificial Sequence: Synthetic oligonucleotide
  Antisense Strand to SEQ ID NO: 370559
uuugacaguuccuggcgac

SEQ ID NO: 370561 - RNA, 19 nt, Artificial Sequence
  Description of Artificial Sequence: Synthetic oligonucleotide
  Sense Strand Starting at position 660 of SEQ ID NO: 318208
ggaaaggaggcgugaagau

SEQ ID NO: 370562 - RNA, 19 nt, Artificial Sequence
  Description of Artificial Sequence: Synthetic oligonucleotide
  Antisense Strand to SEQ ID NO: 370561
aucuucacgccuccuuucc

SEQ ID NO: 370563 - RNA, 19 nt, Artificial Sequence
  Description of Artificial Sequence: Synthetic oligonucleotide
  Sense Strand Starting at position 660 of SEQ ID NO: 318227
acgcccucugcgucaagaa

SEQ ID NO: 370564 - RNA, 19 nt, Artificial Sequence
  Description of Artificial Sequence: Synthetic oligonucleotide
  Antisense Strand to SEQ ID NO: 370563
uucuugacgcagagggcgu

SEQ ID NO: 370565 - RNA, 19 nt, Artificial Sequence
  Description of Artificial Sequence: Synthetic oligonucleotide
  Sense Strand Starting at position 660 of SEQ ID NO: 318384
agcgaagacacagguuuaa

SEQ ID NO: 370566 - RNA, 19 nt, Artificial Sequence
  Description of Artificial Sequence: Synthetic oligonucleotide
  Antisense Strand to SEQ ID NO: 370565
uuaaaccugugucuucgcu

SEQ ID NO: 370567 - RNA, 19 nt, Artificial Sequence
  Description of Artificial Sequence: Synthetic oligonucleotide
  Sense Strand Starting at position 660 of SEQ ID NO: 318425
cugggacauccuugguuau

SEQ ID NO: 370568 - RNA, 19 nt, Artificial Sequence
  Description of Artificial Sequence: Synthetic oligonucleotide
  Antisense Strand to SEQ ID NO: 370567
auaaccaaggaugucccag

SEQ ID NO: 370569 - RNA, 19 nt, Artificial Sequence
  Description of Artificial Sequence: Synthetic oligonucleotide
  Sense Strand Starting at position 660 of SEQ ID NO: 318426
ugggacauccuugguuauu

SEQ ID NO: 370570 - RNA, 19 nt, Artificial Sequence
  Description of Artificial Sequence: Synthetic oligonucleotide
  Antisense Strand to SEQ ID NO: 370569
aauaaccaaggauguccca

SEQ ID NO: 370571 - RNA, 19 nt, Artificial Sequence
  Description of Artificial Sequence: Synthetic oligonucleotide
  Sense Strand Starting at position 660 of SEQ ID NO: 318437
ugguuauuucauuaggcgu

SEQ ID NO: 370572 - RNA, 19 nt, Artificial Sequence
  Description of Artificial Sequence: Synthetic oligonucleotide
  Antisense Strand to SEQ ID NO: 370571
acgccuaaugaaauaacca

SEQ ID NO: 370573 - RNA, 19 nt, Artificial Sequence
  Description of Artificial Sequence: Synthetic oligonucleotide
  Sense Strand Starting at position 660 of SEQ ID NO: 318519
ccagcaauauguccuugau

SEQ ID NO: 370574 - RNA, 19 nt, Artificial Sequence
  Description of Artificial Sequence: Synthetic oligonucleotide
  Antisense Strand to SEQ ID NO: 370573
aucaaggacauauugcugg

SEQ ID NO: 370575 - RNA, 19 nt, Artificial Sequence
  Description of Artificial Sequence: Synthetic oligonucleotide
  Sense Strand Starting at position 660 of SEQ ID NO: 318521
agcaauauguccuugauua

SEQ ID NO: 370576 - RNA, 19 nt, Artificial Sequence
  Description of Artificial Sequence: Synthetic oligonucleotide
  Antisense Strand to SEQ ID NO: 370575
uaaucaaggacauauugcu

SEQ ID NO: 370577 - RNA, 19 nt, Artificial Sequence
  Description of Artificial Sequence: Synthetic oligonucleotide
  Sense Strand Starting at position 660 of SEQ ID NO: 318522
gcaauauguccuugauuac

SEQ ID NO: 370578 - RNA, 19 nt, Artificial Sequence
  Description of Artificial Sequence: Synthetic oligonucleotide
  Antisense Strand to SEQ ID NO: 370577
guaaucaaggacauauugc

SEQ ID NO: 370579 - RNA, 19 nt, Artificial Sequence
  Description of Artificial Sequence: Synthetic oligonucleotide
  Sense Strand Starting at position 660 of SEQ ID NO: 318547
gaaugugugcugcagaaac

SEQ ID NO: 370580 - RNA, 19 nt, Artificial Sequence
  Description of Artificial Sequence: Synthetic oligonucleotide
  Antisense Strand to SEQ ID NO: 370579
guuucugcagcacacauuc

SEQ ID NO: 370581 - RNA, 19 nt, Artificial Sequence
  Description of Artificial Sequence: Synthetic oligonucleotide
  Sense Strand Starting at position 660 of SEQ ID NO: 318558
gcagaaaccuagucucaaa

SEQ ID NO: 370582 - RNA, 19 nt, Artificial Sequence
  Description of Artificial Sequence: Synthetic oligonucleotide
  Antisense Strand to SEQ ID NO: 370581
uuugagacuagguuucugc

SEQ ID NO: 370583 - RNA, 19 nt, Artificial Sequence
  Description of Artificial Sequence: Synthetic oligonucleotide
  Sense Strand Starting at position 660 of SEQ ID NO: 318818
ugagcagagacuugucacu

SEQ ID NO: 370584 - RNA, 19 nt, Artificial Sequence
  Description of Artificial Sequence: Synthetic oligonucleotide
  Antisense Strand to SEQ ID NO: 370583
agugacaagucucugcuca

SEQ ID NO: 370585 - RNA, 19 nt, Artificial Sequence
  Description of Artificial Sequence: Synthetic oligonucleotide
  Sense Strand Starting at position 660 of SEQ ID NO: 318820
agcagagacuugucacuga

SEQ ID NO: 370586 - RNA, 19 nt, Artificial Sequence
  Description of Artificial Sequence: Synthetic oligonucleotide
  Antisense Strand to SEQ ID NO: 370585
ucagugacaagucucugcu

SEQ ID NO: 370587 - RNA, 19 nt, Artificial Sequence
  Description of Artificial Sequence: Synthetic oligonucleotide
  Sense Strand Starting at position 660 of SEQ ID NO: 318823
agagacuugucacugaauu

SEQ ID NO: 370588 - RNA, 19 nt, Artificial Sequence
  Description of Artificial Sequence: Synthetic oligonucleotide
  Antisense Strand to SEQ ID NO: 370587
aauucagugacaagucucu

SEQ ID NO: 370589 - RNA, 19 nt, Artificial Sequence
  Description of Artificial Sequence: Synthetic oligonucleotide
  Sense Strand Starting at position 660 of SEQ ID NO: 318824
gagacuugucacugaauug

SEQ ID NO: 370590 - RNA, 19 nt, Artificial Sequence
  Description of Artificial Sequence: Synthetic oligonucleotide
  Antisense Strand to SEQ ID NO: 370589
caauucagugacaagucuc

SEQ ID NO: 370591 - RNA, 19 nt, Artificial Sequence
  Description of Artificial Sequence: Synthetic oligonucleotide
  Sense Strand Starting at position 660 of SEQ ID NO: 318831
gucacugaauugucacuga

SEQ ID NO: 370592 - RNA, 19 nt, Artificial Sequence
  Description of Artificial Sequence: Synthetic oligonucleotide
  Antisense Strand to SEQ ID NO: 370591
ucagugacaauucagugac

SEQ ID NO: 370593 - RNA, 19 nt, Artificial Sequence
  Description of Artificial Sequence: Synthetic oligonucleotide
  Sense Strand Starting at position 660 of SEQ ID NO: 318834
acugaauugucacugaauu

SEQ ID NO: 370594 - RNA, 19 nt, Artificial Sequence
  Description of Artificial Sequence: Synthetic oligonucleotide
  Antisense Strand to SEQ ID NO: 370593
aauucagugacaauucagu

SEQ ID NO: 370595 - RNA, 19 nt, Artificial Sequence
  Description of Artificial Sequence: Synthetic oligonucleotide
  Sense Strand Starting at position 660 of SEQ ID NO: 318835
cugaauugucacugaauuc

SEQ ID NO: 370596 - RNA, 19 nt, Artificial Sequence
  Description of Artificial Sequence: Synthetic oligonucleotide
  Antisense Strand to SEQ ID NO: 370595
gaauucagugacaauucag

SEQ ID NO: 370597 - RNA, 19 nt, Artificial Sequence
  Description of Artificial Sequence: Synthetic oligonucleotide
  Sense Strand Starting at position 660 of SEQ ID NO: 318916
gcuagugaguugaagggua

SEQ ID NO: 370598 - RNA, 19 nt, Artificial Sequence
  Description of Artificial Sequence: Synthetic oligonucleotide
  Antisense Strand to SEQ ID NO: 370597
uacccuucaacucacuagc

SEQ ID NO: 370599 - RNA, 19 nt, Artificial Sequence
  Description of Artificial Sequence: Synthetic oligonucleotide
  Sense Strand Starting at position 660 of SEQ ID NO: 318924
guugaaggguacuucuaga

SEQ ID NO: 370600 - RNA, 19 nt, Artificial Sequence
  Description of Artificial Sequence: Synthetic oligonucleotide
  Antisense Strand to SEQ ID NO: 370599
ucuagaaguacccuucaac

SEQ ID NO: 370601 - RNA, 19 nt, Artificial Sequence
  Description of Artificial Sequence: Synthetic oligonucleotide
  Sense Strand Starting at position 660 of SEQ ID NO: 319025
ucaagaagccauuguguau

SEQ ID NO: 370602 - RNA, 19 nt, Artificial Sequence
  Description of Artificial Sequence: Synthetic oligonucleotide
  Antisense Strand to SEQ ID NO: 370601
auacacaauggcuucuuga

SEQ ID NO: 370603 - RNA, 19 nt, Artificial Sequence
  Description of Artificial Sequence: Synthetic oligonucleotide
  Sense Strand Starting at position 660 of SEQ ID NO: 319034
cauuguguauucguaagag

SEQ ID NO: 370604 - RNA, 19 nt, Artificial Sequence
  Description of Artificial Sequence: Synthetic oligonucleotide
  Antisense Strand to SEQ ID NO: 370603
cucuuacgaauacacaaug

SEQ ID NO: 370605 - RNA, 19 nt, Artificial Sequence
  Description of Artificial Sequence: Synthetic oligonucleotide
  Sense Strand Starting at position 660 of SEQ ID NO: 319042
auucguaagagacagaguu

SEQ ID NO: 370606 - RNA, 19 nt, Artificial Sequence
  Description of Artificial Sequence: Synthetic oligonucleotide
  Antisense Strand to SEQ ID NO: 370605
aacucugucucuuacgaau

SEQ ID NO: 370607 - RNA, 19 nt, Artificial Sequence
  Description of Artificial Sequence: Synthetic oligonucleotide
  Sense Strand Starting at position 660 of SEQ ID NO: 319125
guguguuacgauaguacgu

SEQ ID NO: 370608 - RNA, 19 nt, Artificial Sequence
  Description of Artificial Sequence: Synthetic oligonucleotide
  Antisense Strand to SEQ ID NO: 370607
acguacuaucguaacacac

SEQ ID NO: 370609 - RNA, 19 nt, Artificial Sequence
  Description of Artificial Sequence: Synthetic oligonucleotide
  Sense Strand Starting at position 660 of SEQ ID NO: 319132
acgauaguacgugguaaca

SEQ ID NO: 370610 - RNA, 19 nt, Artificial Sequence
  Description of Artificial Sequence: Synthetic oligonucleotide
  Antisense Strand to SEQ ID NO: 370609
uguuaccacguacuaucgu

SEQ ID NO: 370611 - RNA, 19 nt, Artificial Sequence
  Description of Artificial Sequence: Synthetic oligonucleotide
  Sense Strand Starting at position 661 of SEQ ID NO: 315323
uguugcuuauuguuugaaa

SEQ ID NO: 370612 - RNA, 19 nt, Artificial Sequence
  Description of Artificial Sequence: Synthetic oligonucleotide
  Antisense Strand to SEQ ID NO: 370611
uuucaaacaauaagcaaca

SEQ ID NO: 370613 - RNA, 19 nt, Artificial Sequence
  Description of Artificial Sequence: Synthetic oligonucleotide
  Sense Strand Starting at position 661 of SEQ ID NO: 315426
gcaggacugucauuagccu

SEQ ID NO: 370614 - RNA, 19 nt, Artificial Sequence
  Description of Artificial Sequence: Synthetic oligonucleotide
  Antisense Strand to SEQ ID NO: 370613
aggcuaaugacaguccugc

SEQ ID NO: 370615 - RNA, 19 nt, Artificial Sequence
  Description of Artificial Sequence: Synthetic oligonucleotide
  Sense Strand Starting at position 661 of SEQ ID NO: 315432
cugucauuagccuggcaag

SEQ ID NO: 370616 - RNA, 19 nt, Artificial Sequence
  Description of Artificial Sequence: Synthetic oligonucleotide
  Antisense Strand to SEQ ID NO: 370615
cuugccaggcuaaugacag

SEQ ID NO: 370617 - RNA, 19 nt, Artificial Sequence
  Description of Artificial Sequence: Synthetic oligonucleotide
  Sense Strand Starting at position 661 of SEQ ID NO: 315618
guucuaauuucugugucca

SEQ ID NO: 370618 - RNA, 19 nt, Artificial Sequence
  Description of Artificial Sequence: Synthetic oligonucleotide
  Antisense Strand to SEQ ID NO: 370617
uggacacagaaauuagaac

SEQ ID NO: 370619 - RNA, 19 nt, Artificial Sequence
  Description of Artificial Sequence: Synthetic oligonucleotide
  Sense Strand Starting at position 661 of SEQ ID NO: 315673
acuccuucguggucaggau

SEQ ID NO: 370620 - RNA, 19 nt, Artificial Sequence
  Description of Artificial Sequence: Synthetic oligonucleotide
  Antisense Strand to SEQ ID NO: 370619
auccugaccacgaaggagu

SEQ ID NO: 370621 - RNA, 19 nt, Artificial Sequence
  Description of Artificial Sequence: Synthetic oligonucleotide
  Sense Strand Starting at position 661 of SEQ ID NO: 315674
cuccuucguggucaggauu

SEQ ID NO: 370622 - RNA, 19 nt, Artificial Sequence
  Description of Artificial Sequence: Synthetic oligonucleotide
  Antisense Strand to SEQ ID NO: 370621
aauccugaccacgaaggag

SEQ ID NO: 370623 - RNA, 19 nt, Artificial Sequence
  Description of Artificial Sequence: Synthetic oligonucleotide
  Sense Strand Starting at position 661 of SEQ ID NO: 315815
ccauuuacugagcgagcua

SEQ ID NO: 370624 - RNA, 19 nt, Artificial Sequence
  Description of Artificial Sequence: Synthetic oligonucleotide
  Antisense Strand to SEQ ID NO: 370623
uagcucgcucaguaaaugg

SEQ ID NO: 370625 - RNA, 19 nt, Artificial Sequence
  Description of Artificial Sequence: Synthetic oligonucleotide
  Sense Strand Starting at position 661 of SEQ ID NO: 315835
gggaguguucccuagcccu

SEQ ID NO: 370626 - RNA, 19 nt, Artificial Sequence
  Description of Artificial Sequence: Synthetic oligonucleotide
  Antisense Strand to SEQ ID NO: 370625
agggcuagggaacacuccc

SEQ ID NO: 370627 - RNA, 19 nt, Artificial Sequence
  Description of Artificial Sequence: Synthetic oligonucleotide
  Sense Strand Starting at position 661 of SEQ ID NO: 315871
accugacugucugucgaau

SEQ ID NO: 370628 - RNA, 19 nt, Artificial Sequence
  Description of Artificial Sequence: Synthetic oligonucleotide
  Antisense Strand to SEQ ID NO: 370627
auucgacagacagucaggu

SEQ ID NO: 370629 - RNA, 19 nt, Artificial Sequence
  Description of Artificial Sequence: Synthetic oligonucleotide
  Sense Strand Starting at position 661 of SEQ ID NO: 315882
ugucgaaucuauccagaac

SEQ ID NO: 370630 - RNA, 19 nt, Artificial Sequence
  Description of Artificial Sequence: Synthetic oligonucleotide
  Antisense Strand to SEQ ID NO: 370629
guucuggauagauucgaca

SEQ ID NO: 370631 - RNA, 19 nt, Artificial Sequence
  Description of Artificial Sequence: Synthetic oligonucleotide
  Sense Strand Starting at position 661 of SEQ ID NO: 316014
ucagucucugcagaaugaa

SEQ ID NO: 370632 - RNA, 19 nt, Artificial Sequence
  Description of Artificial Sequence: Synthetic oligonucleotide
  Antisense Strand to SEQ ID NO: 370631
uucauucugcagagacuga

SEQ ID NO: 370633 - RNA, 19 nt, Artificial Sequence
  Description of Artificial Sequence: Synthetic oligonucleotide
  Sense Strand Starting at position 661 of SEQ ID NO: 316089
cugagagcugcccaaggua

SEQ ID NO: 370634 - RNA, 19 nt, Artificial Sequence
  Description of Artificial Sequence: Synthetic oligonucleotide
  Antisense Strand to SEQ ID NO: 370633
uaccuugggcagcucucag

SEQ ID NO: 370635 - RNA, 19 nt, Artificial Sequence
  Description of Artificial Sequence: Synthetic oligonucleotide
  Sense Strand Starting at position 661 of SEQ ID NO: 316510
acuguuagagccugaacaa

SEQ ID NO: 370636 - RNA, 19 nt, Artificial Sequence
  Description of Artificial Sequence: Synthetic oligonucleotide
  Antisense Strand to SEQ ID NO: 370635
uuguucaggcucuaacagu

SEQ ID NO: 370637 - RNA, 19 nt, Artificial Sequence
  Description of Artificial Sequence: Synthetic oligonucleotide
  Sense Strand Starting at position 661 of SEQ ID NO: 316511
cuguuagagccugaacaau

SEQ ID NO: 370638 - RNA, 19 nt, Artificial Sequence
  Description of Artificial Sequence: Synthetic oligonucleotide
  Antisense Strand to SEQ ID NO: 370637
auuguucaggcucuaacag

SEQ ID NO: 370639 - RNA, 19 nt, Artificial Sequence
  Description of Artificial Sequence: Synthetic oligonucleotide
  Sense Strand Starting at position 661 of SEQ ID NO: 316577
agcacaucugcugaaguua

SEQ ID NO: 370640 - RNA, 19 nt, Artificial Sequence
  Description of Artificial Sequence: Synthetic oligonucleotide
  Antisense Strand to SEQ ID NO: 370639
uaacuucagcagaugugcu

SEQ ID NO: 370641 - RNA, 19 nt, Artificial Sequence
  Description of Artificial Sequence: Synthetic oligonucleotide
  Sense Strand Starting at position 661 of SEQ ID NO: 316588
ugaaguuacacuugcagga

SEQ ID NO: 370642 - RNA, 19 nt, Artificial Sequence
  Description of Artificial Sequence: Synthetic oligonucleotide
  Antisense Strand to SEQ ID NO: 370641
uccugcaaguguaacuuca

SEQ ID NO: 370643 - RNA, 19 nt, Artificial Sequence
  Description of Artificial Sequence: Synthetic oligonucleotide
  Sense Strand Starting at position 661 of SEQ ID NO: 316592
guuacacuugcaggaguua

SEQ ID NO: 370644 - RNA, 19 nt, Artificial Sequence
  Description of Artificial Sequence: Synthetic oligonucleotide
  Antisense Strand to SEQ ID NO: 370643
uaacuccugcaaguguaac

SEQ ID NO: 370645 - RNA, 19 nt, Artificial Sequence
  Description of Artificial Sequence: Synthetic oligonucleotide
  Sense Strand Starting at position 661 of SEQ ID NO: 316593
uuacacuugcaggaguuau

SEQ ID NO: 370646 - RNA, 19 nt, Artificial Sequence
  Description of Artificial Sequence: Synthetic oligonucleotide
  Antisense Strand to SEQ ID NO: 370645
auaacuccugcaaguguaa

SEQ ID NO: 370647 - RNA, 19 nt, Artificial Sequence
  Description of Artificial Sequence: Synthetic oligonucleotide
  Sense Strand Starting at position 661 of SEQ ID NO: 316607
guuauccaucuaugcaaag

SEQ ID NO: 370648 - RNA, 19 nt, Artificial Sequence
  Description of Artificial Sequence: Synthetic oligonucleotide
  Antisense Strand to SEQ ID NO: 370647
cuuugcauagauggauaac

SEQ ID NO: 370649 - RNA, 19 nt, Artificial Sequence
  Description of Artificial Sequence: Synthetic oligonucleotide
  Sense Strand Starting at position 661 of SEQ ID NO: 316631
agcucucuugccugggaaa

SEQ ID NO: 370650 - RNA, 19 nt, Artificial Sequence
  Description of Artificial Sequence: Synthetic oligonucleotide
  Antisense Strand to SEQ ID NO: 370649
uuucccaggcaagagagcu

SEQ ID NO: 370651 - RNA, 19 nt, Artificial Sequence
  Description of Artificial Sequence: Synthetic oligonucleotide
  Sense Strand Starting at position 661 of SEQ ID NO: 316632
gcucucuugccugggaaac

SEQ ID NO: 370652 - RNA, 19 nt, Artificial Sequence
  Description of Artificial Sequence: Synthetic oligonucleotide
  Antisense Strand to SEQ ID NO: 370651
guuucccaggcaagagagc

SEQ ID NO: 370653 - RNA, 19 nt, Artificial Sequence
  Description of Artificial Sequence: Synthetic oligonucleotide
  Sense Strand Starting at position 661 of SEQ ID NO: 316798
cggucaauccagugacaag

SEQ ID NO: 370654 - RNA, 19 nt, Artificial Sequence
  Description of Artificial Sequence: Synthetic oligonucleotide
  Antisense Strand to SEQ ID NO: 370653
cuugucacuggauugaccg

SEQ ID NO: 370655 - RNA, 19 nt, Artificial Sequence
  Description of Artificial Sequence: Synthetic oligonucleotide
  Sense Strand Starting at position 661 of SEQ ID NO: 316845
ccaacuugcuggucucaga

SEQ ID NO: 370656 - RNA, 19 nt, Artificial Sequence
  Description of Artificial Sequence: Synthetic oligonucleotide
  Antisense Strand to SEQ ID NO: 370655
ucugagaccagcaaguugg

SEQ ID NO: 370657 - RNA, 19 nt, Artificial Sequence
  Description of Artificial Sequence: Synthetic oligonucleotide
  Sense Strand Starting at position 661 of SEQ ID NO: 317243
cuaagcugucccgguauuu

SEQ ID NO: 370658 - RNA, 19 nt, Artificial Sequence
  Description of Artificial Sequence: Synthetic oligonucleotide
  Antisense Strand to SEQ ID NO: 370657
aaauaccgggacagcuuag

SEQ ID NO: 370659 - RNA, 19 nt, Artificial Sequence
  Description of Artificial Sequence: Synthetic oligonucleotide
  Sense Strand Starting at position 661 of SEQ ID NO: 317261
uaaacuaucccgggcguga

SEQ ID NO: 370660 - RNA, 19 nt, Artificial Sequence
  Description of Artificial Sequence: Synthetic oligonucleotide
  Antisense Strand to SEQ ID NO: 370659
ucacgcccgggauaguuua

SEQ ID NO: 370661 - RNA, 19 nt, Artificial Sequence
  Description of Artificial Sequence: Synthetic oligonucleotide
  Sense Strand Starting at position 661 of SEQ ID NO: 317627
ccuagaaguauuggcaagu

SEQ ID NO: 370662 - RNA, 19 nt, Artificial Sequence
  Description of Artificial Sequence: Synthetic oligonucleotide
  Antisense Strand to SEQ ID NO: 370661
acuugccaauacuucuagg

SEQ ID NO: 370663 - RNA, 19 nt, Artificial Sequence
  Description of Artificial Sequence: Synthetic oligonucleotide
  Sense Strand Starting at position 661 of SEQ ID NO: 317848
uuccgauuuccuugugaug

SEQ ID NO: 370664 - RNA, 19 nt, Artificial Sequence
  Description of Artificial Sequence: Synthetic oligonucleotide
  Antisense Strand to SEQ ID NO: 370663
caucacaaggaaaucggaa

SEQ ID NO: 370665 - RNA, 19 nt, Artificial Sequence
  Description of Artificial Sequence: Synthetic oligonucleotide
  Sense Strand Starting at position 661 of SEQ ID NO: 318041
acuguuucuauuuguggua

SEQ ID NO: 370666 - RNA, 19 nt, Artificial Sequence
  Description of Artificial Sequence: Synthetic oligonucleotide
  Antisense Strand to SEQ ID NO: 370665
uaccacaaauagaaacagu

SEQ ID NO: 370667 - RNA, 19 nt, Artificial Sequence
  Description of Artificial Sequence: Synthetic oligonucleotide
  Sense Strand Starting at position 661 of SEQ ID NO: 318042
cuguuucuauuugugguau

SEQ ID NO: 370668 - RNA, 19 nt, Artificial Sequence
  Description of Artificial Sequence: Synthetic oligonucleotide
  Antisense Strand to SEQ ID NO: 370667
auaccacaaauagaaacag

SEQ ID NO: 370669 - RNA, 19 nt, Artificial Sequence
  Description of Artificial Sequence: Synthetic oligonucleotide
  Sense Strand Starting at position 661 of SEQ ID NO: 318231
gagugauauuuacacacag

SEQ ID NO: 370670 - RNA, 19 nt, Artificial Sequence
  Description of Artificial Sequence: Synthetic oligonucleotide
  Antisense Strand to SEQ ID NO: 370669
cuguguguaaauaucacuc

SEQ ID NO: 370671 - RNA, 19 nt, Artificial Sequence
  Description of Artificial Sequence: Synthetic oligonucleotide
  Sense Strand Starting at position 661 of SEQ ID NO: 318262
ugccaagaggcuuaauuaa

SEQ ID NO: 370672 - RNA, 19 nt, Artificial Sequence
  Description of Artificial Sequence: Synthetic oligonucleotide
  Antisense Strand to SEQ ID NO: 370671
uuaauuaagccucuuggca

SEQ ID NO: 370673 - RNA, 19 nt, Artificial Sequence
  Description of Artificial Sequence: Synthetic oligonucleotide
  Sense Strand Starting at position 661 of SEQ ID NO: 318278
uaauauuugcgcuguguuu

SEQ ID NO: 370674 - RNA, 19 nt, Artificial Sequence
  Description of Artificial Sequence: Synthetic oligonucleotide
  Antisense Strand to SEQ ID NO: 370673
aaacacagcgcaaauauua

SEQ ID NO: 370675 - RNA, 19 nt, Artificial Sequence
  Description of Artificial Sequence: Synthetic oligonucleotide
  Sense Strand Starting at position 661 of SEQ ID NO: 318297
ugagaucugcgaugaaagg

SEQ ID NO: 370676 - RNA, 19 nt, Artificial Sequence
  Description of Artificial Sequence: Synthetic oligonucleotide
  Antisense Strand to SEQ ID NO: 370675
ccuuucaucgcagaucuca

SEQ ID NO: 370677 - RNA, 19 nt, Artificial Sequence
  Description of Artificial Sequence: Synthetic oligonucleotide
  Sense Strand Starting at position 661 of SEQ ID NO: 318448
ugucuuguccacuaaauaa

SEQ ID NO: 370678 - RNA, 19 nt, Artificial Sequence
  Description of Artificial Sequence: Synthetic oligonucleotide
  Antisense Strand to SEQ ID NO: 370677
uuauuuaguggacaagaca

SEQ ID NO: 370679 - RNA, 19 nt, Artificial Sequence
  Description of Artificial Sequence: Synthetic oligonucleotide
  Sense Strand Starting at position 661 of SEQ ID NO: 318850
gucucaugauucucgugau

SEQ ID NO: 370680 - RNA, 19 nt, Artificial Sequence
  Description of Artificial Sequence: Synthetic oligonucleotide
  Antisense Strand to SEQ ID NO: 370679
aucacgagaaucaugagac

SEQ ID NO: 370681 - RNA, 19 nt, Artificial Sequence
  Description of Artificial Sequence: Synthetic oligonucleotide
  Sense Strand Starting at position 661 of SEQ ID NO: 318854
caugauucucgugauccac

SEQ ID NO: 370682 - RNA, 19 nt, Artificial Sequence
  Description of Artificial Sequence: Synthetic oligonucleotide
  Antisense Strand to SEQ ID NO: 370681
guggaucacgagaaucaug

SEQ ID NO: 370683 - RNA, 19 nt, Artificial Sequence
  Description of Artificial Sequence: Synthetic oligonucleotide
  Sense Strand Starting at position 661 of SEQ ID NO: 319054
agggaugaaucggcugcau

SEQ ID NO: 370684 - RNA, 19 nt, Artificial Sequence
  Description of Artificial Sequence: Synthetic oligonucleotide
  Antisense Strand to SEQ ID NO: 370683
augcagccgauucaucccu

SEQ ID NO: 370685 - RNA, 19 nt, Artificial Sequence
  Description of Artificial Sequence: Synthetic oligonucleotide
  Sense Strand Starting at position 661 of SEQ ID NO: 319056
ggaugaaucggcugcauuu

SEQ ID NO: 370686 - RNA, 19 nt, Artificial Sequence
  Description of Artificial Sequence: Synthetic oligonucleotide
  Antisense Strand to SEQ ID NO: 370685
aaaugcagccgauucaucc

SEQ ID NO: 370687 - RNA, 19 nt, Artificial Sequence
  Description of Artificial Sequence: Synthetic oligonucleotide
  Sense Strand Starting at position 661 of SEQ ID NO: 319169
ggccucaccacgugacauu

SEQ ID NO: 370688 - RNA, 19 nt, Artificial Sequence
  Description of Artificial Sequence: Synthetic oligonucleotide
  Antisense Strand to SEQ ID NO: 370687
aaugucacguggugaggcc

SEQ ID NO: 370689 - RNA, 19 nt, Artificial Sequence
  Description of Artificial Sequence: Synthetic oligonucleotide
  Sense Strand Starting at position 661 of SEQ ID NO: 319179
cgugacauuuggaggcaga

SEQ ID NO: 370690 - RNA, 19 nt, Artificial Sequence
  Description of Artificial Sequence: Synthetic oligonucleotide
  Antisense Strand to SEQ ID NO: 370689
ucugccuccaaaugucacg

SEQ ID NO: 370691 - RNA, 19 nt, Artificial Sequence
  Description of Artificial Sequence: Synthetic oligonucleotide
  Sense Strand Starting at position 662 of SEQ ID NO: 315495
gugucaucaauguaaggaa

SEQ ID NO: 370692 - RNA, 19 nt, Artificial Sequence
  Description of Artificial Sequence: Synthetic oligonucleotide
  Antisense Strand to SEQ ID NO: 370691
uuccuuacauugaugacac

SEQ ID NO: 370693 - RNA, 19 nt, Artificial Sequence
  Description of Artificial Sequence: Synthetic oligonucleotide
  Sense Strand Starting at position 662 of SEQ ID NO: 315550
cacuguaacccaugggaau

SEQ ID NO: 370694 - RNA, 19 nt, Artificial Sequence
  Description of Artificial Sequence: Synthetic oligonucleotide
  Antisense Strand to SEQ ID NO: 370693
auucccauggguuacagug

SEQ ID NO: 370695 - RNA, 19 nt, Artificial Sequence
  Description of Artificial Sequence: Synthetic oligonucleotide
  Sense Strand Starting at position 662 of SEQ ID NO: 315551
acuguaacccaugggaauu

SEQ ID NO: 370696 - RNA, 19 nt, Artificial Sequence
  Description of Artificial Sequence: Synthetic oligonucleotide
  Antisense Strand to SEQ ID NO: 370695
aauucccauggguuacagu

SEQ ID NO: 370697 - RNA, 19 nt, Artificial Sequence
  Description of Artificial Sequence: Synthetic oligonucleotide
  Sense Strand Starting at position 662 of SEQ ID NO: 315614
gagcuuuggugacucacaa

SEQ ID NO: 370698 - RNA, 19 nt, Artificial Sequence
  Description of Artificial Sequence: Synthetic oligonucleotide
  Antisense Strand to SEQ ID NO: 370697
uugugagucaccaaagcuc

SEQ ID NO: 370699 - RNA, 19 nt, Artificial Sequence
  Description of Artificial Sequence: Synthetic oligonucleotide
  Sense Strand Starting at position 662 of SEQ ID NO: 315722
ggagcuaaauagucaagua

SEQ ID NO: 370700 - RNA, 19 nt, Artificial Sequence
  Description of Artificial Sequence: Synthetic oligonucleotide
  Antisense Strand to SEQ ID NO: 370699
uacuugacuauuuagcucc

SEQ ID NO: 370701 - RNA, 19 nt, Artificial Sequence
  Description of Artificial Sequence: Synthetic oligonucleotide
  Sense Strand Starting at position 662 of SEQ ID NO: 315735
caaguaaggucaguauagu

SEQ ID NO: 370702 - RNA, 19 nt, Artificial Sequence
  Description of Artificial Sequence: Synthetic oligonucleotide
  Antisense Strand to SEQ ID NO: 370701
acuauacugaccuuacuug

SEQ ID NO: 370703 - RNA, 19 nt, Artificial Sequence
  Description of Artificial Sequence: Synthetic oligonucleotide
  Sense Strand Starting at position 662 of SEQ ID NO: 315744
ucaguauagucagccaaau

SEQ ID NO: 370704 - RNA, 19 nt, Artificial Sequence
  Description of Artificial Sequence: Synthetic oligonucleotide
  Antisense Strand to SEQ ID NO: 370703
auuuggcugacuauacuga

SEQ ID NO: 370705 - RNA, 19 nt, Artificial Sequence
  Description of Artificial Sequence: Synthetic oligonucleotide
  Sense Strand Starting at position 662 of SEQ ID NO: 315774
ugacauuuaugccacauga

SEQ ID NO: 370706 - RNA, 19 nt, Artificial Sequence
  Description of Artificial Sequence: Synthetic oligonucleotide
  Antisense Strand to SEQ ID NO: 370705
ucauguggcauaaauguca

SEQ ID NO: 370707 - RNA, 19 nt, Artificial Sequence
  Description of Artificial Sequence: Synthetic oligonucleotide
  Sense Strand Starting at position 662 of SEQ ID NO: 315877
acgggauuaagagggcaau

SEQ ID NO: 370708 - RNA, 19 nt, Artificial Sequence
  Description of Artificial Sequence: Synthetic oligonucleotide
  Antisense Strand to SEQ ID NO: 370707
auugcccucuuaaucccgu

SEQ ID NO: 370709 - RNA, 19 nt, Artificial Sequence
  Description of Artificial Sequence: Synthetic oligonucleotide
  Sense Strand Starting at position 662 of SEQ ID NO: 315878
cgggauuaagagggcaauu

SEQ ID NO: 370710 - RNA, 19 nt, Artificial Sequence
  Description of Artificial Sequence: Synthetic oligonucleotide
  Antisense Strand to SEQ ID NO: 370709
aauugcccucuuaaucccg

SEQ ID NO: 370711 - RNA, 19 nt, Artificial Sequence
  Description of Artificial Sequence: Synthetic oligonucleotide
  Sense Strand Starting at position 662 of SEQ ID NO: 315942
ggccacaugucccugagaa

SEQ ID NO: 370712 - RNA, 19 nt, Artificial Sequence
  Description of Artificial Sequence: Synthetic oligonucleotide
  Antisense Strand to SEQ ID NO: 370711
uucucagggacauguggcc

SEQ ID NO: 370713 - RNA, 19 nt, Artificial Sequence
  Description of Artificial Sequence: Synthetic oligonucleotide
  Sense Strand Starting at position 662 of SEQ ID NO: 315943
gccacaugucccugagaac

SEQ ID NO: 370714 - RNA, 19 nt, Artificial Sequence
  Description of Artificial Sequence: Synthetic oligonucleotide
  Antisense Strand to SEQ ID NO: 370713
guucucagggacauguggc

SEQ ID NO: 370715 - RNA, 19 nt, Artificial Sequence
  Description of Artificial Sequence: Synthetic oligonucleotide
  Sense Strand Starting at position 662 of SEQ ID NO: 316049
uaggaucauugugucaaga

SEQ ID NO: 370716 - RNA, 19 nt, Artificial Sequence
  Description of Artificial Sequence: Synthetic oligonucleotide
  Antisense Strand to SEQ ID NO: 370715
ucuugacacaaugauccua

SEQ ID NO: 370717 - RNA, 19 nt, Artificial Sequence
  Description of Artificial Sequence: Synthetic oligonucleotide
  Sense Strand Starting at position 662 of SEQ ID NO: 316059
gugucaagagcuuaagaca

SEQ ID NO: 370718 - RNA, 19 nt, Artificial Sequence
  Description of Artificial Sequence: Synthetic oligonucleotide
  Antisense Strand to SEQ ID NO: 370717
ugucuuaagcucuugacac

SEQ ID NO: 370719 - RNA, 19 nt, Artificial Sequence
  Description of Artificial Sequence: Synthetic oligonucleotide
  Sense Strand Starting at position 662 of SEQ ID NO: 316084
ggcaccuagcaagaucaaa

SEQ ID NO: 370720 - RNA, 19 nt, Artificial Sequence
  Description of Artificial Sequence: Synthetic oligonucleotide
  Antisense Strand to SEQ ID NO: 370719
uuugaucuugcuaggugcc

SEQ ID NO: 370721 - RNA, 19 nt, Artificial Sequence
  Description of Artificial Sequence: Synthetic oligonucleotide
  Sense Strand Starting at position 662 of SEQ ID NO: 316176
acaagagguaugugagcau

SEQ ID NO: 370722 - RNA, 19 nt, Artificial Sequence
  Description of Artificial Sequence: Synthetic oligonucleotide
  Antisense Strand to SEQ ID NO: 370721
augcucacauaccucuugu

SEQ ID NO: 370723 - RNA, 19 nt, Artificial Sequence
  Description of Artificial Sequence: Synthetic oligonucleotide
  Sense Strand Starting at position 662 of SEQ ID NO: 316180
gagguaugugagcauccga

SEQ ID NO: 370724 - RNA, 19 nt, Artificial Sequence
  Description of Artificial Sequence: Synthetic oligonucleotide
  Antisense Strand to SEQ ID NO: 370723
ucggaugcucacauaccuc

SEQ ID NO: 370725 - RNA, 19 nt, Artificial Sequence
  Description of Artificial Sequence: Synthetic oligonucleotide
  Sense Strand Starting at position 662 of SEQ ID NO: 316217
gcaugauuagcagagguuc

SEQ ID NO: 370726 - RNA, 19 nt, Artificial Sequence
  Description of Artificial Sequence: Synthetic oligonucleotide
  Antisense Strand to SEQ ID NO: 370725
gaaccucugcuaaucaugc

SEQ ID NO: 370727 - RNA, 19 nt, Artificial Sequence
  Description of Artificial Sequence: Synthetic oligonucleotide
  Sense Strand Starting at position 662 of SEQ ID NO: 316219
augauuagcagagguucuu

SEQ ID NO: 370728 - RNA, 19 nt, Artificial Sequence
  Description of Artificial Sequence: Synthetic oligonucleotide
  Antisense Strand to SEQ ID NO: 370727
aagaaccucugcuaaucau

SEQ ID NO: 370729 - RNA, 19 nt, Artificial Sequence
  Description of Artificial Sequence: Synthetic oligonucleotide
  Sense Strand Starting at position 662 of SEQ ID NO: 316229
gagguucuuugggugaaua

SEQ ID NO: 370730 - RNA, 19 nt, Artificial Sequence
  Description of Artificial Sequence: Synthetic oligonucleotide
  Antisense Strand to SEQ ID NO: 370729
uauucacccaaagaaccuc

SEQ ID NO: 370731 - RNA, 19 nt, Artificial Sequence
  Description of Artificial Sequence: Synthetic oligonucleotide
  Sense Strand Starting at position 662 of SEQ ID NO: 316230
agguucuuugggugaauaa

SEQ ID NO: 370732 - RNA, 19 nt, Artificial Sequence
  Description of Artificial Sequence: Synthetic oligonucleotide
  Antisense Strand to SEQ ID NO: 370731
uuauucacccaaagaaccu

SEQ ID NO: 370733 - RNA, 19 nt, Artificial Sequence
  Description of Artificial Sequence: Synthetic oligonucleotide
  Sense Strand Starting at position 662 of SEQ ID NO: 316231
gguucuuugggugaauaau

SEQ ID NO: 370734 - RNA, 19 nt, Artificial Sequence
  Description of Artificial Sequence: Synthetic oligonucleotide
  Antisense Strand to SEQ ID NO: 370733
auuauucacccaaagaacc

SEQ ID NO: 370735 - RNA, 19 nt, Artificial Sequence
  Description of Artificial Sequence: Synthetic oligonucleotide
  Sense Strand Starting at position 662 of SEQ ID NO: 316239
gggugaauaaugggugaac

SEQ ID NO: 370736 - RNA, 19 nt, Artificial Sequence
  Description of Artificial Sequence: Synthetic oligonucleotide
  Antisense Strand to SEQ ID NO: 370735
guucacccauuauucaccc

SEQ ID NO: 370737 - RNA, 19 nt, Artificial Sequence
  Description of Artificial Sequence: Synthetic oligonucleotide
  Sense Strand Starting at position 662 of SEQ ID NO: 316269
ugaguucugggagaggguu

SEQ ID NO: 370738 - RNA, 19 nt, Artificial Sequence
  Description of Artificial Sequence: Synthetic oligonucleotide
  Antisense Strand to SEQ ID NO: 370737
aacccucucccagaacuca

SEQ ID NO: 370739 - RNA, 19 nt, Artificial Sequence
  Description of Artificial Sequence: Synthetic oligonucleotide
  Sense Strand Starting at position 662 of SEQ ID NO: 316281
gaggguuugguccagcaga

SEQ ID NO: 370740 - RNA, 19 nt, Artificial Sequence
  Description of Artificial Sequence: Synthetic oligonucleotide
  Antisense Strand to SEQ ID NO: 370739
ucugcuggaccaaacccuc

SEQ ID NO: 370741 - RNA, 19 nt, Artificial Sequence
  Description of Artificial Sequence: Synthetic oligonucleotide
  Sense Strand Starting at position 662 of SEQ ID NO: 316323
gcuaacaagccagacaauu

SEQ ID NO: 370742 - RNA, 19 nt, Artificial Sequence
  Description of Artificial Sequence: Synthetic oligonucleotide
  Antisense Strand to SEQ ID NO: 370741
aauugucuggcuuguuagc

SEQ ID NO: 370743 - RNA, 19 nt, Artificial Sequence
  Description of Artificial Sequence: Synthetic oligonucleotide
  Sense Strand Starting at position 662 of SEQ ID NO: 316999
gcgcuaacaggcuauauuu

SEQ ID NO: 370744 - RNA, 19 nt, Artificial Sequence
  Description of Artificial Sequence: Synthetic oligonucleotide
  Antisense Strand to SEQ ID NO: 370743
aaauauagccuguuagcgc

SEQ ID NO: 370745 - RNA, 19 nt, Artificial Sequence
  Description of Artificial Sequence: Synthetic oligonucleotide
  Sense Strand Starting at position 662 of SEQ ID NO: 317008
ggcuauauuuguaggcgga

SEQ ID NO: 370746 - RNA, 19 nt, Artificial Sequence
  Description of Artificial Sequence: Synthetic oligonucleotide
  Antisense Strand to SEQ ID NO: 370745
uccgccuacaaauauagcc

SEQ ID NO: 370747 - RNA, 19 nt, Artificial Sequence
  Description of Artificial Sequence: Synthetic oligonucleotide
  Sense Strand Starting at position 662 of SEQ ID NO: 317009
gcuauauuuguaggcggau

SEQ ID NO: 370748 - RNA, 19 nt, Artificial Sequence
  Description of Artificial Sequence: Synthetic oligonucleotide
  Antisense Strand to SEQ ID NO: 370747
auccgccuacaaauauagc

SEQ ID NO: 370749 - RNA, 19 nt, Artificial Sequence
  Description of Artificial Sequence: Synthetic oligonucleotide
  Sense Strand Starting at position 662 of SEQ ID NO: 317063
cuaucuauucuaugugacu

SEQ ID NO: 370750 - RNA, 19 nt, Artificial Sequence
  Description of Artificial Sequence: Synthetic oligonucleotide
  Antisense Strand to SEQ ID NO: 370749
agucacauagaauagauag

SEQ ID NO: 370751 - RNA, 19 nt, Artificial Sequence
  Description of Artificial Sequence: Synthetic oligonucleotide
  Sense Strand Starting at position 662 of SEQ ID NO: 317292
ggcuuugaaagccauauga

SEQ ID NO: 370752 - RNA, 19 nt, Artificial Sequence
  Description of Artificial Sequence: Synthetic oligonucleotide
  Antisense Strand to SEQ ID NO: 370751
ucauauggcuuucaaagcc

SEQ ID NO: 370753 - RNA, 19 nt, Artificial Sequence
  Description of Artificial Sequence: Synthetic oligonucleotide
  Sense Strand Starting at position 662 of SEQ ID NO: 317412
gaguuuagguucucuuuag

SEQ ID NO: 370754 - RNA, 19 nt, Artificial Sequence
  Description of Artificial Sequence: Synthetic oligonucleotide
  Antisense Strand to SEQ ID NO: 370753
cuaaagagaaccuaaacuc

SEQ ID NO: 370755 - RNA, 19 nt, Artificial Sequence
  Description of Artificial Sequence: Synthetic oligonucleotide
  Sense Strand Starting at position 662 of SEQ ID NO: 317413
aguuuagguucucuuuaga

SEQ ID NO: 370756 - RNA, 19 nt, Artificial Sequence
  Description of Artificial Sequence: Synthetic oligonucleotide
  Antisense Strand to SEQ ID NO: 370755
ucuaaagagaaccuaaacu

SEQ ID NO: 370757 - RNA, 19 nt, Artificial Sequence
  Description of Artificial Sequence: Synthetic oligonucleotide
  Sense Strand Starting at position 662 of SEQ ID NO: 317416
uuagguucucuuuagauac

SEQ ID NO: 370758 - RNA, 19 nt, Artificial Sequence
  Description of Artificial Sequence: Synthetic oligonucleotide
  Antisense Strand to SEQ ID NO: 370757
guaucuaaagagaaccuaa

SEQ ID NO: 370759 - RNA, 19 nt, Artificial Sequence
  Description of Artificial Sequence: Synthetic oligonucleotide
  Sense Strand Starting at position 662 of SEQ ID NO: 317607
ugugauauaugugucauac

SEQ ID NO: 370760 - RNA, 19 nt, Artificial Sequence
  Description of Artificial Sequence: Synthetic oligonucleotide
  Antisense Strand to SEQ ID NO: 370759
guaugacacauauaucaca

SEQ ID NO: 370761 - RNA, 19 nt, Artificial Sequence
  Description of Artificial Sequence: Synthetic oligonucleotide
  Sense Strand Starting at position 662 of SEQ ID NO: 318365
cucuuugagcuauaugucu

SEQ ID NO: 370762 - RNA, 19 nt, Artificial Sequence
  Description of Artificial Sequence: Synthetic oligonucleotide
  Antisense Strand to SEQ ID NO: 370761
agacauauagcucaaagag

SEQ ID NO: 370763 - RNA, 19 nt, Artificial Sequence
  Description of Artificial Sequence: Synthetic oligonucleotide
  Sense Strand Starting at position 662 of SEQ ID NO: 318392
ugaaauuacuugcuauugu

SEQ ID NO: 370764 - RNA, 19 nt, Artificial Sequence
  Description of Artificial Sequence: Synthetic oligonucleotide
  Antisense Strand to SEQ ID NO: 370763
acaauagcaaguaauuuca

SEQ ID NO: 370765 - RNA, 19 nt, Artificial Sequence
  Description of Artificial Sequence: Synthetic oligonucleotide
  Sense Strand Starting at position 662 of SEQ ID NO: 318418
agcuguaaauuagccuaau

SEQ ID NO: 370766 - RNA, 19 nt, Artificial Sequence
  Description of Artificial Sequence: Synthetic oligonucleotide
  Antisense Strand to SEQ ID NO: 370765
auuaggcuaauuuacagcu

SEQ ID NO: 370767 - RNA, 19 nt, Artificial Sequence
  Description of Artificial Sequence: Synthetic oligonucleotide
  Sense Strand Starting at position 662 of SEQ ID NO: 318419
gcuguaaauuagccuaaua

SEQ ID NO: 370768 - RNA, 19 nt, Artificial Sequence
  Description of Artificial Sequence: Synthetic oligonucleotide
  Antisense Strand to SEQ ID NO: 370767
uauuaggcuaauuuacagc

SEQ ID NO: 370769 - RNA, 19 nt, Artificial Sequence
  Description of Artificial Sequence: Synthetic oligonucleotide
  Sense Strand Starting at position 662 of SEQ ID NO: 319050
auuuaugccugggauacaa

SEQ ID NO: 370770 - RNA, 19 nt, Artificial Sequence
  Description of Artificial Sequence: Synthetic oligonucleotide
  Antisense Strand to SEQ ID NO: 370769
uuguaucccaggcauaaau

SEQ ID NO: 370771 - RNA, 19 nt, Artificial Sequence
  Description of Artificial Sequence: Synthetic oligonucleotide
  Sense Strand Starting at position 663 of SEQ ID NO: 315248
ggaacucacugaguaauua

SEQ ID NO: 370772 - RNA, 19 nt, Artificial Sequence
  Description of Artificial Sequence: Synthetic oligonucleotide
  Antisense Strand to SEQ ID NO: 370771
uaauuacucagugaguucc

SEQ ID NO: 370773 - RNA, 19 nt, Artificial Sequence
  Description of Artificial Sequence: Synthetic oligonucleotide
  Sense Strand Starting at position 663 of SEQ ID NO: 315398
aggaaucuguaagcuauua

SEQ ID NO: 370774 - RNA, 19 nt, Artificial Sequence
  Description of Artificial Sequence: Synthetic oligonucleotide
  Antisense Strand to SEQ ID NO: 370773
uaauagcuuacagauuccu

SEQ ID NO: 370775 - RNA, 19 nt, Artificial Sequence
  Description of Artificial Sequence: Synthetic oligonucleotide
  Sense Strand Starting at position 663 of SEQ ID NO: 315577
agucucuuugccuggaaag

SEQ ID NO: 370776 - RNA, 19 nt, Artificial Sequence
  Description of Artificial Sequence: Synthetic oligonucleotide
  Antisense Strand to SEQ ID NO: 370775
cuuuccaggcaaagagacu

SEQ ID NO: 370777 - RNA, 19 nt, Artificial Sequence
  Description of Artificial Sequence: Synthetic oligonucleotide
  Sense Strand Starting at position 663 of SEQ ID NO: 315878
uugacugcugacugacaga

SEQ ID NO: 370778 - RNA, 19 nt, Artificial Sequence
  Description of Artificial Sequence: Synthetic oligonucleotide
  Antisense Strand to SEQ ID NO: 370777
ucugucagucagcagucaa

SEQ ID NO: 370779 - RNA, 19 nt, Artificial Sequence
  Description of Artificial Sequence: Synthetic oligonucleotide
  Sense Strand Starting at position 663 of SEQ ID NO: 315940
uaaagaaaugaucguuugu

SEQ ID NO: 370780 - RNA, 19 nt, Artificial Sequence
  Description of Artificial Sequence: Synthetic oligonucleotide
  Antisense Strand to SEQ ID NO: 370779
acaaacgaucauuucuuua

SEQ ID NO: 370781 - RNA, 19 nt, Artificial Sequence
  Description of Artificial Sequence: Synthetic oligonucleotide
  Sense Strand Starting at position 663 of SEQ ID NO: 316089
acucauaguugagucuuua

SEQ ID NO: 370782 - RNA, 19 nt, Artificial Sequence
  Description of Artificial Sequence: Synthetic oligonucleotide
  Antisense Strand to SEQ ID NO: 370781
uaaagacucaacuaugagu

SEQ ID NO: 370783 - RNA, 19 nt, Artificial Sequence
  Description of Artificial Sequence: Synthetic oligonucleotide
  Sense Strand Starting at position 663 of SEQ ID NO: 316097
uugagucuuuagucucaaa

SEQ ID NO: 370784 - RNA, 19 nt, Artificial Sequence
  Description of Artificial Sequence: Synthetic oligonucleotide
  Antisense Strand to SEQ ID NO: 370783
uuugagacuaaagacucaa

SEQ ID NO: 370785 - RNA, 19 nt, Artificial Sequence
  Description of Artificial Sequence: Synthetic oligonucleotide
  Sense Strand Starting at position 663 of SEQ ID NO: 316766
acaauaugauuauuaggca

SEQ ID NO: 370786 - RNA, 19 nt, Artificial Sequence
  Description of Artificial Sequence: Synthetic oligonucleotide
  Antisense Strand to SEQ ID NO: 370785
ugccuaauaaucauauugu

SEQ ID NO: 370787 - RNA, 19 nt, Artificial Sequence
  Description of Artificial Sequence: Synthetic oligonucleotide
  Sense Strand Starting at position 663 of SEQ ID NO: 317035
gaaauuuguugacaguuga

SEQ ID NO: 370788 - RNA, 19 nt, Artificial Sequence
  Description of Artificial Sequence: Synthetic oligonucleotide
  Antisense Strand to SEQ ID NO: 370787
ucaacugucaacaaauuuc

SEQ ID NO: 370789 - RNA, 19 nt, Artificial Sequence
  Description of Artificial Sequence: Synthetic oligonucleotide
  Sense Strand Starting at position 663 of SEQ ID NO: 317070
ucuccuucugaggaaguuu

SEQ ID NO: 370790 - RNA, 19 nt, Artificial Sequence
  Description of Artificial Sequence: Synthetic oligonucleotide
  Antisense Strand to SEQ ID NO: 370789
aaacuuccucagaaggaga

SEQ ID NO: 370791 - RNA, 19 nt, Artificial Sequence
  Description of Artificial Sequence: Synthetic oligonucleotide
  Sense Strand Starting at position 663 of SEQ ID NO: 317283
gcuguuaauguuuaacaug

SEQ ID NO: 370792 - RNA, 19 nt, Artificial Sequence
  Description of Artificial Sequence: Synthetic oligonucleotide
  Antisense Strand to SEQ ID NO: 370791
cauguuaaacauuaacagc

SEQ ID NO: 370793 - RNA, 19 nt, Artificial Sequence
  Description of Artificial Sequence: Synthetic oligonucleotide
  Sense Strand Starting at position 663 of SEQ ID NO: 317312
ugauguaacccaggaucca

SEQ ID NO: 370794 - RNA, 19 nt, Artificial Sequence
  Description of Artificial Sequence: Synthetic oligonucleotide
  Antisense Strand to SEQ ID NO: 370793
uggauccuggguuacauca

SEQ ID NO: 370795 - RNA, 19 nt, Artificial Sequence
  Description of Artificial Sequence: Synthetic oligonucleotide
  Sense Strand Starting at position 663 of SEQ ID NO: 317390
agauacaagucauuaagca

SEQ ID NO: 370796 - RNA, 19 nt, Artificial Sequence
  Description of Artificial Sequence: Synthetic oligonucleotide
  Antisense Strand to SEQ ID NO: 370795
ugcuuaaugacuuguaucu

SEQ ID NO: 370797 - RNA, 19 nt, Artificial Sequence
  Description of Artificial Sequence: Synthetic oligonucleotide
  Sense Strand Starting at position 663 of SEQ ID NO: 317397
agucauuaagcaugacuuu

SEQ ID NO: 370798 - RNA, 19 nt, Artificial Sequence
  Description of Artificial Sequence: Synthetic oligonucleotide
  Antisense Strand to SEQ ID NO: 370797
aaagucaugcuuaaugacu

SEQ ID NO: 370799 - RNA, 19 nt, Artificial Sequence
  Description of Artificial Sequence: Synthetic oligonucleotide
  Sense Strand Starting at position 663 of SEQ ID NO: 317458
gucaauuaguuaccugaag

SEQ ID NO: 370800 - RNA, 19 nt, Artificial Sequence
  Description of Artificial Sequence: Synthetic oligonucleotide
  Antisense Strand to SEQ ID NO: 370799
cuucagguaacuaauugac

SEQ ID NO: 370801 - RNA, 19 nt, Artificial Sequence
  Description of Artificial Sequence: Synthetic oligonucleotide
  Sense Strand Starting at position 663 of SEQ ID NO: 317459
ucaauuaguuaccugaaga

SEQ ID NO: 370802 - RNA, 19 nt, Artificial Sequence
  Description of Artificial Sequence: Synthetic oligonucleotide
  Antisense Strand to SEQ ID NO: 370801
ucuucagguaacuaauuga

SEQ ID NO: 370803 - RNA, 19 nt, Artificial Sequence
  Description of Artificial Sequence: Synthetic oligonucleotide
  Sense Strand Starting at position 663 of SEQ ID NO: 317649
cugaaacauguuggcagua

SEQ ID NO: 370804 - RNA, 19 nt, Artificial Sequence
  Description of Artificial Sequence: Synthetic oligonucleotide
  Antisense Strand to SEQ ID NO: 370803
uacugccaacauguuucag

SEQ ID NO: 370805 - RNA, 19 nt, Artificial Sequence
  Description of Artificial Sequence: Synthetic oligonucleotide
  Sense Strand Starting at position 663 of SEQ ID NO: 317650
ugaaacauguuggcaguaa

SEQ ID NO: 370806 - RNA, 19 nt, Artificial Sequence
  Description of Artificial Sequence: Synthetic oligonucleotide
  Antisense Strand to SEQ ID NO: 370805
uuacugccaacauguuuca

SEQ ID NO: 370807 - RNA, 19 nt, Artificial Sequence
  Description of Artificial Sequence: Synthetic oligonucleotide
  Sense Strand Starting at position 663 of SEQ ID NO: 317654
acauguuggcaguaaagaa

SEQ ID NO: 370808 - RNA, 19 nt, Artificial Sequence
  Description of Artificial Sequence: Synthetic oligonucleotide
  Antisense Strand to SEQ ID NO: 370807
uucuuuacugccaacaugu

SEQ ID NO: 370809 - RNA, 19 nt, Artificial Sequence
  Description of Artificial Sequence: Synthetic oligonucleotide
  Sense Strand Starting at position 663 of SEQ ID NO: 317753
aagagacaguucuugucuu

SEQ ID NO: 370810 - RNA, 19 nt, Artificial Sequence
  Description of Artificial Sequence: Synthetic oligonucleotide
  Antisense Strand to SEQ ID NO: 370809
aagacaagaacugucucuu

SEQ ID NO: 370811 - RNA, 19 nt, Artificial Sequence
  Description of Artificial Sequence: Synthetic oligonucleotide
  Sense Strand Starting at position 663 of SEQ ID NO: 317765
uugucuuugaugggaucuu

SEQ ID NO: 370812 - RNA, 19 nt, Artificial Sequence
  Description of Artificial Sequence: Synthetic oligonucleotide
  Antisense Strand to SEQ ID NO: 370811
aagaucccaucaaagacaa

SEQ ID NO: 370813 - RNA, 19 nt, Artificial Sequence
  Description of Artificial Sequence: Synthetic oligonucleotide
  Sense Strand Starting at position 663 of SEQ ID NO: 317777
ggaucuuaaccugguggga

SEQ ID NO: 370814 - RNA, 19 nt, Artificial Sequence
  Description of Artificial Sequence: Synthetic oligonucleotide
  Antisense Strand to SEQ ID NO: 370813
ucccaccagguuaagaucc

SEQ ID NO: 370815 - RNA, 19 nt, Artificial Sequence
  Description of Artificial Sequence: Synthetic oligonucleotide
  Sense Strand Starting at position 663 of SEQ ID NO: 317871
cuaagcaugccuuggagaa

SEQ ID NO: 370816 - RNA, 19 nt, Artificial Sequence
  Description of Artificial Sequence: Synthetic oligonucleotide
  Antisense Strand to SEQ ID NO: 370815
uucuccaaggcaugcuuag

SEQ ID NO: 370817 - RNA, 19 nt, Artificial Sequence
  Description of Artificial Sequence: Synthetic oligonucleotide
  Sense Strand Starting at position 663 of SEQ ID NO: 317872
uaagcaugccuuggagaac

SEQ ID NO: 370818 - RNA, 19 nt, Artificial Sequence
  Description of Artificial Sequence: Synthetic oligonucleotide
  Antisense Strand to SEQ ID NO: 370817
guucuccaaggcaugcuua

SEQ ID NO: 370819 - RNA, 19 nt, Artificial Sequence
  Description of Artificial Sequence: Synthetic oligonucleotide
  Sense Strand Starting at position 663 of SEQ ID NO: 317958
aagaguaucccaggcagaa

SEQ ID NO: 370820 - RNA, 19 nt, Artificial Sequence
  Description of Artificial Sequence: Synthetic oligonucleotide
  Antisense Strand to SEQ ID NO: 370819
uucugccugggauacucuu

SEQ ID NO: 370821 - RNA, 19 nt, Artificial Sequence
  Description of Artificial Sequence: Synthetic oligonucleotide
  Sense Strand Starting at position 663 of SEQ ID NO: 318012
gcuggaagagccuagcauu

SEQ ID NO: 370822 - RNA, 19 nt, Artificial Sequence
  Description of Artificial Sequence: Synthetic oligonucleotide
  Antisense Strand to SEQ ID NO: 370821
aaugcuaggcucuuccagc

SEQ ID NO: 370823 - RNA, 19 nt, Artificial Sequence
  Description of Artificial Sequence: Synthetic oligonucleotide
  Sense Strand Starting at position 663 of SEQ ID NO: 318071
ugaggucugguaugaauug

SEQ ID NO: 370824 - RNA, 19 nt, Artificial Sequence
  Description of Artificial Sequence: Synthetic oligonucleotide
  Antisense Strand to SEQ ID NO: 370823
caauucauaccagaccuca

SEQ ID NO: 370825 - RNA, 19 nt, Artificial Sequence
  Description of Artificial Sequence: Synthetic oligonucleotide
  Sense Strand Starting at position 663 of SEQ ID NO: 318076
ucugguaugaauugaagcu

SEQ ID NO: 370826 - RNA, 19 nt, Artificial Sequence
  Description of Artificial Sequence: Synthetic oligonucleotide
  Antisense Strand to SEQ ID NO: 370825
agcuucaauucauaccaga

SEQ ID NO: 370827 - RNA, 19 nt, Artificial Sequence
  Description of Artificial Sequence: Synthetic oligonucleotide
  Sense Strand Starting at position 663 of SEQ ID NO: 318077
cugguaugaauugaagcua

SEQ ID NO: 370828 - RNA, 19 nt, Artificial Sequence
  Description of Artificial Sequence: Synthetic oligonucleotide
  Antisense Strand to SEQ ID NO: 370827
uagcuucaauucauaccag

SEQ ID NO: 370829 - RNA, 19 nt, Artificial Sequence
  Description of Artificial Sequence: Synthetic oligonucleotide
  Sense Strand Starting at position 663 of SEQ ID NO: 318099
aggauucguaaaggucaau

SEQ ID NO: 370830 - RNA, 19 nt, Artificial Sequence
  Description of Artificial Sequence: Synthetic oligonucleotide
  Antisense Strand to SEQ ID NO: 370829
auugaccuuuacgaauccu

SEQ ID NO: 370831 - RNA, 19 nt, Artificial Sequence
  Description of Artificial Sequence: Synthetic oligonucleotide
  Sense Strand Starting at position 663 of SEQ ID NO: 318102
auucguaaaggucaaucua

SEQ ID NO: 370832 - RNA, 19 nt, Artificial Sequence
  Description of Artificial Sequence: Synthetic oligonucleotide
  Antisense Strand to SEQ ID NO: 370831
uagauugaccuuuacgaau

SEQ ID NO: 370833 - RNA, 19 nt, Artificial Sequence
  Description of Artificial Sequence: Synthetic oligonucleotide
  Sense Strand Starting at position 663 of SEQ ID NO: 318298
ggcuuaaaggugugaacca

SEQ ID NO: 370834 - RNA, 19 nt, Artificial Sequence
  Description of Artificial Sequence: Synthetic oligonucleotide
  Antisense Strand to SEQ ID NO: 370833
ugguucacaccuuuaagcc

SEQ ID NO: 370835 - RNA, 19 nt, Artificial Sequence
  Description of Artificial Sequence: Synthetic oligonucleotide
  Sense Strand Starting at position 663 of SEQ ID NO: 318326
gcagaaguauucuugaaau

SEQ ID NO: 370836 - RNA, 19 nt, Artificial Sequence
  Description of Artificial Sequence: Synthetic oligonucleotide
  Antisense Strand to SEQ ID NO: 370835
auuucaagaauacuucugc

SEQ ID NO: 370837 - RNA, 19 nt, Artificial Sequence
  Description of Artificial Sequence: Synthetic oligonucleotide
  Sense Strand Starting at position 663 of SEQ ID NO: 318387
guaacauuauguuccagaa

SEQ ID NO: 370838 - RNA, 19 nt, Artificial Sequence
  Description of Artificial Sequence: Synthetic oligonucleotide
  Antisense Strand to SEQ ID NO: 370837
uucuggaacauaauguuac

SEQ ID NO: 370839 - RNA, 19 nt, Artificial Sequence
  Description of Artificial Sequence: Synthetic oligonucleotide
  Sense Strand Starting at position 663 of SEQ ID NO: 318391
cauuauguuccagaauggu

SEQ ID NO: 370840 - RNA, 19 nt, Artificial Sequence
  Description of Artificial Sequence: Synthetic oligonucleotide
  Antisense Strand to SEQ ID NO: 370839
accauucuggaacauaaug

SEQ ID NO: 370841 - RNA, 19 nt, Artificial Sequence
  Description of Artificial Sequence: Synthetic oligonucleotide
  Sense Strand Starting at position 663 of SEQ ID NO: 318579
ugguuuacccagcaacaga

SEQ ID NO: 370842 - RNA, 19 nt, Artificial Sequence
  Description of Artificial Sequence: Synthetic oligonucleotide
  Antisense Strand to SEQ ID NO: 370841
ucuguugcuggguaaacca

SEQ ID NO: 370843 - RNA, 19 nt, Artificial Sequence
  Description of Artificial Sequence: Synthetic oligonucleotide
  Sense Strand Starting at position 663 of SEQ ID NO: 318794
ggacaccuccauggucauu

SEQ ID NO: 370844 - RNA, 19 nt, Artificial Sequence
  Description of Artificial Sequence: Synthetic oligonucleotide
  Antisense Strand to SEQ ID NO: 370843
aaugaccauggaggugucc

SEQ ID NO: 370845 - RNA, 19 nt, Artificial Sequence
  Description of Artificial Sequence: Synthetic oligonucleotide
  Sense Strand Starting at position 663 of SEQ ID NO: 318860
ggagcuagcucaguaaaug

SEQ ID NO: 370846 - RNA, 19 nt, Artificial Sequence
  Description of Artificial Sequence: Synthetic oligonucleotide
  Antisense Strand to SEQ ID NO: 370845
cauuuacugagcuagcucc

SEQ ID NO: 370847 - RNA, 19 nt, Artificial Sequence
  Description of Artificial Sequence: Synthetic oligonucleotide
  Sense Strand Starting at position 663 of SEQ ID NO: 319013
guucucugugaagaucagu

SEQ ID NO: 370848 - RNA, 19 nt, Artificial Sequence
  Description of Artificial Sequence: Synthetic oligonucleotide
  Antisense Strand to SEQ ID NO: 370847
acugaucuucacagagaac

SEQ ID NO: 370849 - RNA, 19 nt, Artificial Sequence
  Description of Artificial Sequence: Synthetic oligonucleotide
  Sense Strand Starting at position 663 of SEQ ID NO: 319018
cugugaagaucaguacacu

SEQ ID NO: 370850 - RNA, 19 nt, Artificial Sequence
  Description of Artificial Sequence: Synthetic oligonucleotide
  Antisense Strand to SEQ ID NO: 370849
aguguacugaucuucacag

SEQ ID NO: 370851 - RNA, 19 nt, Artificial Sequence
  Description of Artificial Sequence: Synthetic oligonucleotide
  Sense Strand Starting at position 664 of SEQ ID NO: 315417
gcgacagaaucgcuugaau

SEQ ID NO: 370852 - RNA, 19 nt, Artificial Sequence
  Description of Artificial Sequence: Synthetic oligonucleotide
  Antisense Strand to SEQ ID NO: 370851
auucaagcgauucugucgc

SEQ ID NO: 370853 - RNA, 19 nt, Artificial Sequence
  Description of Artificial Sequence: Synthetic oligonucleotide
  Sense Strand Starting at position 664 of SEQ ID NO: 315419
gacagaaucgcuugaaugc

SEQ ID NO: 370854 - RNA, 19 nt, Artificial Sequence
  Description of Artificial Sequence: Synthetic oligonucleotide
  Antisense Strand to SEQ ID NO: 370853
gcauucaagcgauucuguc

SEQ ID NO: 370855 - RNA, 19 nt, Artificial Sequence
  Description of Artificial Sequence: Synthetic oligonucleotide
  Sense Strand Starting at position 664 of SEQ ID NO: 315598
gcaaguagaucccaaauag

SEQ ID NO: 370856 - RNA, 19 nt, Artificial Sequence
  Description of Artificial Sequence: Synthetic oligonucleotide
  Antisense Strand to SEQ ID NO: 370855
cuauuugggaucuacuugc

SEQ ID NO: 370857 - RNA, 19 nt, Artificial Sequence
  Description of Artificial Sequence: Synthetic oligonucleotide
  Sense Strand Starting at position 664 of SEQ ID NO: 315656
acugucuuccuugguauua

SEQ ID NO: 370858 - RNA, 19 nt, Artificial Sequence
  Description of Artificial Sequence: Synthetic oligonucleotide
  Antisense Strand to SEQ ID NO: 370857
uaauaccaaggaagacagu

SEQ ID NO: 370859 - RNA, 19 nt, Artificial Sequence
  Description of Artificial Sequence: Synthetic oligonucleotide
  Sense Strand Starting at position 664 of SEQ ID NO: 315661
cuuccuugguauuaagaga

SEQ ID NO: 370860 - RNA, 19 nt, Artificial Sequence
  Description of Artificial Sequence: Synthetic oligonucleotide
  Antisense Strand to SEQ ID NO: 370859
ucucuuaauaccaaggaag

SEQ ID NO: 370861 - RNA, 19 nt, Artificial Sequence
  Description of Artificial Sequence: Synthetic oligonucleotide
  Sense Strand Starting at position 664 of SEQ ID NO: 315691
gagaaucuccgagggcaca

SEQ ID NO: 370862 - RNA, 19 nt, Artificial Sequence
  Description of Artificial Sequence: Synthetic oligonucleotide
  Antisense Strand to SEQ ID NO: 370861
ugugcccucggagauucuc

SEQ ID NO: 370863 - RNA, 19 nt, Artificial Sequence
  Description of Artificial Sequence: Synthetic oligonucleotide
  Sense Strand Starting at position 664 of SEQ ID NO: 315704
ggcacagaaaugugucaga

SEQ ID NO: 370864 - RNA, 19 nt, Artificial Sequence
  Description of Artificial Sequence: Synthetic oligonucleotide
  Antisense Strand to SEQ ID NO: 370863
ucugacacauuucugugcc

SEQ ID NO: 370865 - RNA, 19 nt, Artificial Sequence
  Description of Artificial Sequence: Synthetic oligonucleotide
  Sense Strand Starting at position 664 of SEQ ID NO: 315707
acagaaaugugucagacua

SEQ ID NO: 370866 - RNA, 19 nt, Artificial Sequence
  Description of Artificial Sequence: Synthetic oligonucleotide
  Antisense Strand to SEQ ID NO: 370865
uagucugacacauuucugu

SEQ ID NO: 370867 - RNA, 19 nt, Artificial Sequence
  Description of Artificial Sequence: Synthetic oligonucleotide
  Sense Strand Starting at position 664 of SEQ ID NO: 315709
agaaaugugucagacuaca

SEQ ID NO: 370868 - RNA, 19 nt, Artificial Sequence
  Description of Artificial Sequence: Synthetic oligonucleotide
  Antisense Strand to SEQ ID NO: 370867
uguagucugacacauuucu

SEQ ID NO: 370869 - RNA, 19 nt, Artificial Sequence
  Description of Artificial Sequence: Synthetic oligonucleotide
  Sense Strand Starting at position 664 of SEQ ID NO: 315818
gccagagauuuacaguauu

SEQ ID NO: 370870 - RNA, 19 nt, Artificial Sequence
  Description of Artificial Sequence: Synthetic oligonucleotide
  Antisense Strand to SEQ ID NO: 370869
aauacuguaaaucucuggc

SEQ ID NO: 370871 - RNA, 19 nt, Artificial Sequence
  Description of Artificial Sequence: Synthetic oligonucleotide
  Sense Strand Starting at position 664 of SEQ ID NO: 316092
ggagguagaucccuccaaa

SEQ ID NO: 370872 - RNA, 19 nt, Artificial Sequence
  Description of Artificial Sequence: Synthetic oligonucleotide
  Antisense Strand to SEQ ID NO: 370871
uuuggagggaucuaccucc

SEQ ID NO: 370873 - RNA, 19 nt, Artificial Sequence
  Description of Artificial Sequence: Synthetic oligonucleotide
  Sense Strand Starting at position 664 of SEQ ID NO: 316139
ugggaaaucuaagcgauaa

SEQ ID NO: 370874 - RNA, 19 nt, Artificial Sequence
  Description of Artificial Sequence: Synthetic oligonucleotide
  Antisense Strand to SEQ ID NO: 370873
uuaucgcuuagauuuccca

SEQ ID NO: 370875 - RNA, 19 nt, Artificial Sequence
  Description of Artificial Sequence: Synthetic oligonucleotide
  Sense Strand Starting at position 664 of SEQ ID NO: 316140
gggaaaucuaagcgauaag

SEQ ID NO: 370876 - RNA, 19 nt, Artificial Sequence
  Description of Artificial Sequence: Synthetic oligonucleotide
  Antisense Strand to SEQ ID NO: 370875
cuuaucgcuuagauuuccc

SEQ ID NO: 370877 - RNA, 19 nt, Artificial Sequence
  Description of Artificial Sequence: Synthetic oligonucleotide
  Sense Strand Starting at position 664 of SEQ ID NO: 316149
aagcgauaagcaugaguca

SEQ ID NO: 370878 - RNA, 19 nt, Artificial Sequence
  Description of Artificial Sequence: Synthetic oligonucleotide
  Antisense Strand to SEQ ID NO: 370877
ugacucaugcuuaucgcuu

SEQ ID NO: 370879 - RNA, 19 nt, Artificial Sequence
  Description of Artificial Sequence: Synthetic oligonucleotide
  Sense Strand Starting at position 664 of SEQ ID NO: 316152
cgauaagcaugagucagaa

SEQ ID NO: 370880 - RNA, 19 nt, Artificial Sequence
  Description of Artificial Sequence: Synthetic oligonucleotide
  Antisense Strand to SEQ ID NO: 370879
uucugacucaugcuuaucg

SEQ ID NO: 370881 - RNA, 19 nt, Artificial Sequence
  Description of Artificial Sequence: Synthetic oligonucleotide
  Sense Strand Starting at position 664 of SEQ ID NO: 316309
acaguuccguauccacaaa

SEQ ID NO: 370882 - RNA, 19 nt, Artificial Sequence
  Description of Artificial Sequence: Synthetic oligonucleotide
  Antisense Strand to SEQ ID NO: 370881
uuuguggauacggaacugu

SEQ ID NO: 370883 - RNA, 19 nt, Artificial Sequence
  Description of Artificial Sequence: Synthetic oligonucleotide
  Sense Strand Starting at position 664 of SEQ ID NO: 316381
caggguaggugcuuaacuu

SEQ ID NO: 370884 - RNA, 19 nt, Artificial Sequence
  Description of Artificial Sequence: Synthetic oligonucleotide
  Antisense Strand to SEQ ID NO: 370883
aaguuaagcaccuacccug

SEQ ID NO: 370885 - RNA, 19 nt, Artificial Sequence
  Description of Artificial Sequence: Synthetic oligonucleotide
  Sense Strand Starting at position 664 of SEQ ID NO: 316389
gugcuuaacuugcuaauca

SEQ ID NO: 370886 - RNA, 19 nt, Artificial Sequence
  Description of Artificial Sequence: Synthetic oligonucleotide
  Antisense Strand to SEQ ID NO: 370885
ugauuagcaaguuaagcac

SEQ ID NO: 370887 - RNA, 19 nt, Artificial Sequence
  Description of Artificial Sequence: Synthetic oligonucleotide
  Sense Strand Starting at position 664 of SEQ ID NO: 316400
gcuaaucaugggcgcagaa

SEQ ID NO: 370888 - RNA, 19 nt, Artificial Sequence
  Description of Artificial Sequence: Synthetic oligonucleotide
  Antisense Strand to SEQ ID NO: 370887
uucugcgcccaugauuagc

SEQ ID NO: 370889 - RNA, 19 nt, Artificial Sequence
  Description of Artificial Sequence: Synthetic oligonucleotide
  Sense Strand Starting at position 664 of SEQ ID NO: 316402
uaaucaugggcgcagaaau

SEQ ID NO: 370890 - RNA, 19 nt, Artificial Sequence
  Description of Artificial Sequence: Synthetic oligonucleotide
  Antisense Strand to SEQ ID NO: 370889
auuucugcgcccaugauua

SEQ ID NO: 370891 - RNA, 19 nt, Artificial Sequence
  Description of Artificial Sequence: Synthetic oligonucleotide
  Sense Strand Starting at position 664 of SEQ ID NO: 317152
ucacccugcccugguuaaa

SEQ ID NO: 370892 - RNA, 19 nt, Artificial Sequence
  Description of Artificial Sequence: Synthetic oligonucleotide
  Antisense Strand to SEQ ID NO: 370891
uuuaaccagggcaggguga

SEQ ID NO: 370893 - RNA, 19 nt, Artificial Sequence
  Description of Artificial Sequence: Synthetic oligonucleotide
  Sense Strand Starting at position 664 of SEQ ID NO: 317207
ggaggaguucccgagguuu

SEQ ID NO: 370894 - RNA, 19 nt, Artificial Sequence
  Description of Artificial Sequence: Synthetic oligonucleotide
  Antisense Strand to SEQ ID NO: 370893
aaaccucgggaacuccucc

SEQ ID NO: 370895 - RNA, 19 nt, Artificial Sequence
  Description of Artificial Sequence: Synthetic oligonucleotide
  Sense Strand Starting at position 664 of SEQ ID NO: 317209
aggaguucccgagguuuga

SEQ ID NO: 370896 - RNA, 19 nt, Artificial Sequence
  Description of Artificial Sequence: Synthetic oligonucleotide
  Antisense Strand to SEQ ID NO: 370895
ucaaaccucgggaacuccu

SEQ ID NO: 370897 - RNA, 19 nt, Artificial Sequence
  Description of Artificial Sequence: Synthetic oligonucleotide
  Sense Strand Starting at position 664 of SEQ ID NO: 317330
guagcaucagcacaugaua

SEQ ID NO: 370898 - RNA, 19 nt, Artificial Sequence
  Description of Artificial Sequence: Synthetic oligonucleotide
  Antisense Strand to SEQ ID NO: 370897
uaucaugugcugaugcuac

SEQ ID NO: 370899 - RNA, 19 nt, Artificial Sequence
  Description of Artificial Sequence: Synthetic oligonucleotide
  Sense Strand Starting at position 664 of SEQ ID NO: 317498
acuugaauguacucagauc

SEQ ID NO: 370900 - RNA, 19 nt, Artificial Sequence
  Description of Artificial Sequence: Synthetic oligonucleotide
  Antisense Strand to SEQ ID NO: 370899
gaucugaguacauucaagu

SEQ ID NO: 370901 - RNA, 19 nt, Artificial Sequence
  Description of Artificial Sequence: Synthetic oligonucleotide
  Sense Strand Starting at position 664 of SEQ ID NO: 317506
guacucagaucaguacaga

SEQ ID NO: 370902 - RNA, 19 nt, Artificial Sequence
  Description of Artificial Sequence: Synthetic oligonucleotide
  Antisense Strand to SEQ ID NO: 370901
ucuguacugaucugaguac

SEQ ID NO: 370903 - RNA, 19 nt, Artificial Sequence
  Description of Artificial Sequence: Synthetic oligonucleotide
  Sense Strand Starting at position 664 of SEQ ID NO: 317547
agauccacauguguuacua

SEQ ID NO: 370904 - RNA, 19 nt, Artificial Sequence
  Description of Artificial Sequence: Synthetic oligonucleotide
  Antisense Strand to SEQ ID NO: 370903
uaguaacacauguggaucu

SEQ ID NO: 370905 - RNA, 19 nt, Artificial Sequence
  Description of Artificial Sequence: Synthetic oligonucleotide
  Sense Strand Starting at position 664 of SEQ ID NO: 317717
ggguuuacauagcaagaaa

SEQ ID NO: 370906 - RNA, 19 nt, Artificial Sequence
  Description of Artificial Sequence: Synthetic oligonucleotide
  Antisense Strand to SEQ ID NO: 370905
uuucuugcuauguaaaccc

SEQ ID NO: 370907 - RNA, 19 nt, Artificial Sequence
  Description of Artificial Sequence: Synthetic oligonucleotide
  Sense Strand Starting at position 664 of SEQ ID NO: 317728
gcaagaaagaaaugugacu

SEQ ID NO: 370908 - RNA, 19 nt, Artificial Sequence
  Description of Artificial Sequence: Synthetic oligonucleotide
  Antisense Strand to SEQ ID NO: 370907
agucacauuucuuucuugc

SEQ ID NO: 370909 - RNA, 19 nt, Artificial Sequence
  Description of Artificial Sequence: Synthetic oligonucleotide
  Sense Strand Starting at position 664 of SEQ ID NO: 317742
ugacuacuugcaggaaauc

SEQ ID NO: 370910 - RNA, 19 nt, Artificial Sequence
  Description of Artificial Sequence: Synthetic oligonucleotide
  Antisense Strand to SEQ ID NO: 370909
gauuuccugcaaguaguca

SEQ ID NO: 370911 - RNA, 19 nt, Artificial Sequence
  Description of Artificial Sequence: Synthetic oligonucleotide
  Sense Strand Starting at position 664 of SEQ ID NO: 317800
ggaaucagguggucguuua

SEQ ID NO: 370912 - RNA, 19 nt, Artificial Sequence
  Description of Artificial Sequence: Synthetic oligonucleotide
  Antisense Strand to SEQ ID NO: 370911
uaaacgaccaccugauucc

SEQ ID NO: 370913 - RNA, 19 nt, Artificial Sequence
  Description of Artificial Sequence: Synthetic oligonucleotide
  Sense Strand Starting at position 664 of SEQ ID NO: 317901
ugguaauaguuuccuuauc

SEQ ID NO: 370914 - RNA, 19 nt, Artificial Sequence
  Description of Artificial Sequence: Synthetic oligonucleotide
  Antisense Strand to SEQ ID NO: 370913
gauaaggaaacuauuacca

SEQ ID NO: 370915 - RNA, 19 nt, Artificial Sequence
  Description of Artificial Sequence: Synthetic oligonucleotide
  Sense Strand Starting at position 664 of SEQ ID NO: 317987
ucgcacuucggcuauaaca

SEQ ID NO: 370916 - RNA, 19 nt, Artificial Sequence
  Description of Artificial Sequence: Synthetic oligonucleotide
  Antisense Strand to SEQ ID NO: 370915
uguuauagccgaagugcga

SEQ ID NO: 370917 - RNA, 19 nt, Artificial Sequence
  Description of Artificial Sequence: Synthetic oligonucleotide
  Sense Strand Starting at position 664 of SEQ ID NO: 318024
ggguguacaccauaaacga

SEQ ID NO: 370918 - RNA, 19 nt, Artificial Sequence
  Description of Artificial Sequence: Synthetic oligonucleotide
  Antisense Strand to SEQ ID NO: 370917
ucguuuaugguguacaccc

SEQ ID NO: 370919 - RNA, 19 nt, Artificial Sequence
  Description of Artificial Sequence: Synthetic oligonucleotide
  Sense Strand Starting at position 664 of SEQ ID NO: 318076
cagggcguacucuaaguaa

SEQ ID NO: 370920 - RNA, 19 nt, Artificial Sequence
  Description of Artificial Sequence: Synthetic oligonucleotide
  Antisense Strand to SEQ ID NO: 370919
uuacuuagaguacgcccug

SEQ ID NO: 370921 - RNA, 19 nt, Artificial Sequence
  Description of Artificial Sequence: Synthetic oligonucleotide
  Sense Strand Starting at position 664 of SEQ ID NO: 318079
ggcguacucuaaguaacca

SEQ ID NO: 370922 - RNA, 19 nt, Artificial Sequence
  Description of Artificial Sequence: Synthetic oligonucleotide
  Antisense Strand to SEQ ID NO: 370921
ugguuacuuagaguacgcc

SEQ ID NO: 370923 - RNA, 19 nt, Artificial Sequence
  Description of Artificial Sequence: Synthetic oligonucleotide
  Sense Strand Starting at position 664 of SEQ ID NO: 318100
ggaauccucuaagggauau

SEQ ID NO: 370924 - RNA, 19 nt, Artificial Sequence
  Description of Artificial Sequence: Synthetic oligonucleotide
  Antisense Strand to SEQ ID NO: 370923
auaucccuuagaggauucc

SEQ ID NO: 370925 - RNA, 19 nt, Artificial Sequence
  Description of Artificial Sequence: Synthetic oligonucleotide
  Sense Strand Starting at position 664 of SEQ ID NO: 318277
accuucuaccgguaacaau

SEQ ID NO: 370926 - RNA, 19 nt, Artificial Sequence
  Description of Artificial Sequence: Synthetic oligonucleotide
  Antisense Strand to SEQ ID NO: 370925
auuguuaccgguagaaggu

SEQ ID NO: 370927 - RNA, 19 nt, Artificial Sequence
  Description of Artificial Sequence: Synthetic oligonucleotide
  Sense Strand Starting at position 664 of SEQ ID NO: 318491
gcgucaaucagcucaguua

SEQ ID NO: 370928 - RNA, 19 nt, Artificial Sequence
  Description of Artificial Sequence: Synthetic oligonucleotide
  Antisense Strand to SEQ ID NO: 370927
uaacugagcugauugacgc

SEQ ID NO: 370929 - RNA, 19 nt, Artificial Sequence
  Description of Artificial Sequence: Synthetic oligonucleotide
  Sense Strand Starting at position 664 of SEQ ID NO: 318554
ggguucuggccuuggugua

SEQ ID NO: 370930 - RNA, 19 nt, Artificial Sequence
  Description of Artificial Sequence: Synthetic oligonucleotide
  Antisense Strand to SEQ ID NO: 370929
uacaccaaggccagaaccc

SEQ ID NO: 370931 - RNA, 19 nt, Artificial Sequence
  Description of Artificial Sequence: Synthetic oligonucleotide
  Sense Strand Starting at position 665 of SEQ ID NO: 315628
guggaaacauccuugacuc

SEQ ID NO: 370932 - RNA, 19 nt, Artificial Sequence
  Description of Artificial Sequence: Synthetic oligonucleotide
  Antisense Strand to SEQ ID NO: 370931
gagucaaggauguuuccac

SEQ ID NO: 370933 - RNA, 19 nt, Artificial Sequence
  Description of Artificial Sequence: Synthetic oligonucleotide
  Sense Strand Starting at position 665 of SEQ ID NO: 315740
agacuaugguccucuuaga

SEQ ID NO: 370934 - RNA, 19 nt, Artificial Sequence
  Description of Artificial Sequence: Synthetic oligonucleotide
  Antisense Strand to SEQ ID NO: 370933
ucuaagaggaccauagucu

SEQ ID NO: 370935 - RNA, 19 nt, Artificial Sequence
  Description of Artificial Sequence: Synthetic oligonucleotide
  Sense Strand Starting at position 665 of SEQ ID NO: 315750
ccucuuagagcuuggagaa

SEQ ID NO: 370936 - RNA, 19 nt, Artificial Sequence
  Description of Artificial Sequence: Synthetic oligonucleotide
  Antisense Strand to SEQ ID NO: 370935
uucuccaagcucuaagagg

SEQ ID NO: 370937 - RNA, 19 nt, Artificial Sequence
  Description of Artificial Sequence: Synthetic oligonucleotide
  Sense Strand Starting at position 665 of SEQ ID NO: 316569
aaguuugcagacuauugua

SEQ ID NO: 370938 - RNA, 19 nt, Artificial Sequence
  Description of Artificial Sequence: Synthetic oligonucleotide
  Antisense Strand to SEQ ID NO: 370937
uacaauagucugcaaacuu

SEQ ID NO: 370939 - RNA, 19 nt, Artificial Sequence
  Description of Artificial Sequence: Synthetic oligonucleotide
  Sense Strand Starting at position 665 of SEQ ID NO: 316695
uuagaacugguguaauagu

SEQ ID NO: 370940 - RNA, 19 nt, Artificial Sequence
  Description of Artificial Sequence: Synthetic oligonucleotide
  Antisense Strand to SEQ ID NO: 370939
acuauuacaccaguucuaa

SEQ ID NO: 370941 - RNA, 19 nt, Artificial Sequence
  Description of Artificial Sequence: Synthetic oligonucleotide
  Sense Strand Starting at position 665 of SEQ ID NO: 316705
uguaauaguucuccucuac

SEQ ID NO: 370942 - RNA, 19 nt, Artificial Sequence
  Description of Artificial Sequence: Synthetic oligonucleotide
  Antisense Strand to SEQ ID NO: 370941
guagaggagaacuauuaca

SEQ ID NO: 370943 - RNA, 19 nt, Artificial Sequence
  Description of Artificial Sequence: Synthetic oligonucleotide
  Sense Strand Starting at position 665 of SEQ ID NO: 317316
agggaauuaacgugacagu

SEQ ID NO: 370944 - RNA, 19 nt, Artificial Sequence
  Description of Artificial Sequence: Synthetic oligonucleotide
  Antisense Strand to SEQ ID NO: 370943
acugucacguuaauucccu

SEQ ID NO: 370945 - RNA, 19 nt, Artificial Sequence
  Description of Artificial Sequence: Synthetic oligonucleotide
  Sense Strand Starting at position 665 of SEQ ID NO: 317317
gggaauuaacgugacaguc

SEQ ID NO: 370946 - RNA, 19 nt, Artificial Sequence
  Description of Artificial Sequence: Synthetic oligonucleotide
  Antisense Strand to SEQ ID NO: 370945
gacugucacguuaauuccc

SEQ ID NO: 370947 - RNA, 19 nt, Artificial Sequence
  Description of Artificial Sequence: Synthetic oligonucleotide
  Sense Strand Starting at position 665 of SEQ ID NO: 317556
ugagaucagagcugaauua

SEQ ID NO: 370948 - RNA, 19 nt, Artificial Sequence
  Description of Artificial Sequence: Synthetic oligonucleotide
  Antisense Strand to SEQ ID NO: 370947
uaauucagcucugaucuca

SEQ ID NO: 370949 - RNA, 19 nt, Artificial Sequence
  Description of Artificial Sequence: Synthetic oligonucleotide
  Sense Strand Starting at position 665 of SEQ ID NO: 317566
gcugaauuaagcuggugaa

SEQ ID NO: 370950 - RNA, 19 nt, Artificial Sequence
  Description of Artificial Sequence: Synthetic oligonucleotide
  Antisense Strand to SEQ ID NO: 370949
uucaccagcuuaauucagc

SEQ ID NO: 370951 - RNA, 19 nt, Artificial Sequence
  Description of Artificial Sequence: Synthetic oligonucleotide
  Sense Strand Starting at position 665 of SEQ ID NO: 317567
cugaauuaagcuggugaaa

SEQ ID NO: 370952 - RNA, 19 nt, Artificial Sequence
  Description of Artificial Sequence: Synthetic oligonucleotide
  Antisense Strand to SEQ ID NO: 370951
uuucaccagcuuaauucag

SEQ ID NO: 370953 - RNA, 19 nt, Artificial Sequence
  Description of Artificial Sequence: Synthetic oligonucleotide
  Sense Strand Starting at position 665 of SEQ ID NO: 317602
gggauugauugcccuccuu

SEQ ID NO: 370954 - RNA, 19 nt, Artificial Sequence
  Description of Artificial Sequence: Synthetic oligonucleotide
  Antisense Strand to SEQ ID NO: 370953
aaggagggcaaucaauccc

SEQ ID NO: 370955 - RNA, 19 nt, Artificial Sequence
  Description of Artificial Sequence: Synthetic oligonucleotide
  Sense Strand Starting at position 665 of SEQ ID NO: 317648
uucgacaaaugaguguuua

SEQ ID NO: 370956 - RNA, 19 nt, Artificial Sequence
  Description of Artificial Sequence: Synthetic oligonucleotide
  Antisense Strand to SEQ ID NO: 370955
uaaacacucauuugucgaa

SEQ ID NO: 370957 - RNA, 19 nt, Artificial Sequence
  Description of Artificial Sequence: Synthetic oligonucleotide
  Sense Strand Starting at position 665 of SEQ ID NO: 317649
ucgacaaaugaguguuuac

SEQ ID NO: 370958 - RNA, 19 nt, Artificial Sequence
  Description of Artificial Sequence: Synthetic oligonucleotide
  Antisense Strand to SEQ ID NO: 370957
guaaacacucauuugucga

SEQ ID NO: 370959 - RNA, 19 nt, Artificial Sequence
  Description of Artificial Sequence: Synthetic oligonucleotide
  Sense Strand Starting at position 665 of SEQ ID NO: 317676
gaguacugugcuccgcuau

SEQ ID NO: 370960 - RNA, 19 nt, Artificial Sequence
  Description of Artificial Sequence: Synthetic oligonucleotide
  Antisense Strand to SEQ ID NO: 370959
auagcggagcacaguacuc

SEQ ID NO: 370961 - RNA, 19 nt, Artificial Sequence
  Description of Artificial Sequence: Synthetic oligonucleotide
  Sense Strand Starting at position 665 of SEQ ID NO: 317690
gcuauugugagggaggguu

SEQ ID NO: 370962 - RNA, 19 nt, Artificial Sequence
  Description of Artificial Sequence: Synthetic oligonucleotide
  Antisense Strand to SEQ ID NO: 370961
aacccucccucacaauagc

SEQ ID NO: 370963 - RNA, 19 nt, Artificial Sequence
  Description of Artificial Sequence: Synthetic oligonucleotide
  Sense Strand Starting at position 665 of SEQ ID NO: 317692
uauugugagggaggguuau

SEQ ID NO: 370964 - RNA, 19 nt, Artificial Sequence
  Description of Artificial Sequence: Synthetic oligonucleotide
  Antisense Strand to SEQ ID NO: 370963
auaacccucccucacaaua

SEQ ID NO: 370965 - RNA, 19 nt, Artificial Sequence
  Description of Artificial Sequence: Synthetic oligonucleotide
  Sense Strand Starting at position 665 of SEQ ID NO: 317840
cuuucuaaaucagaagaag

SEQ ID NO: 370966 - RNA, 19 nt, Artificial Sequence
  Description of Artificial Sequence: Synthetic oligonucleotide
  Antisense Strand to SEQ ID NO: 370965
cuucuucugauuuagaaag

SEQ ID NO: 370967 - RNA, 19 nt, Artificial Sequence
  Description of Artificial Sequence: Synthetic oligonucleotide
  Sense Strand Starting at position 665 of SEQ ID NO: 318052
uuaccauaucugcaguaga

SEQ ID NO: 370968 - RNA, 19 nt, Artificial Sequence
  Description of Artificial Sequence: Synthetic oligonucleotide
  Antisense Strand to SEQ ID NO: 370967
ucuacugcagauaugguaa

SEQ ID NO: 370969 - RNA, 19 nt, Artificial Sequence
  Description of Artificial Sequence: Synthetic oligonucleotide
  Sense Strand Starting at position 665 of SEQ ID NO: 318157
ucugacucgaggcagaaau

SEQ ID NO: 370970 - RNA, 19 nt, Artificial Sequence
  Description of Artificial Sequence: Synthetic oligonucleotide
  Antisense Strand to SEQ ID NO: 370969
auuucugccucgagucaga

SEQ ID NO: 370971 - RNA, 19 nt, Artificial Sequence
  Description of Artificial Sequence: Synthetic oligonucleotide
  Sense Strand Starting at position 665 of SEQ ID NO: 318322
guaucuaauggguacucaa

SEQ ID NO: 370972 - RNA, 19 nt, Artificial Sequence
  Description of Artificial Sequence: Synthetic oligonucleotide
  Antisense Strand to SEQ ID NO: 370971
uugaguacccauuagauac

SEQ ID NO: 370973 - RNA, 19 nt, Artificial Sequence
  Description of Artificial Sequence: Synthetic oligonucleotide
  Sense Strand Starting at position 665 of SEQ ID NO: 318339
aaggaaagcuuauccaguu

SEQ ID NO: 370974 - RNA, 19 nt, Artificial Sequence
  Description of Artificial Sequence: Synthetic oligonucleotide
  Antisense Strand to SEQ ID NO: 370973
aacuggauaagcuuuccuu

SEQ ID NO: 370975 - RNA, 19 nt, Artificial Sequence
  Description of Artificial Sequence: Synthetic oligonucleotide
  Sense Strand Starting at position 665 of SEQ ID NO: 318345
agcuuauccaguugaaggu

SEQ ID NO: 370976 - RNA, 19 nt, Artificial Sequence
  Description of Artificial Sequence: Synthetic oligonucleotide
  Antisense Strand to SEQ ID NO: 370975
accuucaacuggauaagcu

SEQ ID NO: 370977 - RNA, 19 nt, Artificial Sequence
  Description of Artificial Sequence: Synthetic oligonucleotide
  Sense Strand Starting at position 665 of SEQ ID NO: 318372
ccuucuguaugagcuaaau

SEQ ID NO: 370978 - RNA, 19 nt, Artificial Sequence
  Description of Artificial Sequence: Synthetic oligonucleotide
  Antisense Strand to SEQ ID NO: 370977
auuuagcucauacagaagg

SEQ ID NO: 370979 - RNA, 19 nt, Artificial Sequence
  Description of Artificial Sequence: Synthetic oligonucleotide
  Sense Strand Starting at position 665 of SEQ ID NO: 318389
aucucagugucucuagaau

SEQ ID NO: 370980 - RNA, 19 nt, Artificial Sequence
  Description of Artificial Sequence: Synthetic oligonucleotide
  Antisense Strand to SEQ ID NO: 370979
auucuagagacacugagau

SEQ ID NO: 370981 - RNA, 19 nt, Artificial Sequence
  Description of Artificial Sequence: Synthetic oligonucleotide
  Sense Strand Starting at position 665 of SEQ ID NO: 318697
uuucuugaccugugucaag

SEQ ID NO: 370982 - RNA, 19 nt, Artificial Sequence
  Description of Artificial Sequence: Synthetic oligonucleotide
  Antisense Strand to SEQ ID NO: 370981
cuugacacaggucaagaaa

SEQ ID NO: 370983 - RNA, 19 nt, Artificial Sequence
  Description of Artificial Sequence: Synthetic oligonucleotide
  Sense Strand Starting at position 665 of SEQ ID NO: 318706
cugugucaaguauguugaa

SEQ ID NO: 370984 - RNA, 19 nt, Artificial Sequence
  Description of Artificial Sequence: Synthetic oligonucleotide
  Antisense Strand to SEQ ID NO: 370983
uucaacauacuugacacag

SEQ ID NO: 370985 - RNA, 19 nt, Artificial Sequence
  Description of Artificial Sequence: Synthetic oligonucleotide
  Sense Strand Starting at position 665 of SEQ ID NO: 318707
ugugucaaguauguugaaa

SEQ ID NO: 370986 - RNA, 19 nt, Artificial Sequence
  Description of Artificial Sequence: Synthetic oligonucleotide
  Antisense Strand to SEQ ID NO: 370985
uuucaacauacuugacaca

SEQ ID NO: 370987 - RNA, 19 nt, Artificial Sequence
  Description of Artificial Sequence: Synthetic oligonucleotide
  Sense Strand Starting at position 665 of SEQ ID NO: 318758
acucuuauucuggaugcau

SEQ ID NO: 370988 - RNA, 19 nt, Artificial Sequence
  Description of Artificial Sequence: Synthetic oligonucleotide
  Antisense Strand to SEQ ID NO: 370987
augcauccagaauaagagu

SEQ ID NO: 370989 - RNA, 19 nt, Artificial Sequence
  Description of Artificial Sequence: Synthetic oligonucleotide
  Sense Strand Starting at position 665 of SEQ ID NO: 318784
caguuugaacaguguuaca

SEQ ID NO: 370990 - RNA, 19 nt, Artificial Sequence
  Description of Artificial Sequence: Synthetic oligonucleotide
  Antisense Strand to SEQ ID NO: 370989
uguaacacuguucaaacug

SEQ ID NO: 370991 - RNA, 19 nt, Artificial Sequence
  Description of Artificial Sequence: Synthetic oligonucleotide
  Sense Strand Starting at position 665 of SEQ ID NO: 318796
uguuacauugcucagaggu

SEQ ID NO: 370992 - RNA, 19 nt, Artificial Sequence
  Description of Artificial Sequence: Synthetic oligonucleotide
  Antisense Strand to SEQ ID NO: 370991
accucugagcaauguaaca

SEQ ID NO: 370993 - RNA, 19 nt, Artificial Sequence
  Description of Artificial Sequence: Synthetic oligonucleotide
  Sense Strand Starting at position 665 of SEQ ID NO: 318802
auugcucagaggugaagaa

SEQ ID NO: 370994 - RNA, 19 nt, Artificial Sequence
  Description of Artificial Sequence: Synthetic oligonucleotide
  Antisense Strand to SEQ ID NO: 370993
uucuucaccucugagcaau

SEQ ID NO: 370995 - RNA, 19 nt, Artificial Sequence
  Description of Artificial Sequence: Synthetic oligonucleotide
  Sense Strand Starting at position 665 of SEQ ID NO: 318824
ugcuuuguaguuuaaggau

SEQ ID NO: 370996 - RNA, 19 nt, Artificial Sequence
  Description of Artificial Sequence: Synthetic oligonucleotide
  Antisense Strand to SEQ ID NO: 370995
auccuuaaacuacaaagca

SEQ ID NO: 370997 - RNA, 19 nt, Artificial Sequence
  Description of Artificial Sequence: Synthetic oligonucleotide
  Sense Strand Starting at position 665 of SEQ ID NO: 318887
cuacaaauugcacgauaga

SEQ ID NO: 370998 - RNA, 19 nt, Artificial Sequence
  Description of Artificial Sequence: Synthetic oligonucleotide
  Antisense Strand to SEQ ID NO: 370997
ucuaucgugcaauuuguag

SEQ ID NO: 370999 - RNA, 19 nt, Artificial Sequence
  Description of Artificial Sequence: Synthetic oligonucleotide
  Sense Strand Starting at position 665 of SEQ ID NO: 318897
cacgauagauaccucagau

SEQ ID NO: 371000 - RNA, 19 nt, Artificial Sequence
  Description of Artificial Sequence: Synthetic oligonucleotide
  Antisense Strand to SEQ ID NO: 370999
aucugagguaucuaucgug

SEQ ID NO: 371001 - RNA, 19 nt, Artificial Sequence
  Description of Artificial Sequence: Synthetic oligonucleotide
  Sense Strand Starting at position 665 of SEQ ID NO: 318940
guccauaaugcaggagauu

SEQ ID NO: 371002 - RNA, 19 nt, Artificial Sequence
  Description of Artificial Sequence: Synthetic oligonucleotide
  Antisense Strand to SEQ ID NO: 371001
aaucuccugcauuauggac

SEQ ID NO: 371003 - RNA, 19 nt, Artificial Sequence
  Description of Artificial Sequence: Synthetic oligonucleotide
  Sense Strand Starting at position 665 of SEQ ID NO: 318988
ucucuuagacguuaugaua

SEQ ID NO: 371004 - RNA, 19 nt, Artificial Sequence
  Description of Artificial Sequence: Synthetic oligonucleotide
  Antisense Strand to SEQ ID NO: 371003
uaucauaacgucuaagaga

SEQ ID NO: 371005 - RNA, 19 nt, Artificial Sequence
  Description of Artificial Sequence: Synthetic oligonucleotide
  Sense Strand Starting at position 665 of SEQ ID NO: 319018
aagauugcgguuuaaaguu

SEQ ID NO: 371006 - RNA, 19 nt, Artificial Sequence
  Description of Artificial Sequence: Synthetic oligonucleotide
  Antisense Strand to SEQ ID NO: 371005
aacuuuaaaccgcaaucuu

SEQ ID NO: 371007 - RNA, 19 nt, Artificial Sequence
  Description of Artificial Sequence: Synthetic oligonucleotide
  Sense Strand Starting at position 665 of SEQ ID NO: 319102
guggauagcagguauguaa

SEQ ID NO: 371008 - RNA, 19 nt, Artificial Sequence
  Description of Artificial Sequence: Synthetic oligonucleotide
  Antisense Strand to SEQ ID NO: 371007
uuacauaccugcuauccac

SEQ ID NO: 371009 - RNA, 19 nt, Artificial Sequence
  Description of Artificial Sequence: Synthetic oligonucleotide
  Sense Strand Starting at position 665 of SEQ ID NO: 319140
agggaaauuuggcaugcua

SEQ ID NO: 371010 - RNA, 19 nt, Artificial Sequence
  Description of Artificial Sequence: Synthetic oligonucleotide
  Antisense Strand to SEQ ID NO: 371009
uagcaugccaaauuucccu

SEQ ID NO: 371011 - RNA, 19 nt, Artificial Sequence
  Description of Artificial Sequence: Synthetic oligonucleotide
  Sense Strand Starting at position 666 of SEQ ID NO: 315823
guaggugaagcagauaauu

SEQ ID NO: 371012 - RNA, 19 nt, Artificial Sequence
  Description of Artificial Sequence: Synthetic oligonucleotide
  Antisense Strand to SEQ ID NO: 371011
aauuaucugcuucaccuac

SEQ ID NO: 371013 - RNA, 19 nt, Artificial Sequence
  Description of Artificial Sequence: Synthetic oligonucleotide
  Sense Strand Starting at position 666 of SEQ ID NO: 315831
agcagauaauuccuguaaa

SEQ ID NO: 371014 - RNA, 19 nt, Artificial Sequence
  Description of Artificial Sequence: Synthetic oligonucleotide
  Antisense Strand to SEQ ID NO: 371013
uuuacaggaauuaucugcu

SEQ ID NO: 371015 - RNA, 19 nt, Artificial Sequence
  Description of Artificial Sequence: Synthetic oligonucleotide
  Sense Strand Starting at position 666 of SEQ ID NO: 315958
uguugugcagggaguagua

SEQ ID NO: 371016 - RNA, 19 nt, Artificial Sequence
  Description of Artificial Sequence: Synthetic oligonucleotide
  Antisense Strand to SEQ ID NO: 371015
uacuacucccugcacaaca

SEQ ID NO: 371017 - RNA, 19 nt, Artificial Sequence
  Description of Artificial Sequence: Synthetic oligonucleotide
  Sense Strand Starting at position 666 of SEQ ID NO: 316153
augcauaggucacugaacu

SEQ ID NO: 371018 - RNA, 19 nt, Artificial Sequence
  Description of Artificial Sequence: Synthetic oligonucleotide
  Antisense Strand to SEQ ID NO: 371017
aguucagugaccuaugcau

SEQ ID NO: 371019 - RNA, 19 nt, Artificial Sequence
  Description of Artificial Sequence: Synthetic oligonucleotide
  Sense Strand Starting at position 666 of SEQ ID NO: 316185
uugguacugccacagagaa

SEQ ID NO: 371020 - RNA, 19 nt, Artificial Sequence
  Description of Artificial Sequence: Synthetic oligonucleotide
  Antisense Strand to SEQ ID NO: 371019
uucucuguggcaguaccaa

SEQ ID NO: 371021 - RNA, 19 nt, Artificial Sequence
  Description of Artificial Sequence: Synthetic oligonucleotide
  Sense Strand Starting at position 666 of SEQ ID NO: 316222
guggaaagcaaggguuaga

SEQ ID NO: 371022 - RNA, 19 nt, Artificial Sequence
  Description of Artificial Sequence: Synthetic oligonucleotide
  Antisense Strand to SEQ ID NO: 371021
ucuaacccuugcuuuccac

SEQ ID NO: 371023 - RNA, 19 nt, Artificial Sequence
  Description of Artificial Sequence: Synthetic oligonucleotide
  Sense Strand Starting at position 666 of SEQ ID NO: 316271
cacguacuuugaucuauag

SEQ ID NO: 371024 - RNA, 19 nt, Artificial Sequence
  Description of Artificial Sequence: Synthetic oligonucleotide
  Antisense Strand to SEQ ID NO: 371023
cuauagaucaaaguacgug

SEQ ID NO: 371025 - RNA, 19 nt, Artificial Sequence
  Description of Artificial Sequence: Synthetic oligonucleotide
  Sense Strand Starting at position 666 of SEQ ID NO: 316273
cguacuuugaucuauagag

SEQ ID NO: 371026 - RNA, 19 nt, Artificial Sequence
  Description of Artificial Sequence: Synthetic oligonucleotide
  Antisense Strand to SEQ ID NO: 371025
cucuauagaucaaaguacg

SEQ ID NO: 371027 - RNA, 19 nt, Artificial Sequence
  Description of Artificial Sequence: Synthetic oligonucleotide
  Sense Strand Starting at position 666 of SEQ ID NO: 316325
gugacaaccucugauuuac

SEQ ID NO: 371028 - RNA, 19 nt, Artificial Sequence
  Description of Artificial Sequence: Synthetic oligonucleotide
  Antisense Strand to SEQ ID NO: 371027
guaaaucagagguugucac

SEQ ID NO: 371029 - RNA, 19 nt, Artificial Sequence
  Description of Artificial Sequence: Synthetic oligonucleotide
  Sense Strand Starting at position 666 of SEQ ID NO: 316493
gaugguugggcagaacuca

SEQ ID NO: 371030 - RNA, 19 nt, Artificial Sequence
  Description of Artificial Sequence: Synthetic oligonucleotide
  Antisense Strand to SEQ ID NO: 371029
ugaguucugcccaaccauc

SEQ ID NO: 371031 - RNA, 19 nt, Artificial Sequence
  Description of Artificial Sequence: Synthetic oligonucleotide
  Sense Strand Starting at position 666 of SEQ ID NO: 316535
cuuggaaauaguuacguga

SEQ ID NO: 371032 - RNA, 19 nt, Artificial Sequence
  Description of Artificial Sequence: Synthetic oligonucleotide
  Antisense Strand to SEQ ID NO: 371031
ucacguaacuauuuccaag

SEQ ID NO: 371033 - RNA, 19 nt, Artificial Sequence
  Description of Artificial Sequence: Synthetic oligonucleotide
  Sense Strand Starting at position 666 of SEQ ID NO: 316538
ggaaauaguuacgugacaa

SEQ ID NO: 371034 - RNA, 19 nt, Artificial Sequence
  Description of Artificial Sequence: Synthetic oligonucleotide
  Antisense Strand to SEQ ID NO: 371033
uugucacguaacuauuucc

SEQ ID NO: 371035 - RNA, 19 nt, Artificial Sequence
  Description of Artificial Sequence: Synthetic oligonucleotide
  Sense Strand Starting at position 666 of SEQ ID NO: 317480
gaccuauuccagggcuaca

SEQ ID NO: 371036 - RNA, 19 nt, Artificial Sequence
  Description of Artificial Sequence: Synthetic oligonucleotide
  Antisense Strand to SEQ ID NO: 371035
uguagcccuggaauagguc

SEQ ID NO: 371037 - RNA, 19 nt, Artificial Sequence
  Description of Artificial Sequence: Synthetic oligonucleotide
  Sense Strand Starting at position 666 of SEQ ID NO: 317496
acaagacugccucggcaaa

SEQ ID NO: 371038 - RNA, 19 nt, Artificial Sequence
  Description of Artificial Sequence: Synthetic oligonucleotide
  Antisense Strand to SEQ ID NO: 371037
uuugccgaggcagucuugu

SEQ ID NO: 371039 - RNA, 19 nt, Artificial Sequence
  Description of Artificial Sequence: Synthetic oligonucleotide
  Sense Strand Starting at position 666 of SEQ ID NO: 317528
uucgguuaucucgccuuga

SEQ ID NO: 371040 - RNA, 19 nt, Artificial Sequence
  Description of Artificial Sequence: Synthetic oligonucleotide
  Antisense Strand to SEQ ID NO: 371039
ucaaggcgagauaaccgaa

SEQ ID NO: 371041 - RNA, 19 nt, Artificial Sequence
  Description of Artificial Sequence: Synthetic oligonucleotide
  Sense Strand Starting at position 666 of SEQ ID NO: 317643
aguggugauuuagcuccau

SEQ ID NO: 371042 - RNA, 19 nt, Artificial Sequence
  Description of Artificial Sequence: Synthetic oligonucleotide
  Antisense Strand to SEQ ID NO: 371041
auggagcuaaaucaccacu

SEQ ID NO: 371043 - RNA, 19 nt, Artificial Sequence
  Description of Artificial Sequence: Synthetic oligonucleotide
  Sense Strand Starting at position 666 of SEQ ID NO: 317678
aauuuaaaguccgaggauu

SEQ ID NO: 371044 - RNA, 19 nt, Artificial Sequence
  Description of Artificial Sequence: Synthetic oligonucleotide
  Antisense Strand to SEQ ID NO: 371043
aauccucggacuuuaaauu

SEQ ID NO: 371045 - RNA, 19 nt, Artificial Sequence
  Description of Artificial Sequence: Synthetic oligonucleotide
  Sense Strand Starting at position 666 of SEQ ID NO: 317876
ggcagaaauguguaucaag

SEQ ID NO: 371046 - RNA, 19 nt, Artificial Sequence
  Description of Artificial Sequence: Synthetic oligonucleotide
  Antisense Strand to SEQ ID NO: 371045
cuugauacacauuucugcc

SEQ ID NO: 371047 - RNA, 19 nt, Artificial Sequence
  Description of Artificial Sequence: Synthetic oligonucleotide
  Sense Strand Starting at position 666 of SEQ ID NO: 317883
auguguaucaaguaaggac

SEQ ID NO: 371048 - RNA, 19 nt, Artificial Sequence
  Description of Artificial Sequence: Synthetic oligonucleotide
  Antisense Strand to SEQ ID NO: 371047
guccuuacuugauacacau

SEQ ID NO: 371049 - RNA, 19 nt, Artificial Sequence
  Description of Artificial Sequence: Synthetic oligonucleotide
  Sense Strand Starting at position 666 of SEQ ID NO: 317959
aggagugaauuugggagau

SEQ ID NO: 371050 - RNA, 19 nt, Artificial Sequence
  Description of Artificial Sequence: Synthetic oligonucleotide
  Antisense Strand to SEQ ID NO: 371049
aucucccaaauucacuccu

SEQ ID NO: 371051 - RNA, 19 nt, Artificial Sequence
  Description of Artificial Sequence: Synthetic oligonucleotide
  Sense Strand Starting at position 666 of SEQ ID NO: 317961
gagugaauuugggagauau

SEQ ID NO: 371052 - RNA, 19 nt, Artificial Sequence
  Description of Artificial Sequence: Synthetic oligonucleotide
  Antisense Strand to SEQ ID NO: 371051
auaucucccaaauucacuc

SEQ ID NO: 371053 - RNA, 19 nt, Artificial Sequence
  Description of Artificial Sequence: Synthetic oligonucleotide
  Sense Strand Starting at position 666 of SEQ ID NO: 317984
gcgguugcaugauuugaga

SEQ ID NO: 371054 - RNA, 19 nt, Artificial Sequence
  Description of Artificial Sequence: Synthetic oligonucleotide
  Antisense Strand to SEQ ID NO: 371053
ucucaaaucaugcaaccgc

SEQ ID NO: 371055 - RNA, 19 nt, Artificial Sequence
  Description of Artificial Sequence: Synthetic oligonucleotide
  Sense Strand Starting at position 666 of SEQ ID NO: 318083
cugaucugguacuaauuua

SEQ ID NO: 371056 - RNA, 19 nt, Artificial Sequence
  Description of Artificial Sequence: Synthetic oligonucleotide
  Antisense Strand to SEQ ID NO: 371055
uaaauuaguaccagaucag

SEQ ID NO: 371057 - RNA, 19 nt, Artificial Sequence
  Description of Artificial Sequence: Synthetic oligonucleotide
  Sense Strand Starting at position 666 of SEQ ID NO: 318250
aguggucguguauaaucaa

SEQ ID NO: 371058 - RNA, 19 nt, Artificial Sequence
  Description of Artificial Sequence: Synthetic oligonucleotide
  Antisense Strand to SEQ ID NO: 371057
uugauuauacacgaccacu

SEQ ID NO: 371059 - RNA, 19 nt, Artificial Sequence
  Description of Artificial Sequence: Synthetic oligonucleotide
  Sense Strand Starting at position 666 of SEQ ID NO: 318257
guguauaaucaacgacauu

SEQ ID NO: 371060 - RNA, 19 nt, Artificial Sequence
  Description of Artificial Sequence: Synthetic oligonucleotide
  Antisense Strand to SEQ ID NO: 371059
aaugucguugauuauacac

SEQ ID NO: 371061 - RNA, 19 nt, Artificial Sequence
  Description of Artificial Sequence: Synthetic oligonucleotide
  Sense Strand Starting at position 666 of SEQ ID NO: 318322
gucauuuauuuguaugaga

SEQ ID NO: 371062 - RNA, 19 nt, Artificial Sequence
  Description of Artificial Sequence: Synthetic oligonucleotide
  Antisense Strand to SEQ ID NO: 371061
ucucauacaaauaaaugac

SEQ ID NO: 371063 - RNA, 19 nt, Artificial Sequence
  Description of Artificial Sequence: Synthetic oligonucleotide
  Sense Strand Starting at position 666 of SEQ ID NO: 318335
augagaaacuaugccuuua

SEQ ID NO: 371064 - RNA, 19 nt, Artificial Sequence
  Description of Artificial Sequence: Synthetic oligonucleotide
  Antisense Strand to SEQ ID NO: 371063
uaaaggcauaguuucucau

SEQ ID NO: 371065 - RNA, 19 nt, Artificial Sequence
  Description of Artificial Sequence: Synthetic oligonucleotide
  Sense Strand Starting at position 666 of SEQ ID NO: 318366
acuuuaauuucugauugag

SEQ ID NO: 371066 - RNA, 19 nt, Artificial Sequence
  Description of Artificial Sequence: Synthetic oligonucleotide
  Antisense Strand to SEQ ID NO: 371065
cucaaucagaaauuaaagu

SEQ ID NO: 371067 - RNA, 19 nt, Artificial Sequence
  Description of Artificial Sequence: Synthetic oligonucleotide
  Sense Strand Starting at position 666 of SEQ ID NO: 318384
gugguaguccuagaaggac

SEQ ID NO: 371068 - RNA, 19 nt, Artificial Sequence
  Description of Artificial Sequence: Synthetic oligonucleotide
  Antisense Strand to SEQ ID NO: 371067
guccuucuaggacuaccac

SEQ ID NO: 371069 - RNA, 19 nt, Artificial Sequence
  Description of Artificial Sequence: Synthetic oligonucleotide
  Sense Strand Starting at position 666 of SEQ ID NO: 318410
guauguuuaagcuaauggu

SEQ ID NO: 371070 - RNA, 19 nt, Artificial Sequence
  Description of Artificial Sequence: Synthetic oligonucleotide
  Antisense Strand to SEQ ID NO: 371069
accauuagcuuaaacauac

SEQ ID NO: 371071 - RNA, 19 nt, Artificial Sequence
  Description of Artificial Sequence: Synthetic oligonucleotide
  Sense Strand Starting at position 666 of SEQ ID NO: 318444
acugaugagucaucuguuu

SEQ ID NO: 371072 - RNA, 19 nt, Artificial Sequence
  Description of Artificial Sequence: Synthetic oligonucleotide
  Antisense Strand to SEQ ID NO: 371071
aaacagaugacucaucagu

SEQ ID NO: 371073 - RNA, 19 nt, Artificial Sequence
  Description of Artificial Sequence: Synthetic oligonucleotide
  Sense Strand Starting at position 666 of SEQ ID NO: 318496
gggucaagccagcauucua

SEQ ID NO: 371074 - RNA, 19 nt, Artificial Sequence
  Description of Artificial Sequence: Synthetic oligonucleotide
  Antisense Strand to SEQ ID NO: 371073
uagaaugcuggcuugaccc

SEQ ID NO: 371075 - RNA, 19 nt, Artificial Sequence
  Description of Artificial Sequence: Synthetic oligonucleotide
  Sense Strand Starting at position 666 of SEQ ID NO: 318510
uucuaacaguaguccuaau

SEQ ID NO: 371076 - RNA, 19 nt, Artificial Sequence
  Description of Artificial Sequence: Synthetic oligonucleotide
  Antisense Strand to SEQ ID NO: 371075
auuaggacuacuguuagaa

SEQ ID NO: 371077 - RNA, 19 nt, Artificial Sequence
  Description of Artificial Sequence: Synthetic oligonucleotide
  Sense Strand Starting at position 666 of SEQ ID NO: 318597
aagugauaggaacguaaug

SEQ ID NO: 371078 - RNA, 19 nt, Artificial Sequence
  Description of Artificial Sequence: Synthetic oligonucleotide
  Antisense Strand to SEQ ID NO: 371077
cauuacguuccuaucacuu

SEQ ID NO: 371079 - RNA, 19 nt, Artificial Sequence
  Description of Artificial Sequence: Synthetic oligonucleotide
  Sense Strand Starting at position 666 of SEQ ID NO: 318599
gugauaggaacguaaugua

SEQ ID NO: 371080 - RNA, 19 nt, Artificial Sequence
  Description of Artificial Sequence: Synthetic oligonucleotide
  Antisense Strand to SEQ ID NO: 371079
uacauuacguuccuaucac

SEQ ID NO: 371081 - RNA, 19 nt, Artificial Sequence
  Description of Artificial Sequence: Synthetic oligonucleotide
  Sense Strand Starting at position 666 of SEQ ID NO: 318875
guugcagagagccaugauu

SEQ ID NO: 371082 - RNA, 19 nt, Artificial Sequence
  Description of Artificial Sequence: Synthetic oligonucleotide
  Antisense Strand to SEQ ID NO: 371081
aaucauggcucucugcaac

SEQ ID NO: 371083 - RNA, 19 nt, Artificial Sequence
  Description of Artificial Sequence: Synthetic oligonucleotide
  Sense Strand Starting at position 666 of SEQ ID NO: 319002
aaaugaggcuuccuaguag

SEQ ID NO: 371084 - RNA, 19 nt, Artificial Sequence
  Description of Artificial Sequence: Synthetic oligonucleotide
  Antisense Strand to SEQ ID NO: 371083
cuacuaggaagccucauuu

SEQ ID NO: 371085 - RNA, 19 nt, Artificial Sequence
  Description of Artificial Sequence: Synthetic oligonucleotide
  Sense Strand Starting at position 666 of SEQ ID NO: 319008
ggcuuccuaguagaaaguu

SEQ ID NO: 371086 - RNA, 19 nt, Artificial Sequence
  Description of Artificial Sequence: Synthetic oligonucleotide
  Antisense Strand to SEQ ID NO: 371085
aacuuucuacuaggaagcc

SEQ ID NO: 371087 - RNA, 19 nt, Artificial Sequence
  Description of Artificial Sequence: Synthetic oligonucleotide
  Sense Strand Starting at position 666 of SEQ ID NO: 319111
ugaguaaccugacaaauuu

SEQ ID NO: 371088 - RNA, 19 nt, Artificial Sequence
  Description of Artificial Sequence: Synthetic oligonucleotide
  Antisense Strand to SEQ ID NO: 371087
aaauuugucagguuacuca

SEQ ID NO: 371089 - RNA, 19 nt, Artificial Sequence
  Description of Artificial Sequence: Synthetic oligonucleotide
  Sense Strand Starting at position 666 of SEQ ID NO: 319188
cuauuugguuguugaauuu

SEQ ID NO: 371090 - RNA, 19 nt, Artificial Sequence
  Description of Artificial Sequence: Synthetic oligonucleotide
  Antisense Strand to SEQ ID NO: 371089
aaauucaacaaccaaauag

SEQ ID NO: 371091 - RNA, 19 nt, Artificial Sequence
  Description of Artificial Sequence: Synthetic oligonucleotide
  Sense Strand Starting at position 667 of SEQ ID NO: 315347
gggugaugcuuuccacuca

SEQ ID NO: 371092 - RNA, 19 nt, Artificial Sequence
  Description of Artificial Sequence: Synthetic oligonucleotide
  Antisense Strand to SEQ ID NO: 371091
ugaguggaaagcaucaccc

SEQ ID NO: 371093 - RNA, 19 nt, Artificial Sequence
  Description of Artificial Sequence: Synthetic oligonucleotide
  Sense Strand Starting at position 667 of SEQ ID NO: 315672
ccaucucauuaggcagaua

SEQ ID NO: 371094 - RNA, 19 nt, Artificial Sequence
  Description of Artificial Sequence: Synthetic oligonucleotide
  Antisense Strand to SEQ ID NO: 371093
uaucugccuaaugagaugg

SEQ ID NO: 371095 - RNA, 19 nt, Artificial Sequence
  Description of Artificial Sequence: Synthetic oligonucleotide
  Sense Strand Starting at position 667 of SEQ ID NO: 315675
ucucauuaggcagauacga

SEQ ID NO: 371096 - RNA, 19 nt, Artificial Sequence
  Description of Artificial Sequence: Synthetic oligonucleotide
  Antisense Strand to SEQ ID NO: 371095
ucguaucugccuaaugaga

SEQ ID NO: 371097 - RNA, 19 nt, Artificial Sequence
  Description of Artificial Sequence: Synthetic oligonucleotide
  Sense Strand Starting at position 667 of SEQ ID NO: 315738
ucacaaagugagugaucua

SEQ ID NO: 371098 - RNA, 19 nt, Artificial Sequence
  Description of Artificial Sequence: Synthetic oligonucleotide
  Antisense Strand to SEQ ID NO: 371097
uagaucacucacuuuguga

SEQ ID NO: 371099 - RNA, 19 nt, Artificial Sequence
  Description of Artificial Sequence: Synthetic oligonucleotide
  Sense Strand Starting at position 667 of SEQ ID NO: 315741
caaagugagugaucuaccu

SEQ ID NO: 371100 - RNA, 19 nt, Artificial Sequence
  Description of Artificial Sequence: Synthetic oligonucleotide
  Antisense Strand to SEQ ID NO: 371099
agguagaucacucacuuug

SEQ ID NO: 371101 - RNA, 19 nt, Artificial Sequence
  Description of Artificial Sequence: Synthetic oligonucleotide
  Sense Strand Starting at position 667 of SEQ ID NO: 315749
gugaucuaccuucgaaaug

SEQ ID NO: 371102 - RNA, 19 nt, Artificial Sequence
  Description of Artificial Sequence: Synthetic oligonucleotide
  Antisense Strand to SEQ ID NO: 371101
cauuucgaagguagaucac

SEQ ID NO: 371103 - RNA, 19 nt, Artificial Sequence
  Description of Artificial Sequence: Synthetic oligonucleotide
  Sense Strand Starting at position 667 of SEQ ID NO: 315813
ucauuaucucugcaucugu

SEQ ID NO: 371104 - RNA, 19 nt, Artificial Sequence
  Description of Artificial Sequence: Synthetic oligonucleotide
  Antisense Strand to SEQ ID NO: 371103
acagaugcagagauaauga

SEQ ID NO: 371105 - RNA, 19 nt, Artificial Sequence
  Description of Artificial Sequence: Synthetic oligonucleotide
  Sense Strand Starting at position 667 of SEQ ID NO: 315859
ggguuagugcugcaagaua

SEQ ID NO: 371106 - RNA, 19 nt, Artificial Sequence
  Description of Artificial Sequence: Synthetic oligonucleotide
  Antisense Strand to SEQ ID NO: 371105
uaucuugcagcacuaaccc

SEQ ID NO: 371107 - RNA, 19 nt, Artificial Sequence
  Description of Artificial Sequence: Synthetic oligonucleotide
  Sense Strand Starting at position 667 of SEQ ID NO: 316279
uguaucucccacggugaaa

SEQ ID NO: 371108 - RNA, 19 nt, Artificial Sequence
  Description of Artificial Sequence: Synthetic oligonucleotide
  Antisense Strand to SEQ ID NO: 371107
uuucaccgugggagauaca

SEQ ID NO: 371109 - RNA, 19 nt, Artificial Sequence
  Description of Artificial Sequence: Synthetic oligonucleotide
  Sense Strand Starting at position 667 of SEQ ID NO: 316400
acuggaguucuguaacuua

SEQ ID NO: 371110 - RNA, 19 nt, Artificial Sequence
  Description of Artificial Sequence: Synthetic oligonucleotide
  Antisense Strand to SEQ ID NO: 371109
uaaguuacagaacuccagu

SEQ ID NO: 371111 - RNA, 19 nt, Artificial Sequence
  Description of Artificial Sequence: Synthetic oligonucleotide
  Sense Strand Starting at position 667 of SEQ ID NO: 316403
ggaguucuguaacuuaaca

SEQ ID NO: 371112 - RNA, 19 nt, Artificial Sequence
  Description of Artificial Sequence: Synthetic oligonucleotide
  Antisense Strand to SEQ ID NO: 371111
uguuaaguuacagaacucc

SEQ ID NO: 371113 - RNA, 19 nt, Artificial Sequence
  Description of Artificial Sequence: Synthetic oligonucleotide
  Sense Strand Starting at position 667 of SEQ ID NO: 316416
uuaacaaucugggugucaa

SEQ ID NO: 371114 - RNA, 19 nt, Artificial Sequence
  Description of Artificial Sequence: Synthetic oligonucleotide
  Antisense Strand to SEQ ID NO: 371113
uugacacccagauuguuaa

SEQ ID NO: 371115 - RNA, 19 nt, Artificial Sequence
  Description of Artificial Sequence: Synthetic oligonucleotide
  Sense Strand Starting at position 667 of SEQ ID NO: 316417
uaacaaucugggugucaau

SEQ ID NO: 371116 - RNA, 19 nt, Artificial Sequence
  Description of Artificial Sequence: Synthetic oligonucleotide
  Antisense Strand to SEQ ID NO: 371115
auugacacccagauuguua

SEQ ID NO: 371117 - RNA, 19 nt, Artificial Sequence
  Description of Artificial Sequence: Synthetic oligonucleotide
  Sense Strand Starting at position 667 of SEQ ID NO: 316428
gugucaauaacgccucgua

SEQ ID NO: 371118 - RNA, 19 nt, Artificial Sequence
  Description of Artificial Sequence: Synthetic oligonucleotide
  Antisense Strand to SEQ ID NO: 371117
uacgaggcguuauugacac

SEQ ID NO: 371119 - RNA, 19 nt, Artificial Sequence
  Description of Artificial Sequence: Synthetic oligonucleotide
  Sense Strand Starting at position 667 of SEQ ID NO: 316440
ccucguauuagucaaguau

SEQ ID NO: 371120 - RNA, 19 nt, Artificial Sequence
  Description of Artificial Sequence: Synthetic oligonucleotide
  Antisense Strand to SEQ ID NO: 371119
auacuugacuaauacgagg

SEQ ID NO: 371121 - RNA, 19 nt, Artificial Sequence
  Description of Artificial Sequence: Synthetic oligonucleotide
  Sense Strand Starting at position 667 of SEQ ID NO: 316678
gggaauaacacguaccuuu

SEQ ID NO: 371122 - RNA, 19 nt, Artificial Sequence
  Description of Artificial Sequence: Synthetic oligonucleotide
  Antisense Strand to SEQ ID NO: 371121
aaagguacguguuauuccc

SEQ ID NO: 371123 - RNA, 19 nt, Artificial Sequence
  Description of Artificial Sequence: Synthetic oligonucleotide
  Sense Strand Starting at position 667 of SEQ ID NO: 316712
aagggugagcguuagaaau

SEQ ID NO: 371124 - RNA, 19 nt, Artificial Sequence
  Description of Artificial Sequence: Synthetic oligonucleotide
  Antisense Strand to SEQ ID NO: 371123
auuucuaacgcucacccuu

SEQ ID NO: 371125 - RNA, 19 nt, Artificial Sequence
  Description of Artificial Sequence: Synthetic oligonucleotide
  Sense Strand Starting at position 667 of SEQ ID NO: 317572
gguaaugugaauugacacu

SEQ ID NO: 371126 - RNA, 19 nt, Artificial Sequence
  Description of Artificial Sequence: Synthetic oligonucleotide
  Antisense Strand to SEQ ID NO: 371125
agugucaauucacauuacc

SEQ ID NO: 371127 - RNA, 19 nt, Artificial Sequence
  Description of Artificial Sequence: Synthetic oligonucleotide
  Sense Strand Starting at position 667 of SEQ ID NO: 317661
gcuggaguagcgcucuguu

SEQ ID NO: 371128 - RNA, 19 nt, Artificial Sequence
  Description of Artificial Sequence: Synthetic oligonucleotide
  Antisense Strand to SEQ ID NO: 371127
aacagagcgcuacuccagc

SEQ ID NO: 371129 - RNA, 19 nt, Artificial Sequence
  Description of Artificial Sequence: Synthetic oligonucleotide
  Sense Strand Starting at position 667 of SEQ ID NO: 317674
ucuguuaggaaacgaguau

SEQ ID NO: 371130 - RNA, 19 nt, Artificial Sequence
  Description of Artificial Sequence: Synthetic oligonucleotide
  Antisense Strand to SEQ ID NO: 371129
auacucguuuccuaacaga

SEQ ID NO: 371131 - RNA, 19 nt, Artificial Sequence
  Description of Artificial Sequence: Synthetic oligonucleotide
  Sense Strand Starting at position 667 of SEQ ID NO: 317833
gaguauagagucuguuaaa

SEQ ID NO: 371132 - RNA, 19 nt, Artificial Sequence
  Description of Artificial Sequence: Synthetic oligonucleotide
  Antisense Strand to SEQ ID NO: 371131
uuuaacagacucuauacuc

SEQ ID NO: 371133 - RNA, 19 nt, Artificial Sequence
  Description of Artificial Sequence: Synthetic oligonucleotide
  Sense Strand Starting at position 667 of SEQ ID NO: 317949
aagcuuaccuuaguggaau

SEQ ID NO: 371134 - RNA, 19 nt, Artificial Sequence
  Description of Artificial Sequence: Synthetic oligonucleotide
  Antisense Strand to SEQ ID NO: 371133
auuccacuaagguaagcuu

SEQ ID NO: 371135 - RNA, 19 nt, Artificial Sequence
  Description of Artificial Sequence: Synthetic oligonucleotide
  Sense Strand Starting at position 667 of SEQ ID NO: 317961
guggaauagacuggcugaa

SEQ ID NO: 371136 - RNA, 19 nt, Artificial Sequence
  Description of Artificial Sequence: Synthetic oligonucleotide
  Antisense Strand to SEQ ID NO: 371135
uucagccagucuauuccac

SEQ ID NO: 371137 - RNA, 19 nt, Artificial Sequence
  Description of Artificial Sequence: Synthetic oligonucleotide
  Sense Strand Starting at position 667 of SEQ ID NO: 317992
gguaaugacagguguagua

SEQ ID NO: 371138 - RNA, 19 nt, Artificial Sequence
  Description of Artificial Sequence: Synthetic oligonucleotide
  Antisense Strand to SEQ ID NO: 371137
uacuacaccugucauuacc

SEQ ID NO: 371139 - RNA, 19 nt, Artificial Sequence
  Description of Artificial Sequence: Synthetic oligonucleotide
  Sense Strand Starting at position 667 of SEQ ID NO: 318006
uaguauggcuuugcaggaa

SEQ ID NO: 371140 - RNA, 19 nt, Artificial Sequence
  Description of Artificial Sequence: Synthetic oligonucleotide
  Antisense Strand to SEQ ID NO: 371139
uuccugcaaagccauacua

SEQ ID NO: 371141 - RNA, 19 nt, Artificial Sequence
  Description of Artificial Sequence: Synthetic oligonucleotide
  Sense Strand Starting at position 667 of SEQ ID NO: 318009
uauggcuuugcaggaaaca

SEQ ID NO: 371142 - RNA, 19 nt, Artificial Sequence
  Description of Artificial Sequence: Synthetic oligonucleotide
  Antisense Strand to SEQ ID NO: 371141
uguuuccugcaaagccaua

SEQ ID NO: 371143 - RNA, 19 nt, Artificial Sequence
  Description of Artificial Sequence: Synthetic oligonucleotide
  Sense Strand Starting at position 667 of SEQ ID NO: 318067
gcuggauaggauggcuaaa

SEQ ID NO: 371144 - RNA, 19 nt, Artificial Sequence
  Description of Artificial Sequence: Synthetic oligonucleotide
  Antisense Strand to SEQ ID NO: 371143
uuuagccauccuauccagc

SEQ ID NO: 371145 - RNA, 19 nt, Artificial Sequence
  Description of Artificial Sequence: Synthetic oligonucleotide
  Sense Strand Starting at position 667 of SEQ ID NO: 318202
ccacuaauuccauguugag

SEQ ID NO: 371146 - RNA, 19 nt, Artificial Sequence
  Description of Artificial Sequence: Synthetic oligonucleotide
  Antisense Strand to SEQ ID NO: 371145
cucaacauggaauuagugg

SEQ ID NO: 371147 - RNA, 19 nt, Artificial Sequence
  Description of Artificial Sequence: Synthetic oligonucleotide
  Sense Strand Starting at position 667 of SEQ ID NO: 318216
uugagcaccugucucuaaa

SEQ ID NO: 371148 - RNA, 19 nt, Artificial Sequence
  Description of Artificial Sequence: Synthetic oligonucleotide
  Antisense Strand to SEQ ID NO: 371147
uuuagagacaggugcucaa

SEQ ID NO: 371149 - RNA, 19 nt, Artificial Sequence
  Description of Artificial Sequence: Synthetic oligonucleotide
  Sense Strand Starting at position 667 of SEQ ID NO: 318287
cuugaucacccuuacaguu

SEQ ID NO: 371150 - RNA, 19 nt, Artificial Sequence
  Description of Artificial Sequence: Synthetic oligonucleotide
  Antisense Strand to SEQ ID NO: 371149
aacuguaagggugaucaag

SEQ ID NO: 371151 - RNA, 19 nt, Artificial Sequence
  Description of Artificial Sequence: Synthetic oligonucleotide
  Sense Strand Starting at position 667 of SEQ ID NO: 318363
acccaucagcuuugagaga

SEQ ID NO: 371152 - RNA, 19 nt, Artificial Sequence
  Description of Artificial Sequence: Synthetic oligonucleotide
  Antisense Strand to SEQ ID NO: 371151
ucucucaaagcugaugggu

SEQ ID NO: 371153 - RNA, 19 nt, Artificial Sequence
  Description of Artificial Sequence: Synthetic oligonucleotide
  Sense Strand Starting at position 667 of SEQ ID NO: 318403
guuucuaugucacuauauu

SEQ ID NO: 371154 - RNA, 19 nt, Artificial Sequence
  Description of Artificial Sequence: Synthetic oligonucleotide
  Antisense Strand to SEQ ID NO: 371153
aauauagugacauagaaac

SEQ ID NO: 371155 - RNA, 19 nt, Artificial Sequence
  Description of Artificial Sequence: Synthetic oligonucleotide
  Sense Strand Starting at position 667 of SEQ ID NO: 318415
cuauauuucucagagucau

SEQ ID NO: 371156 - RNA, 19 nt, Artificial Sequence
  Description of Artificial Sequence: Synthetic oligonucleotide
  Antisense Strand to SEQ ID NO: 371155
augacucugagaaauauag

SEQ ID NO: 371157 - RNA, 19 nt, Artificial Sequence
  Description of Artificial Sequence: Synthetic oligonucleotide
  Sense Strand Starting at position 667 of SEQ ID NO: 318544
gaugcaguaccugaauaau

SEQ ID NO: 371158 - RNA, 19 nt, Artificial Sequence
  Description of Artificial Sequence: Synthetic oligonucleotide
  Antisense Strand to SEQ ID NO: 371157
auuauucagguacugcauc

SEQ ID NO: 371159 - RNA, 19 nt, Artificial Sequence
  Description of Artificial Sequence: Synthetic oligonucleotide
  Sense Strand Starting at position 667 of SEQ ID NO: 318600
auuaauagauugucuggau

SEQ ID NO: 371160 - RNA, 19 nt, Artificial Sequence
  Description of Artificial Sequence: Synthetic oligonucleotide
  Antisense Strand to SEQ ID NO: 371159
auccagacaaucuauuaau

SEQ ID NO: 371161 - RNA, 19 nt, Artificial Sequence
  Description of Artificial Sequence: Synthetic oligonucleotide
  Sense Strand Starting at position 667 of SEQ ID NO: 318601
uuaauagauugucuggaua

SEQ ID NO: 371162 - RNA, 19 nt, Artificial Sequence
  Description of Artificial Sequence: Synthetic oligonucleotide
  Antisense Strand to SEQ ID NO: 371161
uauccagacaaucuauuaa

SEQ ID NO: 371163 - RNA, 19 nt, Artificial Sequence
  Description of Artificial Sequence: Synthetic oligonucleotide
  Sense Strand Starting at position 667 of SEQ ID NO: 318790
ccuugagauauggguauca

SEQ ID NO: 371164 - RNA, 19 nt, Artificial Sequence
  Description of Artificial Sequence: Synthetic oligonucleotide
  Antisense Strand to SEQ ID NO: 371163
ugauacccauaucucaagg

SEQ ID NO: 371165 - RNA, 19 nt, Artificial Sequence
  Description of Artificial Sequence: Synthetic oligonucleotide
  Sense Strand Starting at position 667 of SEQ ID NO: 318992
aaauguauguguuccuaga

SEQ ID NO: 371166 - RNA, 19 nt, Artificial Sequence
  Description of Artificial Sequence: Synthetic oligonucleotide
  Antisense Strand to SEQ ID NO: 371165
ucuaggaacacauacauuu

SEQ ID NO: 371167 - RNA, 19 nt, Artificial Sequence
  Description of Artificial Sequence: Synthetic oligonucleotide
  Sense Strand Starting at position 667 of SEQ ID NO: 319002
guuccuagaucuuuaugga

SEQ ID NO: 371168 - RNA, 19 nt, Artificial Sequence
  Description of Artificial Sequence: Synthetic oligonucleotide
  Antisense Strand to SEQ ID NO: 371167
uccauaaagaucuaggaac

SEQ ID NO: 371169 - RNA, 19 nt, Artificial Sequence
  Description of Artificial Sequence: Synthetic oligonucleotide
  Sense Strand Starting at position 667 of SEQ ID NO: 319181
cuuugaugaggccaagcaa

SEQ ID NO: 371170 - RNA, 19 nt, Artificial Sequence
  Description of Artificial Sequence: Synthetic oligonucleotide
  Antisense Strand to SEQ ID NO: 371169
uugcuuggccucaucaaag

SEQ ID NO: 371171 - RNA, 19 nt, Artificial Sequence
  Description of Artificial Sequence: Synthetic oligonucleotide
  Sense Strand Starting at position 668 of SEQ ID NO: 315608
uacgaaacagccuguauuu

SEQ ID NO: 371172 - RNA, 19 nt, Artificial Sequence
  Description of Artificial Sequence: Synthetic oligonucleotide
  Antisense Strand to SEQ ID NO: 371171
aaauacaggcuguuucgua

SEQ ID NO: 371173 - RNA, 19 nt, Artificial Sequence
  Description of Artificial Sequence: Synthetic oligonucleotide
  Sense Strand Starting at position 668 of SEQ ID NO: 315639
ggaugaugauccuaagaua

SEQ ID NO: 371174 - RNA, 19 nt, Artificial Sequence
  Description of Artificial Sequence: Synthetic oligonucleotide
  Antisense Strand to SEQ ID NO: 371173
uaucuuaggaucaucaucc

SEQ ID NO: 371175 - RNA, 19 nt, Artificial Sequence
  Description of Artificial Sequence: Synthetic oligonucleotide
  Sense Strand Starting at position 668 of SEQ ID NO: 315642
ugaugauccuaagauaaag

SEQ ID NO: 371176 - RNA, 19 nt, Artificial Sequence
  Description of Artificial Sequence: Synthetic oligonucleotide
  Antisense Strand to SEQ ID NO: 371175
cuuuaucuuaggaucauca

SEQ ID NO: 371177 - RNA, 19 nt, Artificial Sequence
  Description of Artificial Sequence: Synthetic oligonucleotide
  Sense Strand Starting at position 668 of SEQ ID NO: 315707
agcacacugcaagaauuau

SEQ ID NO: 371178 - RNA, 19 nt, Artificial Sequence
  Description of Artificial Sequence: Synthetic oligonucleotide
  Antisense Strand to SEQ ID NO: 371177
auaauucuugcagugugcu

SEQ ID NO: 371179 - RNA, 19 nt, Artificial Sequence
  Description of Artificial Sequence: Synthetic oligonucleotide
  Sense Strand Starting at position 668 of SEQ ID NO: 315865
agagauacuuugccaaaua

SEQ ID NO: 371180 - RNA, 19 nt, Artificial Sequence
  Description of Artificial Sequence: Synthetic oligonucleotide
  Antisense Strand to SEQ ID NO: 371179
uauuuggcaaaguaucucu

SEQ ID NO: 371181 - RNA, 19 nt, Artificial Sequence
  Description of Artificial Sequence: Synthetic oligonucleotide
  Sense Strand Starting at position 668 of SEQ ID NO: 315904
ccuuucguuaacggagaua

SEQ ID NO: 371182 - RNA, 19 nt, Artificial Sequence
  Description of Artificial Sequence: Synthetic oligonucleotide
  Antisense Strand to SEQ ID NO: 371181
uaucuccguuaacgaaagg

SEQ ID NO: 371183 - RNA, 19 nt, Artificial Sequence
  Description of Artificial Sequence: Synthetic oligonucleotide
  Sense Strand Starting at position 668 of SEQ ID NO: 315907
uucguuaacggagauacuu

SEQ ID NO: 371184 - RNA, 19 nt, Artificial Sequence
  Description of Artificial Sequence: Synthetic oligonucleotide
  Antisense Strand to SEQ ID NO: 371183
aaguaucuccguuaacgaa

SEQ ID NO: 371185 - RNA, 19 nt, Artificial Sequence
  Description of Artificial Sequence: Synthetic oligonucleotide
  Sense Strand Starting at position 668 of SEQ ID NO: 315909
cguuaacggagauacuuaa

SEQ ID NO: 371186 - RNA, 19 nt, Artificial Sequence
  Description of Artificial Sequence: Synthetic oligonucleotide
  Antisense Strand to SEQ ID NO: 371185
uuaaguaucuccguuaacg

SEQ ID NO: 371187 - RNA, 19 nt, Artificial Sequence
  Description of Artificial Sequence: Synthetic oligonucleotide
  Sense Strand Starting at position 668 of SEQ ID NO: 315940
gaagguuucccuugcauau

SEQ ID NO: 371188 - RNA, 19 nt, Artificial Sequence
  Description of Artificial Sequence: Synthetic oligonucleotide
  Antisense Strand to SEQ ID NO: 371187
auaugcaagggaaaccuuc

SEQ ID NO: 371189 - RNA, 19 nt, Artificial Sequence
  Description of Artificial Sequence: Synthetic oligonucleotide
  Sense Strand Starting at position 668 of SEQ ID NO: 316053
uuuaaauuagcuggacaaa

SEQ ID NO: 371190 - RNA, 19 nt, Artificial Sequence
  Description of Artificial Sequence: Synthetic oligonucleotide
  Antisense Strand to SEQ ID NO: 371189
uuuguccagcuaauuuaaa

SEQ ID NO: 371191 - RNA, 19 nt, Artificial Sequence
  Description of Artificial Sequence: Synthetic oligonucleotide
  Sense Strand Starting at position 668 of SEQ ID NO: 316088
agggaacacucugaauaua

SEQ ID NO: 371192 - RNA, 19 nt, Artificial Sequence
  Description of Artificial Sequence: Synthetic oligonucleotide
  Antisense Strand to SEQ ID NO: 371191
uauauucagaguguucccu

SEQ ID NO: 371193 - RNA, 19 nt, Artificial Sequence
  Description of Artificial Sequence: Synthetic oligonucleotide
  Sense Strand Starting at position 668 of SEQ ID NO: 316181
aggauagacuugccauuau

SEQ ID NO: 371194 - RNA, 19 nt, Artificial Sequence
  Description of Artificial Sequence: Synthetic oligonucleotide
  Antisense Strand to SEQ ID NO: 371193
auaauggcaagucuauccu

SEQ ID NO: 371195 - RNA, 19 nt, Artificial Sequence
  Description of Artificial Sequence: Synthetic oligonucleotide
  Sense Strand Starting at position 668 of SEQ ID NO: 316492
gggugaugcuuuccacuca

SEQ ID NO: 371196 - RNA, 19 nt, Artificial Sequence
  Description of Artificial Sequence: Synthetic oligonucleotide
  Antisense Strand to SEQ ID NO: 371195
ugaguggaaagcaucaccc

SEQ ID NO: 371197 - RNA, 19 nt, Artificial Sequence
  Description of Artificial Sequence: Synthetic oligonucleotide
  Sense Strand Starting at position 668 of SEQ ID NO: 316817
ccaucucauuaggcagaua

SEQ ID NO: 371198 - RNA, 19 nt, Artificial Sequence
  Description of Artificial Sequence: Synthetic oligonucleotide
  Antisense Strand to SEQ ID NO: 371197
uaucugccuaaugagaugg

SEQ ID NO: 371199 - RNA, 19 nt, Artificial Sequence
  Description of Artificial Sequence: Synthetic oligonucleotide
  Sense Strand Starting at position 668 of SEQ ID NO: 316820
ucucauuaggcagauacga

SEQ ID NO: 371200 - RNA, 19 nt, Artificial Sequence
  Description of Artificial Sequence: Synthetic oligonucleotide
  Antisense Strand to SEQ ID NO: 371199
ucguaucugccuaaugaga

SEQ ID NO: 371201 - RNA, 19 nt, Artificial Sequence
  Description of Artificial Sequence: Synthetic oligonucleotide
  Sense Strand Starting at position 668 of SEQ ID NO: 316883
ucacaaagugagugaucua

SEQ ID NO: 371202 - RNA, 19 nt, Artificial Sequence
  Description of Artificial Sequence: Synthetic oligonucleotide
  Antisense Strand to SEQ ID NO: 371201
uagaucacucacuuuguga

SEQ ID NO: 371203 - RNA, 19 nt, Artificial Sequence
  Description of Artificial Sequence: Synthetic oligonucleotide
  Sense Strand Starting at position 668 of SEQ ID NO: 316886
caaagugagugaucuaccu

SEQ ID NO: 371204 - RNA, 19 nt, Artificial Sequence
  Description of Artificial Sequence: Synthetic oligonucleotide
  Antisense Strand to SEQ ID NO: 371203
agguagaucacucacuuug

SEQ ID NO: 371205 - RNA, 19 nt, Artificial Sequence
  Description of Artificial Sequence: Synthetic oligonucleotide
  Sense Strand Starting at position 668 of SEQ ID NO: 316894
gugaucuaccuucgaaaug

SEQ ID NO: 371206 - RNA, 19 nt, Artificial Sequence
  Description of Artificial Sequence: Synthetic oligonucleotide
  Antisense Strand to SEQ ID NO: 371205
cauuucgaagguagaucac

SEQ ID NO: 371207 - RNA, 19 nt, Artificial Sequence
  Description of Artificial Sequence: Synthetic oligonucleotide
  Sense Strand Starting at position 668 of SEQ ID NO: 316955
aggucauuaucucugcauc

SEQ ID NO: 371208 - RNA, 19 nt, Artificial Sequence
  Description of Artificial Sequence: Synthetic oligonucleotide
  Antisense Strand to SEQ ID NO: 371207
gaugcagagauaaugaccu

SEQ ID NO: 371209 - RNA, 19 nt, Artificial Sequence
  Description of Artificial Sequence: Synthetic oligonucleotide
  Sense Strand Starting at position 668 of SEQ ID NO: 316958
ucauuaucucugcaucugu

SEQ ID NO: 371210 - RNA, 19 nt, Artificial Sequence
  Description of Artificial Sequence: Synthetic oligonucleotide
  Antisense Strand to SEQ ID NO: 371209
acagaugcagagauaauga

SEQ ID NO: 371211 - RNA, 19 nt, Artificial Sequence
  Description of Artificial Sequence: Synthetic oligonucleotide
  Sense Strand Starting at position 668 of SEQ ID NO: 317004
ggguuagugcugcaagaua

SEQ ID NO: 371212 - RNA, 19 nt, Artificial Sequence
  Description of Artificial Sequence: Synthetic oligonucleotide
  Antisense Strand to SEQ ID NO: 371211
uaucuugcagcacuaaccc

SEQ ID NO: 371213 - RNA, 19 nt, Artificial Sequence
  Description of Artificial Sequence: Synthetic oligonucleotide
  Sense Strand Starting at position 668 of SEQ ID NO: 317424
uguaucucccacggugaaa

SEQ ID NO: 371214 - RNA, 19 nt, Artificial Sequence
  Description of Artificial Sequence: Synthetic oligonucleotide
  Antisense Strand to SEQ ID NO: 371213
uuucaccgugggagauaca

SEQ ID NO: 371215 - RNA, 19 nt, Artificial Sequence
  Description of Artificial Sequence: Synthetic oligonucleotide
  Sense Strand Starting at position 668 of SEQ ID NO: 317545
acuggaguucuguaacuua

SEQ ID NO: 371216 - RNA, 19 nt, Artificial Sequence
  Description of Artificial Sequence: Synthetic oligonucleotide
  Antisense Strand to SEQ ID NO: 371215
uaaguuacagaacuccagu

SEQ ID NO: 371217 - RNA, 19 nt, Artificial Sequence
  Description of Artificial Sequence: Synthetic oligonucleotide
  Sense Strand Starting at position 668 of SEQ ID NO: 317548
ggaguucuguaacuuaaca

SEQ ID NO: 371218 - RNA, 19 nt, Artificial Sequence
  Description of Artificial Sequence: Synthetic oligonucleotide
  Antisense Strand to SEQ ID NO: 371217
uguuaaguuacagaacucc

SEQ ID NO: 371219 - RNA, 19 nt, Artificial Sequence
  Description of Artificial Sequence: Synthetic oligonucleotide
  Sense Strand Starting at position 668 of SEQ ID NO: 317561
uuaacaaucugggugucaa

SEQ ID NO: 371220 - RNA, 19 nt, Artificial Sequence
  Description of Artificial Sequence: Synthetic oligonucleotide
  Antisense Strand to SEQ ID NO: 371219
uugacacccagauuguuaa

SEQ ID NO: 371221 - RNA, 19 nt, Artificial Sequence
  Description of Artificial Sequence: Synthetic oligonucleotide
  Sense Strand Starting at position 668 of SEQ ID NO: 317562
uaacaaucugggugucaau

SEQ ID NO: 371222 - RNA, 19 nt, Artificial Sequence
  Description of Artificial Sequence: Synthetic oligonucleotide
  Antisense Strand to SEQ ID NO: 371221
auugacacccagauuguua

SEQ ID NO: 371223 - RNA, 19 nt, Artificial Sequence
  Description of Artificial Sequence: Synthetic oligonucleotide
  Sense Strand Starting at position 668 of SEQ ID NO: 317573
gugucaauaacgccucgua

SEQ ID NO: 371224 - RNA, 19 nt, Artificial Sequence
  Description of Artificial Sequence: Synthetic oligonucleotide
  Antisense Strand to SEQ ID NO: 371223
uacgaggcguuauugacac

SEQ ID NO: 371225 - RNA, 19 nt, Artificial Sequence
  Description of Artificial Sequence: Synthetic oligonucleotide
  Sense Strand Starting at position 668 of SEQ ID NO: 317585
ccucguauuagucaaguau

SEQ ID NO: 371226 - RNA, 19 nt, Artificial Sequence
  Description of Artificial Sequence: Synthetic oligonucleotide
  Antisense Strand to SEQ ID NO: 371225
auacuugacuaauacgagg

SEQ ID NO: 371227 - RNA, 19 nt, Artificial Sequence
  Description of Artificial Sequence: Synthetic oligonucleotide
  Sense Strand Starting at position 668 of SEQ ID NO: 317823
gggaauaacacguaccuuu

SEQ ID NO: 371228 - RNA, 19 nt, Artificial Sequence
  Description of Artificial Sequence: Synthetic oligonucleotide
  Antisense Strand to SEQ ID NO: 371227
aaagguacguguuauuccc

SEQ ID NO: 371229 - RNA, 19 nt, Artificial Sequence
  Description of Artificial Sequence: Synthetic oligonucleotide
  Sense Strand Starting at position 668 of SEQ ID NO: 317857
aagggugagcguuagaaau

SEQ ID NO: 371230 - RNA, 19 nt, Artificial Sequence
  Description of Artificial Sequence: Synthetic oligonucleotide
  Antisense Strand to SEQ ID NO: 371229
auuucuaacgcucacccuu

SEQ ID NO: 371231 - RNA, 19 nt, Artificial Sequence
  Description of Artificial Sequence: Synthetic oligonucleotide
  Sense Strand Starting at position 668 of SEQ ID NO: 318717
gguaaugugaauugacacu

SEQ ID NO: 371232 - RNA, 19 nt, Artificial Sequence
  Description of Artificial Sequence: Synthetic oligonucleotide
  Antisense Strand to SEQ ID NO: 371231
agugucaauucacauuacc

SEQ ID NO: 371233 - RNA, 19 nt, Artificial Sequence
  Description of Artificial Sequence: Synthetic oligonucleotide
  Sense Strand Starting at position 668 of SEQ ID NO: 318806
gcuggaguagcgcucuguu

SEQ ID NO: 371234 - RNA, 19 nt, Artificial Sequence
  Description of Artificial Sequence: Synthetic oligonucleotide
  Antisense Strand to SEQ ID NO: 371233
aacagagcgcuacuccagc

SEQ ID NO: 371235 - RNA, 19 nt, Artificial Sequence
  Description of Artificial Sequence: Synthetic oligonucleotide
  Sense Strand Starting at position 668 of SEQ ID NO: 318819
ucuguuaggaaacgaguau

SEQ ID NO: 371236 - RNA, 19 nt, Artificial Sequence
  Description of Artificial Sequence: Synthetic oligonucleotide
  Antisense Strand to SEQ ID NO: 371235
auacucguuuccuaacaga

SEQ ID NO: 371237 - RNA, 19 nt, Artificial Sequence
  Description of Artificial Sequence: Synthetic oligonucleotide
  Sense Strand Starting at position 668 of SEQ ID NO: 318978
gaguauagagucuguuaaa

SEQ ID NO: 371238 - RNA, 19 nt, Artificial Sequence
  Description of Artificial Sequence: Synthetic oligonucleotide
  Antisense Strand to SEQ ID NO: 371237
uuuaacagacucuauacuc

SEQ ID NO: 371239 - RNA, 19 nt, Artificial Sequence
  Description of Artificial Sequence: Synthetic oligonucleotide
  Sense Strand Starting at position 668 of SEQ ID NO: 319094
aagcuuaccuuaguggaau

SEQ ID NO: 371240 - RNA, 19 nt, Artificial Sequence
  Description of Artificial Sequence: Synthetic oligonucleotide
  Antisense Strand to SEQ ID NO: 371239
auuccacuaagguaagcuu

SEQ ID NO: 371241 - RNA, 19 nt, Artificial Sequence
  Description of Artificial Sequence: Synthetic oligonucleotide
  Sense Strand Starting at position 668 of SEQ ID NO: 319106
guggaauagacuggcugaa

SEQ ID NO: 371242 - RNA, 19 nt, Artificial Sequence
  Description of Artificial Sequence: Synthetic oligonucleotide
  Antisense Strand to SEQ ID NO: 371241
uucagccagucuauuccac

SEQ ID NO: 371243 - RNA, 19 nt, Artificial Sequence
  Description of Artificial Sequence: Synthetic oligonucleotide
  Sense Strand Starting at position 668 of SEQ ID NO: 319137
gguaaugacagguguagua

SEQ ID NO: 371244 - RNA, 19 nt, Artificial Sequence
  Description of Artificial Sequence: Synthetic oligonucleotide
  Antisense Strand to SEQ ID NO: 371243
uacuacaccugucauuacc

SEQ ID NO: 371245 - RNA, 19 nt, Artificial Sequence
  Description of Artificial Sequence: Synthetic oligonucleotide
  Sense Strand Starting at position 668 of SEQ ID NO: 319151
uaguauggcuuugcaggaa

SEQ ID NO: 371246 - RNA, 19 nt, Artificial Sequence
  Description of Artificial Sequence: Synthetic oligonucleotide
  Antisense Strand to SEQ ID NO: 371245
uuccugcaaagccauacua

SEQ ID NO: 371247 - RNA, 19 nt, Artificial Sequence
  Description of Artificial Sequence: Synthetic oligonucleotide
  Sense Strand Starting at position 668 of SEQ ID NO: 319154
uauggcuuugcaggaaaca

SEQ ID NO: 371248 - RNA, 19 nt, Artificial Sequence
  Description of Artificial Sequence: Synthetic oligonucleotide
  Antisense Strand to SEQ ID NO: 371247
uguuuccugcaaagccaua

SEQ ID NO: 371249 - RNA, 19 nt, Artificial Sequence
  Description of Artificial Sequence: Synthetic oligonucleotide
  Sense Strand Starting at position 668 of SEQ ID NO: 319212
gcuggauaggauggcuaaa

SEQ ID NO: 371250 - RNA, 19 nt, Artificial Sequence
  Description of Artificial Sequence: Synthetic oligonucleotide
  Antisense Strand to SEQ ID NO: 371249
uuuagccauccuauccagc

SEQ ID NO: 371251 - RNA, 19 nt, Artificial Sequence
  Description of Artificial Sequence: Synthetic oligonucleotide
  Sense Strand Starting at position 669 of SEQ ID NO: 315320
gcauacauauguucccuau

SEQ ID NO: 371252 - RNA, 19 nt, Artificial Sequence
  Description of Artificial Sequence: Synthetic oligonucleotide
  Antisense Strand to SEQ ID NO: 371251
auagggaacauauguaugc

SEQ ID NO: 371253 - RNA, 19 nt, Artificial Sequence
  Description of Artificial Sequence: Synthetic oligonucleotide
  Sense Strand Starting at position 669 of SEQ ID NO: 315322
auacauauguucccuauga

SEQ ID NO: 371254 - RNA, 19 nt, Artificial Sequence
  Description of Artificial Sequence: Synthetic oligonucleotide
  Antisense Strand to SEQ ID NO: 371253
ucauagggaacauauguau

SEQ ID NO: 371255 - RNA, 19 nt, Artificial Sequence
  Description of Artificial Sequence: Synthetic oligonucleotide
  Sense Strand Starting at position 669 of SEQ ID NO: 315326
auauguucccuaugaagug

SEQ ID NO: 371256 - RNA, 19 nt, Artificial Sequence
  Description of Artificial Sequence: Synthetic oligonucleotide
  Antisense Strand to SEQ ID NO: 371255
cacuucauagggaacauau

SEQ ID NO: 371257 - RNA, 19 nt, Artificial Sequence
  Description of Artificial Sequence: Synthetic oligonucleotide
  Sense Strand Starting at position 669 of SEQ ID NO: 315342
guggaauuaucucuugacc

SEQ ID NO: 371258 - RNA, 19 nt, Artificial Sequence
  Description of Artificial Sequence: Synthetic oligonucleotide
  Antisense Strand to SEQ ID NO: 371257
ggucaagagauaauuccac

SEQ ID NO: 371259 - RNA, 19 nt, Artificial Sequence
  Description of Artificial Sequence: Synthetic oligonucleotide
  Sense Strand Starting at position 669 of SEQ ID NO: 315433
uuguuugacuccuuugaag

SEQ ID NO: 371260 - RNA, 19 nt, Artificial Sequence
  Description of Artificial Sequence: Synthetic oligonucleotide
  Antisense Strand to SEQ ID NO: 371259
cuucaaaggagucaaacaa

SEQ ID NO: 371261 - RNA, 19 nt, Artificial Sequence
  Description of Artificial Sequence: Synthetic oligonucleotide
  Sense Strand Starting at position 669 of SEQ ID NO: 315435
guuugacuccuuugaaguc

SEQ ID NO: 371262 - RNA, 19 nt, Artificial Sequence
  Description of Artificial Sequence: Synthetic oligonucleotide
  Antisense Strand to SEQ ID NO: 371261
gacuucaaaggagucaaac

SEQ ID NO: 371263 - RNA, 19 nt, Artificial Sequence
  Description of Artificial Sequence: Synthetic oligonucleotide
  Sense Strand Starting at position 669 of SEQ ID NO: 315442
uccuuugaaguccagcaua

SEQ ID NO: 371264 - RNA, 19 nt, Artificial Sequence
  Description of Artificial Sequence: Synthetic oligonucleotide
  Antisense Strand to SEQ ID NO: 371263
uaugcuggacuucaaagga

SEQ ID NO: 371265 - RNA, 19 nt, Artificial Sequence
  Description of Artificial Sequence: Synthetic oligonucleotide
  Sense Strand Starting at position 669 of SEQ ID NO: 315445
uuugaaguccagcauaauu

SEQ ID NO: 371266 - RNA, 19 nt, Artificial Sequence
  Description of Artificial Sequence: Synthetic oligonucleotide
  Antisense Strand to SEQ ID NO: 371265
aauuaugcuggacuucaaa

SEQ ID NO: 371267 - RNA, 19 nt, Artificial Sequence
  Description of Artificial Sequence: Synthetic oligonucleotide
  Sense Strand Starting at position 669 of SEQ ID NO: 316218
uacgaaacagccuguauuu

SEQ ID NO: 371268 - RNA, 19 nt, Artificial Sequence
  Description of Artificial Sequence: Synthetic oligonucleotide
  Antisense Strand to SEQ ID NO: 371267
aaauacaggcuguuucgua

SEQ ID NO: 371269 - RNA, 19 nt, Artificial Sequence
  Description of Artificial Sequence: Synthetic oligonucleotide
  Sense Strand Starting at position 669 of SEQ ID NO: 316249
ggaugaugauccuaagaua

SEQ ID NO: 371270 - RNA, 19 nt, Artificial Sequence
  Description of Artificial Sequence: Synthetic oligonucleotide
  Antisense Strand to SEQ ID NO: 371269
uaucuuaggaucaucaucc

SEQ ID NO: 371271 - RNA, 19 nt, Artificial Sequence
  Description of Artificial Sequence: Synthetic oligonucleotide
  Sense Strand Starting at position 669 of SEQ ID NO: 316252
ugaugauccuaagauaaag

SEQ ID NO: 371272 - RNA, 19 nt, Artificial Sequence
  Description of Artificial Sequence: Synthetic oligonucleotide
  Antisense Strand to SEQ ID NO: 371271
cuuuaucuuaggaucauca

SEQ ID NO: 371273 - RNA, 19 nt, Artificial Sequence
  Description of Artificial Sequence: Synthetic oligonucleotide
  Sense Strand Starting at position 669 of SEQ ID NO: 316317
agcacacugcaagaauuau

SEQ ID NO: 371274 - RNA, 19 nt, Artificial Sequence
  Description of Artificial Sequence: Synthetic oligonucleotide
  Antisense Strand to SEQ ID NO: 371273
auaauucuugcagugugcu

SEQ ID NO: 371275 - RNA, 19 nt, Artificial Sequence
  Description of Artificial Sequence: Synthetic oligonucleotide
  Sense Strand Starting at position 669 of SEQ ID NO: 316475
agagauacuuugccaaaua

SEQ ID NO: 371276 - RNA, 19 nt, Artificial Sequence
  Description of Artificial Sequence: Synthetic oligonucleotide
  Antisense Strand to SEQ ID NO: 371275
uauuuggcaaaguaucucu

SEQ ID NO: 371277 - RNA, 19 nt, Artificial Sequence
  Description of Artificial Sequence: Synthetic oligonucleotide
  Sense Strand Starting at position 669 of SEQ ID NO: 316514
ccuuucguuaacggagaua

SEQ ID NO: 371278 - RNA, 19 nt, Artificial Sequence
  Description of Artificial Sequence: Synthetic oligonucleotide
  Antisense Strand to SEQ ID NO: 371277
uaucuccguuaacgaaagg

SEQ ID NO: 371279 - RNA, 19 nt, Artificial Sequence
  Description of Artificial Sequence: Synthetic oligonucleotide
  Sense Strand Starting at position 669 of SEQ ID NO: 316517
uucguuaacggagauacuu

SEQ ID NO: 371280 - RNA, 19 nt, Artificial Sequence
  Description of Artificial Sequence: Synthetic oligonucleotide
  Antisense Strand to SEQ ID NO: 371279
aaguaucuccguuaacgaa

SEQ ID NO: 371281 - RNA, 19 nt, Artificial Sequence
  Description of Artificial Sequence: Synthetic oligonucleotide
  Sense Strand Starting at position 669 of SEQ ID NO: 316519
cguuaacggagauacuuaa

SEQ ID NO: 371282 - RNA, 19 nt, Artificial Sequence
  Description of Artificial Sequence: Synthetic oligonucleotide
  Antisense Strand to SEQ ID NO: 371281
uuaaguaucuccguuaacg

SEQ ID NO: 371283 - RNA, 19 nt, Artificial Sequence
  Description of Artificial Sequence: Synthetic oligonucleotide
  Sense Strand Starting at position 669 of SEQ ID NO: 316550
gaagguuucccuugcauau

SEQ ID NO: 371284 - RNA, 19 nt, Artificial Sequence
  Description of Artificial Sequence: Synthetic oligonucleotide
  Antisense Strand to SEQ ID NO: 371283
auaugcaagggaaaccuuc

SEQ ID NO: 371285 - RNA, 19 nt, Artificial Sequence
  Description of Artificial Sequence: Synthetic oligonucleotide
  Sense Strand Starting at position 669 of SEQ ID NO: 316663
uuuaaauuagcuggacaaa

SEQ ID NO: 371286 - RNA, 19 nt, Artificial Sequence
  Description of Artificial Sequence: Synthetic oligonucleotide
  Antisense Strand to SEQ ID NO: 371285
uuuguccagcuaauuuaaa

SEQ ID NO: 371287 - RNA, 19 nt, Artificial Sequence
  Description of Artificial Sequence: Synthetic oligonucleotide
  Sense Strand Starting at position 669 of SEQ ID NO: 316698
agggaacacucugaauaua

SEQ ID NO: 371288 - RNA, 19 nt, Artificial Sequence
  Description of Artificial Sequence: Synthetic oligonucleotide
  Antisense Strand to SEQ ID NO: 371287
uauauucagaguguucccu

SEQ ID NO: 371289 - RNA, 19 nt, Artificial Sequence
  Description of Artificial Sequence: Synthetic oligonucleotide
  Sense Strand Starting at position 669 of SEQ ID NO: 316791
aggauagacuugccauuau

SEQ ID NO: 371290 - RNA, 19 nt, Artificial Sequence
  Description of Artificial Sequence: Synthetic oligonucleotide
  Antisense Strand to SEQ ID NO: 371289
auaauggcaagucuauccu

SEQ ID NO: 371291 - RNA, 19 nt, Artificial Sequence
  Description of Artificial Sequence: Synthetic oligonucleotide
  Sense Strand Starting at position 669 of SEQ ID NO: 317102
gggugaugcuuuccacuca

SEQ ID NO: 371292 - RNA, 19 nt, Artificial Sequence
  Description of Artificial Sequence: Synthetic oligonucleotide
  Antisense Strand to SEQ ID NO: 371291
ugaguggaaagcaucaccc

SEQ ID NO: 371293 - RNA, 19 nt, Artificial Sequence
  Description of Artificial Sequence: Synthetic oligonucleotide
  Sense Strand Starting at position 669 of SEQ ID NO: 317427
ccaucucauuaggcagaua

SEQ ID NO: 371294 - RNA, 19 nt, Artificial Sequence
  Description of Artificial Sequence: Synthetic oligonucleotide
  Antisense Strand to SEQ ID NO: 371293
uaucugccuaaugagaugg

SEQ ID NO: 371295 - RNA, 19 nt, Artificial Sequence
  Description of Artificial Sequence: Synthetic oligonucleotide
  Sense Strand Starting at position 669 of SEQ ID NO: 317430
ucucauuaggcagauacga

SEQ ID NO: 371296 - RNA, 19 nt, Artificial Sequence
  Description of Artificial Sequence: Synthetic oligonucleotide
  Antisense Strand to SEQ ID NO: 371295
ucguaucugccuaaugaga

SEQ ID NO: 371297 - RNA, 19 nt, Artificial Sequence
  Description of Artificial Sequence: Synthetic oligonucleotide
  Sense Strand Starting at position 669 of SEQ ID NO: 317493
ucacaaagugagugaucua

SEQ ID NO: 371298 - RNA, 19 nt, Artificial Sequence
  Description of Artificial Sequence: Synthetic oligonucleotide
  Antisense Strand to SEQ ID NO: 371297
uagaucacucacuuuguga

SEQ ID NO: 371299 - RNA, 19 nt, Artificial Sequence
  Description of Artificial Sequence: Synthetic oligonucleotide
  Sense Strand Starting at position 669 of SEQ ID NO: 317496
caaagugagugaucuaccu

SEQ ID NO: 371300 - RNA, 19 nt, Artificial Sequence
  Description of Artificial Sequence: Synthetic oligonucleotide
  Antisense Strand to SEQ ID NO: 371299
agguagaucacucacuuug

SEQ ID NO: 371301 - RNA, 19 nt, Artificial Sequence
  Description of Artificial Sequence: Synthetic oligonucleotide
  Sense Strand Starting at position 669 of SEQ ID NO: 317504
gugaucuaccuucgaaaug

SEQ ID NO: 371302 - RNA, 19 nt, Artificial Sequence
  Description of Artificial Sequence: Synthetic oligonucleotide
  Antisense Strand to SEQ ID NO: 371301
cauuucgaagguagaucac

SEQ ID NO: 371303 - RNA, 19 nt, Artificial Sequence
  Description of Artificial Sequence: Synthetic oligonucleotide
  Sense Strand Starting at position 669 of SEQ ID NO: 317565
aggucauuaucucugcauc

SEQ ID NO: 371304 - RNA, 19 nt, Artificial Sequence
  Description of Artificial Sequence: Synthetic oligonucleotide
  Antisense Strand to SEQ ID NO: 371303
gaugcagagauaaugaccu

SEQ ID NO: 371305 - RNA, 19 nt, Artificial Sequence
  Description of Artificial Sequence: Synthetic oligonucleotide
  Sense Strand Starting at position 669 of SEQ ID NO: 317568
ucauuaucucugcaucugu

SEQ ID NO: 371306 - RNA, 19 nt, Artificial Sequence
  Description of Artificial Sequence: Synthetic oligonucleotide
  Antisense Strand to SEQ ID NO: 371305
acagaugcagagauaauga

SEQ ID NO: 371307 - RNA, 19 nt, Artificial Sequence
  Description of Artificial Sequence: Synthetic oligonucleotide
  Sense Strand Starting at position 669 of SEQ ID NO: 317592
agagcaugacguugguuaa

SEQ ID NO: 371308 - RNA, 19 nt, Artificial Sequence
  Description of Artificial Sequence: Synthetic oligonucleotide
  Antisense Strand to SEQ ID NO: 371307
uuaaccaacgucaugcucu

SEQ ID NO: 371309 - RNA, 19 nt, Artificial Sequence
  Description of Artificial Sequence: Synthetic oligonucleotide
  Sense Strand Starting at position 669 of SEQ ID NO: 317593
gagcaugacguugguuaaa

SEQ ID NO: 371310 - RNA, 19 nt, Artificial Sequence
  Description of Artificial Sequence: Synthetic oligonucleotide
  Antisense Strand to SEQ ID NO: 371309
uuuaaccaacgucaugcuc

SEQ ID NO: 371311 - RNA, 19 nt, Artificial Sequence
  Description of Artificial Sequence: Synthetic oligonucleotide
  Sense Strand Starting at position 669 of SEQ ID NO: 317614
ggguuagugcugcaagaua

SEQ ID NO: 371312 - RNA, 19 nt, Artificial Sequence
  Description of Artificial Sequence: Synthetic oligonucleotide
  Antisense Strand to SEQ ID NO: 371311
uaucuugcagcacuaaccc

SEQ ID NO: 371313 - RNA, 19 nt, Artificial Sequence
  Description of Artificial Sequence: Synthetic oligonucleotide
  Sense Strand Starting at position 669 of SEQ ID NO: 318034
uguaucucccacggugaaa

SEQ ID NO: 371314 - RNA, 19 nt, Artificial Sequence
  Description of Artificial Sequence: Synthetic oligonucleotide
  Antisense Strand to SEQ ID NO: 371313
uuucaccgugggagauaca

SEQ ID NO: 371315 - RNA, 19 nt, Artificial Sequence
  Description of Artificial Sequence: Synthetic oligonucleotide
  Sense Strand Starting at position 669 of SEQ ID NO: 318155
acuggaguucuguaacuua

SEQ ID NO: 371316 - RNA, 19 nt, Artificial Sequence
  Description of Artificial Sequence: Synthetic oligonucleotide
  Antisense Strand to SEQ ID NO: 371315
uaaguuacagaacuccagu

SEQ ID NO: 371317 - RNA, 19 nt, Artificial Sequence
  Description of Artificial Sequence: Synthetic oligonucleotide
  Sense Strand Starting at position 669 of SEQ ID NO: 318158
ggaguucuguaacuuaaca

SEQ ID NO: 371318 - RNA, 19 nt, Artificial Sequence
  Description of Artificial Sequence: Synthetic oligonucleotide
  Antisense Strand to SEQ ID NO: 371317
uguuaaguuacagaacucc

SEQ ID NO: 371319 - RNA, 19 nt, Artificial Sequence
  Description of Artificial Sequence: Synthetic oligonucleotide
  Sense Strand Starting at position 669 of SEQ ID NO: 318171
uuaacaaucugggugucaa

SEQ ID NO: 371320 - RNA, 19 nt, Artificial Sequence
  Description of Artificial Sequence: Synthetic oligonucleotide
  Antisense Strand to SEQ ID NO: 371319
uugacacccagauuguuaa

SEQ ID NO: 371321 - RNA, 19 nt, Artificial Sequence
  Description of Artificial Sequence: Synthetic oligonucleotide
  Sense Strand Starting at position 669 of SEQ ID NO: 318172
uaacaaucugggugucaau

SEQ ID NO: 371322 - RNA, 19 nt, Artificial Sequence
  Description of Artificial Sequence: Synthetic oligonucleotide
  Antisense Strand to SEQ ID NO: 371321
auugacacccagauuguua

SEQ ID NO: 371323 - RNA, 19 nt, Artificial Sequence
  Description of Artificial Sequence: Synthetic oligonucleotide
  Sense Strand Starting at position 669 of SEQ ID NO: 318183
gugucaauaacgccucgua

SEQ ID NO: 371324 - RNA, 19 nt, Artificial Sequence
  Description of Artificial Sequence: Synthetic oligonucleotide
  Antisense Strand to SEQ ID NO: 371323
uacgaggcguuauugacac

SEQ ID NO: 371325 - RNA, 19 nt, Artificial Sequence
  Description of Artificial Sequence: Synthetic oligonucleotide
  Sense Strand Starting at position 669 of SEQ ID NO: 318195
ccucguauuagucaaguau

SEQ ID NO: 371326 - RNA, 19 nt, Artificial Sequence
  Description of Artificial Sequence: Synthetic oligonucleotide
  Antisense Strand to SEQ ID NO: 371325
auacuugacuaauacgagg

SEQ ID NO: 371327 - RNA, 19 nt, Artificial Sequence
  Description of Artificial Sequence: Synthetic oligonucleotide
  Sense Strand Starting at position 669 of SEQ ID NO: 318433
gggaauaacacguaccuuu

SEQ ID NO: 371328 - RNA, 19 nt, Artificial Sequence
  Description of Artificial Sequence: Synthetic oligonucleotide
  Antisense Strand to SEQ ID NO: 371327
aaagguacguguuauuccc

SEQ ID NO: 371329 - RNA, 19 nt, Artificial Sequence
  Description of Artificial Sequence: Synthetic oligonucleotide
  Sense Strand Starting at position 669 of SEQ ID NO: 318467
aagggugagcguuagaaau

SEQ ID NO: 371330 - RNA, 19 nt, Artificial Sequence
  Description of Artificial Sequence: Synthetic oligonucleotide
  Antisense Strand to SEQ ID NO: 371329
auuucuaacgcucacccuu

SEQ ID NO: 371331 - RNA, 19 nt, Artificial Sequence
  Description of Artificial Sequence: Synthetic oligonucleotide
  Sense Strand Starting at position 670 of SEQ ID NO: 315372
acaguuucuguugggacaa

SEQ ID NO: 371332 - RNA, 19 nt, Artificial Sequence
  Description of Artificial Sequence: Synthetic oligonucleotide
  Antisense Strand to SEQ ID NO: 371331
uugucccaacagaaacugu

SEQ ID NO: 371333 - RNA, 19 nt, Artificial Sequence
  Description of Artificial Sequence: Synthetic oligonucleotide
  Sense Strand Starting at position 670 of SEQ ID NO: 315404
guuuccuauggauggaacu

SEQ ID NO: 371334 - RNA, 19 nt, Artificial Sequence
  Description of Artificial Sequence: Synthetic oligonucleotide
  Antisense Strand to SEQ ID NO: 371333
aguuccauccauaggaaac

SEQ ID NO: 371335 - RNA, 19 nt, Artificial Sequence
  Description of Artificial Sequence: Synthetic oligonucleotide
  Sense Strand Starting at position 670 of SEQ ID NO: 315433
aaggcuguuguguauuaga

SEQ ID NO: 371336 - RNA, 19 nt, Artificial Sequence
  Description of Artificial Sequence: Synthetic oligonucleotide
  Antisense Strand to SEQ ID NO: 371335
ucuaauacacaacagccuu

SEQ ID NO: 371337 - RNA, 19 nt, Artificial Sequence
  Description of Artificial Sequence: Synthetic oligonucleotide
  Sense Strand Starting at position 670 of SEQ ID NO: 315447
uuagaaacaucugcuguua

SEQ ID NO: 371338 - RNA, 19 nt, Artificial Sequence
  Description of Artificial Sequence: Synthetic oligonucleotide
  Antisense Strand to SEQ ID NO: 371337
uaacagcagauguuucuaa

SEQ ID NO: 371339 - RNA, 19 nt, Artificial Sequence
  Description of Artificial Sequence: Synthetic oligonucleotide
  Sense Strand Starting at position 670 of SEQ ID NO: 315475
cugucaggagauugucuuu

SEQ ID NO: 371340 - RNA, 19 nt, Artificial Sequence
  Description of Artificial Sequence: Synthetic oligonucleotide
  Antisense Strand to SEQ ID NO: 371339
aaagacaaucuccugacag

SEQ ID NO: 371341 - RNA, 19 nt, Artificial Sequence
  Description of Artificial Sequence: Synthetic oligonucleotide
  Sense Strand Starting at position 670 of SEQ ID NO: 315478
ucaggagauugucuuuguu

SEQ ID NO: 371342 - RNA, 19 nt, Artificial Sequence
  Description of Artificial Sequence: Synthetic oligonucleotide
  Antisense Strand to SEQ ID NO: 371341
aacaaagacaaucuccuga

SEQ ID NO: 371343 - RNA, 19 nt, Artificial Sequence
  Description of Artificial Sequence: Synthetic oligonucleotide
  Sense Strand Starting at position 670 of SEQ ID NO: 315480
aggagauugucuuuguuaa

SEQ ID NO: 371344 - RNA, 19 nt, Artificial Sequence
  Description of Artificial Sequence: Synthetic oligonucleotide
  Antisense Strand to SEQ ID NO: 371343
uuaacaaagacaaucuccu

SEQ ID NO: 371345 - RNA, 19 nt, Artificial Sequence
  Description of Artificial Sequence: Synthetic oligonucleotide
  Sense Strand Starting at position 670 of SEQ ID NO: 315481
ggagauugucuuuguuaag

SEQ ID NO: 371346 - RNA, 19 nt, Artificial Sequence
  Description of Artificial Sequence: Synthetic oligonucleotide
  Antisense Strand to SEQ ID NO: 371345
cuuaacaaagacaaucucc

SEQ ID NO: 371347 - RNA, 19 nt, Artificial Sequence
  Description of Artificial Sequence: Synthetic oligonucleotide
  Sense Strand Starting at position 670 of SEQ ID NO: 315482
gagauugucuuuguuaaga

SEQ ID NO: 371348 - RNA, 19 nt, Artificial Sequence
  Description of Artificial Sequence: Synthetic oligonucleotide
  Antisense Strand to SEQ ID NO: 371347
ucuuaacaaagacaaucuc

SEQ ID NO: 371349 - RNA, 19 nt, Artificial Sequence
  Description of Artificial Sequence: Synthetic oligonucleotide
  Sense Strand Starting at position 670 of SEQ ID NO: 315878
cuguguaaccuuggauaug

SEQ ID NO: 371350 - RNA, 19 nt, Artificial Sequence
  Description of Artificial Sequence: Synthetic oligonucleotide
  Antisense Strand to SEQ ID NO: 371349
cauauccaagguuacacag

SEQ ID NO: 371351 - RNA, 19 nt, Artificial Sequence
  Description of Artificial Sequence: Synthetic oligonucleotide
  Sense Strand Starting at position 670 of SEQ ID NO: 315881
uguaaccuuggauauguua

SEQ ID NO: 371352 - RNA, 19 nt, Artificial Sequence
  Description of Artificial Sequence: Synthetic oligonucleotide
  Antisense Strand to SEQ ID NO: 371351
uaacauauccaagguuaca

SEQ ID NO: 371353 - RNA, 19 nt, Artificial Sequence
  Description of Artificial Sequence: Synthetic oligonucleotide
  Sense Strand Starting at position 670 of SEQ ID NO: 315890
ggauauguuaguuaagcuc

SEQ ID NO: 371354 - RNA, 19 nt, Artificial Sequence
  Description of Artificial Sequence: Synthetic oligonucleotide
  Antisense Strand to SEQ ID NO: 371353
gagcuuaacuaacauaucc

SEQ ID NO: 371355 - RNA, 19 nt, Artificial Sequence
  Description of Artificial Sequence: Synthetic oligonucleotide
  Sense Strand Starting at position 670 of SEQ ID NO: 315947
gucguugugagguaaauga

SEQ ID NO: 371356 - RNA, 19 nt, Artificial Sequence
  Description of Artificial Sequence: Synthetic oligonucleotide
  Antisense Strand to SEQ ID NO: 371355
ucauuuaccucacaacgac

SEQ ID NO: 371357 - RNA, 19 nt, Artificial Sequence
  Description of Artificial Sequence: Synthetic oligonucleotide
  Sense Strand Starting at position 670 of SEQ ID NO: 315951
uugugagguaaaugagaug

SEQ ID NO: 371358 - RNA, 19 nt, Artificial Sequence
  Description of Artificial Sequence: Synthetic oligonucleotide
  Antisense Strand to SEQ ID NO: 371357
caucucauuuaccucacaa

SEQ ID NO: 371359 - RNA, 19 nt, Artificial Sequence
  Description of Artificial Sequence: Synthetic oligonucleotide
  Sense Strand Starting at position 670 of SEQ ID NO: 315963
ugagaugauccauguaaac

SEQ ID NO: 371360 - RNA, 19 nt, Artificial Sequence
  Description of Artificial Sequence: Synthetic oligonucleotide
  Antisense Strand to SEQ ID NO: 371359
guuuacauggaucaucuca

SEQ ID NO: 371361 - RNA, 19 nt, Artificial Sequence
  Description of Artificial Sequence: Synthetic oligonucleotide
  Sense Strand Starting at position 670 of SEQ ID NO: 316073
aaaguaucaccuuguugga

SEQ ID NO: 371362 - RNA, 19 nt, Artificial Sequence
  Description of Artificial Sequence: Synthetic oligonucleotide
  Antisense Strand to SEQ ID NO: 371361
uccaacaaggugauacuuu

SEQ ID NO: 371363 - RNA, 19 nt, Artificial Sequence
  Description of Artificial Sequence: Synthetic oligonucleotide
  Sense Strand Starting at position 670 of SEQ ID NO: 316075
aguaucaccuuguuggaua

SEQ ID NO: 371364 - RNA, 19 nt, Artificial Sequence
  Description of Artificial Sequence: Synthetic oligonucleotide
  Antisense Strand to SEQ ID NO: 371363
uauccaacaaggugauacu

SEQ ID NO: 371365 - RNA, 19 nt, Artificial Sequence
  Description of Artificial Sequence: Synthetic oligonucleotide
  Sense Strand Starting at position 670 of SEQ ID NO: 317832
uucugaauguuuccaguag

SEQ ID NO: 371366 - RNA, 19 nt, Artificial Sequence
  Description of Artificial Sequence: Synthetic oligonucleotide
  Antisense Strand to SEQ ID NO: 371365
cuacuggaaacauucagaa

SEQ ID NO: 371367 - RNA, 19 nt, Artificial Sequence
  Description of Artificial Sequence: Synthetic oligonucleotide
  Sense Strand Starting at position 670 of SEQ ID NO: 317836
gaauguuuccaguaggaug

SEQ ID NO: 371368 - RNA, 19 nt, Artificial Sequence
  Description of Artificial Sequence: Synthetic oligonucleotide
  Antisense Strand to SEQ ID NO: 371367
cauccuacuggaaacauuc

SEQ ID NO: 371369 - RNA, 19 nt, Artificial Sequence
  Description of Artificial Sequence: Synthetic oligonucleotide
  Sense Strand Starting at position 670 of SEQ ID NO: 317838
auguuuccaguaggaugua

SEQ ID NO: 371370 - RNA, 19 nt, Artificial Sequence
  Description of Artificial Sequence: Synthetic oligonucleotide
  Antisense Strand to SEQ ID NO: 371369
uacauccuacuggaaacau

SEQ ID NO: 371371 - RNA, 19 nt, Artificial Sequence
  Description of Artificial Sequence: Synthetic oligonucleotide
  Sense Strand Starting at position 670 of SEQ ID NO: 317841
uuuccaguaggauguagaa

SEQ ID NO: 371372 - RNA, 19 nt, Artificial Sequence
  Description of Artificial Sequence: Synthetic oligonucleotide
  Antisense Strand to SEQ ID NO: 371371
uucuacauccuacuggaaa

SEQ ID NO: 371373 - RNA, 19 nt, Artificial Sequence
  Description of Artificial Sequence: Synthetic oligonucleotide
  Sense Strand Starting at position 670 of SEQ ID NO: 318141
aggaacuucugggagaaga

SEQ ID NO: 371374 - RNA, 19 nt, Artificial Sequence
  Description of Artificial Sequence: Synthetic oligonucleotide
  Antisense Strand to SEQ ID NO: 371373
ucuucucccagaaguuccu

SEQ ID NO: 371375 - RNA, 19 nt, Artificial Sequence
  Description of Artificial Sequence: Synthetic oligonucleotide
  Sense Strand Starting at position 670 of SEQ ID NO: 318325
gagacagguccugaaguuu

SEQ ID NO: 371376 - RNA, 19 nt, Artificial Sequence
  Description of Artificial Sequence: Synthetic oligonucleotide
  Antisense Strand to SEQ ID NO: 371375
aaacuucaggaccugucuc

SEQ ID NO: 371377 - RNA, 19 nt, Artificial Sequence
  Description of Artificial Sequence: Synthetic oligonucleotide
  Sense Strand Starting at position 670 of SEQ ID NO: 318375
ggagcuuaacucugucuaa

SEQ ID NO: 371378 - RNA, 19 nt, Artificial Sequence
  Description of Artificial Sequence: Synthetic oligonucleotide
  Antisense Strand to SEQ ID NO: 371377
uuagacagaguuaagcucc

SEQ ID NO: 371379 - RNA, 19 nt, Artificial Sequence
  Description of Artificial Sequence: Synthetic oligonucleotide
  Sense Strand Starting at position 670 of SEQ ID NO: 318376
gagcuuaacucugucuaag

SEQ ID NO: 371380 - RNA, 19 nt, Artificial Sequence
  Description of Artificial Sequence: Synthetic oligonucleotide
  Antisense Strand to SEQ ID NO: 371379
cuuagacagaguuaagcuc

SEQ ID NO: 371381 - RNA, 19 nt, Artificial Sequence
  Description of Artificial Sequence: Synthetic oligonucleotide
  Sense Strand Starting at position 670 of SEQ ID NO: 318379
cuuaacucugucuaaguga

SEQ ID NO: 371382 - RNA, 19 nt, Artificial Sequence
  Description of Artificial Sequence: Synthetic oligonucleotide
  Antisense Strand to SEQ ID NO: 371381
ucacuuagacagaguuaag

SEQ ID NO: 371383 - RNA, 19 nt, Artificial Sequence
  Description of Artificial Sequence: Synthetic oligonucleotide
  Sense Strand Starting at position 670 of SEQ ID NO: 318404
uggaacugcgguuaauuga

SEQ ID NO: 371384 - RNA, 19 nt, Artificial Sequence
  Description of Artificial Sequence: Synthetic oligonucleotide
  Antisense Strand to SEQ ID NO: 371383
ucaauuaaccgcaguucca

SEQ ID NO: 371385 - RNA, 19 nt, Artificial Sequence
  Description of Artificial Sequence: Synthetic oligonucleotide
  Sense Strand Starting at position 670 of SEQ ID NO: 318412
cgguuaauugaaugaacua

SEQ ID NO: 371386 - RNA, 19 nt, Artificial Sequence
  Description of Artificial Sequence: Synthetic oligonucleotide
  Antisense Strand to SEQ ID NO: 371385
uaguucauucaauuaaccg

SEQ ID NO: 371387 - RNA, 19 nt, Artificial Sequence
  Description of Artificial Sequence: Synthetic oligonucleotide
  Sense Strand Starting at position 670 of SEQ ID NO: 318474
gacaaaucauguccaugga

SEQ ID NO: 371388 - RNA, 19 nt, Artificial Sequence
  Description of Artificial Sequence: Synthetic oligonucleotide
  Antisense Strand to SEQ ID NO: 371387
uccauggacaugauuuguc

SEQ ID NO: 371389 - RNA, 19 nt, Artificial Sequence
  Description of Artificial Sequence: Synthetic oligonucleotide
  Sense Strand Starting at position 670 of SEQ ID NO: 318490
ggauuagaauucucaguaa

SEQ ID NO: 371390 - RNA, 19 nt, Artificial Sequence
  Description of Artificial Sequence: Synthetic oligonucleotide
  Antisense Strand to SEQ ID NO: 371389
uuacugagaauucuaaucc

SEQ ID NO: 371391 - RNA, 19 nt, Artificial Sequence
  Description of Artificial Sequence: Synthetic oligonucleotide
  Sense Strand Starting at position 670 of SEQ ID NO: 318493
uuagaauucucaguaaugc

SEQ ID NO: 371392 - RNA, 19 nt, Artificial Sequence
  Description of Artificial Sequence: Synthetic oligonucleotide
  Antisense Strand to SEQ ID NO: 371391
gcauuacugagaauucuaa

SEQ ID NO: 371393 - RNA, 19 nt, Artificial Sequence
  Description of Artificial Sequence: Synthetic oligonucleotide
  Sense Strand Starting at position 670 of SEQ ID NO: 318824
gcaagaugugaauauugua

SEQ ID NO: 371394 - RNA, 19 nt, Artificial Sequence
  Description of Artificial Sequence: Synthetic oligonucleotide
  Antisense Strand to SEQ ID NO: 371393
uacaauauucacaucuugc

SEQ ID NO: 371395 - RNA, 19 nt, Artificial Sequence
  Description of Artificial Sequence: Synthetic oligonucleotide
  Sense Strand Starting at position 670 of SEQ ID NO: 318845
ucagaagaguaagucuuua

SEQ ID NO: 371396 - RNA, 19 nt, Artificial Sequence
  Description of Artificial Sequence: Synthetic oligonucleotide
  Antisense Strand to SEQ ID NO: 371395
uaaagacuuacucuucuga

SEQ ID NO: 371397 - RNA, 19 nt, Artificial Sequence
  Description of Artificial Sequence: Synthetic oligonucleotide
  Sense Strand Starting at position 670 of SEQ ID NO: 318849
aagaguaagucuuuaguac

SEQ ID NO: 371398 - RNA, 19 nt, Artificial Sequence
  Description of Artificial Sequence: Synthetic oligonucleotide
  Antisense Strand to SEQ ID NO: 371397
guacuaaagacuuacucuu

SEQ ID NO: 371399 - RNA, 19 nt, Artificial Sequence
  Description of Artificial Sequence: Synthetic oligonucleotide
  Sense Strand Starting at position 670 of SEQ ID NO: 318850
agaguaagucuuuaguaca

SEQ ID NO: 371400 - RNA, 19 nt, Artificial Sequence
  Description of Artificial Sequence: Synthetic oligonucleotide
  Antisense Strand to SEQ ID NO: 371399
uguacuaaagacuuacucu

SEQ ID NO: 371401 - RNA, 19 nt, Artificial Sequence
  Description of Artificial Sequence: Synthetic oligonucleotide
  Sense Strand Starting at position 670 of SEQ ID NO: 318929
agaacaacaugacaugaua

SEQ ID NO: 371402 - RNA, 19 nt, Artificial Sequence
  Description of Artificial Sequence: Synthetic oligonucleotide
  Antisense Strand to SEQ ID NO: 371401
uaucaugucauguuguucu

SEQ ID NO: 371403 - RNA, 19 nt, Artificial Sequence
  Description of Artificial Sequence: Synthetic oligonucleotide
  Sense Strand Starting at position 670 of SEQ ID NO: 318958
uggcgguagcgucuuugaa

SEQ ID NO: 371404 - RNA, 19 nt, Artificial Sequence
  Description of Artificial Sequence: Synthetic oligonucleotide
  Antisense Strand to SEQ ID NO: 371403
uucaaagacgcuaccgcca

SEQ ID NO: 371405 - RNA, 19 nt, Artificial Sequence
  Description of Artificial Sequence: Synthetic oligonucleotide
  Sense Strand Starting at position 670 of SEQ ID NO: 318959
ggcgguagcgucuuugaac

SEQ ID NO: 371406 - RNA, 19 nt, Artificial Sequence
  Description of Artificial Sequence: Synthetic oligonucleotide
  Antisense Strand to SEQ ID NO: 371405
guucaaagacgcuaccgcc

SEQ ID NO: 371407 - RNA, 19 nt, Artificial Sequence
  Description of Artificial Sequence: Synthetic oligonucleotide
  Sense Strand Starting at position 670 of SEQ ID NO: 319130
gcuuuaugccuggacucaa

SEQ ID NO: 371408 - RNA, 19 nt, Artificial Sequence
  Description of Artificial Sequence: Synthetic oligonucleotide
  Antisense Strand to SEQ ID NO: 371407
uugaguccaggcauaaagc

SEQ ID NO: 371409 - RNA, 19 nt, Artificial Sequence
  Description of Artificial Sequence: Synthetic oligonucleotide
  Sense Strand Starting at position 670 of SEQ ID NO: 319157
cugagacaauguuauuuaa

SEQ ID NO: 371410 - RNA, 19 nt, Artificial Sequence
  Description of Artificial Sequence: Synthetic oligonucleotide
  Antisense Strand to SEQ ID NO: 371409
uuaaauaacauugucucag

SEQ ID NO: 371411 - RNA, 19 nt, Artificial Sequence
  Description of Artificial Sequence: Synthetic oligonucleotide
  Sense Strand Starting at position 671 of SEQ ID NO: 315248
augaaauaaugagccuauu

SEQ ID NO: 371412 - RNA, 19 nt, Artificial Sequence
  Description of Artificial Sequence: Synthetic oligonucleotide
  Antisense Strand to SEQ ID NO: 371411
aauaggcucauuauuucau

SEQ ID NO: 371413 - RNA, 19 nt, Artificial Sequence
  Description of Artificial Sequence: Synthetic oligonucleotide
  Sense Strand Starting at position 671 of SEQ ID NO: 315280
uuagauugucauggcaaga

SEQ ID NO: 371414 - RNA, 19 nt, Artificial Sequence
  Description of Artificial Sequence: Synthetic oligonucleotide
  Antisense Strand to SEQ ID NO: 371413
ucuugccaugacaaucuaa

SEQ ID NO: 371415 - RNA, 19 nt, Artificial Sequence
  Description of Artificial Sequence: Synthetic oligonucleotide
  Sense Strand Starting at position 671 of SEQ ID NO: 316147
gagaguucgguagauccuu

SEQ ID NO: 371416 - RNA, 19 nt, Artificial Sequence
  Description of Artificial Sequence: Synthetic oligonucleotide
  Antisense Strand to SEQ ID NO: 371415
aaggaucuaccgaacucuc

SEQ ID NO: 371417 - RNA, 19 nt, Artificial Sequence
  Description of Artificial Sequence: Synthetic oligonucleotide
  Sense Strand Starting at position 671 of SEQ ID NO: 317803
cggcgaagucgcuucccau

SEQ ID NO: 371418 - RNA, 19 nt, Artificial Sequence
  Description of Artificial Sequence: Synthetic oligonucleotide
  Antisense Strand to SEQ ID NO: 371417
augggaagcgacuucgccg

SEQ ID NO: 371419 - RNA, 19 nt, Artificial Sequence
  Description of Artificial Sequence: Synthetic oligonucleotide
  Sense Strand Starting at position 671 of SEQ ID NO: 317804
ggcgaagucgcuucccauu

SEQ ID NO: 371420 - RNA, 19 nt, Artificial Sequence
  Description of Artificial Sequence: Synthetic oligonucleotide
  Antisense Strand to SEQ ID NO: 371419
aaugggaagcgacuucgcc

SEQ ID NO: 371421 - RNA, 19 nt, Artificial Sequence
  Description of Artificial Sequence: Synthetic oligonucleotide
  Sense Strand Starting at position 671 of SEQ ID NO: 317887
ggaaguuguguuuaaacag

SEQ ID NO: 371422 - RNA, 19 nt, Artificial Sequence
  Description of Artificial Sequence: Synthetic oligonucleotide
  Antisense Strand to SEQ ID NO: 371421
cuguuuaaacacaacuucc

SEQ ID NO: 371423 - RNA, 19 nt, Artificial Sequence
  Description of Artificial Sequence: Synthetic oligonucleotide
  Sense Strand Starting at position 671 of SEQ ID NO: 317917
cugagaaggcaguguuaag

SEQ ID NO: 371424 - RNA, 19 nt, Artificial Sequence
  Description of Artificial Sequence: Synthetic oligonucleotide
  Antisense Strand to SEQ ID NO: 371423
cuuaacacugccuucucag

SEQ ID NO: 371425 - RNA, 19 nt, Artificial Sequence
  Description of Artificial Sequence: Synthetic oligonucleotide
  Sense Strand Starting at position 671 of SEQ ID NO: 317936
uggaggugucuccgaggaa

SEQ ID NO: 371426 - RNA, 19 nt, Artificial Sequence
  Description of Artificial Sequence: Synthetic oligonucleotide
  Antisense Strand to SEQ ID NO: 371425
uuccucggagacaccucca

SEQ ID NO: 371427 - RNA, 19 nt, Artificial Sequence
  Description of Artificial Sequence: Synthetic oligonucleotide
  Sense Strand Starting at position 671 of SEQ ID NO: 317972
cggaauaggucuucggaaa

SEQ ID NO: 371428 - RNA, 19 nt, Artificial Sequence
  Description of Artificial Sequence: Synthetic oligonucleotide
  Antisense Strand to SEQ ID NO: 371427
uuuccgaagaccuauuccg

SEQ ID NO: 371429 - RNA, 19 nt, Artificial Sequence
  Description of Artificial Sequence: Synthetic oligonucleotide
  Sense Strand Starting at position 671 of SEQ ID NO: 317973
ggaauaggucuucggaaac

SEQ ID NO: 371430 - RNA, 19 nt, Artificial Sequence
  Description of Artificial Sequence: Synthetic oligonucleotide
  Antisense Strand to SEQ ID NO: 371429
guuuccgaagaccuauucc

SEQ ID NO: 371431 - RNA, 19 nt, Artificial Sequence
  Description of Artificial Sequence: Synthetic oligonucleotide
  Sense Strand Starting at position 671 of SEQ ID NO: 318189
ggauacauuauucgagaau

SEQ ID NO: 371432 - RNA, 19 nt, Artificial Sequence
  Description of Artificial Sequence: Synthetic oligonucleotide
  Antisense Strand to SEQ ID NO: 371431
auucucgaauaauguaucc

SEQ ID NO: 371433 - RNA, 19 nt, Artificial Sequence
  Description of Artificial Sequence: Synthetic oligonucleotide
  Sense Strand Starting at position 671 of SEQ ID NO: 318198
auucgagaaucauccuuug

SEQ ID NO: 371434 - RNA, 19 nt, Artificial Sequence
  Description of Artificial Sequence: Synthetic oligonucleotide
  Antisense Strand to SEQ ID NO: 371433
caaaggaugauucucgaau

SEQ ID NO: 371435 - RNA, 19 nt, Artificial Sequence
  Description of Artificial Sequence: Synthetic oligonucleotide
  Sense Strand Starting at position 671 of SEQ ID NO: 318201
cgagaaucauccuuuggau

SEQ ID NO: 371436 - RNA, 19 nt, Artificial Sequence
  Description of Artificial Sequence: Synthetic oligonucleotide
  Antisense Strand to SEQ ID NO: 371435
auccaaaggaugauucucg

SEQ ID NO: 371437 - RNA, 19 nt, Artificial Sequence
  Description of Artificial Sequence: Synthetic oligonucleotide
  Sense Strand Starting at position 671 of SEQ ID NO: 318203
agaaucauccuuuggauuc

SEQ ID NO: 371438 - RNA, 19 nt, Artificial Sequence
  Description of Artificial Sequence: Synthetic oligonucleotide
  Antisense Strand to SEQ ID NO: 371437
gaauccaaaggaugauucu

SEQ ID NO: 371439 - RNA, 19 nt, Artificial Sequence
  Description of Artificial Sequence: Synthetic oligonucleotide
  Sense Strand Starting at position 671 of SEQ ID NO: 318272
guaacauuuauuggcguuu

SEQ ID NO: 371440 - RNA, 19 nt, Artificial Sequence
  Description of Artificial Sequence: Synthetic oligonucleotide
  Antisense Strand to SEQ ID NO: 371439
aaacgccaauaaauguuac

SEQ ID NO: 371441 - RNA, 19 nt, Artificial Sequence
  Description of Artificial Sequence: Synthetic oligonucleotide
  Sense Strand Starting at position 671 of SEQ ID NO: 318337
cuuuguuauccugaaacug

SEQ ID NO: 371442 - RNA, 19 nt, Artificial Sequence
  Description of Artificial Sequence: Synthetic oligonucleotide
  Antisense Strand to SEQ ID NO: 371441
caguuucaggauaacaaag

SEQ ID NO: 371443 - RNA, 19 nt, Artificial Sequence
  Description of Artificial Sequence: Synthetic oligonucleotide
  Sense Strand Starting at position 671 of SEQ ID NO: 318353
cugugucauguagacauaa

SEQ ID NO: 371444 - RNA, 19 nt, Artificial Sequence
  Description of Artificial Sequence: Synthetic oligonucleotide
  Antisense Strand to SEQ ID NO: 371443
uuaugucuacaugacacag

SEQ ID NO: 371445 - RNA, 19 nt, Artificial Sequence
  Description of Artificial Sequence: Synthetic oligonucleotide
  Sense Strand Starting at position 671 of SEQ ID NO: 318355
gugucauguagacauaaau

SEQ ID NO: 371446 - RNA, 19 nt, Artificial Sequence
  Description of Artificial Sequence: Synthetic oligonucleotide
  Antisense Strand to SEQ ID NO: 371445
auuuaugucuacaugacac

SEQ ID NO: 371447 - RNA, 19 nt, Artificial Sequence
  Description of Artificial Sequence: Synthetic oligonucleotide
  Sense Strand Starting at position 671 of SEQ ID NO: 318364
agacauaaauggucacagu

SEQ ID NO: 371448 - RNA, 19 nt, Artificial Sequence
  Description of Artificial Sequence: Synthetic oligonucleotide
  Antisense Strand to SEQ ID NO: 371447
acugugaccauuuaugucu

SEQ ID NO: 371449 - RNA, 19 nt, Artificial Sequence
  Description of Artificial Sequence: Synthetic oligonucleotide
  Sense Strand Starting at position 671 of SEQ ID NO: 318473
acaaaugaaugggaagauu

SEQ ID NO: 371450 - RNA, 19 nt, Artificial Sequence
  Description of Artificial Sequence: Synthetic oligonucleotide
  Antisense Strand to SEQ ID NO: 371449
aaucuucccauucauuugu

SEQ ID NO: 371451 - RNA, 19 nt, Artificial Sequence
  Description of Artificial Sequence: Synthetic oligonucleotide
  Sense Strand Starting at position 671 of SEQ ID NO: 318572
gcagauuauccauggaguu

SEQ ID NO: 371452 - RNA, 19 nt, Artificial Sequence
  Description of Artificial Sequence: Synthetic oligonucleotide
  Antisense Strand to SEQ ID NO: 371451
aacuccauggauaaucugc

SEQ ID NO: 371453 - RNA, 19 nt, Artificial Sequence
  Description of Artificial Sequence: Synthetic oligonucleotide
  Sense Strand Starting at position 671 of SEQ ID NO: 318573
cagauuauccauggaguua

SEQ ID NO: 371454 - RNA, 19 nt, Artificial Sequence
  Description of Artificial Sequence: Synthetic oligonucleotide
  Antisense Strand to SEQ ID NO: 371453
uaacuccauggauaaucug

SEQ ID NO: 371455 - RNA, 19 nt, Artificial Sequence
  Description of Artificial Sequence: Synthetic oligonucleotide
  Sense Strand Starting at position 671 of SEQ ID NO: 318585
ggaguuagcaugcagauag

SEQ ID NO: 371456 - RNA, 19 nt, Artificial Sequence
  Description of Artificial Sequence: Synthetic oligonucleotide
  Antisense Strand to SEQ ID NO: 371455
cuaucugcaugcuaacucc

SEQ ID NO: 371457 - RNA, 19 nt, Artificial Sequence
  Description of Artificial Sequence: Synthetic oligonucleotide
  Sense Strand Starting at position 671 of SEQ ID NO: 318604
cauggaguuugucugauag

SEQ ID NO: 371458 - RNA, 19 nt, Artificial Sequence
  Description of Artificial Sequence: Synthetic oligonucleotide
  Antisense Strand to SEQ ID NO: 371457
cuaucagacaaacuccaug

SEQ ID NO: 371459 - RNA, 19 nt, Artificial Sequence
  Description of Artificial Sequence: Synthetic oligonucleotide
  Sense Strand Starting at position 671 of SEQ ID NO: 318610
guuugucugauagaaguug

SEQ ID NO: 371460 - RNA, 19 nt, Artificial Sequence
  Description of Artificial Sequence: Synthetic oligonucleotide
  Antisense Strand to SEQ ID NO: 371459
caacuucuaucagacaaac

SEQ ID NO: 371461 - RNA, 19 nt, Artificial Sequence
  Description of Artificial Sequence: Synthetic oligonucleotide
  Sense Strand Starting at position 671 of SEQ ID NO: 318673
aaugcagguuucuuaggga

SEQ ID NO: 371462 - RNA, 19 nt, Artificial Sequence
  Description of Artificial Sequence: Synthetic oligonucleotide
  Antisense Strand to SEQ ID NO: 371461
ucccuaagaaaccugcauu

SEQ ID NO: 371463 - RNA, 19 nt, Artificial Sequence
  Description of Artificial Sequence: Synthetic oligonucleotide
  Sense Strand Starting at position 671 of SEQ ID NO: 318797
gcaauuaaugauggugaga

SEQ ID NO: 371464 - RNA, 19 nt, Artificial Sequence
  Description of Artificial Sequence: Synthetic oligonucleotide
  Antisense Strand to SEQ ID NO: 371463
ucucaccaucauuaauugc

SEQ ID NO: 371465 - RNA, 19 nt, Artificial Sequence
  Description of Artificial Sequence: Synthetic oligonucleotide
  Sense Strand Starting at position 671 of SEQ ID NO: 318887
cagggaccaaggugugaau

SEQ ID NO: 371466 - RNA, 19 nt, Artificial Sequence
  Description of Artificial Sequence: Synthetic oligonucleotide
  Antisense Strand to SEQ ID NO: 371465
auucacaccuuggucccug

SEQ ID NO: 371467 - RNA, 19 nt, Artificial Sequence
  Description of Artificial Sequence: Synthetic oligonucleotide
  Sense Strand Starting at position 671 of SEQ ID NO: 318932
gucccagcccugcaauuua

SEQ ID NO: 371468 - RNA, 19 nt, Artificial Sequence
  Description of Artificial Sequence: Synthetic oligonucleotide
  Antisense Strand to SEQ ID NO: 371467
uaaauugcagggcugggac

SEQ ID NO: 371469 - RNA, 19 nt, Artificial Sequence
  Description of Artificial Sequence: Synthetic oligonucleotide
  Sense Strand Starting at position 671 of SEQ ID NO: 318992
gcuuaauuuccuuggcucu

SEQ ID NO: 371470 - RNA, 19 nt, Artificial Sequence
  Description of Artificial Sequence: Synthetic oligonucleotide
  Antisense Strand to SEQ ID NO: 371469
agagccaaggaaauuaagc

SEQ ID NO: 371471 - RNA, 19 nt, Artificial Sequence
  Description of Artificial Sequence: Synthetic oligonucleotide
  Sense Strand Starting at position 671 of SEQ ID NO: 319017
ggguuaauaucaguacuua

SEQ ID NO: 371472 - RNA, 19 nt, Artificial Sequence
  Description of Artificial Sequence: Synthetic oligonucleotide
  Antisense Strand to SEQ ID NO: 371471
uaaguacugauauuaaccc

SEQ ID NO: 371473 - RNA, 19 nt, Artificial Sequence
  Description of Artificial Sequence: Synthetic oligonucleotide
  Sense Strand Starting at position 671 of SEQ ID NO: 319018
gguuaauaucaguacuuau

SEQ ID NO: 371474 - RNA, 19 nt, Artificial Sequence
  Description of Artificial Sequence: Synthetic oligonucleotide
  Antisense Strand to SEQ ID NO: 371473
auaaguacugauauuaacc

SEQ ID NO: 371475 - RNA, 19 nt, Artificial Sequence
  Description of Artificial Sequence: Synthetic oligonucleotide
  Sense Strand Starting at position 671 of SEQ ID NO: 319035
aucccaaaggauugugaug

SEQ ID NO: 371476 - RNA, 19 nt, Artificial Sequence
  Description of Artificial Sequence: Synthetic oligonucleotide
  Antisense Strand to SEQ ID NO: 371475
caucacaauccuuugggau

SEQ ID NO: 371477 - RNA, 19 nt, Artificial Sequence
  Description of Artificial Sequence: Synthetic oligonucleotide
  Sense Strand Starting at position 671 of SEQ ID NO: 319041
aaggauugugaugguuaag

SEQ ID NO: 371478 - RNA, 19 nt, Artificial Sequence
  Description of Artificial Sequence: Synthetic oligonucleotide
  Antisense Strand to SEQ ID NO: 371477
cuuaaccaucacaauccuu

SEQ ID NO: 371479 - RNA, 19 nt, Artificial Sequence
  Description of Artificial Sequence: Synthetic oligonucleotide
  Sense Strand Starting at position 671 of SEQ ID NO: 319050
gaugguuaagugggaguaa

SEQ ID NO: 371480 - RNA, 19 nt, Artificial Sequence
  Description of Artificial Sequence: Synthetic oligonucleotide
  Antisense Strand to SEQ ID NO: 371479
uuacucccacuuaaccauc

SEQ ID NO: 371481 - RNA, 19 nt, Artificial Sequence
  Description of Artificial Sequence: Synthetic oligonucleotide
  Sense Strand Starting at position 671 of SEQ ID NO: 319083
uaggacagugcuuaguaua

SEQ ID NO: 371482 - RNA, 19 nt, Artificial Sequence
  Description of Artificial Sequence: Synthetic oligonucleotide
  Antisense Strand to SEQ ID NO: 371481
uauacuaagcacuguccua

SEQ ID NO: 371483 - RNA, 19 nt, Artificial Sequence
  Description of Artificial Sequence: Synthetic oligonucleotide
  Sense Strand Starting at position 671 of SEQ ID NO: 319120
agauguaagcucuaggcau

SEQ ID NO: 371484 - RNA, 19 nt, Artificial Sequence
  Description of Artificial Sequence: Synthetic oligonucleotide
  Antisense Strand to SEQ ID NO: 371483
augccuagagcuuacaucu

SEQ ID NO: 371485 - RNA, 19 nt, Artificial Sequence
  Description of Artificial Sequence: Synthetic oligonucleotide
  Sense Strand Starting at position 671 of SEQ ID NO: 319134
ggcauuauuaggcagguau

SEQ ID NO: 371486 - RNA, 19 nt, Artificial Sequence
  Description of Artificial Sequence: Synthetic oligonucleotide
  Antisense Strand to SEQ ID NO: 371485
auaccugccuaauaaugcc

SEQ ID NO: 371487 - RNA, 19 nt, Artificial Sequence
  Description of Artificial Sequence: Synthetic oligonucleotide
  Sense Strand Starting at position 671 of SEQ ID NO: 319138
uuauuaggcagguauugaa

SEQ ID NO: 371488 - RNA, 19 nt, Artificial Sequence
  Description of Artificial Sequence: Synthetic oligonucleotide
  Antisense Strand to SEQ ID NO: 371487
uucaauaccugccuaauaa

SEQ ID NO: 371489 - RNA, 19 nt, Artificial Sequence
  Description of Artificial Sequence: Synthetic oligonucleotide
  Sense Strand Starting at position 671 of SEQ ID NO: 319199
ccgcaugugacagaauauc

SEQ ID NO: 371490 - RNA, 19 nt, Artificial Sequence
  Description of Artificial Sequence: Synthetic oligonucleotide
  Antisense Strand to SEQ ID NO: 371489
gauauucugucacaugcgg

SEQ ID NO: 371491 - RNA, 19 nt, Artificial Sequence
  Description of Artificial Sequence: Synthetic oligonucleotide
  Sense Strand Starting at position 672 of SEQ ID NO: 315238
agagcaaugcauuacuuau

SEQ ID NO: 371492 - RNA, 19 nt, Artificial Sequence
  Description of Artificial Sequence: Synthetic oligonucleotide
  Antisense Strand to SEQ ID NO: 371491
auaaguaaugcauugcucu

SEQ ID NO: 371493 - RNA, 19 nt, Artificial Sequence
  Description of Artificial Sequence: Synthetic oligonucleotide
  Sense Strand Starting at position 672 of SEQ ID NO: 315259
aguugaacuuacuuugauu

SEQ ID NO: 371494 - RNA, 19 nt, Artificial Sequence
  Description of Artificial Sequence: Synthetic oligonucleotide
  Antisense Strand to SEQ ID NO: 371493
aaucaaaguaaguucaacu

SEQ ID NO: 371495 - RNA, 19 nt, Artificial Sequence
  Description of Artificial Sequence: Synthetic oligonucleotide
  Sense Strand Starting at position 672 of SEQ ID NO: 315326
acugauguaucccuccaga

SEQ ID NO: 371496 - RNA, 19 nt, Artificial Sequence
  Description of Artificial Sequence: Synthetic oligonucleotide
  Antisense Strand to SEQ ID NO: 371495
ucuggagggauacaucagu

SEQ ID NO: 371497 - RNA, 19 nt, Artificial Sequence
  Description of Artificial Sequence: Synthetic oligonucleotide
  Sense Strand Starting at position 672 of SEQ ID NO: 315464
uuguaaauaugguuccauu

SEQ ID NO: 371498 - RNA, 19 nt, Artificial Sequence
  Description of Artificial Sequence: Synthetic oligonucleotide
  Antisense Strand to SEQ ID NO: 371497
aauggaaccauauuuacaa

SEQ ID NO: 371499 - RNA, 19 nt, Artificial Sequence
  Description of Artificial Sequence: Synthetic oligonucleotide
  Sense Strand Starting at position 672 of SEQ ID NO: 315558
auaguagagcugugauaag

SEQ ID NO: 371500 - RNA, 19 nt, Artificial Sequence
  Description of Artificial Sequence: Synthetic oligonucleotide
  Antisense Strand to SEQ ID NO: 371499
cuuaucacagcucuacuau

SEQ ID NO: 371501 - RNA, 19 nt, Artificial Sequence
  Description of Artificial Sequence: Synthetic oligonucleotide
  Sense Strand Starting at position 672 of SEQ ID NO: 315781
uguaaucaucaauaugucu

SEQ ID NO: 371502 - RNA, 19 nt, Artificial Sequence
  Description of Artificial Sequence: Synthetic oligonucleotide
  Antisense Strand to SEQ ID NO: 371501
agacauauugaugauuaca

SEQ ID NO: 371503 - RNA, 19 nt, Artificial Sequence
  Description of Artificial Sequence: Synthetic oligonucleotide
  Sense Strand Starting at position 672 of SEQ ID NO: 315839
ccacauggauacguggaaa

SEQ ID NO: 371504 - RNA, 19 nt, Artificial Sequence
  Description of Artificial Sequence: Synthetic oligonucleotide
  Antisense Strand to SEQ ID NO: 371503
uuuccacguauccaugugg

SEQ ID NO: 371505 - RNA, 19 nt, Artificial Sequence
  Description of Artificial Sequence: Synthetic oligonucleotide
  Sense Strand Starting at position 672 of SEQ ID NO: 315883
uagcauauuccauggugag

SEQ ID NO: 371506 - RNA, 19 nt, Artificial Sequence
  Description of Artificial Sequence: Synthetic oligonucleotide
  Antisense Strand to SEQ ID NO: 371505
cucaccauggaauaugcua

SEQ ID NO: 371507 - RNA, 19 nt, Artificial Sequence
  Description of Artificial Sequence: Synthetic oligonucleotide
  Sense Strand Starting at position 672 of SEQ ID NO: 315884
agcauauuccauggugaga

SEQ ID NO: 371508 - RNA, 19 nt, Artificial Sequence
  Description of Artificial Sequence: Synthetic oligonucleotide
  Antisense Strand to SEQ ID NO: 371507
ucucaccauggaauaugcu

SEQ ID NO: 371509 - RNA, 19 nt, Artificial Sequence
  Description of Artificial Sequence: Synthetic oligonucleotide
  Sense Strand Starting at position 672 of SEQ ID NO: 316263
auaguuaucuacucaaagu

SEQ ID NO: 371510 - RNA, 19 nt, Artificial Sequence
  Description of Artificial Sequence: Synthetic oligonucleotide
  Antisense Strand to SEQ ID NO: 371509
acuuugaguagauaacuau

SEQ ID NO: 371511 - RNA, 19 nt, Artificial Sequence
  Description of Artificial Sequence: Synthetic oligonucleotide
  Sense Strand Starting at position 672 of SEQ ID NO: 316337
gggccuuaacuagggaaau

SEQ ID NO: 371512 - RNA, 19 nt, Artificial Sequence
  Description of Artificial Sequence: Synthetic oligonucleotide
  Antisense Strand to SEQ ID NO: 371511
auuucccuaguuaaggccc

SEQ ID NO: 371513 - RNA, 19 nt, Artificial Sequence
  Description of Artificial Sequence: Synthetic oligonucleotide
  Sense Strand Starting at position 672 of SEQ ID NO: 316465
gaaagagagucuucucagu

SEQ ID NO: 371514 - RNA, 19 nt, Artificial Sequence
  Description of Artificial Sequence: Synthetic oligonucleotide
  Antisense Strand to SEQ ID NO: 371513
acugagaagacucucuuuc

SEQ ID NO: 371515 - RNA, 19 nt, Artificial Sequence
  Description of Artificial Sequence: Synthetic oligonucleotide
  Sense Strand Starting at position 672 of SEQ ID NO: 316467
aagagagucuucucaguuu

SEQ ID NO: 371516 - RNA, 19 nt, Artificial Sequence
  Description of Artificial Sequence: Synthetic oligonucleotide
  Antisense Strand to SEQ ID NO: 371515
aaacugagaagacucucuu

SEQ ID NO: 371517 - RNA, 19 nt, Artificial Sequence
  Description of Artificial Sequence: Synthetic oligonucleotide
  Sense Strand Starting at position 672 of SEQ ID NO: 316470
agagucuucucaguuuaau

SEQ ID NO: 371518 - RNA, 19 nt, Artificial Sequence
  Description of Artificial Sequence: Synthetic oligonucleotide
  Antisense Strand to SEQ ID NO: 371517
auuaaacugagaagacucu

SEQ ID NO: 371519 - RNA, 19 nt, Artificial Sequence
  Description of Artificial Sequence: Synthetic oligonucleotide
  Sense Strand Starting at position 672 of SEQ ID NO: 316490
uaguuuaagggaugcagaa

SEQ ID NO: 371520 - RNA, 19 nt, Artificial Sequence
  Description of Artificial Sequence: Synthetic oligonucleotide
  Antisense Strand to SEQ ID NO: 371519
uucugcaucccuuaaacua

SEQ ID NO: 371521 - RNA, 19 nt, Artificial Sequence
  Description of Artificial Sequence: Synthetic oligonucleotide
  Sense Strand Starting at position 672 of SEQ ID NO: 316670
uaauuaguugcaggaaauu

SEQ ID NO: 371522 - RNA, 19 nt, Artificial Sequence
  Description of Artificial Sequence: Synthetic oligonucleotide
  Antisense Strand to SEQ ID NO: 371521
aauuuccugcaacuaauua

SEQ ID NO: 371523 - RNA, 19 nt, Artificial Sequence
  Description of Artificial Sequence: Synthetic oligonucleotide
  Sense Strand Starting at position 672 of SEQ ID NO: 316716
cgcagaauccacugaucua

SEQ ID NO: 371524 - RNA, 19 nt, Artificial Sequence
  Description of Artificial Sequence: Synthetic oligonucleotide
  Antisense Strand to SEQ ID NO: 371523
uagaucaguggauucugcg

SEQ ID NO: 371525 - RNA, 19 nt, Artificial Sequence
  Description of Artificial Sequence: Synthetic oligonucleotide
  Sense Strand Starting at position 672 of SEQ ID NO: 316840
ccauguuuccuaugaaaug

SEQ ID NO: 371526 - RNA, 19 nt, Artificial Sequence
  Description of Artificial Sequence: Synthetic oligonucleotide
  Antisense Strand to SEQ ID NO: 371525
cauuucauaggaaacaugg

SEQ ID NO: 371527 - RNA, 19 nt, Artificial Sequence
  Description of Artificial Sequence: Synthetic oligonucleotide
  Sense Strand Starting at position 672 of SEQ ID NO: 316885
augucaugacugcauacau

SEQ ID NO: 371528 - RNA, 19 nt, Artificial Sequence
  Description of Artificial Sequence: Synthetic oligonucleotide
  Antisense Strand to SEQ ID NO: 371527
auguaugcagucaugacau

SEQ ID NO: 371529 - RNA, 19 nt, Artificial Sequence
  Description of Artificial Sequence: Synthetic oligonucleotide
  Sense Strand Starting at position 672 of SEQ ID NO: 317144
uuaauuaaugugcagagca

SEQ ID NO: 371530 - RNA, 19 nt, Artificial Sequence
  Description of Artificial Sequence: Synthetic oligonucleotide
  Antisense Strand to SEQ ID NO: 371529
ugcucugcacauuaauuaa

SEQ ID NO: 371531 - RNA, 19 nt, Artificial Sequence
  Description of Artificial Sequence: Synthetic oligonucleotide
  Sense Strand Starting at position 672 of SEQ ID NO: 317309
ugggaucaguuuccauaag

SEQ ID NO: 371532 - RNA, 19 nt, Artificial Sequence
  Description of Artificial Sequence: Synthetic oligonucleotide
  Antisense Strand to SEQ ID NO: 371531
cuuauggaaacugauccca

SEQ ID NO: 371533 - RNA, 19 nt, Artificial Sequence
  Description of Artificial Sequence: Synthetic oligonucleotide
  Sense Strand Starting at position 672 of SEQ ID NO: 317426
uuugucaaaccuuggugaa

SEQ ID NO: 371534 - RNA, 19 nt, Artificial Sequence
  Description of Artificial Sequence: Synthetic oligonucleotide
  Antisense Strand to SEQ ID NO: 371533
uucaccaagguuugacaaa

SEQ ID NO: 371535 - RNA, 19 nt, Artificial Sequence
  Description of Artificial Sequence: Synthetic oligonucleotide
  Sense Strand Starting at position 672 of SEQ ID NO: 317427
uugucaaaccuuggugaac

SEQ ID NO: 371536 - RNA, 19 nt, Artificial Sequence
  Description of Artificial Sequence: Synthetic oligonucleotide
  Antisense Strand to SEQ ID NO: 371535
guucaccaagguuugacaa

SEQ ID NO: 371537 - RNA, 19 nt, Artificial Sequence
  Description of Artificial Sequence: Synthetic oligonucleotide
  Sense Strand Starting at position 672 of SEQ ID NO: 317428
ugucaaaccuuggugaaca

SEQ ID NO: 371538 - RNA, 19 nt, Artificial Sequence
  Description of Artificial Sequence: Synthetic oligonucleotide
  Antisense Strand to SEQ ID NO: 371537
uguucaccaagguuugaca

SEQ ID NO: 371539 - RNA, 19 nt, Artificial Sequence
  Description of Artificial Sequence: Synthetic oligonucleotide
  Sense Strand Starting at position 672 of SEQ ID NO: 317712
cacuucuuuggucaucgaa

SEQ ID NO: 371540 - RNA, 19 nt, Artificial Sequence
  Description of Artificial Sequence: Synthetic oligonucleotide
  Antisense Strand to SEQ ID NO: 371539
uucgaugaccaaagaagug

SEQ ID NO: 371541 - RNA, 19 nt, Artificial Sequence
  Description of Artificial Sequence: Synthetic oligonucleotide
  Sense Strand Starting at position 672 of SEQ ID NO: 317773
gggucuugaugcccugaaa

SEQ ID NO: 371542 - RNA, 19 nt, Artificial Sequence
  Description of Artificial Sequence: Synthetic oligonucleotide
  Antisense Strand to SEQ ID NO: 371541
uuucagggcaucaagaccc

SEQ ID NO: 371543 - RNA, 19 nt, Artificial Sequence
  Description of Artificial Sequence: Synthetic oligonucleotide
  Sense Strand Starting at position 672 of SEQ ID NO: 317776
ucuugaugcccugaaauuc

SEQ ID NO: 371544 - RNA, 19 nt, Artificial Sequence
  Description of Artificial Sequence: Synthetic oligonucleotide
  Antisense Strand to SEQ ID NO: 371543
gaauuucagggcaucaaga

SEQ ID NO: 371545 - RNA, 19 nt, Artificial Sequence
  Description of Artificial Sequence: Synthetic oligonucleotide
  Sense Strand Starting at position 672 of SEQ ID NO: 317800
caugguuuccuuuagugga

SEQ ID NO: 371546 - RNA, 19 nt, Artificial Sequence
  Description of Artificial Sequence: Synthetic oligonucleotide
  Antisense Strand to SEQ ID NO: 371545
uccacuaaaggaaaccaug

SEQ ID NO: 371547 - RNA, 19 nt, Artificial Sequence
  Description of Artificial Sequence: Synthetic oligonucleotide
  Sense Strand Starting at position 672 of SEQ ID NO: 317913
ccgaguugaauugaccuuu

SEQ ID NO: 371548 - RNA, 19 nt, Artificial Sequence
  Description of Artificial Sequence: Synthetic oligonucleotide
  Antisense Strand to SEQ ID NO: 371547
aaaggucaauucaacucgg

SEQ ID NO: 371549 - RNA, 19 nt, Artificial Sequence
  Description of Artificial Sequence: Synthetic oligonucleotide
  Sense Strand Starting at position 672 of SEQ ID NO: 317934
guuagugugacuuaagaaa

SEQ ID NO: 371550 - RNA, 19 nt, Artificial Sequence
  Description of Artificial Sequence: Synthetic oligonucleotide
  Antisense Strand to SEQ ID NO: 371549
uuucuuaagucacacuaac

SEQ ID NO: 371551 - RNA, 19 nt, Artificial Sequence
  Description of Artificial Sequence: Synthetic oligonucleotide
  Sense Strand Starting at position 672 of SEQ ID NO: 318063
ugugacucuucucuaauug

SEQ ID NO: 371552 - RNA, 19 nt, Artificial Sequence
  Description of Artificial Sequence: Synthetic oligonucleotide
  Antisense Strand to SEQ ID NO: 371551
caauuagagaagagucaca

SEQ ID NO: 371553 - RNA, 19 nt, Artificial Sequence
  Description of Artificial Sequence: Synthetic oligonucleotide
  Sense Strand Starting at position 672 of SEQ ID NO: 318064
gugacucuucucuaauuga

SEQ ID NO: 371554 - RNA, 19 nt, Artificial Sequence
  Description of Artificial Sequence: Synthetic oligonucleotide
  Antisense Strand to SEQ ID NO: 371553
ucaauuagagaagagucac

SEQ ID NO: 371555 - RNA, 19 nt, Artificial Sequence
  Description of Artificial Sequence: Synthetic oligonucleotide
  Sense Strand Starting at position 672 of SEQ ID NO: 318110
cuggaaccguuucuuugaa

SEQ ID NO: 371556 - RNA, 19 nt, Artificial Sequence
  Description of Artificial Sequence: Synthetic oligonucleotide
  Antisense Strand to SEQ ID NO: 371555
uucaaagaaacgguuccag

SEQ ID NO: 371557 - RNA, 19 nt, Artificial Sequence
  Description of Artificial Sequence: Synthetic oligonucleotide
  Sense Strand Starting at position 672 of SEQ ID NO: 318111
uggaaccguuucuuugaau

SEQ ID NO: 371558 - RNA, 19 nt, Artificial Sequence
  Description of Artificial Sequence: Synthetic oligonucleotide
  Antisense Strand to SEQ ID NO: 371557
auucaaagaaacgguucca

SEQ ID NO: 371559 - RNA, 19 nt, Artificial Sequence
  Description of Artificial Sequence: Synthetic oligonucleotide
  Sense Strand Starting at position 672 of SEQ ID NO: 318112
ggaaccguuucuuugaaug

SEQ ID NO: 371560 - RNA, 19 nt, Artificial Sequence
  Description of Artificial Sequence: Synthetic oligonucleotide
  Antisense Strand to SEQ ID NO: 371559
cauucaaagaaacgguucc

SEQ ID NO: 371561 - RNA, 19 nt, Artificial Sequence
  Description of Artificial Sequence: Synthetic oligonucleotide
  Sense Strand Starting at position 672 of SEQ ID NO: 318207
cuguguguaacugugugua

SEQ ID NO: 371562 - RNA, 19 nt, Artificial Sequence
  Description of Artificial Sequence: Synthetic oligonucleotide
  Antisense Strand to SEQ ID NO: 371561
uacacacaguuacacacag

SEQ ID NO: 371563 - RNA, 19 nt, Artificial Sequence
  Description of Artificial Sequence: Synthetic oligonucleotide
  Sense Strand Starting at position 672 of SEQ ID NO: 318260
ggcuccaggagguauaauu

SEQ ID NO: 371564 - RNA, 19 nt, Artificial Sequence
  Description of Artificial Sequence: Synthetic oligonucleotide
  Antisense Strand to SEQ ID NO: 371563
aauuauaccuccuggagcc

SEQ ID NO: 371565 - RNA, 19 nt, Artificial Sequence
  Description of Artificial Sequence: Synthetic oligonucleotide
  Sense Strand Starting at position 672 of SEQ ID NO: 318426
ggcugugcccaggauuaaa

SEQ ID NO: 371566 - RNA, 19 nt, Artificial Sequence
  Description of Artificial Sequence: Synthetic oligonucleotide
  Antisense Strand to SEQ ID NO: 371565
uuuaauccugggcacagcc

SEQ ID NO: 371567 - RNA, 19 nt, Artificial Sequence
  Description of Artificial Sequence: Synthetic oligonucleotide
  Sense Strand Starting at position 672 of SEQ ID NO: 318645
cccuuugugaauggaaguu

SEQ ID NO: 371568 - RNA, 19 nt, Artificial Sequence
  Description of Artificial Sequence: Synthetic oligonucleotide
  Antisense Strand to SEQ ID NO: 371567
aacuuccauucacaaaggg

SEQ ID NO: 371569 - RNA, 19 nt, Artificial Sequence
  Description of Artificial Sequence: Synthetic oligonucleotide
  Sense Strand Starting at position 672 of SEQ ID NO: 319179
uugugaaggccagauagua

SEQ ID NO: 371570 - RNA, 19 nt, Artificial Sequence
  Description of Artificial Sequence: Synthetic oligonucleotide
  Antisense Strand to SEQ ID NO: 371569
uacuaucuggccuucacaa

SEQ ID NO: 371571 - RNA, 19 nt, Artificial Sequence
  Description of Artificial Sequence: Synthetic oligonucleotide
  Sense Strand Starting at position 673 of SEQ ID NO: 315300
gcagcucugcuagagaacu

SEQ ID NO: 371572 - RNA, 19 nt, Artificial Sequence
  Description of Artificial Sequence: Synthetic oligonucleotide
  Antisense Strand to SEQ ID NO: 371571
aguucucuagcagagcugc

SEQ ID NO: 371573 - RNA, 19 nt, Artificial Sequence
  Description of Artificial Sequence: Synthetic oligonucleotide
  Sense Strand Starting at position 673 of SEQ ID NO: 315511
uuguuagcaucugccagaa

SEQ ID NO: 371574 - RNA, 19 nt, Artificial Sequence
  Description of Artificial Sequence: Synthetic oligonucleotide
  Antisense Strand to SEQ ID NO: 371573
uucuggcagaugcuaacaa

SEQ ID NO: 371575 - RNA, 19 nt, Artificial Sequence
  Description of Artificial Sequence: Synthetic oligonucleotide
  Sense Strand Starting at position 673 of SEQ ID NO: 315639
augacuaggucucauuuga

SEQ ID NO: 371576 - RNA, 19 nt, Artificial Sequence
  Description of Artificial Sequence: Synthetic oligonucleotide
  Antisense Strand to SEQ ID NO: 371575
ucaaaugagaccuagucau

SEQ ID NO: 371577 - RNA, 19 nt, Artificial Sequence
  Description of Artificial Sequence: Synthetic oligonucleotide
  Sense Strand Starting at position 673 of SEQ ID NO: 315704
uugggacucuucuuuccaa

SEQ ID NO: 371578 - RNA, 19 nt, Artificial Sequence
  Description of Artificial Sequence: Synthetic oligonucleotide
  Antisense Strand to SEQ ID NO: 371577
uuggaaagaagagucccaa

SEQ ID NO: 371579 - RNA, 19 nt, Artificial Sequence
  Description of Artificial Sequence: Synthetic oligonucleotide
  Sense Strand Starting at position 673 of SEQ ID NO: 315827
cucccaaccucuguguuua

SEQ ID NO: 371580 - RNA, 19 nt, Artificial Sequence
  Description of Artificial Sequence: Synthetic oligonucleotide
  Antisense Strand to SEQ ID NO: 371579
uaaacacagagguugggag

SEQ ID NO: 371581 - RNA, 19 nt, Artificial Sequence
  Description of Artificial Sequence: Synthetic oligonucleotide
  Sense Strand Starting at position 673 of SEQ ID NO: 315828
ucccaaccucuguguuuaa

SEQ ID NO: 371582 - RNA, 19 nt, Artificial Sequence
  Description of Artificial Sequence: Synthetic oligonucleotide
  Antisense Strand to SEQ ID NO: 371581
uuaaacacagagguuggga

SEQ ID NO: 371583 - RNA, 19 nt, Artificial Sequence
  Description of Artificial Sequence: Synthetic oligonucleotide
  Sense Strand Starting at position 673 of SEQ ID NO: 315992
agaagauccuuacagaaag

SEQ ID NO: 371584 - RNA, 19 nt, Artificial Sequence
  Description of Artificial Sequence: Synthetic oligonucleotide
  Antisense Strand to SEQ ID NO: 371583
cuuucuguaaggaucuucu

SEQ ID NO: 371585 - RNA, 19 nt, Artificial Sequence
  Description of Artificial Sequence: Synthetic oligonucleotide
  Sense Strand Starting at position 673 of SEQ ID NO: 316129
aaugcaguacuguguacua

SEQ ID NO: 371586 - RNA, 19 nt, Artificial Sequence
  Description of Artificial Sequence: Synthetic oligonucleotide
  Antisense Strand to SEQ ID NO: 371585
uaguacacaguacugcauu

SEQ ID NO: 371587 - RNA, 19 nt, Artificial Sequence
  Description of Artificial Sequence: Synthetic oligonucleotide
  Sense Strand Starting at position 673 of SEQ ID NO: 316140
guguacuacucucugagag

SEQ ID NO: 371588 - RNA, 19 nt, Artificial Sequence
  Description of Artificial Sequence: Synthetic oligonucleotide
  Antisense Strand to SEQ ID NO: 371587
cucucagagaguaguacac

SEQ ID NO: 371589 - RNA, 19 nt, Artificial Sequence
  Description of Artificial Sequence: Synthetic oligonucleotide
  Sense Strand Starting at position 673 of SEQ ID NO: 316150
cucugagagccauaaucca

SEQ ID NO: 371590 - RNA, 19 nt, Artificial Sequence
  Description of Artificial Sequence: Synthetic oligonucleotide
  Antisense Strand to SEQ ID NO: 371589
uggauuauggcucucagag

SEQ ID NO: 371591 - RNA, 19 nt, Artificial Sequence
  Description of Artificial Sequence: Synthetic oligonucleotide
  Sense Strand Starting at position 673 of SEQ ID NO: 316212
agugcaaugccacagcaau

SEQ ID NO: 371592 - RNA, 19 nt, Artificial Sequence
  Description of Artificial Sequence: Synthetic oligonucleotide
  Antisense Strand to SEQ ID NO: 371591
auugcuguggcauugcacu

SEQ ID NO: 371593 - RNA, 19 nt, Artificial Sequence
  Description of Artificial Sequence: Synthetic oligonucleotide
  Sense Strand Starting at position 673 of SEQ ID NO: 316230
uuacaauagugagaauacu

SEQ ID NO: 371594 - RNA, 19 nt, Artificial Sequence
  Description of Artificial Sequence: Synthetic oligonucleotide
  Antisense Strand to SEQ ID NO: 371593
aguauucucacuauuguaa

SEQ ID NO: 371595 - RNA, 19 nt, Artificial Sequence
  Description of Artificial Sequence: Synthetic oligonucleotide
  Sense Strand Starting at position 673 of SEQ ID NO: 316239
ugagaauacugcccagaag

SEQ ID NO: 371596 - RNA, 19 nt, Artificial Sequence
  Description of Artificial Sequence: Synthetic oligonucleotide
  Antisense Strand to SEQ ID NO: 371595
cuucugggcaguauucuca

SEQ ID NO: 371597 - RNA, 19 nt, Artificial Sequence
  Description of Artificial Sequence: Synthetic oligonucleotide
  Sense Strand Starting at position 673 of SEQ ID NO: 316242
gaauacugcccagaaguca

SEQ ID NO: 371598 - RNA, 19 nt, Artificial Sequence
  Description of Artificial Sequence: Synthetic oligonucleotide
  Antisense Strand to SEQ ID NO: 371597
ugacuucugggcaguauuc

SEQ ID NO: 371599 - RNA, 19 nt, Artificial Sequence
  Description of Artificial Sequence: Synthetic oligonucleotide
  Sense Strand Starting at position 673 of SEQ ID NO: 316258
ucacuaaugccauggguga

SEQ ID NO: 371600 - RNA, 19 nt, Artificial Sequence
  Description of Artificial Sequence: Synthetic oligonucleotide
  Antisense Strand to SEQ ID NO: 371599
ucacccauggcauuaguga

SEQ ID NO: 371601 - RNA, 19 nt, Artificial Sequence
  Description of Artificial Sequence: Synthetic oligonucleotide
  Sense Strand Starting at position 673 of SEQ ID NO: 316259
cacuaaugccaugggugaa

SEQ ID NO: 371602 - RNA, 19 nt, Artificial Sequence
  Description of Artificial Sequence: Synthetic oligonucleotide
  Antisense Strand to SEQ ID NO: 371601
uucacccauggcauuagug

SEQ ID NO: 371603 - RNA, 19 nt, Artificial Sequence
  Description of Artificial Sequence: Synthetic oligonucleotide
  Sense Strand Starting at position 673 of SEQ ID NO: 316276
aaguuaggcuuccuugaua

SEQ ID NO: 371604 - RNA, 19 nt, Artificial Sequence
  Description of Artificial Sequence: Synthetic oligonucleotide
  Antisense Strand to SEQ ID NO: 371603
uaucaaggaagccuaacuu

SEQ ID NO: 371605 - RNA, 19 nt, Artificial Sequence
  Description of Artificial Sequence: Synthetic oligonucleotide
  Sense Strand Starting at position 673 of SEQ ID NO: 316279
uuaggcuuccuugauaaga

SEQ ID NO: 371606 - RNA, 19 nt, Artificial Sequence
  Description of Artificial Sequence: Synthetic oligonucleotide
  Antisense Strand to SEQ ID NO: 371605
ucuuaucaaggaagccuaa

SEQ ID NO: 371607 - RNA, 19 nt, Artificial Sequence
  Description of Artificial Sequence: Synthetic oligonucleotide
  Sense Strand Starting at position 673 of SEQ ID NO: 316464
gcuggaguucaaggagauc

SEQ ID NO: 371608 - RNA, 19 nt, Artificial Sequence
  Description of Artificial Sequence: Synthetic oligonucleotide
  Antisense Strand to SEQ ID NO: 371607
gaucuccuugaacuccagc

SEQ ID NO: 371609 - RNA, 19 nt, Artificial Sequence
  Description of Artificial Sequence: Synthetic oligonucleotide
  Sense Strand Starting at position 673 of SEQ ID NO: 316646
ggcaguccugugggaagaa

SEQ ID NO: 371610 - RNA, 19 nt, Artificial Sequence
  Description of Artificial Sequence: Synthetic oligonucleotide
  Antisense Strand to SEQ ID NO: 371609
uucuucccacaggacugcc

SEQ ID NO: 371611 - RNA, 19 nt, Artificial Sequence
  Description of Artificial Sequence: Synthetic oligonucleotide
  Sense Strand Starting at position 673 of SEQ ID NO: 316668
agagcaaucucaguaggac

SEQ ID NO: 371612 - RNA, 19 nt, Artificial Sequence
  Description of Artificial Sequence: Synthetic oligonucleotide
  Antisense Strand to SEQ ID NO: 371611
guccuacugagauugcucu

SEQ ID NO: 371613 - RNA, 19 nt, Artificial Sequence
  Description of Artificial Sequence: Synthetic oligonucleotide
  Sense Strand Starting at position 673 of SEQ ID NO: 317083
gagcuccuucgcucuguaa

SEQ ID NO: 371614 - RNA, 19 nt, Artificial Sequence
  Description of Artificial Sequence: Synthetic oligonucleotide
  Antisense Strand to SEQ ID NO: 371613
uuacagagcgaaggagcuc

SEQ ID NO: 371615 - RNA, 19 nt, Artificial Sequence
  Description of Artificial Sequence: Synthetic oligonucleotide
  Sense Strand Starting at position 673 of SEQ ID NO: 317431
uuggguugucaggacgaca

SEQ ID NO: 371616 - RNA, 19 nt, Artificial Sequence
  Description of Artificial Sequence: Synthetic oligonucleotide
  Antisense Strand to SEQ ID NO: 371615
ugucguccugacaacccaa

SEQ ID NO: 371617 - RNA, 19 nt, Artificial Sequence
  Description of Artificial Sequence: Synthetic oligonucleotide
  Sense Strand Starting at position 673 of SEQ ID NO: 317492
ggagcuuagagguacuguu

SEQ ID NO: 371618 - RNA, 19 nt, Artificial Sequence
  Description of Artificial Sequence: Synthetic oligonucleotide
  Antisense Strand to SEQ ID NO: 371617
aacaguaccucuaagcucc

SEQ ID NO: 371619 - RNA, 19 nt, Artificial Sequence
  Description of Artificial Sequence: Synthetic oligonucleotide
  Sense Strand Starting at position 673 of SEQ ID NO: 317716
ggagaaacuugacagugga

SEQ ID NO: 371620 - RNA, 19 nt, Artificial Sequence
  Description of Artificial Sequence: Synthetic oligonucleotide
  Antisense Strand to SEQ ID NO: 371619
uccacugucaaguuucucc

SEQ ID NO: 371621 - RNA, 19 nt, Artificial Sequence
  Description of Artificial Sequence: Synthetic oligonucleotide
  Sense Strand Starting at position 673 of SEQ ID NO: 317767
cgaaacauucuuggcaacu

SEQ ID NO: 371622 - RNA, 19 nt, Artificial Sequence
  Description of Artificial Sequence: Synthetic oligonucleotide
  Antisense Strand to SEQ ID NO: 371621
aguugccaagaauguuucg

SEQ ID NO: 371623 - RNA, 19 nt, Artificial Sequence
  Description of Artificial Sequence: Synthetic oligonucleotide
  Sense Strand Starting at position 673 of SEQ ID NO: 317785
uggcuuugcguguucaagu

SEQ ID NO: 371624 - RNA, 19 nt, Artificial Sequence
  Description of Artificial Sequence: Synthetic oligonucleotide
  Antisense Strand to SEQ ID NO: 371623
acuugaacacgcaaagcca

SEQ ID NO: 371625 - RNA, 19 nt, Artificial Sequence
  Description of Artificial Sequence: Synthetic oligonucleotide
  Sense Strand Starting at position 673 of SEQ ID NO: 318089
uugaauugcuacccaaguu

SEQ ID NO: 371626 - RNA, 19 nt, Artificial Sequence
  Description of Artificial Sequence: Synthetic oligonucleotide
  Antisense Strand to SEQ ID NO: 371625
aacuuggguagcaauucaa

SEQ ID NO: 371627 - RNA, 19 nt, Artificial Sequence
  Description of Artificial Sequence: Synthetic oligonucleotide
  Sense Strand Starting at position 673 of SEQ ID NO: 318146
gaaggagauuuguaaauca

SEQ ID NO: 371628 - RNA, 19 nt, Artificial Sequence
  Description of Artificial Sequence: Synthetic oligonucleotide
  Antisense Strand to SEQ ID NO: 371627
ugauuuacaaaucuccuuc

SEQ ID NO: 371629 - RNA, 19 nt, Artificial Sequence
  Description of Artificial Sequence: Synthetic oligonucleotide
  Sense Strand Starting at position 673 of SEQ ID NO: 318153
auuuguaaaucagaaagcu

SEQ ID NO: 371630 - RNA, 19 nt, Artificial Sequence
  Description of Artificial Sequence: Synthetic oligonucleotide
  Antisense Strand to SEQ ID NO: 371629
agcuuucugauuuacaaau

SEQ ID NO: 371631 - RNA, 19 nt, Artificial Sequence
  Description of Artificial Sequence: Synthetic oligonucleotide
  Sense Strand Starting at position 673 of SEQ ID NO: 318165
gaaagcuugucauuugcaa

SEQ ID NO: 371632 - RNA, 19 nt, Artificial Sequence
  Description of Artificial Sequence: Synthetic oligonucleotide
  Antisense Strand to SEQ ID NO: 371631
uugcaaaugacaagcuuuc

SEQ ID NO: 371633 - RNA, 19 nt, Artificial Sequence
  Description of Artificial Sequence: Synthetic oligonucleotide
  Sense Strand Starting at position 673 of SEQ ID NO: 318218
gcuaauggcagacagguua

SEQ ID NO: 371634 - RNA, 19 nt, Artificial Sequence
  Description of Artificial Sequence: Synthetic oligonucleotide
  Antisense Strand to SEQ ID NO: 371633
uaaccugucugccauuagc

SEQ ID NO: 371635 - RNA, 19 nt, Artificial Sequence
  Description of Artificial Sequence: Synthetic oligonucleotide
  Sense Strand Starting at position 673 of SEQ ID NO: 318467
gaugcuauagagugaauug

SEQ ID NO: 371636 - RNA, 19 nt, Artificial Sequence
  Description of Artificial Sequence: Synthetic oligonucleotide
  Antisense Strand to SEQ ID NO: 371635
caauucacucuauagcauc

SEQ ID NO: 371637 - RNA, 19 nt, Artificial Sequence
  Description of Artificial Sequence: Synthetic oligonucleotide
  Sense Strand Starting at position 673 of SEQ ID NO: 318973
gcaaauguuuagccuagga

SEQ ID NO: 371638 - RNA, 19 nt, Artificial Sequence
  Description of Artificial Sequence: Synthetic oligonucleotide
  Antisense Strand to SEQ ID NO: 371637
uccuaggcuaaacauuugc

SEQ ID NO: 371639 - RNA, 19 nt, Artificial Sequence
  Description of Artificial Sequence: Synthetic oligonucleotide
  Sense Strand Starting at position 673 of SEQ ID NO: 318975
aaauguuuagccuaggaca

SEQ ID NO: 371640 - RNA, 19 nt, Artificial Sequence
  Description of Artificial Sequence: Synthetic oligonucleotide
  Antisense Strand to SEQ ID NO: 371639
uguccuaggcuaaacauuu

SEQ ID NO: 371641 - RNA, 19 nt, Artificial Sequence
  Description of Artificial Sequence: Synthetic oligonucleotide
  Sense Strand Starting at position 673 of SEQ ID NO: 318977
auguuuagccuaggacauu

SEQ ID NO: 371642 - RNA, 19 nt, Artificial Sequence
  Description of Artificial Sequence: Synthetic oligonucleotide
  Antisense Strand to SEQ ID NO: 371641
aauguccuaggcuaaacau

SEQ ID NO: 371643 - RNA, 19 nt, Artificial Sequence
  Description of Artificial Sequence: Synthetic oligonucleotide
  Sense Strand Starting at position 673 of SEQ ID NO: 318978
uguuuagccuaggacauuu

SEQ ID NO: 371644 - RNA, 19 nt, Artificial Sequence
  Description of Artificial Sequence: Synthetic oligonucleotide
  Antisense Strand to SEQ ID NO: 371643
aaauguccuaggcuaaaca

SEQ ID NO: 371645 - RNA, 19 nt, Artificial Sequence
  Description of Artificial Sequence: Synthetic oligonucleotide
  Sense Strand Starting at position 673 of SEQ ID NO: 319091
acuggcuuguccucagaau

SEQ ID NO: 371646 - RNA, 19 nt, Artificial Sequence
  Description of Artificial Sequence: Synthetic oligonucleotide
  Antisense Strand to SEQ ID NO: 371645
auucugaggacaagccagu

SEQ ID NO: 371647 - RNA, 19 nt, Artificial Sequence
  Description of Artificial Sequence: Synthetic oligonucleotide
  Sense Strand Starting at position 673 of SEQ ID NO: 319092
cuggcuuguccucagaaua

SEQ ID NO: 371648 - RNA, 19 nt, Artificial Sequence
  Description of Artificial Sequence: Synthetic oligonucleotide
  Antisense Strand to SEQ ID NO: 371647
uauucugaggacaagccag

SEQ ID NO: 371649 - RNA, 19 nt, Artificial Sequence
  Description of Artificial Sequence: Synthetic oligonucleotide
  Sense Strand Starting at position 673 of SEQ ID NO: 319158
acucuuacagauuacguga

SEQ ID NO: 371650 - RNA, 19 nt, Artificial Sequence
  Description of Artificial Sequence: Synthetic oligonucleotide
  Antisense Strand to SEQ ID NO: 371649
ucacguaaucuguaagagu

SEQ ID NO: 371651 - RNA, 19 nt, Artificial Sequence
  Description of Artificial Sequence: Synthetic oligonucleotide
  Sense Strand Starting at position 674 of SEQ ID NO: 315307
gguguauguacauauaaug

SEQ ID NO: 371652 - RNA, 19 nt, Artificial Sequence
  Description of Artificial Sequence: Synthetic oligonucleotide
  Antisense Strand to SEQ ID NO: 371651
cauuauauguacauacacc

SEQ ID NO: 371653 - RNA, 19 nt, Artificial Sequence
  Description of Artificial Sequence: Synthetic oligonucleotide
  Sense Strand Starting at position 674 of SEQ ID NO: 315520
gcuauauacuuaguauaga

SEQ ID NO: 371654 - RNA, 19 nt, Artificial Sequence
  Description of Artificial Sequence: Synthetic oligonucleotide
  Antisense Strand to SEQ ID NO: 371653
ucuauacuaaguauauagc

SEQ ID NO: 371655 - RNA, 19 nt, Artificial Sequence
  Description of Artificial Sequence: Synthetic oligonucleotide
  Sense Strand Starting at position 674 of SEQ ID NO: 315765
ugcccagaaguuugagacu

SEQ ID NO: 371656 - RNA, 19 nt, Artificial Sequence
  Description of Artificial Sequence: Synthetic oligonucleotide
  Antisense Strand to SEQ ID NO: 371655
agucucaaacuucugggca

SEQ ID NO: 371657 - RNA, 19 nt, Artificial Sequence
  Description of Artificial Sequence: Synthetic oligonucleotide
  Sense Strand Starting at position 674 of SEQ ID NO: 315785
uagugaauuggugaguuau

SEQ ID NO: 371658 - RNA, 19 nt, Artificial Sequence
  Description of Artificial Sequence: Synthetic oligonucleotide
  Antisense Strand to SEQ ID NO: 371657
auaacucaccaauucacua

SEQ ID NO: 371659 - RNA, 19 nt, Artificial Sequence
  Description of Artificial Sequence: Synthetic oligonucleotide
  Sense Strand Starting at position 674 of SEQ ID NO: 315787
gugaauuggugaguuauga

SEQ ID NO: 371660 - RNA, 19 nt, Artificial Sequence
  Description of Artificial Sequence: Synthetic oligonucleotide
  Antisense Strand to SEQ ID NO: 371659
ucauaacucaccaauucac

SEQ ID NO: 371661 - RNA, 19 nt, Artificial Sequence
  Description of Artificial Sequence: Synthetic oligonucleotide
  Sense Strand Starting at position 674 of SEQ ID NO: 315909
aaguuuaagugggcauaga

SEQ ID NO: 371662 - RNA, 19 nt, Artificial Sequence
  Description of Artificial Sequence: Synthetic oligonucleotide
  Antisense Strand to SEQ ID NO: 371661
ucuaugcccacuuaaacuu

SEQ ID NO: 371663 - RNA, 19 nt, Artificial Sequence
  Description of Artificial Sequence: Synthetic oligonucleotide
  Sense Strand Starting at position 674 of SEQ ID NO: 315910
aguuuaagugggcauagaa

SEQ ID NO: 371664 - RNA, 19 nt, Artificial Sequence
  Description of Artificial Sequence: Synthetic oligonucleotide
  Antisense Strand to SEQ ID NO: 371663
uucuaugcccacuuaaacu

SEQ ID NO: 371665 - RNA, 19 nt, Artificial Sequence
  Description of Artificial Sequence: Synthetic oligonucleotide
  Sense Strand Starting at position 674 of SEQ ID NO: 316047
aucuaauguccagaguaac

SEQ ID NO: 371666 - RNA, 19 nt, Artificial Sequence
  Description of Artificial Sequence: Synthetic oligonucleotide
  Antisense Strand to SEQ ID NO: 371665
guuacucuggacauuagau

SEQ ID NO: 371667 - RNA, 19 nt, Artificial Sequence
  Description of Artificial Sequence: Synthetic oligonucleotide
  Sense Strand Starting at position 674 of SEQ ID NO: 316059
gaguaacucugaccugaug

SEQ ID NO: 371668 - RNA, 19 nt, Artificial Sequence
  Description of Artificial Sequence: Synthetic oligonucleotide
  Antisense Strand to SEQ ID NO: 371667
caucaggucagaguuacuc

SEQ ID NO: 371669 - RNA, 19 nt, Artificial Sequence
  Description of Artificial Sequence: Synthetic oligonucleotide
  Sense Strand Starting at position 674 of SEQ ID NO: 316099
cuguuuacucugcagacua

SEQ ID NO: 371670 - RNA, 19 nt, Artificial Sequence
  Description of Artificial Sequence: Synthetic oligonucleotide
  Antisense Strand to SEQ ID NO: 371669
uagucugcagaguaaacag

SEQ ID NO: 371671 - RNA, 19 nt, Artificial Sequence
  Description of Artificial Sequence: Synthetic oligonucleotide
  Sense Strand Starting at position 674 of SEQ ID NO: 316101
guuuacucugcagacuaua

SEQ ID NO: 371672 - RNA, 19 nt, Artificial Sequence
  Description of Artificial Sequence: Synthetic oligonucleotide
  Antisense Strand to SEQ ID NO: 371671
uauagucugcagaguaaac

SEQ ID NO: 371673 - RNA, 19 nt, Artificial Sequence
  Description of Artificial Sequence: Synthetic oligonucleotide
  Sense Strand Starting at position 674 of SEQ ID NO: 316157
uacuuagcuccagggacau

SEQ ID NO: 371674 - RNA, 19 nt, Artificial Sequence
  Description of Artificial Sequence: Synthetic oligonucleotide
  Antisense Strand to SEQ ID NO: 371673
augucccuggagcuaagua

SEQ ID NO: 371675 - RNA, 19 nt, Artificial Sequence
  Description of Artificial Sequence: Synthetic oligonucleotide
  Sense Strand Starting at position 674 of SEQ ID NO: 316384
gggugcuucgcaaggauga

SEQ ID NO: 371676 - RNA, 19 nt, Artificial Sequence
  Description of Artificial Sequence: Synthetic oligonucleotide
  Antisense Strand to SEQ ID NO: 371675
ucauccuugcgaagcaccc

SEQ ID NO: 371677 - RNA, 19 nt, Artificial Sequence
  Description of Artificial Sequence: Synthetic oligonucleotide
  Sense Strand Starting at position 674 of SEQ ID NO: 316455
ggauccauucuuugaacaa

SEQ ID NO: 371678 - RNA, 19 nt, Artificial Sequence
  Description of Artificial Sequence: Synthetic oligonucleotide
  Antisense Strand to SEQ ID NO: 371677
uuguucaaagaauggaucc

SEQ ID NO: 371679 - RNA, 19 nt, Artificial Sequence
  Description of Artificial Sequence: Synthetic oligonucleotide
  Sense Strand Starting at position 674 of SEQ ID NO: 316798
gaaagaugacauggucugu

SEQ ID NO: 371680 - RNA, 19 nt, Artificial Sequence
  Description of Artificial Sequence: Synthetic oligonucleotide
  Antisense Strand to SEQ ID NO: 371679
acagaccaugucaucuuuc

SEQ ID NO: 371681 - RNA, 19 nt, Artificial Sequence
  Description of Artificial Sequence: Synthetic oligonucleotide
  Sense Strand Starting at position 674 of SEQ ID NO: 316802
gaugacauggucugucuua

SEQ ID NO: 371682 - RNA, 19 nt, Artificial Sequence
  Description of Artificial Sequence: Synthetic oligonucleotide
  Antisense Strand to SEQ ID NO: 371681
uaagacagaccaugucauc

SEQ ID NO: 371683 - RNA, 19 nt, Artificial Sequence
  Description of Artificial Sequence: Synthetic oligonucleotide
  Sense Strand Starting at position 674 of SEQ ID NO: 317135
ucgauagauuuccuggcga

SEQ ID NO: 371684 - RNA, 19 nt, Artificial Sequence
  Description of Artificial Sequence: Synthetic oligonucleotide
  Antisense Strand to SEQ ID NO: 371683
ucgccaggaaaucuaucga

SEQ ID NO: 371685 - RNA, 19 nt, Artificial Sequence
  Description of Artificial Sequence: Synthetic oligonucleotide
  Sense Strand Starting at position 674 of SEQ ID NO: 317165
uuggauaaaugacugaguu

SEQ ID NO: 371686 - RNA, 19 nt, Artificial Sequence
  Description of Artificial Sequence: Synthetic oligonucleotide
  Antisense Strand to SEQ ID NO: 371685
aacucagucauuuauccaa

SEQ ID NO: 371687 - RNA, 19 nt, Artificial Sequence
  Description of Artificial Sequence: Synthetic oligonucleotide
  Sense Strand Starting at position 674 of SEQ ID NO: 317476
uucgccuggaugugaauuu

SEQ ID NO: 371688 - RNA, 19 nt, Artificial Sequence
  Description of Artificial Sequence: Synthetic oligonucleotide
  Antisense Strand to SEQ ID NO: 371687
aaauucacauccaggcgaa

SEQ ID NO: 371689 - RNA, 19 nt, Artificial Sequence
  Description of Artificial Sequence: Synthetic oligonucleotide
  Sense Strand Starting at position 674 of SEQ ID NO: 317483
ggaugugaauuuggaauga

SEQ ID NO: 371690 - RNA, 19 nt, Artificial Sequence
  Description of Artificial Sequence: Synthetic oligonucleotide
  Antisense Strand to SEQ ID NO: 371689
ucauuccaaauucacaucc

SEQ ID NO: 371691 - RNA, 19 nt, Artificial Sequence
  Description of Artificial Sequence: Synthetic oligonucleotide
  Sense Strand Starting at position 674 of SEQ ID NO: 317694
uccucacuugaauguuuga

SEQ ID NO: 371692 - RNA, 19 nt, Artificial Sequence
  Description of Artificial Sequence: Synthetic oligonucleotide
  Antisense Strand to SEQ ID NO: 371691
ucaaacauucaagugagga

SEQ ID NO: 371693 - RNA, 19 nt, Artificial Sequence
  Description of Artificial Sequence: Synthetic oligonucleotide
  Sense Strand Starting at position 674 of SEQ ID NO: 317731
aauagaaagucagcuuaga

SEQ ID NO: 371694 - RNA, 19 nt, Artificial Sequence
  Description of Artificial Sequence: Synthetic oligonucleotide
  Antisense Strand to SEQ ID NO: 371693
ucuaagcugacuuucuauu

SEQ ID NO: 371695 - RNA, 19 nt, Artificial Sequence
  Description of Artificial Sequence: Synthetic oligonucleotide
  Sense Strand Starting at position 674 of SEQ ID NO: 317780
agagaaccaucucuuuguu

SEQ ID NO: 371696 - RNA, 19 nt, Artificial Sequence
  Description of Artificial Sequence: Synthetic oligonucleotide
  Antisense Strand to SEQ ID NO: 371695
aacaaagagaugguucucu

SEQ ID NO: 371697 - RNA, 19 nt, Artificial Sequence
  Description of Artificial Sequence: Synthetic oligonucleotide
  Sense Strand Starting at position 674 of SEQ ID NO: 317826
gagcaagucguagauugag

SEQ ID NO: 371698 - RNA, 19 nt, Artificial Sequence
  Description of Artificial Sequence: Synthetic oligonucleotide
  Antisense Strand to SEQ ID NO: 371697
cucaaucuacgacuugcuc

SEQ ID NO: 371699 - RNA, 19 nt, Artificial Sequence
  Description of Artificial Sequence: Synthetic oligonucleotide
  Sense Strand Starting at position 674 of SEQ ID NO: 317846
gcgugcagugucaggaaua

SEQ ID NO: 371700 - RNA, 19 nt, Artificial Sequence
  Description of Artificial Sequence: Synthetic oligonucleotide
  Antisense Strand to SEQ ID NO: 371699
uauuccugacacugcacgc

SEQ ID NO: 371701 - RNA, 19 nt, Artificial Sequence
  Description of Artificial Sequence: Synthetic oligonucleotide
  Sense Strand Starting at position 674 of SEQ ID NO: 317908
gggaaugaggguuguuaac

SEQ ID NO: 371702 - RNA, 19 nt, Artificial Sequence
  Description of Artificial Sequence: Synthetic oligonucleotide
  Antisense Strand to SEQ ID NO: 371701
guuaacaacccucauuccc

SEQ ID NO: 371703 - RNA, 19 nt, Artificial Sequence
  Description of Artificial Sequence: Synthetic oligonucleotide
  Sense Strand Starting at position 674 of SEQ ID NO: 317910
gaaugaggguuguuaacau

SEQ ID NO: 371704 - RNA, 19 nt, Artificial Sequence
  Description of Artificial Sequence: Synthetic oligonucleotide
  Antisense Strand to SEQ ID NO: 371703
auguuaacaacccucauuc

SEQ ID NO: 371705 - RNA, 19 nt, Artificial Sequence
  Description of Artificial Sequence: Synthetic oligonucleotide
  Sense Strand Starting at position 674 of SEQ ID NO: 318064
gcgggaauuacagacacgu

SEQ ID NO: 371706 - RNA, 19 nt, Artificial Sequence
  Description of Artificial Sequence: Synthetic oligonucleotide
  Antisense Strand to SEQ ID NO: 371705
acgugucuguaauucccgc

SEQ ID NO: 371707 - RNA, 19 nt, Artificial Sequence
  Description of Artificial Sequence: Synthetic oligonucleotide
  Sense Strand Starting at position 674 of SEQ ID NO: 318247
aaaucauaggaucgaggua

SEQ ID NO: 371708 - RNA, 19 nt, Artificial Sequence
  Description of Artificial Sequence: Synthetic oligonucleotide
  Antisense Strand to SEQ ID NO: 371707
uaccucgauccuaugauuu

SEQ ID NO: 371709 - RNA, 19 nt, Artificial Sequence
  Description of Artificial Sequence: Synthetic oligonucleotide
  Sense Strand Starting at position 674 of SEQ ID NO: 318259
cgagguaaugcauauauua

SEQ ID NO: 371710 - RNA, 19 nt, Artificial Sequence
  Description of Artificial Sequence: Synthetic oligonucleotide
  Antisense Strand to SEQ ID NO: 371709
uaauauaugcauuaccucg

SEQ ID NO: 371711 - RNA, 19 nt, Artificial Sequence
  Description of Artificial Sequence: Synthetic oligonucleotide
  Sense Strand Starting at position 674 of SEQ ID NO: 318278
ccuagcauagcuugauuua

SEQ ID NO: 371712 - RNA, 19 nt, Artificial Sequence
  Description of Artificial Sequence: Synthetic oligonucleotide
  Antisense Strand to SEQ ID NO: 371711
uaaaucaagcuaugcuagg

SEQ ID NO: 371713 - RNA, 19 nt, Artificial Sequence
  Description of Artificial Sequence: Synthetic oligonucleotide
  Sense Strand Starting at position 674 of SEQ ID NO: 318335
gguacaacguaaguaauaa

SEQ ID NO: 371714 - RNA, 19 nt, Artificial Sequence
  Description of Artificial Sequence: Synthetic oligonucleotide
  Antisense Strand to SEQ ID NO: 371713
uuauuacuuacguuguacc

SEQ ID NO: 371715 - RNA, 19 nt, Artificial Sequence
  Description of Artificial Sequence: Synthetic oligonucleotide
  Sense Strand Starting at position 674 of SEQ ID NO: 318531
aggugauacccauaguacu

SEQ ID NO: 371716 - RNA, 19 nt, Artificial Sequence
  Description of Artificial Sequence: Synthetic oligonucleotide
  Antisense Strand to SEQ ID NO: 371715
aguacuauggguaucaccu

SEQ ID NO: 371717 - RNA, 19 nt, Artificial Sequence
  Description of Artificial Sequence: Synthetic oligonucleotide
  Sense Strand Starting at position 674 of SEQ ID NO: 318625
ggcuaaaggucagucauag

SEQ ID NO: 371718 - RNA, 19 nt, Artificial Sequence
  Description of Artificial Sequence: Synthetic oligonucleotide
  Antisense Strand to SEQ ID NO: 371717
cuaugacugaccuuuagcc

SEQ ID NO: 371719 - RNA, 19 nt, Artificial Sequence
  Description of Artificial Sequence: Synthetic oligonucleotide
  Sense Strand Starting at position 674 of SEQ ID NO: 318733
acugaauugaagugaguuu

SEQ ID NO: 371720 - RNA, 19 nt, Artificial Sequence
  Description of Artificial Sequence: Synthetic oligonucleotide
  Antisense Strand to SEQ ID NO: 371719
aaacucacuucaauucagu

SEQ ID NO: 371721 - RNA, 19 nt, Artificial Sequence
  Description of Artificial Sequence: Synthetic oligonucleotide
  Sense Strand Starting at position 674 of SEQ ID NO: 318807
gaaggcagugcucacagau

SEQ ID NO: 371722 - RNA, 19 nt, Artificial Sequence
  Description of Artificial Sequence: Synthetic oligonucleotide
  Antisense Strand to SEQ ID NO: 371721
aucugugagcacugccuuc

SEQ ID NO: 371723 - RNA, 19 nt, Artificial Sequence
  Description of Artificial Sequence: Synthetic oligonucleotide
  Sense Strand Starting at position 674 of SEQ ID NO: 318870
uuagaaacaguguaucuuu

SEQ ID NO: 371724 - RNA, 19 nt, Artificial Sequence
  Description of Artificial Sequence: Synthetic oligonucleotide
  Antisense Strand to SEQ ID NO: 371723
aaagauacacuguuucuaa

SEQ ID NO: 371725 - RNA, 19 nt, Artificial Sequence
  Description of Artificial Sequence: Synthetic oligonucleotide
  Sense Strand Starting at position 674 of SEQ ID NO: 318962
gcauucucuccagagcuaa

SEQ ID NO: 371726 - RNA, 19 nt, Artificial Sequence
  Description of Artificial Sequence: Synthetic oligonucleotide
  Antisense Strand to SEQ ID NO: 371725
uuagcucuggagagaaugc

SEQ ID NO: 371727 - RNA, 19 nt, Artificial Sequence
  Description of Artificial Sequence: Synthetic oligonucleotide
  Sense Strand Starting at position 674 of SEQ ID NO: 318974
gagcuaagugguuaaaggu

SEQ ID NO: 371728 - RNA, 19 nt, Artificial Sequence
  Description of Artificial Sequence: Synthetic oligonucleotide
  Antisense Strand to SEQ ID NO: 371727
accuuuaaccacuuagcuc

SEQ ID NO: 371729 - RNA, 19 nt, Artificial Sequence
  Description of Artificial Sequence: Synthetic oligonucleotide
  Sense Strand Starting at position 674 of SEQ ID NO: 318981
gugguuaaaggucaaacua

SEQ ID NO: 371730 - RNA, 19 nt, Artificial Sequence
  Description of Artificial Sequence: Synthetic oligonucleotide
  Antisense Strand to SEQ ID NO: 371729
uaguuugaccuuuaaccac

SEQ ID NO: 371731 - RNA, 19 nt, Artificial Sequence
  Description of Artificial Sequence: Synthetic oligonucleotide
  Sense Strand Starting at position 675 of SEQ ID NO: 315301
ggauuaaacuaguuaaugc

SEQ ID NO: 371732 - RNA, 19 nt, Artificial Sequence
  Description of Artificial Sequence: Synthetic oligonucleotide
  Antisense Strand to SEQ ID NO: 371731
gcauuaacuaguuuaaucc

SEQ ID NO: 371733 - RNA, 19 nt, Artificial Sequence
  Description of Artificial Sequence: Synthetic oligonucleotide
  Sense Strand Starting at position 675 of SEQ ID NO: 315799
gccgcuaagaguuagaaag

SEQ ID NO: 371734 - RNA, 19 nt, Artificial Sequence
  Description of Artificial Sequence: Synthetic oligonucleotide
  Antisense Strand to SEQ ID NO: 371733
cuuucuaacucuuagcggc

SEQ ID NO: 371735 - RNA, 19 nt, Artificial Sequence
  Description of Artificial Sequence: Synthetic oligonucleotide
  Sense Strand Starting at position 675 of SEQ ID NO: 315867
gguaacugaauugguaaca

SEQ ID NO: 371736 - RNA, 19 nt, Artificial Sequence
  Description of Artificial Sequence: Synthetic oligonucleotide
  Antisense Strand to SEQ ID NO: 371735
uguuaccaauucaguuacc

SEQ ID NO: 371737 - RNA, 19 nt, Artificial Sequence
  Description of Artificial Sequence: Synthetic oligonucleotide
  Sense Strand Starting at position 675 of SEQ ID NO: 315879
gguaacaggcucugaagau

SEQ ID NO: 371738 - RNA, 19 nt, Artificial Sequence
  Description of Artificial Sequence: Synthetic oligonucleotide
  Antisense Strand to SEQ ID NO: 371737
aucuucagagccuguuacc

SEQ ID NO: 371739 - RNA, 19 nt, Artificial Sequence
  Description of Artificial Sequence: Synthetic oligonucleotide
  Sense Strand Starting at position 675 of SEQ ID NO: 315959
caacaaguguuuguuaaag

SEQ ID NO: 371740 - RNA, 19 nt, Artificial Sequence
  Description of Artificial Sequence: Synthetic oligonucleotide
  Antisense Strand to SEQ ID NO: 371739
cuuuaacaaacacuuguug

SEQ ID NO: 371741 - RNA, 19 nt, Artificial Sequence
  Description of Artificial Sequence: Synthetic oligonucleotide
  Sense Strand Starting at position 675 of SEQ ID NO: 315965
guguuuguuaaaggaucag

SEQ ID NO: 371742 - RNA, 19 nt, Artificial Sequence
  Description of Artificial Sequence: Synthetic oligonucleotide
  Antisense Strand to SEQ ID NO: 371741
cugauccuuuaacaaacac

SEQ ID NO: 371743 - RNA, 19 nt, Artificial Sequence
  Description of Artificial Sequence: Synthetic oligonucleotide
  Sense Strand Starting at position 675 of SEQ ID NO: 315997
agauuacaaugauagagaa

SEQ ID NO: 371744 - RNA, 19 nt, Artificial Sequence
  Description of Artificial Sequence: Synthetic oligonucleotide
  Antisense Strand to SEQ ID NO: 371743
uucucuaucauuguaaucu

SEQ ID NO: 371745 - RNA, 19 nt, Artificial Sequence
  Description of Artificial Sequence: Synthetic oligonucleotide
  Sense Strand Starting at position 675 of SEQ ID NO: 316188
ggcuuccucugaucaucua

SEQ ID NO: 371746 - RNA, 19 nt, Artificial Sequence
  Description of Artificial Sequence: Synthetic oligonucleotide
  Antisense Strand to SEQ ID NO: 371745
uagaugaucagaggaagcc

SEQ ID NO: 371747 - RNA, 19 nt, Artificial Sequence
  Description of Artificial Sequence: Synthetic oligonucleotide
  Sense Strand Starting at position 675 of SEQ ID NO: 316230
gaguguuuccagcacuguu

SEQ ID NO: 371748 - RNA, 19 nt, Artificial Sequence
  Description of Artificial Sequence: Synthetic oligonucleotide
  Antisense Strand to SEQ ID NO: 371747
aacagugcuggaaacacuc

SEQ ID NO: 371749 - RNA, 19 nt, Artificial Sequence
  Description of Artificial Sequence: Synthetic oligonucleotide
  Sense Strand Starting at position 675 of SEQ ID NO: 316457
gaaaguuuaaguuguggca

SEQ ID NO: 371750 - RNA, 19 nt, Artificial Sequence
  Description of Artificial Sequence: Synthetic oligonucleotide
  Antisense Strand to SEQ ID NO: 371749
ugccacaacuuaaacuuuc

SEQ ID NO: 371751 - RNA, 19 nt, Artificial Sequence
  Description of Artificial Sequence: Synthetic oligonucleotide
  Sense Strand Starting at position 675 of SEQ ID NO: 316470
guggcaugaucuccaaaga

SEQ ID NO: 371752 - RNA, 19 nt, Artificial Sequence
  Description of Artificial Sequence: Synthetic oligonucleotide
  Antisense Strand to SEQ ID NO: 371751
ucuuuggagaucaugccac

SEQ ID NO: 371753 - RNA, 19 nt, Artificial Sequence
  Description of Artificial Sequence: Synthetic oligonucleotide
  Sense Strand Starting at position 675 of SEQ ID NO: 316533
ucuguuauucugcauacca

SEQ ID NO: 371754 - RNA, 19 nt, Artificial Sequence
  Description of Artificial Sequence: Synthetic oligonucleotide
  Antisense Strand to SEQ ID NO: 371753
ugguaugcagaauaacaga

SEQ ID NO: 371755 - RNA, 19 nt, Artificial Sequence
  Description of Artificial Sequence: Synthetic oligonucleotide
  Sense Strand Starting at position 675 of SEQ ID NO: 316535
uguuauucugcauaccagu

SEQ ID NO: 371756 - RNA, 19 nt, Artificial Sequence
  Description of Artificial Sequence: Synthetic oligonucleotide
  Antisense Strand to SEQ ID NO: 371755
acugguaugcagaauaaca

SEQ ID NO: 371757 - RNA, 19 nt, Artificial Sequence
  Description of Artificial Sequence: Synthetic oligonucleotide
  Sense Strand Starting at position 675 of SEQ ID NO: 316585
cuggaagucuuacauauuu

SEQ ID NO: 371758 - RNA, 19 nt, Artificial Sequence
  Description of Artificial Sequence: Synthetic oligonucleotide
  Antisense Strand to SEQ ID NO: 371757
aaauauguaagacuuccag

SEQ ID NO: 371759 - RNA, 19 nt, Artificial Sequence
  Description of Artificial Sequence: Synthetic oligonucleotide
  Sense Strand Starting at position 675 of SEQ ID NO: 316650
uggcaaggaucucuuauau

SEQ ID NO: 371760 - RNA, 19 nt, Artificial Sequence
  Description of Artificial Sequence: Synthetic oligonucleotide
  Antisense Strand to SEQ ID NO: 371759
auauaagagauccuugcca

SEQ ID NO: 371761 - RNA, 19 nt, Artificial Sequence
  Description of Artificial Sequence: Synthetic oligonucleotide
  Sense Strand Starting at position 675 of SEQ ID NO: 316656
ggaucucuuauaugucgau

SEQ ID NO: 371762 - RNA, 19 nt, Artificial Sequence
  Description of Artificial Sequence: Synthetic oligonucleotide
  Antisense Strand to SEQ ID NO: 371761
aucgacauauaagagaucc

SEQ ID NO: 371763 - RNA, 19 nt, Artificial Sequence
  Description of Artificial Sequence: Synthetic oligonucleotide
  Sense Strand Starting at position 675 of SEQ ID NO: 316660
cucuuauaugucgauguca

SEQ ID NO: 371764 - RNA, 19 nt, Artificial Sequence
  Description of Artificial Sequence: Synthetic oligonucleotide
  Antisense Strand to SEQ ID NO: 371763
ugacaucgacauauaagag

SEQ ID NO: 371765 - RNA, 19 nt, Artificial Sequence
  Description of Artificial Sequence: Synthetic oligonucleotide
  Sense Strand Starting at position 675 of SEQ ID NO: 316727
acucuaucugcugaaugaa

SEQ ID NO: 371766 - RNA, 19 nt, Artificial Sequence
  Description of Artificial Sequence: Synthetic oligonucleotide
  Antisense Strand to SEQ ID NO: 371765
uucauucagcagauagagu

SEQ ID NO: 371767 - RNA, 19 nt, Artificial Sequence
  Description of Artificial Sequence: Synthetic oligonucleotide
  Sense Strand Starting at position 675 of SEQ ID NO: 316730
cuaucugcugaaugaauaa

SEQ ID NO: 371768 - RNA, 19 nt, Artificial Sequence
  Description of Artificial Sequence: Synthetic oligonucleotide
  Antisense Strand to SEQ ID NO: 371767
uuauucauucagcagauag

SEQ ID NO: 371769 - RNA, 19 nt, Artificial Sequence
  Description of Artificial Sequence: Synthetic oligonucleotide
  Sense Strand Starting at position 675 of SEQ ID NO: 316813
cugacagcuccaugaggua

SEQ ID NO: 371770 - RNA, 19 nt, Artificial Sequence
  Description of Artificial Sequence: Synthetic oligonucleotide
  Antisense Strand to SEQ ID NO: 371769
uaccucauggagcugucag

SEQ ID NO: 371771 - RNA, 19 nt, Artificial Sequence
  Description of Artificial Sequence: Synthetic oligonucleotide
  Sense Strand Starting at position 675 of SEQ ID NO: 316866
aagcgaagagugugagaau

SEQ ID NO: 371772 - RNA, 19 nt, Artificial Sequence
  Description of Artificial Sequence: Synthetic oligonucleotide
  Antisense Strand to SEQ ID NO: 371771
auucucacacucuucgcuu

SEQ ID NO: 371773 - RNA, 19 nt, Artificial Sequence
  Description of Artificial Sequence: Synthetic oligonucleotide
  Sense Strand Starting at position 675 of SEQ ID NO: 316875
gugugagaauagucaucag

SEQ ID NO: 371774 - RNA, 19 nt, Artificial Sequence
  Description of Artificial Sequence: Synthetic oligonucleotide
  Antisense Strand to SEQ ID NO: 371773
cugaugacuauucucacac

SEQ ID NO: 371775 - RNA, 19 nt, Artificial Sequence
  Description of Artificial Sequence: Synthetic oligonucleotide
  Sense Strand Starting at position 675 of SEQ ID NO: 316878
ugagaauagucaucaggug

SEQ ID NO: 371776 - RNA, 19 nt, Artificial Sequence
  Description of Artificial Sequence: Synthetic oligonucleotide
  Antisense Strand to SEQ ID NO: 371775
caccugaugacuauucuca

SEQ ID NO: 371777 - RNA, 19 nt, Artificial Sequence
  Description of Artificial Sequence: Synthetic oligonucleotide
  Sense Strand Starting at position 675 of SEQ ID NO: 317762
acagauguucaggguugaa

SEQ ID NO: 371778 - RNA, 19 nt, Artificial Sequence
  Description of Artificial Sequence: Synthetic oligonucleotide
  Antisense Strand to SEQ ID NO: 371777
uucaacccugaacaucugu

SEQ ID NO: 371779 - RNA, 19 nt, Artificial Sequence
  Description of Artificial Sequence: Synthetic oligonucleotide
  Sense Strand Starting at position 675 of SEQ ID NO: 317771
caggguugaacucggagaa

SEQ ID NO: 371780 - RNA, 19 nt, Artificial Sequence
  Description of Artificial Sequence: Synthetic oligonucleotide
  Antisense Strand to SEQ ID NO: 371779
uucuccgaguucaacccug

SEQ ID NO: 371781 - RNA, 19 nt, Artificial Sequence
  Description of Artificial Sequence: Synthetic oligonucleotide
  Sense Strand Starting at position 675 of SEQ ID NO: 317852
cugacucccgaaugauaac

SEQ ID NO: 371782 - RNA, 19 nt, Artificial Sequence
  Description of Artificial Sequence: Synthetic oligonucleotide
  Antisense Strand to SEQ ID NO: 371781
guuaucauucgggagucag

SEQ ID NO: 371783 - RNA, 19 nt, Artificial Sequence
  Description of Artificial Sequence: Synthetic oligonucleotide
  Sense Strand Starting at position 675 of SEQ ID NO: 317925
auggauauuugauaggcuu

SEQ ID NO: 371784 - RNA, 19 nt, Artificial Sequence
  Description of Artificial Sequence: Synthetic oligonucleotide
  Antisense Strand to SEQ ID NO: 371783
aagccuaucaaauauccau

SEQ ID NO: 371785 - RNA, 19 nt, Artificial Sequence
  Description of Artificial Sequence: Synthetic oligonucleotide
  Sense Strand Starting at position 675 of SEQ ID NO: 317933
uugauaggcuucuuacauu

SEQ ID NO: 371786 - RNA, 19 nt, Artificial Sequence
  Description of Artificial Sequence: Synthetic oligonucleotide
  Antisense Strand to SEQ ID NO: 371785
aauguaagaagccuaucaa

SEQ ID NO: 371787 - RNA, 19 nt, Artificial Sequence
  Description of Artificial Sequence: Synthetic oligonucleotide
  Sense Strand Starting at position 675 of SEQ ID NO: 317952
ugucaugggcaaugcagaa

SEQ ID NO: 371788 - RNA, 19 nt, Artificial Sequence
  Description of Artificial Sequence: Synthetic oligonucleotide
  Antisense Strand to SEQ ID NO: 371787
uucugcauugcccaugaca

SEQ ID NO: 371789 - RNA, 19 nt, Artificial Sequence
  Description of Artificial Sequence: Synthetic oligonucleotide
  Sense Strand Starting at position 675 of SEQ ID NO: 318095
cagccucaagaguguauuu

SEQ ID NO: 371790 - RNA, 19 nt, Artificial Sequence
  Description of Artificial Sequence: Synthetic oligonucleotide
  Antisense Strand to SEQ ID NO: 371789
aaauacacucuugaggcug

SEQ ID NO: 371791 - RNA, 19 nt, Artificial Sequence
  Description of Artificial Sequence: Synthetic oligonucleotide
  Sense Strand Starting at position 675 of SEQ ID NO: 318389
cuuguuuccuugccagaua

SEQ ID NO: 371792 - RNA, 19 nt, Artificial Sequence
  Description of Artificial Sequence: Synthetic oligonucleotide
  Antisense Strand to SEQ ID NO: 371791
uaucuggcaaggaaacaag

SEQ ID NO: 371793 - RNA, 19 nt, Artificial Sequence
  Description of Artificial Sequence: Synthetic oligonucleotide
  Sense Strand Starting at position 675 of SEQ ID NO: 318442
augccaaguuauuccuuga

SEQ ID NO: 371794 - RNA, 19 nt, Artificial Sequence
  Description of Artificial Sequence: Synthetic oligonucleotide
  Antisense Strand to SEQ ID NO: 371793
ucaaggaauaacuuggcau

SEQ ID NO: 371795 - RNA, 19 nt, Artificial Sequence
  Description of Artificial Sequence: Synthetic oligonucleotide
  Sense Strand Starting at position 675 of SEQ ID NO: 318445
ccaaguuauuccuugaguc

SEQ ID NO: 371796 - RNA, 19 nt, Artificial Sequence
  Description of Artificial Sequence: Synthetic oligonucleotide
  Antisense Strand to SEQ ID NO: 371795
gacucaaggaauaacuugg

SEQ ID NO: 371797 - RNA, 19 nt, Artificial Sequence
  Description of Artificial Sequence: Synthetic oligonucleotide
  Sense Strand Starting at position 675 of SEQ ID NO: 318478
uccuucugccuagagugaa

SEQ ID NO: 371798 - RNA, 19 nt, Artificial Sequence
  Description of Artificial Sequence: Synthetic oligonucleotide
  Antisense Strand to SEQ ID NO: 371797
uucacucuaggcagaagga

SEQ ID NO: 371799 - RNA, 19 nt, Artificial Sequence
  Description of Artificial Sequence: Synthetic oligonucleotide
  Sense Strand Starting at position 675 of SEQ ID NO: 318548
guuagacauuccuugagca

SEQ ID NO: 371800 - RNA, 19 nt, Artificial Sequence
  Description of Artificial Sequence: Synthetic oligonucleotide
  Antisense Strand to SEQ ID NO: 371799
ugcucaaggaaugucuaac

SEQ ID NO: 371801 - RNA, 19 nt, Artificial Sequence
  Description of Artificial Sequence: Synthetic oligonucleotide
  Sense Strand Starting at position 675 of SEQ ID NO: 318549
uuagacauuccuugagcaa

SEQ ID NO: 371802 - RNA, 19 nt, Artificial Sequence
  Description of Artificial Sequence: Synthetic oligonucleotide
  Antisense Strand to SEQ ID NO: 371801
uugcucaaggaaugucuaa

SEQ ID NO: 371803 - RNA, 19 nt, Artificial Sequence
  Description of Artificial Sequence: Synthetic oligonucleotide
  Sense Strand Starting at position 675 of SEQ ID NO: 318630
uaucaaauggccuaguguu

SEQ ID NO: 371804 - RNA, 19 nt, Artificial Sequence
  Description of Artificial Sequence: Synthetic oligonucleotide
  Antisense Strand to SEQ ID NO: 371803
aacacuaggccauuugaua

SEQ ID NO: 371805 - RNA, 19 nt, Artificial Sequence
  Description of Artificial Sequence: Synthetic oligonucleotide
  Sense Strand Starting at position 675 of SEQ ID NO: 318661
augcacauccuccgacaua

SEQ ID NO: 371806 - RNA, 19 nt, Artificial Sequence
  Description of Artificial Sequence: Synthetic oligonucleotide
  Antisense Strand to SEQ ID NO: 371805
uaugucggaggaugugcau

SEQ ID NO: 371807 - RNA, 19 nt, Artificial Sequence
  Description of Artificial Sequence: Synthetic oligonucleotide
  Sense Strand Starting at position 675 of SEQ ID NO: 318824
cguggauugguagggcuaa

SEQ ID NO: 371808 - RNA, 19 nt, Artificial Sequence
  Description of Artificial Sequence: Synthetic oligonucleotide
  Antisense Strand to SEQ ID NO: 371807
uuagcccuaccaauccacg

SEQ ID NO: 371809 - RNA, 19 nt, Artificial Sequence
  Description of Artificial Sequence: Synthetic oligonucleotide
  Sense Strand Starting at position 675 of SEQ ID NO: 319183
gaaggaauuucugggucuc

SEQ ID NO: 371810 - RNA, 19 nt, Artificial Sequence
  Description of Artificial Sequence: Synthetic oligonucleotide
  Antisense Strand to SEQ ID NO: 371809
gagacccagaaauuccuuc

SEQ ID NO: 371811 - RNA, 19 nt, Artificial Sequence
  Description of Artificial Sequence: Synthetic oligonucleotide
  Sense Strand Starting at position 676 of SEQ ID NO: 315315
gugaauuguuuauuacagg

SEQ ID NO: 371812 - RNA, 19 nt, Artificial Sequence
  Description of Artificial Sequence: Synthetic oligonucleotide
  Antisense Strand to SEQ ID NO: 371811
ccuguaauaaacaauucac

SEQ ID NO: 371813 - RNA, 19 nt, Artificial Sequence
  Description of Artificial Sequence: Synthetic oligonucleotide
  Sense Strand Starting at position 676 of SEQ ID NO: 315316
ugaauuguuuauuacagga

SEQ ID NO: 371814 - RNA, 19 nt, Artificial Sequence
  Description of Artificial Sequence: Synthetic oligonucleotide
  Antisense Strand to SEQ ID NO: 371813
uccuguaauaaacaauuca

SEQ ID NO: 371815 - RNA, 19 nt, Artificial Sequence
  Description of Artificial Sequence: Synthetic oligonucleotide
  Sense Strand Starting at position 676 of SEQ ID NO: 315350
uguuauuguuaagauccca

SEQ ID NO: 371816 - RNA, 19 nt, Artificial Sequence
  Description of Artificial Sequence: Synthetic oligonucleotide
  Antisense Strand to SEQ ID NO: 371815
ugggaucuuaacaauaaca

SEQ ID NO: 371817 - RNA, 19 nt, Artificial Sequence
  Description of Artificial Sequence: Synthetic oligonucleotide
  Sense Strand Starting at position 676 of SEQ ID NO: 316483
ugcucugucaugggccaua

SEQ ID NO: 371818 - RNA, 19 nt, Artificial Sequence
  Description of Artificial Sequence: Synthetic oligonucleotide
  Antisense Strand to SEQ ID NO: 371817
uauggcccaugacagagca

SEQ ID NO: 371819 - RNA, 19 nt, Artificial Sequence
  Description of Artificial Sequence: Synthetic oligonucleotide
  Sense Strand Starting at position 676 of SEQ ID NO: 316486
ucugucaugggccauaaca

SEQ ID NO: 371820 - RNA, 19 nt, Artificial Sequence
  Description of Artificial Sequence: Synthetic oligonucleotide
  Antisense Strand to SEQ ID NO: 371819
uguuauggcccaugacaga

SEQ ID NO: 371821 - RNA, 19 nt, Artificial Sequence
  Description of Artificial Sequence: Synthetic oligonucleotide
  Sense Strand Starting at position 676 of SEQ ID NO: 316548
accuguagcuuccuagauu

SEQ ID NO: 371822 - RNA, 19 nt, Artificial Sequence
  Description of Artificial Sequence: Synthetic oligonucleotide
  Antisense Strand to SEQ ID NO: 371821
aaucuaggaagcuacaggu

SEQ ID NO: 371823 - RNA, 19 nt, Artificial Sequence
  Description of Artificial Sequence: Synthetic oligonucleotide
  Sense Strand Starting at position 676 of SEQ ID NO: 316549
ccuguagcuuccuagauuc

SEQ ID NO: 371824 - RNA, 19 nt, Artificial Sequence
  Description of Artificial Sequence: Synthetic oligonucleotide
  Antisense Strand to SEQ ID NO: 371823
gaaucuaggaagcuacagg

SEQ ID NO: 371825 - RNA, 19 nt, Artificial Sequence
  Description of Artificial Sequence: Synthetic oligonucleotide
  Sense Strand Starting at position 676 of SEQ ID NO: 316766
cccaaaugcuuucuggaac

SEQ ID NO: 371826 - RNA, 19 nt, Artificial Sequence
  Description of Artificial Sequence: Synthetic oligonucleotide
  Antisense Strand to SEQ ID NO: 371825
guuccagaaagcauuuggg

SEQ ID NO: 371827 - RNA, 19 nt, Artificial Sequence
  Description of Artificial Sequence: Synthetic oligonucleotide
  Sense Strand Starting at position 676 of SEQ ID NO: 317058
cagugaggucagugggaca

SEQ ID NO: 371828 - RNA, 19 nt, Artificial Sequence
  Description of Artificial Sequence: Synthetic oligonucleotide
  Antisense Strand to SEQ ID NO: 371827
ugucccacugaccucacug

SEQ ID NO: 371829 - RNA, 19 nt, Artificial Sequence
  Description of Artificial Sequence: Synthetic oligonucleotide
  Sense Strand Starting at position 676 of SEQ ID NO: 317234
agcaguggcuccuuuguga

SEQ ID NO: 371830 - RNA, 19 nt, Artificial Sequence
  Description of Artificial Sequence: Synthetic oligonucleotide
  Antisense Strand to SEQ ID NO: 371829
ucacaaaggagccacugcu

SEQ ID NO: 371831 - RNA, 19 nt, Artificial Sequence
  Description of Artificial Sequence: Synthetic oligonucleotide
  Sense Strand Starting at position 676 of SEQ ID NO: 317359
gagugauccacgugggcca

SEQ ID NO: 371832 - RNA, 19 nt, Artificial Sequence
  Description of Artificial Sequence: Synthetic oligonucleotide
  Antisense Strand to SEQ ID NO: 371831
uggcccacguggaucacuc

SEQ ID NO: 371833 - RNA, 19 nt, Artificial Sequence
  Description of Artificial Sequence: Synthetic oligonucleotide
  Sense Strand Starting at position 676 of SEQ ID NO: 317381
ugaacuaucuaccugguga

SEQ ID NO: 371834 - RNA, 19 nt, Artificial Sequence
  Description of Artificial Sequence: Synthetic oligonucleotide
  Antisense Strand to SEQ ID NO: 371833
ucaccagguagauaguuca

SEQ ID NO: 371835 - RNA, 19 nt, Artificial Sequence
  Description of Artificial Sequence: Synthetic oligonucleotide
  Sense Strand Starting at position 676 of SEQ ID NO: 317385
cuaucuaccuggugaggga

SEQ ID NO: 371836 - RNA, 19 nt, Artificial Sequence
  Description of Artificial Sequence: Synthetic oligonucleotide
  Antisense Strand to SEQ ID NO: 371835
ucccucaccagguagauag

SEQ ID NO: 371837 - RNA, 19 nt, Artificial Sequence
  Description of Artificial Sequence: Synthetic oligonucleotide
  Sense Strand Starting at position 676 of SEQ ID NO: 317668
gugucuuauagagggugau

SEQ ID NO: 371838 - RNA, 19 nt, Artificial Sequence
  Description of Artificial Sequence: Synthetic oligonucleotide
  Antisense Strand to SEQ ID NO: 371837
aucacccucuauaagacac

SEQ ID NO: 371839 - RNA, 19 nt, Artificial Sequence
  Description of Artificial Sequence: Synthetic oligonucleotide
  Sense Strand Starting at position 676 of SEQ ID NO: 317671
ucuuauagagggugaugga

SEQ ID NO: 371840 - RNA, 19 nt, Artificial Sequence
  Description of Artificial Sequence: Synthetic oligonucleotide
  Antisense Strand to SEQ ID NO: 371839
uccaucacccucuauaaga

SEQ ID NO: 371841 - RNA, 19 nt, Artificial Sequence
  Description of Artificial Sequence: Synthetic oligonucleotide
  Sense Strand Starting at position 676 of SEQ ID NO: 317781
guuggaggcugguucauuu

SEQ ID NO: 371842 - RNA, 19 nt, Artificial Sequence
  Description of Artificial Sequence: Synthetic oligonucleotide
  Antisense Strand to SEQ ID NO: 371841
aaaugaaccagccuccaac

SEQ ID NO: 371843 - RNA, 19 nt, Artificial Sequence
  Description of Artificial Sequence: Synthetic oligonucleotide
  Sense Strand Starting at position 676 of SEQ ID NO: 317857
auguguaaagucggaauaa

SEQ ID NO: 371844 - RNA, 19 nt, Artificial Sequence
  Description of Artificial Sequence: Synthetic oligonucleotide
  Antisense Strand to SEQ ID NO: 371843
uuauuccgacuuuacacau

SEQ ID NO: 371845 - RNA, 19 nt, Artificial Sequence
  Description of Artificial Sequence: Synthetic oligonucleotide
  Sense Strand Starting at position 676 of SEQ ID NO: 317858
uguguaaagucggaauaac

SEQ ID NO: 371846 - RNA, 19 nt, Artificial Sequence
  Description of Artificial Sequence: Synthetic oligonucleotide
  Antisense Strand to SEQ ID NO: 371845
guuauuccgacuuuacaca

SEQ ID NO: 371847 - RNA, 19 nt, Artificial Sequence
  Description of Artificial Sequence: Synthetic oligonucleotide
  Sense Strand Starting at position 676 of SEQ ID NO: 317981
gucccauaagguuguguaa

SEQ ID NO: 371848 - RNA, 19 nt, Artificial Sequence
  Description of Artificial Sequence: Synthetic oligonucleotide
  Antisense Strand to SEQ ID NO: 371847
uuacacaaccuuaugggac

SEQ ID NO: 371849 - RNA, 19 nt, Artificial Sequence
  Description of Artificial Sequence: Synthetic oligonucleotide
  Sense Strand Starting at position 676 of SEQ ID NO: 317984
ccauaagguuguguaagga

SEQ ID NO: 371850 - RNA, 19 nt, Artificial Sequence
  Description of Artificial Sequence: Synthetic oligonucleotide
  Antisense Strand to SEQ ID NO: 371849
uccuuacacaaccuuaugg

SEQ ID NO: 371851 - RNA, 19 nt, Artificial Sequence
  Description of Artificial Sequence: Synthetic oligonucleotide
  Sense Strand Starting at position 676 of SEQ ID NO: 318111
gggcucuacuuccuacaca

SEQ ID NO: 371852 - RNA, 19 nt, Artificial Sequence
  Description of Artificial Sequence: Synthetic oligonucleotide
  Antisense Strand to SEQ ID NO: 371851
uguguaggaaguagagccc

SEQ ID NO: 371853 - RNA, 19 nt, Artificial Sequence
  Description of Artificial Sequence: Synthetic oligonucleotide
  Sense Strand Starting at position 676 of SEQ ID NO: 318166
cccugauguuccucaaagu

SEQ ID NO: 371854 - RNA, 19 nt, Artificial Sequence
  Description of Artificial Sequence: Synthetic oligonucleotide
  Antisense Strand to SEQ ID NO: 371853
acuuugaggaacaucaggg

SEQ ID NO: 371855 - RNA, 19 nt, Artificial Sequence
  Description of Artificial Sequence: Synthetic oligonucleotide
  Sense Strand Starting at position 676 of SEQ ID NO: 318167
ccugauguuccucaaaguc

SEQ ID NO: 371856 - RNA, 19 nt, Artificial Sequence
  Description of Artificial Sequence: Synthetic oligonucleotide
  Antisense Strand to SEQ ID NO: 371855
gacuuugaggaacaucagg

SEQ ID NO: 371857 - RNA, 19 nt, Artificial Sequence
  Description of Artificial Sequence: Synthetic oligonucleotide
  Sense Strand Starting at position 676 of SEQ ID NO: 318269
cccgucuugucagcgaacu

SEQ ID NO: 371858 - RNA, 19 nt, Artificial Sequence
  Description of Artificial Sequence: Synthetic oligonucleotide
  Antisense Strand to SEQ ID NO: 371857
aguucgcugacaagacggg

SEQ ID NO: 371859 - RNA, 19 nt, Artificial Sequence
  Description of Artificial Sequence: Synthetic oligonucleotide
  Sense Strand Starting at position 676 of SEQ ID NO: 318271
cgucuugucagcgaacuca

SEQ ID NO: 371860 - RNA, 19 nt, Artificial Sequence
  Description of Artificial Sequence: Synthetic oligonucleotide
  Antisense Strand to SEQ ID NO: 371859
ugaguucgcugacaagacg

SEQ ID NO: 371861 - RNA, 19 nt, Artificial Sequence
  Description of Artificial Sequence: Synthetic oligonucleotide
  Sense Strand Starting at position 676 of SEQ ID NO: 318306
ugaggccuucuguguacau

SEQ ID NO: 371862 - RNA, 19 nt, Artificial Sequence
  Description of Artificial Sequence: Synthetic oligonucleotide
  Antisense Strand to SEQ ID NO: 371861
auguacacagaaggccuca

SEQ ID NO: 371863 - RNA, 19 nt, Artificial Sequence
  Description of Artificial Sequence: Synthetic oligonucleotide
  Sense Strand Starting at position 676 of SEQ ID NO: 318307
gaggccuucuguguacauu

SEQ ID NO: 371864 - RNA, 19 nt, Artificial Sequence
  Description of Artificial Sequence: Synthetic oligonucleotide
  Antisense Strand to SEQ ID NO: 371863
aauguacacagaaggccuc

SEQ ID NO: 371865 - RNA, 19 nt, Artificial Sequence
  Description of Artificial Sequence: Synthetic oligonucleotide
  Sense Strand Starting at position 676 of SEQ ID NO: 318655
agcacuuaguccugaaguu

SEQ ID NO: 371866 - RNA, 19 nt, Artificial Sequence
  Description of Artificial Sequence: Synthetic oligonucleotide
  Antisense Strand to SEQ ID NO: 371865
aacuucaggacuaagugcu

SEQ ID NO: 371867 - RNA, 19 nt, Artificial Sequence
  Description of Artificial Sequence: Synthetic oligonucleotide
  Sense Strand Starting at position 676 of SEQ ID NO: 318656
gcacuuaguccugaaguua

SEQ ID NO: 371868 - RNA, 19 nt, Artificial Sequence
  Description of Artificial Sequence: Synthetic oligonucleotide
  Antisense Strand to SEQ ID NO: 371867
uaacuucaggacuaagugc

SEQ ID NO: 371869 - RNA, 19 nt, Artificial Sequence
  Description of Artificial Sequence: Synthetic oligonucleotide
  Sense Strand Starting at position 676 of SEQ ID NO: 318695
gcgugucacuauucccaaa

SEQ ID NO: 371870 - RNA, 19 nt, Artificial Sequence
  Description of Artificial Sequence: Synthetic oligonucleotide
  Antisense Strand to SEQ ID NO: 371869
uuugggaauagugacacgc

SEQ ID NO: 371871 - RNA, 19 nt, Artificial Sequence
  Description of Artificial Sequence: Synthetic oligonucleotide
  Sense Strand Starting at position 676 of SEQ ID NO: 318811
cggcgagaucuaggcucau

SEQ ID NO: 371872 - RNA, 19 nt, Artificial Sequence
  Description of Artificial Sequence: Synthetic oligonucleotide
  Antisense Strand to SEQ ID NO: 371871
augagccuagaucucgccg

SEQ ID NO: 371873 - RNA, 19 nt, Artificial Sequence
  Description of Artificial Sequence: Synthetic oligonucleotide
  Sense Strand Starting at position 677 of SEQ ID NO: 315308
uugaauuguacgcaaauag

SEQ ID NO: 371874 - RNA, 19 nt, Artificial Sequence
  Description of Artificial Sequence: Synthetic oligonucleotide
  Antisense Strand to SEQ ID NO: 371873
cuauuugcguacaauucaa

SEQ ID NO: 371875 - RNA, 19 nt, Artificial Sequence
  Description of Artificial Sequence: Synthetic oligonucleotide
  Sense Strand Starting at position 677 of SEQ ID NO: 315639
auauaaucuugccuuggaa

SEQ ID NO: 371876 - RNA, 19 nt, Artificial Sequence
  Description of Artificial Sequence: Synthetic oligonucleotide
  Antisense Strand to SEQ ID NO: 371875
uuccaaggcaagauuauau

SEQ ID NO: 371877 - RNA, 19 nt, Artificial Sequence
  Description of Artificial Sequence: Synthetic oligonucleotide
  Sense Strand Starting at position 677 of SEQ ID NO: 315710
uugugacccagugagcauu

SEQ ID NO: 371878 - RNA, 19 nt, Artificial Sequence
  Description of Artificial Sequence: Synthetic oligonucleotide
  Antisense Strand to SEQ ID NO: 371877
aaugcucacugggucacaa

SEQ ID NO: 371879 - RNA, 19 nt, Artificial Sequence
  Description of Artificial Sequence: Synthetic oligonucleotide
  Sense Strand Starting at position 677 of SEQ ID NO: 315758
gugugucacgcaaggaaug

SEQ ID NO: 371880 - RNA, 19 nt, Artificial Sequence
  Description of Artificial Sequence: Synthetic oligonucleotide
  Antisense Strand to SEQ ID NO: 371879
cauuccuugcgugacacac

SEQ ID NO: 371881 - RNA, 19 nt, Artificial Sequence
  Description of Artificial Sequence: Synthetic oligonucleotide
  Sense Strand Starting at position 677 of SEQ ID NO: 315835
gaagcuaagaaugguggau

SEQ ID NO: 371882 - RNA, 19 nt, Artificial Sequence
  Description of Artificial Sequence: Synthetic oligonucleotide
  Antisense Strand to SEQ ID NO: 371881
auccaccauucuuagcuuc

SEQ ID NO: 371883 - RNA, 19 nt, Artificial Sequence
  Description of Artificial Sequence: Synthetic oligonucleotide
  Sense Strand Starting at position 677 of SEQ ID NO: 315839
cuaagaaugguggaugugu

SEQ ID NO: 371884 - RNA, 19 nt, Artificial Sequence
  Description of Artificial Sequence: Synthetic oligonucleotide
  Antisense Strand to SEQ ID NO: 371883
acacauccaccauucuuag

SEQ ID NO: 371885 - RNA, 19 nt, Artificial Sequence
  Description of Artificial Sequence: Synthetic oligonucleotide
  Sense Strand Starting at position 677 of SEQ ID NO: 315841
aagaaugguggauguguua

SEQ ID NO: 371886 - RNA, 19 nt, Artificial Sequence
  Description of Artificial Sequence: Synthetic oligonucleotide
  Antisense Strand to SEQ ID NO: 371885
uaacacauccaccauucuu

SEQ ID NO: 371887 - RNA, 19 nt, Artificial Sequence
  Description of Artificial Sequence: Synthetic oligonucleotide
  Sense Strand Starting at position 677 of SEQ ID NO: 315974
gagcuauggcuuuaacuag

SEQ ID NO: 371888 - RNA, 19 nt, Artificial Sequence
  Description of Artificial Sequence: Synthetic oligonucleotide
  Antisense Strand to SEQ ID NO: 371887
cuaguuaaagccauagcuc

SEQ ID NO: 371889 - RNA, 19 nt, Artificial Sequence
  Description of Artificial Sequence: Synthetic oligonucleotide
  Sense Strand Starting at position 677 of SEQ ID NO: 316020
cuaauaaguaaguguugga

SEQ ID NO: 371890 - RNA, 19 nt, Artificial Sequence
  Description of Artificial Sequence: Synthetic oligonucleotide
  Antisense Strand to SEQ ID NO: 371889
uccaacacuuacuuauuag

SEQ ID NO: 371891 - RNA, 19 nt, Artificial Sequence
  Description of Artificial Sequence: Synthetic oligonucleotide
  Sense Strand Starting at position 677 of SEQ ID NO: 316024
uaaguaaguguuggaucua

SEQ ID NO: 371892 - RNA, 19 nt, Artificial Sequence
  Description of Artificial Sequence: Synthetic oligonucleotide
  Antisense Strand to SEQ ID NO: 371891
uagauccaacacuuacuua

SEQ ID NO: 371893 - RNA, 19 nt, Artificial Sequence
  Description of Artificial Sequence: Synthetic oligonucleotide
  Sense Strand Starting at position 677 of SEQ ID NO: 316029
aaguguuggaucuaggacu

SEQ ID NO: 371894 - RNA, 19 nt, Artificial Sequence
  Description of Artificial Sequence: Synthetic oligonucleotide
  Antisense Strand to SEQ ID NO: 371893
aguccuagauccaacacuu

SEQ ID NO: 371895 - RNA, 19 nt, Artificial Sequence
  Description of Artificial Sequence: Synthetic oligonucleotide
  Sense Strand Starting at position 677 of SEQ ID NO: 316092
gggcuagccugccuauuua

SEQ ID NO: 371896 - RNA, 19 nt, Artificial Sequence
  Description of Artificial Sequence: Synthetic oligonucleotide
  Antisense Strand to SEQ ID NO: 371895
uaaauaggcaggcuagccc

SEQ ID NO: 371897 - RNA, 19 nt, Artificial Sequence
  Description of Artificial Sequence: Synthetic oligonucleotide
  Sense Strand Starting at position 677 of SEQ ID NO: 316102
gccuauuuagguuggcaaa

SEQ ID NO: 371898 - RNA, 19 nt, Artificial Sequence
  Description of Artificial Sequence: Synthetic oligonucleotide
  Antisense Strand to SEQ ID NO: 371897
uuugccaaccuaaauaggc

SEQ ID NO: 371899 - RNA, 19 nt, Artificial Sequence
  Description of Artificial Sequence: Synthetic oligonucleotide
  Sense Strand Starting at position 677 of SEQ ID NO: 316159
gggucagauccuggaaagu

SEQ ID NO: 371900 - RNA, 19 nt, Artificial Sequence
  Description of Artificial Sequence: Synthetic oligonucleotide
  Antisense Strand to SEQ ID NO: 371899
acuuuccaggaucugaccc

SEQ ID NO: 371901 - RNA, 19 nt, Artificial Sequence
  Description of Artificial Sequence: Synthetic oligonucleotide
  Sense Strand Starting at position 677 of SEQ ID NO: 316169
cuggaaagucuccaaugcu

SEQ ID NO: 371902 - RNA, 19 nt, Artificial Sequence
  Description of Artificial Sequence: Synthetic oligonucleotide
  Antisense Strand to SEQ ID NO: 371901
agcauuggagacuuuccag

SEQ ID NO: 371903 - RNA, 19 nt, Artificial Sequence
  Description of Artificial Sequence: Synthetic oligonucleotide
  Sense Strand Starting at position 677 of SEQ ID NO: 316198
ggucuuauucaggaugcag

SEQ ID NO: 371904 - RNA, 19 nt, Artificial Sequence
  Description of Artificial Sequence: Synthetic oligonucleotide
  Antisense Strand to SEQ ID NO: 371903
cugcauccugaauaagacc

SEQ ID NO: 371905 - RNA, 19 nt, Artificial Sequence
  Description of Artificial Sequence: Synthetic oligonucleotide
  Sense Strand Starting at position 677 of SEQ ID NO: 316313
gggaagggcuagucugagu

SEQ ID NO: 371906 - RNA, 19 nt, Artificial Sequence
  Description of Artificial Sequence: Synthetic oligonucleotide
  Antisense Strand to SEQ ID NO: 371905
acucagacuagcccuuccc

SEQ ID NO: 371907 - RNA, 19 nt, Artificial Sequence
  Description of Artificial Sequence: Synthetic oligonucleotide
  Sense Strand Starting at position 677 of SEQ ID NO: 316318
gggcuagucugaguggaga

SEQ ID NO: 371908 - RNA, 19 nt, Artificial Sequence
  Description of Artificial Sequence: Synthetic oligonucleotide
  Antisense Strand to SEQ ID NO: 371907
ucuccacucagacuagccc

SEQ ID NO: 371909 - RNA, 19 nt, Artificial Sequence
  Description of Artificial Sequence: Synthetic oligonucleotide
  Sense Strand Starting at position 677 of SEQ ID NO: 316320
gcuagucugaguggagaga

SEQ ID NO: 371910 - RNA, 19 nt, Artificial Sequence
  Description of Artificial Sequence: Synthetic oligonucleotide
  Antisense Strand to SEQ ID NO: 371909
ucucuccacucagacuagc

SEQ ID NO: 371911 - RNA, 19 nt, Artificial Sequence
  Description of Artificial Sequence: Synthetic oligonucleotide
  Sense Strand Starting at position 677 of SEQ ID NO: 316382
cagaaaucagcuugguaau

SEQ ID NO: 371912 - RNA, 19 nt, Artificial Sequence
  Description of Artificial Sequence: Synthetic oligonucleotide
  Antisense Strand to SEQ ID NO: 371911
auuaccaagcugauuucug

SEQ ID NO: 371913 - RNA, 19 nt, Artificial Sequence
  Description of Artificial Sequence: Synthetic oligonucleotide
  Sense Strand Starting at position 677 of SEQ ID NO: 316383
agaaaucagcuugguaaug

SEQ ID NO: 371914 - RNA, 19 nt, Artificial Sequence
  Description of Artificial Sequence: Synthetic oligonucleotide
  Antisense Strand to SEQ ID NO: 371913
cauuaccaagcugauuucu

SEQ ID NO: 371915 - RNA, 19 nt, Artificial Sequence
  Description of Artificial Sequence: Synthetic oligonucleotide
  Sense Strand Starting at position 677 of SEQ ID NO: 316624
ggagcugugugacccacaa

SEQ ID NO: 371916 - RNA, 19 nt, Artificial Sequence
  Description of Artificial Sequence: Synthetic oligonucleotide
  Antisense Strand to SEQ ID NO: 371915
uugugggucacacagcucc

SEQ ID NO: 371917 - RNA, 19 nt, Artificial Sequence
  Description of Artificial Sequence: Synthetic oligonucleotide
  Sense Strand Starting at position 677 of SEQ ID NO: 316786
cacacauucugggcagaca

SEQ ID NO: 371918 - RNA, 19 nt, Artificial Sequence
  Description of Artificial Sequence: Synthetic oligonucleotide
  Antisense Strand to SEQ ID NO: 371917
ugucugcccagaaugugug

SEQ ID NO: 371919 - RNA, 19 nt, Artificial Sequence
  Description of Artificial Sequence: Synthetic oligonucleotide
  Sense Strand Starting at position 677 of SEQ ID NO: 317045
gcaggaauuccacagggca

SEQ ID NO: 371920 - RNA, 19 nt, Artificial Sequence
  Description of Artificial Sequence: Synthetic oligonucleotide
  Antisense Strand to SEQ ID NO: 371919
ugcccuguggaauuccugc

SEQ ID NO: 371921 - RNA, 19 nt, Artificial Sequence
  Description of Artificial Sequence: Synthetic oligonucleotide
  Sense Strand Starting at position 677 of SEQ ID NO: 317127
cccaauugacugcaggauu

SEQ ID NO: 371922 - RNA, 19 nt, Artificial Sequence
  Description of Artificial Sequence: Synthetic oligonucleotide
  Antisense Strand to SEQ ID NO: 371921
aauccugcagucaauuggg

SEQ ID NO: 371923 - RNA, 19 nt, Artificial Sequence
  Description of Artificial Sequence: Synthetic oligonucleotide
  Sense Strand Starting at position 677 of SEQ ID NO: 317366
gucccaaucugucuuagag

SEQ ID NO: 371924 - RNA, 19 nt, Artificial Sequence
  Description of Artificial Sequence: Synthetic oligonucleotide
  Antisense Strand to SEQ ID NO: 371923
cucuaagacagauugggac

SEQ ID NO: 371925 - RNA, 19 nt, Artificial Sequence
  Description of Artificial Sequence: Synthetic oligonucleotide
  Sense Strand Starting at position 677 of SEQ ID NO: 317687
gcauuuaggucacuaaugu

SEQ ID NO: 371926 - RNA, 19 nt, Artificial Sequence
  Description of Artificial Sequence: Synthetic oligonucleotide
  Antisense Strand to SEQ ID NO: 371925
acauuagugaccuaaaugc

SEQ ID NO: 371927 - RNA, 19 nt, Artificial Sequence
  Description of Artificial Sequence: Synthetic oligonucleotide
  Sense Strand Starting at position 677 of SEQ ID NO: 317724
cucugagcacccgagaaau

SEQ ID NO: 371928 - RNA, 19 nt, Artificial Sequence
  Description of Artificial Sequence: Synthetic oligonucleotide
  Antisense Strand to SEQ ID NO: 371927
auuucucgggugcucagag

SEQ ID NO: 371929 - RNA, 19 nt, Artificial Sequence
  Description of Artificial Sequence: Synthetic oligonucleotide
  Sense Strand Starting at position 677 of SEQ ID NO: 317726
cugagcacccgagaaauua

SEQ ID NO: 371930 - RNA, 19 nt, Artificial Sequence
  Description of Artificial Sequence: Synthetic oligonucleotide
  Antisense Strand to SEQ ID NO: 371929
uaauuucucgggugcucag

SEQ ID NO: 371931 - RNA, 19 nt, Artificial Sequence
  Description of Artificial Sequence: Synthetic oligonucleotide
  Sense Strand Starting at position 677 of SEQ ID NO: 317734
ccgagaaauuacuuugguu

SEQ ID NO: 371932 - RNA, 19 nt, Artificial Sequence
  Description of Artificial Sequence: Synthetic oligonucleotide
  Antisense Strand to SEQ ID NO: 371931
aaccaaaguaauuucucgg

SEQ ID NO: 371933 - RNA, 19 nt, Artificial Sequence
  Description of Artificial Sequence: Synthetic oligonucleotide
  Sense Strand Starting at position 677 of SEQ ID NO: 317736
gagaaauuacuuugguuau

SEQ ID NO: 371934 - RNA, 19 nt, Artificial Sequence
  Description of Artificial Sequence: Synthetic oligonucleotide
  Antisense Strand to SEQ ID NO: 371933
auaaccaaaguaauuucuc

SEQ ID NO: 371935 - RNA, 19 nt, Artificial Sequence
  Description of Artificial Sequence: Synthetic oligonucleotide
  Sense Strand Starting at position 677 of SEQ ID NO: 317739
aaauuacuuugguuaugga

SEQ ID NO: 371936 - RNA, 19 nt, Artificial Sequence
  Description of Artificial Sequence: Synthetic oligonucleotide
  Antisense Strand to SEQ ID NO: 371935
uccauaaccaaaguaauuu

SEQ ID NO: 371937 - RNA, 19 nt, Artificial Sequence
  Description of Artificial Sequence: Synthetic oligonucleotide
  Sense Strand Starting at position 677 of SEQ ID NO: 317748
ugguuauggaacugacaau

SEQ ID NO: 371938 - RNA, 19 nt, Artificial Sequence
  Description of Artificial Sequence: Synthetic oligonucleotide
  Antisense Strand to SEQ ID NO: 371937
auugucaguuccauaacca

SEQ ID NO: 371939 - RNA, 19 nt, Artificial Sequence
  Description of Artificial Sequence: Synthetic oligonucleotide
  Sense Strand Starting at position 677 of SEQ ID NO: 317933
cguuucuuuaagugaagaa

SEQ ID NO: 371940 - RNA, 19 nt, Artificial Sequence
  Description of Artificial Sequence: Synthetic oligonucleotide
  Antisense Strand to SEQ ID NO: 371939
uucuucacuuaaagaaacg

SEQ ID NO: 371941 - RNA, 19 nt, Artificial Sequence
  Description of Artificial Sequence: Synthetic oligonucleotide
  Sense Strand Starting at position 677 of SEQ ID NO: 318001
ggagcuaggaucuggacua

SEQ ID NO: 371942 - RNA, 19 nt, Artificial Sequence
  Description of Artificial Sequence: Synthetic oligonucleotide
  Antisense Strand to SEQ ID NO: 371941
uaguccagauccuagcucc

SEQ ID NO: 371943 - RNA, 19 nt, Artificial Sequence
  Description of Artificial Sequence: Synthetic oligonucleotide
  Sense Strand Starting at position 677 of SEQ ID NO: 318565
ucuacuuguuccuugagga

SEQ ID NO: 371944 - RNA, 19 nt, Artificial Sequence
  Description of Artificial Sequence: Synthetic oligonucleotide
  Antisense Strand to SEQ ID NO: 371943
uccucaaggaacaaguaga

SEQ ID NO: 371945 - RNA, 19 nt, Artificial Sequence
  Description of Artificial Sequence: Synthetic oligonucleotide
  Sense Strand Starting at position 677 of SEQ ID NO: 318566
cuacuuguuccuugaggau

SEQ ID NO: 371946 - RNA, 19 nt, Artificial Sequence
  Description of Artificial Sequence: Synthetic oligonucleotide
  Antisense Strand to SEQ ID NO: 371945
auccucaaggaacaaguag

SEQ ID NO: 371947 - RNA, 19 nt, Artificial Sequence
  Description of Artificial Sequence: Synthetic oligonucleotide
  Sense Strand Starting at position 677 of SEQ ID NO: 318792
gagggucuuuacuugaaga

SEQ ID NO: 371948 - RNA, 19 nt, Artificial Sequence
  Description of Artificial Sequence: Synthetic oligonucleotide
  Antisense Strand to SEQ ID NO: 371947
ucuucaaguaaagacccuc

SEQ ID NO: 371949 - RNA, 19 nt, Artificial Sequence
  Description of Artificial Sequence: Synthetic oligonucleotide
  Sense Strand Starting at position 677 of SEQ ID NO: 318793
agggucuuuacuugaagau

SEQ ID NO: 371950 - RNA, 19 nt, Artificial Sequence
  Description of Artificial Sequence: Synthetic oligonucleotide
  Antisense Strand to SEQ ID NO: 371949
aucuucaaguaaagacccu

SEQ ID NO: 371951 - RNA, 19 nt, Artificial Sequence
  Description of Artificial Sequence: Synthetic oligonucleotide
  Sense Strand Starting at position 677 of SEQ ID NO: 319112
uguucuuauuugccaauga

SEQ ID NO: 371952 - RNA, 19 nt, Artificial Sequence
  Description of Artificial Sequence: Synthetic oligonucleotide
  Antisense Strand to SEQ ID NO: 371951
ucauuggcaaauaagaaca

SEQ ID NO: 371953 - RNA, 19 nt, Artificial Sequence
  Description of Artificial Sequence: Synthetic oligonucleotide
  Sense Strand Starting at position 678 of SEQ ID NO: 315315
cacacauucugggcagaca

SEQ ID NO: 371954 - RNA, 19 nt, Artificial Sequence
  Description of Artificial Sequence: Synthetic oligonucleotide
  Antisense Strand to SEQ ID NO: 371953
ugucugcccagaaugugug

SEQ ID NO: 371955 - RNA, 19 nt, Artificial Sequence
  Description of Artificial Sequence: Synthetic oligonucleotide
  Sense Strand Starting at position 678 of SEQ ID NO: 315574
gcaggaauuccacagggca

SEQ ID NO: 371956 - RNA, 19 nt, Artificial Sequence
  Description of Artificial Sequence: Synthetic oligonucleotide
  Antisense Strand to SEQ ID NO: 371955
ugcccuguggaauuccugc

SEQ ID NO: 371957 - RNA, 19 nt, Artificial Sequence
  Description of Artificial Sequence: Synthetic oligonucleotide
  Sense Strand Starting at position 678 of SEQ ID NO: 315656
cccaauugacugcaggauu

SEQ ID NO: 371958 - RNA, 19 nt, Artificial Sequence
  Description of Artificial Sequence: Synthetic oligonucleotide
  Antisense Strand to SEQ ID NO: 371957
aauccugcagucaauuggg

SEQ ID NO: 371959 - RNA, 19 nt, Artificial Sequence
  Description of Artificial Sequence: Synthetic oligonucleotide
  Sense Strand Starting at position 678 of SEQ ID NO: 315895
gucccaaucugucuuagag

SEQ ID NO: 371960 - RNA, 19 nt, Artificial Sequence
  Description of Artificial Sequence: Synthetic oligonucleotide
  Antisense Strand to SEQ ID NO: 371959
cucuaagacagauugggac

SEQ ID NO: 371961 - RNA, 19 nt, Artificial Sequence
  Description of Artificial Sequence: Synthetic oligonucleotide
  Sense Strand Starting at position 678 of SEQ ID NO: 316216
gcauuuaggucacuaaugu

SEQ ID NO: 371962 - RNA, 19 nt, Artificial Sequence
  Description of Artificial Sequence: Synthetic oligonucleotide
  Antisense Strand to SEQ ID NO: 371961
acauuagugaccuaaaugc

SEQ ID NO: 371963 - RNA, 19 nt, Artificial Sequence
  Description of Artificial Sequence: Synthetic oligonucleotide
  Sense Strand Starting at position 678 of SEQ ID NO: 316253
cucugagcacccgagaaau

SEQ ID NO: 371964 - RNA, 19 nt, Artificial Sequence
  Description of Artificial Sequence: Synthetic oligonucleotide
  Antisense Strand to SEQ ID NO: 371963
auuucucgggugcucagag

SEQ ID NO: 371965 - RNA, 19 nt, Artificial Sequence
  Description of Artificial Sequence: Synthetic oligonucleotide
  Sense Strand Starting at position 678 of SEQ ID NO: 316255
cugagcacccgagaaauua

SEQ ID NO: 371966 - RNA, 19 nt, Artificial Sequence
  Description of Artificial Sequence: Synthetic oligonucleotide
  Antisense Strand to SEQ ID NO: 371965
uaauuucucgggugcucag

SEQ ID NO: 371967 - RNA, 19 nt, Artificial Sequence
  Description of Artificial Sequence: Synthetic oligonucleotide
  Sense Strand Starting at position 678 of SEQ ID NO: 316263
ccgagaaauuacuuugguu

SEQ ID NO: 371968 - RNA, 19 nt, Artificial Sequence
  Description of Artificial Sequence: Synthetic oligonucleotide
  Antisense Strand to SEQ ID NO: 371967
aaccaaaguaauuucucgg

SEQ ID NO: 371969 - RNA, 19 nt, Artificial Sequence
  Description of Artificial Sequence: Synthetic oligonucleotide
  Sense Strand Starting at position 678 of SEQ ID NO: 316265
gagaaauuacuuugguuau

SEQ ID NO: 371970 - RNA, 19 nt, Artificial Sequence
  Description of Artificial Sequence: Synthetic oligonucleotide
  Antisense Strand to SEQ ID NO: 371969
auaaccaaaguaauuucuc

SEQ ID NO: 371971 - RNA, 19 nt, Artificial Sequence
  Description of Artificial Sequence: Synthetic oligonucleotide
  Sense Strand Starting at position 678 of SEQ ID NO: 316268
aaauuacuuugguuaugga

SEQ ID NO: 371972 - RNA, 19 nt, Artificial Sequence
  Description of Artificial Sequence: Synthetic oligonucleotide
  Antisense Strand to SEQ ID NO: 371971
uccauaaccaaaguaauuu

SEQ ID NO: 371973 - RNA, 19 nt, Artificial Sequence
  Description of Artificial Sequence: Synthetic oligonucleotide
  Sense Strand Starting at position 678 of SEQ ID NO: 316277
ugguuauggaacugacaau

SEQ ID NO: 371974 - RNA, 19 nt, Artificial Sequence
  Description of Artificial Sequence: Synthetic oligonucleotide
  Antisense Strand to SEQ ID NO: 371973
auugucaguuccauaacca

SEQ ID NO: 371975 - RNA, 19 nt, Artificial Sequence
  Description of Artificial Sequence: Synthetic oligonucleotide
  Sense Strand Starting at position 678 of SEQ ID NO: 316462
cguuucuuuaagugaagaa

SEQ ID NO: 371976 - RNA, 19 nt, Artificial Sequence
  Description of Artificial Sequence: Synthetic oligonucleotide
  Antisense Strand to SEQ ID NO: 371975
uucuucacuuaaagaaacg

SEQ ID NO: 371977 - RNA, 19 nt, Artificial Sequence
  Description of Artificial Sequence: Synthetic oligonucleotide
  Sense Strand Starting at position 678 of SEQ ID NO: 316530
ggagcuaggaucuggacua

SEQ ID NO: 371978 - RNA, 19 nt, Artificial Sequence
  Description of Artificial Sequence: Synthetic oligonucleotide
  Antisense Strand to SEQ ID NO: 371977
uaguccagauccuagcucc

SEQ ID NO: 371979 - RNA, 19 nt, Artificial Sequence
  Description of Artificial Sequence: Synthetic oligonucleotide
  Sense Strand Starting at position 678 of SEQ ID NO: 317094
ucuacuuguuccuugagga

SEQ ID NO: 371980 - RNA, 19 nt, Artificial Sequence
  Description of Artificial Sequence: Synthetic oligonucleotide
  Antisense Strand to SEQ ID NO: 371979
uccucaaggaacaaguaga

SEQ ID NO: 371981 - RNA, 19 nt, Artificial Sequence
  Description of Artificial Sequence: Synthetic oligonucleotide
  Sense Strand Starting at position 678 of SEQ ID NO: 317095
cuacuuguuccuugaggau

SEQ ID NO: 371982 - RNA, 19 nt, Artificial Sequence
  Description of Artificial Sequence: Synthetic oligonucleotide
  Antisense Strand to SEQ ID NO: 371981
auccucaaggaacaaguag

SEQ ID NO: 371983 - RNA, 19 nt, Artificial Sequence
  Description of Artificial Sequence: Synthetic oligonucleotide
  Sense Strand Starting at position 678 of SEQ ID NO: 317321
gagggucuuuacuugaaga

SEQ ID NO: 371984 - RNA, 19 nt, Artificial Sequence
  Description of Artificial Sequence: Synthetic oligonucleotide
  Antisense Strand to SEQ ID NO: 371983
ucuucaaguaaagacccuc

SEQ ID NO: 371985 - RNA, 19 nt, Artificial Sequence
  Description of Artificial Sequence: Synthetic oligonucleotide
  Sense Strand Starting at position 678 of SEQ ID NO: 317322
agggucuuuacuugaagau

SEQ ID NO: 371986 - RNA, 19 nt, Artificial Sequence
  Description of Artificial Sequence: Synthetic oligonucleotide
  Antisense Strand to SEQ ID NO: 371985
aucuucaaguaaagacccu

SEQ ID NO: 371987 - RNA, 19 nt, Artificial Sequence
  Description of Artificial Sequence: Synthetic oligonucleotide
  Sense Strand Starting at position 678 of SEQ ID NO: 317641
uguucuuauuugccaauga

SEQ ID NO: 371988 - RNA, 19 nt, Artificial Sequence
  Description of Artificial Sequence: Synthetic oligonucleotide
  Antisense Strand to SEQ ID NO: 371987
ucauuggcaaauaagaaca

SEQ ID NO: 371989 - RNA, 19 nt, Artificial Sequence
  Description of Artificial Sequence: Synthetic oligonucleotide
  Sense Strand Starting at position 678 of SEQ ID NO: 317762
aggaaaugguaaccucauu

SEQ ID NO: 371990 - RNA, 19 nt, Artificial Sequence
  Description of Artificial Sequence: Synthetic oligonucleotide
  Antisense Strand to SEQ ID NO: 371989
aaugagguuaccauuuccu

SEQ ID NO: 371991 - RNA, 19 nt, Artificial Sequence
  Description of Artificial Sequence: Synthetic oligonucleotide
  Sense Strand Starting at position 678 of SEQ ID NO: 317821
cuagaauacugcuucuaag

SEQ ID NO: 371992 - RNA, 19 nt, Artificial Sequence
  Description of Artificial Sequence: Synthetic oligonucleotide
  Antisense Strand to SEQ ID NO: 371991
cuuagaagcaguauucuag

SEQ ID NO: 371993 - RNA, 19 nt, Artificial Sequence
  Description of Artificial Sequence: Synthetic oligonucleotide
  Sense Strand Starting at position 678 of SEQ ID NO: 317910
ugccauuaaucaguuggaa

SEQ ID NO: 371994 - RNA, 19 nt, Artificial Sequence
  Description of Artificial Sequence: Synthetic oligonucleotide
  Antisense Strand to SEQ ID NO: 371993
uuccaacugauuaauggca

SEQ ID NO: 371995 - RNA, 19 nt, Artificial Sequence
  Description of Artificial Sequence: Synthetic oligonucleotide
  Sense Strand Starting at position 678 of SEQ ID NO: 317913
cauuaaucaguuggaagca

SEQ ID NO: 371996 - RNA, 19 nt, Artificial Sequence
  Description of Artificial Sequence: Synthetic oligonucleotide
  Antisense Strand to SEQ ID NO: 371995
ugcuuccaacugauuaaug

SEQ ID NO: 371997 - RNA, 19 nt, Artificial Sequence
  Description of Artificial Sequence: Synthetic oligonucleotide
  Sense Strand Starting at position 678 of SEQ ID NO: 317952
gggagugucacauacagca

SEQ ID NO: 371998 - RNA, 19 nt, Artificial Sequence
  Description of Artificial Sequence: Synthetic oligonucleotide
  Antisense Strand to SEQ ID NO: 371997
ugcuguaugugacacuccc

SEQ ID NO: 371999 - RNA, 19 nt, Artificial Sequence
  Description of Artificial Sequence: Synthetic oligonucleotide
  Sense Strand Starting at position 678 of SEQ ID NO: 318003
aagaauauccuguguguau

SEQ ID NO: 372000 - RNA, 19 nt, Artificial Sequence
  Description of Artificial Sequence: Synthetic oligonucleotide
  Antisense Strand to SEQ ID NO: 371999
auacacacaggauauucuu

SEQ ID NO: 372001 - RNA, 19 nt, Artificial Sequence
  Description of Artificial Sequence: Synthetic oligonucleotide
  Sense Strand Starting at position 678 of SEQ ID NO: 318004
agaauauccuguguguaug

SEQ ID NO: 372002 - RNA, 19 nt, Artificial Sequence
  Description of Artificial Sequence: Synthetic oligonucleotide
  Antisense Strand to SEQ ID NO: 372001
cauacacacaggauauucu

SEQ ID NO: 372003 - RNA, 19 nt, Artificial Sequence
  Description of Artificial Sequence: Synthetic oligonucleotide
  Sense Strand Starting at position 678 of SEQ ID NO: 318024
augugaacuuagcccaaga

SEQ ID NO: 372004 - RNA, 19 nt, Artificial Sequence
  Description of Artificial Sequence: Synthetic oligonucleotide
  Antisense Strand to SEQ ID NO: 372003
ucuugggcuaaguucacau

SEQ ID NO: 372005 - RNA, 19 nt, Artificial Sequence
  Description of Artificial Sequence: Synthetic oligonucleotide
  Sense Strand Starting at position 678 of SEQ ID NO: 318026
gugaacuuagcccaagagu

SEQ ID NO: 372006 - RNA, 19 nt, Artificial Sequence
  Description of Artificial Sequence: Synthetic oligonucleotide
  Antisense Strand to SEQ ID NO: 372005
acucuugggcuaaguucac

SEQ ID NO: 372007 - RNA, 19 nt, Artificial Sequence
  Description of Artificial Sequence: Synthetic oligonucleotide
  Sense Strand Starting at position 678 of SEQ ID NO: 318422
aggugagucugaccaauau

SEQ ID NO: 372008 - RNA, 19 nt, Artificial Sequence
  Description of Artificial Sequence: Synthetic oligonucleotide
  Antisense Strand to SEQ ID NO: 372007
auauuggucagacucaccu

SEQ ID NO: 372009 - RNA, 19 nt, Artificial Sequence
  Description of Artificial Sequence: Synthetic oligonucleotide
  Sense Strand Starting at position 678 of SEQ ID NO: 318433
accaauaugugacucugaa

SEQ ID NO: 372010 - RNA, 19 nt, Artificial Sequence
  Description of Artificial Sequence: Synthetic oligonucleotide
  Antisense Strand to SEQ ID NO: 372009
uucagagucacauauuggu

SEQ ID NO: 372011 - RNA, 19 nt, Artificial Sequence
  Description of Artificial Sequence: Synthetic oligonucleotide
  Sense Strand Starting at position 678 of SEQ ID NO: 318447
cugaaaucugcuuauucug

SEQ ID NO: 372012 - RNA, 19 nt, Artificial Sequence
  Description of Artificial Sequence: Synthetic oligonucleotide
  Antisense Strand to SEQ ID NO: 372011
cagaauaagcagauuucag

SEQ ID NO: 372013 - RNA, 19 nt, Artificial Sequence
  Description of Artificial Sequence: Synthetic oligonucleotide
  Sense Strand Starting at position 678 of SEQ ID NO: 318476
cuugacucugcuuagacua

SEQ ID NO: 372014 - RNA, 19 nt, Artificial Sequence
  Description of Artificial Sequence: Synthetic oligonucleotide
  Antisense Strand to SEQ ID NO: 372013
uagucuaagcagagucaag

SEQ ID NO: 372015 - RNA, 19 nt, Artificial Sequence
  Description of Artificial Sequence: Synthetic oligonucleotide
  Sense Strand Starting at position 678 of SEQ ID NO: 318486
cuuagacuacuugguacua

SEQ ID NO: 372016 - RNA, 19 nt, Artificial Sequence
  Description of Artificial Sequence: Synthetic oligonucleotide
  Antisense Strand to SEQ ID NO: 372015
uaguaccaaguagucuaag

SEQ ID NO: 372017 - RNA, 19 nt, Artificial Sequence
  Description of Artificial Sequence: Synthetic oligonucleotide
  Sense Strand Starting at position 678 of SEQ ID NO: 318487
uuagacuacuugguacuaa

SEQ ID NO: 372018 - RNA, 19 nt, Artificial Sequence
  Description of Artificial Sequence: Synthetic oligonucleotide
  Antisense Strand to SEQ ID NO: 372017
uuaguaccaaguagucuaa

SEQ ID NO: 372019 - RNA, 19 nt, Artificial Sequence
  Description of Artificial Sequence: Synthetic oligonucleotide
  Sense Strand Starting at position 678 of SEQ ID NO: 318574
ggcaccuagccauggagaa

SEQ ID NO: 372020 - RNA, 19 nt, Artificial Sequence
  Description of Artificial Sequence: Synthetic oligonucleotide
  Antisense Strand to SEQ ID NO: 372019
uucuccauggcuaggugcc

SEQ ID NO: 372021 - RNA, 19 nt, Artificial Sequence
  Description of Artificial Sequence: Synthetic oligonucleotide
  Sense Strand Starting at position 678 of SEQ ID NO: 318679
gaggcuaaucagggaucau

SEQ ID NO: 372022 - RNA, 19 nt, Artificial Sequence
  Description of Artificial Sequence: Synthetic oligonucleotide
  Antisense Strand to SEQ ID NO: 372021
augaucccugauuagccuc

SEQ ID NO: 372023 - RNA, 19 nt, Artificial Sequence
  Description of Artificial Sequence: Synthetic oligonucleotide
  Sense Strand Starting at position 678 of SEQ ID NO: 318773
ggucucucauuguuuggaa

SEQ ID NO: 372024 - RNA, 19 nt, Artificial Sequence
  Description of Artificial Sequence: Synthetic oligonucleotide
  Antisense Strand to SEQ ID NO: 372023
uuccaaacaaugagagacc

SEQ ID NO: 372025 - RNA, 19 nt, Artificial Sequence
  Description of Artificial Sequence: Synthetic oligonucleotide
  Sense Strand Starting at position 678 of SEQ ID NO: 318774
gucucucauuguuuggaaa

SEQ ID NO: 372026 - RNA, 19 nt, Artificial Sequence
  Description of Artificial Sequence: Synthetic oligonucleotide
  Antisense Strand to SEQ ID NO: 372025
uuuccaaacaaugagagac

SEQ ID NO: 372027 - RNA, 19 nt, Artificial Sequence
  Description of Artificial Sequence: Synthetic oligonucleotide
  Sense Strand Starting at position 678 of SEQ ID NO: 318775
ucucucauuguuuggaaac

SEQ ID NO: 372028 - RNA, 19 nt, Artificial Sequence
  Description of Artificial Sequence: Synthetic oligonucleotide
  Antisense Strand to SEQ ID NO: 372027
guuuccaaacaaugagaga

SEQ ID NO: 372029 - RNA, 19 nt, Artificial Sequence
  Description of Artificial Sequence: Synthetic oligonucleotide
  Sense Strand Starting at position 678 of SEQ ID NO: 318892
ugaagcaucuuuguaccua

SEQ ID NO: 372030 - RNA, 19 nt, Artificial Sequence
  Description of Artificial Sequence: Synthetic oligonucleotide
  Antisense Strand to SEQ ID NO: 372029
uagguacaaagaugcuuca

SEQ ID NO: 372031 - RNA, 19 nt, Artificial Sequence
  Description of Artificial Sequence: Synthetic oligonucleotide
  Sense Strand Starting at position 678 of SEQ ID NO: 319050
caguguuggcaagaacaca

SEQ ID NO: 372032 - RNA, 19 nt, Artificial Sequence
  Description of Artificial Sequence: Synthetic oligonucleotide
  Antisense Strand to SEQ ID NO: 372031
uguguucuugccaacacug

SEQ ID NO: 372033 - RNA, 19 nt, Artificial Sequence
  Description of Artificial Sequence: Synthetic oligonucleotide
  Sense Strand Starting at position 679 of SEQ ID NO: 315542
uguccucuuccuggaauau

SEQ ID NO: 372034 - RNA, 19 nt, Artificial Sequence
  Description of Artificial Sequence: Synthetic oligonucleotide
  Antisense Strand to SEQ ID NO: 372033
auauuccaggaagaggaca

SEQ ID NO: 372035 - RNA, 19 nt, Artificial Sequence
  Description of Artificial Sequence: Synthetic oligonucleotide
  Sense Strand Starting at position 679 of SEQ ID NO: 315543
guccucuuccuggaauauc

SEQ ID NO: 372036 - RNA, 19 nt, Artificial Sequence
  Description of Artificial Sequence: Synthetic oligonucleotide
  Antisense Strand to SEQ ID NO: 372035
gauauuccaggaagaggac

SEQ ID NO: 372037 - RNA, 19 nt, Artificial Sequence
  Description of Artificial Sequence: Synthetic oligonucleotide
  Sense Strand Starting at position 679 of SEQ ID NO: 315611
auacuugcauuguuagaag

SEQ ID NO: 372038 - RNA, 19 nt, Artificial Sequence
  Description of Artificial Sequence: Synthetic oligonucleotide
  Antisense Strand to SEQ ID NO: 372037
cuucuaacaaugcaaguau

SEQ ID NO: 372039 - RNA, 19 nt, Artificial Sequence
  Description of Artificial Sequence: Synthetic oligonucleotide
  Sense Strand Starting at position 679 of SEQ ID NO: 315629
guaugcaucucauuugguu

SEQ ID NO: 372040 - RNA, 19 nt, Artificial Sequence
  Description of Artificial Sequence: Synthetic oligonucleotide
  Antisense Strand to SEQ ID NO: 372039
aaccaaaugagaugcauac

SEQ ID NO: 372041 - RNA, 19 nt, Artificial Sequence
  Description of Artificial Sequence: Synthetic oligonucleotide
  Sense Strand Starting at position 679 of SEQ ID NO: 315670
uggugaaagccuuaggucu

SEQ ID NO: 372042 - RNA, 19 nt, Artificial Sequence
  Description of Artificial Sequence: Synthetic oligonucleotide
  Antisense Strand to SEQ ID NO: 372041
agaccuaaggcuuucacca

SEQ ID NO: 372043 - RNA, 19 nt, Artificial Sequence
  Description of Artificial Sequence: Synthetic oligonucleotide
  Sense Strand Starting at position 679 of SEQ ID NO: 315693
aaaggcaugucaccaugaa

SEQ ID NO: 372044 - RNA, 19 nt, Artificial Sequence
  Description of Artificial Sequence: Synthetic oligonucleotide
  Antisense Strand to SEQ ID NO: 372043
uucauggugacaugccuuu

SEQ ID NO: 372045 - RNA, 19 nt, Artificial Sequence
  Description of Artificial Sequence: Synthetic oligonucleotide
  Sense Strand Starting at position 679 of SEQ ID NO: 315694
aaggcaugucaccaugaau

SEQ ID NO: 372046 - RNA, 19 nt, Artificial Sequence
  Description of Artificial Sequence: Synthetic oligonucleotide
  Antisense Strand to SEQ ID NO: 372045
auucauggugacaugccuu

SEQ ID NO: 372047 - RNA, 19 nt, Artificial Sequence
  Description of Artificial Sequence: Synthetic oligonucleotide
  Sense Strand Starting at position 679 of SEQ ID NO: 315697
gcaugucaccaugaaugua

SEQ ID NO: 372048 - RNA, 19 nt, Artificial Sequence
  Description of Artificial Sequence: Synthetic oligonucleotide
  Antisense Strand to SEQ ID NO: 372047
uacauucauggugacaugc

SEQ ID NO: 372049 - RNA, 19 nt, Artificial Sequence
  Description of Artificial Sequence: Synthetic oligonucleotide
  Sense Strand Starting at position 679 of SEQ ID NO: 315834
cuggaucugugaucuuaaa

SEQ ID NO: 372050 - RNA, 19 nt, Artificial Sequence
  Description of Artificial Sequence: Synthetic oligonucleotide
  Antisense Strand to SEQ ID NO: 372049
uuuaagaucacagauccag

SEQ ID NO: 372051 - RNA, 19 nt, Artificial Sequence
  Description of Artificial Sequence: Synthetic oligonucleotide
  Sense Strand Starting at position 679 of SEQ ID NO: 315872
ugaaacagcguuuaauucu

SEQ ID NO: 372052 - RNA, 19 nt, Artificial Sequence
  Description of Artificial Sequence: Synthetic oligonucleotide
  Antisense Strand to SEQ ID NO: 372051
agaauuaaacgcuguuuca

SEQ ID NO: 372053 - RNA, 19 nt, Artificial Sequence
  Description of Artificial Sequence: Synthetic oligonucleotide
  Sense Strand Starting at position 679 of SEQ ID NO: 315981
ggcagauuacugcaaagca

SEQ ID NO: 372054 - RNA, 19 nt, Artificial Sequence
  Description of Artificial Sequence: Synthetic oligonucleotide
  Antisense Strand to SEQ ID NO: 372053
ugcuuugcaguaaucugcc

SEQ ID NO: 372055 - RNA, 19 nt, Artificial Sequence
  Description of Artificial Sequence: Synthetic oligonucleotide
  Sense Strand Starting at position 679 of SEQ ID NO: 316260
aaacaaaccucguuaguga

SEQ ID NO: 372056 - RNA, 19 nt, Artificial Sequence
  Description of Artificial Sequence: Synthetic oligonucleotide
  Antisense Strand to SEQ ID NO: 372055
ucacuaacgagguuuguuu

SEQ ID NO: 372057 - RNA, 19 nt, Artificial Sequence
  Description of Artificial Sequence: Synthetic oligonucleotide
  Sense Strand Starting at position 679 of SEQ ID NO: 316261
aacaaaccucguuagugau

SEQ ID NO: 372058 - RNA, 19 nt, Artificial Sequence
  Description of Artificial Sequence: Synthetic oligonucleotide
  Antisense Strand to SEQ ID NO: 372057
aucacuaacgagguuuguu

SEQ ID NO: 372059 - RNA, 19 nt, Artificial Sequence
  Description of Artificial Sequence: Synthetic oligonucleotide
  Sense Strand Starting at position 679 of SEQ ID NO: 316451
ggucaaagggucugauaag

SEQ ID NO: 372060 - RNA, 19 nt, Artificial Sequence
  Description of Artificial Sequence: Synthetic oligonucleotide
  Antisense Strand to SEQ ID NO: 372059
cuuaucagacccuuugacc

SEQ ID NO: 372061 - RNA, 19 nt, Artificial Sequence
  Description of Artificial Sequence: Synthetic oligonucleotide
  Sense Strand Starting at position 679 of SEQ ID NO: 316516
uuuguugguccagaucaga

SEQ ID NO: 372062 - RNA, 19 nt, Artificial Sequence
  Description of Artificial Sequence: Synthetic oligonucleotide
  Antisense Strand to SEQ ID NO: 372061
ucugaucuggaccaacaaa

SEQ ID NO: 372063 - RNA, 19 nt, Artificial Sequence
  Description of Artificial Sequence: Synthetic oligonucleotide
  Sense Strand Starting at position 679 of SEQ ID NO: 316570
uuugaaugguuucuacagu

SEQ ID NO: 372064 - RNA, 19 nt, Artificial Sequence
  Description of Artificial Sequence: Synthetic oligonucleotide
  Antisense Strand to SEQ ID NO: 372063
acuguagaaaccauucaaa

SEQ ID NO: 372065 - RNA, 19 nt, Artificial Sequence
  Description of Artificial Sequence: Synthetic oligonucleotide
  Sense Strand Starting at position 679 of SEQ ID NO: 317440
cucugaagacucuaguuuc

SEQ ID NO: 372066 - RNA, 19 nt, Artificial Sequence
  Description of Artificial Sequence: Synthetic oligonucleotide
  Antisense Strand to SEQ ID NO: 372065
gaaacuagagucuucagag

SEQ ID NO: 372067 - RNA, 19 nt, Artificial Sequence
  Description of Artificial Sequence: Synthetic oligonucleotide
  Sense Strand Starting at position 679 of SEQ ID NO: 317454
guuuccuguccaugggaaa

SEQ ID NO: 372068 - RNA, 19 nt, Artificial Sequence
  Description of Artificial Sequence: Synthetic oligonucleotide
  Antisense Strand to SEQ ID NO: 372067
uuucccauggacaggaaac

SEQ ID NO: 372069 - RNA, 19 nt, Artificial Sequence
  Description of Artificial Sequence: Synthetic oligonucleotide
  Sense Strand Starting at position 679 of SEQ ID NO: 317608
caggaagaggcuugcucau

SEQ ID NO: 372070 - RNA, 19 nt, Artificial Sequence
  Description of Artificial Sequence: Synthetic oligonucleotide
  Antisense Strand to SEQ ID NO: 372069
augagcaagccucuuccug

SEQ ID NO: 372071 - RNA, 19 nt, Artificial Sequence
  Description of Artificial Sequence: Synthetic oligonucleotide
  Sense Strand Starting at position 679 of SEQ ID NO: 317670
guaugagaaucugcaaacu

SEQ ID NO: 372072 - RNA, 19 nt, Artificial Sequence
  Description of Artificial Sequence: Synthetic oligonucleotide
  Antisense Strand to SEQ ID NO: 372071
aguuugcagauucucauac

SEQ ID NO: 372073 - RNA, 19 nt, Artificial Sequence
  Description of Artificial Sequence: Synthetic oligonucleotide
  Sense Strand Starting at position 679 of SEQ ID NO: 317713
uaauuuggaucaggagaaa

SEQ ID NO: 372074 - RNA, 19 nt, Artificial Sequence
  Description of Artificial Sequence: Synthetic oligonucleotide
  Antisense Strand to SEQ ID NO: 372073
uuucuccugauccaaauua

SEQ ID NO: 372075 - RNA, 19 nt, Artificial Sequence
  Description of Artificial Sequence: Synthetic oligonucleotide
  Sense Strand Starting at position 679 of SEQ ID NO: 317882
ugguauguggucuaccuca

SEQ ID NO: 372076 - RNA, 19 nt, Artificial Sequence
  Description of Artificial Sequence: Synthetic oligonucleotide
  Antisense Strand to SEQ ID NO: 372075
ugagguagaccacauacca

SEQ ID NO: 372077 - RNA, 19 nt, Artificial Sequence
  Description of Artificial Sequence: Synthetic oligonucleotide
  Sense Strand Starting at position 679 of SEQ ID NO: 317901
uugcaaugggccuauaaac

SEQ ID NO: 372078 - RNA, 19 nt, Artificial Sequence
  Description of Artificial Sequence: Synthetic oligonucleotide
  Antisense Strand to SEQ ID NO: 372077
guuuauaggcccauugcaa

SEQ ID NO: 372079 - RNA, 19 nt, Artificial Sequence
  Description of Artificial Sequence: Synthetic oligonucleotide
  Sense Strand Starting at position 679 of SEQ ID NO: 317927
uguagaaguacagguuuau

SEQ ID NO: 372080 - RNA, 19 nt, Artificial Sequence
  Description of Artificial Sequence: Synthetic oligonucleotide
  Antisense Strand to SEQ ID NO: 372079
auaaaccuguacuucuaca

SEQ ID NO: 372081 - RNA, 19 nt, Artificial Sequence
  Description of Artificial Sequence: Synthetic oligonucleotide
  Sense Strand Starting at position 679 of SEQ ID NO: 317931
gaaguacagguuuauccuu

SEQ ID NO: 372082 - RNA, 19 nt, Artificial Sequence
  Description of Artificial Sequence: Synthetic oligonucleotide
  Antisense Strand to SEQ ID NO: 372081
aaggauaaaccuguacuuc

SEQ ID NO: 372083 - RNA, 19 nt, Artificial Sequence
  Description of Artificial Sequence: Synthetic oligonucleotide
  Sense Strand Starting at position 679 of SEQ ID NO: 317958
uagguuaauugggcuagga

SEQ ID NO: 372084 - RNA, 19 nt, Artificial Sequence
  Description of Artificial Sequence: Synthetic oligonucleotide
  Antisense Strand to SEQ ID NO: 372083
uccuagcccaauuaaccua

SEQ ID NO: 372085 - RNA, 19 nt, Artificial Sequence
  Description of Artificial Sequence: Synthetic oligonucleotide
  Sense Strand Starting at position 679 of SEQ ID NO: 317960
gguuaauugggcuaggaua

SEQ ID NO: 372086 - RNA, 19 nt, Artificial Sequence
  Description of Artificial Sequence: Synthetic oligonucleotide
  Antisense Strand to SEQ ID NO: 372085
uauccuagcccaauuaacc

SEQ ID NO: 372087 - RNA, 19 nt, Artificial Sequence
  Description of Artificial Sequence: Synthetic oligonucleotide
  Sense Strand Starting at position 679 of SEQ ID NO: 318347
ggaccuuuaacuugguagu

SEQ ID NO: 372088 - RNA, 19 nt, Artificial Sequence
  Description of Artificial Sequence: Synthetic oligonucleotide
  Antisense Strand to SEQ ID NO: 372087
acuaccaaguuaaaggucc

SEQ ID NO: 372089 - RNA, 19 nt, Artificial Sequence
  Description of Artificial Sequence: Synthetic oligonucleotide
  Sense Strand Starting at position 679 of SEQ ID NO: 318348
gaccuuuaacuugguagua

SEQ ID NO: 372090 - RNA, 19 nt, Artificial Sequence
  Description of Artificial Sequence: Synthetic oligonucleotide
  Antisense Strand to SEQ ID NO: 372089
uacuaccaaguuaaagguc

SEQ ID NO: 372091 - RNA, 19 nt, Artificial Sequence
  Description of Artificial Sequence: Synthetic oligonucleotide
  Sense Strand Starting at position 679 of SEQ ID NO: 318349
accuuuaacuugguaguaa

SEQ ID NO: 372092 - RNA, 19 nt, Artificial Sequence
  Description of Artificial Sequence: Synthetic oligonucleotide
  Antisense Strand to SEQ ID NO: 372091
uuacuaccaaguuaaaggu

SEQ ID NO: 372093 - RNA, 19 nt, Artificial Sequence
  Description of Artificial Sequence: Synthetic oligonucleotide
  Sense Strand Starting at position 679 of SEQ ID NO: 318380
agacucuugagguguaucu

SEQ ID NO: 372094 - RNA, 19 nt, Artificial Sequence
  Description of Artificial Sequence: Synthetic oligonucleotide
  Antisense Strand to SEQ ID NO: 372093
agauacaccucaagagucu

SEQ ID NO: 372095 - RNA, 19 nt, Artificial Sequence
  Description of Artificial Sequence: Synthetic oligonucleotide
  Sense Strand Starting at position 679 of SEQ ID NO: 318395
aucucuuucugauuaugua

SEQ ID NO: 372096 - RNA, 19 nt, Artificial Sequence
  Description of Artificial Sequence: Synthetic oligonucleotide
  Antisense Strand to SEQ ID NO: 372095
uacauaaucagaaagagau

SEQ ID NO: 372097 - RNA, 19 nt, Artificial Sequence
  Description of Artificial Sequence: Synthetic oligonucleotide
  Sense Strand Starting at position 679 of SEQ ID NO: 318399
cuuucugauuauguagauu

SEQ ID NO: 372098 - RNA, 19 nt, Artificial Sequence
  Description of Artificial Sequence: Synthetic oligonucleotide
  Antisense Strand to SEQ ID NO: 372097
aaucuacauaaucagaaag

SEQ ID NO: 372099 - RNA, 19 nt, Artificial Sequence
  Description of Artificial Sequence: Synthetic oligonucleotide
  Sense Strand Starting at position 679 of SEQ ID NO: 318420
gcaguaaaucuggauucug

SEQ ID NO: 372100 - RNA, 19 nt, Artificial Sequence
  Description of Artificial Sequence: Synthetic oligonucleotide
  Antisense Strand to SEQ ID NO: 372099
cagaauccagauuuacugc

SEQ ID NO: 372101 - RNA, 19 nt, Artificial Sequence
  Description of Artificial Sequence: Synthetic oligonucleotide
  Sense Strand Starting at position 679 of SEQ ID NO: 318461
uuauuauugucuccuggga

SEQ ID NO: 372102 - RNA, 19 nt, Artificial Sequence
  Description of Artificial Sequence: Synthetic oligonucleotide
  Antisense Strand to SEQ ID NO: 372101
ucccaggagacaauaauaa

SEQ ID NO: 372103 - RNA, 19 nt, Artificial Sequence
  Description of Artificial Sequence: Synthetic oligonucleotide
  Sense Strand Starting at position 679 of SEQ ID NO: 318581
ugagaaauuugcuuugcga

SEQ ID NO: 372104 - RNA, 19 nt, Artificial Sequence
  Description of Artificial Sequence: Synthetic oligonucleotide
  Antisense Strand to SEQ ID NO: 372103
ucgcaaagcaaauuucuca

SEQ ID NO: 372105 - RNA, 19 nt, Artificial Sequence
  Description of Artificial Sequence: Synthetic oligonucleotide
  Sense Strand Starting at position 679 of SEQ ID NO: 318584
gaaauuugcuuugcgagac

SEQ ID NO: 372106 - RNA, 19 nt, Artificial Sequence
  Description of Artificial Sequence: Synthetic oligonucleotide
  Antisense Strand to SEQ ID NO: 372105
gucucgcaaagcaaauuuc

SEQ ID NO: 372107 - RNA, 19 nt, Artificial Sequence
  Description of Artificial Sequence: Synthetic oligonucleotide
  Sense Strand Starting at position 679 of SEQ ID NO: 319012
cacugucuccugggauaaa

SEQ ID NO: 372108 - RNA, 19 nt, Artificial Sequence
  Description of Artificial Sequence: Synthetic oligonucleotide
  Antisense Strand to SEQ ID NO: 372107
uuuaucccaggagacagug

SEQ ID NO: 372109 - RNA, 19 nt, Artificial Sequence
  Description of Artificial Sequence: Synthetic oligonucleotide
  Sense Strand Starting at position 679 of SEQ ID NO: 319140
caguauuugucuuauuugu

SEQ ID NO: 372110 - RNA, 19 nt, Artificial Sequence
  Description of Artificial Sequence: Synthetic oligonucleotide
  Antisense Strand to SEQ ID NO: 372109
acaaauaagacaaauacug

SEQ ID NO: 372111 - RNA, 19 nt, Artificial Sequence
  Description of Artificial Sequence: Synthetic oligonucleotide
  Sense Strand Starting at position 679 of SEQ ID NO: 319174
guagaagacugcccauauu

SEQ ID NO: 372112 - RNA, 19 nt, Artificial Sequence
  Description of Artificial Sequence: Synthetic oligonucleotide
  Antisense Strand to SEQ ID NO: 372111
aauaugggcagucuucuac

SEQ ID NO: 372113 - RNA, 19 nt, Artificial Sequence
  Description of Artificial Sequence: Synthetic oligonucleotide
  Sense Strand Starting at position 680 of SEQ ID NO: 315258
ugucccauuccucagacua

SEQ ID NO: 372114 - RNA, 19 nt, Artificial Sequence
  Description of Artificial Sequence: Synthetic oligonucleotide
  Antisense Strand to SEQ ID NO: 372113
uagucugaggaaugggaca

SEQ ID NO: 372115 - RNA, 19 nt, Artificial Sequence
  Description of Artificial Sequence: Synthetic oligonucleotide
  Sense Strand Starting at position 680 of SEQ ID NO: 315446
uggcacuugggcuggaaua

SEQ ID NO: 372116 - RNA, 19 nt, Artificial Sequence
  Description of Artificial Sequence: Synthetic oligonucleotide
  Antisense Strand to SEQ ID NO: 372115
uauuccagcccaagugcca

SEQ ID NO: 372117 - RNA, 19 nt, Artificial Sequence
  Description of Artificial Sequence: Synthetic oligonucleotide
  Sense Strand Starting at position 680 of SEQ ID NO: 315447
ggcacuugggcuggaauau

SEQ ID NO: 372118 - RNA, 19 nt, Artificial Sequence
  Description of Artificial Sequence: Synthetic oligonucleotide
  Antisense Strand to SEQ ID NO: 372117
auauuccagcccaagugcc

SEQ ID NO: 372119 - RNA, 19 nt, Artificial Sequence
  Description of Artificial Sequence: Synthetic oligonucleotide
  Sense Strand Starting at position 680 of SEQ ID NO: 315457
cuggaauaugcuuaguucu

SEQ ID NO: 372120 - RNA, 19 nt, Artificial Sequence
  Description of Artificial Sequence: Synthetic oligonucleotide
  Antisense Strand to SEQ ID NO: 372119
agaacuaagcauauuccag

SEQ ID NO: 372121 - RNA, 19 nt, Artificial Sequence
  Description of Artificial Sequence: Synthetic oligonucleotide
  Sense Strand Starting at position 680 of SEQ ID NO: 315488
ugcauuggauuguuuagga

SEQ ID NO: 372122 - RNA, 19 nt, Artificial Sequence
  Description of Artificial Sequence: Synthetic oligonucleotide
  Antisense Strand to SEQ ID NO: 372121
uccuaaacaauccaaugca

SEQ ID NO: 372123 - RNA, 19 nt, Artificial Sequence
  Description of Artificial Sequence: Synthetic oligonucleotide
  Sense Strand Starting at position 680 of SEQ ID NO: 315674
acucucaagcuguaugauu

SEQ ID NO: 372124 - RNA, 19 nt, Artificial Sequence
  Description of Artificial Sequence: Synthetic oligonucleotide
  Antisense Strand to SEQ ID NO: 372123
aaucauacagcuugagagu

SEQ ID NO: 372125 - RNA, 19 nt, Artificial Sequence
  Description of Artificial Sequence: Synthetic oligonucleotide
  Sense Strand Starting at position 680 of SEQ ID NO: 315688
ugauuaguugcagacauga

SEQ ID NO: 372126 - RNA, 19 nt, Artificial Sequence
  Description of Artificial Sequence: Synthetic oligonucleotide
  Antisense Strand to SEQ ID NO: 372125
ucaugucugcaacuaauca

SEQ ID NO: 372127 - RNA, 19 nt, Artificial Sequence
  Description of Artificial Sequence: Synthetic oligonucleotide
  Sense Strand Starting at position 680 of SEQ ID NO: 315748
agagcucagacuugggaau

SEQ ID NO: 372128 - RNA, 19 nt, Artificial Sequence
  Description of Artificial Sequence: Synthetic oligonucleotide
  Antisense Strand to SEQ ID NO: 372127
auucccaagucugagcucu

SEQ ID NO: 372129 - RNA, 19 nt, Artificial Sequence
  Description of Artificial Sequence: Synthetic oligonucleotide
  Sense Strand Starting at position 680 of SEQ ID NO: 315798
cccucaguggcugagauau

SEQ ID NO: 372130 - RNA, 19 nt, Artificial Sequence
  Description of Artificial Sequence: Synthetic oligonucleotide
  Antisense Strand to SEQ ID NO: 372129
auaucucagccacugaggg

SEQ ID NO: 372131 - RNA, 19 nt, Artificial Sequence
  Description of Artificial Sequence: Synthetic oligonucleotide
  Sense Strand Starting at position 680 of SEQ ID NO: 315817
cagugaucccagcaguaau

SEQ ID NO: 372132 - RNA, 19 nt, Artificial Sequence
  Description of Artificial Sequence: Synthetic oligonucleotide
  Antisense Strand to SEQ ID NO: 372131
auuacugcugggaucacug

SEQ ID NO: 372133 - RNA, 19 nt, Artificial Sequence
  Description of Artificial Sequence: Synthetic oligonucleotide
  Sense Strand Starting at position 680 of SEQ ID NO: 315920
uuugaagaguaagugaauu

SEQ ID NO: 372134 - RNA, 19 nt, Artificial Sequence
  Description of Artificial Sequence: Synthetic oligonucleotide
  Antisense Strand to SEQ ID NO: 372133
aauucacuuacucuucaaa

SEQ ID NO: 372135 - RNA, 19 nt, Artificial Sequence
  Description of Artificial Sequence: Synthetic oligonucleotide
  Sense Strand Starting at position 680 of SEQ ID NO: 316318
gguggagacuuucuaacua

SEQ ID NO: 372136 - RNA, 19 nt, Artificial Sequence
  Description of Artificial Sequence: Synthetic oligonucleotide
  Antisense Strand to SEQ ID NO: 372135
uaguuagaaagucuccacc

SEQ ID NO: 372137 - RNA, 19 nt, Artificial Sequence
  Description of Artificial Sequence: Synthetic oligonucleotide
  Sense Strand Starting at position 680 of SEQ ID NO: 316432
acuaaucuccaguggauuc

SEQ ID NO: 372138 - RNA, 19 nt, Artificial Sequence
  Description of Artificial Sequence: Synthetic oligonucleotide
  Antisense Strand to SEQ ID NO: 372137
gaauccacuggagauuagu

SEQ ID NO: 372139 - RNA, 19 nt, Artificial Sequence
  Description of Artificial Sequence: Synthetic oligonucleotide
  Sense Strand Starting at position 680 of SEQ ID NO: 316831
gaguguaagcaccaggaau

SEQ ID NO: 372140 - RNA, 19 nt, Artificial Sequence
  Description of Artificial Sequence: Synthetic oligonucleotide
  Antisense Strand to SEQ ID NO: 372139
auuccuggugcuuacacuc

SEQ ID NO: 372141 - RNA, 19 nt, Artificial Sequence
  Description of Artificial Sequence: Synthetic oligonucleotide
  Sense Strand Starting at position 680 of SEQ ID NO: 317031
ggguauugucaugcccguu

SEQ ID NO: 372142 - RNA, 19 nt, Artificial Sequence
  Description of Artificial Sequence: Synthetic oligonucleotide
  Antisense Strand to SEQ ID NO: 372141
aacgggcaugacaauaccc

SEQ ID NO: 372143 - RNA, 19 nt, Artificial Sequence
  Description of Artificial Sequence: Synthetic oligonucleotide
  Sense Strand Starting at position 680 of SEQ ID NO: 317032
gguauugucaugcccguua

SEQ ID NO: 372144 - RNA, 19 nt, Artificial Sequence
  Description of Artificial Sequence: Synthetic oligonucleotide
  Antisense Strand to SEQ ID NO: 372143
uaacgggcaugacaauacc

SEQ ID NO: 372145 - RNA, 19 nt, Artificial Sequence
  Description of Artificial Sequence: Synthetic oligonucleotide
  Sense Strand Starting at position 680 of SEQ ID NO: 317247
aagaguucuccaugacaug

SEQ ID NO: 372146 - RNA, 19 nt, Artificial Sequence
  Description of Artificial Sequence: Synthetic oligonucleotide
  Antisense Strand to SEQ ID NO: 372145
caugucauggagaacucuu

SEQ ID NO: 372147 - RNA, 19 nt, Artificial Sequence
  Description of Artificial Sequence: Synthetic oligonucleotide
  Sense Strand Starting at position 680 of SEQ ID NO: 317258
augacaugcucuucuagaa

SEQ ID NO: 372148 - RNA, 19 nt, Artificial Sequence
  Description of Artificial Sequence: Synthetic oligonucleotide
  Antisense Strand to SEQ ID NO: 372147
uucuagaagagcaugucau

SEQ ID NO: 372149 - RNA, 19 nt, Artificial Sequence
  Description of Artificial Sequence: Synthetic oligonucleotide
  Sense Strand Starting at position 680 of SEQ ID NO: 317294
guugcuaugcaccaggaua

SEQ ID NO: 372150 - RNA, 19 nt, Artificial Sequence
  Description of Artificial Sequence: Synthetic oligonucleotide
  Antisense Strand to SEQ ID NO: 372149
uauccuggugcauagcaac

SEQ ID NO: 372151 - RNA, 19 nt, Artificial Sequence
  Description of Artificial Sequence: Synthetic oligonucleotide
  Sense Strand Starting at position 680 of SEQ ID NO: 317302
gcaccaggauauucugaaa

SEQ ID NO: 372152 - RNA, 19 nt, Artificial Sequence
  Description of Artificial Sequence: Synthetic oligonucleotide
  Antisense Strand to SEQ ID NO: 372151
uuucagaauauccuggugc

SEQ ID NO: 372153 - RNA, 19 nt, Artificial Sequence
  Description of Artificial Sequence: Synthetic oligonucleotide
  Sense Strand Starting at position 680 of SEQ ID NO: 317358
ucuauugcugcugaaauac

SEQ ID NO: 372154 - RNA, 19 nt, Artificial Sequence
  Description of Artificial Sequence: Synthetic oligonucleotide
  Antisense Strand to SEQ ID NO: 372153
guauuucagcagcaauaga

SEQ ID NO: 372155 - RNA, 19 nt, Artificial Sequence
  Description of Artificial Sequence: Synthetic oligonucleotide
  Sense Strand Starting at position 680 of SEQ ID NO: 317425
uucuauagcccugaaguca

SEQ ID NO: 372156 - RNA, 19 nt, Artificial Sequence
  Description of Artificial Sequence: Synthetic oligonucleotide
  Antisense Strand to SEQ ID NO: 372155
ugacuucagggcuauagaa

SEQ ID NO: 372157 - RNA, 19 nt, Artificial Sequence
  Description of Artificial Sequence: Synthetic oligonucleotide
  Sense Strand Starting at position 680 of SEQ ID NO: 317547
agaauaaaguuucugcagu

SEQ ID NO: 372158 - RNA, 19 nt, Artificial Sequence
  Description of Artificial Sequence: Synthetic oligonucleotide
  Antisense Strand to SEQ ID NO: 372157
acugcagaaacuuuauucu

SEQ ID NO: 372159 - RNA, 19 nt, Artificial Sequence
  Description of Artificial Sequence: Synthetic oligonucleotide
  Sense Strand Starting at position 680 of SEQ ID NO: 317784
ucaugauuagauuggucca

SEQ ID NO: 372160 - RNA, 19 nt, Artificial Sequence
  Description of Artificial Sequence: Synthetic oligonucleotide
  Antisense Strand to SEQ ID NO: 372159
uggaccaaucuaaucauga

SEQ ID NO: 372161 - RNA, 19 nt, Artificial Sequence
  Description of Artificial Sequence: Synthetic oligonucleotide
  Sense Strand Starting at position 680 of SEQ ID NO: 317907
gugaguguuaccgaacaaa

SEQ ID NO: 372162 - RNA, 19 nt, Artificial Sequence
  Description of Artificial Sequence: Synthetic oligonucleotide
  Antisense Strand to SEQ ID NO: 372161
uuuguucgguaacacucac

SEQ ID NO: 372163 - RNA, 19 nt, Artificial Sequence
  Description of Artificial Sequence: Synthetic oligonucleotide
  Sense Strand Starting at position 680 of SEQ ID NO: 317957
gacacuggguguuugagaa

SEQ ID NO: 372164 - RNA, 19 nt, Artificial Sequence
  Description of Artificial Sequence: Synthetic oligonucleotide
  Antisense Strand to SEQ ID NO: 372163
uucucaaacacccaguguc

SEQ ID NO: 372165 - RNA, 19 nt, Artificial Sequence
  Description of Artificial Sequence: Synthetic oligonucleotide
  Sense Strand Starting at position 680 of SEQ ID NO: 318114
cuaagauuaguaggugauu

SEQ ID NO: 372166 - RNA, 19 nt, Artificial Sequence
  Description of Artificial Sequence: Synthetic oligonucleotide
  Antisense Strand to SEQ ID NO: 372165
aaucaccuacuaaucuuag

SEQ ID NO: 372167 - RNA, 19 nt, Artificial Sequence
  Description of Artificial Sequence: Synthetic oligonucleotide
  Sense Strand Starting at position 680 of SEQ ID NO: 318154
uggaaaguccugggucaua

SEQ ID NO: 372168 - RNA, 19 nt, Artificial Sequence
  Description of Artificial Sequence: Synthetic oligonucleotide
  Antisense Strand to SEQ ID NO: 372167
uaugacccaggacuuucca

SEQ ID NO: 372169 - RNA, 19 nt, Artificial Sequence
  Description of Artificial Sequence: Synthetic oligonucleotide
  Sense Strand Starting at position 680 of SEQ ID NO: 318163
cugggucauaugcaguuau

SEQ ID NO: 372170 - RNA, 19 nt, Artificial Sequence
  Description of Artificial Sequence: Synthetic oligonucleotide
  Antisense Strand to SEQ ID NO: 372169
auaacugcauaugacccag

SEQ ID NO: 372171 - RNA, 19 nt, Artificial Sequence
  Description of Artificial Sequence: Synthetic oligonucleotide
  Sense Strand Starting at position 680 of SEQ ID NO: 318540
gggagaagcccuuauguag

SEQ ID NO: 372172 - RNA, 19 nt, Artificial Sequence
  Description of Artificial Sequence: Synthetic oligonucleotide
  Antisense Strand to SEQ ID NO: 372171
cuacauaagggcuucuccc

SEQ ID NO: 372173 - RNA, 19 nt, Artificial Sequence
  Description of Artificial Sequence: Synthetic oligonucleotide
  Sense Strand Starting at position 680 of SEQ ID NO: 318624
gugacuugagggcaucaga

SEQ ID NO: 372174 - RNA, 19 nt, Artificial Sequence
  Description of Artificial Sequence: Synthetic oligonucleotide
  Antisense Strand to SEQ ID NO: 372173
ucugaugcccucaagucac

SEQ ID NO: 372175 - RNA, 19 nt, Artificial Sequence
  Description of Artificial Sequence: Synthetic oligonucleotide
  Sense Strand Starting at position 680 of SEQ ID NO: 318633
gggcaucagacuggguuau

SEQ ID NO: 372176 - RNA, 19 nt, Artificial Sequence
  Description of Artificial Sequence: Synthetic oligonucleotide
  Antisense Strand to SEQ ID NO: 372175
auaacccagucugaugccc

SEQ ID NO: 372177 - RNA, 19 nt, Artificial Sequence
  Description of Artificial Sequence: Synthetic oligonucleotide
  Sense Strand Starting at position 680 of SEQ ID NO: 318637
aucagacuggguuaucuuu

SEQ ID NO: 372178 - RNA, 19 nt, Artificial Sequence
  Description of Artificial Sequence: Synthetic oligonucleotide
  Antisense Strand to SEQ ID NO: 372177
aaagauaacccagucugau

SEQ ID NO: 372179 - RNA, 19 nt, Artificial Sequence
  Description of Artificial Sequence: Synthetic oligonucleotide
  Sense Strand Starting at position 680 of SEQ ID NO: 318639
cagacuggguuaucuuuaa

SEQ ID NO: 372180 - RNA, 19 nt, Artificial Sequence
  Description of Artificial Sequence: Synthetic oligonucleotide
  Antisense Strand to SEQ ID NO: 372179
uuaaagauaacccagucug

SEQ ID NO: 372181 - RNA, 19 nt, Artificial Sequence
  Description of Artificial Sequence: Synthetic oligonucleotide
  Sense Strand Starting at position 680 of SEQ ID NO: 318643
cuggguuaucuuuaagguc

SEQ ID NO: 372182 - RNA, 19 nt, Artificial Sequence
  Description of Artificial Sequence: Synthetic oligonucleotide
  Antisense Strand to SEQ ID NO: 372181
gaccuuaaagauaacccag

SEQ ID NO: 372183 - RNA, 19 nt, Artificial Sequence
  Description of Artificial Sequence: Synthetic oligonucleotide
  Sense Strand Starting at position 680 of SEQ ID NO: 318757
ugguaauuagucgauuaau

SEQ ID NO: 372184 - RNA, 19 nt, Artificial Sequence
  Description of Artificial Sequence: Synthetic oligonucleotide
  Antisense Strand to SEQ ID NO: 372183
auuaaucgacuaauuacca

SEQ ID NO: 372185 - RNA, 19 nt, Artificial Sequence
  Description of Artificial Sequence: Synthetic oligonucleotide
  Sense Strand Starting at position 680 of SEQ ID NO: 318976
aggcauaauaguggaaaua

SEQ ID NO: 372186 - RNA, 19 nt, Artificial Sequence
  Description of Artificial Sequence: Synthetic oligonucleotide
  Antisense Strand to SEQ ID NO: 372185
uauuuccacuauuaugccu

SEQ ID NO: 372187 - RNA, 19 nt, Artificial Sequence
  Description of Artificial Sequence: Synthetic oligonucleotide
  Sense Strand Starting at position 680 of SEQ ID NO: 318986
guggaaauauucuccucau

SEQ ID NO: 372188 - RNA, 19 nt, Artificial Sequence
  Description of Artificial Sequence: Synthetic oligonucleotide
  Antisense Strand to SEQ ID NO: 372187
augaggagaauauuuccac

SEQ ID NO: 372189 - RNA, 19 nt, Artificial Sequence
  Description of Artificial Sequence: Synthetic oligonucleotide
  Sense Strand Starting at position 680 of SEQ ID NO: 319152
uugcucugacaauagauca

SEQ ID NO: 372190 - RNA, 19 nt, Artificial Sequence
  Description of Artificial Sequence: Synthetic oligonucleotide
  Antisense Strand to SEQ ID NO: 372189
ugaucuauugucagagcaa

SEQ ID NO: 372191 - RNA, 19 nt, Artificial Sequence
  Description of Artificial Sequence: Synthetic oligonucleotide
  Sense Strand Starting at position 680 of SEQ ID NO: 319172
aguggaaugagguaguacu

SEQ ID NO: 372192 - RNA, 19 nt, Artificial Sequence
  Description of Artificial Sequence: Synthetic oligonucleotide
  Antisense Strand to SEQ ID NO: 372191
aguacuaccucauuccacu

SEQ ID NO: 372193 - RNA, 19 nt, Artificial Sequence
  Description of Artificial Sequence: Synthetic oligonucleotide
  Sense Strand Starting at position 681 of SEQ ID NO: 315252
cuuugauucuguguaccga

SEQ ID NO: 372194 - RNA, 19 nt, Artificial Sequence
  Description of Artificial Sequence: Synthetic oligonucleotide
  Antisense Strand to SEQ ID NO: 372193
ucgguacacagaaucaaag

SEQ ID NO: 372195 - RNA, 19 nt, Artificial Sequence
  Description of Artificial Sequence: Synthetic oligonucleotide
  Sense Strand Starting at position 681 of SEQ ID NO: 315397
cagaaaugaucugccaguu

SEQ ID NO: 372196 - RNA, 19 nt, Artificial Sequence
  Description of Artificial Sequence: Synthetic oligonucleotide
  Antisense Strand to SEQ ID NO: 372195
aacuggcagaucauuucug

SEQ ID NO: 372197 - RNA, 19 nt, Artificial Sequence
  Description of Artificial Sequence: Synthetic oligonucleotide
  Sense Strand Starting at position 681 of SEQ ID NO: 315557
uagugcuugggcuaaugga

SEQ ID NO: 372198 - RNA, 19 nt, Artificial Sequence
  Description of Artificial Sequence: Synthetic oligonucleotide
  Antisense Strand to SEQ ID NO: 372197
uccauuagcccaagcacua

SEQ ID NO: 372199 - RNA, 19 nt, Artificial Sequence
  Description of Artificial Sequence: Synthetic oligonucleotide
  Sense Strand Starting at position 681 of SEQ ID NO: 315619
agaguuaaauuaggagaca

SEQ ID NO: 372200 - RNA, 19 nt, Artificial Sequence
  Description of Artificial Sequence: Synthetic oligonucleotide
  Antisense Strand to SEQ ID NO: 372199
ugucuccuaauuuaacucu

SEQ ID NO: 372201 - RNA, 19 nt, Artificial Sequence
  Description of Artificial Sequence: Synthetic oligonucleotide
  Sense Strand Starting at position 681 of SEQ ID NO: 316241
ggcucaauaccugaaacuu

SEQ ID NO: 372202 - RNA, 19 nt, Artificial Sequence
  Description of Artificial Sequence: Synthetic oligonucleotide
  Antisense Strand to SEQ ID NO: 372201
aaguuucagguauugagcc

SEQ ID NO: 372203 - RNA, 19 nt, Artificial Sequence
  Description of Artificial Sequence: Synthetic oligonucleotide
  Sense Strand Starting at position 681 of SEQ ID NO: 316340
augaaugugugguccucuu

SEQ ID NO: 372204 - RNA, 19 nt, Artificial Sequence
  Description of Artificial Sequence: Synthetic oligonucleotide
  Antisense Strand to SEQ ID NO: 372203
aagaggaccacacauucau

SEQ ID NO: 372205 - RNA, 19 nt, Artificial Sequence
  Description of Artificial Sequence: Synthetic oligonucleotide
  Sense Strand Starting at position 681 of SEQ ID NO: 316403
ggagcugccucuuccaaga

SEQ ID NO: 372206 - RNA, 19 nt, Artificial Sequence
  Description of Artificial Sequence: Synthetic oligonucleotide
  Antisense Strand to SEQ ID NO: 372205
ucuuggaagaggcagcucc

SEQ ID NO: 372207 - RNA, 19 nt, Artificial Sequence
  Description of Artificial Sequence: Synthetic oligonucleotide
  Sense Strand Starting at position 681 of SEQ ID NO: 316515
cagggcccuguuugugaaa

SEQ ID NO: 372208 - RNA, 19 nt, Artificial Sequence
  Description of Artificial Sequence: Synthetic oligonucleotide
  Antisense Strand to SEQ ID NO: 372207
uuucacaaacagggcccug

SEQ ID NO: 372209 - RNA, 19 nt, Artificial Sequence
  Description of Artificial Sequence: Synthetic oligonucleotide
  Sense Strand Starting at position 681 of SEQ ID NO: 316630
gguccaggcuuccuuacau

SEQ ID NO: 372210 - RNA, 19 nt, Artificial Sequence
  Description of Artificial Sequence: Synthetic oligonucleotide
  Antisense Strand to SEQ ID NO: 372209
auguaaggaagccuggacc

SEQ ID NO: 372211 - RNA, 19 nt, Artificial Sequence
  Description of Artificial Sequence: Synthetic oligonucleotide
  Sense Strand Starting at position 681 of SEQ ID NO: 316720
uucuuccaaugagaaagau

SEQ ID NO: 372212 - RNA, 19 nt, Artificial Sequence
  Description of Artificial Sequence: Synthetic oligonucleotide
  Antisense Strand to SEQ ID NO: 372211
aucuuucucauuggaagaa

SEQ ID NO: 372213 - RNA, 19 nt, Artificial Sequence
  Description of Artificial Sequence: Synthetic oligonucleotide
  Sense Strand Starting at position 681 of SEQ ID NO: 317073
cgaagacagaccuguccua

SEQ ID NO: 372214 - RNA, 19 nt, Artificial Sequence
  Description of Artificial Sequence: Synthetic oligonucleotide
  Antisense Strand to SEQ ID NO: 372213
uaggacaggucugucuucg

SEQ ID NO: 372215 - RNA, 19 nt, Artificial Sequence
  Description of Artificial Sequence: Synthetic oligonucleotide
  Sense Strand Starting at position 681 of SEQ ID NO: 317078
acagaccuguccuagaaac

SEQ ID NO: 372216 - RNA, 19 nt, Artificial Sequence
  Description of Artificial Sequence: Synthetic oligonucleotide
  Antisense Strand to SEQ ID NO: 372215
guuucuaggacaggucugu

SEQ ID NO: 372217 - RNA, 19 nt, Artificial Sequence
  Description of Artificial Sequence: Synthetic oligonucleotide
  Sense Strand Starting at position 681 of SEQ ID NO: 317621
uucugagucacccaggagu

SEQ ID NO: 372218 - RNA, 19 nt, Artificial Sequence
  Description of Artificial Sequence: Synthetic oligonucleotide
  Antisense Strand to SEQ ID NO: 372217
acuccugggugacucagaa

SEQ ID NO: 372219 - RNA, 19 nt, Artificial Sequence
  Description of Artificial Sequence: Synthetic oligonucleotide
  Sense Strand Starting at position 681 of SEQ ID NO: 317728
cccggauuaccuggaauca

SEQ ID NO: 372220 - RNA, 19 nt, Artificial Sequence
  Description of Artificial Sequence: Synthetic oligonucleotide
  Antisense Strand to SEQ ID NO: 372219
ugauuccagguaauccggg

SEQ ID NO: 372221 - RNA, 19 nt, Artificial Sequence
  Description of Artificial Sequence: Synthetic oligonucleotide
  Sense Strand Starting at position 681 of SEQ ID NO: 317779
uugggucaucuugaguuau

SEQ ID NO: 372222 - RNA, 19 nt, Artificial Sequence
  Description of Artificial Sequence: Synthetic oligonucleotide
  Antisense Strand to SEQ ID NO: 372221
auaacucaagaugacccaa

SEQ ID NO: 372223 - RNA, 19 nt, Artificial Sequence
  Description of Artificial Sequence: Synthetic oligonucleotide
  Sense Strand Starting at position 681 of SEQ ID NO: 317781
gggucaucuugaguuauuc

SEQ ID NO: 372224 - RNA, 19 nt, Artificial Sequence
  Description of Artificial Sequence: Synthetic oligonucleotide
  Antisense Strand to SEQ ID NO: 372223
gaauaacucaagaugaccc

SEQ ID NO: 372225 - RNA, 19 nt, Artificial Sequence
  Description of Artificial Sequence: Synthetic oligonucleotide
  Sense Strand Starting at position 681 of SEQ ID NO: 317789
uugaguuauucugcaguuu

SEQ ID NO: 372226 - RNA, 19 nt, Artificial Sequence
  Description of Artificial Sequence: Synthetic oligonucleotide
  Antisense Strand to SEQ ID NO: 372225
aaacugcagaauaacucaa

SEQ ID NO: 372227 - RNA, 19 nt, Artificial Sequence
  Description of Artificial Sequence: Synthetic oligonucleotide
  Sense Strand Starting at position 681 of SEQ ID NO: 317790
ugaguuauucugcaguuua

SEQ ID NO: 372228 - RNA, 19 nt, Artificial Sequence
  Description of Artificial Sequence: Synthetic oligonucleotide
  Antisense Strand to SEQ ID NO: 372227
uaaacugcagaauaacuca

SEQ ID NO: 372229 - RNA, 19 nt, Artificial Sequence
  Description of Artificial Sequence: Synthetic oligonucleotide
  Sense Strand Starting at position 681 of SEQ ID NO: 317884
acauauauguaugucucaa

SEQ ID NO: 372230 - RNA, 19 nt, Artificial Sequence
  Description of Artificial Sequence: Synthetic oligonucleotide
  Antisense Strand to SEQ ID NO: 372229
uugagacauacauauaugu

SEQ ID NO: 372231 - RNA, 19 nt, Artificial Sequence
  Description of Artificial Sequence: Synthetic oligonucleotide
  Sense Strand Starting at position 681 of SEQ ID NO: 317886
auauauguaugucucaacu

SEQ ID NO: 372232 - RNA, 19 nt, Artificial Sequence
  Description of Artificial Sequence: Synthetic oligonucleotide
  Antisense Strand to SEQ ID NO: 372231
aguugagacauacauauau

SEQ ID NO: 372233 - RNA, 19 nt, Artificial Sequence
  Description of Artificial Sequence: Synthetic oligonucleotide
  Sense Strand Starting at position 681 of SEQ ID NO: 318002
uggaguaacuaucugccau

SEQ ID NO: 372234 - RNA, 19 nt, Artificial Sequence
  Description of Artificial Sequence: Synthetic oligonucleotide
  Antisense Strand to SEQ ID NO: 372233
auggcagauaguuacucca

SEQ ID NO: 372235 - RNA, 19 nt, Artificial Sequence
  Description of Artificial Sequence: Synthetic oligonucleotide
  Sense Strand Starting at position 681 of SEQ ID NO: 318022
acugcaaucugguuacuag

SEQ ID NO: 372236 - RNA, 19 nt, Artificial Sequence
  Description of Artificial Sequence: Synthetic oligonucleotide
  Antisense Strand to SEQ ID NO: 372235
cuaguaaccagauugcagu

SEQ ID NO: 372237 - RNA, 19 nt, Artificial Sequence
  Description of Artificial Sequence: Synthetic oligonucleotide
  Sense Strand Starting at position 681 of SEQ ID NO: 318023
cugcaaucugguuacuaga

SEQ ID NO: 372238 - RNA, 19 nt, Artificial Sequence
  Description of Artificial Sequence: Synthetic oligonucleotide
  Antisense Strand to SEQ ID NO: 372237
ucuaguaaccagauugcag

SEQ ID NO: 372239 - RNA, 19 nt, Artificial Sequence
  Description of Artificial Sequence: Synthetic oligonucleotide
  Sense Strand Starting at position 681 of SEQ ID NO: 318025
gcaaucugguuacuagaua

SEQ ID NO: 372240 - RNA, 19 nt, Artificial Sequence
  Description of Artificial Sequence: Synthetic oligonucleotide
  Antisense Strand to SEQ ID NO: 372239
uaucuaguaaccagauugc

SEQ ID NO: 372241 - RNA, 19 nt, Artificial Sequence
  Description of Artificial Sequence: Synthetic oligonucleotide
  Sense Strand Starting at position 681 of SEQ ID NO: 318043
agauacuugaucugagggu

SEQ ID NO: 372242 - RNA, 19 nt, Artificial Sequence
  Description of Artificial Sequence: Synthetic oligonucleotide
  Antisense Strand to SEQ ID NO: 372241
acccucagaucaaguaucu

SEQ ID NO: 372243 - RNA, 19 nt, Artificial Sequence
  Description of Artificial Sequence: Synthetic oligonucleotide
  Sense Strand Starting at position 681 of SEQ ID NO: 318044
gauacuugaucugagggua

SEQ ID NO: 372244 - RNA, 19 nt, Artificial Sequence
  Description of Artificial Sequence: Synthetic oligonucleotide
  Antisense Strand to SEQ ID NO: 372243
uacccucagaucaaguauc

SEQ ID NO: 372245 - RNA, 19 nt, Artificial Sequence
  Description of Artificial Sequence: Synthetic oligonucleotide
  Sense Strand Starting at position 681 of SEQ ID NO: 318102
cguggaguggcaugaucuu

SEQ ID NO: 372246 - RNA, 19 nt, Artificial Sequence
  Description of Artificial Sequence: Synthetic oligonucleotide
  Antisense Strand to SEQ ID NO: 372245
aagaucaugccacuccacg

SEQ ID NO: 372247 - RNA, 19 nt, Artificial Sequence
  Description of Artificial Sequence: Synthetic oligonucleotide
  Sense Strand Starting at position 681 of SEQ ID NO: 318317
gggcaucuuugacauaaga

SEQ ID NO: 372248 - RNA, 19 nt, Artificial Sequence
  Description of Artificial Sequence: Synthetic oligonucleotide
  Antisense Strand to SEQ ID NO: 372247
ucuuaugucaaagaugccc

SEQ ID NO: 372249 - RNA, 19 nt, Artificial Sequence
  Description of Artificial Sequence: Synthetic oligonucleotide
  Sense Strand Starting at position 681 of SEQ ID NO: 318366
gcuaucauugccuguaucu

SEQ ID NO: 372250 - RNA, 19 nt, Artificial Sequence
  Description of Artificial Sequence: Synthetic oligonucleotide
  Antisense Strand to SEQ ID NO: 372249
agauacaggcaaugauagc

SEQ ID NO: 372251 - RNA, 19 nt, Artificial Sequence
  Description of Artificial Sequence: Synthetic oligonucleotide
  Sense Strand Starting at position 681 of SEQ ID NO: 318451
gaguuagucgccaguggga

SEQ ID NO: 372252 - RNA, 19 nt, Artificial Sequence
  Description of Artificial Sequence: Synthetic oligonucleotide
  Antisense Strand to SEQ ID NO: 372251
ucccacuggcgacuaacuc

SEQ ID NO: 372253 - RNA, 19 nt, Artificial Sequence
  Description of Artificial Sequence: Synthetic oligonucleotide
  Sense Strand Starting at position 681 of SEQ ID NO: 318453
guuagucgccagugggaau

SEQ ID NO: 372254 - RNA, 19 nt, Artificial Sequence
  Description of Artificial Sequence: Synthetic oligonucleotide
  Antisense Strand to SEQ ID NO: 372253
auucccacuggcgacuaac

SEQ ID NO: 372255 - RNA, 19 nt, Artificial Sequence
  Description of Artificial Sequence: Synthetic oligonucleotide
  Sense Strand Starting at position 681 of SEQ ID NO: 318663
ugacuucuuccauggagua

SEQ ID NO: 372256 - RNA, 19 nt, Artificial Sequence
  Description of Artificial Sequence: Synthetic oligonucleotide
  Antisense Strand to SEQ ID NO: 372255
uacuccauggaagaaguca

SEQ ID NO: 372257 - RNA, 19 nt, Artificial Sequence
  Description of Artificial Sequence: Synthetic oligonucleotide
  Sense Strand Starting at position 681 of SEQ ID NO: 318664
gacuucuuccauggaguaa

SEQ ID NO: 372258 - RNA, 19 nt, Artificial Sequence
  Description of Artificial Sequence: Synthetic oligonucleotide
  Antisense Strand to SEQ ID NO: 372257
uuacuccauggaagaaguc

SEQ ID NO: 372259 - RNA, 19 nt, Artificial Sequence
  Description of Artificial Sequence: Synthetic oligonucleotide
  Sense Strand Starting at position 681 of SEQ ID NO: 318794
gggacagagcccuggucau

SEQ ID NO: 372260 - RNA, 19 nt, Artificial Sequence
  Description of Artificial Sequence: Synthetic oligonucleotide
  Antisense Strand to SEQ ID NO: 372259
augaccagggcucuguccc

SEQ ID NO: 372261 - RNA, 19 nt, Artificial Sequence
  Description of Artificial Sequence: Synthetic oligonucleotide
  Sense Strand Starting at position 681 of SEQ ID NO: 318936
gagaaagguaugcgggaau

SEQ ID NO: 372262 - RNA, 19 nt, Artificial Sequence
  Description of Artificial Sequence: Synthetic oligonucleotide
  Antisense Strand to SEQ ID NO: 372261
auucccgcauaccuuucuc

SEQ ID NO: 372263 - RNA, 19 nt, Artificial Sequence
  Description of Artificial Sequence: Synthetic oligonucleotide
  Sense Strand Starting at position 681 of SEQ ID NO: 318994
ggcagucuugcccagcuuu

SEQ ID NO: 372264 - RNA, 19 nt, Artificial Sequence
  Description of Artificial Sequence: Synthetic oligonucleotide
  Antisense Strand to SEQ ID NO: 372263
aaagcugggcaagacugcc

SEQ ID NO: 372265 - RNA, 19 nt, Artificial Sequence
  Description of Artificial Sequence: Synthetic oligonucleotide
  Sense Strand Starting at position 681 of SEQ ID NO: 318997
agucuugcccagcuuugua

SEQ ID NO: 372266 - RNA, 19 nt, Artificial Sequence
  Description of Artificial Sequence: Synthetic oligonucleotide
  Antisense Strand to SEQ ID NO: 372265
uacaaagcugggcaagacu

SEQ ID NO: 372267 - RNA, 19 nt, Artificial Sequence
  Description of Artificial Sequence: Synthetic oligonucleotide
  Sense Strand Starting at position 681 of SEQ ID NO: 319005
ccagcuuuguaccucauau

SEQ ID NO: 372268 - RNA, 19 nt, Artificial Sequence
  Description of Artificial Sequence: Synthetic oligonucleotide
  Antisense Strand to SEQ ID NO: 372267
auaugagguacaaagcugg

SEQ ID NO: 372269 - RNA, 19 nt, Artificial Sequence
  Description of Artificial Sequence: Synthetic oligonucleotide
  Sense Strand Starting at position 681 of SEQ ID NO: 319089
gaagucugcucuuugcuca

SEQ ID NO: 372270 - RNA, 19 nt, Artificial Sequence
  Description of Artificial Sequence: Synthetic oligonucleotide
  Antisense Strand to SEQ ID NO: 372269
ugagcaaagagcagacuuc

SEQ ID NO: 372271 - RNA, 19 nt, Artificial Sequence
  Description of Artificial Sequence: Synthetic oligonucleotide
  Sense Strand Starting at position 681 of SEQ ID NO: 319092
gucugcucuuugcucaaca

SEQ ID NO: 372272 - RNA, 19 nt, Artificial Sequence
  Description of Artificial Sequence: Synthetic oligonucleotide
  Antisense Strand to SEQ ID NO: 372271
uguugagcaaagagcagac

SEQ ID NO: 372273 - RNA, 19 nt, Artificial Sequence
  Description of Artificial Sequence: Synthetic oligonucleotide
  Sense Strand Starting at position 682 of SEQ ID NO: 315360
auagcaucagccuaggaaa

SEQ ID NO: 372274 - RNA, 19 nt, Artificial Sequence
  Description of Artificial Sequence: Synthetic oligonucleotide
  Antisense Strand to SEQ ID NO: 372273
uuuccuaggcugaugcuau

SEQ ID NO: 372275 - RNA, 19 nt, Artificial Sequence
  Description of Artificial Sequence: Synthetic oligonucleotide
  Sense Strand Starting at position 682 of SEQ ID NO: 315452
auagguagauaugugguau

SEQ ID NO: 372276 - RNA, 19 nt, Artificial Sequence
  Description of Artificial Sequence: Synthetic oligonucleotide
  Antisense Strand to SEQ ID NO: 372275
auaccacauaucuaccuau

SEQ ID NO: 372277 - RNA, 19 nt, Artificial Sequence
  Description of Artificial Sequence: Synthetic oligonucleotide
  Sense Strand Starting at position 682 of SEQ ID NO: 315584
ugcuaaaugagagguagau

SEQ ID NO: 372278 - RNA, 19 nt, Artificial Sequence
  Description of Artificial Sequence: Synthetic oligonucleotide
  Antisense Strand to SEQ ID NO: 372277
aucuaccucucauuuagca

SEQ ID NO: 372279 - RNA, 19 nt, Artificial Sequence
  Description of Artificial Sequence: Synthetic oligonucleotide
  Sense Strand Starting at position 682 of SEQ ID NO: 315601
auaugaugaucaguccuaa

SEQ ID NO: 372280 - RNA, 19 nt, Artificial Sequence
  Description of Artificial Sequence: Synthetic oligonucleotide
  Antisense Strand to SEQ ID NO: 372279
uuaggacugaucaucauau

SEQ ID NO: 372281 - RNA, 19 nt, Artificial Sequence
  Description of Artificial Sequence: Synthetic oligonucleotide
  Sense Strand Starting at position 682 of SEQ ID NO: 315921
augagcacaguuuaauaau

SEQ ID NO: 372282 - RNA, 19 nt, Artificial Sequence
  Description of Artificial Sequence: Synthetic oligonucleotide
  Antisense Strand to SEQ ID NO: 372281
auuauuaaacugugcucau

SEQ ID NO: 372283 - RNA, 19 nt, Artificial Sequence
  Description of Artificial Sequence: Synthetic oligonucleotide
  Sense Strand Starting at position 682 of SEQ ID NO: 315945
ucagauacugaaugcuuaa

SEQ ID NO: 372284 - RNA, 19 nt, Artificial Sequence
  Description of Artificial Sequence: Synthetic oligonucleotide
  Antisense Strand to SEQ ID NO: 372283
uuaagcauucaguaucuga

SEQ ID NO: 372285 - RNA, 19 nt, Artificial Sequence
  Description of Artificial Sequence: Synthetic oligonucleotide
  Sense Strand Starting at position 682 of SEQ ID NO: 316057
accugagccugauuccaaa

SEQ ID NO: 372286 - RNA, 19 nt, Artificial Sequence
  Description of Artificial Sequence: Synthetic oligonucleotide
  Antisense Strand to SEQ ID NO: 372285
uuuggaaucaggcucaggu

SEQ ID NO: 372287 - RNA, 19 nt, Artificial Sequence
  Description of Artificial Sequence: Synthetic oligonucleotide
  Sense Strand Starting at position 682 of SEQ ID NO: 316079
ucaguuguuaacugaugga

SEQ ID NO: 372288 - RNA, 19 nt, Artificial Sequence
  Description of Artificial Sequence: Synthetic oligonucleotide
  Antisense Strand to SEQ ID NO: 372287
uccaucaguuaacaacuga

SEQ ID NO: 372289 - RNA, 19 nt, Artificial Sequence
  Description of Artificial Sequence: Synthetic oligonucleotide
  Sense Strand Starting at position 682 of SEQ ID NO: 316222
gagggagcaaucuguuuag

SEQ ID NO: 372290 - RNA, 19 nt, Artificial Sequence
  Description of Artificial Sequence: Synthetic oligonucleotide
  Antisense Strand to SEQ ID NO: 372289
cuaaacagauugcucccuc

SEQ ID NO: 372291 - RNA, 19 nt, Artificial Sequence
  Description of Artificial Sequence: Synthetic oligonucleotide
  Sense Strand Starting at position 682 of SEQ ID NO: 316297
agaaauucugguugcugaa

SEQ ID NO: 372292 - RNA, 19 nt, Artificial Sequence
  Description of Artificial Sequence: Synthetic oligonucleotide
  Antisense Strand to SEQ ID NO: 372291
uucagcaaccagaauuucu

SEQ ID NO: 372293 - RNA, 19 nt, Artificial Sequence
  Description of Artificial Sequence: Synthetic oligonucleotide
  Sense Strand Starting at position 682 of SEQ ID NO: 316427
cuauauucgcuggagggau

SEQ ID NO: 372294 - RNA, 19 nt, Artificial Sequence
  Description of Artificial Sequence: Synthetic oligonucleotide
  Antisense Strand to SEQ ID NO: 372293
aucccuccagcgaauauag

SEQ ID NO: 372295 - RNA, 19 nt, Artificial Sequence
  Description of Artificial Sequence: Synthetic oligonucleotide
  Sense Strand Starting at position 682 of SEQ ID NO: 316431
auucgcuggagggauuaau

SEQ ID NO: 372296 - RNA, 19 nt, Artificial Sequence
  Description of Artificial Sequence: Synthetic oligonucleotide
  Antisense Strand to SEQ ID NO: 372295
auuaaucccuccagcgaau

SEQ ID NO: 372297 - RNA, 19 nt, Artificial Sequence
  Description of Artificial Sequence: Synthetic oligonucleotide
  Sense Strand Starting at position 682 of SEQ ID NO: 317172
gaggguagguuguuuagaa

SEQ ID NO: 372298 - RNA, 19 nt, Artificial Sequence
  Description of Artificial Sequence: Synthetic oligonucleotide
  Antisense Strand to SEQ ID NO: 372297
uucuaaacaaccuacccuc

SEQ ID NO: 372299 - RNA, 19 nt, Artificial Sequence
  Description of Artificial Sequence: Synthetic oligonucleotide
  Sense Strand Starting at position 682 of SEQ ID NO: 317460
ggaaguucuuguccagaac

SEQ ID NO: 372300 - RNA, 19 nt, Artificial Sequence
  Description of Artificial Sequence: Synthetic oligonucleotide
  Antisense Strand to SEQ ID NO: 372299
guucuggacaagaacuucc

SEQ ID NO: 372301 - RNA, 19 nt, Artificial Sequence
  Description of Artificial Sequence: Synthetic oligonucleotide
  Sense Strand Starting at position 682 of SEQ ID NO: 317461
gaaguucuuguccagaacu

SEQ ID NO: 372302 - RNA, 19 nt, Artificial Sequence
  Description of Artificial Sequence: Synthetic oligonucleotide
  Antisense Strand to SEQ ID NO: 372301
aguucuggacaagaacuuc

SEQ ID NO: 372303 - RNA, 19 nt, Artificial Sequence
  Description of Artificial Sequence: Synthetic oligonucleotide
  Sense Strand Starting at position 682 of SEQ ID NO: 317463
aguucuuguccagaacuuc

SEQ ID NO: 372304 - RNA, 19 nt, Artificial Sequence
  Description of Artificial Sequence: Synthetic oligonucleotide
  Antisense Strand to SEQ ID NO: 372303
gaaguucuggacaagaacu

SEQ ID NO: 372305 - RNA, 19 nt, Artificial Sequence
  Description of Artificial Sequence: Synthetic oligonucleotide
  Sense Strand Starting at position 682 of SEQ ID NO: 317820
uauggaagcuuguugaaca

SEQ ID NO: 372306 - RNA, 19 nt, Artificial Sequence
  Description of Artificial Sequence: Synthetic oligonucleotide
  Antisense Strand to SEQ ID NO: 372305
uguucaacaagcuuccaua

SEQ ID NO: 372307 - RNA, 19 nt, Artificial Sequence
  Description of Artificial Sequence: Synthetic oligonucleotide
  Sense Strand Starting at position 682 of SEQ ID NO: 317836
acaaauuccugggccuuau

SEQ ID NO: 372308 - RNA, 19 nt, Artificial Sequence
  Description of Artificial Sequence: Synthetic oligonucleotide
  Antisense Strand to SEQ ID NO: 372307
auaaggcccaggaauuugu

SEQ ID NO: 372309 - RNA, 19 nt, Artificial Sequence
  Description of Artificial Sequence: Synthetic oligonucleotide
  Sense Strand Starting at position 682 of SEQ ID NO: 317845
ugggccuuaucuccagaaa

SEQ ID NO: 372310 - RNA, 19 nt, Artificial Sequence
  Description of Artificial Sequence: Synthetic oligonucleotide
  Antisense Strand to SEQ ID NO: 372309
uuucuggagauaaggccca

SEQ ID NO: 372311 - RNA, 19 nt, Artificial Sequence
  Description of Artificial Sequence: Synthetic oligonucleotide
  Sense Strand Starting at position 682 of SEQ ID NO: 317846
gggccuuaucuccagaaau

SEQ ID NO: 372312 - RNA, 19 nt, Artificial Sequence
  Description of Artificial Sequence: Synthetic oligonucleotide
  Antisense Strand to SEQ ID NO: 372311
auuucuggagauaaggccc

SEQ ID NO: 372313 - RNA, 19 nt, Artificial Sequence
  Description of Artificial Sequence: Synthetic oligonucleotide
  Sense Strand Starting at position 682 of SEQ ID NO: 317977
guaggaugagaucgauuau

SEQ ID NO: 372314 - RNA, 19 nt, Artificial Sequence
  Description of Artificial Sequence: Synthetic oligonucleotide
  Antisense Strand to SEQ ID NO: 372313
auaaucgaucucauccuac

SEQ ID NO: 372315 - RNA, 19 nt, Artificial Sequence
  Description of Artificial Sequence: Synthetic oligonucleotide
  Sense Strand Starting at position 682 of SEQ ID NO: 317983
ugagaucgauuauugcaaa

SEQ ID NO: 372316 - RNA, 19 nt, Artificial Sequence
  Description of Artificial Sequence: Synthetic oligonucleotide
  Antisense Strand to SEQ ID NO: 372315
uuugcaauaaucgaucuca

SEQ ID NO: 372317 - RNA, 19 nt, Artificial Sequence
  Description of Artificial Sequence: Synthetic oligonucleotide
  Sense Strand Starting at position 682 of SEQ ID NO: 318039
aggugaugugcaggcauuu

SEQ ID NO: 372318 - RNA, 19 nt, Artificial Sequence
  Description of Artificial Sequence: Synthetic oligonucleotide
  Antisense Strand to SEQ ID NO: 372317
aaaugccugcacaucaccu

SEQ ID NO: 372319 - RNA, 19 nt, Artificial Sequence
  Description of Artificial Sequence: Synthetic oligonucleotide
  Sense Strand Starting at position 682 of SEQ ID NO: 318048
gcaggcauuugcccacaga

SEQ ID NO: 372320 - RNA, 19 nt, Artificial Sequence
  Description of Artificial Sequence: Synthetic oligonucleotide
  Antisense Strand to SEQ ID NO: 372319
ucugugggcaaaugccugc

SEQ ID NO: 372321 - RNA, 19 nt, Artificial Sequence
  Description of Artificial Sequence: Synthetic oligonucleotide
  Sense Strand Starting at position 682 of SEQ ID NO: 318140
gaaugauggccugaaggca

SEQ ID NO: 372322 - RNA, 19 nt, Artificial Sequence
  Description of Artificial Sequence: Synthetic oligonucleotide
  Antisense Strand to SEQ ID NO: 372321
ugccuucaggccaucauuc

SEQ ID NO: 372323 - RNA, 19 nt, Artificial Sequence
  Description of Artificial Sequence: Synthetic oligonucleotide
  Sense Strand Starting at position 682 of SEQ ID NO: 318234
cccugucuucuugaaagau

SEQ ID NO: 372324 - RNA, 19 nt, Artificial Sequence
  Description of Artificial Sequence: Synthetic oligonucleotide
  Antisense Strand to SEQ ID NO: 372323
aucuuucaagaagacaggg

SEQ ID NO: 372325 - RNA, 19 nt, Artificial Sequence
  Description of Artificial Sequence: Synthetic oligonucleotide
  Sense Strand Starting at position 682 of SEQ ID NO: 318354
uguugaauuugguugccau

SEQ ID NO: 372326 - RNA, 19 nt, Artificial Sequence
  Description of Artificial Sequence: Synthetic oligonucleotide
  Antisense Strand to SEQ ID NO: 372325
auggcaaccaaauucaaca

SEQ ID NO: 372327 - RNA, 19 nt, Artificial Sequence
  Description of Artificial Sequence: Synthetic oligonucleotide
  Sense Strand Starting at position 682 of SEQ ID NO: 318355
guugaauuugguugccauu

SEQ ID NO: 372328 - RNA, 19 nt, Artificial Sequence
  Description of Artificial Sequence: Synthetic oligonucleotide
  Antisense Strand to SEQ ID NO: 372327
aauggcaaccaaauucaac

SEQ ID NO: 372329 - RNA, 19 nt, Artificial Sequence
  Description of Artificial Sequence: Synthetic oligonucleotide
  Sense Strand Starting at position 682 of SEQ ID NO: 318407
auuccauuccaguaguuaa

SEQ ID NO: 372330 - RNA, 19 nt, Artificial Sequence
  Description of Artificial Sequence: Synthetic oligonucleotide
  Antisense Strand to SEQ ID NO: 372329
uuaacuacuggaauggaau

SEQ ID NO: 372331 - RNA, 19 nt, Artificial Sequence
  Description of Artificial Sequence: Synthetic oligonucleotide
  Sense Strand Starting at position 682 of SEQ ID NO: 318417
aguaguuaauccucauaau

SEQ ID NO: 372332 - RNA, 19 nt, Artificial Sequence
  Description of Artificial Sequence: Synthetic oligonucleotide
  Antisense Strand to SEQ ID NO: 372331
auuaugaggauuaacuacu

SEQ ID NO: 372333 - RNA, 19 nt, Artificial Sequence
  Description of Artificial Sequence: Synthetic oligonucleotide
  Sense Strand Starting at position 682 of SEQ ID NO: 318418
guaguuaauccucauaaua

SEQ ID NO: 372334 - RNA, 19 nt, Artificial Sequence
  Description of Artificial Sequence: Synthetic oligonucleotide
  Antisense Strand to SEQ ID NO: 372333
uauuaugaggauuaacuac

SEQ ID NO: 372335 - RNA, 19 nt, Artificial Sequence
  Description of Artificial Sequence: Synthetic oligonucleotide
  Sense Strand Starting at position 682 of SEQ ID NO: 318442
uucuuuccucuguagacau

SEQ ID NO: 372336 - RNA, 19 nt, Artificial Sequence
  Description of Artificial Sequence: Synthetic oligonucleotide
  Antisense Strand to SEQ ID NO: 372335
augucuacagaggaaagaa

SEQ ID NO: 372337 - RNA, 19 nt, Artificial Sequence
  Description of Artificial Sequence: Synthetic oligonucleotide
  Sense Strand Starting at position 682 of SEQ ID NO: 318475
uagugagagggucacuuua

SEQ ID NO: 372338 - RNA, 19 nt, Artificial Sequence
  Description of Artificial Sequence: Synthetic oligonucleotide
  Antisense Strand to SEQ ID NO: 372337
uaaagugacccucucacua

SEQ ID NO: 372339 - RNA, 19 nt, Artificial Sequence
  Description of Artificial Sequence: Synthetic oligonucleotide
  Sense Strand Starting at position 682 of SEQ ID NO: 318477
gugagagggucacuuuaca

SEQ ID NO: 372340 - RNA, 19 nt, Artificial Sequence
  Description of Artificial Sequence: Synthetic oligonucleotide
  Antisense Strand to SEQ ID NO: 372339
uguaaagugacccucucac

SEQ ID NO: 372341 - RNA, 19 nt, Artificial Sequence
  Description of Artificial Sequence: Synthetic oligonucleotide
  Sense Strand Starting at position 682 of SEQ ID NO: 318497
gguguugugggugcgagau

SEQ ID NO: 372342 - RNA, 19 nt, Artificial Sequence
  Description of Artificial Sequence: Synthetic oligonucleotide
  Antisense Strand to SEQ ID NO: 372341
aucucgcacccacaacacc

SEQ ID NO: 372343 - RNA, 19 nt, Artificial Sequence
  Description of Artificial Sequence: Synthetic oligonucleotide
  Sense Strand Starting at position 682 of SEQ ID NO: 318762
cuucuauaccaaggagguu

SEQ ID NO: 372344 - RNA, 19 nt, Artificial Sequence
  Description of Artificial Sequence: Synthetic oligonucleotide
  Antisense Strand to SEQ ID NO: 372343
aaccuccuugguauagaag

SEQ ID NO: 372345 - RNA, 19 nt, Artificial Sequence
  Description of Artificial Sequence: Synthetic oligonucleotide
  Sense Strand Starting at position 682 of SEQ ID NO: 318771
caaggagguuaaucaccau

SEQ ID NO: 372346 - RNA, 19 nt, Artificial Sequence
  Description of Artificial Sequence: Synthetic oligonucleotide
  Antisense Strand to SEQ ID NO: 372345
auggugauuaaccuccuug

SEQ ID NO: 372347 - RNA, 19 nt, Artificial Sequence
  Description of Artificial Sequence: Synthetic oligonucleotide
  Sense Strand Starting at position 682 of SEQ ID NO: 318774
ggagguuaaucaccauuag

SEQ ID NO: 372348 - RNA, 19 nt, Artificial Sequence
  Description of Artificial Sequence: Synthetic oligonucleotide
  Antisense Strand to SEQ ID NO: 372347
cuaauggugauuaaccucc

SEQ ID NO: 372349 - RNA, 19 nt, Artificial Sequence
  Description of Artificial Sequence: Synthetic oligonucleotide
  Sense Strand Starting at position 682 of SEQ ID NO: 318823
acauaagcugucuaaauag

SEQ ID NO: 372350 - RNA, 19 nt, Artificial Sequence
  Description of Artificial Sequence: Synthetic oligonucleotide
  Antisense Strand to SEQ ID NO: 372349
cuauuuagacagcuuaugu

SEQ ID NO: 372351 - RNA, 19 nt, Artificial Sequence
  Description of Artificial Sequence: Synthetic oligonucleotide
  Sense Strand Starting at position 682 of SEQ ID NO: 319201
guucccagucaucauacua

SEQ ID NO: 372352 - RNA, 19 nt, Artificial Sequence
  Description of Artificial Sequence: Synthetic oligonucleotide
  Antisense Strand to SEQ ID NO: 372351
uaguaugaugacugggaac

SEQ ID NO: 372353 - RNA, 19 nt, Artificial Sequence
  Description of Artificial Sequence: Synthetic oligonucleotide
  Sense Strand Starting at position 683 of SEQ ID NO: 315244
guaaauaucagaggguacu

SEQ ID NO: 372354 - RNA, 19 nt, Artificial Sequence
  Description of Artificial Sequence: Synthetic oligonucleotide
  Antisense Strand to SEQ ID NO: 372353
aguacccucugauauuuac

SEQ ID NO: 372355 - RNA, 19 nt, Artificial Sequence
  Description of Artificial Sequence: Synthetic oligonucleotide
  Sense Strand Starting at position 683 of SEQ ID NO: 315245
uaaauaucagaggguacuu

SEQ ID NO: 372356 - RNA, 19 nt, Artificial Sequence
  Description of Artificial Sequence: Synthetic oligonucleotide
  Antisense Strand to SEQ ID NO: 372355
aaguacccucugauauuua

SEQ ID NO: 372357 - RNA, 19 nt, Artificial Sequence
  Description of Artificial Sequence: Synthetic oligonucleotide
  Sense Strand Starting at position 683 of SEQ ID NO: 315250
aucagaggguacuuaacau

SEQ ID NO: 372358 - RNA, 19 nt, Artificial Sequence
  Description of Artificial Sequence: Synthetic oligonucleotide
  Antisense Strand to SEQ ID NO: 372357
auguuaaguacccucugau

SEQ ID NO: 372359 - RNA, 19 nt, Artificial Sequence
  Description of Artificial Sequence: Synthetic oligonucleotide
  Sense Strand Starting at position 683 of SEQ ID NO: 315418
gaugcauugggcuacaaug

SEQ ID NO: 372360 - RNA, 19 nt, Artificial Sequence
  Description of Artificial Sequence: Synthetic oligonucleotide
  Antisense Strand to SEQ ID NO: 372359
cauuguagcccaaugcauc

SEQ ID NO: 372361 - RNA, 19 nt, Artificial Sequence
  Description of Artificial Sequence: Synthetic oligonucleotide
  Sense Strand Starting at position 683 of SEQ ID NO: 315446
cuacaaugucacgaaguaa

SEQ ID NO: 372362 - RNA, 19 nt, Artificial Sequence
  Description of Artificial Sequence: Synthetic oligonucleotide
  Antisense Strand to SEQ ID NO: 372361
uuacuucgugacauuguag

SEQ ID NO: 372363 - RNA, 19 nt, Artificial Sequence
  Description of Artificial Sequence: Synthetic oligonucleotide
  Sense Strand Starting at position 683 of SEQ ID NO: 315528
accgaaauaucauuacuug

SEQ ID NO: 372364 - RNA, 19 nt, Artificial Sequence
  Description of Artificial Sequence: Synthetic oligonucleotide
  Antisense Strand to SEQ ID NO: 372363
caaguaaugauauuucggu

SEQ ID NO: 372365 - RNA, 19 nt, Artificial Sequence
  Description of Artificial Sequence: Synthetic oligonucleotide
  Sense Strand Starting at position 683 of SEQ ID NO: 315920
uuugaucuacucugaguga

SEQ ID NO: 372366 - RNA, 19 nt, Artificial Sequence
  Description of Artificial Sequence: Synthetic oligonucleotide
  Antisense Strand to SEQ ID NO: 372365
ucacucagaguagaucaaa

SEQ ID NO: 372367 - RNA, 19 nt, Artificial Sequence
  Description of Artificial Sequence: Synthetic oligonucleotide
  Sense Strand Starting at position 683 of SEQ ID NO: 315923
gaucuacucugagugaauu

SEQ ID NO: 372368 - RNA, 19 nt, Artificial Sequence
  Description of Artificial Sequence: Synthetic oligonucleotide
  Antisense Strand to SEQ ID NO: 372367
aauucacucagaguagauc

SEQ ID NO: 372369 - RNA, 19 nt, Artificial Sequence
  Description of Artificial Sequence: Synthetic oligonucleotide
  Sense Strand Starting at position 683 of SEQ ID NO: 315935
gugaauuucuguucuuagc

SEQ ID NO: 372370 - RNA, 19 nt, Artificial Sequence
  Description of Artificial Sequence: Synthetic oligonucleotide
  Antisense Strand to SEQ ID NO: 372369
gcuaagaacagaaauucac

SEQ ID NO: 372371 - RNA, 19 nt, Artificial Sequence
  Description of Artificial Sequence: Synthetic oligonucleotide
  Sense Strand Starting at position 683 of SEQ ID NO: 315990
agagacacuucggcaucaa

SEQ ID NO: 372372 - RNA, 19 nt, Artificial Sequence
  Description of Artificial Sequence: Synthetic oligonucleotide
  Antisense Strand to SEQ ID NO: 372371
uugaugccgaagugucucu

SEQ ID NO: 372373 - RNA, 19 nt, Artificial Sequence
  Description of Artificial Sequence: Synthetic oligonucleotide
  Sense Strand Starting at position 683 of SEQ ID NO: 315991
gagacacuucggcaucaaa

SEQ ID NO: 372374 - RNA, 19 nt, Artificial Sequence
  Description of Artificial Sequence: Synthetic oligonucleotide
  Antisense Strand to SEQ ID NO: 372373
uuugaugccgaagugucuc

SEQ ID NO: 372375 - RNA, 19 nt, Artificial Sequence
  Description of Artificial Sequence: Synthetic oligonucleotide
  Sense Strand Starting at position 683 of SEQ ID NO: 315994
acacuucggcaucaaagaa

SEQ ID NO: 372376 - RNA, 19 nt, Artificial Sequence
  Description of Artificial Sequence: Synthetic oligonucleotide
  Antisense Strand to SEQ ID NO: 372375
uucuuugaugccgaagugu

SEQ ID NO: 372377 - RNA, 19 nt, Artificial Sequence
  Description of Artificial Sequence: Synthetic oligonucleotide
  Sense Strand Starting at position 683 of SEQ ID NO: 316083
uggugauguguuuacagga

SEQ ID NO: 372378 - RNA, 19 nt, Artificial Sequence
  Description of Artificial Sequence: Synthetic oligonucleotide
  Antisense Strand to SEQ ID NO: 372377
uccuguaaacacaucacca

SEQ ID NO: 372379 - RNA, 19 nt, Artificial Sequence
  Description of Artificial Sequence: Synthetic oligonucleotide
  Sense Strand Starting at position 683 of SEQ ID NO: 316088
auguguuuacaggagcuaa

SEQ ID NO: 372380 - RNA, 19 nt, Artificial Sequence
  Description of Artificial Sequence: Synthetic oligonucleotide
  Antisense Strand to SEQ ID NO: 372379
uuagcuccuguaaacacau

SEQ ID NO: 372381 - RNA, 19 nt, Artificial Sequence
  Description of Artificial Sequence: Synthetic oligonucleotide
  Sense Strand Starting at position 683 of SEQ ID NO: 316155
agaauaugucagcaaucau

SEQ ID NO: 372382 - RNA, 19 nt, Artificial Sequence
  Description of Artificial Sequence: Synthetic oligonucleotide
  Antisense Strand to SEQ ID NO: 372381
augauugcugacauauucu

SEQ ID NO: 372383 - RNA, 19 nt, Artificial Sequence
  Description of Artificial Sequence: Synthetic oligonucleotide
  Sense Strand Starting at position 683 of SEQ ID NO: 316227
gggauucccagaggcaaca

SEQ ID NO: 372384 - RNA, 19 nt, Artificial Sequence
  Description of Artificial Sequence: Synthetic oligonucleotide
  Antisense Strand to SEQ ID NO: 372383
uguugccucugggaauccc

SEQ ID NO: 372385 - RNA, 19 nt, Artificial Sequence
  Description of Artificial Sequence: Synthetic oligonucleotide
  Sense Strand Starting at position 683 of SEQ ID NO: 316389
auguaucagcacuagaaua

SEQ ID NO: 372386 - RNA, 19 nt, Artificial Sequence
  Description of Artificial Sequence: Synthetic oligonucleotide
  Antisense Strand to SEQ ID NO: 372385
uauucuagugcugauacau

SEQ ID NO: 372387 - RNA, 19 nt, Artificial Sequence
  Description of Artificial Sequence: Synthetic oligonucleotide
  Sense Strand Starting at position 683 of SEQ ID NO: 316401
uagaauaggugcucagaag

SEQ ID NO: 372388 - RNA, 19 nt, Artificial Sequence
  Description of Artificial Sequence: Synthetic oligonucleotide
  Antisense Strand to SEQ ID NO: 372387
cuucugagcaccuauucua

SEQ ID NO: 372389 - RNA, 19 nt, Artificial Sequence
  Description of Artificial Sequence: Synthetic oligonucleotide
  Sense Strand Starting at position 683 of SEQ ID NO: 316543
ggacccagucuauaagcaa

SEQ ID NO: 372390 - RNA, 19 nt, Artificial Sequence
  Description of Artificial Sequence: Synthetic oligonucleotide
  Antisense Strand to SEQ ID NO: 372389
uugcuuauagacugggucc

SEQ ID NO: 372391 - RNA, 19 nt, Artificial Sequence
  Description of Artificial Sequence: Synthetic oligonucleotide
  Sense Strand Starting at position 683 of SEQ ID NO: 317448
ggagaaagcuacucuuaag

SEQ ID NO: 372392 - RNA, 19 nt, Artificial Sequence
  Description of Artificial Sequence: Synthetic oligonucleotide
  Antisense Strand to SEQ ID NO: 372391
cuuaagaguagcuuucucc

SEQ ID NO: 372393 - RNA, 19 nt, Artificial Sequence
  Description of Artificial Sequence: Synthetic oligonucleotide
  Sense Strand Starting at position 683 of SEQ ID NO: 317465
agucauugauuugccaguu

SEQ ID NO: 372394 - RNA, 19 nt, Artificial Sequence
  Description of Artificial Sequence: Synthetic oligonucleotide
  Antisense Strand to SEQ ID NO: 372393
aacuggcaaaucaaugacu

SEQ ID NO: 372395 - RNA, 19 nt, Artificial Sequence
  Description of Artificial Sequence: Synthetic oligonucleotide
  Sense Strand Starting at position 683 of SEQ ID NO: 317466
gucauugauuugccaguua

SEQ ID NO: 372396 - RNA, 19 nt, Artificial Sequence
  Description of Artificial Sequence: Synthetic oligonucleotide
  Antisense Strand to SEQ ID NO: 372395
uaacuggcaaaucaaugac

SEQ ID NO: 372397 - RNA, 19 nt, Artificial Sequence
  Description of Artificial Sequence: Synthetic oligonucleotide
  Sense Strand Starting at position 683 of SEQ ID NO: 317498
cucggaaaucccugggaga

SEQ ID NO: 372398 - RNA, 19 nt, Artificial Sequence
  Description of Artificial Sequence: Synthetic oligonucleotide
  Antisense Strand to SEQ ID NO: 372397
ucucccagggauuuccgag

SEQ ID NO: 372399 - RNA, 19 nt, Artificial Sequence
  Description of Artificial Sequence: Synthetic oligonucleotide
  Sense Strand Starting at position 683 of SEQ ID NO: 317499
ucggaaaucccugggagau

SEQ ID NO: 372400 - RNA, 19 nt, Artificial Sequence
  Description of Artificial Sequence: Synthetic oligonucleotide
  Antisense Strand to SEQ ID NO: 372399
aucucccagggauuuccga

SEQ ID NO: 372401 - RNA, 19 nt, Artificial Sequence
  Description of Artificial Sequence: Synthetic oligonucleotide
  Sense Strand Starting at position 683 of SEQ ID NO: 317500
cggaaaucccugggagauc

SEQ ID NO: 372402 - RNA, 19 nt, Artificial Sequence
  Description of Artificial Sequence: Synthetic oligonucleotide
  Antisense Strand to SEQ ID NO: 372401
gaucucccagggauuuccg

SEQ ID NO: 372403 - RNA, 19 nt, Artificial Sequence
  Description of Artificial Sequence: Synthetic oligonucleotide
  Sense Strand Starting at position 683 of SEQ ID NO: 317578
gggcuugucccgagagcug

SEQ ID NO: 372404 - RNA, 19 nt, Artificial Sequence
  Description of Artificial Sequence: Synthetic oligonucleotide
  Antisense Strand to SEQ ID NO: 372403
cagcucucgggacaagccc

SEQ ID NO: 372405 - RNA, 19 nt, Artificial Sequence
  Description of Artificial Sequence: Synthetic oligonucleotide
  Sense Strand Starting at position 683 of SEQ ID NO: 317691
ucaguaacuguugaucuga

SEQ ID NO: 372406 - RNA, 19 nt, Artificial Sequence
  Description of Artificial Sequence: Synthetic oligonucleotide
  Antisense Strand to SEQ ID NO: 372405
ucagaucaacaguuacuga

SEQ ID NO: 372407 - RNA, 19 nt, Artificial Sequence
  Description of Artificial Sequence: Synthetic oligonucleotide
  Sense Strand Starting at position 683 of SEQ ID NO: 317693
aguaacuguugaucugaga

SEQ ID NO: 372408 - RNA, 19 nt, Artificial Sequence
  Description of Artificial Sequence: Synthetic oligonucleotide
  Antisense Strand to SEQ ID NO: 372407
ucucagaucaacaguuacu

SEQ ID NO: 372409 - RNA, 19 nt, Artificial Sequence
  Description of Artificial Sequence: Synthetic oligonucleotide
  Sense Strand Starting at position 683 of SEQ ID NO: 317725
cugaguccugggcauuaaa

SEQ ID NO: 372410 - RNA, 19 nt, Artificial Sequence
  Description of Artificial Sequence: Synthetic oligonucleotide
  Antisense Strand to SEQ ID NO: 372409
uuuaaugcccaggacucag

SEQ ID NO: 372411 - RNA, 19 nt, Artificial Sequence
  Description of Artificial Sequence: Synthetic oligonucleotide
  Sense Strand Starting at position 683 of SEQ ID NO: 317728
aguccugggcauuaaauaa

SEQ ID NO: 372412 - RNA, 19 nt, Artificial Sequence
  Description of Artificial Sequence: Synthetic oligonucleotide
  Antisense Strand to SEQ ID NO: 372411
uuauuuaaugcccaggacu

SEQ ID NO: 372413 - RNA, 19 nt, Artificial Sequence
  Description of Artificial Sequence: Synthetic oligonucleotide
  Sense Strand Starting at position 683 of SEQ ID NO: 318069
ccuguuugaguccaaauua

SEQ ID NO: 372414 - RNA, 19 nt, Artificial Sequence
  Description of Artificial Sequence: Synthetic oligonucleotide
  Antisense Strand to SEQ ID NO: 372413
uaauuuggacucaaacagg

SEQ ID NO: 372415 - RNA, 19 nt, Artificial Sequence
  Description of Artificial Sequence: Synthetic oligonucleotide
  Sense Strand Starting at position 683 of SEQ ID NO: 318206
cuauuauuaccagagguuc

SEQ ID NO: 372416 - RNA, 19 nt, Artificial Sequence
  Description of Artificial Sequence: Synthetic oligonucleotide
  Antisense Strand to SEQ ID NO: 372415
gaaccucugguaauaauag

SEQ ID NO: 372417 - RNA, 19 nt, Artificial Sequence
  Description of Artificial Sequence: Synthetic oligonucleotide
  Sense Strand Starting at position 683 of SEQ ID NO: 318214
accagagguucuucuauaa

SEQ ID NO: 372418 - RNA, 19 nt, Artificial Sequence
  Description of Artificial Sequence: Synthetic oligonucleotide
  Antisense Strand to SEQ ID NO: 372417
uuauagaagaaccucuggu

SEQ ID NO: 372419 - RNA, 19 nt, Artificial Sequence
  Description of Artificial Sequence: Synthetic oligonucleotide
  Sense Strand Starting at position 683 of SEQ ID NO: 318253
cucauugguuauccugaga

SEQ ID NO: 372420 - RNA, 19 nt, Artificial Sequence
  Description of Artificial Sequence: Synthetic oligonucleotide
  Antisense Strand to SEQ ID NO: 372419
ucucaggauaaccaaugag

SEQ ID NO: 372421 - RNA, 19 nt, Artificial Sequence
  Description of Artificial Sequence: Synthetic oligonucleotide
  Sense Strand Starting at position 683 of SEQ ID NO: 318447
auccguuaugaucauuauu

SEQ ID NO: 372422 - RNA, 19 nt, Artificial Sequence
  Description of Artificial Sequence: Synthetic oligonucleotide
  Antisense Strand to SEQ ID NO: 372421
aauaaugaucauaacggau

SEQ ID NO: 372423 - RNA, 19 nt, Artificial Sequence
  Description of Artificial Sequence: Synthetic oligonucleotide
  Sense Strand Starting at position 683 of SEQ ID NO: 318522
uccuuuaauguugagacga

SEQ ID NO: 372424 - RNA, 19 nt, Artificial Sequence
  Description of Artificial Sequence: Synthetic oligonucleotide
  Antisense Strand to SEQ ID NO: 372423
ucgucucaacauuaaagga

SEQ ID NO: 372425 - RNA, 19 nt, Artificial Sequence
  Description of Artificial Sequence: Synthetic oligonucleotide
  Sense Strand Starting at position 683 of SEQ ID NO: 318527
uaauguugagacgagaagu

SEQ ID NO: 372426 - RNA, 19 nt, Artificial Sequence
  Description of Artificial Sequence: Synthetic oligonucleotide
  Antisense Strand to SEQ ID NO: 372425
acuucucgucucaacauua

SEQ ID NO: 372427 - RNA, 19 nt, Artificial Sequence
  Description of Artificial Sequence: Synthetic oligonucleotide
  Sense Strand Starting at position 683 of SEQ ID NO: 318545
ucuucuuccgaucaaaggu

SEQ ID NO: 372428 - RNA, 19 nt, Artificial Sequence
  Description of Artificial Sequence: Synthetic oligonucleotide
  Antisense Strand to SEQ ID NO: 372427
accuuugaucggaagaaga

SEQ ID NO: 372429 - RNA, 19 nt, Artificial Sequence
  Description of Artificial Sequence: Synthetic oligonucleotide
  Sense Strand Starting at position 683 of SEQ ID NO: 318828
gucccauaggauuagguua

SEQ ID NO: 372430 - RNA, 19 nt, Artificial Sequence
  Description of Artificial Sequence: Synthetic oligonucleotide
  Antisense Strand to SEQ ID NO: 372429
uaaccuaauccuaugggac

SEQ ID NO: 372431 - RNA, 19 nt, Artificial Sequence
  Description of Artificial Sequence: Synthetic oligonucleotide
  Sense Strand Starting at position 683 of SEQ ID NO: 319166
uaacauaucgguuagguca

SEQ ID NO: 372432 - RNA, 19 nt, Artificial Sequence
  Description of Artificial Sequence: Synthetic oligonucleotide
  Antisense Strand to SEQ ID NO: 372431
ugaccuaaccgauauguua

SEQ ID NO: 372433 - RNA, 19 nt, Artificial Sequence
  Description of Artificial Sequence: Synthetic oligonucleotide
  Sense Strand Starting at position 684 of SEQ ID NO: 315484
guaggaccuuuaucuuguu

SEQ ID NO: 372434 - RNA, 19 nt, Artificial Sequence
  Description of Artificial Sequence: Synthetic oligonucleotide
  Antisense Strand to SEQ ID NO: 372433
aacaagauaaagguccuac

SEQ ID NO: 372435 - RNA, 19 nt, Artificial Sequence
  Description of Artificial Sequence: Synthetic oligonucleotide
  Sense Strand Starting at position 684 of SEQ ID NO: 315489
accuuuaucuuguuuagua

SEQ ID NO: 372436 - RNA, 19 nt, Artificial Sequence
  Description of Artificial Sequence: Synthetic oligonucleotide
  Antisense Strand to SEQ ID NO: 372435
uacuaaacaagauaaaggu

SEQ ID NO: 372437 - RNA, 19 nt, Artificial Sequence
  Description of Artificial Sequence: Synthetic oligonucleotide
  Sense Strand Starting at position 684 of SEQ ID NO: 315978
ucacacgauuucuacagaa

SEQ ID NO: 372438 - RNA, 19 nt, Artificial Sequence
  Description of Artificial Sequence: Synthetic oligonucleotide
  Antisense Strand to SEQ ID NO: 372437
uucuguagaaaucguguga

SEQ ID NO: 372439 - RNA, 19 nt, Artificial Sequence
  Description of Artificial Sequence: Synthetic oligonucleotide
  Sense Strand Starting at position 684 of SEQ ID NO: 316258
ugcugauuuccagguugcu

SEQ ID NO: 372440 - RNA, 19 nt, Artificial Sequence
  Description of Artificial Sequence: Synthetic oligonucleotide
  Antisense Strand to SEQ ID NO: 372439
agcaaccuggaaaucagca

SEQ ID NO: 372441 - RNA, 19 nt, Artificial Sequence
  Description of Artificial Sequence: Synthetic oligonucleotide
  Sense Strand Starting at position 684 of SEQ ID NO: 316305
gguggauuggugugaggca

SEQ ID NO: 372442 - RNA, 19 nt, Artificial Sequence
  Description of Artificial Sequence: Synthetic oligonucleotide
  Antisense Strand to SEQ ID NO: 372441
ugccucacaccaauccacc

SEQ ID NO: 372443 - RNA, 19 nt, Artificial Sequence
  Description of Artificial Sequence: Synthetic oligonucleotide
  Sense Strand Starting at position 684 of SEQ ID NO: 316325
ccgccuguaacugagauau

SEQ ID NO: 372444 - RNA, 19 nt, Artificial Sequence
  Description of Artificial Sequence: Synthetic oligonucleotide
  Antisense Strand to SEQ ID NO: 372443
auaucucaguuacaggcgg

SEQ ID NO: 372445 - RNA, 19 nt, Artificial Sequence
  Description of Artificial Sequence: Synthetic oligonucleotide
  Sense Strand Starting at position 684 of SEQ ID NO: 316477
agauaaggcccaggaucau

SEQ ID NO: 372446 - RNA, 19 nt, Artificial Sequence
  Description of Artificial Sequence: Synthetic oligonucleotide
  Antisense Strand to SEQ ID NO: 372445
augauccugggccuuaucu

SEQ ID NO: 372447 - RNA, 19 nt, Artificial Sequence
  Description of Artificial Sequence: Synthetic oligonucleotide
  Sense Strand Starting at position 684 of SEQ ID NO: 316483
ggcccaggaucaucauuaa

SEQ ID NO: 372448 - RNA, 19 nt, Artificial Sequence
  Description of Artificial Sequence: Synthetic oligonucleotide
  Antisense Strand to SEQ ID NO: 372447
uuaaugaugauccugggcc

SEQ ID NO: 372449 - RNA, 19 nt, Artificial Sequence
  Description of Artificial Sequence: Synthetic oligonucleotide
  Sense Strand Starting at position 684 of SEQ ID NO: 316561
uuaguuuguugaucaggau

SEQ ID NO: 372450 - RNA, 19 nt, Artificial Sequence
  Description of Artificial Sequence: Synthetic oligonucleotide
  Antisense Strand to SEQ ID NO: 372449
auccugaucaacaaacuaa

SEQ ID NO: 372451 - RNA, 19 nt, Artificial Sequence
  Description of Artificial Sequence: Synthetic oligonucleotide
  Sense Strand Starting at position 684 of SEQ ID NO: 316565
uuuguugaucaggauguaa

SEQ ID NO: 372452 - RNA, 19 nt, Artificial Sequence
  Description of Artificial Sequence: Synthetic oligonucleotide
  Antisense Strand to SEQ ID NO: 372451
uuacauccugaucaacaaa

SEQ ID NO: 372453 - RNA, 19 nt, Artificial Sequence
  Description of Artificial Sequence: Synthetic oligonucleotide
  Sense Strand Starting at position 684 of SEQ ID NO: 316567
uguugaucaggauguaagu

SEQ ID NO: 372454 - RNA, 19 nt, Artificial Sequence
  Description of Artificial Sequence: Synthetic oligonucleotide
  Antisense Strand to SEQ ID NO: 372453
acuuacauccugaucaaca

SEQ ID NO: 372455 - RNA, 19 nt, Artificial Sequence
  Description of Artificial Sequence: Synthetic oligonucleotide
  Sense Strand Starting at position 684 of SEQ ID NO: 316587
uggugcuugcggucaaacu

SEQ ID NO: 372456 - RNA, 19 nt, Artificial Sequence
  Description of Artificial Sequence: Synthetic oligonucleotide
  Antisense Strand to SEQ ID NO: 372455
aguuugaccgcaagcacca

SEQ ID NO: 372457 - RNA, 19 nt, Artificial Sequence
  Description of Artificial Sequence: Synthetic oligonucleotide
  Sense Strand Starting at position 684 of SEQ ID NO: 316654
cgaugauguccgggaacag

SEQ ID NO: 372458 - RNA, 19 nt, Artificial Sequence
  Description of Artificial Sequence: Synthetic oligonucleotide
  Antisense Strand to SEQ ID NO: 372457
cuguucccggacaucaucg

SEQ ID NO: 372459 - RNA, 19 nt, Artificial Sequence
  Description of Artificial Sequence: Synthetic oligonucleotide
  Sense Strand Starting at position 684 of SEQ ID NO: 316678
ucaagucuccaauaacgua

SEQ ID NO: 372460 - RNA, 19 nt, Artificial Sequence
  Description of Artificial Sequence: Synthetic oligonucleotide
  Antisense Strand to SEQ ID NO: 372459
uacguuauuggagacuuga

SEQ ID NO: 372461 - RNA, 19 nt, Artificial Sequence
  Description of Artificial Sequence: Synthetic oligonucleotide
  Sense Strand Starting at position 684 of SEQ ID NO: 317334
ggcugcuauaaguggaaau

SEQ ID NO: 372462 - RNA, 19 nt, Artificial Sequence
  Description of Artificial Sequence: Synthetic oligonucleotide
  Antisense Strand to SEQ ID NO: 372461
auuuccacuuauagcagcc

SEQ ID NO: 372463 - RNA, 19 nt, Artificial Sequence
  Description of Artificial Sequence: Synthetic oligonucleotide
  Sense Strand Starting at position 684 of SEQ ID NO: 317335
gcugcuauaaguggaaaug

SEQ ID NO: 372464 - RNA, 19 nt, Artificial Sequence
  Description of Artificial Sequence: Synthetic oligonucleotide
  Antisense Strand to SEQ ID NO: 372463
cauuuccacuuauagcagc

SEQ ID NO: 372465 - RNA, 19 nt, Artificial Sequence
  Description of Artificial Sequence: Synthetic oligonucleotide
  Sense Strand Starting at position 684 of SEQ ID NO: 317460
gggaauguuucgguguaca

SEQ ID NO: 372466 - RNA, 19 nt, Artificial Sequence
  Description of Artificial Sequence: Synthetic oligonucleotide
  Antisense Strand to SEQ ID NO: 372465
uguacaccgaaacauuccc

SEQ ID NO: 372467 - RNA, 19 nt, Artificial Sequence
  Description of Artificial Sequence: Synthetic oligonucleotide
  Sense Strand Starting at position 684 of SEQ ID NO: 317463
aauguuucgguguacaaga

SEQ ID NO: 372468 - RNA, 19 nt, Artificial Sequence
  Description of Artificial Sequence: Synthetic oligonucleotide
  Antisense Strand to SEQ ID NO: 372467
ucuuguacaccgaaacauu

SEQ ID NO: 372469 - RNA, 19 nt, Artificial Sequence
  Description of Artificial Sequence: Synthetic oligonucleotide
  Sense Strand Starting at position 684 of SEQ ID NO: 317603
gagguaagacugugcgaac

SEQ ID NO: 372470 - RNA, 19 nt, Artificial Sequence
  Description of Artificial Sequence: Synthetic oligonucleotide
  Antisense Strand to SEQ ID NO: 372469
guucgcacagucuuaccuc

SEQ ID NO: 372471 - RNA, 19 nt, Artificial Sequence
  Description of Artificial Sequence: Synthetic oligonucleotide
  Sense Strand Starting at position 684 of SEQ ID NO: 317614
gugcgaaccaauuaguaaa

SEQ ID NO: 372472 - RNA, 19 nt, Artificial Sequence
  Description of Artificial Sequence: Synthetic oligonucleotide
  Antisense Strand to SEQ ID NO: 372471
uuuacuaauugguucgcac

SEQ ID NO: 372473 - RNA, 19 nt, Artificial Sequence
  Description of Artificial Sequence: Synthetic oligonucleotide
  Sense Strand Starting at position 684 of SEQ ID NO: 317688
gauuuaagcaagugagugu

SEQ ID NO: 372474 - RNA, 19 nt, Artificial Sequence
  Description of Artificial Sequence: Synthetic oligonucleotide
  Antisense Strand to SEQ ID NO: 372473
acacucacuugcuuaaauc

SEQ ID NO: 372475 - RNA, 19 nt, Artificial Sequence
  Description of Artificial Sequence: Synthetic oligonucleotide
  Sense Strand Starting at position 684 of SEQ ID NO: 317734
ggcgguauuguggaagaua

SEQ ID NO: 372476 - RNA, 19 nt, Artificial Sequence
  Description of Artificial Sequence: Synthetic oligonucleotide
  Antisense Strand to SEQ ID NO: 372475
uaucuuccacaauaccgcc

SEQ ID NO: 372477 - RNA, 19 nt, Artificial Sequence
  Description of Artificial Sequence: Synthetic oligonucleotide
  Sense Strand Starting at position 684 of SEQ ID NO: 317788
uuuggaggauuauuauagu

SEQ ID NO: 372478 - RNA, 19 nt, Artificial Sequence
  Description of Artificial Sequence: Synthetic oligonucleotide
  Antisense Strand to SEQ ID NO: 372477
acuauaauaauccuccaaa

SEQ ID NO: 372479 - RNA, 19 nt, Artificial Sequence
  Description of Artificial Sequence: Synthetic oligonucleotide
  Sense Strand Starting at position 684 of SEQ ID NO: 317829
gccuauuuacuggguugua

SEQ ID NO: 372480 - RNA, 19 nt, Artificial Sequence
  Description of Artificial Sequence: Synthetic oligonucleotide
  Antisense Strand to SEQ ID NO: 372479
uacaacccaguaaauaggc

SEQ ID NO: 372481 - RNA, 19 nt, Artificial Sequence
  Description of Artificial Sequence: Synthetic oligonucleotide
  Sense Strand Starting at position 684 of SEQ ID NO: 317980
agggacugguuggaagaaa

SEQ ID NO: 372482 - RNA, 19 nt, Artificial Sequence
  Description of Artificial Sequence: Synthetic oligonucleotide
  Antisense Strand to SEQ ID NO: 372481
uuucuuccaaccagucccu

SEQ ID NO: 372483 - RNA, 19 nt, Artificial Sequence
  Description of Artificial Sequence: Synthetic oligonucleotide
  Sense Strand Starting at position 684 of SEQ ID NO: 318258
cccuuccuucccugucaga

SEQ ID NO: 372484 - RNA, 19 nt, Artificial Sequence
  Description of Artificial Sequence: Synthetic oligonucleotide
  Antisense Strand to SEQ ID NO: 372483
ucugacagggaaggaaggg

SEQ ID NO: 372485 - RNA, 19 nt, Artificial Sequence
  Description of Artificial Sequence: Synthetic oligonucleotide
  Sense Strand Starting at position 684 of SEQ ID NO: 318494
ucacuaauguagguacuaa

SEQ ID NO: 372486 - RNA, 19 nt, Artificial Sequence
  Description of Artificial Sequence: Synthetic oligonucleotide
  Antisense Strand to SEQ ID NO: 372485
uuaguaccuacauuaguga

SEQ ID NO: 372487 - RNA, 19 nt, Artificial Sequence
  Description of Artificial Sequence: Synthetic oligonucleotide
  Sense Strand Starting at position 684 of SEQ ID NO: 318553
ugacacaguuugcuacuua

SEQ ID NO: 372488 - RNA, 19 nt, Artificial Sequence
  Description of Artificial Sequence: Synthetic oligonucleotide
  Antisense Strand to SEQ ID NO: 372487
uaaguagcaaacuguguca

SEQ ID NO: 372489 - RNA, 19 nt, Artificial Sequence
  Description of Artificial Sequence: Synthetic oligonucleotide
  Sense Strand Starting at position 684 of SEQ ID NO: 318614
ucuguuaccuuaucaguaa

SEQ ID NO: 372490 - RNA, 19 nt, Artificial Sequence
  Description of Artificial Sequence: Synthetic oligonucleotide
  Antisense Strand to SEQ ID NO: 372489
uuacugauaagguaacaga

SEQ ID NO: 372491 - RNA, 19 nt, Artificial Sequence
  Description of Artificial Sequence: Synthetic oligonucleotide
  Sense Strand Starting at position 684 of SEQ ID NO: 318653
cagcauuguggagauuaug

SEQ ID NO: 372492 - RNA, 19 nt, Artificial Sequence
  Description of Artificial Sequence: Synthetic oligonucleotide
  Antisense Strand to SEQ ID NO: 372491
cauaaucuccacaaugcug

SEQ ID NO: 372493 - RNA, 19 nt, Artificial Sequence
  Description of Artificial Sequence: Synthetic oligonucleotide
  Sense Strand Starting at position 684 of SEQ ID NO: 318656
cauuguggagauuauguga

SEQ ID NO: 372494 - RNA, 19 nt, Artificial Sequence
  Description of Artificial Sequence: Synthetic oligonucleotide
  Antisense Strand to SEQ ID NO: 372493
ucacauaaucuccacaaug

SEQ ID NO: 372495 - RNA, 19 nt, Artificial Sequence
  Description of Artificial Sequence: Synthetic oligonucleotide
  Sense Strand Starting at position 684 of SEQ ID NO: 318659
uguggagauuaugugaagu

SEQ ID NO: 372496 - RNA, 19 nt, Artificial Sequence
  Description of Artificial Sequence: Synthetic oligonucleotide
  Antisense Strand to SEQ ID NO: 372495
acuucacauaaucuccaca

SEQ ID NO: 372497 - RNA, 19 nt, Artificial Sequence
  Description of Artificial Sequence: Synthetic oligonucleotide
  Sense Strand Starting at position 684 of SEQ ID NO: 318701
gugcuuggcacauauugau

SEQ ID NO: 372498 - RNA, 19 nt, Artificial Sequence
  Description of Artificial Sequence: Synthetic oligonucleotide
  Antisense Strand to SEQ ID NO: 372497
aucaauaugugccaagcac

SEQ ID NO: 372499 - RNA, 19 nt, Artificial Sequence
  Description of Artificial Sequence: Synthetic oligonucleotide
  Sense Strand Starting at position 684 of SEQ ID NO: 318806
ccuagcacucuguggagau

SEQ ID NO: 372500 - RNA, 19 nt, Artificial Sequence
  Description of Artificial Sequence: Synthetic oligonucleotide
  Antisense Strand to SEQ ID NO: 372499
aucuccacagagugcuagg

SEQ ID NO: 372501 - RNA, 19 nt, Artificial Sequence
  Description of Artificial Sequence: Synthetic oligonucleotide
  Sense Strand Starting at position 684 of SEQ ID NO: 318830
ggagguguccugggacaua

SEQ ID NO: 372502 - RNA, 19 nt, Artificial Sequence
  Description of Artificial Sequence: Synthetic oligonucleotide
  Antisense Strand to SEQ ID NO: 372501
uaugucccaggacaccucc

SEQ ID NO: 372503 - RNA, 19 nt, Artificial Sequence
  Description of Artificial Sequence: Synthetic oligonucleotide
  Sense Strand Starting at position 684 of SEQ ID NO: 318872
cccauucugugaccuugua

SEQ ID NO: 372504 - RNA, 19 nt, Artificial Sequence
  Description of Artificial Sequence: Synthetic oligonucleotide
  Antisense Strand to SEQ ID NO: 372503
uacaaggucacagaauggg

SEQ ID NO: 372505 - RNA, 19 nt, Artificial Sequence
  Description of Artificial Sequence: Synthetic oligonucleotide
  Sense Strand Starting at position 684 of SEQ ID NO: 319124
auuuguugugcuuaucuua

SEQ ID NO: 372506 - RNA, 19 nt, Artificial Sequence
  Description of Artificial Sequence: Synthetic oligonucleotide
  Antisense Strand to SEQ ID NO: 372505
uaagauaagcacaacaaau

SEQ ID NO: 372507 - RNA, 19 nt, Artificial Sequence
  Description of Artificial Sequence: Synthetic oligonucleotide
  Sense Strand Starting at position 684 of SEQ ID NO: 319197
ugaagagcuucucuuaguc

SEQ ID NO: 372508 - RNA, 19 nt, Artificial Sequence
  Description of Artificial Sequence: Synthetic oligonucleotide
  Antisense Strand to SEQ ID NO: 372507
gacuaagagaagcucuuca

SEQ ID NO: 372509 - RNA, 19 nt, Artificial Sequence
  Description of Artificial Sequence: Synthetic oligonucleotide
  Sense Strand Starting at position 684 of SEQ ID NO: 319206
ucucuuagucaauacucga

SEQ ID NO: 372510 - RNA, 19 nt, Artificial Sequence
  Description of Artificial Sequence: Synthetic oligonucleotide
  Antisense Strand to SEQ ID NO: 372509
ucgaguauugacuaagaga

SEQ ID NO: 372511 - RNA, 19 nt, Artificial Sequence
  Description of Artificial Sequence: Synthetic oligonucleotide
  Sense Strand Starting at position 684 of SEQ ID NO: 319209
cuuagucaauacucgauau

SEQ ID NO: 372512 - RNA, 19 nt, Artificial Sequence
  Description of Artificial Sequence: Synthetic oligonucleotide
  Antisense Strand to SEQ ID NO: 372511
auaucgaguauugacuaag

SEQ ID NO: 372513 - RNA, 19 nt, Artificial Sequence
  Description of Artificial Sequence: Synthetic oligonucleotide
  Sense Strand Starting at position 685 of SEQ ID NO: 315271
ucuccauuggguugacaug

SEQ ID NO: 372514 - RNA, 19 nt, Artificial Sequence
  Description of Artificial Sequence: Synthetic oligonucleotide
  Antisense Strand to SEQ ID NO: 372513
caugucaacccaauggaga

SEQ ID NO: 372515 - RNA, 19 nt, Artificial Sequence
  Description of Artificial Sequence: Synthetic oligonucleotide
  Sense Strand Starting at position 685 of SEQ ID NO: 315307
guaccaaagugagauguaa

SEQ ID NO: 372516 - RNA, 19 nt, Artificial Sequence
  Description of Artificial Sequence: Synthetic oligonucleotide
  Antisense Strand to SEQ ID NO: 372515
uuacaucucacuuugguac

SEQ ID NO: 372517 - RNA, 19 nt, Artificial Sequence
  Description of Artificial Sequence: Synthetic oligonucleotide
  Sense Strand Starting at position 685 of SEQ ID NO: 315315
gugagauguaagggaccua

SEQ ID NO: 372518 - RNA, 19 nt, Artificial Sequence
  Description of Artificial Sequence: Synthetic oligonucleotide
  Antisense Strand to SEQ ID NO: 372517
uaggucccuuacaucucac

SEQ ID NO: 372519 - RNA, 19 nt, Artificial Sequence
  Description of Artificial Sequence: Synthetic oligonucleotide
  Sense Strand Starting at position 685 of SEQ ID NO: 315592
acaacucguucuuagaacu

SEQ ID NO: 372520 - RNA, 19 nt, Artificial Sequence
  Description of Artificial Sequence: Synthetic oligonucleotide
  Antisense Strand to SEQ ID NO: 372519
aguucuaagaacgaguugu

SEQ ID NO: 372521 - RNA, 19 nt, Artificial Sequence
  Description of Artificial Sequence: Synthetic oligonucleotide
  Sense Strand Starting at position 685 of SEQ ID NO: 315613
ugugaaucggagugagaua

SEQ ID NO: 372522 - RNA, 19 nt, Artificial Sequence
  Description of Artificial Sequence: Synthetic oligonucleotide
  Antisense Strand to SEQ ID NO: 372521
uaucucacuccgauucaca

SEQ ID NO: 372523 - RNA, 19 nt, Artificial Sequence
  Description of Artificial Sequence: Synthetic oligonucleotide
  Sense Strand Starting at position 685 of SEQ ID NO: 316005
acugacucguggccaaaga

SEQ ID NO: 372524 - RNA, 19 nt, Artificial Sequence
  Description of Artificial Sequence: Synthetic oligonucleotide
  Antisense Strand to SEQ ID NO: 372523
ucuuuggccacgagucagu

SEQ ID NO: 372525 - RNA, 19 nt, Artificial Sequence
  Description of Artificial Sequence: Synthetic oligonucleotide
  Sense Strand Starting at position 685 of SEQ ID NO: 316006
cugacucguggccaaagaa

SEQ ID NO: 372526 - RNA, 19 nt, Artificial Sequence
  Description of Artificial Sequence: Synthetic oligonucleotide
  Antisense Strand to SEQ ID NO: 372525
uucuuuggccacgagucag

SEQ ID NO: 372527 - RNA, 19 nt, Artificial Sequence
  Description of Artificial Sequence: Synthetic oligonucleotide
  Sense Strand Starting at position 685 of SEQ ID NO: 316122
gcacuuaguggcggagaua

SEQ ID NO: 372528 - RNA, 19 nt, Artificial Sequence
  Description of Artificial Sequence: Synthetic oligonucleotide
  Antisense Strand to SEQ ID NO: 372527
uaucuccgccacuaagugc

SEQ ID NO: 372529 - RNA, 19 nt, Artificial Sequence
  Description of Artificial Sequence: Synthetic oligonucleotide
  Sense Strand Starting at position 685 of SEQ ID NO: 316123
cacuuaguggcggagauaa

SEQ ID NO: 372530 - RNA, 19 nt, Artificial Sequence
  Description of Artificial Sequence: Synthetic oligonucleotide
  Antisense Strand to SEQ ID NO: 372529
uuaucuccgccacuaagug

SEQ ID NO: 372531 - RNA, 19 nt, Artificial Sequence
  Description of Artificial Sequence: Synthetic oligonucleotide
  Sense Strand Starting at position 685 of SEQ ID NO: 316237
ucgcaacaacuuuguguau

SEQ ID NO: 372532 - RNA, 19 nt, Artificial Sequence
  Description of Artificial Sequence: Synthetic oligonucleotide
  Antisense Strand to SEQ ID NO: 372531
auacacaaaguuguugcga

SEQ ID NO: 372533 - RNA, 19 nt, Artificial Sequence
  Description of Artificial Sequence: Synthetic oligonucleotide
  Sense Strand Starting at position 685 of SEQ ID NO: 316238
cgcaacaacuuuguguauu

SEQ ID NO: 372534 - RNA, 19 nt, Artificial Sequence
  Description of Artificial Sequence: Synthetic oligonucleotide
  Antisense Strand to SEQ ID NO: 372533
aauacacaaaguuguugcg

SEQ ID NO: 372535 - RNA, 19 nt, Artificial Sequence
  Description of Artificial Sequence: Synthetic oligonucleotide
  Sense Strand Starting at position 685 of SEQ ID NO: 316239
gcaacaacuuuguguauuu

SEQ ID NO: 372536 - RNA, 19 nt, Artificial Sequence
  Description of Artificial Sequence: Synthetic oligonucleotide
  Antisense Strand to SEQ ID NO: 372535
aaauacacaaaguuguugc

SEQ ID NO: 372537 - RNA, 19 nt, Artificial Sequence
  Description of Artificial Sequence: Synthetic oligonucleotide
  Sense Strand Starting at position 685 of SEQ ID NO: 316658
auucgugaacccugcuagu

SEQ ID NO: 372538 - RNA, 19 nt, Artificial Sequence
  Description of Artificial Sequence: Synthetic oligonucleotide
  Antisense Strand to SEQ ID NO: 372537
acuagcaggguucacgaau

SEQ ID NO: 372539 - RNA, 19 nt, Artificial Sequence
  Description of Artificial Sequence: Synthetic oligonucleotide
  Sense Strand Starting at position 685 of SEQ ID NO: 316679
agugguucuucuucuggau

SEQ ID NO: 372540 - RNA, 19 nt, Artificial Sequence
  Description of Artificial Sequence: Synthetic oligonucleotide
  Antisense Strand to SEQ ID NO: 372539
auccagaagaagaaccacu

SEQ ID NO: 372541 - RNA, 19 nt, Artificial Sequence
  Description of Artificial Sequence: Synthetic oligonucleotide
  Sense Strand Starting at position 685 of SEQ ID NO: 316783
ccgcuuguucaugggagaa

SEQ ID NO: 372542 - RNA, 19 nt, Artificial Sequence
  Description of Artificial Sequence: Synthetic oligonucleotide
  Antisense Strand to SEQ ID NO: 372541
uucucccaugaacaagcgg

SEQ ID NO: 372543 - RNA, 19 nt, Artificial Sequence
  Description of Artificial Sequence: Synthetic oligonucleotide
  Sense Strand Starting at position 685 of SEQ ID NO: 316785
gcuuguucaugggagaaac

SEQ ID NO: 372544 - RNA, 19 nt, Artificial Sequence
  Description of Artificial Sequence: Synthetic oligonucleotide
  Antisense Strand to SEQ ID NO: 372543
guuucucccaugaacaagc

SEQ ID NO: 372545 - RNA, 19 nt, Artificial Sequence
  Description of Artificial Sequence: Synthetic oligonucleotide
  Sense Strand Starting at position 685 of SEQ ID NO: 317372
gagagauuccaacgugcuu

SEQ ID NO: 372546 - RNA, 19 nt, Artificial Sequence
  Description of Artificial Sequence: Synthetic oligonucleotide
  Antisense Strand to SEQ ID NO: 372545
aagcacguuggaaucucuc

SEQ ID NO: 372547 - RNA, 19 nt, Artificial Sequence
  Description of Artificial Sequence: Synthetic oligonucleotide
  Sense Strand Starting at position 685 of SEQ ID NO: 317562
gcaaucuggcuuuggcauu

SEQ ID NO: 372548 - RNA, 19 nt, Artificial Sequence
  Description of Artificial Sequence: Synthetic oligonucleotide
  Antisense Strand to SEQ ID NO: 372547
aaugccaaagccagauugc

SEQ ID NO: 372549 - RNA, 19 nt, Artificial Sequence
  Description of Artificial Sequence: Synthetic oligonucleotide
  Sense Strand Starting at position 685 of SEQ ID NO: 317951
ccuuaaacuuugggaccaa

SEQ ID NO: 372550 - RNA, 19 nt, Artificial Sequence
  Description of Artificial Sequence: Synthetic oligonucleotide
  Antisense Strand to SEQ ID NO: 372549
uuggucccaaaguuuaagg

SEQ ID NO: 372551 - RNA, 19 nt, Artificial Sequence
  Description of Artificial Sequence: Synthetic oligonucleotide
  Sense Strand Starting at position 685 of SEQ ID NO: 318001
gagagaagccauggugcua

SEQ ID NO: 372552 - RNA, 19 nt, Artificial Sequence
  Description of Artificial Sequence: Synthetic oligonucleotide
  Antisense Strand to SEQ ID NO: 372551
uagcaccauggcuucucuc

SEQ ID NO: 372553 - RNA, 19 nt, Artificial Sequence
  Description of Artificial Sequence: Synthetic oligonucleotide
  Sense Strand Starting at position 685 of SEQ ID NO: 318225
gugagagaacucggaauuc

SEQ ID NO: 372554 - RNA, 19 nt, Artificial Sequence
  Description of Artificial Sequence: Synthetic oligonucleotide
  Antisense Strand to SEQ ID NO: 372553
gaauuccgaguucucucac

SEQ ID NO: 372555 - RNA, 19 nt, Artificial Sequence
  Description of Artificial Sequence: Synthetic oligonucleotide
  Sense Strand Starting at position 685 of SEQ ID NO: 318438
caucuuuggucacaggaga

SEQ ID NO: 372556 - RNA, 19 nt, Artificial Sequence
  Description of Artificial Sequence: Synthetic oligonucleotide
  Antisense Strand to SEQ ID NO: 372555
ucuccugugaccaaagaug

SEQ ID NO: 372557 - RNA, 19 nt, Artificial Sequence
  Description of Artificial Sequence: Synthetic oligonucleotide
  Sense Strand Starting at position 685 of SEQ ID NO: 318583
cuccguuucucgcugauca

SEQ ID NO: 372558 - RNA, 19 nt, Artificial Sequence
  Description of Artificial Sequence: Synthetic oligonucleotide
  Antisense Strand to SEQ ID NO: 372557
ugaucagcgagaaacggag

SEQ ID NO: 372559 - RNA, 19 nt, Artificial Sequence
  Description of Artificial Sequence: Synthetic oligonucleotide
  Sense Strand Starting at position 685 of SEQ ID NO: 318584
uccguuucucgcugaucaa

SEQ ID NO: 372560 - RNA, 19 nt, Artificial Sequence
  Description of Artificial Sequence: Synthetic oligonucleotide
  Antisense Strand to SEQ ID NO: 372559
uugaucagcgagaaacgga

SEQ ID NO: 372561 - RNA, 19 nt, Artificial Sequence
  Description of Artificial Sequence: Synthetic oligonucleotide
  Sense Strand Starting at position 685 of SEQ ID NO: 318585
ccguuucucgcugaucaaa

SEQ ID NO: 372562 - RNA, 19 nt, Artificial Sequence
  Description of Artificial Sequence: Synthetic oligonucleotide
  Antisense Strand to SEQ ID NO: 372561
uuugaucagcgagaaacgg

SEQ ID NO: 372563 - RNA, 19 nt, Artificial Sequence
  Description of Artificial Sequence: Synthetic oligonucleotide
  Sense Strand Starting at position 685 of SEQ ID NO: 318587
guuucucgcugaucaaaua

SEQ ID NO: 372564 - RNA, 19 nt, Artificial Sequence
  Description of Artificial Sequence: Synthetic oligonucleotide
  Antisense Strand to SEQ ID NO: 372563
uauuugaucagcgagaaac

SEQ ID NO: 372565 - RNA, 19 nt, Artificial Sequence
  Description of Artificial Sequence: Synthetic oligonucleotide
  Sense Strand Starting at position 685 of SEQ ID NO: 318588
uuucucgcugaucaaauaa

SEQ ID NO: 372566 - RNA, 19 nt, Artificial Sequence
  Description of Artificial Sequence: Synthetic oligonucleotide
  Antisense Strand to SEQ ID NO: 372565
uuauuugaucagcgagaaa

SEQ ID NO: 372567 - RNA, 19 nt, Artificial Sequence
  Description of Artificial Sequence: Synthetic oligonucleotide
  Sense Strand Starting at position 685 of SEQ ID NO: 318633
ggaaguauuacgugggaaa

SEQ ID NO: 372568 - RNA, 19 nt, Artificial Sequence
  Description of Artificial Sequence: Synthetic oligonucleotide
  Antisense Strand to SEQ ID NO: 372567
uuucccacguaauacuucc

SEQ ID NO: 372569 - RNA, 19 nt, Artificial Sequence
  Description of Artificial Sequence: Synthetic oligonucleotide
  Sense Strand Starting at position 685 of SEQ ID NO: 318701
guauuacuauuugggaaga

SEQ ID NO: 372570 - RNA, 19 nt, Artificial Sequence
  Description of Artificial Sequence: Synthetic oligonucleotide
  Antisense Strand to SEQ ID NO: 372569
ucuucccaaauaguaauac

SEQ ID NO: 372571 - RNA, 19 nt, Artificial Sequence
  Description of Artificial Sequence: Synthetic oligonucleotide
  Sense Strand Starting at position 685 of SEQ ID NO: 318743
ucaaguuaguaaguaugau

SEQ ID NO: 372572 - RNA, 19 nt, Artificial Sequence
  Description of Artificial Sequence: Synthetic oligonucleotide
  Antisense Strand to SEQ ID NO: 372571
aucauacuuacuaacuuga

SEQ ID NO: 372573 - RNA, 19 nt, Artificial Sequence
  Description of Artificial Sequence: Synthetic oligonucleotide
  Sense Strand Starting at position 685 of SEQ ID NO: 318799
gcauacuuuguguguuugu

SEQ ID NO: 372574 - RNA, 19 nt, Artificial Sequence
  Description of Artificial Sequence: Synthetic oligonucleotide
  Antisense Strand to SEQ ID NO: 372573
acaaacacacaaaguaugc

SEQ ID NO: 372575 - RNA, 19 nt, Artificial Sequence
  Description of Artificial Sequence: Synthetic oligonucleotide
  Sense Strand Starting at position 685 of SEQ ID NO: 318885
gcucgacuagcugauugua

SEQ ID NO: 372576 - RNA, 19 nt, Artificial Sequence
  Description of Artificial Sequence: Synthetic oligonucleotide
  Antisense Strand to SEQ ID NO: 372575
uacaaucagcuagucgagc

SEQ ID NO: 372577 - RNA, 19 nt, Artificial Sequence
  Description of Artificial Sequence: Synthetic oligonucleotide
  Sense Strand Starting at position 685 of SEQ ID NO: 318893
agcugauuguaaccucgaa

SEQ ID NO: 372578 - RNA, 19 nt, Artificial Sequence
  Description of Artificial Sequence: Synthetic oligonucleotide
  Antisense Strand to SEQ ID NO: 372577
uucgagguuacaaucagcu

SEQ ID NO: 372579 - RNA, 19 nt, Artificial Sequence
  Description of Artificial Sequence: Synthetic oligonucleotide
  Sense Strand Starting at position 685 of SEQ ID NO: 318897
gauuguaaccucgaacuuc

SEQ ID NO: 372580 - RNA, 19 nt, Artificial Sequence
  Description of Artificial Sequence: Synthetic oligonucleotide
  Antisense Strand to SEQ ID NO: 372579
gaaguucgagguuacaauc

SEQ ID NO: 372581 - RNA, 19 nt, Artificial Sequence
  Description of Artificial Sequence: Synthetic oligonucleotide
  Sense Strand Starting at position 685 of SEQ ID NO: 319023
gggucucccuauguugauu

SEQ ID NO: 372582 - RNA, 19 nt, Artificial Sequence
  Description of Artificial Sequence: Synthetic oligonucleotide
  Antisense Strand to SEQ ID NO: 372581
aaucaacauagggagaccc

SEQ ID NO: 372583 - RNA, 19 nt, Artificial Sequence
  Description of Artificial Sequence: Synthetic oligonucleotide
  Sense Strand Starting at position 685 of SEQ ID NO: 319133
gguuuaggcauacguuuaa

SEQ ID NO: 372584 - RNA, 19 nt, Artificial Sequence
  Description of Artificial Sequence: Synthetic oligonucleotide
  Antisense Strand to SEQ ID NO: 372583
uuaaacguaugccuaaacc

SEQ ID NO: 372585 - RNA, 19 nt, Artificial Sequence
  Description of Artificial Sequence: Synthetic oligonucleotide
  Sense Strand Starting at position 685 of SEQ ID NO: 319137
uaggcauacguuuaaacau

SEQ ID NO: 372586 - RNA, 19 nt, Artificial Sequence
  Description of Artificial Sequence: Synthetic oligonucleotide
  Antisense Strand to SEQ ID NO: 372585
auguuuaaacguaugccua

SEQ ID NO: 372587 - RNA, 19 nt, Artificial Sequence
  Description of Artificial Sequence: Synthetic oligonucleotide
  Sense Strand Starting at position 685 of SEQ ID NO: 319175
gugcuauucuaagcuaaua

SEQ ID NO: 372588 - RNA, 19 nt, Artificial Sequence
  Description of Artificial Sequence: Synthetic oligonucleotide
  Antisense Strand to SEQ ID NO: 372587
uauuagcuuagaauagcac

SEQ ID NO: 372589 - RNA, 19 nt, Artificial Sequence
  Description of Artificial Sequence: Synthetic oligonucleotide
  Sense Strand Starting at position 685 of SEQ ID NO: 319211
ugaugcuucucucuuggga

SEQ ID NO: 372590 - RNA, 19 nt, Artificial Sequence
  Description of Artificial Sequence: Synthetic oligonucleotide
  Antisense Strand to SEQ ID NO: 372589
ucccaagagagaagcauca

SEQ ID NO: 372591 - RNA, 19 nt, Artificial Sequence
  Description of Artificial Sequence: Synthetic oligonucleotide
  Sense Strand Starting at position 685 of SEQ ID NO: 319214
ugcuucucucuugggauau

SEQ ID NO: 372592 - RNA, 19 nt, Artificial Sequence
  Description of Artificial Sequence: Synthetic oligonucleotide
  Antisense Strand to SEQ ID NO: 372591
auaucccaagagagaagca

SEQ ID NO: 372593 - RNA, 19 nt, Artificial Sequence
  Description of Artificial Sequence: Synthetic oligonucleotide
  Sense Strand Starting at position 686 of SEQ ID NO: 315459
cuguacugguagucagauu

SEQ ID NO: 372594 - RNA, 19 nt, Artificial Sequence
  Description of Artificial Sequence: Synthetic oligonucleotide
  Antisense Strand to SEQ ID NO: 372593
aaucugacuaccaguacag

SEQ ID NO: 372595 - RNA, 19 nt, Artificial Sequence
  Description of Artificial Sequence: Synthetic oligonucleotide
  Sense Strand Starting at position 686 of SEQ ID NO: 315484
guguaaacccuggacucuu

SEQ ID NO: 372596 - RNA, 19 nt, Artificial Sequence
  Description of Artificial Sequence: Synthetic oligonucleotide
  Antisense Strand to SEQ ID NO: 372595
aagaguccaggguuuacac

SEQ ID NO: 372597 - RNA, 19 nt, Artificial Sequence
  Description of Artificial Sequence: Synthetic oligonucleotide
  Sense Strand Starting at position 686 of SEQ ID NO: 315582
gccagagacugucagagaa

SEQ ID NO: 372598 - RNA, 19 nt, Artificial Sequence
  Description of Artificial Sequence: Synthetic oligonucleotide
  Antisense Strand to SEQ ID NO: 372597
uucucugacagucucuggc

SEQ ID NO: 372599 - RNA, 19 nt, Artificial Sequence
  Description of Artificial Sequence: Synthetic oligonucleotide
  Sense Strand Starting at position 686 of SEQ ID NO: 315584
cagagacugucagagaaau

SEQ ID NO: 372600 - RNA, 19 nt, Artificial Sequence
  Description of Artificial Sequence: Synthetic oligonucleotide
  Antisense Strand to SEQ ID NO: 372599
auuucucugacagucucug

SEQ ID NO: 372601 - RNA, 19 nt, Artificial Sequence
  Description of Artificial Sequence: Synthetic oligonucleotide
  Sense Strand Starting at position 686 of SEQ ID NO: 315735
ugcuguucccuguauggga

SEQ ID NO: 372602 - RNA, 19 nt, Artificial Sequence
  Description of Artificial Sequence: Synthetic oligonucleotide
  Antisense Strand to SEQ ID NO: 372601
ucccauacagggaacagca

SEQ ID NO: 372603 - RNA, 19 nt, Artificial Sequence
  Description of Artificial Sequence: Synthetic oligonucleotide
  Sense Strand Starting at position 686 of SEQ ID NO: 315743
ccuguaugggauggucuua

SEQ ID NO: 372604 - RNA, 19 nt, Artificial Sequence
  Description of Artificial Sequence: Synthetic oligonucleotide
  Antisense Strand to SEQ ID NO: 372603
uaagaccaucccauacagg

SEQ ID NO: 372605 - RNA, 19 nt, Artificial Sequence
  Description of Artificial Sequence: Synthetic oligonucleotide
  Sense Strand Starting at position 686 of SEQ ID NO: 315787
cagagacuucuuggccacu

SEQ ID NO: 372606 - RNA, 19 nt, Artificial Sequence
  Description of Artificial Sequence: Synthetic oligonucleotide
  Antisense Strand to SEQ ID NO: 372605
aguggccaagaagucucug

SEQ ID NO: 372607 - RNA, 19 nt, Artificial Sequence
  Description of Artificial Sequence: Synthetic oligonucleotide
  Sense Strand Starting at position 686 of SEQ ID NO: 315790
agacuucuuggccacucua

SEQ ID NO: 372608 - RNA, 19 nt, Artificial Sequence
  Description of Artificial Sequence: Synthetic oligonucleotide
  Antisense Strand to SEQ ID NO: 372607
uagaguggccaagaagucu

SEQ ID NO: 372609 - RNA, 19 nt, Artificial Sequence
  Description of Artificial Sequence: Synthetic oligonucleotide
  Sense Strand Starting at position 686 of SEQ ID NO: 315853
gcauuauuuguguguccga

SEQ ID NO: 372610 - RNA, 19 nt, Artificial Sequence
  Description of Artificial Sequence: Synthetic oligonucleotide
  Antisense Strand to SEQ ID NO: 372609
ucggacacacaaauaaugc

SEQ ID NO: 372611 - RNA, 19 nt, Artificial Sequence
  Description of Artificial Sequence: Synthetic oligonucleotide
  Sense Strand Starting at position 686 of SEQ ID NO: 315866
guccgacugucacuucuuu

SEQ ID NO: 372612 - RNA, 19 nt, Artificial Sequence
  Description of Artificial Sequence: Synthetic oligonucleotide
  Antisense Strand to SEQ ID NO: 372611
aaagaagugacagucggac

SEQ ID NO: 372613 - RNA, 19 nt, Artificial Sequence
  Description of Artificial Sequence: Synthetic oligonucleotide
  Sense Strand Starting at position 686 of SEQ ID NO: 315971
cugcuuugggaaggacaua

SEQ ID NO: 372614 - RNA, 19 nt, Artificial Sequence
  Description of Artificial Sequence: Synthetic oligonucleotide
  Antisense Strand to SEQ ID NO: 372613
uauguccuucccaaagcag

SEQ ID NO: 372615 - RNA, 19 nt, Artificial Sequence
  Description of Artificial Sequence: Synthetic oligonucleotide
  Sense Strand Starting at position 686 of SEQ ID NO: 315998
ucagucuucucacauuagu

SEQ ID NO: 372616 - RNA, 19 nt, Artificial Sequence
  Description of Artificial Sequence: Synthetic oligonucleotide
  Antisense Strand to SEQ ID NO: 372615
acuaaugugagaagacuga

SEQ ID NO: 372617 - RNA, 19 nt, Artificial Sequence
  Description of Artificial Sequence: Synthetic oligonucleotide
  Sense Strand Starting at position 686 of SEQ ID NO: 316001
gucuucucacauuaguuua

SEQ ID NO: 372618 - RNA, 19 nt, Artificial Sequence
  Description of Artificial Sequence: Synthetic oligonucleotide
  Antisense Strand to SEQ ID NO: 372617
uaaacuaaugugagaagac

SEQ ID NO: 372619 - RNA, 19 nt, Artificial Sequence
  Description of Artificial Sequence: Synthetic oligonucleotide
  Sense Strand Starting at position 686 of SEQ ID NO: 316009
acauuaguuuauggagaga

SEQ ID NO: 372620 - RNA, 19 nt, Artificial Sequence
  Description of Artificial Sequence: Synthetic oligonucleotide
  Antisense Strand to SEQ ID NO: 372619
ucucuccauaaacuaaugu

SEQ ID NO: 372621 - RNA, 19 nt, Artificial Sequence
  Description of Artificial Sequence: Synthetic oligonucleotide
  Sense Strand Starting at position 686 of SEQ ID NO: 316028
guagcuggcuuccugaaca

SEQ ID NO: 372622 - RNA, 19 nt, Artificial Sequence
  Description of Artificial Sequence: Synthetic oligonucleotide
  Antisense Strand to SEQ ID NO: 372621
uguucaggaagccagcuac

SEQ ID NO: 372623 - RNA, 19 nt, Artificial Sequence
  Description of Artificial Sequence: Synthetic oligonucleotide
  Sense Strand Starting at position 686 of SEQ ID NO: 316066
uuaucaaacggcuggugaa

SEQ ID NO: 372624 - RNA, 19 nt, Artificial Sequence
  Description of Artificial Sequence: Synthetic oligonucleotide
  Antisense Strand to SEQ ID NO: 372623
uucaccagccguuugauaa

SEQ ID NO: 372625 - RNA, 19 nt, Artificial Sequence
  Description of Artificial Sequence: Synthetic oligonucleotide
  Sense Strand Starting at position 686 of SEQ ID NO: 316078
uggugaagccgaggguuaa

SEQ ID NO: 372626 - RNA, 19 nt, Artificial Sequence
  Description of Artificial Sequence: Synthetic oligonucleotide
  Antisense Strand to SEQ ID NO: 372625
uuaacccucggcuucacca

SEQ ID NO: 372627 - RNA, 19 nt, Artificial Sequence
  Description of Artificial Sequence: Synthetic oligonucleotide
  Sense Strand Starting at position 686 of SEQ ID NO: 316281
acgggagaugcucagcaau

SEQ ID NO: 372628 - RNA, 19 nt, Artificial Sequence
  Description of Artificial Sequence: Synthetic oligonucleotide
  Antisense Strand to SEQ ID NO: 372627
auugcugagcaucucccgu

SEQ ID NO: 372629 - RNA, 19 nt, Artificial Sequence
  Description of Artificial Sequence: Synthetic oligonucleotide
  Sense Strand Starting at position 686 of SEQ ID NO: 316283
gggagaugcucagcaauca

SEQ ID NO: 372630 - RNA, 19 nt, Artificial Sequence
  Description of Artificial Sequence: Synthetic oligonucleotide
  Antisense Strand to SEQ ID NO: 372629
ugauugcugagcaucuccc

SEQ ID NO: 372631 - RNA, 19 nt, Artificial Sequence
  Description of Artificial Sequence: Synthetic oligonucleotide
  Sense Strand Starting at position 686 of SEQ ID NO: 316362
gaugaaucauuagagguga

SEQ ID NO: 372632 - RNA, 19 nt, Artificial Sequence
  Description of Artificial Sequence: Synthetic oligonucleotide
  Antisense Strand to SEQ ID NO: 372631
ucaccucuaaugauucauc

SEQ ID NO: 372633 - RNA, 19 nt, Artificial Sequence
  Description of Artificial Sequence: Synthetic oligonucleotide
  Sense Strand Starting at position 686 of SEQ ID NO: 316528
aguuuaagcccauggugaa

SEQ ID NO: 372634 - RNA, 19 nt, Artificial Sequence
  Description of Artificial Sequence: Synthetic oligonucleotide
  Antisense Strand to SEQ ID NO: 372633
uucaccaugggcuuaaacu

SEQ ID NO: 372635 - RNA, 19 nt, Artificial Sequence
  Description of Artificial Sequence: Synthetic oligonucleotide
  Sense Strand Starting at position 686 of SEQ ID NO: 316544
gaacacguguccuugagac

SEQ ID NO: 372636 - RNA, 19 nt, Artificial Sequence
  Description of Artificial Sequence: Synthetic oligonucleotide
  Antisense Strand to SEQ ID NO: 372635
gucucaaggacacguguuc

SEQ ID NO: 372637 - RNA, 19 nt, Artificial Sequence
  Description of Artificial Sequence: Synthetic oligonucleotide
  Sense Strand Starting at position 686 of SEQ ID NO: 316762
gacaauaacucaggaguga

SEQ ID NO: 372638 - RNA, 19 nt, Artificial Sequence
  Description of Artificial Sequence: Synthetic oligonucleotide
  Antisense Strand to SEQ ID NO: 372637
ucacuccugaguuauuguc

SEQ ID NO: 372639 - RNA, 19 nt, Artificial Sequence
  Description of Artificial Sequence: Synthetic oligonucleotide
  Sense Strand Starting at position 686 of SEQ ID NO: 316807
gggaucuagucucaacuuu

SEQ ID NO: 372640 - RNA, 19 nt, Artificial Sequence
  Description of Artificial Sequence: Synthetic oligonucleotide
  Antisense Strand to SEQ ID NO: 372639
aaaguugagacuagauccc

SEQ ID NO: 372641 - RNA, 19 nt, Artificial Sequence
  Description of Artificial Sequence: Synthetic oligonucleotide
  Sense Strand Starting at position 686 of SEQ ID NO: 317350
gucugagcccuagacaguu

SEQ ID NO: 372642 - RNA, 19 nt, Artificial Sequence
  Description of Artificial Sequence: Synthetic oligonucleotide
  Antisense Strand to SEQ ID NO: 372641
aacugucuagggcucagac

SEQ ID NO: 372643 - RNA, 19 nt, Artificial Sequence
  Description of Artificial Sequence: Synthetic oligonucleotide
  Sense Strand Starting at position 686 of SEQ ID NO: 317362
gacaguugucggccgcuga

SEQ ID NO: 372644 - RNA, 19 nt, Artificial Sequence
  Description of Artificial Sequence: Synthetic oligonucleotide
  Antisense Strand to SEQ ID NO: 372643
ucagcggccgacaacuguc

SEQ ID NO: 372645 - RNA, 19 nt, Artificial Sequence
  Description of Artificial Sequence: Synthetic oligonucleotide
  Sense Strand Starting at position 686 of SEQ ID NO: 317505
cgccuuacaucuguugagu

SEQ ID NO: 372646 - RNA, 19 nt, Artificial Sequence
  Description of Artificial Sequence: Synthetic oligonucleotide
  Antisense Strand to SEQ ID NO: 372645
acucaacagauguaaggcg

SEQ ID NO: 372647 - RNA, 19 nt, Artificial Sequence
  Description of Artificial Sequence: Synthetic oligonucleotide
  Sense Strand Starting at position 686 of SEQ ID NO: 317508
cuuacaucuguugaguuga

SEQ ID NO: 372648 - RNA, 19 nt, Artificial Sequence
  Description of Artificial Sequence: Synthetic oligonucleotide
  Antisense Strand to SEQ ID NO: 372647
ucaacucaacagauguaag

SEQ ID NO: 372649 - RNA, 19 nt, Artificial Sequence
  Description of Artificial Sequence: Synthetic oligonucleotide
  Sense Strand Starting at position 686 of SEQ ID NO: 317693
cuuucauucgcgugggcaa

SEQ ID NO: 372650 - RNA, 19 nt, Artificial Sequence
  Description of Artificial Sequence: Synthetic oligonucleotide
  Antisense Strand to SEQ ID NO: 372649
uugcccacgcgaaugaaag

SEQ ID NO: 372651 - RNA, 19 nt, Artificial Sequence
  Description of Artificial Sequence: Synthetic oligonucleotide
  Sense Strand Starting at position 686 of SEQ ID NO: 317891
agaucaucggucgaggaca

SEQ ID NO: 372652 - RNA, 19 nt, Artificial Sequence
  Description of Artificial Sequence: Synthetic oligonucleotide
  Antisense Strand to SEQ ID NO: 372651
uguccucgaccgaugaucu

SEQ ID NO: 372653 - RNA, 19 nt, Artificial Sequence
  Description of Artificial Sequence: Synthetic oligonucleotide
  Sense Strand Starting at position 686 of SEQ ID NO: 318161
uggcucuacucagugcaaa

SEQ ID NO: 372654 - RNA, 19 nt, Artificial Sequence
  Description of Artificial Sequence: Synthetic oligonucleotide
  Antisense Strand to SEQ ID NO: 372653
uuugcacugaguagagcca

SEQ ID NO: 372655 - RNA, 19 nt, Artificial Sequence
  Description of Artificial Sequence: Synthetic oligonucleotide
  Sense Strand Starting at position 686 of SEQ ID NO: 318184
acaugucuauagggcuaaa

SEQ ID NO: 372656 - RNA, 19 nt, Artificial Sequence
  Description of Artificial Sequence: Synthetic oligonucleotide
  Antisense Strand to SEQ ID NO: 372655
uuuagcccuauagacaugu

SEQ ID NO: 372657 - RNA, 19 nt, Artificial Sequence
  Description of Artificial Sequence: Synthetic oligonucleotide
  Sense Strand Starting at position 686 of SEQ ID NO: 318270
guggaucaguaucacguau

SEQ ID NO: 372658 - RNA, 19 nt, Artificial Sequence
  Description of Artificial Sequence: Synthetic oligonucleotide
  Antisense Strand to SEQ ID NO: 372657
auacgugauacugauccac

SEQ ID NO: 372659 - RNA, 19 nt, Artificial Sequence
  Description of Artificial Sequence: Synthetic oligonucleotide
  Sense Strand Starting at position 686 of SEQ ID NO: 318272
ggaucaguaucacguauuu

SEQ ID NO: 372660 - RNA, 19 nt, Artificial Sequence
  Description of Artificial Sequence: Synthetic oligonucleotide
  Antisense Strand to SEQ ID NO: 372659
aaauacgugauacugaucc

SEQ ID NO: 372661 - RNA, 19 nt, Artificial Sequence
  Description of Artificial Sequence: Synthetic oligonucleotide
  Sense Strand Starting at position 687 of SEQ ID NO: 315456
uuuauaguuccugaggagu

SEQ ID NO: 372662 - RNA, 19 nt, Artificial Sequence
  Description of Artificial Sequence: Synthetic oligonucleotide
  Antisense Strand to SEQ ID NO: 372661
acuccucaggaacuauaaa

SEQ ID NO: 372663 - RNA, 19 nt, Artificial Sequence
  Description of Artificial Sequence: Synthetic oligonucleotide
  Sense Strand Starting at position 687 of SEQ ID NO: 315988
guaguacacuuacuuauaa

SEQ ID NO: 372664 - RNA, 19 nt, Artificial Sequence
  Description of Artificial Sequence: Synthetic oligonucleotide
  Antisense Strand to SEQ ID NO: 372663
uuauaaguaaguguacuac

SEQ ID NO: 372665 - RNA, 19 nt, Artificial Sequence
  Description of Artificial Sequence: Synthetic oligonucleotide
  Sense Strand Starting at position 687 of SEQ ID NO: 316332
aagaacagucagugcuaca

SEQ ID NO: 372666 - RNA, 19 nt, Artificial Sequence
  Description of Artificial Sequence: Synthetic oligonucleotide
  Antisense Strand to SEQ ID NO: 372665
uguagcacugacuguucuu

SEQ ID NO: 372667 - RNA, 19 nt, Artificial Sequence
  Description of Artificial Sequence: Synthetic oligonucleotide
  Sense Strand Starting at position 687 of SEQ ID NO: 316468
ggauaagaauacuaagaca

SEQ ID NO: 372668 - RNA, 19 nt, Artificial Sequence
  Description of Artificial Sequence: Synthetic oligonucleotide
  Antisense Strand to SEQ ID NO: 372667
ugucuuaguauucuuaucc

SEQ ID NO: 372669 - RNA, 19 nt, Artificial Sequence
  Description of Artificial Sequence: Synthetic oligonucleotide
  Sense Strand Starting at position 687 of SEQ ID NO: 316626
acugaaauuugggagaggu

SEQ ID NO: 372670 - RNA, 19 nt, Artificial Sequence
  Description of Artificial Sequence: Synthetic oligonucleotide
  Antisense Strand to SEQ ID NO: 372669
accucucccaaauuucagu

SEQ ID NO: 372671 - RNA, 19 nt, Artificial Sequence
  Description of Artificial Sequence: Synthetic oligonucleotide
  Sense Strand Starting at position 687 of SEQ ID NO: 316807
guaggugaacccuagguca

SEQ ID NO: 372672 - RNA, 19 nt, Artificial Sequence
  Description of Artificial Sequence: Synthetic oligonucleotide
  Antisense Strand to SEQ ID NO: 372671
ugaccuaggguucaccuac

SEQ ID NO: 372673 - RNA, 19 nt, Artificial Sequence
  Description of Artificial Sequence: Synthetic oligonucleotide
  Sense Strand Starting at position 687 of SEQ ID NO: 316857
caacauaagcgccagugau

SEQ ID NO: 372674 - RNA, 19 nt, Artificial Sequence
  Description of Artificial Sequence: Synthetic oligonucleotide
  Antisense Strand to SEQ ID NO: 372673
aucacuggcgcuuauguug

SEQ ID NO: 372675 - RNA, 19 nt, Artificial Sequence
  Description of Artificial Sequence: Synthetic oligonucleotide
  Sense Strand Starting at position 687 of SEQ ID NO: 316897
caugucugauuccuagaag

SEQ ID NO: 372676 - RNA, 19 nt, Artificial Sequence
  Description of Artificial Sequence: Synthetic oligonucleotide
  Antisense Strand to SEQ ID NO: 372675
cuucuaggaaucagacaug

SEQ ID NO: 372677 - RNA, 19 nt, Artificial Sequence
  Description of Artificial Sequence: Synthetic oligonucleotide
  Sense Strand Starting at position 687 of SEQ ID NO: 316916
acucaaccugucuguauuu

SEQ ID NO: 372678 - RNA, 19 nt, Artificial Sequence
  Description of Artificial Sequence: Synthetic oligonucleotide
  Antisense Strand to SEQ ID NO: 372677
aaauacagacagguugagu

SEQ ID NO: 372679 - RNA, 19 nt, Artificial Sequence
  Description of Artificial Sequence: Synthetic oligonucleotide
  Sense Strand Starting at position 687 of SEQ ID NO: 316925
gucuguauuuccucgacga

SEQ ID NO: 372680 - RNA, 19 nt, Artificial Sequence
  Description of Artificial Sequence: Synthetic oligonucleotide
  Antisense Strand to SEQ ID NO: 372679
ucgucgaggaaauacagac

SEQ ID NO: 372681 - RNA, 19 nt, Artificial Sequence
  Description of Artificial Sequence: Synthetic oligonucleotide
  Sense Strand Starting at position 687 of SEQ ID NO: 316926
ucuguauuuccucgacgac

SEQ ID NO: 372682 - RNA, 19 nt, Artificial Sequence
  Description of Artificial Sequence: Synthetic oligonucleotide
  Antisense Strand to SEQ ID NO: 372681
gucgucgaggaaauacaga

SEQ ID NO: 372683 - RNA, 19 nt, Artificial Sequence
  Description of Artificial Sequence: Synthetic oligonucleotide
  Sense Strand Starting at position 687 of SEQ ID NO: 316929
guauuuccucgacgacuuc

SEQ ID NO: 372684 - RNA, 19 nt, Artificial Sequence
  Description of Artificial Sequence: Synthetic oligonucleotide
  Antisense Strand to SEQ ID NO: 372683
gaagucgucgaggaaauac

SEQ ID NO: 372685 - RNA, 19 nt, Artificial Sequence
  Description of Artificial Sequence: Synthetic oligonucleotide
  Sense Strand Starting at position 687 of SEQ ID NO: 316959
ccaaguucccaagaguucu

SEQ ID NO: 372686 - RNA, 19 nt, Artificial Sequence
  Description of Artificial Sequence: Synthetic oligonucleotide
  Antisense Strand to SEQ ID NO: 372685
agaacucuugggaacuugg

SEQ ID NO: 372687 - RNA, 19 nt, Artificial Sequence
  Description of Artificial Sequence: Synthetic oligonucleotide
  Sense Strand Starting at position 687 of SEQ ID NO: 317503
uggacucaucacuggucaa

SEQ ID NO: 372688 - RNA, 19 nt, Artificial Sequence
  Description of Artificial Sequence: Synthetic oligonucleotide
  Antisense Strand to SEQ ID NO: 372687
uugaccagugaugagucca

SEQ ID NO: 372689 - RNA, 19 nt, Artificial Sequence
  Description of Artificial Sequence: Synthetic oligonucleotide
  Sense Strand Starting at position 687 of SEQ ID NO: 317539
gagaaaucaugauuguuac

SEQ ID NO: 372690 - RNA, 19 nt, Artificial Sequence
  Description of Artificial Sequence: Synthetic oligonucleotide
  Antisense Strand to SEQ ID NO: 372689
guaacaaucaugauuucuc

SEQ ID NO: 372691 - RNA, 19 nt, Artificial Sequence
  Description of Artificial Sequence: Synthetic oligonucleotide
  Sense Strand Starting at position 687 of SEQ ID NO: 317540
agaaaucaugauuguuacu

SEQ ID NO: 372692 - RNA, 19 nt, Artificial Sequence
  Description of Artificial Sequence: Synthetic oligonucleotide
  Antisense Strand to SEQ ID NO: 372691
aguaacaaucaugauuucu

SEQ ID NO: 372693 - RNA, 19 nt, Artificial Sequence
  Description of Artificial Sequence: Synthetic oligonucleotide
  Sense Strand Starting at position 687 of SEQ ID NO: 317545
ucaugauuguuacuaugau

SEQ ID NO: 372694 - RNA, 19 nt, Artificial Sequence
  Description of Artificial Sequence: Synthetic oligonucleotide
  Antisense Strand to SEQ ID NO: 372693
aucauaguaacaaucauga

SEQ ID NO: 372695 - RNA, 19 nt, Artificial Sequence
  Description of Artificial Sequence: Synthetic oligonucleotide
  Sense Strand Starting at position 687 of SEQ ID NO: 317654
guguuaccugggcaugaua

SEQ ID NO: 372696 - RNA, 19 nt, Artificial Sequence
  Description of Artificial Sequence: Synthetic oligonucleotide
  Antisense Strand to SEQ ID NO: 372695
uaucaugcccagguaacac

SEQ ID NO: 372697 - RNA, 19 nt, Artificial Sequence
  Description of Artificial Sequence: Synthetic oligonucleotide
  Sense Strand Starting at position 687 of SEQ ID NO: 317732
acgauuguauuacuugaga

SEQ ID NO: 372698 - RNA, 19 nt, Artificial Sequence
  Description of Artificial Sequence: Synthetic oligonucleotide
  Antisense Strand to SEQ ID NO: 372697
ucucaaguaauacaaucgu

SEQ ID NO: 372699 - RNA, 19 nt, Artificial Sequence
  Description of Artificial Sequence: Synthetic oligonucleotide
  Sense Strand Starting at position 687 of SEQ ID NO: 317757
guggaaagcacuggcauau

SEQ ID NO: 372700 - RNA, 19 nt, Artificial Sequence
  Description of Artificial Sequence: Synthetic oligonucleotide
  Antisense Strand to SEQ ID NO: 372699
auaugccagugcuuuccac

SEQ ID NO: 372701 - RNA, 19 nt, Artificial Sequence
  Description of Artificial Sequence: Synthetic oligonucleotide
  Sense Strand Starting at position 687 of SEQ ID NO: 317770
gcauauugaaagcauucga

SEQ ID NO: 372702 - RNA, 19 nt, Artificial Sequence
  Description of Artificial Sequence: Synthetic oligonucleotide
  Antisense Strand to SEQ ID NO: 372701
ucgaaugcuuucaauaugc

SEQ ID NO: 372703 - RNA, 19 nt, Artificial Sequence
  Description of Artificial Sequence: Synthetic oligonucleotide
  Sense Strand Starting at position 687 of SEQ ID NO: 317774
auugaaagcauucgaugag

SEQ ID NO: 372704 - RNA, 19 nt, Artificial Sequence
  Description of Artificial Sequence: Synthetic oligonucleotide
  Antisense Strand to SEQ ID NO: 372703
cucaucgaaugcuuucaau

SEQ ID NO: 372705 - RNA, 19 nt, Artificial Sequence
  Description of Artificial Sequence: Synthetic oligonucleotide
  Sense Strand Starting at position 687 of SEQ ID NO: 317778
aaagcauucgaugaguguu

SEQ ID NO: 372706 - RNA, 19 nt, Artificial Sequence
  Description of Artificial Sequence: Synthetic oligonucleotide
  Antisense Strand to SEQ ID NO: 372705
aacacucaucgaaugcuuu

SEQ ID NO: 372707 - RNA, 19 nt, Artificial Sequence
  Description of Artificial Sequence: Synthetic oligonucleotide
  Sense Strand Starting at position 687 of SEQ ID NO: 317823
acucuuauucccuguugga

SEQ ID NO: 372708 - RNA, 19 nt, Artificial Sequence
  Description of Artificial Sequence: Synthetic oligonucleotide
  Antisense Strand to SEQ ID NO: 372707
uccaacagggaauaagagu

SEQ ID NO: 372709 - RNA, 19 nt, Artificial Sequence
  Description of Artificial Sequence: Synthetic oligonucleotide
  Sense Strand Starting at position 687 of SEQ ID NO: 317839
ggaacauaccugugcuuaa

SEQ ID NO: 372710 - RNA, 19 nt, Artificial Sequence
  Description of Artificial Sequence: Synthetic oligonucleotide
  Antisense Strand to SEQ ID NO: 372709
uuaagcacagguauguucc

SEQ ID NO: 372711 - RNA, 19 nt, Artificial Sequence
  Description of Artificial Sequence: Synthetic oligonucleotide
  Sense Strand Starting at position 687 of SEQ ID NO: 317840
gaacauaccugugcuuaag

SEQ ID NO: 372712 - RNA, 19 nt, Artificial Sequence
  Description of Artificial Sequence: Synthetic oligonucleotide
  Antisense Strand to SEQ ID NO: 372711
cuuaagcacagguauguuc

SEQ ID NO: 372713 - RNA, 19 nt, Artificial Sequence
  Description of Artificial Sequence: Synthetic oligonucleotide
  Sense Strand Starting at position 687 of SEQ ID NO: 318015
uuuaacccugcuggaaaua

SEQ ID NO: 372714 - RNA, 19 nt, Artificial Sequence
  Description of Artificial Sequence: Synthetic oligonucleotide
  Antisense Strand to SEQ ID NO: 372713
uauuuccagcaggguuaaa

SEQ ID NO: 372715 - RNA, 19 nt, Artificial Sequence
  Description of Artificial Sequence: Synthetic oligonucleotide
  Sense Strand Starting at position 687 of SEQ ID NO: 318092
ccucaagaacguggagaua

SEQ ID NO: 372716 - RNA, 19 nt, Artificial Sequence
  Description of Artificial Sequence: Synthetic oligonucleotide
  Antisense Strand to SEQ ID NO: 372715
uaucuccacguucuugagg

SEQ ID NO: 372717 - RNA, 19 nt, Artificial Sequence
  Description of Artificial Sequence: Synthetic oligonucleotide
  Sense Strand Starting at position 687 of SEQ ID NO: 318164
accagcugagcugaagauu

SEQ ID NO: 372718 - RNA, 19 nt, Artificial Sequence
  Description of Artificial Sequence: Synthetic oligonucleotide
  Antisense Strand to SEQ ID NO: 372717
aaucuucagcucagcuggu

SEQ ID NO: 372719 - RNA, 19 nt, Artificial Sequence
  Description of Artificial Sequence: Synthetic oligonucleotide
  Sense Strand Starting at position 687 of SEQ ID NO: 318257
ugcuguuacagguaaggaa

SEQ ID NO: 372720 - RNA, 19 nt, Artificial Sequence
  Description of Artificial Sequence: Synthetic oligonucleotide
  Antisense Strand to SEQ ID NO: 372719
uuccuuaccuguaacagca

SEQ ID NO: 372721 - RNA, 19 nt, Artificial Sequence
  Description of Artificial Sequence: Synthetic oligonucleotide
  Sense Strand Starting at position 687 of SEQ ID NO: 318285
caaagaagcgucuaaaugu

SEQ ID NO: 372722 - RNA, 19 nt, Artificial Sequence
  Description of Artificial Sequence: Synthetic oligonucleotide
  Antisense Strand to SEQ ID NO: 372721
acauuuagacgcuucuuug

SEQ ID NO: 372723 - RNA, 19 nt, Artificial Sequence
  Description of Artificial Sequence: Synthetic oligonucleotide
  Sense Strand Starting at position 687 of SEQ ID NO: 318473
agggcaauguaaccuagau

SEQ ID NO: 372724 - RNA, 19 nt, Artificial Sequence
  Description of Artificial Sequence: Synthetic oligonucleotide
  Antisense Strand to SEQ ID NO: 372723
aucuagguuacauugcccu

SEQ ID NO: 372725 - RNA, 19 nt, Artificial Sequence
  Description of Artificial Sequence: Synthetic oligonucleotide
  Sense Strand Starting at position 687 of SEQ ID NO: 318822
uuauuauggaaauguuggu

SEQ ID NO: 372726 - RNA, 19 nt, Artificial Sequence
  Description of Artificial Sequence: Synthetic oligonucleotide
  Antisense Strand to SEQ ID NO: 372725
accaacauuuccauaauaa

SEQ ID NO: 372727 - RNA, 19 nt, Artificial Sequence
  Description of Artificial Sequence: Synthetic oligonucleotide
  Sense Strand Starting at position 687 of SEQ ID NO: 319037
acaauuuacgcaggucuua

SEQ ID NO: 372728 - RNA, 19 nt, Artificial Sequence
  Description of Artificial Sequence: Synthetic oligonucleotide
  Antisense Strand to SEQ ID NO: 372727
uaagaccugcguaaauugu

SEQ ID NO: 372729 - RNA, 19 nt, Artificial Sequence
  Description of Artificial Sequence: Synthetic oligonucleotide
  Sense Strand Starting at position 687 of SEQ ID NO: 319089
gcuauuaacuagccauaug

SEQ ID NO: 372730 - RNA, 19 nt, Artificial Sequence
  Description of Artificial Sequence: Synthetic oligonucleotide
  Antisense Strand to SEQ ID NO: 372729
cauauggcuaguuaauagc

SEQ ID NO: 372731 - RNA, 19 nt, Artificial Sequence
  Description of Artificial Sequence: Synthetic oligonucleotide
  Sense Strand Starting at position 687 of SEQ ID NO: 319138
auuuccuguuuguuccaua

SEQ ID NO: 372732 - RNA, 19 nt, Artificial Sequence
  Description of Artificial Sequence: Synthetic oligonucleotide
  Antisense Strand to SEQ ID NO: 372731
uauggaacaaacaggaaau

SEQ ID NO: 372733 - RNA, 19 nt, Artificial Sequence
  Description of Artificial Sequence: Synthetic oligonucleotide
  Sense Strand Starting at position 687 of SEQ ID NO: 319143
cuguuuguuccauagaaca

SEQ ID NO: 372734 - RNA, 19 nt, Artificial Sequence
  Description of Artificial Sequence: Synthetic oligonucleotide
  Antisense Strand to SEQ ID NO: 372733
uguucuauggaacaaacag

SEQ ID NO: 372735 - RNA, 19 nt, Artificial Sequence
  Description of Artificial Sequence: Synthetic oligonucleotide
  Sense Strand Starting at position 687 of SEQ ID NO: 319168
guauuaaucuguuuaguag

SEQ ID NO: 372736 - RNA, 19 nt, Artificial Sequence
  Description of Artificial Sequence: Synthetic oligonucleotide
  Antisense Strand to SEQ ID NO: 372735
cuacuaaacagauuaauac

SEQ ID NO: 372737 - RNA, 19 nt, Artificial Sequence
  Description of Artificial Sequence: Synthetic oligonucleotide
  Sense Strand Starting at position 687 of SEQ ID NO: 319190
acaugcauguuacuuauca

SEQ ID NO: 372738 - RNA, 19 nt, Artificial Sequence
  Description of Artificial Sequence: Synthetic oligonucleotide
  Antisense Strand to SEQ ID NO: 372737
ugauaaguaacaugcaugu

SEQ ID NO: 372739 - RNA, 19 nt, Artificial Sequence
  Description of Artificial Sequence: Synthetic oligonucleotide
  Sense Strand Starting at position 687 of SEQ ID NO: 319218
cuagauggcagguguuaag

SEQ ID NO: 372740 - RNA, 19 nt, Artificial Sequence
  Description of Artificial Sequence: Synthetic oligonucleotide
  Antisense Strand to SEQ ID NO: 372739
cuuaacaccugccaucuag

SEQ ID NO: 372741 - RNA, 19 nt, Artificial Sequence
  Description of Artificial Sequence: Synthetic oligonucleotide
  Sense Strand Starting at position 688 of SEQ ID NO: 315482
aaaccauaauuguccgagu

SEQ ID NO: 372742 - RNA, 19 nt, Artificial Sequence
  Description of Artificial Sequence: Synthetic oligonucleotide
  Antisense Strand to SEQ ID NO: 372741
acucggacaauuaugguuu

SEQ ID NO: 372743 - RNA, 19 nt, Artificial Sequence
  Description of Artificial Sequence: Synthetic oligonucleotide
  Sense Strand Starting at position 688 of SEQ ID NO: 315483
aaccauaauuguccgagua

SEQ ID NO: 372744 - RNA, 19 nt, Artificial Sequence
  Description of Artificial Sequence: Synthetic oligonucleotide
  Antisense Strand to SEQ ID NO: 372743
uacucggacaauuaugguu

SEQ ID NO: 372745 - RNA, 19 nt, Artificial Sequence
  Description of Artificial Sequence: Synthetic oligonucleotide
  Sense Strand Starting at position 688 of SEQ ID NO: 315622
auguuacauccucagguau

SEQ ID NO: 372746 - RNA, 19 nt, Artificial Sequence
  Description of Artificial Sequence: Synthetic oligonucleotide
  Antisense Strand to SEQ ID NO: 372745
auaccugaggauguaacau

SEQ ID NO: 372747 - RNA, 19 nt, Artificial Sequence
  Description of Artificial Sequence: Synthetic oligonucleotide
  Sense Strand Starting at position 688 of SEQ ID NO: 315634
cagguaugauaaguuugaa

SEQ ID NO: 372748 - RNA, 19 nt, Artificial Sequence
  Description of Artificial Sequence: Synthetic oligonucleotide
  Antisense Strand to SEQ ID NO: 372747
uucaaacuuaucauaccug

SEQ ID NO: 372749 - RNA, 19 nt, Artificial Sequence
  Description of Artificial Sequence: Synthetic oligonucleotide
  Sense Strand Starting at position 688 of SEQ ID NO: 315653
auuagaugaguuuacaguu

SEQ ID NO: 372750 - RNA, 19 nt, Artificial Sequence
  Description of Artificial Sequence: Synthetic oligonucleotide
  Antisense Strand to SEQ ID NO: 372749
aacuguaaacucaucuaau

SEQ ID NO: 372751 - RNA, 19 nt, Artificial Sequence
  Description of Artificial Sequence: Synthetic oligonucleotide
  Sense Strand Starting at position 688 of SEQ ID NO: 315659
ugaguuuacaguuggaaga

SEQ ID NO: 372752 - RNA, 19 nt, Artificial Sequence
  Description of Artificial Sequence: Synthetic oligonucleotide
  Antisense Strand to SEQ ID NO: 372751
ucuuccaacuguaaacuca

SEQ ID NO: 372753 - RNA, 19 nt, Artificial Sequence
  Description of Artificial Sequence: Synthetic oligonucleotide
  Sense Strand Starting at position 688 of SEQ ID NO: 315660
gaguuuacaguuggaagau

SEQ ID NO: 372754 - RNA, 19 nt, Artificial Sequence
  Description of Artificial Sequence: Synthetic oligonucleotide
  Antisense Strand to SEQ ID NO: 372753
aucuuccaacuguaaacuc

SEQ ID NO: 372755 - RNA, 19 nt, Artificial Sequence
  Description of Artificial Sequence: Synthetic oligonucleotide
  Sense Strand Starting at position 688 of SEQ ID NO: 315790
cauggcagccuggauuaua

SEQ ID NO: 372756 - RNA, 19 nt, Artificial Sequence
  Description of Artificial Sequence: Synthetic oligonucleotide
  Antisense Strand to SEQ ID NO: 372755
uauaauccaggcugccaug

SEQ ID NO: 372757 - RNA, 19 nt, Artificial Sequence
  Description of Artificial Sequence: Synthetic oligonucleotide
  Sense Strand Starting at position 688 of SEQ ID NO: 315793
ggcagccuggauuauaaga

SEQ ID NO: 372758 - RNA, 19 nt, Artificial Sequence
  Description of Artificial Sequence: Synthetic oligonucleotide
  Antisense Strand to SEQ ID NO: 372757
ucuuauaauccaggcugcc

SEQ ID NO: 372759 - RNA, 19 nt, Artificial Sequence
  Description of Artificial Sequence: Synthetic oligonucleotide
  Sense Strand Starting at position 688 of SEQ ID NO: 315861
ugcagacuggcauauaaau

SEQ ID NO: 372760 - RNA, 19 nt, Artificial Sequence
  Description of Artificial Sequence: Synthetic oligonucleotide
  Antisense Strand to SEQ ID NO: 372759
auuuauaugccagucugca

SEQ ID NO: 372761 - RNA, 19 nt, Artificial Sequence
  Description of Artificial Sequence: Synthetic oligonucleotide
  Sense Strand Starting at position 688 of SEQ ID NO: 315870
gcauauaaaucgcucaaag

SEQ ID NO: 372762 - RNA, 19 nt, Artificial Sequence
  Description of Artificial Sequence: Synthetic oligonucleotide
  Antisense Strand to SEQ ID NO: 372761
cuuugagcgauuuauaugc

SEQ ID NO: 372763 - RNA, 19 nt, Artificial Sequence
  Description of Artificial Sequence: Synthetic oligonucleotide
  Sense Strand Starting at position 688 of SEQ ID NO: 315872
auauaaaucgcucaaagug

SEQ ID NO: 372764 - RNA, 19 nt, Artificial Sequence
  Description of Artificial Sequence: Synthetic oligonucleotide
  Antisense Strand to SEQ ID NO: 372763
cacuuugagcgauuuauau

SEQ ID NO: 372765 - RNA, 19 nt, Artificial Sequence
  Description of Artificial Sequence: Synthetic oligonucleotide
  Sense Strand Starting at position 688 of SEQ ID NO: 315887
agugaagcaguugggaaau

SEQ ID NO: 372766 - RNA, 19 nt, Artificial Sequence
  Description of Artificial Sequence: Synthetic oligonucleotide
  Antisense Strand to SEQ ID NO: 372765
auuucccaacugcuucacu

SEQ ID NO: 372767 - RNA, 19 nt, Artificial Sequence
  Description of Artificial Sequence: Synthetic oligonucleotide
  Sense Strand Starting at position 688 of SEQ ID NO: 315913
gauuauucggguugaggag

SEQ ID NO: 372768 - RNA, 19 nt, Artificial Sequence
  Description of Artificial Sequence: Synthetic oligonucleotide
  Antisense Strand to SEQ ID NO: 372767
cuccucaacccgaauaauc

SEQ ID NO: 372769 - RNA, 19 nt, Artificial Sequence
  Description of Artificial Sequence: Synthetic oligonucleotide
  Sense Strand Starting at position 688 of SEQ ID NO: 316175
ugugcauuucuaugcaaua

SEQ ID NO: 372770 - RNA, 19 nt, Artificial Sequence
  Description of Artificial Sequence: Synthetic oligonucleotide
  Antisense Strand to SEQ ID NO: 372769
uauugcauagaaaugcaca

SEQ ID NO: 372771 - RNA, 19 nt, Artificial Sequence
  Description of Artificial Sequence: Synthetic oligonucleotide
  Sense Strand Starting at position 688 of SEQ ID NO: 316176
gugcauuucuaugcaauau

SEQ ID NO: 372772 - RNA, 19 nt, Artificial Sequence
  Description of Artificial Sequence: Synthetic oligonucleotide
  Antisense Strand to SEQ ID NO: 372771
auauugcauagaaaugcac

SEQ ID NO: 372773 - RNA, 19 nt, Artificial Sequence
  Description of Artificial Sequence: Synthetic oligonucleotide
  Sense Strand Starting at position 688 of SEQ ID NO: 316311
aaguguagagagugacaua

SEQ ID NO: 372774 - RNA, 19 nt, Artificial Sequence
  Description of Artificial Sequence: Synthetic oligonucleotide
  Antisense Strand to SEQ ID NO: 372773
uaugucacucucuacacuu

SEQ ID NO: 372775 - RNA, 19 nt, Artificial Sequence
  Description of Artificial Sequence: Synthetic oligonucleotide
  Sense Strand Starting at position 688 of SEQ ID NO: 316363
uauggcucccgucauaaga

SEQ ID NO: 372776 - RNA, 19 nt, Artificial Sequence
  Description of Artificial Sequence: Synthetic oligonucleotide
  Antisense Strand to SEQ ID NO: 372775
ucuuaugacgggagccaua

SEQ ID NO: 372777 - RNA, 19 nt, Artificial Sequence
  Description of Artificial Sequence: Synthetic oligonucleotide
  Sense Strand Starting at position 688 of SEQ ID NO: 316429
ucgcaagauacugacuguu

SEQ ID NO: 372778 - RNA, 19 nt, Artificial Sequence
  Description of Artificial Sequence: Synthetic oligonucleotide
  Antisense Strand to SEQ ID NO: 372777
aacagucaguaucuugcga

SEQ ID NO: 372779 - RNA, 19 nt, Artificial Sequence
  Description of Artificial Sequence: Synthetic oligonucleotide
  Sense Strand Starting at position 688 of SEQ ID NO: 316431
gcaagauacugacuguuac

SEQ ID NO: 372780 - RNA, 19 nt, Artificial Sequence
  Description of Artificial Sequence: Synthetic oligonucleotide
  Antisense Strand to SEQ ID NO: 372779
guaacagucaguaucuugc

SEQ ID NO: 372781 - RNA, 19 nt, Artificial Sequence
  Description of Artificial Sequence: Synthetic oligonucleotide
  Sense Strand Starting at position 688 of SEQ ID NO: 316527
gauagaaccugcucugucu

SEQ ID NO: 372782 - RNA, 19 nt, Artificial Sequence
  Description of Artificial Sequence: Synthetic oligonucleotide
  Antisense Strand to SEQ ID NO: 372781
agacagagcagguucuauc

SEQ ID NO: 372783 - RNA, 19 nt, Artificial Sequence
  Description of Artificial Sequence: Synthetic oligonucleotide
  Sense Strand Starting at position 688 of SEQ ID NO: 316668
cgugcagaaccguaaauga

SEQ ID NO: 372784 - RNA, 19 nt, Artificial Sequence
  Description of Artificial Sequence: Synthetic oligonucleotide
  Antisense Strand to SEQ ID NO: 372783
ucauuuacgguucugcacg

SEQ ID NO: 372785 - RNA, 19 nt, Artificial Sequence
  Description of Artificial Sequence: Synthetic oligonucleotide
  Sense Strand Starting at position 688 of SEQ ID NO: 316802
cacggugucgcccucaaua

SEQ ID NO: 372786 - RNA, 19 nt, Artificial Sequence
  Description of Artificial Sequence: Synthetic oligonucleotide
  Antisense Strand to SEQ ID NO: 372785
uauugagggcgacaccgug

SEQ ID NO: 372787 - RNA, 19 nt, Artificial Sequence
  Description of Artificial Sequence: Synthetic oligonucleotide
  Sense Strand Starting at position 688 of SEQ ID NO: 317845
cuggcagucgauuaagaca

SEQ ID NO: 372788 - RNA, 19 nt, Artificial Sequence
  Description of Artificial Sequence: Synthetic oligonucleotide
  Antisense Strand to SEQ ID NO: 372787
ugucuuaaucgacugccag

SEQ ID NO: 372789 - RNA, 19 nt, Artificial Sequence
  Description of Artificial Sequence: Synthetic oligonucleotide
  Sense Strand Starting at position 688 of SEQ ID NO: 318110
uggccucaauccuugaaac

SEQ ID NO: 372790 - RNA, 19 nt, Artificial Sequence
  Description of Artificial Sequence: Synthetic oligonucleotide
  Antisense Strand to SEQ ID NO: 372789
guuucaaggauugaggcca

SEQ ID NO: 372791 - RNA, 19 nt, Artificial Sequence
  Description of Artificial Sequence: Synthetic oligonucleotide
  Sense Strand Starting at position 688 of SEQ ID NO: 318111
ggccucaauccuugaaacu

SEQ ID NO: 372792 - RNA, 19 nt, Artificial Sequence
  Description of Artificial Sequence: Synthetic oligonucleotide
  Antisense Strand to SEQ ID NO: 372791
aguuucaaggauugaggcc

SEQ ID NO: 372793 - RNA, 19 nt, Artificial Sequence
  Description of Artificial Sequence: Synthetic oligonucleotide
  Sense Strand Starting at position 688 of SEQ ID NO: 318132
aacgaucgugguuaauaua

SEQ ID NO: 372794 - RNA, 19 nt, Artificial Sequence
  Description of Artificial Sequence: Synthetic oligonucleotide
  Antisense Strand to SEQ ID NO: 372793
uauauuaaccacgaucguu

SEQ ID NO: 372795 - RNA, 19 nt, Artificial Sequence
  Description of Artificial Sequence: Synthetic oligonucleotide
  Sense Strand Starting at position 688 of SEQ ID NO: 318156
ucaguuaugagguguccag

SEQ ID NO: 372796 - RNA, 19 nt, Artificial Sequence
  Description of Artificial Sequence: Synthetic oligonucleotide
  Antisense Strand to SEQ ID NO: 372795
cuggacaccucauaacuga

SEQ ID NO: 372797 - RNA, 19 nt, Artificial Sequence
  Description of Artificial Sequence: Synthetic oligonucleotide
  Sense Strand Starting at position 688 of SEQ ID NO: 318163
ugagguguccagugaccaa

SEQ ID NO: 372798 - RNA, 19 nt, Artificial Sequence
  Description of Artificial Sequence: Synthetic oligonucleotide
  Antisense Strand to SEQ ID NO: 372797
uuggucacuggacaccuca

SEQ ID NO: 372799 - RNA, 19 nt, Artificial Sequence
  Description of Artificial Sequence: Synthetic oligonucleotide
  Sense Strand Starting at position 688 of SEQ ID NO: 318375
caguguacugucuauauug

SEQ ID NO: 372800 - RNA, 19 nt, Artificial Sequence
  Description of Artificial Sequence: Synthetic oligonucleotide
  Antisense Strand to SEQ ID NO: 372799
caauauagacaguacacug

SEQ ID NO: 372801 - RNA, 19 nt, Artificial Sequence
  Description of Artificial Sequence: Synthetic oligonucleotide
  Sense Strand Starting at position 688 of SEQ ID NO: 318377
guguacugucuauauugaa

SEQ ID NO: 372802 - RNA, 19 nt, Artificial Sequence
  Description of Artificial Sequence: Synthetic oligonucleotide
  Antisense Strand to SEQ ID NO: 372801
uucaauauagacaguacac

SEQ ID NO: 372803 - RNA, 19 nt, Artificial Sequence
  Description of Artificial Sequence: Synthetic oligonucleotide
  Sense Strand Starting at position 688 of SEQ ID NO: 318393
gaagcaauagaauaucguu

SEQ ID NO: 372804 - RNA, 19 nt, Artificial Sequence
  Description of Artificial Sequence: Synthetic oligonucleotide
  Antisense Strand to SEQ ID NO: 372803
aacgauauucuauugcuuc

SEQ ID NO: 372805 - RNA, 19 nt, Artificial Sequence
  Description of Artificial Sequence: Synthetic oligonucleotide
  Sense Strand Starting at position 688 of SEQ ID NO: 318398
aauagaauaucguuggcaa

SEQ ID NO: 372806 - RNA, 19 nt, Artificial Sequence
  Description of Artificial Sequence: Synthetic oligonucleotide
  Antisense Strand to SEQ ID NO: 372805
uugccaacgauauucuauu

SEQ ID NO: 372807 - RNA, 19 nt, Artificial Sequence
  Description of Artificial Sequence: Synthetic oligonucleotide
  Sense Strand Starting at position 688 of SEQ ID NO: 318399
auagaauaucguuggcaaa

SEQ ID NO: 372808 - RNA, 19 nt, Artificial Sequence
  Description of Artificial Sequence: Synthetic oligonucleotide
  Antisense Strand to SEQ ID NO: 372807
uuugccaacgauauucuau

SEQ ID NO: 372809 - RNA, 19 nt, Artificial Sequence
  Description of Artificial Sequence: Synthetic oligonucleotide
  Sense Strand Starting at position 688 of SEQ ID NO: 318400
uagaauaucguuggcaaac

SEQ ID NO: 372810 - RNA, 19 nt, Artificial Sequence
  Description of Artificial Sequence: Synthetic oligonucleotide
  Antisense Strand to SEQ ID NO: 372809
guuugccaacgauauucua

SEQ ID NO: 372811 - RNA, 19 nt, Artificial Sequence
  Description of Artificial Sequence: Synthetic oligonucleotide
  Sense Strand Starting at position 688 of SEQ ID NO: 318401
agaauaucguuggcaaaca

SEQ ID NO: 372812 - RNA, 19 nt, Artificial Sequence
  Description of Artificial Sequence: Synthetic oligonucleotide
  Antisense Strand to SEQ ID NO: 372811
uguuugccaacgauauucu

SEQ ID NO: 372813 - RNA, 19 nt, Artificial Sequence
  Description of Artificial Sequence: Synthetic oligonucleotide
  Sense Strand Starting at position 688 of SEQ ID NO: 318445
gagcuuauuguggaauauc

SEQ ID NO: 372814 - RNA, 19 nt, Artificial Sequence
  Description of Artificial Sequence: Synthetic oligonucleotide
  Antisense Strand to SEQ ID NO: 372813
gauauuccacaauaagcuc

SEQ ID NO: 372815 - RNA, 19 nt, Artificial Sequence
  Description of Artificial Sequence: Synthetic oligonucleotide
  Sense Strand Starting at position 688 of SEQ ID NO: 318499
guaacaugggagugcucaa

SEQ ID NO: 372816 - RNA, 19 nt, Artificial Sequence
  Description of Artificial Sequence: Synthetic oligonucleotide
  Antisense Strand to SEQ ID NO: 372815
uugagcacucccauguuac

SEQ ID NO: 372817 - RNA, 19 nt, Artificial Sequence
  Description of Artificial Sequence: Synthetic oligonucleotide
  Sense Strand Starting at position 688 of SEQ ID NO: 318506
gggagugcucaaggcaaau

SEQ ID NO: 372818 - RNA, 19 nt, Artificial Sequence
  Description of Artificial Sequence: Synthetic oligonucleotide
  Antisense Strand to SEQ ID NO: 372817
auuugccuugagcacuccc

SEQ ID NO: 372819 - RNA, 19 nt, Artificial Sequence
  Description of Artificial Sequence: Synthetic oligonucleotide
  Sense Strand Starting at position 688 of SEQ ID NO: 318551
cucaguguaccacauuauu

SEQ ID NO: 372820 - RNA, 19 nt, Artificial Sequence
  Description of Artificial Sequence: Synthetic oligonucleotide
  Antisense Strand to SEQ ID NO: 372819
aauaaugugguacacugag

SEQ ID NO: 372821 - RNA, 19 nt, Artificial Sequence
  Description of Artificial Sequence: Synthetic oligonucleotide
  Sense Strand Starting at position 689 of SEQ ID NO: 315241
ggagucuccugcuuagcaa

SEQ ID NO: 372822 - RNA, 19 nt, Artificial Sequence
  Description of Artificial Sequence: Synthetic oligonucleotide
  Antisense Strand to SEQ ID NO: 372821
uugcuaagcaggagacucc

SEQ ID NO: 372823 - RNA, 19 nt, Artificial Sequence
  Description of Artificial Sequence: Synthetic oligonucleotide
  Sense Strand Starting at position 689 of SEQ ID NO: 315259
acuuuaauguugucuacca

SEQ ID NO: 372824 - RNA, 19 nt, Artificial Sequence
  Description of Artificial Sequence: Synthetic oligonucleotide
  Antisense Strand to SEQ ID NO: 372823
ugguagacaacauuaaagu

SEQ ID NO: 372825 - RNA, 19 nt, Artificial Sequence
  Description of Artificial Sequence: Synthetic oligonucleotide
  Sense Strand Starting at position 689 of SEQ ID NO: 315260
cuuuaauguugucuaccaa

SEQ ID NO: 372826 - RNA, 19 nt, Artificial Sequence
  Description of Artificial Sequence: Synthetic oligonucleotide
  Antisense Strand to SEQ ID NO: 372825
uugguagacaacauuaaag

SEQ ID NO: 372827 - RNA, 19 nt, Artificial Sequence
  Description of Artificial Sequence: Synthetic oligonucleotide
  Sense Strand Starting at position 689 of SEQ ID NO: 315261
uuuaauguugucuaccaaa

SEQ ID NO: 372828 - RNA, 19 nt, Artificial Sequence
  Description of Artificial Sequence: Synthetic oligonucleotide
  Antisense Strand to SEQ ID NO: 372827
uuugguagacaacauuaaa

SEQ ID NO: 372829 - RNA, 19 nt, Artificial Sequence
  Description of Artificial Sequence: Synthetic oligonucleotide
  Sense Strand Starting at position 689 of SEQ ID NO: 315279
acacccagcuuguaauaga

SEQ ID NO: 372830 - RNA, 19 nt, Artificial Sequence
  Description of Artificial Sequence: Synthetic oligonucleotide
  Antisense Strand to SEQ ID NO: 372829
ucuauuacaagcugggugu

SEQ ID NO: 372831 - RNA, 19 nt, Artificial Sequence
  Description of Artificial Sequence: Synthetic oligonucleotide
  Sense Strand Starting at position 689 of SEQ ID NO: 315287
cuuguaauagagcaugaca

SEQ ID NO: 372832 - RNA, 19 nt, Artificial Sequence
  Description of Artificial Sequence: Synthetic oligonucleotide
  Antisense Strand to SEQ ID NO: 372831
ugucaugcucuauuacaag

SEQ ID NO: 372833 - RNA, 19 nt, Artificial Sequence
  Description of Artificial Sequence: Synthetic oligonucleotide
  Sense Strand Starting at position 689 of SEQ ID NO: 315289
uguaauagagcaugacaac

SEQ ID NO: 372834 - RNA, 19 nt, Artificial Sequence
  Description of Artificial Sequence: Synthetic oligonucleotide
  Antisense Strand to SEQ ID NO: 372833
guugucaugcucuauuaca

SEQ ID NO: 372835 - RNA, 19 nt, Artificial Sequence
  Description of Artificial Sequence: Synthetic oligonucleotide
  Sense Strand Starting at position 689 of SEQ ID NO: 315369
gguggugcucuuugaaucu

SEQ ID NO: 372836 - RNA, 19 nt, Artificial Sequence
  Description of Artificial Sequence: Synthetic oligonucleotide
  Antisense Strand to SEQ ID NO: 372835
agauucaaagagcaccacc

SEQ ID NO: 372837 - RNA, 19 nt, Artificial Sequence
  Description of Artificial Sequence: Synthetic oligonucleotide
  Sense Strand Starting at position 689 of SEQ ID NO: 315433
gcuguauucccucaccaca

SEQ ID NO: 372838 - RNA, 19 nt, Artificial Sequence
  Description of Artificial Sequence: Synthetic oligonucleotide
  Antisense Strand to SEQ ID NO: 372837
uguggugagggaauacagc

SEQ ID NO: 372839 - RNA, 19 nt, Artificial Sequence
  Description of Artificial Sequence: Synthetic oligonucleotide
  Sense Strand Starting at position 689 of SEQ ID NO: 315534
ugggcugagugagcaaauu

SEQ ID NO: 372840 - RNA, 19 nt, Artificial Sequence
  Description of Artificial Sequence: Synthetic oligonucleotide
  Antisense Strand to SEQ ID NO: 372839
aauuugcucacucagccca

SEQ ID NO: 372841 - RNA, 19 nt, Artificial Sequence
  Description of Artificial Sequence: Synthetic oligonucleotide
  Sense Strand Starting at position 689 of SEQ ID NO: 315840
ccaguagaaagcuggguaa

SEQ ID NO: 372842 - RNA, 19 nt, Artificial Sequence
  Description of Artificial Sequence: Synthetic oligonucleotide
  Antisense Strand to SEQ ID NO: 372841
uuacccagcuuucuacugg

SEQ ID NO: 372843 - RNA, 19 nt, Artificial Sequence
  Description of Artificial Sequence: Synthetic oligonucleotide
  Sense Strand Starting at position 689 of SEQ ID NO: 315842
aguagaaagcuggguaaca

SEQ ID NO: 372844 - RNA, 19 nt, Artificial Sequence
  Description of Artificial Sequence: Synthetic oligonucleotide
  Antisense Strand to SEQ ID NO: 372843
uguuacccagcuuucuacu

SEQ ID NO: 372845 - RNA, 19 nt, Artificial Sequence
  Description of Artificial Sequence: Synthetic oligonucleotide
  Sense Strand Starting at position 689 of SEQ ID NO: 315892
gagcuuggguccuaaagca

SEQ ID NO: 372846 - RNA, 19 nt, Artificial Sequence
  Description of Artificial Sequence: Synthetic oligonucleotide
  Antisense Strand to SEQ ID NO: 372845
ugcuuuaggacccaagcuc

SEQ ID NO: 372847 - RNA, 19 nt, Artificial Sequence
  Description of Artificial Sequence: Synthetic oligonucleotide
  Sense Strand Starting at position 689 of SEQ ID NO: 316047
cggagaacuuguuccaugu

SEQ ID NO: 372848 - RNA, 19 nt, Artificial Sequence
  Description of Artificial Sequence: Synthetic oligonucleotide
  Antisense Strand to SEQ ID NO: 372847
acauggaacaaguucuccg

SEQ ID NO: 372849 - RNA, 19 nt, Artificial Sequence
  Description of Artificial Sequence: Synthetic oligonucleotide
  Sense Strand Starting at position 689 of SEQ ID NO: 316051
gaacuuguuccaugugcua

SEQ ID NO: 372850 - RNA, 19 nt, Artificial Sequence
  Description of Artificial Sequence: Synthetic oligonucleotide
  Antisense Strand to SEQ ID NO: 372849
uagcacauggaacaaguuc

SEQ ID NO: 372851 - RNA, 19 nt, Artificial Sequence
  Description of Artificial Sequence: Synthetic oligonucleotide
  Sense Strand Starting at position 689 of SEQ ID NO: 316054
cuuguuccaugugcuaaau

SEQ ID NO: 372852 - RNA, 19 nt, Artificial Sequence
  Description of Artificial Sequence: Synthetic oligonucleotide
  Antisense Strand to SEQ ID NO: 372851
auuuagcacauggaacaag

SEQ ID NO: 372853 - RNA, 19 nt, Artificial Sequence
  Description of Artificial Sequence: Synthetic oligonucleotide
  Sense Strand Starting at position 689 of SEQ ID NO: 316077
aucucuguucuggguaaug

SEQ ID NO: 372854 - RNA, 19 nt, Artificial Sequence
  Description of Artificial Sequence: Synthetic oligonucleotide
  Antisense Strand to SEQ ID NO: 372853
cauuacccagaacagagau

SEQ ID NO: 372855 - RNA, 19 nt, Artificial Sequence
  Description of Artificial Sequence: Synthetic oligonucleotide
  Sense Strand Starting at position 689 of SEQ ID NO: 316079
cucuguucuggguaauguu

SEQ ID NO: 372856 - RNA, 19 nt, Artificial Sequence
  Description of Artificial Sequence: Synthetic oligonucleotide
  Antisense Strand to SEQ ID NO: 372855
aacauuacccagaacagag

SEQ ID NO: 372857 - RNA, 19 nt, Artificial Sequence
  Description of Artificial Sequence: Synthetic oligonucleotide
  Sense Strand Starting at position 689 of SEQ ID NO: 316087
uggguaauguuuccaacug

SEQ ID NO: 372858 - RNA, 19 nt, Artificial Sequence
  Description of Artificial Sequence: Synthetic oligonucleotide
  Antisense Strand to SEQ ID NO: 372857
caguuggaaacauuaccca

SEQ ID NO: 372859 - RNA, 19 nt, Artificial Sequence
  Description of Artificial Sequence: Synthetic oligonucleotide
  Sense Strand Starting at position 689 of SEQ ID NO: 317124
gccuucgcuguucuaugau

SEQ ID NO: 372860 - RNA, 19 nt, Artificial Sequence
  Description of Artificial Sequence: Synthetic oligonucleotide
  Antisense Strand to SEQ ID NO: 372859
aucauagaacagcgaaggc

SEQ ID NO: 372861 - RNA, 19 nt, Artificial Sequence
  Description of Artificial Sequence: Synthetic oligonucleotide
  Sense Strand Starting at position 689 of SEQ ID NO: 317404
caaguugagaugugcugua

SEQ ID NO: 372862 - RNA, 19 nt, Artificial Sequence
  Description of Artificial Sequence: Synthetic oligonucleotide
  Antisense Strand to SEQ ID NO: 372861
uacagcacaucucaacuug

SEQ ID NO: 372863 - RNA, 19 nt, Artificial Sequence
  Description of Artificial Sequence: Synthetic oligonucleotide
  Sense Strand Starting at position 689 of SEQ ID NO: 317495
augguuacaagugggauaa

SEQ ID NO: 372864 - RNA, 19 nt, Artificial Sequence
  Description of Artificial Sequence: Synthetic oligonucleotide
  Antisense Strand to SEQ ID NO: 372863
uuaucccacuuguaaccau

SEQ ID NO: 372865 - RNA, 19 nt, Artificial Sequence
  Description of Artificial Sequence: Synthetic oligonucleotide
  Sense Strand Starting at position 689 of SEQ ID NO: 317496
ugguuacaagugggauaau

SEQ ID NO: 372866 - RNA, 19 nt, Artificial Sequence
  Description of Artificial Sequence: Synthetic oligonucleotide
  Antisense Strand to SEQ ID NO: 372865
auuaucccacuuguaacca

SEQ ID NO: 372867 - RNA, 19 nt, Artificial Sequence
  Description of Artificial Sequence: Synthetic oligonucleotide
  Sense Strand Starting at position 689 of SEQ ID NO: 317497
gguuacaagugggauaauu

SEQ ID NO: 372868 - RNA, 19 nt, Artificial Sequence
  Description of Artificial Sequence: Synthetic oligonucleotide
  Antisense Strand to SEQ ID NO: 372867
aauuaucccacuuguaacc

SEQ ID NO: 372869 - RNA, 19 nt, Artificial Sequence
  Description of Artificial Sequence: Synthetic oligonucleotide
  Sense Strand Starting at position 689 of SEQ ID NO: 317950
gcuuuaaaguuacuuugau

SEQ ID NO: 372870 - RNA, 19 nt, Artificial Sequence
  Description of Artificial Sequence: Synthetic oligonucleotide
  Antisense Strand to SEQ ID NO: 372869
aucaaaguaacuuuaaagc

SEQ ID NO: 372871 - RNA, 19 nt, Artificial Sequence
  Description of Artificial Sequence: Synthetic oligonucleotide
  Sense Strand Starting at position 689 of SEQ ID NO: 317996
gcauauuccugucccagac

SEQ ID NO: 372872 - RNA, 19 nt, Artificial Sequence
  Description of Artificial Sequence: Synthetic oligonucleotide
  Antisense Strand to SEQ ID NO: 372871
gucugggacaggaauaugc

SEQ ID NO: 372873 - RNA, 19 nt, Artificial Sequence
  Description of Artificial Sequence: Synthetic oligonucleotide
  Sense Strand Starting at position 689 of SEQ ID NO: 317998
auauuccugucccagacuu

SEQ ID NO: 372874 - RNA, 19 nt, Artificial Sequence
  Description of Artificial Sequence: Synthetic oligonucleotide
  Antisense Strand to SEQ ID NO: 372873
aagucugggacaggaauau

SEQ ID NO: 372875 - RNA, 19 nt, Artificial Sequence
  Description of Artificial Sequence: Synthetic oligonucleotide
  Sense Strand Starting at position 689 of SEQ ID NO: 318019
ggaauagaauuggcuuuga

SEQ ID NO: 372876 - RNA, 19 nt, Artificial Sequence
  Description of Artificial Sequence: Synthetic oligonucleotide
  Antisense Strand to SEQ ID NO: 372875
ucaaagccaauucuauucc

SEQ ID NO: 372877 - RNA, 19 nt, Artificial Sequence
  Description of Artificial Sequence: Synthetic oligonucleotide
  Sense Strand Starting at position 689 of SEQ ID NO: 318034
uugagcuccuuuguaguua

SEQ ID NO: 372878 - RNA, 19 nt, Artificial Sequence
  Description of Artificial Sequence: Synthetic oligonucleotide
  Antisense Strand to SEQ ID NO: 372877
uaacuacaaaggagcucaa

SEQ ID NO: 372879 - RNA, 19 nt, Artificial Sequence
  Description of Artificial Sequence: Synthetic oligonucleotide
  Sense Strand Starting at position 689 of SEQ ID NO: 318038
gcuccuuuguaguuagaug

SEQ ID NO: 372880 - RNA, 19 nt, Artificial Sequence
  Description of Artificial Sequence: Synthetic oligonucleotide
  Antisense Strand to SEQ ID NO: 372879
caucuaacuacaaaggagc

SEQ ID NO: 372881 - RNA, 19 nt, Artificial Sequence
  Description of Artificial Sequence: Synthetic oligonucleotide
  Sense Strand Starting at position 689 of SEQ ID NO: 318046
guaguuagauggcuaggaa

SEQ ID NO: 372882 - RNA, 19 nt, Artificial Sequence
  Description of Artificial Sequence: Synthetic oligonucleotide
  Antisense Strand to SEQ ID NO: 372881
uuccuagccaucuaacuac

SEQ ID NO: 372883 - RNA, 19 nt, Artificial Sequence
  Description of Artificial Sequence: Synthetic oligonucleotide
  Sense Strand Starting at position 689 of SEQ ID NO: 318158
gaaggacauuccugaaagg

SEQ ID NO: 372884 - RNA, 19 nt, Artificial Sequence
  Description of Artificial Sequence: Synthetic oligonucleotide
  Antisense Strand to SEQ ID NO: 372883
ccuuucaggaauguccuuc

SEQ ID NO: 372885 - RNA, 19 nt, Artificial Sequence
  Description of Artificial Sequence: Synthetic oligonucleotide
  Sense Strand Starting at position 689 of SEQ ID NO: 318226
agaugaauuugaggaauuc

SEQ ID NO: 372886 - RNA, 19 nt, Artificial Sequence
  Description of Artificial Sequence: Synthetic oligonucleotide
  Antisense Strand to SEQ ID NO: 372885
gaauuccucaaauucaucu

SEQ ID NO: 372887 - RNA, 19 nt, Artificial Sequence
  Description of Artificial Sequence: Synthetic oligonucleotide
  Sense Strand Starting at position 689 of SEQ ID NO: 318317
uagucaauuguguauuaug

SEQ ID NO: 372888 - RNA, 19 nt, Artificial Sequence
  Description of Artificial Sequence: Synthetic oligonucleotide
  Antisense Strand to SEQ ID NO: 372887
cauaauacacaauugacua

SEQ ID NO: 372889 - RNA, 19 nt, Artificial Sequence
  Description of Artificial Sequence: Synthetic oligonucleotide
  Sense Strand Starting at position 689 of SEQ ID NO: 318320
ucaauuguguauuauguca

SEQ ID NO: 372890 - RNA, 19 nt, Artificial Sequence
  Description of Artificial Sequence: Synthetic oligonucleotide
  Antisense Strand to SEQ ID NO: 372889
ugacauaauacacaauuga

SEQ ID NO: 372891 - RNA, 19 nt, Artificial Sequence
  Description of Artificial Sequence: Synthetic oligonucleotide
  Sense Strand Starting at position 689 of SEQ ID NO: 318338
aaguaugucugcuuaggaa

SEQ ID NO: 372892 - RNA, 19 nt, Artificial Sequence
  Description of Artificial Sequence: Synthetic oligonucleotide
  Antisense Strand to SEQ ID NO: 372891
uuccuaagcagacauacuu

SEQ ID NO: 372893 - RNA, 19 nt, Artificial Sequence
  Description of Artificial Sequence: Synthetic oligonucleotide
  Sense Strand Starting at position 689 of SEQ ID NO: 318342
augucugcuuaggaaugaa

SEQ ID NO: 372894 - RNA, 19 nt, Artificial Sequence
  Description of Artificial Sequence: Synthetic oligonucleotide
  Antisense Strand to SEQ ID NO: 372893
uucauuccuaagcagacau

SEQ ID NO: 372895 - RNA, 19 nt, Artificial Sequence
  Description of Artificial Sequence: Synthetic oligonucleotide
  Sense Strand Starting at position 689 of SEQ ID NO: 318363
gcaguuugugcaugacuca

SEQ ID NO: 372896 - RNA, 19 nt, Artificial Sequence
  Description of Artificial Sequence: Synthetic oligonucleotide
  Antisense Strand to SEQ ID NO: 372895
ugagucaugcacaaacugc

SEQ ID NO: 372897 - RNA, 19 nt, Artificial Sequence
  Description of Artificial Sequence: Synthetic oligonucleotide
  Sense Strand Starting at position 689 of SEQ ID NO: 319052
ggcugaaggguccgaaauu

SEQ ID NO: 372898 - RNA, 19 nt, Artificial Sequence
  Description of Artificial Sequence: Synthetic oligonucleotide
  Antisense Strand to SEQ ID NO: 372897
aauuucggacccuucagcc

SEQ ID NO: 372899 - RNA, 19 nt, Artificial Sequence
  Description of Artificial Sequence: Synthetic oligonucleotide
  Sense Strand Starting at position 689 of SEQ ID NO: 319053
gcugaaggguccgaaauuu

SEQ ID NO: 372900 - RNA, 19 nt, Artificial Sequence
  Description of Artificial Sequence: Synthetic oligonucleotide
  Antisense Strand to SEQ ID NO: 372899
aaauuucggacccuucagc

SEQ ID NO: 372901 - RNA, 19 nt, Artificial Sequence
  Description of Artificial Sequence: Synthetic oligonucleotide
  Sense Strand Starting at position 690 of SEQ ID NO: 315547
gguaccaucuccucagaca

SEQ ID NO: 372902 - RNA, 19 nt, Artificial Sequence
  Description of Artificial Sequence: Synthetic oligonucleotide
  Antisense Strand to SEQ ID NO: 372901
ugucugaggagaugguacc

SEQ ID NO: 372903 - RNA, 19 nt, Artificial Sequence
  Description of Artificial Sequence: Synthetic oligonucleotide
  Sense Strand Starting at position 690 of SEQ ID NO: 315572
agggcauccugugcuuauu

SEQ ID NO: 372904 - RNA, 19 nt, Artificial Sequence
  Description of Artificial Sequence: Synthetic oligonucleotide
  Antisense Strand to SEQ ID NO: 372903
aauaagcacaggaugcccu

SEQ ID NO: 372905 - RNA, 19 nt, Artificial Sequence
  Description of Artificial Sequence: Synthetic oligonucleotide
  Sense Strand Starting at position 690 of SEQ ID NO: 315575
gcauccugugcuuauuuga

SEQ ID NO: 372906 - RNA, 19 nt, Artificial Sequence
  Description of Artificial Sequence: Synthetic oligonucleotide
  Antisense Strand to SEQ ID NO: 372905
ucaaauaagcacaggaugc

SEQ ID NO: 372907 - RNA, 19 nt, Artificial Sequence
  Description of Artificial Sequence: Synthetic oligonucleotide
  Sense Strand Starting at position 690 of SEQ ID NO: 315582
gugcuuauuugagcauaug

SEQ ID NO: 372908 - RNA, 19 nt, Artificial Sequence
  Description of Artificial Sequence: Synthetic oligonucleotide
  Antisense Strand to SEQ ID NO: 372907
cauaugcucaaauaagcac

SEQ ID NO: 372909 - RNA, 19 nt, Artificial Sequence
  Description of Artificial Sequence: Synthetic oligonucleotide
  Sense Strand Starting at position 690 of SEQ ID NO: 315590
uugagcauauguguguaua

SEQ ID NO: 372910 - RNA, 19 nt, Artificial Sequence
  Description of Artificial Sequence: Synthetic oligonucleotide
  Antisense Strand to SEQ ID NO: 372909
uauacacacauaugcucaa

SEQ ID NO: 372911 - RNA, 19 nt, Artificial Sequence
  Description of Artificial Sequence: Synthetic oligonucleotide
  Sense Strand Starting at position 690 of SEQ ID NO: 315592
gagcauauguguguauauu

SEQ ID NO: 372912 - RNA, 19 nt, Artificial Sequence
  Description of Artificial Sequence: Synthetic oligonucleotide
  Antisense Strand to SEQ ID NO: 372911
aauauacacacauaugcuc

SEQ ID NO: 372913 - RNA, 19 nt, Artificial Sequence
  Description of Artificial Sequence: Synthetic oligonucleotide
  Sense Strand Starting at position 690 of SEQ ID NO: 315593
agcauauguguguauauua

SEQ ID NO: 372914 - RNA, 19 nt, Artificial Sequence
  Description of Artificial Sequence: Synthetic oligonucleotide
  Antisense Strand to SEQ ID NO: 372913
uaauauacacacauaugcu

SEQ ID NO: 372915 - RNA, 19 nt, Artificial Sequence
  Description of Artificial Sequence: Synthetic oligonucleotide
  Sense Strand Starting at position 690 of SEQ ID NO: 315668
guaugcguauauuuaagau

SEQ ID NO: 372916 - RNA, 19 nt, Artificial Sequence
  Description of Artificial Sequence: Synthetic oligonucleotide
  Antisense Strand to SEQ ID NO: 372915
aucuuaaauauacgcauac

SEQ ID NO: 372917 - RNA, 19 nt, Artificial Sequence
  Description of Artificial Sequence: Synthetic oligonucleotide
  Sense Strand Starting at position 690 of SEQ ID NO: 315712
auggcugugcuauaauuaa

SEQ ID NO: 372918 - RNA, 19 nt, Artificial Sequence
  Description of Artificial Sequence: Synthetic oligonucleotide
  Antisense Strand to SEQ ID NO: 372917
uuaauuauagcacagccau

SEQ ID NO: 372919 - RNA, 19 nt, Artificial Sequence
  Description of Artificial Sequence: Synthetic oligonucleotide
  Sense Strand Starting at position 690 of SEQ ID NO: 315765
uguacaaugucuccaccua

SEQ ID NO: 372920 - RNA, 19 nt, Artificial Sequence
  Description of Artificial Sequence: Synthetic oligonucleotide
  Antisense Strand to SEQ ID NO: 372919
uagguggagacauuguaca

SEQ ID NO: 372921 - RNA, 19 nt, Artificial Sequence
  Description of Artificial Sequence: Synthetic oligonucleotide
  Sense Strand Starting at position 690 of SEQ ID NO: 315766
guacaaugucuccaccuau

SEQ ID NO: 372922 - RNA, 19 nt, Artificial Sequence
  Description of Artificial Sequence: Synthetic oligonucleotide
  Antisense Strand to SEQ ID NO: 372921
auagguggagacauuguac

SEQ ID NO: 372923 - RNA, 19 nt, Artificial Sequence
  Description of Artificial Sequence: Synthetic oligonucleotide
  Sense Strand Starting at position 690 of SEQ ID NO: 315844
gugaaauagcugcaucaaa

SEQ ID NO: 372924 - RNA, 19 nt, Artificial Sequence
  Description of Artificial Sequence: Synthetic oligonucleotide
  Antisense Strand to SEQ ID NO: 372923
uuugaugcagcuauuucac

SEQ ID NO: 372925 - RNA, 19 nt, Artificial Sequence
  Description of Artificial Sequence: Synthetic oligonucleotide
  Sense Strand Starting at position 690 of SEQ ID NO: 315903
cuaaauagucaaugguaag

SEQ ID NO: 372926 - RNA, 19 nt, Artificial Sequence
  Description of Artificial Sequence: Synthetic oligonucleotide
  Antisense Strand to SEQ ID NO: 372925
cuuaccauugacuauuuag

SEQ ID NO: 372927 - RNA, 19 nt, Artificial Sequence
  Description of Artificial Sequence: Synthetic oligonucleotide
  Sense Strand Starting at position 690 of SEQ ID NO: 315906
aauagucaaugguaaggaa

SEQ ID NO: 372928 - RNA, 19 nt, Artificial Sequence
  Description of Artificial Sequence: Synthetic oligonucleotide
  Antisense Strand to SEQ ID NO: 372927
uuccuuaccauugacuauu

SEQ ID NO: 372929 - RNA, 19 nt, Artificial Sequence
  Description of Artificial Sequence: Synthetic oligonucleotide
  Sense Strand Starting at position 690 of SEQ ID NO: 316054
guaagaaucuaaccacgua

SEQ ID NO: 372930 - RNA, 19 nt, Artificial Sequence
  Description of Artificial Sequence: Synthetic oligonucleotide
  Antisense Strand to SEQ ID NO: 372929
uacgugguuagauucuuac

SEQ ID NO: 372931 - RNA, 19 nt, Artificial Sequence
  Description of Artificial Sequence: Synthetic oligonucleotide
  Sense Strand Starting at position 690 of SEQ ID NO: 316158
guuguaauuucuguacuuu

SEQ ID NO: 372932 - RNA, 19 nt, Artificial Sequence
  Description of Artificial Sequence: Synthetic oligonucleotide
  Antisense Strand to SEQ ID NO: 372931
aaaguacagaaauuacaac

SEQ ID NO: 372933 - RNA, 19 nt, Artificial Sequence
  Description of Artificial Sequence: Synthetic oligonucleotide
  Sense Strand Starting at position 690 of SEQ ID NO: 317447
aguguccaucucgaagaau

SEQ ID NO: 372934 - RNA, 19 nt, Artificial Sequence
  Description of Artificial Sequence: Synthetic oligonucleotide
  Antisense Strand to SEQ ID NO: 372933
auucuucgagauggacacu

SEQ ID NO: 372935 - RNA, 19 nt, Artificial Sequence
  Description of Artificial Sequence: Synthetic oligonucleotide
  Sense Strand Starting at position 690 of SEQ ID NO: 317456
cucgaagaaugccucagaa

SEQ ID NO: 372936 - RNA, 19 nt, Artificial Sequence
  Description of Artificial Sequence: Synthetic oligonucleotide
  Antisense Strand to SEQ ID NO: 372935
uucugaggcauucuucgag

SEQ ID NO: 372937 - RNA, 19 nt, Artificial Sequence
  Description of Artificial Sequence: Synthetic oligonucleotide
  Sense Strand Starting at position 690 of SEQ ID NO: 317458
cgaagaaugccucagaauu

SEQ ID NO: 372938 - RNA, 19 nt, Artificial Sequence
  Description of Artificial Sequence: Synthetic oligonucleotide
  Antisense Strand to SEQ ID NO: 372937
aauucugaggcauucuucg

SEQ ID NO: 372939 - RNA, 19 nt, Artificial Sequence
  Description of Artificial Sequence: Synthetic oligonucleotide
  Sense Strand Starting at position 690 of SEQ ID NO: 317489
cccucagugucaucuuaua

SEQ ID NO: 372940 - RNA, 19 nt, Artificial Sequence
  Description of Artificial Sequence: Synthetic oligonucleotide
  Antisense Strand to SEQ ID NO: 372939
uauaagaugacacugaggg

SEQ ID NO: 372941 - RNA, 19 nt, Artificial Sequence
  Description of Artificial Sequence: Synthetic oligonucleotide
  Sense Strand Starting at position 690 of SEQ ID NO: 317663
cagcaaugagggugucaga

SEQ ID NO: 372942 - RNA, 19 nt, Artificial Sequence
  Description of Artificial Sequence: Synthetic oligonucleotide
  Antisense Strand to SEQ ID NO: 372941
ucugacacccucauugcug

SEQ ID NO: 372943 - RNA, 19 nt, Artificial Sequence
  Description of Artificial Sequence: Synthetic oligonucleotide
  Sense Strand Starting at position 690 of SEQ ID NO: 317666
caaugagggugucagagaa

SEQ ID NO: 372944 - RNA, 19 nt, Artificial Sequence
  Description of Artificial Sequence: Synthetic oligonucleotide
  Antisense Strand to SEQ ID NO: 372943
uucucugacacccucauug

SEQ ID NO: 372945 - RNA, 19 nt, Artificial Sequence
  Description of Artificial Sequence: Synthetic oligonucleotide
  Sense Strand Starting at position 690 of SEQ ID NO: 317694
cccugcuucccggagaaca

SEQ ID NO: 372946 - RNA, 19 nt, Artificial Sequence
  Description of Artificial Sequence: Synthetic oligonucleotide
  Antisense Strand to SEQ ID NO: 372945
uguucuccgggaagcaggg

SEQ ID NO: 372947 - RNA, 19 nt, Artificial Sequence
  Description of Artificial Sequence: Synthetic oligonucleotide
  Sense Strand Starting at position 690 of SEQ ID NO: 317728
cugugagucgccgccuauu

SEQ ID NO: 372948 - RNA, 19 nt, Artificial Sequence
  Description of Artificial Sequence: Synthetic oligonucleotide
  Antisense Strand to SEQ ID NO: 372947
aauaggcggcgacucacag

SEQ ID NO: 372949 - RNA, 19 nt, Artificial Sequence
  Description of Artificial Sequence: Synthetic oligonucleotide
  Sense Strand Starting at position 690 of SEQ ID NO: 317752
uuaggaugcuagucuacau

SEQ ID NO: 372950 - RNA, 19 nt, Artificial Sequence
  Description of Artificial Sequence: Synthetic oligonucleotide
  Antisense Strand to SEQ ID NO: 372949
auguagacuagcauccuaa

SEQ ID NO: 372951 - RNA, 19 nt, Artificial Sequence
  Description of Artificial Sequence: Synthetic oligonucleotide
  Sense Strand Starting at position 690 of SEQ ID NO: 317762
agucuacauuugugacaac

SEQ ID NO: 372952 - RNA, 19 nt, Artificial Sequence
  Description of Artificial Sequence: Synthetic oligonucleotide
  Antisense Strand to SEQ ID NO: 372951
guugucacaaauguagacu

SEQ ID NO: 372953 - RNA, 19 nt, Artificial Sequence
  Description of Artificial Sequence: Synthetic oligonucleotide
  Sense Strand Starting at position 690 of SEQ ID NO: 317803
ggcauuagccaccaaucga

SEQ ID NO: 372954 - RNA, 19 nt, Artificial Sequence
  Description of Artificial Sequence: Synthetic oligonucleotide
  Antisense Strand to SEQ ID NO: 372953
ucgauugguggcuaaugcc

SEQ ID NO: 372955 - RNA, 19 nt, Artificial Sequence
  Description of Artificial Sequence: Synthetic oligonucleotide
  Sense Strand Starting at position 690 of SEQ ID NO: 317956
ggcagagcuguugagggau

SEQ ID NO: 372956 - RNA, 19 nt, Artificial Sequence
  Description of Artificial Sequence: Synthetic oligonucleotide
  Antisense Strand to SEQ ID NO: 372955
aucccucaacagcucugcc

SEQ ID NO: 372957 - RNA, 19 nt, Artificial Sequence
  Description of Artificial Sequence: Synthetic oligonucleotide
  Sense Strand Starting at position 690 of SEQ ID NO: 317991
aggucuguucaaugcagga

SEQ ID NO: 372958 - RNA, 19 nt, Artificial Sequence
  Description of Artificial Sequence: Synthetic oligonucleotide
  Antisense Strand to SEQ ID NO: 372957
uccugcauugaacagaccu

SEQ ID NO: 372959 - RNA, 19 nt, Artificial Sequence
  Description of Artificial Sequence: Synthetic oligonucleotide
  Sense Strand Starting at position 690 of SEQ ID NO: 318392
gagugaacucuuuguggac

SEQ ID NO: 372960 - RNA, 19 nt, Artificial Sequence
  Description of Artificial Sequence: Synthetic oligonucleotide
  Antisense Strand to SEQ ID NO: 372959
guccacaaagaguucacuc

SEQ ID NO: 372961 - RNA, 19 nt, Artificial Sequence
  Description of Artificial Sequence: Synthetic oligonucleotide
  Sense Strand Starting at position 690 of SEQ ID NO: 318393
agugaacucuuuguggacu

SEQ ID NO: 372962 - RNA, 19 nt, Artificial Sequence
  Description of Artificial Sequence: Synthetic oligonucleotide
  Antisense Strand to SEQ ID NO: 372961
aguccacaaagaguucacu

SEQ ID NO: 372963 - RNA, 19 nt, Artificial Sequence
  Description of Artificial Sequence: Synthetic oligonucleotide
  Sense Strand Starting at position 690 of SEQ ID NO: 318539
ugcuaugugcuaggaauaa

SEQ ID NO: 372964 - RNA, 19 nt, Artificial Sequence
  Description of Artificial Sequence: Synthetic oligonucleotide
  Antisense Strand to SEQ ID NO: 372963
uuauuccuagcacauagca

SEQ ID NO: 372965 - RNA, 19 nt, Artificial Sequence
  Description of Artificial Sequence: Synthetic oligonucleotide
  Sense Strand Starting at position 690 of SEQ ID NO: 318551
ggaauaauucugggugccu

SEQ ID NO: 372966 - RNA, 19 nt, Artificial Sequence
  Description of Artificial Sequence: Synthetic oligonucleotide
  Antisense Strand to SEQ ID NO: 372965
aggcacccagaauuauucc

SEQ ID NO: 372967 - RNA, 19 nt, Artificial Sequence
  Description of Artificial Sequence: Synthetic oligonucleotide
  Sense Strand Starting at position 690 of SEQ ID NO: 318552
gaauaauucugggugccuu

SEQ ID NO: 372968 - RNA, 19 nt, Artificial Sequence
  Description of Artificial Sequence: Synthetic oligonucleotide
  Antisense Strand to SEQ ID NO: 372967
aaggcacccagaauuauuc

SEQ ID NO: 372969 - RNA, 19 nt, Artificial Sequence
  Description of Artificial Sequence: Synthetic oligonucleotide
  Sense Strand Starting at position 690 of SEQ ID NO: 318573
ggagguuuagugugguagu

SEQ ID NO: 372970 - RNA, 19 nt, Artificial Sequence
  Description of Artificial Sequence: Synthetic oligonucleotide
  Antisense Strand to SEQ ID NO: 372969
acuaccacacuaaaccucc

SEQ ID NO: 372971 - RNA, 19 nt, Artificial Sequence
  Description of Artificial Sequence: Synthetic oligonucleotide
  Sense Strand Starting at position 690 of SEQ ID NO: 318596
gacggaaggaaguguaauu

SEQ ID NO: 372972 - RNA, 19 nt, Artificial Sequence
  Description of Artificial Sequence: Synthetic oligonucleotide
  Antisense Strand to SEQ ID NO: 372971
aauuacacuuccuuccguc

SEQ ID NO: 372973 - RNA, 19 nt, Artificial Sequence
  Description of Artificial Sequence: Synthetic oligonucleotide
  Sense Strand Starting at position 690 of SEQ ID NO: 318601
aaggaaguguaauugaacu

SEQ ID NO: 372974 - RNA, 19 nt, Artificial Sequence
  Description of Artificial Sequence: Synthetic oligonucleotide
  Antisense Strand to SEQ ID NO: 372973
aguucaauuacacuuccuu

SEQ ID NO: 372975 - RNA, 19 nt, Artificial Sequence
  Description of Artificial Sequence: Synthetic oligonucleotide
  Sense Strand Starting at position 690 of SEQ ID NO: 318607
guguaauugaacugacaag

SEQ ID NO: 372976 - RNA, 19 nt, Artificial Sequence
  Description of Artificial Sequence: Synthetic oligonucleotide
  Antisense Strand to SEQ ID NO: 372975
cuugucaguucaauuacac

SEQ ID NO: 372977 - RNA, 19 nt, Artificial Sequence
  Description of Artificial Sequence: Synthetic oligonucleotide
  Sense Strand Starting at position 690 of SEQ ID NO: 318810
gauggcucaugcguggaau

SEQ ID NO: 372978 - RNA, 19 nt, Artificial Sequence
  Description of Artificial Sequence: Synthetic oligonucleotide
  Antisense Strand to SEQ ID NO: 372977
auuccacgcaugagccauc

SEQ ID NO: 372979 - RNA, 19 nt, Artificial Sequence
  Description of Artificial Sequence: Synthetic oligonucleotide
  Sense Strand Starting at position 690 of SEQ ID NO: 319195
ucaacaguccagggacuaa

SEQ ID NO: 372980 - RNA, 19 nt, Artificial Sequence
  Description of Artificial Sequence: Synthetic oligonucleotide
  Antisense Strand to SEQ ID NO: 372979
uuagucccuggacuguuga

SEQ ID NO: 372981 - RNA, 19 nt, Artificial Sequence
  Description of Artificial Sequence: Synthetic oligonucleotide
  Sense Strand Starting at position 691 of SEQ ID NO: 315267
gcuuccagagucuaggaua

SEQ ID NO: 372982 - RNA, 19 nt, Artificial Sequence
  Description of Artificial Sequence: Synthetic oligonucleotide
  Antisense Strand to SEQ ID NO: 372981
uauccuagacucuggaagc

SEQ ID NO: 372983 - RNA, 19 nt, Artificial Sequence
  Description of Artificial Sequence: Synthetic oligonucleotide
  Sense Strand Starting at position 691 of SEQ ID NO: 315293
aggucaugaaacuggcaaa

SEQ ID NO: 372984 - RNA, 19 nt, Artificial Sequence
  Description of Artificial Sequence: Synthetic oligonucleotide
  Antisense Strand to SEQ ID NO: 372983
uuugccaguuucaugaccu

SEQ ID NO: 372985 - RNA, 19 nt, Artificial Sequence
  Description of Artificial Sequence: Synthetic oligonucleotide
  Sense Strand Starting at position 691 of SEQ ID NO: 315320
agcuauuagccauaucuag

SEQ ID NO: 372986 - RNA, 19 nt, Artificial Sequence
  Description of Artificial Sequence: Synthetic oligonucleotide
  Antisense Strand to SEQ ID NO: 372985
cuagauauggcuaauagcu

SEQ ID NO: 372987 - RNA, 19 nt, Artificial Sequence
  Description of Artificial Sequence: Synthetic oligonucleotide
  Sense Strand Starting at position 691 of SEQ ID NO: 315828
cccagaacuguaugccuua

SEQ ID NO: 372988 - RNA, 19 nt, Artificial Sequence
  Description of Artificial Sequence: Synthetic oligonucleotide
  Antisense Strand to SEQ ID NO: 372987
uaaggcauacaguucuggg

SEQ ID NO: 372989 - RNA, 19 nt, Artificial Sequence
  Description of Artificial Sequence: Synthetic oligonucleotide
  Sense Strand Starting at position 691 of SEQ ID NO: 315829
ccagaacuguaugccuuaa

SEQ ID NO: 372990 - RNA, 19 nt, Artificial Sequence
  Description of Artificial Sequence: Synthetic oligonucleotide
  Antisense Strand to SEQ ID NO: 372989
uuaaggcauacaguucugg

SEQ ID NO: 372991 - RNA, 19 nt, Artificial Sequence
  Description of Artificial Sequence: Synthetic oligonucleotide
  Sense Strand Starting at position 691 of SEQ ID NO: 316022
gcgacucgucaggagucua

SEQ ID NO: 372992 - RNA, 19 nt, Artificial Sequence
  Description of Artificial Sequence: Synthetic oligonucleotide
  Antisense Strand to SEQ ID NO: 372991
uagacuccugacgagucgc

SEQ ID NO: 372993 - RNA, 19 nt, Artificial Sequence
  Description of Artificial Sequence: Synthetic oligonucleotide
  Sense Strand Starting at position 691 of SEQ ID NO: 316456
acaguaugacgaugaaaca

SEQ ID NO: 372994 - RNA, 19 nt, Artificial Sequence
  Description of Artificial Sequence: Synthetic oligonucleotide
  Antisense Strand to SEQ ID NO: 372993
uguuucaucgucauacugu

SEQ ID NO: 372995 - RNA, 19 nt, Artificial Sequence
  Description of Artificial Sequence: Synthetic oligonucleotide
  Sense Strand Starting at position 691 of SEQ ID NO: 316470
aaacauguugcugagcaua

SEQ ID NO: 372996 - RNA, 19 nt, Artificial Sequence
  Description of Artificial Sequence: Synthetic oligonucleotide
  Antisense Strand to SEQ ID NO: 372995
uaugcucagcaacauguuu

SEQ ID NO: 372997 - RNA, 19 nt, Artificial Sequence
  Description of Artificial Sequence: Synthetic oligonucleotide
  Sense Strand Starting at position 691 of SEQ ID NO: 316962
ggacgaacggccugagagu

SEQ ID NO: 372998 - RNA, 19 nt, Artificial Sequence
  Description of Artificial Sequence: Synthetic oligonucleotide
  Antisense Strand to SEQ ID NO: 372997
acucucaggccguucgucc

SEQ ID NO: 372999 - RNA, 19 nt, Artificial Sequence
  Description of Artificial Sequence: Synthetic oligonucleotide
  Sense Strand Starting at position 691 of SEQ ID NO: 317532
cuugaaagcucuccuugag

SEQ ID NO: 373000 - RNA, 19 nt, Artificial Sequence
  Description of Artificial Sequence: Synthetic oligonucleotide
  Antisense Strand to SEQ ID NO: 372999
cucaaggagagcuuucaag

SEQ ID NO: 373001 - RNA, 19 nt, Artificial Sequence
  Description of Artificial Sequence: Synthetic oligonucleotide
  Sense Strand Starting at position 691 of SEQ ID NO: 317683
uguugaauucgccacucuu

SEQ ID NO: 373002 - RNA, 19 nt, Artificial Sequence
  Description of Artificial Sequence: Synthetic oligonucleotide
  Antisense Strand to SEQ ID NO: 373001
aagaguggcgaauucaaca

SEQ ID NO: 373003 - RNA, 19 nt, Artificial Sequence
  Description of Artificial Sequence: Synthetic oligonucleotide
  Sense Strand Starting at position 691 of SEQ ID NO: 317778
cgcugcuucccuuugguau

SEQ ID NO: 373004 - RNA, 19 nt, Artificial Sequence
  Description of Artificial Sequence: Synthetic oligonucleotide
  Antisense Strand to SEQ ID NO: 373003
auaccaaagggaagcagcg

SEQ ID NO: 373005 - RNA, 19 nt, Artificial Sequence
  Description of Artificial Sequence: Synthetic oligonucleotide
  Sense Strand Starting at position 691 of SEQ ID NO: 317781
ugcuucccuuugguauaua

SEQ ID NO: 373006 - RNA, 19 nt, Artificial Sequence
  Description of Artificial Sequence: Synthetic oligonucleotide
  Antisense Strand to SEQ ID NO: 373005
uauauaccaaagggaagca

SEQ ID NO: 373007 - RNA, 19 nt, Artificial Sequence
  Description of Artificial Sequence: Synthetic oligonucleotide
  Sense Strand Starting at position 691 of SEQ ID NO: 317824
cgaguugccauuugaucag

SEQ ID NO: 373008 - RNA, 19 nt, Artificial Sequence
  Description of Artificial Sequence: Synthetic oligonucleotide
  Antisense Strand to SEQ ID NO: 373007
cugaucaaauggcaacucg

SEQ ID NO: 373009 - RNA, 19 nt, Artificial Sequence
  Description of Artificial Sequence: Synthetic oligonucleotide
  Sense Strand Starting at position 691 of SEQ ID NO: 317903
cucccauccgagugacaga

SEQ ID NO: 373010 - RNA, 19 nt, Artificial Sequence
  Description of Artificial Sequence: Synthetic oligonucleotide
  Antisense Strand to SEQ ID NO: 373009
ucugucacucggaugggag

SEQ ID NO: 373011 - RNA, 19 nt, Artificial Sequence
  Description of Artificial Sequence: Synthetic oligonucleotide
  Sense Strand Starting at position 691 of SEQ ID NO: 317908
auccgagugacagauauuc

SEQ ID NO: 373012 - RNA, 19 nt, Artificial Sequence
  Description of Artificial Sequence: Synthetic oligonucleotide
  Antisense Strand to SEQ ID NO: 373011
gaauaucugucacucggau

SEQ ID NO: 373013 - RNA, 19 nt, Artificial Sequence
  Description of Artificial Sequence: Synthetic oligonucleotide
  Sense Strand Starting at position 691 of SEQ ID NO: 317913
agugacagauauucuccau

SEQ ID NO: 373014 - RNA, 19 nt, Artificial Sequence
  Description of Artificial Sequence: Synthetic oligonucleotide
  Antisense Strand to SEQ ID NO: 373013
auggagaauaucugucacu

SEQ ID NO: 373015 - RNA, 19 nt, Artificial Sequence
  Description of Artificial Sequence: Synthetic oligonucleotide
  Sense Strand Starting at position 691 of SEQ ID NO: 317954
acauauaagucucuguuaa

SEQ ID NO: 373016 - RNA, 19 nt, Artificial Sequence
  Description of Artificial Sequence: Synthetic oligonucleotide
  Antisense Strand to SEQ ID NO: 373015
uuaacagagacuuauaugu

SEQ ID NO: 373017 - RNA, 19 nt, Artificial Sequence
  Description of Artificial Sequence: Synthetic oligonucleotide
  Sense Strand Starting at position 691 of SEQ ID NO: 317956
auauaagucucuguuaagc

SEQ ID NO: 373018 - RNA, 19 nt, Artificial Sequence
  Description of Artificial Sequence: Synthetic oligonucleotide
  Antisense Strand to SEQ ID NO: 373017
gcuuaacagagacuuauau

SEQ ID NO: 373019 - RNA, 19 nt, Artificial Sequence
  Description of Artificial Sequence: Synthetic oligonucleotide
  Sense Strand Starting at position 691 of SEQ ID NO: 317979
cuuagacuaccuuacguau

SEQ ID NO: 373020 - RNA, 19 nt, Artificial Sequence
  Description of Artificial Sequence: Synthetic oligonucleotide
  Antisense Strand to SEQ ID NO: 373019
auacguaagguagucuaag

SEQ ID NO: 373021 - RNA, 19 nt, Artificial Sequence
  Description of Artificial Sequence: Synthetic oligonucleotide
  Sense Strand Starting at position 691 of SEQ ID NO: 318077
acaacuugucuagagccau

SEQ ID NO: 373022 - RNA, 19 nt, Artificial Sequence
  Description of Artificial Sequence: Synthetic oligonucleotide
  Antisense Strand to SEQ ID NO: 373021
auggcucuagacaaguugu

SEQ ID NO: 373023 - RNA, 19 nt, Artificial Sequence
  Description of Artificial Sequence: Synthetic oligonucleotide
  Sense Strand Starting at position 691 of SEQ ID NO: 318111
ggcugucuucugggacaga

SEQ ID NO: 373024 - RNA, 19 nt, Artificial Sequence
  Description of Artificial Sequence: Synthetic oligonucleotide
  Antisense Strand to SEQ ID NO: 373023
ucugucccagaagacagcc

SEQ ID NO: 373025 - RNA, 19 nt, Artificial Sequence
  Description of Artificial Sequence: Synthetic oligonucleotide
  Sense Strand Starting at position 691 of SEQ ID NO: 318114
ugucuucugggacagaucu

SEQ ID NO: 373026 - RNA, 19 nt, Artificial Sequence
  Description of Artificial Sequence: Synthetic oligonucleotide
  Antisense Strand to SEQ ID NO: 373025
agaucugucccagaagaca

SEQ ID NO: 373027 - RNA, 19 nt, Artificial Sequence
  Description of Artificial Sequence: Synthetic oligonucleotide
  Sense Strand Starting at position 691 of SEQ ID NO: 318417
ugugcaggcucaucagaga

SEQ ID NO: 373028 - RNA, 19 nt, Artificial Sequence
  Description of Artificial Sequence: Synthetic oligonucleotide
  Antisense Strand to SEQ ID NO: 373027
ucucugaugagccugcaca

SEQ ID NO: 373029 - RNA, 19 nt, Artificial Sequence
  Description of Artificial Sequence: Synthetic oligonucleotide
  Sense Strand Starting at position 691 of SEQ ID NO: 318434
gaaguagcucuuggaaaga

SEQ ID NO: 373030 - RNA, 19 nt, Artificial Sequence
  Description of Artificial Sequence: Synthetic oligonucleotide
  Antisense Strand to SEQ ID NO: 373029
ucuuuccaagagcuacuuc

SEQ ID NO: 373031 - RNA, 19 nt, Artificial Sequence
  Description of Artificial Sequence: Synthetic oligonucleotide
  Sense Strand Starting at position 691 of SEQ ID NO: 318447
gaaagaugaucuucuguca

SEQ ID NO: 373032 - RNA, 19 nt, Artificial Sequence
  Description of Artificial Sequence: Synthetic oligonucleotide
  Antisense Strand to SEQ ID NO: 373031
ugacagaagaucaucuuuc

SEQ ID NO: 373033 - RNA, 19 nt, Artificial Sequence
  Description of Artificial Sequence: Synthetic oligonucleotide
  Sense Strand Starting at position 691 of SEQ ID NO: 318450
agaugaucuucugucaaug

SEQ ID NO: 373034 - RNA, 19 nt, Artificial Sequence
  Description of Artificial Sequence: Synthetic oligonucleotide
  Antisense Strand to SEQ ID NO: 373033
cauugacagaagaucaucu

SEQ ID NO: 373035 - RNA, 19 nt, Artificial Sequence
  Description of Artificial Sequence: Synthetic oligonucleotide
  Sense Strand Starting at position 691 of SEQ ID NO: 318455
aucuucugucaaugaauga

SEQ ID NO: 373036 - RNA, 19 nt, Artificial Sequence
  Description of Artificial Sequence: Synthetic oligonucleotide
  Antisense Strand to SEQ ID NO: 373035
ucauucauugacagaagau

SEQ ID NO: 373037 - RNA, 19 nt, Artificial Sequence
  Description of Artificial Sequence: Synthetic oligonucleotide
  Sense Strand Starting at position 691 of SEQ ID NO: 318526
ugcagauguugaguggaga

SEQ ID NO: 373038 - RNA, 19 nt, Artificial Sequence
  Description of Artificial Sequence: Synthetic oligonucleotide
  Antisense Strand to SEQ ID NO: 373037
ucuccacucaacaucugca

SEQ ID NO: 373039 - RNA, 19 nt, Artificial Sequence
  Description of Artificial Sequence: Synthetic oligonucleotide
  Sense Strand Starting at position 691 of SEQ ID NO: 318527
gcagauguugaguggagau

SEQ ID NO: 373040 - RNA, 19 nt, Artificial Sequence
  Description of Artificial Sequence: Synthetic oligonucleotide
  Antisense Strand to SEQ ID NO: 373039
aucuccacucaacaucugc

SEQ ID NO: 373041 - RNA, 19 nt, Artificial Sequence
  Description of Artificial Sequence: Synthetic oligonucleotide
  Sense Strand Starting at position 691 of SEQ ID NO: 318588
gcuagcaguguucagugaa

SEQ ID NO: 373042 - RNA, 19 nt, Artificial Sequence
  Description of Artificial Sequence: Synthetic oligonucleotide
  Antisense Strand to SEQ ID NO: 373041
uucacugaacacugcuagc

SEQ ID NO: 373043 - RNA, 19 nt, Artificial Sequence
  Description of Artificial Sequence: Synthetic oligonucleotide
  Sense Strand Starting at position 691 of SEQ ID NO: 318642
agugaacacuucuugcaga

SEQ ID NO: 373044 - RNA, 19 nt, Artificial Sequence
  Description of Artificial Sequence: Synthetic oligonucleotide
  Antisense Strand to SEQ ID NO: 373043
ucugcaagaaguguucacu

SEQ ID NO: 373045 - RNA, 19 nt, Artificial Sequence
  Description of Artificial Sequence: Synthetic oligonucleotide
  Sense Strand Starting at position 691 of SEQ ID NO: 318647
acacuucuugcagaccaga

SEQ ID NO: 373046 - RNA, 19 nt, Artificial Sequence
  Description of Artificial Sequence: Synthetic oligonucleotide
  Antisense Strand to SEQ ID NO: 373045
ucuggucugcaagaagugu

SEQ ID NO: 373047 - RNA, 19 nt, Artificial Sequence
  Description of Artificial Sequence: Synthetic oligonucleotide
  Sense Strand Starting at position 691 of SEQ ID NO: 318776
gguuaagugaccugucuga

SEQ ID NO: 373048 - RNA, 19 nt, Artificial Sequence
  Description of Artificial Sequence: Synthetic oligonucleotide
  Antisense Strand to SEQ ID NO: 373047
ucagacaggucacuuaacc

SEQ ID NO: 373049 - RNA, 19 nt, Artificial Sequence
  Description of Artificial Sequence: Synthetic oligonucleotide
  Sense Strand Starting at position 691 of SEQ ID NO: 318851
cugggcucuuauccucaaa

SEQ ID NO: 373050 - RNA, 19 nt, Artificial Sequence
  Description of Artificial Sequence: Synthetic oligonucleotide
  Antisense Strand to SEQ ID NO: 373049
uuugaggauaagagcccag

SEQ ID NO: 373051 - RNA, 19 nt, Artificial Sequence
  Description of Artificial Sequence: Synthetic oligonucleotide
  Sense Strand Starting at position 691 of SEQ ID NO: 319121
cucagagccucuuugaaag

SEQ ID NO: 373052 - RNA, 19 nt, Artificial Sequence
  Description of Artificial Sequence: Synthetic oligonucleotide
  Antisense Strand to SEQ ID NO: 373051
cuuucaaagaggcucugag

SEQ ID NO: 373053 - RNA, 19 nt, Artificial Sequence
  Description of Artificial Sequence: Synthetic oligonucleotide
  Sense Strand Starting at position 691 of SEQ ID NO: 319131
cuuugaaagcccuaugauc

SEQ ID NO: 373054 - RNA, 19 nt, Artificial Sequence
  Description of Artificial Sequence: Synthetic oligonucleotide
  Antisense Strand to SEQ ID NO: 373053
gaucauagggcuuucaaag

SEQ ID NO: 373055 - RNA, 19 nt, Artificial Sequence
  Description of Artificial Sequence: Synthetic oligonucleotide
  Sense Strand Starting at position 691 of SEQ ID NO: 319133
uugaaagcccuaugaucug

SEQ ID NO: 373056 - RNA, 19 nt, Artificial Sequence
  Description of Artificial Sequence: Synthetic oligonucleotide
  Antisense Strand to SEQ ID NO: 373055
cagaucauagggcuuucaa

SEQ ID NO: 373057 - RNA, 19 nt, Artificial Sequence
  Description of Artificial Sequence: Synthetic oligonucleotide
  Sense Strand Starting at position 691 of SEQ ID NO: 319206
cuaguuugagccuggugaa

SEQ ID NO: 373058 - RNA, 19 nt, Artificial Sequence
  Description of Artificial Sequence: Synthetic oligonucleotide
  Antisense Strand to SEQ ID NO: 373057
uucaccaggcucaaacuag

SEQ ID NO: 373059 - RNA, 19 nt, Artificial Sequence
  Description of Artificial Sequence: Synthetic oligonucleotide
  Sense Strand Starting at position 691 of SEQ ID NO: 319207
uaguuugagccuggugaac

SEQ ID NO: 373060 - RNA, 19 nt, Artificial Sequence
  Description of Artificial Sequence: Synthetic oligonucleotide
  Antisense Strand to SEQ ID NO: 373059
guucaccaggcucaaacua

SEQ ID NO: 373061 - RNA, 19 nt, Artificial Sequence
  Description of Artificial Sequence: Synthetic oligonucleotide
  Sense Strand Starting at position 692 of SEQ ID NO: 315316
ggagauaauaugugguagu

SEQ ID NO: 373062 - RNA, 19 nt, Artificial Sequence
  Description of Artificial Sequence: Synthetic oligonucleotide
  Antisense Strand to SEQ ID NO: 373061
acuaccacauauuaucucc

SEQ ID NO: 373063 - RNA, 19 nt, Artificial Sequence
  Description of Artificial Sequence: Synthetic oligonucleotide
  Sense Strand Starting at position 692 of SEQ ID NO: 315323
auaugugguaguugugaca

SEQ ID NO: 373064 - RNA, 19 nt, Artificial Sequence
  Description of Artificial Sequence: Synthetic oligonucleotide
  Antisense Strand to SEQ ID NO: 373063
ugucacaacuaccacauau

SEQ ID NO: 373065 - RNA, 19 nt, Artificial Sequence
  Description of Artificial Sequence: Synthetic oligonucleotide
  Sense Strand Starting at position 692 of SEQ ID NO: 315342
augacaugaggcugcaaau

SEQ ID NO: 373066 - RNA, 19 nt, Artificial Sequence
  Description of Artificial Sequence: Synthetic oligonucleotide
  Antisense Strand to SEQ ID NO: 373065
auuugcagccucaugucau

SEQ ID NO: 373067 - RNA, 19 nt, Artificial Sequence
  Description of Artificial Sequence: Synthetic oligonucleotide
  Sense Strand Starting at position 692 of SEQ ID NO: 315363
cugagagugcuugacacau

SEQ ID NO: 373068 - RNA, 19 nt, Artificial Sequence
  Description of Artificial Sequence: Synthetic oligonucleotide
  Antisense Strand to SEQ ID NO: 373067
augugucaagcacucucag

SEQ ID NO: 373069 - RNA, 19 nt, Artificial Sequence
  Description of Artificial Sequence: Synthetic oligonucleotide
  Sense Strand Starting at position 692 of SEQ ID NO: 315380
auaguaaguguucaguuga

SEQ ID NO: 373070 - RNA, 19 nt, Artificial Sequence
  Description of Artificial Sequence: Synthetic oligonucleotide
  Antisense Strand to SEQ ID NO: 373069
ucaacugaacacuuacuau

SEQ ID NO: 373071 - RNA, 19 nt, Artificial Sequence
  Description of Artificial Sequence: Synthetic oligonucleotide
  Sense Strand Starting at position 692 of SEQ ID NO: 315604
gcccucaaaguggguuaua

SEQ ID NO: 373072 - RNA, 19 nt, Artificial Sequence
  Description of Artificial Sequence: Synthetic oligonucleotide
  Antisense Strand to SEQ ID NO: 373071
uauaacccacuuugagggc

SEQ ID NO: 373073 - RNA, 19 nt, Artificial Sequence
  Description of Artificial Sequence: Synthetic oligonucleotide
  Sense Strand Starting at position 692 of SEQ ID NO: 315605
cccucaaaguggguuauaa

SEQ ID NO: 373074 - RNA, 19 nt, Artificial Sequence
  Description of Artificial Sequence: Synthetic oligonucleotide
  Antisense Strand to SEQ ID NO: 373073
uuauaacccacuuugaggg

SEQ ID NO: 373075 - RNA, 19 nt, Artificial Sequence
  Description of Artificial Sequence: Synthetic oligonucleotide
  Sense Strand Starting at position 692 of SEQ ID NO: 315614
uggguuauaagguauccau

SEQ ID NO: 373076 - RNA, 19 nt, Artificial Sequence
  Description of Artificial Sequence: Synthetic oligonucleotide
  Antisense Strand to SEQ ID NO: 373075
auggauaccuuauaaccca

SEQ ID NO: 373077 - RNA, 19 nt, Artificial Sequence
  Description of Artificial Sequence: Synthetic oligonucleotide
  Sense Strand Starting at position 692 of SEQ ID NO: 315734
agaagugacugcccugaaa

SEQ ID NO: 373078 - RNA, 19 nt, Artificial Sequence
  Description of Artificial Sequence: Synthetic oligonucleotide
  Antisense Strand to SEQ ID NO: 373077
uuucagggcagucacuucu

SEQ ID NO: 373079 - RNA, 19 nt, Artificial Sequence
  Description of Artificial Sequence: Synthetic oligonucleotide
  Sense Strand Starting at position 692 of SEQ ID NO: 315736
aagugacugcccugaaauc

SEQ ID NO: 373080 - RNA, 19 nt, Artificial Sequence
  Description of Artificial Sequence: Synthetic oligonucleotide
  Antisense Strand to SEQ ID NO: 373079
gauuucagggcagucacuu

SEQ ID NO: 373081 - RNA, 19 nt, Artificial Sequence
  Description of Artificial Sequence: Synthetic oligonucleotide
  Sense Strand Starting at position 692 of SEQ ID NO: 315737
agugacugcccugaaaucu

SEQ ID NO: 373082 - RNA, 19 nt, Artificial Sequence
  Description of Artificial Sequence: Synthetic oligonucleotide
  Antisense Strand to SEQ ID NO: 373081
agauuucagggcagucacu

SEQ ID NO: 373083 - RNA, 19 nt, Artificial Sequence
  Description of Artificial Sequence: Synthetic oligonucleotide
  Sense Strand Starting at position 692 of SEQ ID NO: 315844
cugucuucccuggaugcua

SEQ ID NO: 373084 - RNA, 19 nt, Artificial Sequence
  Description of Artificial Sequence: Synthetic oligonucleotide
  Antisense Strand to SEQ ID NO: 373083
uagcauccagggaagacag

SEQ ID NO: 373085 - RNA, 19 nt, Artificial Sequence
  Description of Artificial Sequence: Synthetic oligonucleotide
  Sense Strand Starting at position 692 of SEQ ID NO: 316058
caagaugcuccauagugaa

SEQ ID NO: 373086 - RNA, 19 nt, Artificial Sequence
  Description of Artificial Sequence: Synthetic oligonucleotide
  Antisense Strand to SEQ ID NO: 373085
uucacuauggagcaucuug

SEQ ID NO: 373087 - RNA, 19 nt, Artificial Sequence
  Description of Artificial Sequence: Synthetic oligonucleotide
  Sense Strand Starting at position 692 of SEQ ID NO: 316119
gugggcuucugauucagag

SEQ ID NO: 373088 - RNA, 19 nt, Artificial Sequence
  Description of Artificial Sequence: Synthetic oligonucleotide
  Antisense Strand to SEQ ID NO: 373087
cucugaaucagaagcccac

SEQ ID NO: 373089 - RNA, 19 nt, Artificial Sequence
  Description of Artificial Sequence: Synthetic oligonucleotide
  Sense Strand Starting at position 692 of SEQ ID NO: 316240
gcaaguacucccuguagau

SEQ ID NO: 373090 - RNA, 19 nt, Artificial Sequence
  Description of Artificial Sequence: Synthetic oligonucleotide
  Antisense Strand to SEQ ID NO: 373089
aucuacagggaguacuugc

SEQ ID NO: 373091 - RNA, 19 nt, Artificial Sequence
  Description of Artificial Sequence: Synthetic oligonucleotide
  Sense Strand Starting at position 692 of SEQ ID NO: 316253
guagauaagagcgaguguu

SEQ ID NO: 373092 - RNA, 19 nt, Artificial Sequence
  Description of Artificial Sequence: Synthetic oligonucleotide
  Antisense Strand to SEQ ID NO: 373091
aacacucgcucuuaucuac

SEQ ID NO: 373093 - RNA, 19 nt, Artificial Sequence
  Description of Artificial Sequence: Synthetic oligonucleotide
  Sense Strand Starting at position 692 of SEQ ID NO: 316261
gagcgaguguuacuacucu

SEQ ID NO: 373094 - RNA, 19 nt, Artificial Sequence
  Description of Artificial Sequence: Synthetic oligonucleotide
  Antisense Strand to SEQ ID NO: 373093
agaguaguaacacucgcuc

SEQ ID NO: 373095 - RNA, 19 nt, Artificial Sequence
  Description of Artificial Sequence: Synthetic oligonucleotide
  Sense Strand Starting at position 692 of SEQ ID NO: 316320
agauuaucucccuauguuu

SEQ ID NO: 373096 - RNA, 19 nt, Artificial Sequence
  Description of Artificial Sequence: Synthetic oligonucleotide
  Antisense Strand to SEQ ID NO: 373095
aaacauagggagauaaucu

SEQ ID NO: 373097 - RNA, 19 nt, Artificial Sequence
  Description of Artificial Sequence: Synthetic oligonucleotide
  Sense Strand Starting at position 692 of SEQ ID NO: 316501
acuggauggucugccugau

SEQ ID NO: 373098 - RNA, 19 nt, Artificial Sequence
  Description of Artificial Sequence: Synthetic oligonucleotide
  Antisense Strand to SEQ ID NO: 373097
aucaggcagaccauccagu

SEQ ID NO: 373099 - RNA, 19 nt, Artificial Sequence
  Description of Artificial Sequence: Synthetic oligonucleotide
  Sense Strand Starting at position 692 of SEQ ID NO: 316505
gauggucugccugauucga

SEQ ID NO: 373100 - RNA, 19 nt, Artificial Sequence
  Description of Artificial Sequence: Synthetic oligonucleotide
  Antisense Strand to SEQ ID NO: 373099
ucgaaucaggcagaccauc

SEQ ID NO: 373101 - RNA, 19 nt, Artificial Sequence
  Description of Artificial Sequence: Synthetic oligonucleotide
  Sense Strand Starting at position 692 of SEQ ID NO: 316507
uggucugccugauucgaaa

SEQ ID NO: 373102 - RNA, 19 nt, Artificial Sequence
  Description of Artificial Sequence: Synthetic oligonucleotide
  Antisense Strand to SEQ ID NO: 373101
uuucgaaucaggcagacca

SEQ ID NO: 373103 - RNA, 19 nt, Artificial Sequence
  Description of Artificial Sequence: Synthetic oligonucleotide
  Sense Strand Starting at position 692 of SEQ ID NO: 316566
cguucuugucuggaucuuu

SEQ ID NO: 373104 - RNA, 19 nt, Artificial Sequence
  Description of Artificial Sequence: Synthetic oligonucleotide
  Antisense Strand to SEQ ID NO: 373103
aaagauccagacaagaacg

SEQ ID NO: 373105 - RNA, 19 nt, Artificial Sequence
  Description of Artificial Sequence: Synthetic oligonucleotide
  Sense Strand Starting at position 692 of SEQ ID NO: 316835
cgaguuccaccgcgagaua

SEQ ID NO: 373106 - RNA, 19 nt, Artificial Sequence
  Description of Artificial Sequence: Synthetic oligonucleotide
  Antisense Strand to SEQ ID NO: 373105
uaucucgcgguggaacucg

SEQ ID NO: 373107 - RNA, 19 nt, Artificial Sequence
  Description of Artificial Sequence: Synthetic oligonucleotide
  Sense Strand Starting at position 692 of SEQ ID NO: 316836
gaguuccaccgcgagauaa

SEQ ID NO: 373108 - RNA, 19 nt, Artificial Sequence
  Description of Artificial Sequence: Synthetic oligonucleotide
  Antisense Strand to SEQ ID NO: 373107
uuaucucgcgguggaacuc

SEQ ID NO: 373109 - RNA, 19 nt, Artificial Sequence
  Description of Artificial Sequence: Synthetic oligonucleotide
  Sense Strand Starting at position 692 of SEQ ID NO: 316838
guuccaccgcgagauaaga

SEQ ID NO: 373110 - RNA, 19 nt, Artificial Sequence
  Description of Artificial Sequence: Synthetic oligonucleotide
  Antisense Strand to SEQ ID NO: 373109
ucuuaucucgcgguggaac

SEQ ID NO: 373111 - RNA, 19 nt, Artificial Sequence
  Description of Artificial Sequence: Synthetic oligonucleotide
  Sense Strand Starting at position 692 of SEQ ID NO: 317654
cucaauucccacuguggau

SEQ ID NO: 373112 - RNA, 19 nt, Artificial Sequence
  Description of Artificial Sequence: Synthetic oligonucleotide
  Antisense Strand to SEQ ID NO: 373111
auccacagugggaauugag

SEQ ID NO: 373113 - RNA, 19 nt, Artificial Sequence
  Description of Artificial Sequence: Synthetic oligonucleotide
  Sense Strand Starting at position 692 of SEQ ID NO: 317661
cccacuguggauugggaaa

SEQ ID NO: 373114 - RNA, 19 nt, Artificial Sequence
  Description of Artificial Sequence: Synthetic oligonucleotide
  Antisense Strand to SEQ ID NO: 373113
uuucccaauccacaguggg

SEQ ID NO: 373115 - RNA, 19 nt, Artificial Sequence
  Description of Artificial Sequence: Synthetic oligonucleotide
  Sense Strand Starting at position 692 of SEQ ID NO: 317771
ccaagauguggccaacaau

SEQ ID NO: 373116 - RNA, 19 nt, Artificial Sequence
  Description of Artificial Sequence: Synthetic oligonucleotide
  Antisense Strand to SEQ ID NO: 373115
auuguuggccacaucuugg

SEQ ID NO: 373117 - RNA, 19 nt, Artificial Sequence
  Description of Artificial Sequence: Synthetic oligonucleotide
  Sense Strand Starting at position 692 of SEQ ID NO: 318064
cugggaucccaaugugaga

SEQ ID NO: 373118 - RNA, 19 nt, Artificial Sequence
  Description of Artificial Sequence: Synthetic oligonucleotide
  Antisense Strand to SEQ ID NO: 373117
ucucacauugggaucccag

SEQ ID NO: 373119 - RNA, 19 nt, Artificial Sequence
  Description of Artificial Sequence: Synthetic oligonucleotide
  Sense Strand Starting at position 692 of SEQ ID NO: 318152
gcugauaagacagagucuu

SEQ ID NO: 373120 - RNA, 19 nt, Artificial Sequence
  Description of Artificial Sequence: Synthetic oligonucleotide
  Antisense Strand to SEQ ID NO: 373119
aagacucugucuuaucagc

SEQ ID NO: 373121 - RNA, 19 nt, Artificial Sequence
  Description of Artificial Sequence: Synthetic oligonucleotide
  Sense Strand Starting at position 692 of SEQ ID NO: 318164
gagucuugaccugagcuga

SEQ ID NO: 373122 - RNA, 19 nt, Artificial Sequence
  Description of Artificial Sequence: Synthetic oligonucleotide
  Antisense Strand to SEQ ID NO: 373121
ucagcucaggucaagacuc

SEQ ID NO: 373123 - RNA, 19 nt, Artificial Sequence
  Description of Artificial Sequence: Synthetic oligonucleotide
  Sense Strand Starting at position 692 of SEQ ID NO: 318181
gagcauuccuggccaucca

SEQ ID NO: 373124 - RNA, 19 nt, Artificial Sequence
  Description of Artificial Sequence: Synthetic oligonucleotide
  Antisense Strand to SEQ ID NO: 373123
uggauggccaggaaugcuc

SEQ ID NO: 373125 - RNA, 19 nt, Artificial Sequence
  Description of Artificial Sequence: Synthetic oligonucleotide
  Sense Strand Starting at position 692 of SEQ ID NO: 318298
gguauaaauggguguucug

SEQ ID NO: 373126 - RNA, 19 nt, Artificial Sequence
  Description of Artificial Sequence: Synthetic oligonucleotide
  Antisense Strand to SEQ ID NO: 373125
cagaacacccauuuauacc

SEQ ID NO: 373127 - RNA, 19 nt, Artificial Sequence
  Description of Artificial Sequence: Synthetic oligonucleotide
  Sense Strand Starting at position 692 of SEQ ID NO: 318740
ggagcuuguggugaucaac

SEQ ID NO: 373128 - RNA, 19 nt, Artificial Sequence
  Description of Artificial Sequence: Synthetic oligonucleotide
  Antisense Strand to SEQ ID NO: 373127
guugaucaccacaagcucc

SEQ ID NO: 373129 - RNA, 19 nt, Artificial Sequence
  Description of Artificial Sequence: Synthetic oligonucleotide
  Sense Strand Starting at position 692 of SEQ ID NO: 318743
gcuuguggugaucaacaca

SEQ ID NO: 373130 - RNA, 19 nt, Artificial Sequence
  Description of Artificial Sequence: Synthetic oligonucleotide
  Antisense Strand to SEQ ID NO: 373129
uguguugaucaccacaagc

SEQ ID NO: 373131 - RNA, 19 nt, Artificial Sequence
  Description of Artificial Sequence: Synthetic oligonucleotide
  Sense Strand Starting at position 692 of SEQ ID NO: 318923
gcaagcaggucaucucaaa

SEQ ID NO: 373132 - RNA, 19 nt, Artificial Sequence
  Description of Artificial Sequence: Synthetic oligonucleotide
  Antisense Strand to SEQ ID NO: 373131
uuugagaugaccugcuugc

SEQ ID NO: 373133 - RNA, 19 nt, Artificial Sequence
  Description of Artificial Sequence: Synthetic oligonucleotide
  Sense Strand Starting at position 692 of SEQ ID NO: 319045
gcccuuucucacugugagu

SEQ ID NO: 373134 - RNA, 19 nt, Artificial Sequence
  Description of Artificial Sequence: Synthetic oligonucleotide
  Antisense Strand to SEQ ID NO: 373133
acucacagugagaaagggc

SEQ ID NO: 373135 - RNA, 19 nt, Artificial Sequence
  Description of Artificial Sequence: Synthetic oligonucleotide
  Sense Strand Starting at position 692 of SEQ ID NO: 319052
cucacugugaguggucaua

SEQ ID NO: 373136 - RNA, 19 nt, Artificial Sequence
  Description of Artificial Sequence: Synthetic oligonucleotide
  Antisense Strand to SEQ ID NO: 373135
uaugaccacucacagugag

SEQ ID NO: 373137 - RNA, 19 nt, Artificial Sequence
  Description of Artificial Sequence: Synthetic oligonucleotide
  Sense Strand Starting at position 692 of SEQ ID NO: 319063
uggucauagggccaugauu

SEQ ID NO: 373138 - RNA, 19 nt, Artificial Sequence
  Description of Artificial Sequence: Synthetic oligonucleotide
  Antisense Strand to SEQ ID NO: 373137
aaucauggcccuaugacca

SEQ ID NO: 373139 - RNA, 19 nt, Artificial Sequence
  Description of Artificial Sequence: Synthetic oligonucleotide
  Sense Strand Starting at position 692 of SEQ ID NO: 319090
ccuagagggucaccuauaa

SEQ ID NO: 373140 - RNA, 19 nt, Artificial Sequence
  Description of Artificial Sequence: Synthetic oligonucleotide
  Antisense Strand to SEQ ID NO: 373139
uuauaggugacccucuagg

SEQ ID NO: 373141 - RNA, 19 nt, Artificial Sequence
  Description of Artificial Sequence: Synthetic oligonucleotide
  Sense Strand Starting at position 693 of SEQ ID NO: 315441
ggaugcucacucuggaaua

SEQ ID NO: 373142 - RNA, 19 nt, Artificial Sequence
  Description of Artificial Sequence: Synthetic oligonucleotide
  Antisense Strand to SEQ ID NO: 373141
uauuccagagugagcaucc

SEQ ID NO: 373143 - RNA, 19 nt, Artificial Sequence
  Description of Artificial Sequence: Synthetic oligonucleotide
  Sense Strand Starting at position 693 of SEQ ID NO: 315454
ggaauaugguggucaggag

SEQ ID NO: 373144 - RNA, 19 nt, Artificial Sequence
  Description of Artificial Sequence: Synthetic oligonucleotide
  Antisense Strand to SEQ ID NO: 373143
cuccugaccaccauauucc

SEQ ID NO: 373145 - RNA, 19 nt, Artificial Sequence
  Description of Artificial Sequence: Synthetic oligonucleotide
  Sense Strand Starting at position 693 of SEQ ID NO: 315479
agagauauuugugccagcu

SEQ ID NO: 373146 - RNA, 19 nt, Artificial Sequence
  Description of Artificial Sequence: Synthetic oligonucleotide
  Antisense Strand to SEQ ID NO: 373145
agcuggcacaaauaucucu

SEQ ID NO: 373147 - RNA, 19 nt, Artificial Sequence
  Description of Artificial Sequence: Synthetic oligonucleotide
  Sense Strand Starting at position 693 of SEQ ID NO: 315505
ucaggucuucuagguggaa

SEQ ID NO: 373148 - RNA, 19 nt, Artificial Sequence
  Description of Artificial Sequence: Synthetic oligonucleotide
  Antisense Strand to SEQ ID NO: 373147
uuccaccuagaagaccuga

SEQ ID NO: 373149 - RNA, 19 nt, Artificial Sequence
  Description of Artificial Sequence: Synthetic oligonucleotide
  Sense Strand Starting at position 693 of SEQ ID NO: 315506
caggucuucuagguggaaa

SEQ ID NO: 373150 - RNA, 19 nt, Artificial Sequence
  Description of Artificial Sequence: Synthetic oligonucleotide
  Antisense Strand to SEQ ID NO: 373149
uuuccaccuagaagaccug

SEQ ID NO: 373151 - RNA, 19 nt, Artificial Sequence
  Description of Artificial Sequence: Synthetic oligonucleotide
  Sense Strand Starting at position 693 of SEQ ID NO: 315793
ugguuaucucucugaacca

SEQ ID NO: 373152 - RNA, 19 nt, Artificial Sequence
  Description of Artificial Sequence: Synthetic oligonucleotide
  Antisense Strand to SEQ ID NO: 373151
ugguucagagagauaacca

SEQ ID NO: 373153 - RNA, 19 nt, Artificial Sequence
  Description of Artificial Sequence: Synthetic oligonucleotide
  Sense Strand Starting at position 693 of SEQ ID NO: 315831
gaguuaacauagucugaag

SEQ ID NO: 373154 - RNA, 19 nt, Artificial Sequence
  Description of Artificial Sequence: Synthetic oligonucleotide
  Antisense Strand to SEQ ID NO: 373153
cuucagacuauguuaacuc

SEQ ID NO: 373155 - RNA, 19 nt, Artificial Sequence
  Description of Artificial Sequence: Synthetic oligonucleotide
  Sense Strand Starting at position 693 of SEQ ID NO: 315881
cuagguuacuuugcagaag

SEQ ID NO: 373156 - RNA, 19 nt, Artificial Sequence
  Description of Artificial Sequence: Synthetic oligonucleotide
  Antisense Strand to SEQ ID NO: 373155
cuucugcaaaguaaccuag

SEQ ID NO: 373157 - RNA, 19 nt, Artificial Sequence
  Description of Artificial Sequence: Synthetic oligonucleotide
  Sense Strand Starting at position 693 of SEQ ID NO: 316011
guguaacagcauuaacacu

SEQ ID NO: 373158 - RNA, 19 nt, Artificial Sequence
  Description of Artificial Sequence: Synthetic oligonucleotide
  Antisense Strand to SEQ ID NO: 373157
aguguuaaugcuguuacac

SEQ ID NO: 373159 - RNA, 19 nt, Artificial Sequence
  Description of Artificial Sequence: Synthetic oligonucleotide
  Sense Strand Starting at position 693 of SEQ ID NO: 316085
guaugaaaggucugguaag

SEQ ID NO: 373160 - RNA, 19 nt, Artificial Sequence
  Description of Artificial Sequence: Synthetic oligonucleotide
  Antisense Strand to SEQ ID NO: 373159
cuuaccagaccuuucauac

SEQ ID NO: 373161 - RNA, 19 nt, Artificial Sequence
  Description of Artificial Sequence: Synthetic oligonucleotide
  Sense Strand Starting at position 693 of SEQ ID NO: 316102
aggagugucaaguauaaug

SEQ ID NO: 373162 - RNA, 19 nt, Artificial Sequence
  Description of Artificial Sequence: Synthetic oligonucleotide
  Antisense Strand to SEQ ID NO: 373161
cauuauacuugacacuccu

SEQ ID NO: 373163 - RNA, 19 nt, Artificial Sequence
  Description of Artificial Sequence: Synthetic oligonucleotide
  Sense Strand Starting at position 693 of SEQ ID NO: 316159
auuugaaguucuugauuuc

SEQ ID NO: 373164 - RNA, 19 nt, Artificial Sequence
  Description of Artificial Sequence: Synthetic oligonucleotide
  Antisense Strand to SEQ ID NO: 373163
gaaaucaagaacuucaaau

SEQ ID NO: 373165 - RNA, 19 nt, Artificial Sequence
  Description of Artificial Sequence: Synthetic oligonucleotide
  Sense Strand Starting at position 693 of SEQ ID NO: 316210
augauaucucuuuaagagc

SEQ ID NO: 373166 - RNA, 19 nt, Artificial Sequence
  Description of Artificial Sequence: Synthetic oligonucleotide
  Antisense Strand to SEQ ID NO: 373165
gcucuuaaagagauaucau

SEQ ID NO: 373167 - RNA, 19 nt, Artificial Sequence
  Description of Artificial Sequence: Synthetic oligonucleotide
  Sense Strand Starting at position 693 of SEQ ID NO: 316470
gagagaaagcaaugcucuu

SEQ ID NO: 373168 - RNA, 19 nt, Artificial Sequence
  Description of Artificial Sequence: Synthetic oligonucleotide
  Antisense Strand to SEQ ID NO: 373167
aagagcauugcuuucucuc

SEQ ID NO: 373169 - RNA, 19 nt, Artificial Sequence
  Description of Artificial Sequence: Synthetic oligonucleotide
  Sense Strand Starting at position 693 of SEQ ID NO: 316483
gcucuuuccagaggaggaa

SEQ ID NO: 373170 - RNA, 19 nt, Artificial Sequence
  Description of Artificial Sequence: Synthetic oligonucleotide
  Antisense Strand to SEQ ID NO: 373169
uuccuccucuggaaagagc

SEQ ID NO: 373171 - RNA, 19 nt, Artificial Sequence
  Description of Artificial Sequence: Synthetic oligonucleotide
  Sense Strand Starting at position 693 of SEQ ID NO: 316575
gugggagaaaucugagcuu

SEQ ID NO: 373172 - RNA, 19 nt, Artificial Sequence
  Description of Artificial Sequence: Synthetic oligonucleotide
  Antisense Strand to SEQ ID NO: 373171
aagcucagauuucucccac

SEQ ID NO: 373173 - RNA, 19 nt, Artificial Sequence
  Description of Artificial Sequence: Synthetic oligonucleotide
  Sense Strand Starting at position 693 of SEQ ID NO: 316608
gcaggauuugcacgaaguc

SEQ ID NO: 373174 - RNA, 19 nt, Artificial Sequence
  Description of Artificial Sequence: Synthetic oligonucleotide
  Antisense Strand to SEQ ID NO: 373173
gacuucgugcaaauccugc

SEQ ID NO: 373175 - RNA, 19 nt, Artificial Sequence
  Description of Artificial Sequence: Synthetic oligonucleotide
  Sense Strand Starting at position 693 of SEQ ID NO: 316691
uucucagagcccuaagaau

SEQ ID NO: 373176 - RNA, 19 nt, Artificial Sequence
  Description of Artificial Sequence: Synthetic oligonucleotide
  Antisense Strand to SEQ ID NO: 373175
auucuuagggcucugagaa

SEQ ID NO: 373177 - RNA, 19 nt, Artificial Sequence
  Description of Artificial Sequence: Synthetic oligonucleotide
  Sense Strand Starting at position 693 of SEQ ID NO: 316926
guccgugaugccuuaucuu

SEQ ID NO: 373178 - RNA, 19 nt, Artificial Sequence
  Description of Artificial Sequence: Synthetic oligonucleotide
  Antisense Strand to SEQ ID NO: 373177
aagauaaggcaucacggac

SEQ ID NO: 373179 - RNA, 19 nt, Artificial Sequence
  Description of Artificial Sequence: Synthetic oligonucleotide
  Sense Strand Starting at position 693 of SEQ ID NO: 317320
uuugccagaugacuauaau

SEQ ID NO: 373180 - RNA, 19 nt, Artificial Sequence
  Description of Artificial Sequence: Synthetic oligonucleotide
  Antisense Strand to SEQ ID NO: 373179
auuauagucaucuggcaaa

SEQ ID NO: 373181 - RNA, 19 nt, Artificial Sequence
  Description of Artificial Sequence: Synthetic oligonucleotide
  Sense Strand Starting at position 693 of SEQ ID NO: 317321
uugccagaugacuauaauu

SEQ ID NO: 373182 - RNA, 19 nt, Artificial Sequence
  Description of Artificial Sequence: Synthetic oligonucleotide
  Antisense Strand to SEQ ID NO: 373181
aauuauagucaucuggcaa

SEQ ID NO: 373183 - RNA, 19 nt, Artificial Sequence
  Description of Artificial Sequence: Synthetic oligonucleotide
  Sense Strand Starting at position 693 of SEQ ID NO: 317730
aagaccugggccuguauau

SEQ ID NO: 373184 - RNA, 19 nt, Artificial Sequence
  Description of Artificial Sequence: Synthetic oligonucleotide
  Antisense Strand to SEQ ID NO: 373183
auauacaggcccaggucuu

SEQ ID NO: 373185 - RNA, 19 nt, Artificial Sequence
  Description of Artificial Sequence: Synthetic oligonucleotide
  Sense Strand Starting at position 693 of SEQ ID NO: 317761
auggcuuccggagaaauca

SEQ ID NO: 373186 - RNA, 19 nt, Artificial Sequence
  Description of Artificial Sequence: Synthetic oligonucleotide
  Antisense Strand to SEQ ID NO: 373185
ugauuucuccggaagccau

SEQ ID NO: 373187 - RNA, 19 nt, Artificial Sequence
  Description of Artificial Sequence: Synthetic oligonucleotide
  Sense Strand Starting at position 693 of SEQ ID NO: 317786
gaucuaagaugagcugaau

SEQ ID NO: 373188 - RNA, 19 nt, Artificial Sequence
  Description of Artificial Sequence: Synthetic oligonucleotide
  Antisense Strand to SEQ ID NO: 373187
auucagcucaucuuagauc

SEQ ID NO: 373189 - RNA, 19 nt, Artificial Sequence
  Description of Artificial Sequence: Synthetic oligonucleotide
  Sense Strand Starting at position 693 of SEQ ID NO: 317899
uucuguguuagacacagua

SEQ ID NO: 373190 - RNA, 19 nt, Artificial Sequence
  Description of Artificial Sequence: Synthetic oligonucleotide
  Antisense Strand to SEQ ID NO: 373189
uacugugucuaacacagaa

SEQ ID NO: 373191 - RNA, 19 nt, Artificial Sequence
  Description of Artificial Sequence: Synthetic oligonucleotide
  Sense Strand Starting at position 693 of SEQ ID NO: 317901
cuguguuagacacaguacu

SEQ ID NO: 373192 - RNA, 19 nt, Artificial Sequence
  Description of Artificial Sequence: Synthetic oligonucleotide
  Antisense Strand to SEQ ID NO: 373191
aguacugugucuaacacag

SEQ ID NO: 373193 - RNA, 19 nt, Artificial Sequence
  Description of Artificial Sequence: Synthetic oligonucleotide
  Sense Strand Starting at position 693 of SEQ ID NO: 317914
aguacuagucauuaacauc

SEQ ID NO: 373194 - RNA, 19 nt, Artificial Sequence
  Description of Artificial Sequence: Synthetic oligonucleotide
  Antisense Strand to SEQ ID NO: 373193
gauguuaaugacuaguacu

SEQ ID NO: 373195 - RNA, 19 nt, Artificial Sequence
  Description of Artificial Sequence: Synthetic oligonucleotide
  Sense Strand Starting at position 693 of SEQ ID NO: 318088
gagugcuacgugucaggca

SEQ ID NO: 373196 - RNA, 19 nt, Artificial Sequence
  Description of Artificial Sequence: Synthetic oligonucleotide
  Antisense Strand to SEQ ID NO: 373195
ugccugacacguagcacuc

SEQ ID NO: 373197 - RNA, 19 nt, Artificial Sequence
  Description of Artificial Sequence: Synthetic oligonucleotide
  Sense Strand Starting at position 693 of SEQ ID NO: 318393
agaguuuagcuguaaucuu

SEQ ID NO: 373198 - RNA, 19 nt, Artificial Sequence
  Description of Artificial Sequence: Synthetic oligonucleotide
  Antisense Strand to SEQ ID NO: 373197
aagauuacagcuaaacucu

SEQ ID NO: 373199 - RNA, 19 nt, Artificial Sequence
  Description of Artificial Sequence: Synthetic oligonucleotide
  Sense Strand Starting at position 693 of SEQ ID NO: 318433
guguacuuugggcacaaua

SEQ ID NO: 373200 - RNA, 19 nt, Artificial Sequence
  Description of Artificial Sequence: Synthetic oligonucleotide
  Antisense Strand to SEQ ID NO: 373199
uauugugcccaaaguacac

SEQ ID NO: 373201 - RNA, 19 nt, Artificial Sequence
  Description of Artificial Sequence: Synthetic oligonucleotide
  Sense Strand Starting at position 693 of SEQ ID NO: 318435
guacuuugggcacaauacu

SEQ ID NO: 373202 - RNA, 19 nt, Artificial Sequence
  Description of Artificial Sequence: Synthetic oligonucleotide
  Antisense Strand to SEQ ID NO: 373201
aguauugugcccaaaguac

SEQ ID NO: 373203 - RNA, 19 nt, Artificial Sequence
  Description of Artificial Sequence: Synthetic oligonucleotide
  Sense Strand Starting at position 693 of SEQ ID NO: 318737
agaggcugugguugauaaa

SEQ ID NO: 373204 - RNA, 19 nt, Artificial Sequence
  Description of Artificial Sequence: Synthetic oligonucleotide
  Antisense Strand to SEQ ID NO: 373203
uuuaucaaccacagccucu

SEQ ID NO: 373205 - RNA, 19 nt, Artificial Sequence
  Description of Artificial Sequence: Synthetic oligonucleotide
  Sense Strand Starting at position 693 of SEQ ID NO: 318738
gaggcugugguugauaaag

SEQ ID NO: 373206 - RNA, 19 nt, Artificial Sequence
  Description of Artificial Sequence: Synthetic oligonucleotide
  Antisense Strand to SEQ ID NO: 373205
cuuuaucaaccacagccuc

SEQ ID NO: 373207 - RNA, 19 nt, Artificial Sequence
  Description of Artificial Sequence: Synthetic oligonucleotide
  Sense Strand Starting at position 693 of SEQ ID NO: 318759
gguacaaguauaugagaug

SEQ ID NO: 373208 - RNA, 19 nt, Artificial Sequence
  Description of Artificial Sequence: Synthetic oligonucleotide
  Antisense Strand to SEQ ID NO: 373207
caucucauauacuuguacc

SEQ ID NO: 373209 - RNA, 19 nt, Artificial Sequence
  Description of Artificial Sequence: Synthetic oligonucleotide
  Sense Strand Starting at position 693 of SEQ ID NO: 318778
ggaggauauguuugaacuc

SEQ ID NO: 373210 - RNA, 19 nt, Artificial Sequence
  Description of Artificial Sequence: Synthetic oligonucleotide
  Antisense Strand to SEQ ID NO: 373209
gaguucaaacauauccucc

SEQ ID NO: 373211 - RNA, 19 nt, Artificial Sequence
  Description of Artificial Sequence: Synthetic oligonucleotide
  Sense Strand Starting at position 693 of SEQ ID NO: 318996
ggagaaagagcuuggcaaa

SEQ ID NO: 373212 - RNA, 19 nt, Artificial Sequence
  Description of Artificial Sequence: Synthetic oligonucleotide
  Antisense Strand to SEQ ID NO: 373211
uuugccaagcucuuucucc

SEQ ID NO: 373213 - RNA, 19 nt, Artificial Sequence
  Description of Artificial Sequence: Synthetic oligonucleotide
  Sense Strand Starting at position 693 of SEQ ID NO: 319121
gcagucauuuguucugggu

SEQ ID NO: 373214 - RNA, 19 nt, Artificial Sequence
  Description of Artificial Sequence: Synthetic oligonucleotide
  Antisense Strand to SEQ ID NO: 373213
acccagaacaaaugacugc

SEQ ID NO: 373215 - RNA, 19 nt, Artificial Sequence
  Description of Artificial Sequence: Synthetic oligonucleotide
  Sense Strand Starting at position 693 of SEQ ID NO: 319169
aucagcuucuccuuggaaa

SEQ ID NO: 373216 - RNA, 19 nt, Artificial Sequence
  Description of Artificial Sequence: Synthetic oligonucleotide
  Antisense Strand to SEQ ID NO: 373215
uuuccaaggagaagcugau

SEQ ID NO: 373217 - RNA, 19 nt, Artificial Sequence
  Description of Artificial Sequence: Synthetic oligonucleotide
  Sense Strand Starting at position 693 of SEQ ID NO: 319170
ucagcuucuccuuggaaag

SEQ ID NO: 373218 - RNA, 19 nt, Artificial Sequence
  Description of Artificial Sequence: Synthetic oligonucleotide
  Antisense Strand to SEQ ID NO: 373217
cuuuccaaggagaagcuga

SEQ ID NO: 373219 - RNA, 19 nt, Artificial Sequence
  Description of Artificial Sequence: Synthetic oligonucleotide
  Sense Strand Starting at position 693 of SEQ ID NO: 319202
uuaggccuccuggaauaau

SEQ ID NO: 373220 - RNA, 19 nt, Artificial Sequence
  Description of Artificial Sequence: Synthetic oligonucleotide
  Antisense Strand to SEQ ID NO: 373219
auuauuccaggaggccuaa

SEQ ID NO: 373221 - RNA, 19 nt, Artificial Sequence
  Description of Artificial Sequence: Synthetic oligonucleotide
  Sense Strand Starting at position 694 of SEQ ID NO: 315620
gaguaccaguucuucggaa

SEQ ID NO: 373222 - RNA, 19 nt, Artificial Sequence
  Description of Artificial Sequence: Synthetic oligonucleotide
  Antisense Strand to SEQ ID NO: 373221
uuccgaagaacugguacuc

SEQ ID NO: 373223 - RNA, 19 nt, Artificial Sequence
  Description of Artificial Sequence: Synthetic oligonucleotide
  Sense Strand Starting at position 694 of SEQ ID NO: 315621
aguaccaguucuucggaau

SEQ ID NO: 373224 - RNA, 19 nt, Artificial Sequence
  Description of Artificial Sequence: Synthetic oligonucleotide
  Antisense Strand to SEQ ID NO: 373223
auuccgaagaacugguacu

SEQ ID NO: 373225 - RNA, 19 nt, Artificial Sequence
  Description of Artificial Sequence: Synthetic oligonucleotide
  Sense Strand Starting at position 694 of SEQ ID NO: 315892
acgucuccgcgguuggaaa

SEQ ID NO: 373226 - RNA, 19 nt, Artificial Sequence
  Description of Artificial Sequence: Synthetic oligonucleotide
  Antisense Strand to SEQ ID NO: 373225
uuuccaaccgcggagacgu

SEQ ID NO: 373227 - RNA, 19 nt, Artificial Sequence
  Description of Artificial Sequence: Synthetic oligonucleotide
  Sense Strand Starting at position 694 of SEQ ID NO: 316000
acggaagagcugggaauua

SEQ ID NO: 373228 - RNA, 19 nt, Artificial Sequence
  Description of Artificial Sequence: Synthetic oligonucleotide
  Antisense Strand to SEQ ID NO: 373227
uaauucccagcucuuccgu

SEQ ID NO: 373229 - RNA, 19 nt, Artificial Sequence
  Description of Artificial Sequence: Synthetic oligonucleotide
  Sense Strand Starting at position 694 of SEQ ID NO: 316032
cagcgagagcccugaagaa

SEQ ID NO: 373230 - RNA, 19 nt, Artificial Sequence
  Description of Artificial Sequence: Synthetic oligonucleotide
  Antisense Strand to SEQ ID NO: 373229
uucuucagggcucucgcug

SEQ ID NO: 373231 - RNA, 19 nt, Artificial Sequence
  Description of Artificial Sequence: Synthetic oligonucleotide
  Sense Strand Starting at position 694 of SEQ ID NO: 316439
ccagguggcggagaaauua

SEQ ID NO: 373232 - RNA, 19 nt, Artificial Sequence
  Description of Artificial Sequence: Synthetic oligonucleotide
  Antisense Strand to SEQ ID NO: 373231
uaauuucuccgccaccugg

SEQ ID NO: 373233 - RNA, 19 nt, Artificial Sequence
  Description of Artificial Sequence: Synthetic oligonucleotide
  Sense Strand Starting at position 694 of SEQ ID NO: 316559
gcggaacagagauggcuua

SEQ ID NO: 373234 - RNA, 19 nt, Artificial Sequence
  Description of Artificial Sequence: Synthetic oligonucleotide
  Antisense Strand to SEQ ID NO: 373233
uaagccaucucuguuccgc

SEQ ID NO: 373235 - RNA, 19 nt, Artificial Sequence
  Description of Artificial Sequence: Synthetic oligonucleotide
  Sense Strand Starting at position 694 of SEQ ID NO: 316716
agaugaaauccuuggcugu

SEQ ID NO: 373236 - RNA, 19 nt, Artificial Sequence
  Description of Artificial Sequence: Synthetic oligonucleotide
  Antisense Strand to SEQ ID NO: 373235
acagccaaggauuucaucu

SEQ ID NO: 373237 - RNA, 19 nt, Artificial Sequence
  Description of Artificial Sequence: Synthetic oligonucleotide
  Sense Strand Starting at position 694 of SEQ ID NO: 316717
gaugaaauccuuggcugug

SEQ ID NO: 373238 - RNA, 19 nt, Artificial Sequence
  Description of Artificial Sequence: Synthetic oligonucleotide
  Antisense Strand to SEQ ID NO: 373237
cacagccaaggauuucauc

SEQ ID NO: 373239 - RNA, 19 nt, Artificial Sequence
  Description of Artificial Sequence: Synthetic oligonucleotide
  Sense Strand Starting at position 694 of SEQ ID NO: 316770
gcuggucgugcuucguaaa

SEQ ID NO: 373240 - RNA, 19 nt, Artificial Sequence
  Description of Artificial Sequence: Synthetic oligonucleotide
  Antisense Strand to SEQ ID NO: 373239
uuuacgaagcacgaccagc

SEQ ID NO: 373241 - RNA, 19 nt, Artificial Sequence
  Description of Artificial Sequence: Synthetic oligonucleotide
  Sense Strand Starting at position 694 of SEQ ID NO: 316782
ucguaaauucuuggaugag

SEQ ID NO: 373242 - RNA, 19 nt, Artificial Sequence
  Description of Artificial Sequence: Synthetic oligonucleotide
  Antisense Strand to SEQ ID NO: 373241
cucauccaagaauuuacga

SEQ ID NO: 373243 - RNA, 19 nt, Artificial Sequence
  Description of Artificial Sequence: Synthetic oligonucleotide
  Sense Strand Starting at position 694 of SEQ ID NO: 316785
uaaauucuuggaugaguuu

SEQ ID NO: 373244 - RNA, 19 nt, Artificial Sequence
  Description of Artificial Sequence: Synthetic oligonucleotide
  Antisense Strand to SEQ ID NO: 373243
aaacucauccaagaauuua

SEQ ID NO: 373245 - RNA, 19 nt, Artificial Sequence
  Description of Artificial Sequence: Synthetic oligonucleotide
  Sense Strand Starting at position 694 of SEQ ID NO: 317264
guggaaacaaugugaaauu

SEQ ID NO: 373246 - RNA, 19 nt, Artificial Sequence
  Description of Artificial Sequence: Synthetic oligonucleotide
  Antisense Strand to SEQ ID NO: 373245
aauuucacauuguuuccac

SEQ ID NO: 373247 - RNA, 19 nt, Artificial Sequence
  Description of Artificial Sequence: Synthetic oligonucleotide
  Sense Strand Starting at position 694 of SEQ ID NO: 317331
gcaccagcgucuccauuua

SEQ ID NO: 373248 - RNA, 19 nt, Artificial Sequence
  Description of Artificial Sequence: Synthetic oligonucleotide
  Antisense Strand to SEQ ID NO: 373247
uaaauggagacgcuggugc

SEQ ID NO: 373249 - RNA, 19 nt, Artificial Sequence
  Description of Artificial Sequence: Synthetic oligonucleotide
  Sense Strand Starting at position 694 of SEQ ID NO: 317389
gacagaggucugcacgcau

SEQ ID NO: 373250 - RNA, 19 nt, Artificial Sequence
  Description of Artificial Sequence: Synthetic oligonucleotide
  Antisense Strand to SEQ ID NO: 373249
augcgugcagaccucuguc

SEQ ID NO: 373251 - RNA, 19 nt, Artificial Sequence
  Description of Artificial Sequence: Synthetic oligonucleotide
  Sense Strand Starting at position 694 of SEQ ID NO: 317678
ccucuuggauugccaagau

SEQ ID NO: 373252 - RNA, 19 nt, Artificial Sequence
  Description of Artificial Sequence: Synthetic oligonucleotide
  Antisense Strand to SEQ ID NO: 373251
aucuuggcaauccaagagg

SEQ ID NO: 373253 - RNA, 19 nt, Artificial Sequence
  Description of Artificial Sequence: Synthetic oligonucleotide
  Sense Strand Starting at position 694 of SEQ ID NO: 317693
agaugauaggauugagcgu

SEQ ID NO: 373254 - RNA, 19 nt, Artificial Sequence
  Description of Artificial Sequence: Synthetic oligonucleotide
  Antisense Strand to SEQ ID NO: 373253
acgcucaauccuaucaucu

SEQ ID NO: 373255 - RNA, 19 nt, Artificial Sequence
  Description of Artificial Sequence: Synthetic oligonucleotide
  Sense Strand Starting at position 694 of SEQ ID NO: 317694
gaugauaggauugagcgua

SEQ ID NO: 373256 - RNA, 19 nt, Artificial Sequence
  Description of Artificial Sequence: Synthetic oligonucleotide
  Antisense Strand to SEQ ID NO: 373255
uacgcucaauccuaucauc

SEQ ID NO: 373257 - RNA, 19 nt, Artificial Sequence
  Description of Artificial Sequence: Synthetic oligonucleotide
  Sense Strand Starting at position 694 of SEQ ID NO: 317775
accuuugcccaagguaauu

SEQ ID NO: 373258 - RNA, 19 nt, Artificial Sequence
  Description of Artificial Sequence: Synthetic oligonucleotide
  Antisense Strand to SEQ ID NO: 373257
aauuaccuugggcaaaggu

SEQ ID NO: 373259 - RNA, 19 nt, Artificial Sequence
  Description of Artificial Sequence: Synthetic oligonucleotide
  Sense Strand Starting at position 694 of SEQ ID NO: 317787
gguaauuaaugaccugaau

SEQ ID NO: 373260 - RNA, 19 nt, Artificial Sequence
  Description of Artificial Sequence: Synthetic oligonucleotide
  Antisense Strand to SEQ ID NO: 373259
auucaggucauuaauuacc

SEQ ID NO: 373261 - RNA, 19 nt, Artificial Sequence
  Description of Artificial Sequence: Synthetic oligonucleotide
  Sense Strand Starting at position 694 of SEQ ID NO: 317919
gguuccaagaaauguugga

SEQ ID NO: 373262 - RNA, 19 nt, Artificial Sequence
  Description of Artificial Sequence: Synthetic oligonucleotide
  Antisense Strand to SEQ ID NO: 373261
uccaacauuucuuggaacc

SEQ ID NO: 373263 - RNA, 19 nt, Artificial Sequence
  Description of Artificial Sequence: Synthetic oligonucleotide
  Sense Strand Starting at position 694 of SEQ ID NO: 318036
ggcuccuaccauggaguua

SEQ ID NO: 373264 - RNA, 19 nt, Artificial Sequence
  Description of Artificial Sequence: Synthetic oligonucleotide
  Antisense Strand to SEQ ID NO: 373263
uaacuccaugguaggagcc

SEQ ID NO: 373265 - RNA, 19 nt, Artificial Sequence
  Description of Artificial Sequence: Synthetic oligonucleotide
  Sense Strand Starting at position 694 of SEQ ID NO: 318047
uggaguuaggcuuacauga

SEQ ID NO: 373266 - RNA, 19 nt, Artificial Sequence
  Description of Artificial Sequence: Synthetic oligonucleotide
  Antisense Strand to SEQ ID NO: 373265
ucauguaagccuaacucca

SEQ ID NO: 373267 - RNA, 19 nt, Artificial Sequence
  Description of Artificial Sequence: Synthetic oligonucleotide
  Sense Strand Starting at position 694 of SEQ ID NO: 318085
gucauaguccuuuaggcag

SEQ ID NO: 373268 - RNA, 19 nt, Artificial Sequence
  Description of Artificial Sequence: Synthetic oligonucleotide
  Antisense Strand to SEQ ID NO: 373267
cugccuaaaggacuaugac

SEQ ID NO: 373269 - RNA, 19 nt, Artificial Sequence
  Description of Artificial Sequence: Synthetic oligonucleotide
  Sense Strand Starting at position 694 of SEQ ID NO: 318088
auaguccuuuaggcagaau

SEQ ID NO: 373270 - RNA, 19 nt, Artificial Sequence
  Description of Artificial Sequence: Synthetic oligonucleotide
  Antisense Strand to SEQ ID NO: 373269
auucugccuaaaggacuau

SEQ ID NO: 373271 - RNA, 19 nt, Artificial Sequence
  Description of Artificial Sequence: Synthetic oligonucleotide
  Sense Strand Starting at position 694 of SEQ ID NO: 318091
guccuuuaggcagaauaga

SEQ ID NO: 373272 - RNA, 19 nt, Artificial Sequence
  Description of Artificial Sequence: Synthetic oligonucleotide
  Antisense Strand to SEQ ID NO: 373271
ucuauucugccuaaaggac

SEQ ID NO: 373273 - RNA, 19 nt, Artificial Sequence
  Description of Artificial Sequence: Synthetic oligonucleotide
  Sense Strand Starting at position 694 of SEQ ID NO: 318106
uagagucucagaggugguu

SEQ ID NO: 373274 - RNA, 19 nt, Artificial Sequence
  Description of Artificial Sequence: Synthetic oligonucleotide
  Antisense Strand to SEQ ID NO: 373273
aaccaccucugagacucua

SEQ ID NO: 373275 - RNA, 19 nt, Artificial Sequence
  Description of Artificial Sequence: Synthetic oligonucleotide
  Sense Strand Starting at position 694 of SEQ ID NO: 318174
gugagaaacauagguuauc

SEQ ID NO: 373276 - RNA, 19 nt, Artificial Sequence
  Description of Artificial Sequence: Synthetic oligonucleotide
  Antisense Strand to SEQ ID NO: 373275
gauaaccuauguuucucac

SEQ ID NO: 373277 - RNA, 19 nt, Artificial Sequence
  Description of Artificial Sequence: Synthetic oligonucleotide
  Sense Strand Starting at position 694 of SEQ ID NO: 318175
ugagaaacauagguuaucu

SEQ ID NO: 373278 - RNA, 19 nt, Artificial Sequence
  Description of Artificial Sequence: Synthetic oligonucleotide
  Antisense Strand to SEQ ID NO: 373277
agauaaccuauguuucuca

SEQ ID NO: 373279 - RNA, 19 nt, Artificial Sequence
  Description of Artificial Sequence: Synthetic oligonucleotide
  Sense Strand Starting at position 694 of SEQ ID NO: 318261
acuuucuuacccgaguucu

SEQ ID NO: 373280 - RNA, 19 nt, Artificial Sequence
  Description of Artificial Sequence: Synthetic oligonucleotide
  Antisense Strand to SEQ ID NO: 373279
agaacucggguaagaaagu

SEQ ID NO: 373281 - RNA, 19 nt, Artificial Sequence
  Description of Artificial Sequence: Synthetic oligonucleotide
  Sense Strand Starting at position 694 of SEQ ID NO: 318273
gaguucucauggccaagaa

SEQ ID NO: 373282 - RNA, 19 nt, Artificial Sequence
  Description of Artificial Sequence: Synthetic oligonucleotide
  Antisense Strand to SEQ ID NO: 373281
uucuuggccaugagaacuc

SEQ ID NO: 373283 - RNA, 19 nt, Artificial Sequence
  Description of Artificial Sequence: Synthetic oligonucleotide
  Sense Strand Starting at position 694 of SEQ ID NO: 318274
aguucucauggccaagaau

SEQ ID NO: 373284 - RNA, 19 nt, Artificial Sequence
  Description of Artificial Sequence: Synthetic oligonucleotide
  Antisense Strand to SEQ ID NO: 373283
auucuuggccaugagaacu

SEQ ID NO: 373285 - RNA, 19 nt, Artificial Sequence
  Description of Artificial Sequence: Synthetic oligonucleotide
  Sense Strand Starting at position 694 of SEQ ID NO: 318518
uugccagagugaucuuuag

SEQ ID NO: 373286 - RNA, 19 nt, Artificial Sequence
  Description of Artificial Sequence: Synthetic oligonucleotide
  Antisense Strand to SEQ ID NO: 373285
cuaaagaucacucuggcaa

SEQ ID NO: 373287 - RNA, 19 nt, Artificial Sequence
  Description of Artificial Sequence: Synthetic oligonucleotide
  Sense Strand Starting at position 694 of SEQ ID NO: 318874
gcaucuagaucucucaaag

SEQ ID NO: 373288 - RNA, 19 nt, Artificial Sequence
  Description of Artificial Sequence: Synthetic oligonucleotide
  Antisense Strand to SEQ ID NO: 373287
cuuugagagaucuagaugc

SEQ ID NO: 373289 - RNA, 19 nt, Artificial Sequence
  Description of Artificial Sequence: Synthetic oligonucleotide
  Sense Strand Starting at position 694 of SEQ ID NO: 318994
uuguauuuccugcagcaua

SEQ ID NO: 373290 - RNA, 19 nt, Artificial Sequence
  Description of Artificial Sequence: Synthetic oligonucleotide
  Antisense Strand to SEQ ID NO: 373289
uaugcugcaggaaauacaa

SEQ ID NO: 373291 - RNA, 19 nt, Artificial Sequence
  Description of Artificial Sequence: Synthetic oligonucleotide
  Sense Strand Starting at position 694 of SEQ ID NO: 319024
aaggguccucuauguuuau

SEQ ID NO: 373292 - RNA, 19 nt, Artificial Sequence
  Description of Artificial Sequence: Synthetic oligonucleotide
  Antisense Strand to SEQ ID NO: 373291
auaaacauagaggacccuu

SEQ ID NO: 373293 - RNA, 19 nt, Artificial Sequence
  Description of Artificial Sequence: Synthetic oligonucleotide
  Sense Strand Starting at position 694 of SEQ ID NO: 319025
aggguccucuauguuuauu

SEQ ID NO: 373294 - RNA, 19 nt, Artificial Sequence
  Description of Artificial Sequence: Synthetic oligonucleotide
  Antisense Strand to SEQ ID NO: 373293
aauaaacauagaggacccu

SEQ ID NO: 373295 - RNA, 19 nt, Artificial Sequence
  Description of Artificial Sequence: Synthetic oligonucleotide
  Sense Strand Starting at position 694 of SEQ ID NO: 319027
gguccucuauguuuauuga

SEQ ID NO: 373296 - RNA, 19 nt, Artificial Sequence
  Description of Artificial Sequence: Synthetic oligonucleotide
  Antisense Strand to SEQ ID NO: 373295
ucaauaaacauagaggacc

SEQ ID NO: 373297 - RNA, 19 nt, Artificial Sequence
  Description of Artificial Sequence: Synthetic oligonucleotide
  Sense Strand Starting at position 694 of SEQ ID NO: 319028
guccucuauguuuauugaa

SEQ ID NO: 373298 - RNA, 19 nt, Artificial Sequence
  Description of Artificial Sequence: Synthetic oligonucleotide
  Antisense Strand to SEQ ID NO: 373297
uucaauaaacauagaggac

SEQ ID NO: 373299 - RNA, 19 nt, Artificial Sequence
  Description of Artificial Sequence: Synthetic oligonucleotide
  Sense Strand Starting at position 694 of SEQ ID NO: 319150
gaggauccaugccuagaua

SEQ ID NO: 373300 - RNA, 19 nt, Artificial Sequence
  Description of Artificial Sequence: Synthetic oligonucleotide
  Antisense Strand to SEQ ID NO: 373299
uaucuaggcauggauccuc

SEQ ID NO: 373301 - RNA, 19 nt, Artificial Sequence
  Description of Artificial Sequence: Synthetic oligonucleotide
  Sense Strand Starting at position 695 of SEQ ID NO: 315257
ucggauuaaucacugagua

SEQ ID NO: 373302 - RNA, 19 nt, Artificial Sequence
  Description of Artificial Sequence: Synthetic oligonucleotide
  Antisense Strand to SEQ ID NO: 373301
uacucagugauuaauccga

SEQ ID NO: 373303 - RNA, 19 nt, Artificial Sequence
  Description of Artificial Sequence: Synthetic oligonucleotide
  Sense Strand Starting at position 695 of SEQ ID NO: 315258
cggauuaaucacugaguag

SEQ ID NO: 373304 - RNA, 19 nt, Artificial Sequence
  Description of Artificial Sequence: Synthetic oligonucleotide
  Antisense Strand to SEQ ID NO: 373303
cuacucagugauuaauccg

SEQ ID NO: 373305 - RNA, 19 nt, Artificial Sequence
  Description of Artificial Sequence: Synthetic oligonucleotide
  Sense Strand Starting at position 695 of SEQ ID NO: 315307
ccauaaauuugagaauaug

SEQ ID NO: 373306 - RNA, 19 nt, Artificial Sequence
  Description of Artificial Sequence: Synthetic oligonucleotide
  Antisense Strand to SEQ ID NO: 373305
cauauucucaaauuuaugg

SEQ ID NO: 373307 - RNA, 19 nt, Artificial Sequence
  Description of Artificial Sequence: Synthetic oligonucleotide
  Sense Strand Starting at position 695 of SEQ ID NO: 315465
uguaauccuccagaaggua

SEQ ID NO: 373308 - RNA, 19 nt, Artificial Sequence
  Description of Artificial Sequence: Synthetic oligonucleotide
  Antisense Strand to SEQ ID NO: 373307
uaccuucuggaggauuaca

SEQ ID NO: 373309 - RNA, 19 nt, Artificial Sequence
  Description of Artificial Sequence: Synthetic oligonucleotide
  Sense Strand Starting at position 695 of SEQ ID NO: 315480
gguaaauaauuugauacag

SEQ ID NO: 373310 - RNA, 19 nt, Artificial Sequence
  Description of Artificial Sequence: Synthetic oligonucleotide
  Antisense Strand to SEQ ID NO: 373309
cuguaucaaauuauuuacc

SEQ ID NO: 373311 - RNA, 19 nt, Artificial Sequence
  Description of Artificial Sequence: Synthetic oligonucleotide
  Sense Strand Starting at position 695 of SEQ ID NO: 315517
auucuugauccucauggua

SEQ ID NO: 373312 - RNA, 19 nt, Artificial Sequence
  Description of Artificial Sequence: Synthetic oligonucleotide
  Antisense Strand to SEQ ID NO: 373311
uaccaugaggaucaagaau

SEQ ID NO: 373313 - RNA, 19 nt, Artificial Sequence
  Description of Artificial Sequence: Synthetic oligonucleotide
  Sense Strand Starting at position 695 of SEQ ID NO: 315533
guaaccuuguagguacaau

SEQ ID NO: 373314 - RNA, 19 nt, Artificial Sequence
  Description of Artificial Sequence: Synthetic oligonucleotide
  Antisense Strand to SEQ ID NO: 373313
auuguaccuacaagguuac

SEQ ID NO: 373315 - RNA, 19 nt, Artificial Sequence
  Description of Artificial Sequence: Synthetic oligonucleotide
  Sense Strand Starting at position 695 of SEQ ID NO: 316026
uccaaugugucuucuauga

SEQ ID NO: 373316 - RNA, 19 nt, Artificial Sequence
  Description of Artificial Sequence: Synthetic oligonucleotide
  Antisense Strand to SEQ ID NO: 373315
ucauagaagacacauugga

SEQ ID NO: 373317 - RNA, 19 nt, Artificial Sequence
  Description of Artificial Sequence: Synthetic oligonucleotide
  Sense Strand Starting at position 695 of SEQ ID NO: 316080
aguaaaguguauccuaauc

SEQ ID NO: 373318 - RNA, 19 nt, Artificial Sequence
  Description of Artificial Sequence: Synthetic oligonucleotide
  Antisense Strand to SEQ ID NO: 373317
gauuaggauacacuuuacu

SEQ ID NO: 373319 - RNA, 19 nt, Artificial Sequence
  Description of Artificial Sequence: Synthetic oligonucleotide
  Sense Strand Starting at position 695 of SEQ ID NO: 316085
aguguauccuaaucacuaa

SEQ ID NO: 373320 - RNA, 19 nt, Artificial Sequence
  Description of Artificial Sequence: Synthetic oligonucleotide
  Antisense Strand to SEQ ID NO: 373319
uuagugauuaggauacacu

SEQ ID NO: 373321 - RNA, 19 nt, Artificial Sequence
  Description of Artificial Sequence: Synthetic oligonucleotide
  Sense Strand Starting at position 695 of SEQ ID NO: 316121
guggaugggucuagagaga

SEQ ID NO: 373322 - RNA, 19 nt, Artificial Sequence
  Description of Artificial Sequence: Synthetic oligonucleotide
  Antisense Strand to SEQ ID NO: 373321
ucucucuagacccauccac

SEQ ID NO: 373323 - RNA, 19 nt, Artificial Sequence
  Description of Artificial Sequence: Synthetic oligonucleotide
  Sense Strand Starting at position 695 of SEQ ID NO: 316244
gauggaucuuaugaaauga

SEQ ID NO: 373324 - RNA, 19 nt, Artificial Sequence
  Description of Artificial Sequence: Synthetic oligonucleotide
  Antisense Strand to SEQ ID NO: 373323
ucauuucauaagauccauc

SEQ ID NO: 373325 - RNA, 19 nt, Artificial Sequence
  Description of Artificial Sequence: Synthetic oligonucleotide
  Sense Strand Starting at position 695 of SEQ ID NO: 316359
uaaguuuagcagcaaguua

SEQ ID NO: 373326 - RNA, 19 nt, Artificial Sequence
  Description of Artificial Sequence: Synthetic oligonucleotide
  Antisense Strand to SEQ ID NO: 373325
uaacuugcugcuaaacuua

SEQ ID NO: 373327 - RNA, 19 nt, Artificial Sequence
  Description of Artificial Sequence: Synthetic oligonucleotide
  Sense Strand Starting at position 695 of SEQ ID NO: 316367
gcagcaaguuacuuaacau

SEQ ID NO: 373328 - RNA, 19 nt, Artificial Sequence
  Description of Artificial Sequence: Synthetic oligonucleotide
  Antisense Strand to SEQ ID NO: 373327
auguuaaguaacuugcugc

SEQ ID NO: 373329 - RNA, 19 nt, Artificial Sequence
  Description of Artificial Sequence: Synthetic oligonucleotide
  Sense Strand Starting at position 695 of SEQ ID NO: 316497
guagucuaaugacuuccua

SEQ ID NO: 373330 - RNA, 19 nt, Artificial Sequence
  Description of Artificial Sequence: Synthetic oligonucleotide
  Antisense Strand to SEQ ID NO: 373329
uaggaagucauuagacuac

SEQ ID NO: 373331 - RNA, 19 nt, Artificial Sequence
  Description of Artificial Sequence: Synthetic oligonucleotide
  Sense Strand Starting at position 695 of SEQ ID NO: 316501
ucuaaugacuuccuaggau

SEQ ID NO: 373332 - RNA, 19 nt, Artificial Sequence
  Description of Artificial Sequence: Synthetic oligonucleotide
  Antisense Strand to SEQ ID NO: 373331
auccuaggaagucauuaga

SEQ ID NO: 373333 - RNA, 19 nt, Artificial Sequence
  Description of Artificial Sequence: Synthetic oligonucleotide
  Sense Strand Starting at position 695 of SEQ ID NO: 316571
ucucccuagucaucuuaga

SEQ ID NO: 373334 - RNA, 19 nt, Artificial Sequence
  Description of Artificial Sequence: Synthetic oligonucleotide
  Antisense Strand to SEQ ID NO: 373333
ucuaagaugacuagggaga

SEQ ID NO: 373335 - RNA, 19 nt, Artificial Sequence
  Description of Artificial Sequence: Synthetic oligonucleotide
  Sense Strand Starting at position 695 of SEQ ID NO: 316778
uaacuuaccggaggucauu

SEQ ID NO: 373336 - RNA, 19 nt, Artificial Sequence
  Description of Artificial Sequence: Synthetic oligonucleotide
  Antisense Strand to SEQ ID NO: 373335
aaugaccuccgguaaguua

SEQ ID NO: 373337 - RNA, 19 nt, Artificial Sequence
  Description of Artificial Sequence: Synthetic oligonucleotide
  Sense Strand Starting at position 695 of SEQ ID NO: 316944
ggcggaguaagaugugaaa

SEQ ID NO: 373338 - RNA, 19 nt, Artificial Sequence
  Description of Artificial Sequence: Synthetic oligonucleotide
  Antisense Strand to SEQ ID NO: 373337
uuucacaucuuacuccgcc

SEQ ID NO: 373339 - RNA, 19 nt, Artificial Sequence
  Description of Artificial Sequence: Synthetic oligonucleotide
  Sense Strand Starting at position 695 of SEQ ID NO: 317088
auccauucucgaggaagac

SEQ ID NO: 373340 - RNA, 19 nt, Artificial Sequence
  Description of Artificial Sequence: Synthetic oligonucleotide
  Antisense Strand to SEQ ID NO: 373339
gucuuccucgagaauggau

SEQ ID NO: 373341 - RNA, 19 nt, Artificial Sequence
  Description of Artificial Sequence: Synthetic oligonucleotide
  Sense Strand Starting at position 695 of SEQ ID NO: 317751
uugccacauccacauagua

SEQ ID NO: 373342 - RNA, 19 nt, Artificial Sequence
  Description of Artificial Sequence: Synthetic oligonucleotide
  Antisense Strand to SEQ ID NO: 373341
uacuauguggauguggcaa

SEQ ID NO: 373343 - RNA, 19 nt, Artificial Sequence
  Description of Artificial Sequence: Synthetic oligonucleotide
  Sense Strand Starting at position 695 of SEQ ID NO: 317876
ugucacuugcucuaaaugu

SEQ ID NO: 373344 - RNA, 19 nt, Artificial Sequence
  Description of Artificial Sequence: Synthetic oligonucleotide
  Antisense Strand to SEQ ID NO: 373343
acauuuagagcaagugaca

SEQ ID NO: 373345 - RNA, 19 nt, Artificial Sequence
  Description of Artificial Sequence: Synthetic oligonucleotide
  Sense Strand Starting at position 695 of SEQ ID NO: 317995
gccuuuaaaccugagaucu

SEQ ID NO: 373346 - RNA, 19 nt, Artificial Sequence
  Description of Artificial Sequence: Synthetic oligonucleotide
  Antisense Strand to SEQ ID NO: 373345
agaucucagguuuaaaggc

SEQ ID NO: 373347 - RNA, 19 nt, Artificial Sequence
  Description of Artificial Sequence: Synthetic oligonucleotide
  Sense Strand Starting at position 695 of SEQ ID NO: 318007
gagaucucguuucucuaaa

SEQ ID NO: 373348 - RNA, 19 nt, Artificial Sequence
  Description of Artificial Sequence: Synthetic oligonucleotide
  Antisense Strand to SEQ ID NO: 373347
uuuagagaaacgagaucuc

SEQ ID NO: 373349 - RNA, 19 nt, Artificial Sequence
  Description of Artificial Sequence: Synthetic oligonucleotide
  Sense Strand Starting at position 695 of SEQ ID NO: 318044
ugaucagaaaggugcucaa

SEQ ID NO: 373350 - RNA, 19 nt, Artificial Sequence
  Description of Artificial Sequence: Synthetic oligonucleotide
  Antisense Strand to SEQ ID NO: 373349
uugagcaccuuucugauca

SEQ ID NO: 373351 - RNA, 19 nt, Artificial Sequence
  Description of Artificial Sequence: Synthetic oligonucleotide
  Sense Strand Starting at position 695 of SEQ ID NO: 318117
gggaaugacuuugucaccu

SEQ ID NO: 373352 - RNA, 19 nt, Artificial Sequence
  Description of Artificial Sequence: Synthetic oligonucleotide
  Antisense Strand to SEQ ID NO: 373351
aggugacaaagucauuccc

SEQ ID NO: 373353 - RNA, 19 nt, Artificial Sequence
  Description of Artificial Sequence: Synthetic oligonucleotide
  Sense Strand Starting at position 695 of SEQ ID NO: 318165
auuguuaucgccuaaaucu

SEQ ID NO: 373354 - RNA, 19 nt, Artificial Sequence
  Description of Artificial Sequence: Synthetic oligonucleotide
  Antisense Strand to SEQ ID NO: 373353
agauuuaggcgauaacaau

SEQ ID NO: 373355 - RNA, 19 nt, Artificial Sequence
  Description of Artificial Sequence: Synthetic oligonucleotide
  Sense Strand Starting at position 695 of SEQ ID NO: 318221
gggauaggucuuggccuga

SEQ ID NO: 373356 - RNA, 19 nt, Artificial Sequence
  Description of Artificial Sequence: Synthetic oligonucleotide
  Antisense Strand to SEQ ID NO: 373355
ucaggccaagaccuauccc

SEQ ID NO: 373357 - RNA, 19 nt, Artificial Sequence
  Description of Artificial Sequence: Synthetic oligonucleotide
  Sense Strand Starting at position 695 of SEQ ID NO: 318323
agaucuuucucuguguaaa

SEQ ID NO: 373358 - RNA, 19 nt, Artificial Sequence
  Description of Artificial Sequence: Synthetic oligonucleotide
  Antisense Strand to SEQ ID NO: 373357
uuuacacagagaaagaucu

SEQ ID NO: 373359 - RNA, 19 nt, Artificial Sequence
  Description of Artificial Sequence: Synthetic oligonucleotide
  Sense Strand Starting at position 695 of SEQ ID NO: 318324
gaucuuucucuguguaaag

SEQ ID NO: 373360 - RNA, 19 nt, Artificial Sequence
  Description of Artificial Sequence: Synthetic oligonucleotide
  Antisense Strand to SEQ ID NO: 373359
cuuuacacagagaaagauc

SEQ ID NO: 373361 - RNA, 19 nt, Artificial Sequence
  Description of Artificial Sequence: Synthetic oligonucleotide
  Sense Strand Starting at position 695 of SEQ ID NO: 318326
ucuuucucuguguaaagca

SEQ ID NO: 373362 - RNA, 19 nt, Artificial Sequence
  Description of Artificial Sequence: Synthetic oligonucleotide
  Antisense Strand to SEQ ID NO: 373361
ugcuuuacacagagaaaga

SEQ ID NO: 373363 - RNA, 19 nt, Artificial Sequence
  Description of Artificial Sequence: Synthetic oligonucleotide
  Sense Strand Starting at position 695 of SEQ ID NO: 318572
auaauuugccagcgucaca

SEQ ID NO: 373364 - RNA, 19 nt, Artificial Sequence
  Description of Artificial Sequence: Synthetic oligonucleotide
  Antisense Strand to SEQ ID NO: 373363
ugugacgcuggcaaauuau

SEQ ID NO: 373365 - RNA, 19 nt, Artificial Sequence
  Description of Artificial Sequence: Synthetic oligonucleotide
  Sense Strand Starting at position 695 of SEQ ID NO: 318675
auguuacagacguggcaaa

SEQ ID NO: 373366 - RNA, 19 nt, Artificial Sequence
  Description of Artificial Sequence: Synthetic oligonucleotide
  Antisense Strand to SEQ ID NO: 373365
uuugccacgucuguaacau

SEQ ID NO: 373367 - RNA, 19 nt, Artificial Sequence
  Description of Artificial Sequence: Synthetic oligonucleotide
  Sense Strand Starting at position 695 of SEQ ID NO: 318694
cucaaaugucugcaggaga

SEQ ID NO: 373368 - RNA, 19 nt, Artificial Sequence
  Description of Artificial Sequence: Synthetic oligonucleotide
  Antisense Strand to SEQ ID NO: 373367
ucuccugcagacauuugag

SEQ ID NO: 373369 - RNA, 19 nt, Artificial Sequence
  Description of Artificial Sequence: Synthetic oligonucleotide
  Sense Strand Starting at position 695 of SEQ ID NO: 318734
agauguuuauuugcaucuu

SEQ ID NO: 373370 - RNA, 19 nt, Artificial Sequence
  Description of Artificial Sequence: Synthetic oligonucleotide
  Antisense Strand to SEQ ID NO: 373369
aagaugcaaauaaacaucu

SEQ ID NO: 373371 - RNA, 19 nt, Artificial Sequence
  Description of Artificial Sequence: Synthetic oligonucleotide
  Sense Strand Starting at position 695 of SEQ ID NO: 318815
gaaacacagccguaucagu

SEQ ID NO: 373372 - RNA, 19 nt, Artificial Sequence
  Description of Artificial Sequence: Synthetic oligonucleotide
  Antisense Strand to SEQ ID NO: 373371
acugauacggcuguguuuc

SEQ ID NO: 373373 - RNA, 19 nt, Artificial Sequence
  Description of Artificial Sequence: Synthetic oligonucleotide
  Sense Strand Starting at position 695 of SEQ ID NO: 318822
agccguaucagugaaucuu

SEQ ID NO: 373374 - RNA, 19 nt, Artificial Sequence
  Description of Artificial Sequence: Synthetic oligonucleotide
  Antisense Strand to SEQ ID NO: 373373
aagauucacugauacggcu

SEQ ID NO: 373375 - RNA, 19 nt, Artificial Sequence
  Description of Artificial Sequence: Synthetic oligonucleotide
  Sense Strand Starting at position 695 of SEQ ID NO: 318962
agaguaauagaguguggca

SEQ ID NO: 373376 - RNA, 19 nt, Artificial Sequence
  Description of Artificial Sequence: Synthetic oligonucleotide
  Antisense Strand to SEQ ID NO: 373375
ugccacacucuauuacucu

SEQ ID NO: 373377 - RNA, 19 nt, Artificial Sequence
  Description of Artificial Sequence: Synthetic oligonucleotide
  Sense Strand Starting at position 695 of SEQ ID NO: 318964
aguaauagaguguggcaaa

SEQ ID NO: 373378 - RNA, 19 nt, Artificial Sequence
  Description of Artificial Sequence: Synthetic oligonucleotide
  Antisense Strand to SEQ ID NO: 373377
uuugccacacucuauuacu

SEQ ID NO: 373379 - RNA, 19 nt, Artificial Sequence
  Description of Artificial Sequence: Synthetic oligonucleotide
  Sense Strand Starting at position 695 of SEQ ID NO: 319168
caccgugugggccaaauaa

SEQ ID NO: 373380 - RNA, 19 nt, Artificial Sequence
  Description of Artificial Sequence: Synthetic oligonucleotide
  Antisense Strand to SEQ ID NO: 373379
uuauuuggcccacacggug

SEQ ID NO: 373381 - RNA, 19 nt, Artificial Sequence
  Description of Artificial Sequence: Synthetic oligonucleotide
  Sense Strand Starting at position 696 of SEQ ID NO: 315585
ggcgucuuccgcccuguaa

SEQ ID NO: 373382 - RNA, 19 nt, Artificial Sequence
  Description of Artificial Sequence: Synthetic oligonucleotide
  Antisense Strand to SEQ ID NO: 373381
uuacagggcggaagacgcc

SEQ ID NO: 373383 - RNA, 19 nt, Artificial Sequence
  Description of Artificial Sequence: Synthetic oligonucleotide
  Sense Strand Starting at position 696 of SEQ ID NO: 315586
gcgucuuccgcccuguaaa

SEQ ID NO: 373384 - RNA, 19 nt, Artificial Sequence
  Description of Artificial Sequence: Synthetic oligonucleotide
  Antisense Strand to SEQ ID NO: 373383
uuuacagggcggaagacgc

SEQ ID NO: 373385 - RNA, 19 nt, Artificial Sequence
  Description of Artificial Sequence: Synthetic oligonucleotide
  Sense Strand Starting at position 696 of SEQ ID NO: 315615
ggcaaacuggccugaaaua

SEQ ID NO: 373386 - RNA, 19 nt, Artificial Sequence
  Description of Artificial Sequence: Synthetic oligonucleotide
  Antisense Strand to SEQ ID NO: 373385
uauuucaggccaguuugcc

SEQ ID NO: 373387 - RNA, 19 nt, Artificial Sequence
  Description of Artificial Sequence: Synthetic oligonucleotide
  Sense Strand Starting at position 696 of SEQ ID NO: 315674
gcguaauuuauggguagca

SEQ ID NO: 373388 - RNA, 19 nt, Artificial Sequence
  Description of Artificial Sequence: Synthetic oligonucleotide
  Antisense Strand to SEQ ID NO: 373387
ugcuacccauaaauuacgc

SEQ ID NO: 373389 - RNA, 19 nt, Artificial Sequence
  Description of Artificial Sequence: Synthetic oligonucleotide
  Sense Strand Starting at position 696 of SEQ ID NO: 315675
cguaauuuauggguagcaa

SEQ ID NO: 373390 - RNA, 19 nt, Artificial Sequence
  Description of Artificial Sequence: Synthetic oligonucleotide
  Antisense Strand to SEQ ID NO: 373389
uugcuacccauaaauuacg

SEQ ID NO: 373391 - RNA, 19 nt, Artificial Sequence
  Description of Artificial Sequence: Synthetic oligonucleotide
  Sense Strand Starting at position 696 of SEQ ID NO: 315687
guagcaagcagagaauuaa

SEQ ID NO: 373392 - RNA, 19 nt, Artificial Sequence
  Description of Artificial Sequence: Synthetic oligonucleotide
  Antisense Strand to SEQ ID NO: 373391
uuaauucucugcuugcuac

SEQ ID NO: 373393 - RNA, 19 nt, Artificial Sequence
  Description of Artificial Sequence: Synthetic oligonucleotide
  Sense Strand Starting at position 696 of SEQ ID NO: 315830
cgacaaaggucauuaaguu

SEQ ID NO: 373394 - RNA, 19 nt, Artificial Sequence
  Description of Artificial Sequence: Synthetic oligonucleotide
  Antisense Strand to SEQ ID NO: 373393
aacuuaaugaccuuugucg

SEQ ID NO: 373395 - RNA, 19 nt, Artificial Sequence
  Description of Artificial Sequence: Synthetic oligonucleotide
  Sense Strand Starting at position 696 of SEQ ID NO: 315842
uuaaguugugaguacacuu

SEQ ID NO: 373396 - RNA, 19 nt, Artificial Sequence
  Description of Artificial Sequence: Synthetic oligonucleotide
  Antisense Strand to SEQ ID NO: 373395
aaguguacucacaacuuaa

SEQ ID NO: 373397 - RNA, 19 nt, Artificial Sequence
  Description of Artificial Sequence: Synthetic oligonucleotide
  Sense Strand Starting at position 696 of SEQ ID NO: 317220
ggugcuauaagauguaacu

SEQ ID NO: 373398 - RNA, 19 nt, Artificial Sequence
  Description of Artificial Sequence: Synthetic oligonucleotide
  Antisense Strand to SEQ ID NO: 373397
aguuacaucuuauagcacc

SEQ ID NO: 373399 - RNA, 19 nt, Artificial Sequence
  Description of Artificial Sequence: Synthetic oligonucleotide
  Sense Strand Starting at position 696 of SEQ ID NO: 317273
cugugaugugaugaaguuu

SEQ ID NO: 373400 - RNA, 19 nt, Artificial Sequence
  Description of Artificial Sequence: Synthetic oligonucleotide
  Antisense Strand to SEQ ID NO: 373399
aaacuucaucacaucacag

SEQ ID NO: 373401 - RNA, 19 nt, Artificial Sequence
  Description of Artificial Sequence: Synthetic oligonucleotide
  Sense Strand Starting at position 696 of SEQ ID NO: 317306
aggauuuccuuugaaugua

SEQ ID NO: 373402 - RNA, 19 nt, Artificial Sequence
  Description of Artificial Sequence: Synthetic oligonucleotide
  Antisense Strand to SEQ ID NO: 373401
uacauucaaaggaaauccu

SEQ ID NO: 373403 - RNA, 19 nt, Artificial Sequence
  Description of Artificial Sequence: Synthetic oligonucleotide
  Sense Strand Starting at position 696 of SEQ ID NO: 317320
auguaaggaauucggauaa

SEQ ID NO: 373404 - RNA, 19 nt, Artificial Sequence
  Description of Artificial Sequence: Synthetic oligonucleotide
  Antisense Strand to SEQ ID NO: 373403
uuauccgaauuccuuacau

SEQ ID NO: 373405 - RNA, 19 nt, Artificial Sequence
  Description of Artificial Sequence: Synthetic oligonucleotide
  Sense Strand Starting at position 696 of SEQ ID NO: 317484
ggugcuaaagugcagaaau

SEQ ID NO: 373406 - RNA, 19 nt, Artificial Sequence
  Description of Artificial Sequence: Synthetic oligonucleotide
  Antisense Strand to SEQ ID NO: 373405
auuucugcacuuuagcacc

SEQ ID NO: 373407 - RNA, 19 nt, Artificial Sequence
  Description of Artificial Sequence: Synthetic oligonucleotide
  Sense Strand Starting at position 696 of SEQ ID NO: 317486
ugcuaaagugcagaaauau

SEQ ID NO: 373408 - RNA, 19 nt, Artificial Sequence
  Description of Artificial Sequence: Synthetic oligonucleotide
  Antisense Strand to SEQ ID NO: 373407
auauuucugcacuuuagca

SEQ ID NO: 373409 - RNA, 19 nt, Artificial Sequence
  Description of Artificial Sequence: Synthetic oligonucleotide
  Sense Strand Starting at position 696 of SEQ ID NO: 317495
gcagaaauaucuuccagag

SEQ ID NO: 373410 - RNA, 19 nt, Artificial Sequence
  Description of Artificial Sequence: Synthetic oligonucleotide
  Antisense Strand to SEQ ID NO: 373409
cucuggaagauauuucugc

SEQ ID NO: 373411 - RNA, 19 nt, Artificial Sequence
  Description of Artificial Sequence: Synthetic oligonucleotide
  Sense Strand Starting at position 696 of SEQ ID NO: 317514
gcacuaauagccgacuuua

SEQ ID NO: 373412 - RNA, 19 nt, Artificial Sequence
  Description of Artificial Sequence: Synthetic oligonucleotide
  Antisense Strand to SEQ ID NO: 373411
uaaagucggcuauuagugc

SEQ ID NO: 373413 - RNA, 19 nt, Artificial Sequence
  Description of Artificial Sequence: Synthetic oligonucleotide
  Sense Strand Starting at position 696 of SEQ ID NO: 317527
acuuuaguucuugaccuuu

SEQ ID NO: 373414 - RNA, 19 nt, Artificial Sequence
  Description of Artificial Sequence: Synthetic oligonucleotide
  Antisense Strand to SEQ ID NO: 373413
aaaggucaagaacuaaagu

SEQ ID NO: 373415 - RNA, 19 nt, Artificial Sequence
  Description of Artificial Sequence: Synthetic oligonucleotide
  Sense Strand Starting at position 696 of SEQ ID NO: 317535
ucuugaccuuuagcuagau

SEQ ID NO: 373416 - RNA, 19 nt, Artificial Sequence
  Description of Artificial Sequence: Synthetic oligonucleotide
  Antisense Strand to SEQ ID NO: 373415
aucuagcuaaaggucaaga

SEQ ID NO: 373417 - RNA, 19 nt, Artificial Sequence
  Description of Artificial Sequence: Synthetic oligonucleotide
  Sense Strand Starting at position 696 of SEQ ID NO: 317553
uccacaaagcacugaguua

SEQ ID NO: 373418 - RNA, 19 nt, Artificial Sequence
  Description of Artificial Sequence: Synthetic oligonucleotide
  Antisense Strand to SEQ ID NO: 373417
uaacucagugcuuugugga

SEQ ID NO: 373419 - RNA, 19 nt, Artificial Sequence
  Description of Artificial Sequence: Synthetic oligonucleotide
  Sense Strand Starting at position 696 of SEQ ID NO: 317618
ugccucuucccagcguuaa

SEQ ID NO: 373420 - RNA, 19 nt, Artificial Sequence
  Description of Artificial Sequence: Synthetic oligonucleotide
  Antisense Strand to SEQ ID NO: 373419
uuaacgcugggaagaggca

SEQ ID NO: 373421 - RNA, 19 nt, Artificial Sequence
  Description of Artificial Sequence: Synthetic oligonucleotide
  Sense Strand Starting at position 696 of SEQ ID NO: 317808
augccagugaugcaagaau

SEQ ID NO: 373422 - RNA, 19 nt, Artificial Sequence
  Description of Artificial Sequence: Synthetic oligonucleotide
  Antisense Strand to SEQ ID NO: 373421
auucuugcaucacuggcau

SEQ ID NO: 373423 - RNA, 19 nt, Artificial Sequence
  Description of Artificial Sequence: Synthetic oligonucleotide
  Sense Strand Starting at position 696 of SEQ ID NO: 317858
gccucuaguaggugagaga

SEQ ID NO: 373424 - RNA, 19 nt, Artificial Sequence
  Description of Artificial Sequence: Synthetic oligonucleotide
  Antisense Strand to SEQ ID NO: 373423
ucucucaccuacuagaggc

SEQ ID NO: 373425 - RNA, 19 nt, Artificial Sequence
  Description of Artificial Sequence: Synthetic oligonucleotide
  Sense Strand Starting at position 696 of SEQ ID NO: 317881
ccgauuaauucugcauaag

SEQ ID NO: 373426 - RNA, 19 nt, Artificial Sequence
  Description of Artificial Sequence: Synthetic oligonucleotide
  Antisense Strand to SEQ ID NO: 373425
cuuaugcagaauuaaucgg

SEQ ID NO: 373427 - RNA, 19 nt, Artificial Sequence
  Description of Artificial Sequence: Synthetic oligonucleotide
  Sense Strand Starting at position 696 of SEQ ID NO: 317882
cgauuaauucugcauaagg

SEQ ID NO: 373428 - RNA, 19 nt, Artificial Sequence
  Description of Artificial Sequence: Synthetic oligonucleotide
  Antisense Strand to SEQ ID NO: 373427
ccuuaugcagaauuaaucg

SEQ ID NO: 373429 - RNA, 19 nt, Artificial Sequence
  Description of Artificial Sequence: Synthetic oligonucleotide
  Sense Strand Starting at position 696 of SEQ ID NO: 317928
caaugagggcucugaggau

SEQ ID NO: 373430 - RNA, 19 nt, Artificial Sequence
  Description of Artificial Sequence: Synthetic oligonucleotide
  Antisense Strand to SEQ ID NO: 373429
auccucagagcccucauug

SEQ ID NO: 373431 - RNA, 19 nt, Artificial Sequence
  Description of Artificial Sequence: Synthetic oligonucleotide
  Sense Strand Starting at position 696 of SEQ ID NO: 317977
uuuaacuggugccuugaaa

SEQ ID NO: 373432 - RNA, 19 nt, Artificial Sequence
  Description of Artificial Sequence: Synthetic oligonucleotide
  Antisense Strand to SEQ ID NO: 373431
uuucaaggcaccaguuaaa

SEQ ID NO: 373433 - RNA, 19 nt, Artificial Sequence
  Description of Artificial Sequence: Synthetic oligonucleotide
  Sense Strand Starting at position 696 of SEQ ID NO: 317988
ccuugaaagguguguagaa

SEQ ID NO: 373434 - RNA, 19 nt, Artificial Sequence
  Description of Artificial Sequence: Synthetic oligonucleotide
  Antisense Strand to SEQ ID NO: 373433
uucuacacaccuuucaagg

SEQ ID NO: 373435 - RNA, 19 nt, Artificial Sequence
  Description of Artificial Sequence: Synthetic oligonucleotide
  Sense Strand Starting at position 696 of SEQ ID NO: 317989
cuugaaagguguguagaag

SEQ ID NO: 373436 - RNA, 19 nt, Artificial Sequence
  Description of Artificial Sequence: Synthetic oligonucleotide
  Antisense Strand to SEQ ID NO: 373435
cuucuacacaccuuucaag

SEQ ID NO: 373437 - RNA, 19 nt, Artificial Sequence
  Description of Artificial Sequence: Synthetic oligonucleotide
  Sense Strand Starting at position 696 of SEQ ID NO: 317990
uugaaagguguguagaagu

SEQ ID NO: 373438 - RNA, 19 nt, Artificial Sequence
  Description of Artificial Sequence: Synthetic oligonucleotide
  Antisense Strand to SEQ ID NO: 373437
acuucuacacaccuuucaa

SEQ ID NO: 373439 - RNA, 19 nt, Artificial Sequence
  Description of Artificial Sequence: Synthetic oligonucleotide
  Sense Strand Starting at position 696 of SEQ ID NO: 318288
uaggucuguguugaucuaa

SEQ ID NO: 373440 - RNA, 19 nt, Artificial Sequence
  Description of Artificial Sequence: Synthetic oligonucleotide
  Antisense Strand to SEQ ID NO: 373439
uuagaucaacacagaccua

SEQ ID NO: 373441 - RNA, 19 nt, Artificial Sequence
  Description of Artificial Sequence: Synthetic oligonucleotide
  Sense Strand Starting at position 696 of SEQ ID NO: 318365
agagauggagucuggacuu

SEQ ID NO: 373442 - RNA, 19 nt, Artificial Sequence
  Description of Artificial Sequence: Synthetic oligonucleotide
  Antisense Strand to SEQ ID NO: 373441
aaguccagacuccaucucu

SEQ ID NO: 373443 - RNA, 19 nt, Artificial Sequence
  Description of Artificial Sequence: Synthetic oligonucleotide
  Sense Strand Starting at position 696 of SEQ ID NO: 318371
ggagucuggacuuguauug

SEQ ID NO: 373444 - RNA, 19 nt, Artificial Sequence
  Description of Artificial Sequence: Synthetic oligonucleotide
  Antisense Strand to SEQ ID NO: 373443
caauacaaguccagacucc

SEQ ID NO: 373445 - RNA, 19 nt, Artificial Sequence
  Description of Artificial Sequence: Synthetic oligonucleotide
  Sense Strand Starting at position 696 of SEQ ID NO: 318380
acuuguauugcagaaaguu

SEQ ID NO: 373446 - RNA, 19 nt, Artificial Sequence
  Description of Artificial Sequence: Synthetic oligonucleotide
  Antisense Strand to SEQ ID NO: 373445
aacuuucugcaauacaagu

SEQ ID NO: 373447 - RNA, 19 nt, Artificial Sequence
  Description of Artificial Sequence: Synthetic oligonucleotide
  Sense Strand Starting at position 696 of SEQ ID NO: 318473
ugacucaugcagggaauga

SEQ ID NO: 373448 - RNA, 19 nt, Artificial Sequence
  Description of Artificial Sequence: Synthetic oligonucleotide
  Antisense Strand to SEQ ID NO: 373447
ucauucccugcaugaguca

SEQ ID NO: 373449 - RNA, 19 nt, Artificial Sequence
  Description of Artificial Sequence: Synthetic oligonucleotide
  Sense Strand Starting at position 696 of SEQ ID NO: 318610
uucuuaguagagcaaacuu

SEQ ID NO: 373450 - RNA, 19 nt, Artificial Sequence
  Description of Artificial Sequence: Synthetic oligonucleotide
  Antisense Strand to SEQ ID NO: 373449
aaguuugcucuacuaagaa

SEQ ID NO: 373451 - RNA, 19 nt, Artificial Sequence
  Description of Artificial Sequence: Synthetic oligonucleotide
  Sense Strand Starting at position 696 of SEQ ID NO: 318758
ccaaguuagaacuguagug

SEQ ID NO: 373452 - RNA, 19 nt, Artificial Sequence
  Description of Artificial Sequence: Synthetic oligonucleotide
  Antisense Strand to SEQ ID NO: 373451
cacuacaguucuaacuugg

SEQ ID NO: 373453 - RNA, 19 nt, Artificial Sequence
  Description of Artificial Sequence: Synthetic oligonucleotide
  Sense Strand Starting at position 696 of SEQ ID NO: 318760
aaguuagaacuguaguguu

SEQ ID NO: 373454 - RNA, 19 nt, Artificial Sequence
  Description of Artificial Sequence: Synthetic oligonucleotide
  Antisense Strand to SEQ ID NO: 373453
aacacuacaguucuaacuu

SEQ ID NO: 373455 - RNA, 19 nt, Artificial Sequence
  Description of Artificial Sequence: Synthetic oligonucleotide
  Sense Strand Starting at position 696 of SEQ ID NO: 318821
uggugaaacacaggacuuu

SEQ ID NO: 373456 - RNA, 19 nt, Artificial Sequence
  Description of Artificial Sequence: Synthetic oligonucleotide
  Antisense Strand to SEQ ID NO: 373455
aaaguccuguguuucacca

SEQ ID NO: 373457 - RNA, 19 nt, Artificial Sequence
  Description of Artificial Sequence: Synthetic oligonucleotide
  Sense Strand Starting at position 696 of SEQ ID NO: 318922
aauggaaacugagaugaga

SEQ ID NO: 373458 - RNA, 19 nt, Artificial Sequence
  Description of Artificial Sequence: Synthetic oligonucleotide
  Antisense Strand to SEQ ID NO: 373457
ucucaucucaguuuccauu

SEQ ID NO: 373459 - RNA, 19 nt, Artificial Sequence
  Description of Artificial Sequence: Synthetic oligonucleotide
  Sense Strand Starting at position 696 of SEQ ID NO: 319161
ggccuaauugacuaucacu

SEQ ID NO: 373460 - RNA, 19 nt, Artificial Sequence
  Description of Artificial Sequence: Synthetic oligonucleotide
  Antisense Strand to SEQ ID NO: 373459
agugauagucaauuaggcc

SEQ ID NO: 373461 - RNA, 19 nt, Artificial Sequence
  Description of Artificial Sequence: Synthetic oligonucleotide
  Sense Strand Starting at position 697 of SEQ ID NO: 315349
ggaacacauuucuagucuu

SEQ ID NO: 373462 - RNA, 19 nt, Artificial Sequence
  Description of Artificial Sequence: Synthetic oligonucleotide
  Antisense Strand to SEQ ID NO: 373461
aagacuagaaauguguucc

SEQ ID NO: 373463 - RNA, 19 nt, Artificial Sequence
  Description of Artificial Sequence: Synthetic oligonucleotide
  Sense Strand Starting at position 697 of SEQ ID NO: 315493
guauuauggugcccacaaa

SEQ ID NO: 373464 - RNA, 19 nt, Artificial Sequence
  Description of Artificial Sequence: Synthetic oligonucleotide
  Antisense Strand to SEQ ID NO: 373463
uuugugggcaccauaauac

SEQ ID NO: 373465 - RNA, 19 nt, Artificial Sequence
  Description of Artificial Sequence: Synthetic oligonucleotide
  Sense Strand Starting at position 697 of SEQ ID NO: 315635
acuuaugaguuucuacuua

SEQ ID NO: 373466 - RNA, 19 nt, Artificial Sequence
  Description of Artificial Sequence: Synthetic oligonucleotide
  Antisense Strand to SEQ ID NO: 373465
uaaguagaaacucauaagu

SEQ ID NO: 373467 - RNA, 19 nt, Artificial Sequence
  Description of Artificial Sequence: Synthetic oligonucleotide
  Sense Strand Starting at position 697 of SEQ ID NO: 315676
aaguuugugccucagguaa

SEQ ID NO: 373468 - RNA, 19 nt, Artificial Sequence
  Description of Artificial Sequence: Synthetic oligonucleotide
  Antisense Strand to SEQ ID NO: 373467
uuaccugaggcacaaacuu

SEQ ID NO: 373469 - RNA, 19 nt, Artificial Sequence
  Description of Artificial Sequence: Synthetic oligonucleotide
  Sense Strand Starting at position 697 of SEQ ID NO: 315919
uugccauggccuuauauau

SEQ ID NO: 373470 - RNA, 19 nt, Artificial Sequence
  Description of Artificial Sequence: Synthetic oligonucleotide
  Antisense Strand to SEQ ID NO: 373469
auauauaaggccauggcaa

SEQ ID NO: 373471 - RNA, 19 nt, Artificial Sequence
  Description of Artificial Sequence: Synthetic oligonucleotide
  Sense Strand Starting at position 697 of SEQ ID NO: 316093
aaaguuuggccagacuuga

SEQ ID NO: 373472 - RNA, 19 nt, Artificial Sequence
  Description of Artificial Sequence: Synthetic oligonucleotide
  Antisense Strand to SEQ ID NO: 373471
ucaagucuggccaaacuuu

SEQ ID NO: 373473 - RNA, 19 nt, Artificial Sequence
  Description of Artificial Sequence: Synthetic oligonucleotide
  Sense Strand Starting at position 697 of SEQ ID NO: 316202
cagagaacuguauguccau

SEQ ID NO: 373474 - RNA, 19 nt, Artificial Sequence
  Description of Artificial Sequence: Synthetic oligonucleotide
  Antisense Strand to SEQ ID NO: 373473
auggacauacaguucucug

SEQ ID NO: 373475 - RNA, 19 nt, Artificial Sequence
  Description of Artificial Sequence: Synthetic oligonucleotide
  Sense Strand Starting at position 697 of SEQ ID NO: 316203
agagaacuguauguccaua

SEQ ID NO: 373476 - RNA, 19 nt, Artificial Sequence
  Description of Artificial Sequence: Synthetic oligonucleotide
  Antisense Strand to SEQ ID NO: 373475
uauggacauacaguucucu

SEQ ID NO: 373477 - RNA, 19 nt, Artificial Sequence
  Description of Artificial Sequence: Synthetic oligonucleotide
  Sense Strand Starting at position 697 of SEQ ID NO: 316205
agaacuguauguccauaua

SEQ ID NO: 373478 - RNA, 19 nt, Artificial Sequence
  Description of Artificial Sequence: Synthetic oligonucleotide
  Antisense Strand to SEQ ID NO: 373477
uauauggacauacaguucu

SEQ ID NO: 373479 - RNA, 19 nt, Artificial Sequence
  Description of Artificial Sequence: Synthetic oligonucleotide
  Sense Strand Starting at position 697 of SEQ ID NO: 317249
gagauagguuaagauuuac

SEQ ID NO: 373480 - RNA, 19 nt, Artificial Sequence
  Description of Artificial Sequence: Synthetic oligonucleotide
  Antisense Strand to SEQ ID NO: 373479
guaaaucuuaaccuaucuc

SEQ ID NO: 373481 - RNA, 19 nt, Artificial Sequence
  Description of Artificial Sequence: Synthetic oligonucleotide
  Sense Strand Starting at position 697 of SEQ ID NO: 317281
acugauguccuacaguauc

SEQ ID NO: 373482 - RNA, 19 nt, Artificial Sequence
  Description of Artificial Sequence: Synthetic oligonucleotide
  Antisense Strand to SEQ ID NO: 373481
gauacuguaggacaucagu

SEQ ID NO: 373483 - RNA, 19 nt, Artificial Sequence
  Description of Artificial Sequence: Synthetic oligonucleotide
  Sense Strand Starting at position 697 of SEQ ID NO: 317300
acaaccuugccaugugaua

SEQ ID NO: 373484 - RNA, 19 nt, Artificial Sequence
  Description of Artificial Sequence: Synthetic oligonucleotide
  Antisense Strand to SEQ ID NO: 373483
uaucacauggcaagguugu

SEQ ID NO: 373485 - RNA, 19 nt, Artificial Sequence
  Description of Artificial Sequence: Synthetic oligonucleotide
  Sense Strand Starting at position 697 of SEQ ID NO: 317446
ugugaagcaaugcaugaua

SEQ ID NO: 373486 - RNA, 19 nt, Artificial Sequence
  Description of Artificial Sequence: Synthetic oligonucleotide
  Antisense Strand to SEQ ID NO: 373485
uaucaugcauugcuucaca

SEQ ID NO: 373487 - RNA, 19 nt, Artificial Sequence
  Description of Artificial Sequence: Synthetic oligonucleotide
  Sense Strand Starting at position 697 of SEQ ID NO: 317448
ugaagcaaugcaugauaga

SEQ ID NO: 373488 - RNA, 19 nt, Artificial Sequence
  Description of Artificial Sequence: Synthetic oligonucleotide
  Antisense Strand to SEQ ID NO: 373487
ucuaucaugcauugcuuca

SEQ ID NO: 373489 - RNA, 19 nt, Artificial Sequence
  Description of Artificial Sequence: Synthetic oligonucleotide
  Sense Strand Starting at position 697 of SEQ ID NO: 317494
agcaauauucugggcagaa

SEQ ID NO: 373490 - RNA, 19 nt, Artificial Sequence
  Description of Artificial Sequence: Synthetic oligonucleotide
  Antisense Strand to SEQ ID NO: 373489
uucugcccagaauauugcu

SEQ ID NO: 373491 - RNA, 19 nt, Artificial Sequence
  Description of Artificial Sequence: Synthetic oligonucleotide
  Sense Strand Starting at position 697 of SEQ ID NO: 317495
gcaauauucugggcagaaa

SEQ ID NO: 373492 - RNA, 19 nt, Artificial Sequence
  Description of Artificial Sequence: Synthetic oligonucleotide
  Antisense Strand to SEQ ID NO: 373491
uuucugcccagaauauugc

SEQ ID NO: 373493 - RNA, 19 nt, Artificial Sequence
  Description of Artificial Sequence: Synthetic oligonucleotide
  Sense Strand Starting at position 697 of SEQ ID NO: 317595
agaugugacuuauuccacu

SEQ ID NO: 373494 - RNA, 19 nt, Artificial Sequence
  Description of Artificial Sequence: Synthetic oligonucleotide
  Antisense Strand to SEQ ID NO: 373493
aguggaauaagucacaucu

SEQ ID NO: 373495 - RNA, 19 nt, Artificial Sequence
  Description of Artificial Sequence: Synthetic oligonucleotide
  Sense Strand Starting at position 697 of SEQ ID NO: 317662
uggacuaaaccauguuagu

SEQ ID NO: 373496 - RNA, 19 nt, Artificial Sequence
  Description of Artificial Sequence: Synthetic oligonucleotide
  Antisense Strand to SEQ ID NO: 373495
acuaacaugguuuagucca

SEQ ID NO: 373497 - RNA, 19 nt, Artificial Sequence
  Description of Artificial Sequence: Synthetic oligonucleotide
  Sense Strand Starting at position 697 of SEQ ID NO: 317703
gucuaagcacuugaagauc

SEQ ID NO: 373498 - RNA, 19 nt, Artificial Sequence
  Description of Artificial Sequence: Synthetic oligonucleotide
  Antisense Strand to SEQ ID NO: 373497
gaucuucaagugcuuagac

SEQ ID NO: 373499 - RNA, 19 nt, Artificial Sequence
  Description of Artificial Sequence: Synthetic oligonucleotide
  Sense Strand Starting at position 697 of SEQ ID NO: 317715
gaagaucauuaccagggaa

SEQ ID NO: 373500 - RNA, 19 nt, Artificial Sequence
  Description of Artificial Sequence: Synthetic oligonucleotide
  Antisense Strand to SEQ ID NO: 373499
uucccugguaaugaucuuc

SEQ ID NO: 373501 - RNA, 19 nt, Artificial Sequence
  Description of Artificial Sequence: Synthetic oligonucleotide
  Sense Strand Starting at position 697 of SEQ ID NO: 317825
uguccugacacgugaauaa

SEQ ID NO: 373502 - RNA, 19 nt, Artificial Sequence
  Description of Artificial Sequence: Synthetic oligonucleotide
  Antisense Strand to SEQ ID NO: 373501
uuauucacgugucaggaca

SEQ ID NO: 373503 - RNA, 19 nt, Artificial Sequence
  Description of Artificial Sequence: Synthetic oligonucleotide
  Sense Strand Starting at position 697 of SEQ ID NO: 317855
gguguuuacaaaugguaca

SEQ ID NO: 373504 - RNA, 19 nt, Artificial Sequence
  Description of Artificial Sequence: Synthetic oligonucleotide
  Antisense Strand to SEQ ID NO: 373503
uguaccauuuguaaacacc

SEQ ID NO: 373505 - RNA, 19 nt, Artificial Sequence
  Description of Artificial Sequence: Synthetic oligonucleotide
  Sense Strand Starting at position 697 of SEQ ID NO: 317856
guguuuacaaaugguacau

SEQ ID NO: 373506 - RNA, 19 nt, Artificial Sequence
  Description of Artificial Sequence: Synthetic oligonucleotide
  Antisense Strand to SEQ ID NO: 373505
auguaccauuuguaaacac

SEQ ID NO: 373507 - RNA, 19 nt, Artificial Sequence
  Description of Artificial Sequence: Synthetic oligonucleotide
  Sense Strand Starting at position 697 of SEQ ID NO: 317869
guacauucuccugaccuau

SEQ ID NO: 373508 - RNA, 19 nt, Artificial Sequence
  Description of Artificial Sequence: Synthetic oligonucleotide
  Antisense Strand to SEQ ID NO: 373507
auaggucaggagaauguac

SEQ ID NO: 373509 - RNA, 19 nt, Artificial Sequence
  Description of Artificial Sequence: Synthetic oligonucleotide
  Sense Strand Starting at position 697 of SEQ ID NO: 317969
cgcagacacuuugucaaua

SEQ ID NO: 373510 - RNA, 19 nt, Artificial Sequence
  Description of Artificial Sequence: Synthetic oligonucleotide
  Antisense Strand to SEQ ID NO: 373509
uauugacaaagugucugcg

SEQ ID NO: 373511 - RNA, 19 nt, Artificial Sequence
  Description of Artificial Sequence: Synthetic oligonucleotide
  Sense Strand Starting at position 697 of SEQ ID NO: 317970
gcagacacuuugucaauau

SEQ ID NO: 373512 - RNA, 19 nt, Artificial Sequence
  Description of Artificial Sequence: Synthetic oligonucleotide
  Antisense Strand to SEQ ID NO: 373511
auauugacaaagugucugc

SEQ ID NO: 373513 - RNA, 19 nt, Artificial Sequence
  Description of Artificial Sequence: Synthetic oligonucleotide
  Sense Strand Starting at position 697 of SEQ ID NO: 318083
guugucagugugucuggua

SEQ ID NO: 373514 - RNA, 19 nt, Artificial Sequence
  Description of Artificial Sequence: Synthetic oligonucleotide
  Antisense Strand to SEQ ID NO: 373513
uaccagacacacugacaac

SEQ ID NO: 373515 - RNA, 19 nt, Artificial Sequence
  Description of Artificial Sequence: Synthetic oligonucleotide
  Sense Strand Starting at position 697 of SEQ ID NO: 318127
aagugauuccaucgcagaa

SEQ ID NO: 373516 - RNA, 19 nt, Artificial Sequence
  Description of Artificial Sequence: Synthetic oligonucleotide
  Antisense Strand to SEQ ID NO: 373515
uucugcgauggaaucacuu

SEQ ID NO: 373517 - RNA, 19 nt, Artificial Sequence
  Description of Artificial Sequence: Synthetic oligonucleotide
  Sense Strand Starting at position 697 of SEQ ID NO: 318170
ugauuugagcagcgugaug

SEQ ID NO: 373518 - RNA, 19 nt, Artificial Sequence
  Description of Artificial Sequence: Synthetic oligonucleotide
  Antisense Strand to SEQ ID NO: 373517
caucacgcugcucaaauca

SEQ ID NO: 373519 - RNA, 19 nt, Artificial Sequence
  Description of Artificial Sequence: Synthetic oligonucleotide
  Sense Strand Starting at position 697 of SEQ ID NO: 318182
cgugaugcacuucagaagu

SEQ ID NO: 373520 - RNA, 19 nt, Artificial Sequence
  Description of Artificial Sequence: Synthetic oligonucleotide
  Antisense Strand to SEQ ID NO: 373519
acuucugaagugcaucacg

SEQ ID NO: 373521 - RNA, 19 nt, Artificial Sequence
  Description of Artificial Sequence: Synthetic oligonucleotide
  Sense Strand Starting at position 697 of SEQ ID NO: 318246
uugccugaugaucaguuaa

SEQ ID NO: 373522 - RNA, 19 nt, Artificial Sequence
  Description of Artificial Sequence: Synthetic oligonucleotide
  Antisense Strand to SEQ ID NO: 373521
uuaacugaucaucaggcaa

SEQ ID NO: 373523 - RNA, 19 nt, Artificial Sequence
  Description of Artificial Sequence: Synthetic oligonucleotide
  Sense Strand Starting at position 697 of SEQ ID NO: 318248
gccugaugaucaguuaacu

SEQ ID NO: 373524 - RNA, 19 nt, Artificial Sequence
  Description of Artificial Sequence: Synthetic oligonucleotide
  Antisense Strand to SEQ ID NO: 373523
aguuaacugaucaucaggc

SEQ ID NO: 373525 - RNA, 19 nt, Artificial Sequence
  Description of Artificial Sequence: Synthetic oligonucleotide
  Sense Strand Starting at position 697 of SEQ ID NO: 318354
guuugaauguugccaauga

SEQ ID NO: 373526 - RNA, 19 nt, Artificial Sequence
  Description of Artificial Sequence: Synthetic oligonucleotide
  Antisense Strand to SEQ ID NO: 373525
ucauuggcaacauucaaac

SEQ ID NO: 373527 - RNA, 19 nt, Artificial Sequence
  Description of Artificial Sequence: Synthetic oligonucleotide
  Sense Strand Starting at position 697 of SEQ ID NO: 318358
gaauguugccaaugaggaa

SEQ ID NO: 373528 - RNA, 19 nt, Artificial Sequence
  Description of Artificial Sequence: Synthetic oligonucleotide
  Antisense Strand to SEQ ID NO: 373527
uuccucauuggcaacauuc

SEQ ID NO: 373529 - RNA, 19 nt, Artificial Sequence
  Description of Artificial Sequence: Synthetic oligonucleotide
  Sense Strand Starting at position 697 of SEQ ID NO: 318425
acaguaugauaacuaguau

SEQ ID NO: 373530 - RNA, 19 nt, Artificial Sequence
  Description of Artificial Sequence: Synthetic oligonucleotide
  Antisense Strand to SEQ ID NO: 373529
auacuaguuaucauacugu

SEQ ID NO: 373531 - RNA, 19 nt, Artificial Sequence
  Description of Artificial Sequence: Synthetic oligonucleotide
  Sense Strand Starting at position 697 of SEQ ID NO: 318436
acuaguauuugaugauacu

SEQ ID NO: 373532 - RNA, 19 nt, Artificial Sequence
  Description of Artificial Sequence: Synthetic oligonucleotide
  Antisense Strand to SEQ ID NO: 373531
aguaucaucaaauacuagu

SEQ ID NO: 373533 - RNA, 19 nt, Artificial Sequence
  Description of Artificial Sequence: Synthetic oligonucleotide
  Sense Strand Starting at position 697 of SEQ ID NO: 318473
gcucuauuggcauauggua

SEQ ID NO: 373534 - RNA, 19 nt, Artificial Sequence
  Description of Artificial Sequence: Synthetic oligonucleotide
  Antisense Strand to SEQ ID NO: 373533
uaccauaugccaauagagc

SEQ ID NO: 373535 - RNA, 19 nt, Artificial Sequence
  Description of Artificial Sequence: Synthetic oligonucleotide
  Sense Strand Starting at position 697 of SEQ ID NO: 319173
cugggugauucuccuggaa

SEQ ID NO: 373536 - RNA, 19 nt, Artificial Sequence
  Description of Artificial Sequence: Synthetic oligonucleotide
  Antisense Strand to SEQ ID NO: 373535
uuccaggagaaucacccag

SEQ ID NO: 373537 - RNA, 19 nt, Artificial Sequence
  Description of Artificial Sequence: Synthetic oligonucleotide
  Sense Strand Starting at position 697 of SEQ ID NO: 319176
ggugauucuccuggaauca

SEQ ID NO: 373538 - RNA, 19 nt, Artificial Sequence
  Description of Artificial Sequence: Synthetic oligonucleotide
  Antisense Strand to SEQ ID NO: 373537
ugauuccaggagaaucacc

SEQ ID NO: 373539 - RNA, 19 nt, Artificial Sequence
  Description of Artificial Sequence: Synthetic oligonucleotide
  Sense Strand Starting at position 697 of SEQ ID NO: 319177
gugauucuccuggaaucac

SEQ ID NO: 373540 - RNA, 19 nt, Artificial Sequence
  Description of Artificial Sequence: Synthetic oligonucleotide
  Antisense Strand to SEQ ID NO: 373539
gugauuccaggagaaucac

SEQ ID NO: 373541 - RNA, 19 nt, Artificial Sequence
  Description of Artificial Sequence: Synthetic oligonucleotide
  Sense Strand Starting at position 698 of SEQ ID NO: 315407
acuugaggauaguucuuua

SEQ ID NO: 373542 - RNA, 19 nt, Artificial Sequence
  Description of Artificial Sequence: Synthetic oligonucleotide
  Antisense Strand to SEQ ID NO: 373541
uaaagaacuauccucaagu

SEQ ID NO: 373543 - RNA, 19 nt, Artificial Sequence
  Description of Artificial Sequence: Synthetic oligonucleotide
  Sense Strand Starting at position 698 of SEQ ID NO: 315410
ugaggauaguucuuuagac

SEQ ID NO: 373544 - RNA, 19 nt, Artificial Sequence
  Description of Artificial Sequence: Synthetic oligonucleotide
  Antisense Strand to SEQ ID NO: 373543
gucuaaagaacuauccuca

SEQ ID NO: 373545 - RNA, 19 nt, Artificial Sequence
  Description of Artificial Sequence: Synthetic oligonucleotide
  Sense Strand Starting at position 698 of SEQ ID NO: 315411
gaggauaguucuuuagaca

SEQ ID NO: 373546 - RNA, 19 nt, Artificial Sequence
  Description of Artificial Sequence: Synthetic oligonucleotide
  Antisense Strand to SEQ ID NO: 373545
ugucuaaagaacuauccuc

SEQ ID NO: 373547 - RNA, 19 nt, Artificial Sequence
  Description of Artificial Sequence: Synthetic oligonucleotide
  Sense Strand Starting at position 698 of SEQ ID NO: 315978
ucauauaaaugguugaguu

SEQ ID NO: 373548 - RNA, 19 nt, Artificial Sequence
  Description of Artificial Sequence: Synthetic oligonucleotide
  Antisense Strand to SEQ ID NO: 373547
aacucaaccauuuauauga

SEQ ID NO: 373549 - RNA, 19 nt, Artificial Sequence
  Description of Artificial Sequence: Synthetic oligonucleotide
  Sense Strand Starting at position 698 of SEQ ID NO: 315979
cauauaaaugguugaguuu

SEQ ID NO: 373550 - RNA, 19 nt, Artificial Sequence
  Description of Artificial Sequence: Synthetic oligonucleotide
  Antisense Strand to SEQ ID NO: 373549
aaacucaaccauuuauaug

SEQ ID NO: 373551 - RNA, 19 nt, Artificial Sequence
  Description of Artificial Sequence: Synthetic oligonucleotide
  Sense Strand Starting at position 698 of SEQ ID NO: 315985
aaugguugaguuugcauuu

SEQ ID NO: 373552 - RNA, 19 nt, Artificial Sequence
  Description of Artificial Sequence: Synthetic oligonucleotide
  Antisense Strand to SEQ ID NO: 373551
aaaugcaaacucaaccauu

SEQ ID NO: 373553 - RNA, 19 nt, Artificial Sequence
  Description of Artificial Sequence: Synthetic oligonucleotide
  Sense Strand Starting at position 698 of SEQ ID NO: 315986
augguugaguuugcauuua

SEQ ID NO: 373554 - RNA, 19 nt, Artificial Sequence
  Description of Artificial Sequence: Synthetic oligonucleotide
  Antisense Strand to SEQ ID NO: 373553
uaaaugcaaacucaaccau

SEQ ID NO: 373555 - RNA, 19 nt, Artificial Sequence
  Description of Artificial Sequence: Synthetic oligonucleotide
  Sense Strand Starting at position 698 of SEQ ID NO: 316001
uuuauagacugaucuuaug

SEQ ID NO: 373556 - RNA, 19 nt, Artificial Sequence
  Description of Artificial Sequence: Synthetic oligonucleotide
  Antisense Strand to SEQ ID NO: 373555
cauaagaucagucuauaaa

SEQ ID NO: 373557 - RNA, 19 nt, Artificial Sequence
  Description of Artificial Sequence: Synthetic oligonucleotide
  Sense Strand Starting at position 698 of SEQ ID NO: 316019
guaccagauugugcuuaaa

SEQ ID NO: 373558 - RNA, 19 nt, Artificial Sequence
  Description of Artificial Sequence: Synthetic oligonucleotide
  Antisense Strand to SEQ ID NO: 373557
uuuaagcacaaucugguac

SEQ ID NO: 373559 - RNA, 19 nt, Artificial Sequence
  Description of Artificial Sequence: Synthetic oligonucleotide
  Sense Strand Starting at position 698 of SEQ ID NO: 316022
ccagauugugcuuaaaccu

SEQ ID NO: 373560 - RNA, 19 nt, Artificial Sequence
  Description of Artificial Sequence: Synthetic oligonucleotide
  Antisense Strand to SEQ ID NO: 373559
agguuuaagcacaaucugg

SEQ ID NO: 373561 - RNA, 19 nt, Artificial Sequence
  Description of Artificial Sequence: Synthetic oligonucleotide
  Sense Strand Starting at position 698 of SEQ ID NO: 316080
guacucguaucaucuccaa

SEQ ID NO: 373562 - RNA, 19 nt, Artificial Sequence
  Description of Artificial Sequence: Synthetic oligonucleotide
  Antisense Strand to SEQ ID NO: 373561
uuggagaugauacgaguac

SEQ ID NO: 373563 - RNA, 19 nt, Artificial Sequence
  Description of Artificial Sequence: Synthetic oligonucleotide
  Sense Strand Starting at position 698 of SEQ ID NO: 316149
ccuagugaguagcuaacua

SEQ ID NO: 373564 - RNA, 19 nt, Artificial Sequence
  Description of Artificial Sequence: Synthetic oligonucleotide
  Antisense Strand to SEQ ID NO: 373563
uaguuagcuacucacuagg

SEQ ID NO: 373565 - RNA, 19 nt, Artificial Sequence
  Description of Artificial Sequence: Synthetic oligonucleotide
  Sense Strand Starting at position 698 of SEQ ID NO: 316186
cagagucugugcccuugaa

SEQ ID NO: 373566 - RNA, 19 nt, Artificial Sequence
  Description of Artificial Sequence: Synthetic oligonucleotide
  Antisense Strand to SEQ ID NO: 373565
uucaagggcacagacucug

SEQ ID NO: 373567 - RNA, 19 nt, Artificial Sequence
  Description of Artificial Sequence: Synthetic oligonucleotide
  Sense Strand Starting at position 698 of SEQ ID NO: 316190
gucugugcccuugaacacu

SEQ ID NO: 373568 - RNA, 19 nt, Artificial Sequence
  Description of Artificial Sequence: Synthetic oligonucleotide
  Antisense Strand to SEQ ID NO: 373567
aguguucaagggcacagac

SEQ ID NO: 373569 - RNA, 19 nt, Artificial Sequence
  Description of Artificial Sequence: Synthetic oligonucleotide
  Sense Strand Starting at position 698 of SEQ ID NO: 316231
gaugaaggaugauaacgau

SEQ ID NO: 373570 - RNA, 19 nt, Artificial Sequence
  Description of Artificial Sequence: Synthetic oligonucleotide
  Antisense Strand to SEQ ID NO: 373569
aucguuaucauccuucauc

SEQ ID NO: 373571 - RNA, 19 nt, Artificial Sequence
  Description of Artificial Sequence: Synthetic oligonucleotide
  Sense Strand Starting at position 698 of SEQ ID NO: 316234
gaaggaugauaacgaugaa

SEQ ID NO: 373572 - RNA, 19 nt, Artificial Sequence
  Description of Artificial Sequence: Synthetic oligonucleotide
  Antisense Strand to SEQ ID NO: 373571
uucaucguuaucauccuuc

SEQ ID NO: 373573 - RNA, 19 nt, Artificial Sequence
  Description of Artificial Sequence: Synthetic oligonucleotide
  Sense Strand Starting at position 698 of SEQ ID NO: 316237
ggaugauaacgaugaagca

SEQ ID NO: 373574 - RNA, 19 nt, Artificial Sequence
  Description of Artificial Sequence: Synthetic oligonucleotide
  Antisense Strand to SEQ ID NO: 373573
ugcuucaucguuaucaucc

SEQ ID NO: 373575 - RNA, 19 nt, Artificial Sequence
  Description of Artificial Sequence: Synthetic oligonucleotide
  Sense Strand Starting at position 698 of SEQ ID NO: 316311
aguuauugccaccaaagcu

SEQ ID NO: 373576 - RNA, 19 nt, Artificial Sequence
  Description of Artificial Sequence: Synthetic oligonucleotide
  Antisense Strand to SEQ ID NO: 373575
agcuuugguggcaauaacu

SEQ ID NO: 373577 - RNA, 19 nt, Artificial Sequence
  Description of Artificial Sequence: Synthetic oligonucleotide
  Sense Strand Starting at position 698 of SEQ ID NO: 316353
gcuggagucaggugagcua

SEQ ID NO: 373578 - RNA, 19 nt, Artificial Sequence
  Description of Artificial Sequence: Synthetic oligonucleotide
  Antisense Strand to SEQ ID NO: 373577
uagcucaccugacuccagc

SEQ ID NO: 373579 - RNA, 19 nt, Artificial Sequence
  Description of Artificial Sequence: Synthetic oligonucleotide
  Sense Strand Starting at position 698 of SEQ ID NO: 316364
gugagcuagacugagucau

SEQ ID NO: 373580 - RNA, 19 nt, Artificial Sequence
  Description of Artificial Sequence: Synthetic oligonucleotide
  Antisense Strand to SEQ ID NO: 373579
augacucagucuagcucac

SEQ ID NO: 373581 - RNA, 19 nt, Artificial Sequence
  Description of Artificial Sequence: Synthetic oligonucleotide
  Sense Strand Starting at position 698 of SEQ ID NO: 316368
gcuagacugagucaucuga

SEQ ID NO: 373582 - RNA, 19 nt, Artificial Sequence
  Description of Artificial Sequence: Synthetic oligonucleotide
  Antisense Strand to SEQ ID NO: 373581
ucagaugacucagucuagc

SEQ ID NO: 373583 - RNA, 19 nt, Artificial Sequence
  Description of Artificial Sequence: Synthetic oligonucleotide
  Sense Strand Starting at position 698 of SEQ ID NO: 316370
uagacugagucaucugaua

SEQ ID NO: 373584 - RNA, 19 nt, Artificial Sequence
  Description of Artificial Sequence: Synthetic oligonucleotide
  Antisense Strand to SEQ ID NO: 373583
uaucagaugacucagucua

SEQ ID NO: 373585 - RNA, 19 nt, Artificial Sequence
  Description of Artificial Sequence: Synthetic oligonucleotide
  Sense Strand Starting at position 698 of SEQ ID NO: 316500
ccaggagucuuucucugaa

SEQ ID NO: 373586 - RNA, 19 nt, Artificial Sequence
  Description of Artificial Sequence: Synthetic oligonucleotide
  Antisense Strand to SEQ ID NO: 373585
uucagagaaagacuccugg

SEQ ID NO: 373587 - RNA, 19 nt, Artificial Sequence
  Description of Artificial Sequence: Synthetic oligonucleotide
  Sense Strand Starting at position 698 of SEQ ID NO: 316502
aggagucuuucucugaacu

SEQ ID NO: 373588 - RNA, 19 nt, Artificial Sequence
  Description of Artificial Sequence: Synthetic oligonucleotide
  Antisense Strand to SEQ ID NO: 373587
aguucagagaaagacuccu

SEQ ID NO: 373589 - RNA, 19 nt, Artificial Sequence
  Description of Artificial Sequence: Synthetic oligonucleotide
  Sense Strand Starting at position 698 of SEQ ID NO: 316503
ggagucuuucucugaacug

SEQ ID NO: 373590 - RNA, 19 nt, Artificial Sequence
  Description of Artificial Sequence: Synthetic oligonucleotide
  Antisense Strand to SEQ ID NO: 373589
caguucagagaaagacucc

SEQ ID NO: 373591 - RNA, 19 nt, Artificial Sequence
  Description of Artificial Sequence: Synthetic oligonucleotide
  Sense Strand Starting at position 698 of SEQ ID NO: 316590
cuguguuucguugaggaag

SEQ ID NO: 373592 - RNA, 19 nt, Artificial Sequence
  Description of Artificial Sequence: Synthetic oligonucleotide
  Antisense Strand to SEQ ID NO: 373591
cuuccucaacgaaacacag

SEQ ID NO: 373593 - RNA, 19 nt, Artificial Sequence
  Description of Artificial Sequence: Synthetic oligonucleotide
  Sense Strand Starting at position 698 of SEQ ID NO: 316604
ggaagucguugaucccuuu

SEQ ID NO: 373594 - RNA, 19 nt, Artificial Sequence
  Description of Artificial Sequence: Synthetic oligonucleotide
  Antisense Strand to SEQ ID NO: 373593
aaagggaucaacgacuucc

SEQ ID NO: 373595 - RNA, 19 nt, Artificial Sequence
  Description of Artificial Sequence: Synthetic oligonucleotide
  Sense Strand Starting at position 698 of SEQ ID NO: 316670
cugcgaaagcccgauguaa

SEQ ID NO: 373596 - RNA, 19 nt, Artificial Sequence
  Description of Artificial Sequence: Synthetic oligonucleotide
  Antisense Strand to SEQ ID NO: 373595
uuacaucgggcuuucgcag

SEQ ID NO: 373597 - RNA, 19 nt, Artificial Sequence
  Description of Artificial Sequence: Synthetic oligonucleotide
  Sense Strand Starting at position 698 of SEQ ID NO: 316672
gcgaaagcccgauguaaac

SEQ ID NO: 373598 - RNA, 19 nt, Artificial Sequence
  Description of Artificial Sequence: Synthetic oligonucleotide
  Antisense Strand to SEQ ID NO: 373597
guuuacaucgggcuuucgc

SEQ ID NO: 373599 - RNA, 19 nt, Artificial Sequence
  Description of Artificial Sequence: Synthetic oligonucleotide
  Sense Strand Starting at position 698 of SEQ ID NO: 316733
cgggcccaguccucagaaa

SEQ ID NO: 373600 - RNA, 19 nt, Artificial Sequence
  Description of Artificial Sequence: Synthetic oligonucleotide
  Antisense Strand to SEQ ID NO: 373599
uuucugaggacugggcccg

SEQ ID NO: 373601 - RNA, 19 nt, Artificial Sequence
  Description of Artificial Sequence: Synthetic oligonucleotide
  Sense Strand Starting at position 698 of SEQ ID NO: 316734
gggcccaguccucagaaau

SEQ ID NO: 373602 - RNA, 19 nt, Artificial Sequence
  Description of Artificial Sequence: Synthetic oligonucleotide
  Antisense Strand to SEQ ID NO: 373601
auuucugaggacugggccc

SEQ ID NO: 373603 - RNA, 19 nt, Artificial Sequence
  Description of Artificial Sequence: Synthetic oligonucleotide
  Sense Strand Starting at position 698 of SEQ ID NO: 317514
uagugcucucagggaugaa

SEQ ID NO: 373604 - RNA, 19 nt, Artificial Sequence
  Description of Artificial Sequence: Synthetic oligonucleotide
  Antisense Strand to SEQ ID NO: 373603
uucaucccugagagcacua

SEQ ID NO: 373605 - RNA, 19 nt, Artificial Sequence
  Description of Artificial Sequence: Synthetic oligonucleotide
  Sense Strand Starting at position 698 of SEQ ID NO: 317697
gggagaaauuagggaagau

SEQ ID NO: 373606 - RNA, 19 nt, Artificial Sequence
  Description of Artificial Sequence: Synthetic oligonucleotide
  Antisense Strand to SEQ ID NO: 373605
aucuucccuaauuucuccc

SEQ ID NO: 373607 - RNA, 19 nt, Artificial Sequence
  Description of Artificial Sequence: Synthetic oligonucleotide
  Sense Strand Starting at position 698 of SEQ ID NO: 317736
ucaggaaaccagugucaaa

SEQ ID NO: 373608 - RNA, 19 nt, Artificial Sequence
  Description of Artificial Sequence: Synthetic oligonucleotide
  Antisense Strand to SEQ ID NO: 373607
uuugacacugguuuccuga

SEQ ID NO: 373609 - RNA, 19 nt, Artificial Sequence
  Description of Artificial Sequence: Synthetic oligonucleotide
  Sense Strand Starting at position 698 of SEQ ID NO: 317792
guuaucuaaucagaaauag

SEQ ID NO: 373610 - RNA, 19 nt, Artificial Sequence
  Description of Artificial Sequence: Synthetic oligonucleotide
  Antisense Strand to SEQ ID NO: 373609
cuauuucugauuagauaac

SEQ ID NO: 373611 - RNA, 19 nt, Artificial Sequence
  Description of Artificial Sequence: Synthetic oligonucleotide
  Sense Strand Starting at position 698 of SEQ ID NO: 317817
augcacauuugacaugauu

SEQ ID NO: 373612 - RNA, 19 nt, Artificial Sequence
  Description of Artificial Sequence: Synthetic oligonucleotide
  Antisense Strand to SEQ ID NO: 373611
aaucaugucaaaugugcau

SEQ ID NO: 373613 - RNA, 19 nt, Artificial Sequence
  Description of Artificial Sequence: Synthetic oligonucleotide
  Sense Strand Starting at position 698 of SEQ ID NO: 317879
auagauuuguaagaugcua

SEQ ID NO: 373614 - RNA, 19 nt, Artificial Sequence
  Description of Artificial Sequence: Synthetic oligonucleotide
  Antisense Strand to SEQ ID NO: 373613
uagcaucuuacaaaucuau

SEQ ID NO: 373615 - RNA, 19 nt, Artificial Sequence
  Description of Artificial Sequence: Synthetic oligonucleotide
  Sense Strand Starting at position 698 of SEQ ID NO: 317937
aauggaugauguuacaaga

SEQ ID NO: 373616 - RNA, 19 nt, Artificial Sequence
  Description of Artificial Sequence: Synthetic oligonucleotide
  Antisense Strand to SEQ ID NO: 373615
ucuuguaacaucauccauu

SEQ ID NO: 373617 - RNA, 19 nt, Artificial Sequence
  Description of Artificial Sequence: Synthetic oligonucleotide
  Sense Strand Starting at position 698 of SEQ ID NO: 318024
agagaaguuuaucaaagaa

SEQ ID NO: 373618 - RNA, 19 nt, Artificial Sequence
  Description of Artificial Sequence: Synthetic oligonucleotide
  Antisense Strand to SEQ ID NO: 373617
uucuuugauaaacuucucu

SEQ ID NO: 373619 - RNA, 19 nt, Artificial Sequence
  Description of Artificial Sequence: Synthetic oligonucleotide
  Sense Strand Starting at position 698 of SEQ ID NO: 318284
auguaaguaucaguggaaa

SEQ ID NO: 373620 - RNA, 19 nt, Artificial Sequence
  Description of Artificial Sequence: Synthetic oligonucleotide
  Antisense Strand to SEQ ID NO: 373619
uuuccacugauacuuacau

SEQ ID NO: 373621 - RNA, 19 nt, Artificial Sequence
  Description of Artificial Sequence: Synthetic oligonucleotide
  Sense Strand Starting at position 699 of SEQ ID NO: 315237
gagccugcuccagagaaau

SEQ ID NO: 373622 - RNA, 19 nt, Artificial Sequence
  Description of Artificial Sequence: Synthetic oligonucleotide
  Antisense Strand to SEQ ID NO: 373621
auuucucuggagcaggcuc

SEQ ID NO: 373623 - RNA, 19 nt, Artificial Sequence
  Description of Artificial Sequence: Synthetic oligonucleotide
  Sense Strand Starting at position 699 of SEQ ID NO: 315239
gccugcuccagagaaauag

SEQ ID NO: 373624 - RNA, 19 nt, Artificial Sequence
  Description of Artificial Sequence: Synthetic oligonucleotide
  Antisense Strand to SEQ ID NO: 373623
cuauuucucuggagcaggc

SEQ ID NO: 373625 - RNA, 19 nt, Artificial Sequence
  Description of Artificial Sequence: Synthetic oligonucleotide
  Sense Strand Starting at position 699 of SEQ ID NO: 315288
ccucguuuaacagauggga

SEQ ID NO: 373626 - RNA, 19 nt, Artificial Sequence
  Description of Artificial Sequence: Synthetic oligonucleotide
  Antisense Strand to SEQ ID NO: 373625
ucccaucuguuaaacgagg

SEQ ID NO: 373627 - RNA, 19 nt, Artificial Sequence
  Description of Artificial Sequence: Synthetic oligonucleotide
  Sense Strand Starting at position 699 of SEQ ID NO: 315305
gaggcuucgcccugagaga

SEQ ID NO: 373628 - RNA, 19 nt, Artificial Sequence
  Description of Artificial Sequence: Synthetic oligonucleotide
  Antisense Strand to SEQ ID NO: 373627
ucucucagggcgaagccuc

SEQ ID NO: 373629 - RNA, 19 nt, Artificial Sequence
  Description of Artificial Sequence: Synthetic oligonucleotide
  Sense Strand Starting at position 699 of SEQ ID NO: 315345
ucuuuaguggcgugacaga

SEQ ID NO: 373630 - RNA, 19 nt, Artificial Sequence
  Description of Artificial Sequence: Synthetic oligonucleotide
  Antisense Strand to SEQ ID NO: 373629
ucugucacgccacuaaaga

SEQ ID NO: 373631 - RNA, 19 nt, Artificial Sequence
  Description of Artificial Sequence: Synthetic oligonucleotide
  Sense Strand Starting at position 699 of SEQ ID NO: 315372
ggauaugucuaauaacuga

SEQ ID NO: 373632 - RNA, 19 nt, Artificial Sequence
  Description of Artificial Sequence: Synthetic oligonucleotide
  Antisense Strand to SEQ ID NO: 373631
ucaguuauuagacauaucc

SEQ ID NO: 373633 - RNA, 19 nt, Artificial Sequence
  Description of Artificial Sequence: Synthetic oligonucleotide
  Sense Strand Starting at position 699 of SEQ ID NO: 315386
acugaaaugucuguauaau

SEQ ID NO: 373634 - RNA, 19 nt, Artificial Sequence
  Description of Artificial Sequence: Synthetic oligonucleotide
  Antisense Strand to SEQ ID NO: 373633
auuauacagacauuucagu

SEQ ID NO: 373635 - RNA, 19 nt, Artificial Sequence
  Description of Artificial Sequence: Synthetic oligonucleotide
  Sense Strand Starting at position 699 of SEQ ID NO: 315387
cugaaaugucuguauaauc

SEQ ID NO: 373636 - RNA, 19 nt, Artificial Sequence
  Description of Artificial Sequence: Synthetic oligonucleotide
  Antisense Strand to SEQ ID NO: 373635
gauuauacagacauuucag

SEQ ID NO: 373637 - RNA, 19 nt, Artificial Sequence
  Description of Artificial Sequence: Synthetic oligonucleotide
  Sense Strand Starting at position 699 of SEQ ID NO: 315398
guauaaucacaguguacac

SEQ ID NO: 373638 - RNA, 19 nt, Artificial Sequence
  Description of Artificial Sequence: Synthetic oligonucleotide
  Antisense Strand to SEQ ID NO: 373637
guguacacugugauuauac

SEQ ID NO: 373639 - RNA, 19 nt, Artificial Sequence
  Description of Artificial Sequence: Synthetic oligonucleotide
  Sense Strand Starting at position 699 of SEQ ID NO: 315459
cuuugagcugagugggaaa

SEQ ID NO: 373640 - RNA, 19 nt, Artificial Sequence
  Description of Artificial Sequence: Synthetic oligonucleotide
  Antisense Strand to SEQ ID NO: 373639
uuucccacucagcucaaag

SEQ ID NO: 373641 - RNA, 19 nt, Artificial Sequence
  Description of Artificial Sequence: Synthetic oligonucleotide
  Sense Strand Starting at position 699 of SEQ ID NO: 315509
ggucgaaugacuuguccag

SEQ ID NO: 373642 - RNA, 19 nt, Artificial Sequence
  Description of Artificial Sequence: Synthetic oligonucleotide
  Antisense Strand to SEQ ID NO: 373641
cuggacaagucauucgacc

SEQ ID NO: 373643 - RNA, 19 nt, Artificial Sequence
  Description of Artificial Sequence: Synthetic oligonucleotide
  Sense Strand Starting at position 699 of SEQ ID NO: 315812
ugggccuucccauauaaau

SEQ ID NO: 373644 - RNA, 19 nt, Artificial Sequence
  Description of Artificial Sequence: Synthetic oligonucleotide
  Antisense Strand to SEQ ID NO: 373643
auuuauaugggaaggccca

SEQ ID NO: 373645 - RNA, 19 nt, Artificial Sequence
  Description of Artificial Sequence: Synthetic oligonucleotide
  Sense Strand Starting at position 699 of SEQ ID NO: 315848
uccucacaaguguaucauu

SEQ ID NO: 373646 - RNA, 19 nt, Artificial Sequence
  Description of Artificial Sequence: Synthetic oligonucleotide
  Antisense Strand to SEQ ID NO: 373645
aaugauacacuugugagga

SEQ ID NO: 373647 - RNA, 19 nt, Artificial Sequence
  Description of Artificial Sequence: Synthetic oligonucleotide
  Sense Strand Starting at position 699 of SEQ ID NO: 315851
ucacaaguguaucauuuga

SEQ ID NO: 373648 - RNA, 19 nt, Artificial Sequence
  Description of Artificial Sequence: Synthetic oligonucleotide
  Antisense Strand to SEQ ID NO: 373647
ucaaaugauacacuuguga

SEQ ID NO: 373649 - RNA, 19 nt, Artificial Sequence
  Description of Artificial Sequence: Synthetic oligonucleotide
  Sense Strand Starting at position 699 of SEQ ID NO: 315856
aguguaucauuugagaugu

SEQ ID NO: 373650 - RNA, 19 nt, Artificial Sequence
  Description of Artificial Sequence: Synthetic oligonucleotide
  Antisense Strand to SEQ ID NO: 373649
acaucucaaaugauacacu

SEQ ID NO: 373651 - RNA, 19 nt, Artificial Sequence
  Description of Artificial Sequence: Synthetic oligonucleotide
  Sense Strand Starting at position 699 of SEQ ID NO: 315866
uugagaugugcacgauuau

SEQ ID NO: 373652 - RNA, 19 nt, Artificial Sequence
  Description of Artificial Sequence: Synthetic oligonucleotide
  Antisense Strand to SEQ ID NO: 373651
auaaucgugcacaucucaa

SEQ ID NO: 373653 - RNA, 19 nt, Artificial Sequence
  Description of Artificial Sequence: Synthetic oligonucleotide
  Sense Strand Starting at position 699 of SEQ ID NO: 315867
ugagaugugcacgauuauu

SEQ ID NO: 373654 - RNA, 19 nt, Artificial Sequence
  Description of Artificial Sequence: Synthetic oligonucleotide
  Antisense Strand to SEQ ID NO: 373653
aauaaucgugcacaucuca

SEQ ID NO: 373655 - RNA, 19 nt, Artificial Sequence
  Description of Artificial Sequence: Synthetic oligonucleotide
  Sense Strand Starting at position 699 of SEQ ID NO: 315878
cgauuauuacagcaaacac

SEQ ID NO: 373656 - RNA, 19 nt, Artificial Sequence
  Description of Artificial Sequence: Synthetic oligonucleotide
  Antisense Strand to SEQ ID NO: 373655
guguuugcuguaauaaucg

SEQ ID NO: 373657 - RNA, 19 nt, Artificial Sequence
  Description of Artificial Sequence: Synthetic oligonucleotide
  Sense Strand Starting at position 699 of SEQ ID NO: 315970
ggcaaauaguuccuggcuu

SEQ ID NO: 373658 - RNA, 19 nt, Artificial Sequence
  Description of Artificial Sequence: Synthetic oligonucleotide
  Antisense Strand to SEQ ID NO: 373657
aagccaggaacuauuugcc

SEQ ID NO: 373659 - RNA, 19 nt, Artificial Sequence
  Description of Artificial Sequence: Synthetic oligonucleotide
  Sense Strand Starting at position 699 of SEQ ID NO: 315977
aguuccuggcuuuaucaau

SEQ ID NO: 373660 - RNA, 19 nt, Artificial Sequence
  Description of Artificial Sequence: Synthetic oligonucleotide
  Antisense Strand to SEQ ID NO: 373659
auugauaaagccaggaacu

SEQ ID NO: 373661 - RNA, 19 nt, Artificial Sequence
  Description of Artificial Sequence: Synthetic oligonucleotide
  Sense Strand Starting at position 699 of SEQ ID NO: 316084
agguucugaaccugaaugu

SEQ ID NO: 373662 - RNA, 19 nt, Artificial Sequence
  Description of Artificial Sequence: Synthetic oligonucleotide
  Antisense Strand to SEQ ID NO: 373661
acauucagguucagaaccu

SEQ ID NO: 373663 - RNA, 19 nt, Artificial Sequence
  Description of Artificial Sequence: Synthetic oligonucleotide
  Sense Strand Starting at position 699 of SEQ ID NO: 316093
accugaaugugugucuuua

SEQ ID NO: 373664 - RNA, 19 nt, Artificial Sequence
  Description of Artificial Sequence: Synthetic oligonucleotide
  Antisense Strand to SEQ ID NO: 373663
uaaagacacacauucaggu

SEQ ID NO: 373665 - RNA, 19 nt, Artificial Sequence
  Description of Artificial Sequence: Synthetic oligonucleotide
  Sense Strand Starting at position 699 of SEQ ID NO: 316095
cugaaugugugucuuuacu

SEQ ID NO: 373666 - RNA, 19 nt, Artificial Sequence
  Description of Artificial Sequence: Synthetic oligonucleotide
  Antisense Strand to SEQ ID NO: 373665
aguaaagacacacauucag

SEQ ID NO: 373667 - RNA, 19 nt, Artificial Sequence
  Description of Artificial Sequence: Synthetic oligonucleotide
  Sense Strand Starting at position 699 of SEQ ID NO: 316097
gaaugugugucuuuacuga

SEQ ID NO: 373668 - RNA, 19 nt, Artificial Sequence
  Description of Artificial Sequence: Synthetic oligonucleotide
  Antisense Strand to SEQ ID NO: 373667
ucaguaaagacacacauuc

SEQ ID NO: 373669 - RNA, 19 nt, Artificial Sequence
  Description of Artificial Sequence: Synthetic oligonucleotide
  Sense Strand Starting at position 699 of SEQ ID NO: 316139
ggaagaaagugcuaagaaa

SEQ ID NO: 373670 - RNA, 19 nt, Artificial Sequence
  Description of Artificial Sequence: Synthetic oligonucleotide
  Antisense Strand to SEQ ID NO: 373669
uuucuuagcacuuucuucc

SEQ ID NO: 373671 - RNA, 19 nt, Artificial Sequence
  Description of Artificial Sequence: Synthetic oligonucleotide
  Sense Strand Starting at position 699 of SEQ ID NO: 316859
uucguuuaccgacaugagu

SEQ ID NO: 373672 - RNA, 19 nt, Artificial Sequence
  Description of Artificial Sequence: Synthetic oligonucleotide
  Antisense Strand to SEQ ID NO: 373671
acucaugucgguaaacgaa

SEQ ID NO: 373673 - RNA, 19 nt, Artificial Sequence
  Description of Artificial Sequence: Synthetic oligonucleotide
  Sense Strand Starting at position 699 of SEQ ID NO: 316861
cguuuaccgacaugaguga

SEQ ID NO: 373674 - RNA, 19 nt, Artificial Sequence
  Description of Artificial Sequence: Synthetic oligonucleotide
  Antisense Strand to SEQ ID NO: 373673
ucacucaugucgguaaacg

SEQ ID NO: 373675 - RNA, 19 nt, Artificial Sequence
  Description of Artificial Sequence: Synthetic oligonucleotide
  Sense Strand Starting at position 699 of SEQ ID NO: 316868
cgacaugagugaucacugu

SEQ ID NO: 373676 - RNA, 19 nt, Artificial Sequence
  Description of Artificial Sequence: Synthetic oligonucleotide
  Antisense Strand to SEQ ID NO: 373675
acagugaucacucaugucg

SEQ ID NO: 373677 - RNA, 19 nt, Artificial Sequence
  Description of Artificial Sequence: Synthetic oligonucleotide
  Sense Strand Starting at position 699 of SEQ ID NO: 316874
gagugaucacuguggccag

SEQ ID NO: 373678 - RNA, 19 nt, Artificial Sequence
  Description of Artificial Sequence: Synthetic oligonucleotide
  Antisense Strand to SEQ ID NO: 373677
cuggccacagugaucacuc

SEQ ID NO: 373679 - RNA, 19 nt, Artificial Sequence
  Description of Artificial Sequence: Synthetic oligonucleotide
  Sense Strand Starting at position 699 of SEQ ID NO: 318049
gcccauuaucccgugguuu

SEQ ID NO: 373680 - RNA, 19 nt, Artificial Sequence
  Description of Artificial Sequence: Synthetic oligonucleotide
  Antisense Strand to SEQ ID NO: 373679
aaaccacgggauaaugggc

SEQ ID NO: 373681 - RNA, 19 nt, Artificial Sequence
  Description of Artificial Sequence: Synthetic oligonucleotide
  Sense Strand Starting at position 699 of SEQ ID NO: 318154
gcgaauucggucagguugu

SEQ ID NO: 373682 - RNA, 19 nt, Artificial Sequence
  Description of Artificial Sequence: Synthetic oligonucleotide
  Antisense Strand to SEQ ID NO: 373681
acaaccugaccgaauucgc

SEQ ID NO: 373683 - RNA, 19 nt, Artificial Sequence
  Description of Artificial Sequence: Synthetic oligonucleotide
  Sense Strand Starting at position 699 of SEQ ID NO: 318191
gcgggagucccugaauacu

SEQ ID NO: 373684 - RNA, 19 nt, Artificial Sequence
  Description of Artificial Sequence: Synthetic oligonucleotide
  Antisense Strand to SEQ ID NO: 373683
aguauucagggacucccgc

SEQ ID NO: 373685 - RNA, 19 nt, Artificial Sequence
  Description of Artificial Sequence: Synthetic oligonucleotide
  Sense Strand Starting at position 699 of SEQ ID NO: 318259
uuuccucuucgauauguaa

SEQ ID NO: 373686 - RNA, 19 nt, Artificial Sequence
  Description of Artificial Sequence: Synthetic oligonucleotide
  Antisense Strand to SEQ ID NO: 373685
uuacauaucgaagaggaaa

SEQ ID NO: 373687 - RNA, 19 nt, Artificial Sequence
  Description of Artificial Sequence: Synthetic oligonucleotide
  Sense Strand Starting at position 699 of SEQ ID NO: 318302
auccaaauucuaggaguag

SEQ ID NO: 373688 - RNA, 19 nt, Artificial Sequence
  Description of Artificial Sequence: Synthetic oligonucleotide
  Antisense Strand to SEQ ID NO: 373687
cuacuccuagaauuuggau

SEQ ID NO: 373689 - RNA, 19 nt, Artificial Sequence
  Description of Artificial Sequence: Synthetic oligonucleotide
  Sense Strand Starting at position 699 of SEQ ID NO: 318686
uaacaauugugggcuguga

SEQ ID NO: 373690 - RNA, 19 nt, Artificial Sequence
  Description of Artificial Sequence: Synthetic oligonucleotide
  Antisense Strand to SEQ ID NO: 373689
ucacagcccacaauuguua

SEQ ID NO: 373691 - RNA, 19 nt, Artificial Sequence
  Description of Artificial Sequence: Synthetic oligonucleotide
  Sense Strand Starting at position 699 of SEQ ID NO: 318688
acaauugugggcugugauu

SEQ ID NO: 373692 - RNA, 19 nt, Artificial Sequence
  Description of Artificial Sequence: Synthetic oligonucleotide
  Antisense Strand to SEQ ID NO: 373691
aaucacagcccacaauugu

SEQ ID NO: 373693 - RNA, 19 nt, Artificial Sequence
  Description of Artificial Sequence: Synthetic oligonucleotide
  Sense Strand Starting at position 699 of SEQ ID NO: 318690
aauugugggcugugauuga

SEQ ID NO: 373694 - RNA, 19 nt, Artificial Sequence
  Description of Artificial Sequence: Synthetic oligonucleotide
  Antisense Strand to SEQ ID NO: 373693
ucaaucacagcccacaauu

SEQ ID NO: 373695 - RNA, 19 nt, Artificial Sequence
  Description of Artificial Sequence: Synthetic oligonucleotide
  Sense Strand Starting at position 699 of SEQ ID NO: 318694
gugggcugugauugagaag

SEQ ID NO: 373696 - RNA, 19 nt, Artificial Sequence
  Description of Artificial Sequence: Synthetic oligonucleotide
  Antisense Strand to SEQ ID NO: 373695
cuucucaaucacagcccac

SEQ ID NO: 373697 - RNA, 19 nt, Artificial Sequence
  Description of Artificial Sequence: Synthetic oligonucleotide
  Sense Strand Starting at position 699 of SEQ ID NO: 318732
ucaugagauuuguggagag

SEQ ID NO: 373698 - RNA, 19 nt, Artificial Sequence
  Description of Artificial Sequence: Synthetic oligonucleotide
  Antisense Strand to SEQ ID NO: 373697
cucuccacaaaucucauga

SEQ ID NO: 373699 - RNA, 19 nt, Artificial Sequence
  Description of Artificial Sequence: Synthetic oligonucleotide
  Sense Strand Starting at position 699 of SEQ ID NO: 318762
ugugaaguuugggcacuuu

SEQ ID NO: 373700 - RNA, 19 nt, Artificial Sequence
  Description of Artificial Sequence: Synthetic oligonucleotide
  Antisense Strand to SEQ ID NO: 373699
aaagugcccaaacuucaca

SEQ ID NO: 373701 - RNA, 19 nt, Artificial Sequence
  Description of Artificial Sequence: Synthetic oligonucleotide
  Sense Strand Starting at position 700 of SEQ ID NO: 315850
aguuacaugcaguaaguua

SEQ ID NO: 373702 - RNA, 19 nt, Artificial Sequence
  Description of Artificial Sequence: Synthetic oligonucleotide
  Antisense Strand to SEQ ID NO: 373701
uaacuuacugcauguaacu

SEQ ID NO: 373703 - RNA, 19 nt, Artificial Sequence
  Description of Artificial Sequence: Synthetic oligonucleotide
  Sense Strand Starting at position 700 of SEQ ID NO: 315865
guuaaagagaccuguguca

SEQ ID NO: 373704 - RNA, 19 nt, Artificial Sequence
  Description of Artificial Sequence: Synthetic oligonucleotide
  Antisense Strand to SEQ ID NO: 373703
ugacacaggucucuuuaac

SEQ ID NO: 373705 - RNA, 19 nt, Artificial Sequence
  Description of Artificial Sequence: Synthetic oligonucleotide
  Sense Strand Starting at position 700 of SEQ ID NO: 315867
uaaagagaccugugucaug

SEQ ID NO: 373706 - RNA, 19 nt, Artificial Sequence
  Description of Artificial Sequence: Synthetic oligonucleotide
  Antisense Strand to SEQ ID NO: 373705
caugacacaggucucuuua

SEQ ID NO: 373707 - RNA, 19 nt, Artificial Sequence
  Description of Artificial Sequence: Synthetic oligonucleotide
  Sense Strand Starting at position 700 of SEQ ID NO: 315891
guaaaccugucuccucaga

SEQ ID NO: 373708 - RNA, 19 nt, Artificial Sequence
  Description of Artificial Sequence: Synthetic oligonucleotide
  Antisense Strand to SEQ ID NO: 373707
ucugaggagacagguuuac

SEQ ID NO: 373709 - RNA, 19 nt, Artificial Sequence
  Description of Artificial Sequence: Synthetic oligonucleotide
  Sense Strand Starting at position 700 of SEQ ID NO: 315915
ggaucaagcugugcucaaa

SEQ ID NO: 373710 - RNA, 19 nt, Artificial Sequence
  Description of Artificial Sequence: Synthetic oligonucleotide
  Antisense Strand to SEQ ID NO: 373709
uuugagcacagcuugaucc

SEQ ID NO: 373711 - RNA, 19 nt, Artificial Sequence
  Description of Artificial Sequence: Synthetic oligonucleotide
  Sense Strand Starting at position 700 of SEQ ID NO: 315924
ugugcucaaaggcaagaau

SEQ ID NO: 373712 - RNA, 19 nt, Artificial Sequence
  Description of Artificial Sequence: Synthetic oligonucleotide
  Antisense Strand to SEQ ID NO: 373711
auucuugccuuugagcaca

SEQ ID NO: 373713 - RNA, 19 nt, Artificial Sequence
  Description of Artificial Sequence: Synthetic oligonucleotide
  Sense Strand Starting at position 700 of SEQ ID NO: 316025
cagggccuugaaugaaauu

SEQ ID NO: 373714 - RNA, 19 nt, Artificial Sequence
  Description of Artificial Sequence: Synthetic oligonucleotide
  Antisense Strand to SEQ ID NO: 373713
aauuucauucaaggcccug

SEQ ID NO: 373715 - RNA, 19 nt, Artificial Sequence
  Description of Artificial Sequence: Synthetic oligonucleotide
  Sense Strand Starting at position 700 of SEQ ID NO: 316267
cgaugauuccugcaagaga

SEQ ID NO: 373716 - RNA, 19 nt, Artificial Sequence
  Description of Artificial Sequence: Synthetic oligonucleotide
  Antisense Strand to SEQ ID NO: 373715
ucucuugcaggaaucaucg

SEQ ID NO: 373717 - RNA, 19 nt, Artificial Sequence
  Description of Artificial Sequence: Synthetic oligonucleotide
  Sense Strand Starting at position 700 of SEQ ID NO: 316312
gcuggugaggcaugauaca

SEQ ID NO: 373718 - RNA, 19 nt, Artificial Sequence
  Description of Artificial Sequence: Synthetic oligonucleotide
  Antisense Strand to SEQ ID NO: 373717
uguaucaugccucaccagc

SEQ ID NO: 373719 - RNA, 19 nt, Artificial Sequence
  Description of Artificial Sequence: Synthetic oligonucleotide
  Sense Strand Starting at position 700 of SEQ ID NO: 316450
augcucucagcugagcaau

SEQ ID NO: 373720 - RNA, 19 nt, Artificial Sequence
  Description of Artificial Sequence: Synthetic oligonucleotide
  Antisense Strand to SEQ ID NO: 373719
auugcucagcugagagcau

SEQ ID NO: 373721 - RNA, 19 nt, Artificial Sequence
  Description of Artificial Sequence: Synthetic oligonucleotide
  Sense Strand Starting at position 700 of SEQ ID NO: 316458
agcugagcaaucugaguca

SEQ ID NO: 373722 - RNA, 19 nt, Artificial Sequence
  Description of Artificial Sequence: Synthetic oligonucleotide
  Antisense Strand to SEQ ID NO: 373721
ugacucagauugcucagcu

SEQ ID NO: 373723 - RNA, 19 nt, Artificial Sequence
  Description of Artificial Sequence: Synthetic oligonucleotide
  Sense Strand Starting at position 700 of SEQ ID NO: 316461
ugagcaaucugagucagug

SEQ ID NO: 373724 - RNA, 19 nt, Artificial Sequence
  Description of Artificial Sequence: Synthetic oligonucleotide
  Antisense Strand to SEQ ID NO: 373723
cacugacucagauugcuca

SEQ ID NO: 373725 - RNA, 19 nt, Artificial Sequence
  Description of Artificial Sequence: Synthetic oligonucleotide
  Sense Strand Starting at position 700 of SEQ ID NO: 316529
ccgugcuuucuccaugaaa

SEQ ID NO: 373726 - RNA, 19 nt, Artificial Sequence
  Description of Artificial Sequence: Synthetic oligonucleotide
  Antisense Strand to SEQ ID NO: 373725
uuucauggagaaagcacgg

SEQ ID NO: 373727 - RNA, 19 nt, Artificial Sequence
  Description of Artificial Sequence: Synthetic oligonucleotide
  Sense Strand Starting at position 700 of SEQ ID NO: 316555
gagguuaugucauuugccu

SEQ ID NO: 373728 - RNA, 19 nt, Artificial Sequence
  Description of Artificial Sequence: Synthetic oligonucleotide
  Antisense Strand to SEQ ID NO: 373727
aggcaaaugacauaaccuc

SEQ ID NO: 373729 - RNA, 19 nt, Artificial Sequence
  Description of Artificial Sequence: Synthetic oligonucleotide
  Sense Strand Starting at position 700 of SEQ ID NO: 316568
uugccuauuuaccuguuua

SEQ ID NO: 373730 - RNA, 19 nt, Artificial Sequence
  Description of Artificial Sequence: Synthetic oligonucleotide
  Antisense Strand to SEQ ID NO: 373729
uaaacagguaaauaggcaa

SEQ ID NO: 373731 - RNA, 19 nt, Artificial Sequence
  Description of Artificial Sequence: Synthetic oligonucleotide
  Sense Strand Starting at position 700 of SEQ ID NO: 316572
cuauuuaccuguuuacugu

SEQ ID NO: 373732 - RNA, 19 nt, Artificial Sequence
  Description of Artificial Sequence: Synthetic oligonucleotide
  Antisense Strand to SEQ ID NO: 373731
acaguaaacagguaaauag

SEQ ID NO: 373733 - RNA, 19 nt, Artificial Sequence
  Description of Artificial Sequence: Synthetic oligonucleotide
  Sense Strand Starting at position 700 of SEQ ID NO: 316580
cuguuuacugucuauuauc

SEQ ID NO: 373734 - RNA, 19 nt, Artificial Sequence
  Description of Artificial Sequence: Synthetic oligonucleotide
  Antisense Strand to SEQ ID NO: 373733
gauaauagacaguaaacag

SEQ ID NO: 373735 - RNA, 19 nt, Artificial Sequence
  Description of Artificial Sequence: Synthetic oligonucleotide
  Sense Strand Starting at position 700 of SEQ ID NO: 316646
uugugauagagauggcaua

SEQ ID NO: 373736 - RNA, 19 nt, Artificial Sequence
  Description of Artificial Sequence: Synthetic oligonucleotide
  Antisense Strand to SEQ ID NO: 373735
uaugccaucucuaucacaa

SEQ ID NO: 373737 - RNA, 19 nt, Artificial Sequence
  Description of Artificial Sequence: Synthetic oligonucleotide
  Sense Strand Starting at position 700 of SEQ ID NO: 316751
aaguguaguguuuggaaca

SEQ ID NO: 373738 - RNA, 19 nt, Artificial Sequence
  Description of Artificial Sequence: Synthetic oligonucleotide
  Antisense Strand to SEQ ID NO: 373737
uguuccaaacacuacacuu

SEQ ID NO: 373739 - RNA, 19 nt, Artificial Sequence
  Description of Artificial Sequence: Synthetic oligonucleotide
  Sense Strand Starting at position 700 of SEQ ID NO: 316769
aaggaucauugggaaauua

SEQ ID NO: 373740 - RNA, 19 nt, Artificial Sequence
  Description of Artificial Sequence: Synthetic oligonucleotide
  Antisense Strand to SEQ ID NO: 373739
uaauuucccaaugauccuu

SEQ ID NO: 373741 - RNA, 19 nt, Artificial Sequence
  Description of Artificial Sequence: Synthetic oligonucleotide
  Sense Strand Starting at position 700 of SEQ ID NO: 317829
ggagcacaaugguuuaacu

SEQ ID NO: 373742 - RNA, 19 nt, Artificial Sequence
  Description of Artificial Sequence: Synthetic oligonucleotide
  Antisense Strand to SEQ ID NO: 373741
aguuaaaccauugugcucc

SEQ ID NO: 373743 - RNA, 19 nt, Artificial Sequence
  Description of Artificial Sequence: Synthetic oligonucleotide
  Sense Strand Starting at position 700 of SEQ ID NO: 317839
gguuuaacuucucccaaag

SEQ ID NO: 373744 - RNA, 19 nt, Artificial Sequence
  Description of Artificial Sequence: Synthetic oligonucleotide
  Antisense Strand to SEQ ID NO: 373743
cuuugggagaaguuaaacc

SEQ ID NO: 373745 - RNA, 19 nt, Artificial Sequence
  Description of Artificial Sequence: Synthetic oligonucleotide
  Sense Strand Starting at position 700 of SEQ ID NO: 317882
gcuggacaacucugggauu

SEQ ID NO: 373746 - RNA, 19 nt, Artificial Sequence
  Description of Artificial Sequence: Synthetic oligonucleotide
  Antisense Strand to SEQ ID NO: 373745
aaucccagaguuguccagc

SEQ ID NO: 373747 - RNA, 19 nt, Artificial Sequence
  Description of Artificial Sequence: Synthetic oligonucleotide
  Sense Strand Starting at position 700 of SEQ ID NO: 317883
cuggacaacucugggauuu

SEQ ID NO: 373748 - RNA, 19 nt, Artificial Sequence
  Description of Artificial Sequence: Synthetic oligonucleotide
  Antisense Strand to SEQ ID NO: 373747
aaaucccagaguuguccag

SEQ ID NO: 373749 - RNA, 19 nt, Artificial Sequence
  Description of Artificial Sequence: Synthetic oligonucleotide
  Sense Strand Starting at position 700 of SEQ ID NO: 317919
gaggcuuuaguaggaguua

SEQ ID NO: 373750 - RNA, 19 nt, Artificial Sequence
  Description of Artificial Sequence: Synthetic oligonucleotide
  Antisense Strand to SEQ ID NO: 373749
uaacuccuacuaaagccuc

SEQ ID NO: 373751 - RNA, 19 nt, Artificial Sequence
  Description of Artificial Sequence: Synthetic oligonucleotide
  Sense Strand Starting at position 700 of SEQ ID NO: 317930
aggaguuaucuuugcccag

SEQ ID NO: 373752 - RNA, 19 nt, Artificial Sequence
  Description of Artificial Sequence: Synthetic oligonucleotide
  Antisense Strand to SEQ ID NO: 373751
cugggcaaagauaacuccu

SEQ ID NO: 373753 - RNA, 19 nt, Artificial Sequence
  Description of Artificial Sequence: Synthetic oligonucleotide
  Sense Strand Starting at position 700 of SEQ ID NO: 318135
uagagaguuugacuauucu

SEQ ID NO: 373754 - RNA, 19 nt, Artificial Sequence
  Description of Artificial Sequence: Synthetic oligonucleotide
  Antisense Strand to SEQ ID NO: 373753
agaauagucaaacucucua

SEQ ID NO: 373755 - RNA, 19 nt, Artificial Sequence
  Description of Artificial Sequence: Synthetic oligonucleotide
  Sense Strand Starting at position 700 of SEQ ID NO: 318139
gaguuugacuauucuguau

SEQ ID NO: 373756 - RNA, 19 nt, Artificial Sequence
  Description of Artificial Sequence: Synthetic oligonucleotide
  Antisense Strand to SEQ ID NO: 373755
auacagaauagucaaacuc

SEQ ID NO: 373757 - RNA, 19 nt, Artificial Sequence
  Description of Artificial Sequence: Synthetic oligonucleotide
  Sense Strand Starting at position 700 of SEQ ID NO: 318194
cagggugagacgugaacua

SEQ ID NO: 373758 - RNA, 19 nt, Artificial Sequence
  Description of Artificial Sequence: Synthetic oligonucleotide
  Antisense Strand to SEQ ID NO: 373757
uaguucacgucucacccug

SEQ ID NO: 373759 - RNA, 19 nt, Artificial Sequence
  Description of Artificial Sequence: Synthetic oligonucleotide
  Sense Strand Starting at position 700 of SEQ ID NO: 318254
uggauugaacgagguugaa

SEQ ID NO: 373760 - RNA, 19 nt, Artificial Sequence
  Description of Artificial Sequence: Synthetic oligonucleotide
  Antisense Strand to SEQ ID NO: 373759
uucaaccucguucaaucca

SEQ ID NO: 373761 - RNA, 19 nt, Artificial Sequence
  Description of Artificial Sequence: Synthetic oligonucleotide
  Sense Strand Starting at position 700 of SEQ ID NO: 318445
agauguuuaggagguggaa

SEQ ID NO: 373762 - RNA, 19 nt, Artificial Sequence
  Description of Artificial Sequence: Synthetic oligonucleotide
  Antisense Strand to SEQ ID NO: 373761
uuccaccuccuaaacaucu

SEQ ID NO: 373763 - RNA, 19 nt, Artificial Sequence
  Description of Artificial Sequence: Synthetic oligonucleotide
  Sense Strand Starting at position 700 of SEQ ID NO: 318775
agguguuggugauugagga

SEQ ID NO: 373764 - RNA, 19 nt, Artificial Sequence
  Description of Artificial Sequence: Synthetic oligonucleotide
  Antisense Strand to SEQ ID NO: 373763
uccucaaucaccaacaccu

SEQ ID NO: 373765 - RNA, 19 nt, Artificial Sequence
  Description of Artificial Sequence: Synthetic oligonucleotide
  Sense Strand Starting at position 700 of SEQ ID NO: 318840
gguggaugauagcugagau

SEQ ID NO: 373766 - RNA, 19 nt, Artificial Sequence
  Description of Artificial Sequence: Synthetic oligonucleotide
  Antisense Strand to SEQ ID NO: 373765
aucucagcuaucauccacc

SEQ ID NO: 373767 - RNA, 19 nt, Artificial Sequence
  Description of Artificial Sequence: Synthetic oligonucleotide
  Sense Strand Starting at position 700 of SEQ ID NO: 318841
guggaugauagcugagaua

SEQ ID NO: 373768 - RNA, 19 nt, Artificial Sequence
  Description of Artificial Sequence: Synthetic oligonucleotide
  Antisense Strand to SEQ ID NO: 373767
uaucucagcuaucauccac

SEQ ID NO: 373769 - RNA, 19 nt, Artificial Sequence
  Description of Artificial Sequence: Synthetic oligonucleotide
  Sense Strand Starting at position 700 of SEQ ID NO: 318891
ggaagaagaugaguuuguu

SEQ ID NO: 373770 - RNA, 19 nt, Artificial Sequence
  Description of Artificial Sequence: Synthetic oligonucleotide
  Antisense Strand to SEQ ID NO: 373769
aacaaacucaucuucuucc

SEQ ID NO: 373771 - RNA, 19 nt, Artificial Sequence
  Description of Artificial Sequence: Synthetic oligonucleotide
  Sense Strand Starting at position 700 of SEQ ID NO: 318894
agaagaugaguuuguuucu

SEQ ID NO: 373772 - RNA, 19 nt, Artificial Sequence
  Description of Artificial Sequence: Synthetic oligonucleotide
  Antisense Strand to SEQ ID NO: 373771
agaaacaaacucaucuucu

SEQ ID NO: 373773 - RNA, 19 nt, Artificial Sequence
  Description of Artificial Sequence: Synthetic oligonucleotide
  Sense Strand Starting at position 700 of SEQ ID NO: 318936
gggacauauccaggaagcu

SEQ ID NO: 373774 - RNA, 19 nt, Artificial Sequence
  Description of Artificial Sequence: Synthetic oligonucleotide
  Antisense Strand to SEQ ID NO: 373773
agcuuccuggauauguccc

SEQ ID NO: 373775 - RNA, 19 nt, Artificial Sequence
  Description of Artificial Sequence: Synthetic oligonucleotide
  Sense Strand Starting at position 700 of SEQ ID NO: 318949
gaagcuguuggauauccau

SEQ ID NO: 373776 - RNA, 19 nt, Artificial Sequence
  Description of Artificial Sequence: Synthetic oligonucleotide
  Antisense Strand to SEQ ID NO: 373775
auggauauccaacagcuuc

SEQ ID NO: 373777 - RNA, 19 nt, Artificial Sequence
  Description of Artificial Sequence: Synthetic oligonucleotide
  Sense Strand Starting at position 700 of SEQ ID NO: 318955
guuggauauccauguaugg

SEQ ID NO: 373778 - RNA, 19 nt, Artificial Sequence
  Description of Artificial Sequence: Synthetic oligonucleotide
  Antisense Strand to SEQ ID NO: 373777
ccauacauggauauccaac

SEQ ID NO: 373779 - RNA, 19 nt, Artificial Sequence
  Description of Artificial Sequence: Synthetic oligonucleotide
  Sense Strand Starting at position 700 of SEQ ID NO: 319020
gguuguauaauccagagug

SEQ ID NO: 373780 - RNA, 19 nt, Artificial Sequence
  Description of Artificial Sequence: Synthetic oligonucleotide
  Antisense Strand to SEQ ID NO: 373779
cacucuggauuauacaacc

SEQ ID NO: 373781 - RNA, 19 nt, Artificial Sequence
  Description of Artificial Sequence: Synthetic oligonucleotide
  Sense Strand Starting at position 701 of SEQ ID NO: 315254
aggagauaauaagauuugu

SEQ ID NO: 373782 - RNA, 19 nt, Artificial Sequence
  Description of Artificial Sequence: Synthetic oligonucleotide
  Antisense Strand to SEQ ID NO: 373781
acaaaucuuauuaucuccu

SEQ ID NO: 373783 - RNA, 19 nt, Artificial Sequence
  Description of Artificial Sequence: Synthetic oligonucleotide
  Sense Strand Starting at position 701 of SEQ ID NO: 315272
ucuuauaggugcuuccaaa

SEQ ID NO: 373784 - RNA, 19 nt, Artificial Sequence
  Description of Artificial Sequence: Synthetic oligonucleotide
  Antisense Strand to SEQ ID NO: 373783
uuuggaagcaccuauaaga

SEQ ID NO: 373785 - RNA, 19 nt, Artificial Sequence
  Description of Artificial Sequence: Synthetic oligonucleotide
  Sense Strand Starting at position 701 of SEQ ID NO: 315466
ugccaucauuagguauacu

SEQ ID NO: 373786 - RNA, 19 nt, Artificial Sequence
  Description of Artificial Sequence: Synthetic oligonucleotide
  Antisense Strand to SEQ ID NO: 373785
aguauaccuaaugauggca

SEQ ID NO: 373787 - RNA, 19 nt, Artificial Sequence
  Description of Artificial Sequence: Synthetic oligonucleotide
  Sense Strand Starting at position 701 of SEQ ID NO: 315531
uguuaaucauuaguuagga

SEQ ID NO: 373788 - RNA, 19 nt, Artificial Sequence
  Description of Artificial Sequence: Synthetic oligonucleotide
  Antisense Strand to SEQ ID NO: 373787
uccuaacuaaugauuaaca

SEQ ID NO: 373789 - RNA, 19 nt, Artificial Sequence
  Description of Artificial Sequence: Synthetic oligonucleotide
  Sense Strand Starting at position 701 of SEQ ID NO: 315587
uuaagaucauguguacuua

SEQ ID NO: 373790 - RNA, 19 nt, Artificial Sequence
  Description of Artificial Sequence: Synthetic oligonucleotide
  Antisense Strand to SEQ ID NO: 373789
uaaguacacaugaucuuaa

SEQ ID NO: 373791 - RNA, 19 nt, Artificial Sequence
  Description of Artificial Sequence: Synthetic oligonucleotide
  Sense Strand Starting at position 701 of SEQ ID NO: 315664
uguagaguuguugaccuga

SEQ ID NO: 373792 - RNA, 19 nt, Artificial Sequence
  Description of Artificial Sequence: Synthetic oligonucleotide
  Antisense Strand to SEQ ID NO: 373791
ucaggucaacaacucuaca

SEQ ID NO: 373793 - RNA, 19 nt, Artificial Sequence
  Description of Artificial Sequence: Synthetic oligonucleotide
  Sense Strand Starting at position 701 of SEQ ID NO: 315666
uagaguuguugaccugaug

SEQ ID NO: 373794 - RNA, 19 nt, Artificial Sequence
  Description of Artificial Sequence: Synthetic oligonucleotide
  Antisense Strand to SEQ ID NO: 373793
caucaggucaacaacucua

SEQ ID NO: 373795 - RNA, 19 nt, Artificial Sequence
  Description of Artificial Sequence: Synthetic oligonucleotide
  Sense Strand Starting at position 701 of SEQ ID NO: 315672
uguugaccugauggugaau

SEQ ID NO: 373796 - RNA, 19 nt, Artificial Sequence
  Description of Artificial Sequence: Synthetic oligonucleotide
  Antisense Strand to SEQ ID NO: 373795
auucaccaucaggucaaca

SEQ ID NO: 373797 - RNA, 19 nt, Artificial Sequence
  Description of Artificial Sequence: Synthetic oligonucleotide
  Sense Strand Starting at position 701 of SEQ ID NO: 315703
ugguaauguuaugucaauc

SEQ ID NO: 373798 - RNA, 19 nt, Artificial Sequence
  Description of Artificial Sequence: Synthetic oligonucleotide
  Antisense Strand to SEQ ID NO: 373797
gauugacauaacauuacca

SEQ ID NO: 373799 - RNA, 19 nt, Artificial Sequence
  Description of Artificial Sequence: Synthetic oligonucleotide
  Sense Strand Starting at position 701 of SEQ ID NO: 315734
cgaggaaguuuccuaucaa

SEQ ID NO: 373800 - RNA, 19 nt, Artificial Sequence
  Description of Artificial Sequence: Synthetic oligonucleotide
  Antisense Strand to SEQ ID NO: 373799
uugauaggaaacuuccucg

SEQ ID NO: 373801 - RNA, 19 nt, Artificial Sequence
  Description of Artificial Sequence: Synthetic oligonucleotide
  Sense Strand Starting at position 701 of SEQ ID NO: 315842
uuaaacucuugaguacuga

SEQ ID NO: 373802 - RNA, 19 nt, Artificial Sequence
  Description of Artificial Sequence: Synthetic oligonucleotide
  Antisense Strand to SEQ ID NO: 373801
ucaguacucaagaguuuaa

SEQ ID NO: 373803 - RNA, 19 nt, Artificial Sequence
  Description of Artificial Sequence: Synthetic oligonucleotide
  Sense Strand Starting at position 701 of SEQ ID NO: 315952
cuccaagggcuuuagucaa

SEQ ID NO: 373804 - RNA, 19 nt, Artificial Sequence
  Description of Artificial Sequence: Synthetic oligonucleotide
  Antisense Strand to SEQ ID NO: 373803
uugacuaaagcccuuggag

SEQ ID NO: 373805 - RNA, 19 nt, Artificial Sequence
  Description of Artificial Sequence: Synthetic oligonucleotide
  Sense Strand Starting at position 701 of SEQ ID NO: 315980
ugaauaagccuuuggccau

SEQ ID NO: 373806 - RNA, 19 nt, Artificial Sequence
  Description of Artificial Sequence: Synthetic oligonucleotide
  Antisense Strand to SEQ ID NO: 373805
auggccaaaggcuuauuca

SEQ ID NO: 373807 - RNA, 19 nt, Artificial Sequence
  Description of Artificial Sequence: Synthetic oligonucleotide
  Sense Strand Starting at position 701 of SEQ ID NO: 315986
agccuuuggccaugaggaa

SEQ ID NO: 373808 - RNA, 19 nt, Artificial Sequence
  Description of Artificial Sequence: Synthetic oligonucleotide
  Antisense Strand to SEQ ID NO: 373807
uuccucauggccaaaggcu

SEQ ID NO: 373809 - RNA, 19 nt, Artificial Sequence
  Description of Artificial Sequence: Synthetic oligonucleotide
  Sense Strand Starting at position 701 of SEQ ID NO: 315987
gccuuuggccaugaggaaa

SEQ ID NO: 373810 - RNA, 19 nt, Artificial Sequence
  Description of Artificial Sequence: Synthetic oligonucleotide
  Antisense Strand to SEQ ID NO: 373809
uuuccucauggccaaaggc

SEQ ID NO: 373811 - RNA, 19 nt, Artificial Sequence
  Description of Artificial Sequence: Synthetic oligonucleotide
  Sense Strand Starting at position 701 of SEQ ID NO: 316271
agugcugaguaacucaaau

SEQ ID NO: 373812 - RNA, 19 nt, Artificial Sequence
  Description of Artificial Sequence: Synthetic oligonucleotide
  Antisense Strand to SEQ ID NO: 373811
auuugaguuacucagcacu

SEQ ID NO: 373813 - RNA, 19 nt, Artificial Sequence
  Description of Artificial Sequence: Synthetic oligonucleotide
  Sense Strand Starting at position 701 of SEQ ID NO: 316316
agauguugagaagguacau

SEQ ID NO: 373814 - RNA, 19 nt, Artificial Sequence
  Description of Artificial Sequence: Synthetic oligonucleotide
  Antisense Strand to SEQ ID NO: 373813
auguaccuucucaacaucu

SEQ ID NO: 373815 - RNA, 19 nt, Artificial Sequence
  Description of Artificial Sequence: Synthetic oligonucleotide
  Sense Strand Starting at position 701 of SEQ ID NO: 316439
uguuuccuugacuggcaaa

SEQ ID NO: 373816 - RNA, 19 nt, Artificial Sequence
  Description of Artificial Sequence: Synthetic oligonucleotide
  Antisense Strand to SEQ ID NO: 373815
uuugccagucaaggaaaca

SEQ ID NO: 373817 - RNA, 19 nt, Artificial Sequence
  Description of Artificial Sequence: Synthetic oligonucleotide
  Sense Strand Starting at position 701 of SEQ ID NO: 316488
aaaggcaguucuccugaca

SEQ ID NO: 373818 - RNA, 19 nt, Artificial Sequence
  Description of Artificial Sequence: Synthetic oligonucleotide
  Antisense Strand to SEQ ID NO: 373817
ugucaggagaacugccuuu

SEQ ID NO: 373819 - RNA, 19 nt, Artificial Sequence
  Description of Artificial Sequence: Synthetic oligonucleotide
  Sense Strand Starting at position 701 of SEQ ID NO: 316491
ggcaguucuccugacacac

SEQ ID NO: 373820 - RNA, 19 nt, Artificial Sequence
  Description of Artificial Sequence: Synthetic oligonucleotide
  Antisense Strand to SEQ ID NO: 373819
gugugucaggagaacugcc

SEQ ID NO: 373821 - RNA, 19 nt, Artificial Sequence
  Description of Artificial Sequence: Synthetic oligonucleotide
  Sense Strand Starting at position 701 of SEQ ID NO: 316882
uagcuuucuccagaaacgu

SEQ ID NO: 373822 - RNA, 19 nt, Artificial Sequence
  Description of Artificial Sequence: Synthetic oligonucleotide
  Antisense Strand to SEQ ID NO: 373821
acguuucuggagaaagcua

SEQ ID NO: 373823 - RNA, 19 nt, Artificial Sequence
  Description of Artificial Sequence: Synthetic oligonucleotide
  Sense Strand Starting at position 701 of SEQ ID NO: 316974
gucggaaaucucgaauaaa

SEQ ID NO: 373824 - RNA, 19 nt, Artificial Sequence
  Description of Artificial Sequence: Synthetic oligonucleotide
  Antisense Strand to SEQ ID NO: 373823
uuuauucgagauuuccgac

SEQ ID NO: 373825 - RNA, 19 nt, Artificial Sequence
  Description of Artificial Sequence: Synthetic oligonucleotide
  Sense Strand Starting at position 701 of SEQ ID NO: 317050
gcugucaaccuccaaagau

SEQ ID NO: 373826 - RNA, 19 nt, Artificial Sequence
  Description of Artificial Sequence: Synthetic oligonucleotide
  Antisense Strand to SEQ ID NO: 373825
aucuuuggagguugacagc

SEQ ID NO: 373827 - RNA, 19 nt, Artificial Sequence
  Description of Artificial Sequence: Synthetic oligonucleotide
  Sense Strand Starting at position 701 of SEQ ID NO: 317082
accguuuagguagacuuua

SEQ ID NO: 373828 - RNA, 19 nt, Artificial Sequence
  Description of Artificial Sequence: Synthetic oligonucleotide
  Antisense Strand to SEQ ID NO: 373827
uaaagucuaccuaaacggu

SEQ ID NO: 373829 - RNA, 19 nt, Artificial Sequence
  Description of Artificial Sequence: Synthetic oligonucleotide
  Sense Strand Starting at position 701 of SEQ ID NO: 317480
ggcuuagcaacguagauaa

SEQ ID NO: 373830 - RNA, 19 nt, Artificial Sequence
  Description of Artificial Sequence: Synthetic oligonucleotide
  Antisense Strand to SEQ ID NO: 373829
uuaucuacguugcuaagcc

SEQ ID NO: 373831 - RNA, 19 nt, Artificial Sequence
  Description of Artificial Sequence: Synthetic oligonucleotide
  Sense Strand Starting at position 701 of SEQ ID NO: 317640
ggaguucucuuaccuuuag

SEQ ID NO: 373832 - RNA, 19 nt, Artificial Sequence
  Description of Artificial Sequence: Synthetic oligonucleotide
  Antisense Strand to SEQ ID NO: 373831
cuaaagguaagagaacucc

SEQ ID NO: 373833 - RNA, 19 nt, Artificial Sequence
  Description of Artificial Sequence: Synthetic oligonucleotide
  Sense Strand Starting at position 701 of SEQ ID NO: 317667
ggccucaacucagcaauaa

SEQ ID NO: 373834 - RNA, 19 nt, Artificial Sequence
  Description of Artificial Sequence: Synthetic oligonucleotide
  Antisense Strand to SEQ ID NO: 373833
uuauugcugaguugaggcc

SEQ ID NO: 373835 - RNA, 19 nt, Artificial Sequence
  Description of Artificial Sequence: Synthetic oligonucleotide
  Sense Strand Starting at position 701 of SEQ ID NO: 317765
aacgaucccgagcaacauu

SEQ ID NO: 373836 - RNA, 19 nt, Artificial Sequence
  Description of Artificial Sequence: Synthetic oligonucleotide
  Antisense Strand to SEQ ID NO: 373835
aauguugcucgggaucguu

SEQ ID NO: 373837 - RNA, 19 nt, Artificial Sequence
  Description of Artificial Sequence: Synthetic oligonucleotide
  Sense Strand Starting at position 701 of SEQ ID NO: 317774
gagcaacauuuagagaugu

SEQ ID NO: 373838 - RNA, 19 nt, Artificial Sequence
  Description of Artificial Sequence: Synthetic oligonucleotide
  Antisense Strand to SEQ ID NO: 373837
acaucucuaaauguugcuc

SEQ ID NO: 373839 - RNA, 19 nt, Artificial Sequence
  Description of Artificial Sequence: Synthetic oligonucleotide
  Sense Strand Starting at position 701 of SEQ ID NO: 317839
ccaaaugggucucugacaa

SEQ ID NO: 373840 - RNA, 19 nt, Artificial Sequence
  Description of Artificial Sequence: Synthetic oligonucleotide
  Antisense Strand to SEQ ID NO: 373839
uugucagagacccauuugg

SEQ ID NO: 373841 - RNA, 19 nt, Artificial Sequence
  Description of Artificial Sequence: Synthetic oligonucleotide
  Sense Strand Starting at position 701 of SEQ ID NO: 317900
cggauuuauuguccgccaa

SEQ ID NO: 373842 - RNA, 19 nt, Artificial Sequence
  Description of Artificial Sequence: Synthetic oligonucleotide
  Antisense Strand to SEQ ID NO: 373841
uuggcggacaauaaauccg

SEQ ID NO: 373843 - RNA, 19 nt, Artificial Sequence
  Description of Artificial Sequence: Synthetic oligonucleotide
  Sense Strand Starting at position 701 of SEQ ID NO: 317901
ggauuuauuguccgccaac

SEQ ID NO: 373844 - RNA, 19 nt, Artificial Sequence
  Description of Artificial Sequence: Synthetic oligonucleotide
  Antisense Strand to SEQ ID NO: 373843
guuggcggacaauaaaucc

SEQ ID NO: 373845 - RNA, 19 nt, Artificial Sequence
  Description of Artificial Sequence: Synthetic oligonucleotide
  Sense Strand Starting at position 701 of SEQ ID NO: 317902
gauuuauuguccgccaaca

SEQ ID NO: 373846 - RNA, 19 nt, Artificial Sequence
  Description of Artificial Sequence: Synthetic oligonucleotide
  Antisense Strand to SEQ ID NO: 373845
uguuggcggacaauaaauc

SEQ ID NO: 373847 - RNA, 19 nt, Artificial Sequence
  Description of Artificial Sequence: Synthetic oligonucleotide
  Sense Strand Starting at position 701 of SEQ ID NO: 318064
gcucuuaucagcccgaugu

SEQ ID NO: 373848 - RNA, 19 nt, Artificial Sequence
  Description of Artificial Sequence: Synthetic oligonucleotide
  Antisense Strand to SEQ ID NO: 373847
acaucgggcugauaagagc

SEQ ID NO: 373849 - RNA, 19 nt, Artificial Sequence
  Description of Artificial Sequence: Synthetic oligonucleotide
  Sense Strand Starting at position 701 of SEQ ID NO: 318072
cagcccgauguguaaugaa

SEQ ID NO: 373850 - RNA, 19 nt, Artificial Sequence
  Description of Artificial Sequence: Synthetic oligonucleotide
  Antisense Strand to SEQ ID NO: 373849
uucauuacacaucgggcug

SEQ ID NO: 373851 - RNA, 19 nt, Artificial Sequence
  Description of Artificial Sequence: Synthetic oligonucleotide
  Sense Strand Starting at position 701 of SEQ ID NO: 318308
ugaacugucucuuuaaaga

SEQ ID NO: 373852 - RNA, 19 nt, Artificial Sequence
  Description of Artificial Sequence: Synthetic oligonucleotide
  Antisense Strand to SEQ ID NO: 373851
ucuuuaaagagacaguuca

SEQ ID NO: 373853 - RNA, 19 nt, Artificial Sequence
  Description of Artificial Sequence: Synthetic oligonucleotide
  Sense Strand Starting at position 701 of SEQ ID NO: 318542
uguagauuucuccggguaa

SEQ ID NO: 373854 - RNA, 19 nt, Artificial Sequence
  Description of Artificial Sequence: Synthetic oligonucleotide
  Antisense Strand to SEQ ID NO: 373853
uuacccggagaaaucuaca

SEQ ID NO: 373855 - RNA, 19 nt, Artificial Sequence
  Description of Artificial Sequence: Synthetic oligonucleotide
  Sense Strand Starting at position 701 of SEQ ID NO: 318619
uuucgaugucuugaaagca

SEQ ID NO: 373856 - RNA, 19 nt, Artificial Sequence
  Description of Artificial Sequence: Synthetic oligonucleotide
  Antisense Strand to SEQ ID NO: 373855
ugcuuucaagacaucgaaa

SEQ ID NO: 373857 - RNA, 19 nt, Artificial Sequence
  Description of Artificial Sequence: Synthetic oligonucleotide
  Sense Strand Starting at position 701 of SEQ ID NO: 319103
agcauauuauggguuuaga

SEQ ID NO: 373858 - RNA, 19 nt, Artificial Sequence
  Description of Artificial Sequence: Synthetic oligonucleotide
  Antisense Strand to SEQ ID NO: 373857
ucuaaacccauaauaugcu

SEQ ID NO: 373859 - RNA, 19 nt, Artificial Sequence
  Description of Artificial Sequence: Synthetic oligonucleotide
  Sense Strand Starting at position 701 of SEQ ID NO: 319138
uggugagucuuugccauuu

SEQ ID NO: 373860 - RNA, 19 nt, Artificial Sequence
  Description of Artificial Sequence: Synthetic oligonucleotide
  Antisense Strand to SEQ ID NO: 373859
aaauggcaaagacucacca

SEQ ID NO: 373861 - RNA, 19 nt, Artificial Sequence
  Description of Artificial Sequence: Synthetic oligonucleotide
  Sense Strand Starting at position 702 of SEQ ID NO: 315280
uuaagaucauguguacuua

SEQ ID NO: 373862 - RNA, 19 nt, Artificial Sequence
  Description of Artificial Sequence: Synthetic oligonucleotide
  Antisense Strand to SEQ ID NO: 373861
uaaguacacaugaucuuaa

SEQ ID NO: 373863 - RNA, 19 nt, Artificial Sequence
  Description of Artificial Sequence: Synthetic oligonucleotide
  Sense Strand Starting at position 702 of SEQ ID NO: 315357
uguagaguuguugaccuga

SEQ ID NO: 373864 - RNA, 19 nt, Artificial Sequence
  Description of Artificial Sequence: Synthetic oligonucleotide
  Antisense Strand to SEQ ID NO: 373863
ucaggucaacaacucuaca

SEQ ID NO: 373865 - RNA, 19 nt, Artificial Sequence
  Description of Artificial Sequence: Synthetic oligonucleotide
  Sense Strand Starting at position 702 of SEQ ID NO: 315359
uagaguuguugaccugaug

SEQ ID NO: 373866 - RNA, 19 nt, Artificial Sequence
  Description of Artificial Sequence: Synthetic oligonucleotide
  Antisense Strand to SEQ ID NO: 373865
caucaggucaacaacucua

SEQ ID NO: 373867 - RNA, 19 nt, Artificial Sequence
  Description of Artificial Sequence: Synthetic oligonucleotide
  Sense Strand Starting at position 702 of SEQ ID NO: 315365
uguugaccugauggugaau

SEQ ID NO: 373868 - RNA, 19 nt, Artificial Sequence
  Description of Artificial Sequence: Synthetic oligonucleotide
  Antisense Strand to SEQ ID NO: 373867
auucaccaucaggucaaca

SEQ ID NO: 373869 - RNA, 19 nt, Artificial Sequence
  Description of Artificial Sequence: Synthetic oligonucleotide
  Sense Strand Starting at position 702 of SEQ ID NO: 315427
cgaggaaguuuccuaucaa

SEQ ID NO: 373870 - RNA, 19 nt, Artificial Sequence
  Description of Artificial Sequence: Synthetic oligonucleotide
  Antisense Strand to SEQ ID NO: 373869
uugauaggaaacuuccucg

SEQ ID NO: 373871 - RNA, 19 nt, Artificial Sequence
  Description of Artificial Sequence: Synthetic oligonucleotide
  Sense Strand Starting at position 702 of SEQ ID NO: 315535
uuaaacucuugaguacuga

SEQ ID NO: 373872 - RNA, 19 nt, Artificial Sequence
  Description of Artificial Sequence: Synthetic oligonucleotide
  Antisense Strand to SEQ ID NO: 373871
ucaguacucaagaguuuaa

SEQ ID NO: 373873 - RNA, 19 nt, Artificial Sequence
  Description of Artificial Sequence: Synthetic oligonucleotide
  Sense Strand Starting at position 702 of SEQ ID NO: 315645
cuccaagggcuuuagucaa

SEQ ID NO: 373874 - RNA, 19 nt, Artificial Sequence
  Description of Artificial Sequence: Synthetic oligonucleotide
  Antisense Strand to SEQ ID NO: 373873
uugacuaaagcccuuggag

SEQ ID NO: 373875 - RNA, 19 nt, Artificial Sequence
  Description of Artificial Sequence: Synthetic oligonucleotide
  Sense Strand Starting at position 702 of SEQ ID NO: 315679
agccuuuggccaugaggaa

SEQ ID NO: 373876 - RNA, 19 nt, Artificial Sequence
  Description of Artificial Sequence: Synthetic oligonucleotide
  Antisense Strand to SEQ ID NO: 373875
uuccucauggccaaaggcu

SEQ ID NO: 373877 - RNA, 19 nt, Artificial Sequence
  Description of Artificial Sequence: Synthetic oligonucleotide
  Sense Strand Starting at position 702 of SEQ ID NO: 315680
gccuuuggccaugaggaaa

SEQ ID NO: 373878 - RNA, 19 nt, Artificial Sequence
  Description of Artificial Sequence: Synthetic oligonucleotide
  Antisense Strand to SEQ ID NO: 373877
uuuccucauggccaaaggc

SEQ ID NO: 373879 - RNA, 19 nt, Artificial Sequence
  Description of Artificial Sequence: Synthetic oligonucleotide
  Sense Strand Starting at position 702 of SEQ ID NO: 315964
agugcugaguaacucaaau

SEQ ID NO: 373880 - RNA, 19 nt, Artificial Sequence
  Description of Artificial Sequence: Synthetic oligonucleotide
  Antisense Strand to SEQ ID NO: 373879
auuugaguuacucagcacu

SEQ ID NO: 373881 - RNA, 19 nt, Artificial Sequence
  Description of Artificial Sequence: Synthetic oligonucleotide
  Sense Strand Starting at position 702 of SEQ ID NO: 316009
agauguugagaagguacau

SEQ ID NO: 373882 - RNA, 19 nt, Artificial Sequence
  Description of Artificial Sequence: Synthetic oligonucleotide
  Antisense Strand to SEQ ID NO: 373881
auguaccuucucaacaucu

SEQ ID NO: 373883 - RNA, 19 nt, Artificial Sequence
  Description of Artificial Sequence: Synthetic oligonucleotide
  Sense Strand Starting at position 702 of SEQ ID NO: 316181
aaaggcaguucuccugaca

SEQ ID NO: 373884 - RNA, 19 nt, Artificial Sequence
  Description of Artificial Sequence: Synthetic oligonucleotide
  Antisense Strand to SEQ ID NO: 373883
ugucaggagaacugccuuu

SEQ ID NO: 373885 - RNA, 19 nt, Artificial Sequence
  Description of Artificial Sequence: Synthetic oligonucleotide
  Sense Strand Starting at position 702 of SEQ ID NO: 316184
ggcaguucuccugacacac

SEQ ID NO: 373886 - RNA, 19 nt, Artificial Sequence
  Description of Artificial Sequence: Synthetic oligonucleotide
  Antisense Strand to SEQ ID NO: 373885
gugugucaggagaacugcc

SEQ ID NO: 373887 - RNA, 19 nt, Artificial Sequence
  Description of Artificial Sequence: Synthetic oligonucleotide
  Sense Strand Starting at position 702 of SEQ ID NO: 316575
uagcuuucuccagaaacgu

SEQ ID NO: 373888 - RNA, 19 nt, Artificial Sequence
  Description of Artificial Sequence: Synthetic oligonucleotide
  Antisense Strand to SEQ ID NO: 373887
acguuucuggagaaagcua

SEQ ID NO: 373889 - RNA, 19 nt, Artificial Sequence
  Description of Artificial Sequence: Synthetic oligonucleotide
  Sense Strand Starting at position 702 of SEQ ID NO: 316667
gucggaaaucucgaauaaa

SEQ ID NO: 373890 - RNA, 19 nt, Artificial Sequence
  Description of Artificial Sequence: Synthetic oligonucleotide
  Antisense Strand to SEQ ID NO: 373889
uuuauucgagauuuccgac

SEQ ID NO: 373891 - RNA, 19 nt, Artificial Sequence
  Description of Artificial Sequence: Synthetic oligonucleotide
  Sense Strand Starting at position 702 of SEQ ID NO: 316743
gcugucaaccuccaaagau

SEQ ID NO: 373892 - RNA, 19 nt, Artificial Sequence
  Description of Artificial Sequence: Synthetic oligonucleotide
  Antisense Strand to SEQ ID NO: 373891
aucuuuggagguugacagc

SEQ ID NO: 373893 - RNA, 19 nt, Artificial Sequence
  Description of Artificial Sequence: Synthetic oligonucleotide
  Sense Strand Starting at position 702 of SEQ ID NO: 316775
accguuuagguagacuuua

SEQ ID NO: 373894 - RNA, 19 nt, Artificial Sequence
  Description of Artificial Sequence: Synthetic oligonucleotide
  Antisense Strand to SEQ ID NO: 373893
uaaagucuaccuaaacggu

SEQ ID NO: 373895 - RNA, 19 nt, Artificial Sequence
  Description of Artificial Sequence: Synthetic oligonucleotide
  Sense Strand Starting at position 702 of SEQ ID NO: 317173
ggcuuagcaacguagauaa

SEQ ID NO: 373896 - RNA, 19 nt, Artificial Sequence
  Description of Artificial Sequence: Synthetic oligonucleotide
  Antisense Strand to SEQ ID NO: 373895
uuaucuacguugcuaagcc

SEQ ID NO: 373897 - RNA, 19 nt, Artificial Sequence
  Description of Artificial Sequence: Synthetic oligonucleotide
  Sense Strand Starting at position 702 of SEQ ID NO: 317333
ggaguucucuuaccuuuag

SEQ ID NO: 373898 - RNA, 19 nt, Artificial Sequence
  Description of Artificial Sequence: Synthetic oligonucleotide
  Antisense Strand to SEQ ID NO: 373897
cuaaagguaagagaacucc

SEQ ID NO: 373899 - RNA, 19 nt, Artificial Sequence
  Description of Artificial Sequence: Synthetic oligonucleotide
  Sense Strand Starting at position 702 of SEQ ID NO: 317360
ggccucaacucagcaauaa

SEQ ID NO: 373900 - RNA, 19 nt, Artificial Sequence
  Description of Artificial Sequence: Synthetic oligonucleotide
  Antisense Strand to SEQ ID NO: 373899
uuauugcugaguugaggcc

SEQ ID NO: 373901 - RNA, 19 nt, Artificial Sequence
  Description of Artificial Sequence: Synthetic oligonucleotide
  Sense Strand Starting at position 702 of SEQ ID NO: 317458
aacgaucccgagcaacauu

SEQ ID NO: 373902 - RNA, 19 nt, Artificial Sequence
  Description of Artificial Sequence: Synthetic oligonucleotide
  Antisense Strand to SEQ ID NO: 373901
aauguugcucgggaucguu

SEQ ID NO: 373903 - RNA, 19 nt, Artificial Sequence
  Description of Artificial Sequence: Synthetic oligonucleotide
  Sense Strand Starting at position 702 of SEQ ID NO: 317467
gagcaacauuuagagaugu

SEQ ID NO: 373904 - RNA, 19 nt, Artificial Sequence
  Description of Artificial Sequence: Synthetic oligonucleotide
  Antisense Strand to SEQ ID NO: 373903
acaucucuaaauguugcuc

SEQ ID NO: 373905 - RNA, 19 nt, Artificial Sequence
  Description of Artificial Sequence: Synthetic oligonucleotide
  Sense Strand Starting at position 702 of SEQ ID NO: 317532
ccaaaugggucucugacaa

SEQ ID NO: 373906 - RNA, 19 nt, Artificial Sequence
  Description of Artificial Sequence: Synthetic oligonucleotide
  Antisense Strand to SEQ ID NO: 373905
uugucagagacccauuugg

SEQ ID NO: 373907 - RNA, 19 nt, Artificial Sequence
  Description of Artificial Sequence: Synthetic oligonucleotide
  Sense Strand Starting at position 702 of SEQ ID NO: 317593
cggauuuauuguccgccaa

SEQ ID NO: 373908 - RNA, 19 nt, Artificial Sequence
  Description of Artificial Sequence: Synthetic oligonucleotide
  Antisense Strand to SEQ ID NO: 373907
uuggcggacaauaaauccg

SEQ ID NO: 373909 - RNA, 19 nt, Artificial Sequence
  Description of Artificial Sequence: Synthetic oligonucleotide
  Sense Strand Starting at position 702 of SEQ ID NO: 317594
ggauuuauuguccgccaac

SEQ ID NO: 373910 - RNA, 19 nt, Artificial Sequence
  Description of Artificial Sequence: Synthetic oligonucleotide
  Antisense Strand to SEQ ID NO: 373909
guuggcggacaauaaaucc

SEQ ID NO: 373911 - RNA, 19 nt, Artificial Sequence
  Description of Artificial Sequence: Synthetic oligonucleotide
  Sense Strand Starting at position 702 of SEQ ID NO: 317595
gauuuauuguccgccaaca

SEQ ID NO: 373912 - RNA, 19 nt, Artificial Sequence
  Description of Artificial Sequence: Synthetic oligonucleotide
  Antisense Strand to SEQ ID NO: 373911
uguuggcggacaauaaauc

SEQ ID NO: 373913 - RNA, 19 nt, Artificial Sequence
  Description of Artificial Sequence: Synthetic oligonucleotide
  Sense Strand Starting at position 702 of SEQ ID NO: 317757
gcucuuaucagcccgaugu

SEQ ID NO: 373914 - RNA, 19 nt, Artificial Sequence
  Description of Artificial Sequence: Synthetic oligonucleotide
  Antisense Strand to SEQ ID NO: 373913
acaucgggcugauaagagc

SEQ ID NO: 373915 - RNA, 19 nt, Artificial Sequence
  Description of Artificial Sequence: Synthetic oligonucleotide
  Sense Strand Starting at position 702 of SEQ ID NO: 317765
cagcccgauguguaaugaa

SEQ ID NO: 373916 - RNA, 19 nt, Artificial Sequence
  Description of Artificial Sequence: Synthetic oligonucleotide
  Antisense Strand to SEQ ID NO: 373915
uucauuacacaucgggcug

SEQ ID NO: 373917 - RNA, 19 nt, Artificial Sequence
  Description of Artificial Sequence: Synthetic oligonucleotide
  Sense Strand Starting at position 702 of SEQ ID NO: 318001
ugaacugucucuuuaaaga

SEQ ID NO: 373918 - RNA, 19 nt, Artificial Sequence
  Description of Artificial Sequence: Synthetic oligonucleotide
  Antisense Strand to SEQ ID NO: 373917
ucuuuaaagagacaguuca

SEQ ID NO: 373919 - RNA, 19 nt, Artificial Sequence
  Description of Artificial Sequence: Synthetic oligonucleotide
  Sense Strand Starting at position 702 of SEQ ID NO: 318235
uguagauuucuccggguaa

SEQ ID NO: 373920 - RNA, 19 nt, Artificial Sequence
  Description of Artificial Sequence: Synthetic oligonucleotide
  Antisense Strand to SEQ ID NO: 373919
uuacccggagaaaucuaca

SEQ ID NO: 373921 - RNA, 19 nt, Artificial Sequence
  Description of Artificial Sequence: Synthetic oligonucleotide
  Sense Strand Starting at position 702 of SEQ ID NO: 318312
uuucgaugucuugaaagca

SEQ ID NO: 373922 - RNA, 19 nt, Artificial Sequence
  Description of Artificial Sequence: Synthetic oligonucleotide
  Antisense Strand to SEQ ID NO: 373921
ugcuuucaagacaucgaaa

SEQ ID NO: 373923 - RNA, 19 nt, Artificial Sequence
  Description of Artificial Sequence: Synthetic oligonucleotide
  Sense Strand Starting at position 702 of SEQ ID NO: 318796
agcauauuauggguuuaga

SEQ ID NO: 373924 - RNA, 19 nt, Artificial Sequence
  Description of Artificial Sequence: Synthetic oligonucleotide
  Antisense Strand to SEQ ID NO: 373923
ucuaaacccauaauaugcu

SEQ ID NO: 373925 - RNA, 19 nt, Artificial Sequence
  Description of Artificial Sequence: Synthetic oligonucleotide
  Sense Strand Starting at position 702 of SEQ ID NO: 318831
uggugagucuuugccauuu

SEQ ID NO: 373926 - RNA, 19 nt, Artificial Sequence
  Description of Artificial Sequence: Synthetic oligonucleotide
  Antisense Strand to SEQ ID NO: 373925
aaauggcaaagacucacca

SEQ ID NO: 373927 - RNA, 19 nt, Artificial Sequence
  Description of Artificial Sequence: Synthetic oligonucleotide
  Sense Strand Starting at position 702 of SEQ ID NO: 318950
uuuaguaaucgguacuauc

SEQ ID NO: 373928 - RNA, 19 nt, Artificial Sequence
  Description of Artificial Sequence: Synthetic oligonucleotide
  Antisense Strand to SEQ ID NO: 373927
gauaguaccgauuacuaaa

SEQ ID NO: 373929 - RNA, 19 nt, Artificial Sequence
  Description of Artificial Sequence: Synthetic oligonucleotide
  Sense Strand Starting at position 702 of SEQ ID NO: 318960
gguacuauccuauguuuaa

SEQ ID NO: 373930 - RNA, 19 nt, Artificial Sequence
  Description of Artificial Sequence: Synthetic oligonucleotide
  Antisense Strand to SEQ ID NO: 373929
uuaaacauaggauaguacc

SEQ ID NO: 373931 - RNA, 19 nt, Artificial Sequence
  Description of Artificial Sequence: Synthetic oligonucleotide
  Sense Strand Starting at position 702 of SEQ ID NO: 318961
guacuauccuauguuuaau

SEQ ID NO: 373932 - RNA, 19 nt, Artificial Sequence
  Description of Artificial Sequence: Synthetic oligonucleotide
  Antisense Strand to SEQ ID NO: 373931
auuaaacauaggauaguac

SEQ ID NO: 373933 - RNA, 19 nt, Artificial Sequence
  Description of Artificial Sequence: Synthetic oligonucleotide
  Sense Strand Starting at position 702 of SEQ ID NO: 318986
cuaauauaccuuggguaca

SEQ ID NO: 373934 - RNA, 19 nt, Artificial Sequence
  Description of Artificial Sequence: Synthetic oligonucleotide
  Antisense Strand to SEQ ID NO: 373933
uguacccaagguauauuag

SEQ ID NO: 373935 - RNA, 19 nt, Artificial Sequence
  Description of Artificial Sequence: Synthetic oligonucleotide
  Sense Strand Starting at position 702 of SEQ ID NO: 319090
auggccaacuuuguaagau

SEQ ID NO: 373936 - RNA, 19 nt, Artificial Sequence
  Description of Artificial Sequence: Synthetic oligonucleotide
  Antisense Strand to SEQ ID NO: 373935
aucuuacaaaguuggccau

SEQ ID NO: 373937 - RNA, 19 nt, Artificial Sequence
  Description of Artificial Sequence: Synthetic oligonucleotide
  Sense Strand Starting at position 702 of SEQ ID NO: 319094
ccaacuuuguaagauuuag

SEQ ID NO: 373938 - RNA, 19 nt, Artificial Sequence
  Description of Artificial Sequence: Synthetic oligonucleotide
  Antisense Strand to SEQ ID NO: 373937
cuaaaucuuacaaaguugg

SEQ ID NO: 373939 - RNA, 19 nt, Artificial Sequence
  Description of Artificial Sequence: Synthetic oligonucleotide
  Sense Strand Starting at position 702 of SEQ ID NO: 319111
aguaaaucccacuggcuaa

SEQ ID NO: 373940 - RNA, 19 nt, Artificial Sequence
  Description of Artificial Sequence: Synthetic oligonucleotide
  Antisense Strand to SEQ ID NO: 373939
uuagccagugggauuuacu

SEQ ID NO: 373941 - RNA, 19 nt, Artificial Sequence
  Description of Artificial Sequence: Synthetic oligonucleotide
  Sense Strand Starting at position 703 of SEQ ID NO: 315453
uagcuuucuccagaaacgu

SEQ ID NO: 373942 - RNA, 19 nt, Artificial Sequence
  Description of Artificial Sequence: Synthetic oligonucleotide
  Antisense Strand to SEQ ID NO: 373941
acguuucuggagaaagcua

SEQ ID NO: 373943 - RNA, 19 nt, Artificial Sequence
  Description of Artificial Sequence: Synthetic oligonucleotide
  Sense Strand Starting at position 703 of SEQ ID NO: 315545
gucggaaaucucgaauaaa

SEQ ID NO: 373944 - RNA, 19 nt, Artificial Sequence
  Description of Artificial Sequence: Synthetic oligonucleotide
  Antisense Strand to SEQ ID NO: 373943
uuuauucgagauuuccgac

SEQ ID NO: 373945 - RNA, 19 nt, Artificial Sequence
  Description of Artificial Sequence: Synthetic oligonucleotide
  Sense Strand Starting at position 703 of SEQ ID NO: 315621
gcugucaaccuccaaagau

SEQ ID NO: 373946 - RNA, 19 nt, Artificial Sequence
  Description of Artificial Sequence: Synthetic oligonucleotide
  Antisense Strand to SEQ ID NO: 373945
aucuuuggagguugacagc

SEQ ID NO: 373947 - RNA, 19 nt, Artificial Sequence
  Description of Artificial Sequence: Synthetic oligonucleotide
  Sense Strand Starting at position 703 of SEQ ID NO: 315653
accguuuagguagacuuua

SEQ ID NO: 373948 - RNA, 19 nt, Artificial Sequence
  Description of Artificial Sequence: Synthetic oligonucleotide
  Antisense Strand to SEQ ID NO: 373947
uaaagucuaccuaaacggu

SEQ ID NO: 373949 - RNA, 19 nt, Artificial Sequence
  Description of Artificial Sequence: Synthetic oligonucleotide
  Sense Strand Starting at position 703 of SEQ ID NO: 316051
ggcuuagcaacguagauaa

SEQ ID NO: 373950 - RNA, 19 nt, Artificial Sequence
  Description of Artificial Sequence: Synthetic oligonucleotide
  Antisense Strand to SEQ ID NO: 373949
uuaucuacguugcuaagcc

SEQ ID NO: 373951 - RNA, 19 nt, Artificial Sequence
  Description of Artificial Sequence: Synthetic oligonucleotide
  Sense Strand Starting at position 703 of SEQ ID NO: 316211
ggaguucucuuaccuuuag

SEQ ID NO: 373952 - RNA, 19 nt, Artificial Sequence
  Description of Artificial Sequence: Synthetic oligonucleotide
  Antisense Strand to SEQ ID NO: 373951
cuaaagguaagagaacucc

SEQ ID NO: 373953 - RNA, 19 nt, Artificial Sequence
  Description of Artificial Sequence: Synthetic oligonucleotide
  Sense Strand Starting at position 703 of SEQ ID NO: 316238
ggccucaacucagcaauaa

SEQ ID NO: 373954 - RNA, 19 nt, Artificial Sequence
  Description of Artificial Sequence: Synthetic oligonucleotide
  Antisense Strand to SEQ ID NO: 373953
uuauugcugaguugaggcc

SEQ ID NO: 373955 - RNA, 19 nt, Artificial Sequence
  Description of Artificial Sequence: Synthetic oligonucleotide
  Sense Strand Starting at position 703 of SEQ ID NO: 316336
aacgaucccgagcaacauu

SEQ ID NO: 373956 - RNA, 19 nt, Artificial Sequence
  Description of Artificial Sequence: Synthetic oligonucleotide
  Antisense Strand to SEQ ID NO: 373955
aauguugcucgggaucguu

SEQ ID NO: 373957 - RNA, 19 nt, Artificial Sequence
  Description of Artificial Sequence: Synthetic oligonucleotide
  Sense Strand Starting at position 703 of SEQ ID NO: 316345
gagcaacauuuagagaugu

SEQ ID NO: 373958 - RNA, 19 nt, Artificial Sequence
  Description of Artificial Sequence: Synthetic oligonucleotide
  Antisense Strand to SEQ ID NO: 373957
acaucucuaaauguugcuc

SEQ ID NO: 373959 - RNA, 19 nt, Artificial Sequence
  Description of Artificial Sequence: Synthetic oligonucleotide
  Sense Strand Starting at position 703 of SEQ ID NO: 316410
ccaaaugggucucugacaa

SEQ ID NO: 373960 - RNA, 19 nt, Artificial Sequence
  Description of Artificial Sequence: Synthetic oligonucleotide
  Antisense Strand to SEQ ID NO: 373959
uugucagagacccauuugg

SEQ ID NO: 373961 - RNA, 19 nt, Artificial Sequence
  Description of Artificial Sequence: Synthetic oligonucleotide
  Sense Strand Starting at position 703 of SEQ ID NO: 316471
cggauuuauuguccgccaa

SEQ ID NO: 373962 - RNA, 19 nt, Artificial Sequence
  Description of Artificial Sequence: Synthetic oligonucleotide
  Antisense Strand to SEQ ID NO: 373961
uuggcggacaauaaauccg

SEQ ID NO: 373963 - RNA, 19 nt, Artificial Sequence
  Description of Artificial Sequence: Synthetic oligonucleotide
  Sense Strand Starting at position 703 of SEQ ID NO: 316472
ggauuuauuguccgccaac

SEQ ID NO: 373964 - RNA, 19 nt, Artificial Sequence
  Description of Artificial Sequence: Synthetic oligonucleotide
  Antisense Strand to SEQ ID NO: 373963
guuggcggacaauaaaucc

SEQ ID NO: 373965 - RNA, 19 nt, Artificial Sequence
  Description of Artificial Sequence: Synthetic oligonucleotide
  Sense Strand Starting at position 703 of SEQ ID NO: 316473
gauuuauuguccgccaaca

SEQ ID NO: 373966 - RNA, 19 nt, Artificial Sequence
  Description of Artificial Sequence: Synthetic oligonucleotide
  Antisense Strand to SEQ ID NO: 373965
uguuggcggacaauaaauc

SEQ ID NO: 373967 - RNA, 19 nt, Artificial Sequence
  Description of Artificial Sequence: Synthetic oligonucleotide
  Sense Strand Starting at position 703 of SEQ ID NO: 316635
gcucuuaucagcccgaugu

SEQ ID NO: 373968 - RNA, 19 nt, Artificial Sequence
  Description of Artificial Sequence: Synthetic oligonucleotide
  Antisense Strand to SEQ ID NO: 373967
acaucgggcugauaagagc

SEQ ID NO: 373969 - RNA, 19 nt, Artificial Sequence
  Description of Artificial Sequence: Synthetic oligonucleotide
  Sense Strand Starting at position 703 of SEQ ID NO: 316643
cagcccgauguguaaugaa

SEQ ID NO: 373970 - RNA, 19 nt, Artificial Sequence
  Description of Artificial Sequence: Synthetic oligonucleotide
  Antisense Strand to SEQ ID NO: 373969
uucauuacacaucgggcug

SEQ ID NO: 373971 - RNA, 19 nt, Artificial Sequence
  Description of Artificial Sequence: Synthetic oligonucleotide
  Sense Strand Starting at position 703 of SEQ ID NO: 316879
ugaacugucucuuuaaaga

SEQ ID NO: 373972 - RNA, 19 nt, Artificial Sequence
  Description of Artificial Sequence: Synthetic oligonucleotide
  Antisense Strand to SEQ ID NO: 373971
ucuuuaaagagacaguuca

SEQ ID NO: 373973 - RNA, 19 nt, Artificial Sequence
  Description of Artificial Sequence: Synthetic oligonucleotide
  Sense Strand Starting at position 703 of SEQ ID NO: 317113
uguagauuucuccggguaa

SEQ ID NO: 373974 - RNA, 19 nt, Artificial Sequence
  Description of Artificial Sequence: Synthetic oligonucleotide
  Antisense Strand to SEQ ID NO: 373973
uuacccggagaaaucuaca

SEQ ID NO: 373975 - RNA, 19 nt, Artificial Sequence
  Description of Artificial Sequence: Synthetic oligonucleotide
  Sense Strand Starting at position 703 of SEQ ID NO: 317190
uuucgaugucuugaaagca

SEQ ID NO: 373976 - RNA, 19 nt, Artificial Sequence
  Description of Artificial Sequence: Synthetic oligonucleotide
  Antisense Strand to SEQ ID NO: 373975
ugcuuucaagacaucgaaa

SEQ ID NO: 373977 - RNA, 19 nt, Artificial Sequence
  Description of Artificial Sequence: Synthetic oligonucleotide
  Sense Strand Starting at position 703 of SEQ ID NO: 317674
agcauauuauggguuuaga

SEQ ID NO: 373978 - RNA, 19 nt, Artificial Sequence
  Description of Artificial Sequence: Synthetic oligonucleotide
  Antisense Strand to SEQ ID NO: 373977
ucuaaacccauaauaugcu

SEQ ID NO: 373979 - RNA, 19 nt, Artificial Sequence
  Description of Artificial Sequence: Synthetic oligonucleotide
  Sense Strand Starting at position 703 of SEQ ID NO: 317709
uggugagucuuugccauuu

SEQ ID NO: 373980 - RNA, 19 nt, Artificial Sequence
  Description of Artificial Sequence: Synthetic oligonucleotide
  Antisense Strand to SEQ ID NO: 373979
aaauggcaaagacucacca

SEQ ID NO: 373981 - RNA, 19 nt, Artificial Sequence
  Description of Artificial Sequence: Synthetic oligonucleotide
  Sense Strand Starting at position 703 of SEQ ID NO: 317828
uuuaguaaucgguacuauc

SEQ ID NO: 373982 - RNA, 19 nt, Artificial Sequence
  Description of Artificial Sequence: Synthetic oligonucleotide
  Antisense Strand to SEQ ID NO: 373981
gauaguaccgauuacuaaa

SEQ ID NO: 373983 - RNA, 19 nt, Artificial Sequence
  Description of Artificial Sequence: Synthetic oligonucleotide
  Sense Strand Starting at position 703 of SEQ ID NO: 317838
gguacuauccuauguuuaa

SEQ ID NO: 373984 - RNA, 19 nt, Artificial Sequence
  Description of Artificial Sequence: Synthetic oligonucleotide
  Antisense Strand to SEQ ID NO: 373983
uuaaacauaggauaguacc

SEQ ID NO: 373985 - RNA, 19 nt, Artificial Sequence
  Description of Artificial Sequence: Synthetic oligonucleotide
  Sense Strand Starting at position 703 of SEQ ID NO: 317864
cuaauauaccuuggguaca

SEQ ID NO: 373986 - RNA, 19 nt, Artificial Sequence
  Description of Artificial Sequence: Synthetic oligonucleotide
  Antisense Strand to SEQ ID NO: 373985
uguacccaagguauauuag

SEQ ID NO: 373987 - RNA, 19 nt, Artificial Sequence
  Description of Artificial Sequence: Synthetic oligonucleotide
  Sense Strand Starting at position 703 of SEQ ID NO: 317968
auggccaacuuuguaagau

SEQ ID NO: 373988 - RNA, 19 nt, Artificial Sequence
  Description of Artificial Sequence: Synthetic oligonucleotide
  Antisense Strand to SEQ ID NO: 373987
aucuuacaaaguuggccau

SEQ ID NO: 373989 - RNA, 19 nt, Artificial Sequence
  Description of Artificial Sequence: Synthetic oligonucleotide
  Sense Strand Starting at position 703 of SEQ ID NO: 317972
ccaacuuuguaagauuuag

SEQ ID NO: 373990 - RNA, 19 nt, Artificial Sequence
  Description of Artificial Sequence: Synthetic oligonucleotide
  Antisense Strand to SEQ ID NO: 373989
cuaaaucuuacaaaguugg

SEQ ID NO: 373991 - RNA, 19 nt, Artificial Sequence
  Description of Artificial Sequence: Synthetic oligonucleotide
  Sense Strand Starting at position 703 of SEQ ID NO: 317989
aguaaaucccacuggcuaa

SEQ ID NO: 373992 - RNA, 19 nt, Artificial Sequence
  Description of Artificial Sequence: Synthetic oligonucleotide
  Antisense Strand to SEQ ID NO: 373991
uuagccagugggauuuacu

SEQ ID NO: 373993 - RNA, 19 nt, Artificial Sequence
  Description of Artificial Sequence: Synthetic oligonucleotide
  Sense Strand Starting at position 703 of SEQ ID NO: 318239
guguaaauccaguagaacu

SEQ ID NO: 373994 - RNA, 19 nt, Artificial Sequence
  Description of Artificial Sequence: Synthetic oligonucleotide
  Antisense Strand to SEQ ID NO: 373993
aguucuacuggauuuacac

SEQ ID NO: 373995 - RNA, 19 nt, Artificial Sequence
  Description of Artificial Sequence: Synthetic oligonucleotide
  Sense Strand Starting at position 703 of SEQ ID NO: 318334
gguggugacuaauuuguuu

SEQ ID NO: 373996 - RNA, 19 nt, Artificial Sequence
  Description of Artificial Sequence: Synthetic oligonucleotide
  Antisense Strand to SEQ ID NO: 373995
aaacaaauuagucaccacc

SEQ ID NO: 373997 - RNA, 19 nt, Artificial Sequence
  Description of Artificial Sequence: Synthetic oligonucleotide
  Sense Strand Starting at position 703 of SEQ ID NO: 318338
gugacuaauuuguuucggu

SEQ ID NO: 373998 - RNA, 19 nt, Artificial Sequence
  Description of Artificial Sequence: Synthetic oligonucleotide
  Antisense Strand to SEQ ID NO: 373997
accgaaacaaauuagucac

SEQ ID NO: 373999 - RNA, 19 nt, Artificial Sequence
  Description of Artificial Sequence: Synthetic oligonucleotide
  Sense Strand Starting at position 703 of SEQ ID NO: 318388
ucagauaauggccauuguu

SEQ ID NO: 374000 - RNA, 19 nt, Artificial Sequence
  Description of Artificial Sequence: Synthetic oligonucleotide
  Antisense Strand to SEQ ID NO: 373999
aacaauggccauuaucuga

SEQ ID NO: 374001 - RNA, 19 nt, Artificial Sequence
  Description of Artificial Sequence: Synthetic oligonucleotide
  Sense Strand Starting at position 703 of SEQ ID NO: 318391
gauaauggccauuguuuga

SEQ ID NO: 374002 - RNA, 19 nt, Artificial Sequence
  Description of Artificial Sequence: Synthetic oligonucleotide
  Antisense Strand to SEQ ID NO: 374001
ucaaacaauggccauuauc

SEQ ID NO: 374003 - RNA, 19 nt, Artificial Sequence
  Description of Artificial Sequence: Synthetic oligonucleotide
  Sense Strand Starting at position 703 of SEQ ID NO: 318395
auggccauuguuugagaga

SEQ ID NO: 374004 - RNA, 19 nt, Artificial Sequence
  Description of Artificial Sequence: Synthetic oligonucleotide
  Antisense Strand to SEQ ID NO: 374003
ucucucaaacaauggccau

SEQ ID NO: 374005 - RNA, 19 nt, Artificial Sequence
  Description of Artificial Sequence: Synthetic oligonucleotide
  Sense Strand Starting at position 703 of SEQ ID NO: 318476
cagauauucccguagaguu

SEQ ID NO: 374006 - RNA, 19 nt, Artificial Sequence
  Description of Artificial Sequence: Synthetic oligonucleotide
  Antisense Strand to SEQ ID NO: 374005
aacucuacgggaauaucug

SEQ ID NO: 374007 - RNA, 19 nt, Artificial Sequence
  Description of Artificial Sequence: Synthetic oligonucleotide
  Sense Strand Starting at position 703 of SEQ ID NO: 318676
ugaugcauuguguauuaaa

SEQ ID NO: 374008 - RNA, 19 nt, Artificial Sequence
  Description of Artificial Sequence: Synthetic oligonucleotide
  Antisense Strand to SEQ ID NO: 374007
uuuaauacacaaugcauca

SEQ ID NO: 374009 - RNA, 19 nt, Artificial Sequence
  Description of Artificial Sequence: Synthetic oligonucleotide
  Sense Strand Starting at position 703 of SEQ ID NO: 318816
gaggaaacgucgguaggaa

SEQ ID NO: 374010 - RNA, 19 nt, Artificial Sequence
  Description of Artificial Sequence: Synthetic oligonucleotide
  Antisense Strand to SEQ ID NO: 374009
uuccuaccgacguuuccuc

SEQ ID NO: 374011 - RNA, 19 nt, Artificial Sequence
  Description of Artificial Sequence: Synthetic oligonucleotide
  Sense Strand Starting at position 703 of SEQ ID NO: 318817
aggaaacgucgguaggaaa

SEQ ID NO: 374012 - RNA, 19 nt, Artificial Sequence
  Description of Artificial Sequence: Synthetic oligonucleotide
  Antisense Strand to SEQ ID NO: 374011
uuuccuaccgacguuuccu

SEQ ID NO: 374013 - RNA, 19 nt, Artificial Sequence
  Description of Artificial Sequence: Synthetic oligonucleotide
  Sense Strand Starting at position 703 of SEQ ID NO: 318839
aaaggucgucuggaaucau

SEQ ID NO: 374014 - RNA, 19 nt, Artificial Sequence
  Description of Artificial Sequence: Synthetic oligonucleotide
  Antisense Strand to SEQ ID NO: 374013
augauuccagacgaccuuu

SEQ ID NO: 374015 - RNA, 19 nt, Artificial Sequence
  Description of Artificial Sequence: Synthetic oligonucleotide
  Sense Strand Starting at position 703 of SEQ ID NO: 318860
gcagguccuggcuaaauua

SEQ ID NO: 374016 - RNA, 19 nt, Artificial Sequence
  Description of Artificial Sequence: Synthetic oligonucleotide
  Antisense Strand to SEQ ID NO: 374015
uaauuuagccaggaccugc

SEQ ID NO: 374017 - RNA, 19 nt, Artificial Sequence
  Description of Artificial Sequence: Synthetic oligonucleotide
  Sense Strand Starting at position 703 of SEQ ID NO: 318991
auggcauugcgcuccgaaa

SEQ ID NO: 374018 - RNA, 19 nt, Artificial Sequence
  Description of Artificial Sequence: Synthetic oligonucleotide
  Antisense Strand to SEQ ID NO: 374017
uuucggagcgcaaugccau

SEQ ID NO: 374019 - RNA, 19 nt, Artificial Sequence
  Description of Artificial Sequence: Synthetic oligonucleotide
  Sense Strand Starting at position 703 of SEQ ID NO: 318992
uggcauugcgcuccgaaau

SEQ ID NO: 374020 - RNA, 19 nt, Artificial Sequence
  Description of Artificial Sequence: Synthetic oligonucleotide
  Antisense Strand to SEQ ID NO: 374019
auuucggagcgcaaugcca

SEQ ID NO: 374021 - RNA, 19 nt, Artificial Sequence
  Description of Artificial Sequence: Synthetic oligonucleotide
  Sense Strand Starting at position 704 of SEQ ID NO: 315493
guagaagcauuuggacaaa

SEQ ID NO: 374022 - RNA, 19 nt, Artificial Sequence
  Description of Artificial Sequence: Synthetic oligonucleotide
  Antisense Strand to SEQ ID NO: 374021
uuuguccaaaugcuucuac

SEQ ID NO: 374023 - RNA, 19 nt, Artificial Sequence
  Description of Artificial Sequence: Synthetic oligonucleotide
  Sense Strand Starting at position 704 of SEQ ID NO: 315583
ccaggcgagucauccaaca

SEQ ID NO: 374024 - RNA, 19 nt, Artificial Sequence
  Description of Artificial Sequence: Synthetic oligonucleotide
  Antisense Strand to SEQ ID NO: 374023
uguuggaugacucgccugg

SEQ ID NO: 374025 - RNA, 19 nt, Artificial Sequence
  Description of Artificial Sequence: Synthetic oligonucleotide
  Sense Strand Starting at position 704 of SEQ ID NO: 315585
aggcgagucauccaacacu

SEQ ID NO: 374026 - RNA, 19 nt, Artificial Sequence
  Description of Artificial Sequence: Synthetic oligonucleotide
  Antisense Strand to SEQ ID NO: 374025
aguguuggaugacucgccu

SEQ ID NO: 374027 - RNA, 19 nt, Artificial Sequence
  Description of Artificial Sequence: Synthetic oligonucleotide
  Sense Strand Starting at position 704 of SEQ ID NO: 315714
gaggguuauugacccugga

SEQ ID NO: 374028 - RNA, 19 nt, Artificial Sequence
  Description of Artificial Sequence: Synthetic oligonucleotide
  Antisense Strand to SEQ ID NO: 374027
uccagggucaauaacccuc

SEQ ID NO: 374029 - RNA, 19 nt, Artificial Sequence
  Description of Artificial Sequence: Synthetic oligonucleotide
  Sense Strand Starting at position 704 of SEQ ID NO: 316428
gggagacuuucuccucuuc

SEQ ID NO: 374030 - RNA, 19 nt, Artificial Sequence
  Description of Artificial Sequence: Synthetic oligonucleotide
  Antisense Strand to SEQ ID NO: 374029
gaagaggagaaagucuccc

SEQ ID NO: 374031 - RNA, 19 nt, Artificial Sequence
  Description of Artificial Sequence: Synthetic oligonucleotide
  Sense Strand Starting at position 704 of SEQ ID NO: 316724
gagcgcuagagacagauau

SEQ ID NO: 374032 - RNA, 19 nt, Artificial Sequence
  Description of Artificial Sequence: Synthetic oligonucleotide
  Antisense Strand to SEQ ID NO: 374031
auaucugucucuagcgcuc

SEQ ID NO: 374033 - RNA, 19 nt, Artificial Sequence
  Description of Artificial Sequence: Synthetic oligonucleotide
  Sense Strand Starting at position 704 of SEQ ID NO: 317100
ucgcuaucucuccagcauu

SEQ ID NO: 374034 - RNA, 19 nt, Artificial Sequence
  Description of Artificial Sequence: Synthetic oligonucleotide
  Antisense Strand to SEQ ID NO: 374033
aaugcuggagagauagcga

SEQ ID NO: 374035 - RNA, 19 nt, Artificial Sequence
  Description of Artificial Sequence: Synthetic oligonucleotide
  Sense Strand Starting at position 704 of SEQ ID NO: 317111
ccagcauugucaguuugga

SEQ ID NO: 374036 - RNA, 19 nt, Artificial Sequence
  Description of Artificial Sequence: Synthetic oligonucleotide
  Antisense Strand to SEQ ID NO: 374035
uccaaacugacaaugcugg

SEQ ID NO: 374037 - RNA, 19 nt, Artificial Sequence
  Description of Artificial Sequence: Synthetic oligonucleotide
  Sense Strand Starting at position 704 of SEQ ID NO: 317201
ucacuuugauuuggagauc

SEQ ID NO: 374038 - RNA, 19 nt, Artificial Sequence
  Description of Artificial Sequence: Synthetic oligonucleotide
  Antisense Strand to SEQ ID NO: 374037
gaucuccaaaucaaaguga

SEQ ID NO: 374039 - RNA, 19 nt, Artificial Sequence
  Description of Artificial Sequence: Synthetic oligonucleotide
  Sense Strand Starting at position 704 of SEQ ID NO: 317202
cacuuugauuuggagaucu

SEQ ID NO: 374040 - RNA, 19 nt, Artificial Sequence
  Description of Artificial Sequence: Synthetic oligonucleotide
  Antisense Strand to SEQ ID NO: 374039
agaucuccaaaucaaagug

SEQ ID NO: 374041 - RNA, 19 nt, Artificial Sequence
  Description of Artificial Sequence: Synthetic oligonucleotide
  Sense Strand Starting at position 704 of SEQ ID NO: 317376
auguuagaaucgccaacaa

SEQ ID NO: 374042 - RNA, 19 nt, Artificial Sequence
  Description of Artificial Sequence: Synthetic oligonucleotide
  Antisense Strand to SEQ ID NO: 374041
uuguuggcgauucuaacau

SEQ ID NO: 374043 - RNA, 19 nt, Artificial Sequence
  Description of Artificial Sequence: Synthetic oligonucleotide
  Sense Strand Starting at position 704 of SEQ ID NO: 317396
cuuguaucaugauuauugu

SEQ ID NO: 374044 - RNA, 19 nt, Artificial Sequence
  Description of Artificial Sequence: Synthetic oligonucleotide
  Antisense Strand to SEQ ID NO: 374043
acaauaaucaugauacaag

SEQ ID NO: 374045 - RNA, 19 nt, Artificial Sequence
  Description of Artificial Sequence: Synthetic oligonucleotide
  Sense Strand Starting at position 704 of SEQ ID NO: 317543
gcuggacccucggcuaaua

SEQ ID NO: 374046 - RNA, 19 nt, Artificial Sequence
  Description of Artificial Sequence: Synthetic oligonucleotide
  Antisense Strand to SEQ ID NO: 374045
uauuagccgaggguccagc

SEQ ID NO: 374047 - RNA, 19 nt, Artificial Sequence
  Description of Artificial Sequence: Synthetic oligonucleotide
  Sense Strand Starting at position 704 of SEQ ID NO: 317545
uggacccucggcuaauaau

SEQ ID NO: 374048 - RNA, 19 nt, Artificial Sequence
  Description of Artificial Sequence: Synthetic oligonucleotide
  Antisense Strand to SEQ ID NO: 374047
auuauuagccgagggucca

SEQ ID NO: 374049 - RNA, 19 nt, Artificial Sequence
  Description of Artificial Sequence: Synthetic oligonucleotide
  Sense Strand Starting at position 704 of SEQ ID NO: 317566
aggagaaagugagaaucau

SEQ ID NO: 374050 - RNA, 19 nt, Artificial Sequence
  Description of Artificial Sequence: Synthetic oligonucleotide
  Antisense Strand to SEQ ID NO: 374049
augauucucacuuucuccu

SEQ ID NO: 374051 - RNA, 19 nt, Artificial Sequence
  Description of Artificial Sequence: Synthetic oligonucleotide
  Sense Strand Starting at position 704 of SEQ ID NO: 317713
gcugccauccuugggacau

SEQ ID NO: 374052 - RNA, 19 nt, Artificial Sequence
  Description of Artificial Sequence: Synthetic oligonucleotide
  Antisense Strand to SEQ ID NO: 374051
augucccaaggauggcagc

SEQ ID NO: 374053 - RNA, 19 nt, Artificial Sequence
  Description of Artificial Sequence: Synthetic oligonucleotide
  Sense Strand Starting at position 704 of SEQ ID NO: 317715
ugccauccuugggacauuu

SEQ ID NO: 374054 - RNA, 19 nt, Artificial Sequence
  Description of Artificial Sequence: Synthetic oligonucleotide
  Antisense Strand to SEQ ID NO: 374053
aaaugucccaaggauggca

SEQ ID NO: 374055 - RNA, 19 nt, Artificial Sequence
  Description of Artificial Sequence: Synthetic oligonucleotide
  Sense Strand Starting at position 704 of SEQ ID NO: 317793
gcuggcauuugacauccaa

SEQ ID NO: 374056 - RNA, 19 nt, Artificial Sequence
  Description of Artificial Sequence: Synthetic oligonucleotide
  Antisense Strand to SEQ ID NO: 374055
uuggaugucaaaugccagc

SEQ ID NO: 374057 - RNA, 19 nt, Artificial Sequence
  Description of Artificial Sequence: Synthetic oligonucleotide
  Sense Strand Starting at position 704 of SEQ ID NO: 318061
gcuagcuguguacaaggua

SEQ ID NO: 374058 - RNA, 19 nt, Artificial Sequence
  Description of Artificial Sequence: Synthetic oligonucleotide
  Antisense Strand to SEQ ID NO: 374057
uaccuuguacacagcuagc

SEQ ID NO: 374059 - RNA, 19 nt, Artificial Sequence
  Description of Artificial Sequence: Synthetic oligonucleotide
  Sense Strand Starting at position 704 of SEQ ID NO: 318064
agcuguguacaagguauga

SEQ ID NO: 374060 - RNA, 19 nt, Artificial Sequence
  Description of Artificial Sequence: Synthetic oligonucleotide
  Antisense Strand to SEQ ID NO: 374059
ucauaccuuguacacagcu

SEQ ID NO: 374061 - RNA, 19 nt, Artificial Sequence
  Description of Artificial Sequence: Synthetic oligonucleotide
  Sense Strand Starting at position 704 of SEQ ID NO: 318066
cuguguacaagguaugaau

SEQ ID NO: 374062 - RNA, 19 nt, Artificial Sequence
  Description of Artificial Sequence: Synthetic oligonucleotide
  Antisense Strand to SEQ ID NO: 374061
auucauaccuuguacacag

SEQ ID NO: 374063 - RNA, 19 nt, Artificial Sequence
  Description of Artificial Sequence: Synthetic oligonucleotide
  Sense Strand Starting at position 704 of SEQ ID NO: 318068
guguacaagguaugaauca

SEQ ID NO: 374064 - RNA, 19 nt, Artificial Sequence
  Description of Artificial Sequence: Synthetic oligonucleotide
  Antisense Strand to SEQ ID NO: 374063
ugauucauaccuuguacac

SEQ ID NO: 374065 - RNA, 19 nt, Artificial Sequence
  Description of Artificial Sequence: Synthetic oligonucleotide
  Sense Strand Starting at position 704 of SEQ ID NO: 318114
gguacaaccuucuugcauu

SEQ ID NO: 374066 - RNA, 19 nt, Artificial Sequence
  Description of Artificial Sequence: Synthetic oligonucleotide
  Antisense Strand to SEQ ID NO: 374065
aaugcaagaagguuguacc

SEQ ID NO: 374067 - RNA, 19 nt, Artificial Sequence
  Description of Artificial Sequence: Synthetic oligonucleotide
  Sense Strand Starting at position 704 of SEQ ID NO: 318294
ugggcaugaguuuggcaaa

SEQ ID NO: 374068 - RNA, 19 nt, Artificial Sequence
  Description of Artificial Sequence: Synthetic oligonucleotide
  Antisense Strand to SEQ ID NO: 374067
uuugccaaacucaugccca

SEQ ID NO: 374069 - RNA, 19 nt, Artificial Sequence
  Description of Artificial Sequence: Synthetic oligonucleotide
  Sense Strand Starting at position 704 of SEQ ID NO: 318428
guaucaauggccugcaaau

SEQ ID NO: 374070 - RNA, 19 nt, Artificial Sequence
  Description of Artificial Sequence: Synthetic oligonucleotide
  Antisense Strand to SEQ ID NO: 374069
auuugcaggccauugauac

SEQ ID NO: 374071 - RNA, 19 nt, Artificial Sequence
  Description of Artificial Sequence: Synthetic oligonucleotide
  Sense Strand Starting at position 704 of SEQ ID NO: 318478
auuuguccuuguuaaggau

SEQ ID NO: 374072 - RNA, 19 nt, Artificial Sequence
  Description of Artificial Sequence: Synthetic oligonucleotide
  Antisense Strand to SEQ ID NO: 374071
auccuuaacaaggacaaau

SEQ ID NO: 374073 - RNA, 19 nt, Artificial Sequence
  Description of Artificial Sequence: Synthetic oligonucleotide
  Sense Strand Starting at position 704 of SEQ ID NO: 318507
uuccuuuauccagagcugu

SEQ ID NO: 374074 - RNA, 19 nt, Artificial Sequence
  Description of Artificial Sequence: Synthetic oligonucleotide
  Antisense Strand to SEQ ID NO: 374073
acagcucuggauaaaggaa

SEQ ID NO: 374075 - RNA, 19 nt, Artificial Sequence
  Description of Artificial Sequence: Synthetic oligonucleotide
  Sense Strand Starting at position 704 of SEQ ID NO: 318513
uauccagagcuguguaauu

SEQ ID NO: 374076 - RNA, 19 nt, Artificial Sequence
  Description of Artificial Sequence: Synthetic oligonucleotide
  Antisense Strand to SEQ ID NO: 374075
aauuacacagcucuggaua

SEQ ID NO: 374077 - RNA, 19 nt, Artificial Sequence
  Description of Artificial Sequence: Synthetic oligonucleotide
  Sense Strand Starting at position 704 of SEQ ID NO: 318515
uccagagcuguguaauucu

SEQ ID NO: 374078 - RNA, 19 nt, Artificial Sequence
  Description of Artificial Sequence: Synthetic oligonucleotide
  Antisense Strand to SEQ ID NO: 374077
agaauuacacagcucugga

SEQ ID NO: 374079 - RNA, 19 nt, Artificial Sequence
  Description of Artificial Sequence: Synthetic oligonucleotide
  Sense Strand Starting at position 704 of SEQ ID NO: 318597
gauguauaagguugaaaug

SEQ ID NO: 374080 - RNA, 19 nt, Artificial Sequence
  Description of Artificial Sequence: Synthetic oligonucleotide
  Antisense Strand to SEQ ID NO: 374079
cauuucaaccuuauacauc

SEQ ID NO: 374081 - RNA, 19 nt, Artificial Sequence
  Description of Artificial Sequence: Synthetic oligonucleotide
  Sense Strand Starting at position 704 of SEQ ID NO: 318598
auguauaagguugaaaugu

SEQ ID NO: 374082 - RNA, 19 nt, Artificial Sequence
  Description of Artificial Sequence: Synthetic oligonucleotide
  Antisense Strand to SEQ ID NO: 374081
acauuucaaccuuauacau

SEQ ID NO: 374083 - RNA, 19 nt, Artificial Sequence
  Description of Artificial Sequence: Synthetic oligonucleotide
  Sense Strand Starting at position 704 of SEQ ID NO: 318644
gggaauuacucacaacagg

SEQ ID NO: 374084 - RNA, 19 nt, Artificial Sequence
  Description of Artificial Sequence: Synthetic oligonucleotide
  Antisense Strand to SEQ ID NO: 374083
ccuguugugaguaauuccc

SEQ ID NO: 374085 - RNA, 19 nt, Artificial Sequence
  Description of Artificial Sequence: Synthetic oligonucleotide
  Sense Strand Starting at position 704 of SEQ ID NO: 318811
acacauuuggugugugcaa

SEQ ID NO: 374086 - RNA, 19 nt, Artificial Sequence
  Description of Artificial Sequence: Synthetic oligonucleotide
  Antisense Strand to SEQ ID NO: 374085
uugcacacaccaaaugugu

SEQ ID NO: 374087 - RNA, 19 nt, Artificial Sequence
  Description of Artificial Sequence: Synthetic oligonucleotide
  Sense Strand Starting at position 704 of SEQ ID NO: 318812
cacauuuggugugugcaaa

SEQ ID NO: 374088 - RNA, 19 nt, Artificial Sequence
  Description of Artificial Sequence: Synthetic oligonucleotide
  Antisense Strand to SEQ ID NO: 374087
uuugcacacaccaaaugug

SEQ ID NO: 374089 - RNA, 19 nt, Artificial Sequence
  Description of Artificial Sequence: Synthetic oligonucleotide
  Sense Strand Starting at position 704 of SEQ ID NO: 318865
acaggucuuugacucugaa

SEQ ID NO: 374090 - RNA, 19 nt, Artificial Sequence
  Description of Artificial Sequence: Synthetic oligonucleotide
  Antisense Strand to SEQ ID NO: 374089
uucagagucaaagaccugu

SEQ ID NO: 374091 - RNA, 19 nt, Artificial Sequence
  Description of Artificial Sequence: Synthetic oligonucleotide
  Sense Strand Starting at position 704 of SEQ ID NO: 318868
ggucuuugacucugaaacu

SEQ ID NO: 374092 - RNA, 19 nt, Artificial Sequence
  Description of Artificial Sequence: Synthetic oligonucleotide
  Antisense Strand to SEQ ID NO: 374091
aguuucagagucaaagacc

SEQ ID NO: 374093 - RNA, 19 nt, Artificial Sequence
  Description of Artificial Sequence: Synthetic oligonucleotide
  Sense Strand Starting at position 704 of SEQ ID NO: 318906
accagcuucccucaguuua

SEQ ID NO: 374094 - RNA, 19 nt, Artificial Sequence
  Description of Artificial Sequence: Synthetic oligonucleotide
  Antisense Strand to SEQ ID NO: 374093
uaaacugagggaagcuggu

SEQ ID NO: 374095 - RNA, 19 nt, Artificial Sequence
  Description of Artificial Sequence: Synthetic oligonucleotide
  Sense Strand Starting at position 704 of SEQ ID NO: 318952
gcaaauguccuccgaggaa

SEQ ID NO: 374096 - RNA, 19 nt, Artificial Sequence
  Description of Artificial Sequence: Synthetic oligonucleotide
  Antisense Strand to SEQ ID NO: 374095
uuccucggaggacauuugc

SEQ ID NO: 374097 - RNA, 19 nt, Artificial Sequence
  Description of Artificial Sequence: Synthetic oligonucleotide
  Sense Strand Starting at position 704 of SEQ ID NO: 319055
ucauaaggcugcuucugau

SEQ ID NO: 374098 - RNA, 19 nt, Artificial Sequence
  Description of Artificial Sequence: Synthetic oligonucleotide
  Antisense Strand to SEQ ID NO: 374097
aucagaagcagccuuauga

SEQ ID NO: 374099 - RNA, 19 nt, Artificial Sequence
  Description of Artificial Sequence: Synthetic oligonucleotide
  Sense Strand Starting at position 704 of SEQ ID NO: 319067
uucugaucgguguaagaga

SEQ ID NO: 374100 - RNA, 19 nt, Artificial Sequence
  Description of Artificial Sequence: Synthetic oligonucleotide
  Antisense Strand to SEQ ID NO: 374099
ucucuuacaccgaucagaa

SEQ ID NO: 374101 - RNA, 19 nt, Artificial Sequence
  Description of Artificial Sequence: Synthetic oligonucleotide
  Sense Strand Starting at position 705 of SEQ ID NO: 315250
gguuaaacgagucaagcuu

SEQ ID NO: 374102 - RNA, 19 nt, Artificial Sequence
  Description of Artificial Sequence: Synthetic oligonucleotide
  Antisense Strand to SEQ ID NO: 374101
aagcuugacucguuuaacc

SEQ ID NO: 374103 - RNA, 19 nt, Artificial Sequence
  Description of Artificial Sequence: Synthetic oligonucleotide
  Sense Strand Starting at position 705 of SEQ ID NO: 315306
gaaaguagucccuaagguc

SEQ ID NO: 374104 - RNA, 19 nt, Artificial Sequence
  Description of Artificial Sequence: Synthetic oligonucleotide
  Antisense Strand to SEQ ID NO: 374103
gaccuuagggacuacuuuc

SEQ ID NO: 374105 - RNA, 19 nt, Artificial Sequence
  Description of Artificial Sequence: Synthetic oligonucleotide
  Sense Strand Starting at position 705 of SEQ ID NO: 315412
ugagcauuggccugaagaa

SEQ ID NO: 374106 - RNA, 19 nt, Artificial Sequence
  Description of Artificial Sequence: Synthetic oligonucleotide
  Antisense Strand to SEQ ID NO: 374105
uucuucaggccaaugcuca

SEQ ID NO: 374107 - RNA, 19 nt, Artificial Sequence
  Description of Artificial Sequence: Synthetic oligonucleotide
  Sense Strand Starting at position 705 of SEQ ID NO: 315413
gagcauuggccugaagaac

SEQ ID NO: 374108 - RNA, 19 nt, Artificial Sequence
  Description of Artificial Sequence: Synthetic oligonucleotide
  Antisense Strand to SEQ ID NO: 374107
guucuucaggccaaugcuc

SEQ ID NO: 374109 - RNA, 19 nt, Artificial Sequence
  Description of Artificial Sequence: Synthetic oligonucleotide
  Sense Strand Starting at position 705 of SEQ ID NO: 315787
cgugacuccacugaugcua

SEQ ID NO: 374110 - RNA, 19 nt, Artificial Sequence
  Description of Artificial Sequence: Synthetic oligonucleotide
  Antisense Strand to SEQ ID NO: 374109
uagcaucaguggagucacg

SEQ ID NO: 374111 - RNA, 19 nt, Artificial Sequence
  Description of Artificial Sequence: Synthetic oligonucleotide
  Sense Strand Starting at position 705 of SEQ ID NO: 315808
gcauauuuagugugcuaaa

SEQ ID NO: 374112 - RNA, 19 nt, Artificial Sequence
  Description of Artificial Sequence: Synthetic oligonucleotide
  Antisense Strand to SEQ ID NO: 374111
uuuagcacacuaaauaugc

SEQ ID NO: 374113 - RNA, 19 nt, Artificial Sequence
  Description of Artificial Sequence: Synthetic oligonucleotide
  Sense Strand Starting at position 705 of SEQ ID NO: 315845
guuccuuacuucucagaca

SEQ ID NO: 374114 - RNA, 19 nt, Artificial Sequence
  Description of Artificial Sequence: Synthetic oligonucleotide
  Antisense Strand to SEQ ID NO: 374113
ugucugagaaguaaggaac

SEQ ID NO: 374115 - RNA, 19 nt, Artificial Sequence
  Description of Artificial Sequence: Synthetic oligonucleotide
  Sense Strand Starting at position 705 of SEQ ID NO: 315864
cuuuauaagcaagacaguu

SEQ ID NO: 374116 - RNA, 19 nt, Artificial Sequence
  Description of Artificial Sequence: Synthetic oligonucleotide
  Antisense Strand to SEQ ID NO: 374115
aacugucuugcuuauaaag

SEQ ID NO: 374117 - RNA, 19 nt, Artificial Sequence
  Description of Artificial Sequence: Synthetic oligonucleotide
  Sense Strand Starting at position 705 of SEQ ID NO: 316040
uuugaaauauggucaguuc

SEQ ID NO: 374118 - RNA, 19 nt, Artificial Sequence
  Description of Artificial Sequence: Synthetic oligonucleotide
  Antisense Strand to SEQ ID NO: 374117
gaacugaccauauuucaaa

SEQ ID NO: 374119 - RNA, 19 nt, Artificial Sequence
  Description of Artificial Sequence: Synthetic oligonucleotide
  Sense Strand Starting at position 705 of SEQ ID NO: 316115
cuggguagcaggugaucaa

SEQ ID NO: 374120 - RNA, 19 nt, Artificial Sequence
  Description of Artificial Sequence: Synthetic oligonucleotide
  Antisense Strand to SEQ ID NO: 374119
uugaucaccugcuacccag

SEQ ID NO: 374121 - RNA, 19 nt, Artificial Sequence
  Description of Artificial Sequence: Synthetic oligonucleotide
  Sense Strand Starting at position 705 of SEQ ID NO: 316116
uggguagcaggugaucaaa

SEQ ID NO: 374122 - RNA, 19 nt, Artificial Sequence
  Description of Artificial Sequence: Synthetic oligonucleotide
  Antisense Strand to SEQ ID NO: 374121
uuugaucaccugcuaccca

SEQ ID NO: 374123 - RNA, 19 nt, Artificial Sequence
  Description of Artificial Sequence: Synthetic oligonucleotide
  Sense Strand Starting at position 705 of SEQ ID NO: 316162
gggcaaaugguguagccaa

SEQ ID NO: 374124 - RNA, 19 nt, Artificial Sequence
  Description of Artificial Sequence: Synthetic oligonucleotide
  Antisense Strand to SEQ ID NO: 374123
uuggcuacaccauuugccc

SEQ ID NO: 374125 - RNA, 19 nt, Artificial Sequence
  Description of Artificial Sequence: Synthetic oligonucleotide
  Sense Strand Starting at position 705 of SEQ ID NO: 316173
guagccaaaggugaucauu

SEQ ID NO: 374126 - RNA, 19 nt, Artificial Sequence
  Description of Artificial Sequence: Synthetic oligonucleotide
  Antisense Strand to SEQ ID NO: 374125
aaugaucaccuuuggcuac

SEQ ID NO: 374127 - RNA, 19 nt, Artificial Sequence
  Description of Artificial Sequence: Synthetic oligonucleotide
  Sense Strand Starting at position 705 of SEQ ID NO: 316175
agccaaaggugaucauuau

SEQ ID NO: 374128 - RNA, 19 nt, Artificial Sequence
  Description of Artificial Sequence: Synthetic oligonucleotide
  Antisense Strand to SEQ ID NO: 374127
auaaugaucaccuuuggcu

SEQ ID NO: 374129 - RNA, 19 nt, Artificial Sequence
  Description of Artificial Sequence: Synthetic oligonucleotide
  Sense Strand Starting at position 705 of SEQ ID NO: 316176
gccaaaggugaucauuaua

SEQ ID NO: 374130 - RNA, 19 nt, Artificial Sequence
  Description of Artificial Sequence: Synthetic oligonucleotide
  Antisense Strand to SEQ ID NO: 374129
uauaaugaucaccuuuggc

SEQ ID NO: 374131 - RNA, 19 nt, Artificial Sequence
  Description of Artificial Sequence: Synthetic oligonucleotide
  Sense Strand Starting at position 705 of SEQ ID NO: 316195
acuagagacuuguuacaua

SEQ ID NO: 374132 - RNA, 19 nt, Artificial Sequence
  Description of Artificial Sequence: Synthetic oligonucleotide
  Antisense Strand to SEQ ID NO: 374131
uauguaacaagucucuagu

SEQ ID NO: 374133 - RNA, 19 nt, Artificial Sequence
  Description of Artificial Sequence: Synthetic oligonucleotide
  Sense Strand Starting at position 705 of SEQ ID NO: 316300
gagucaaggugucuccaau

SEQ ID NO: 374134 - RNA, 19 nt, Artificial Sequence
  Description of Artificial Sequence: Synthetic oligonucleotide
  Antisense Strand to SEQ ID NO: 374133
auuggagacaccuugacuc

SEQ ID NO: 374135 - RNA, 19 nt, Artificial Sequence
  Description of Artificial Sequence: Synthetic oligonucleotide
  Sense Strand Starting at position 705 of SEQ ID NO: 316336
auaagcaauccugggaacu

SEQ ID NO: 374136 - RNA, 19 nt, Artificial Sequence
  Description of Artificial Sequence: Synthetic oligonucleotide
  Antisense Strand to SEQ ID NO: 374135
aguucccaggauugcuuau

SEQ ID NO: 374137 - RNA, 19 nt, Artificial Sequence
  Description of Artificial Sequence: Synthetic oligonucleotide
  Sense Strand Starting at position 705 of SEQ ID NO: 316348
gggaacuauucccucccaa

SEQ ID NO: 374138 - RNA, 19 nt, Artificial Sequence
  Description of Artificial Sequence: Synthetic oligonucleotide
  Antisense Strand to SEQ ID NO: 374137
uugggagggaauaguuccc

SEQ ID NO: 374139 - RNA, 19 nt, Artificial Sequence
  Description of Artificial Sequence: Synthetic oligonucleotide
  Sense Strand Starting at position 705 of SEQ ID NO: 316475
aaggguuacagagguauau

SEQ ID NO: 374140 - RNA, 19 nt, Artificial Sequence
  Description of Artificial Sequence: Synthetic oligonucleotide
  Antisense Strand to SEQ ID NO: 374139
auauaccucuguaacccuu

SEQ ID NO: 374141 - RNA, 19 nt, Artificial Sequence
  Description of Artificial Sequence: Synthetic oligonucleotide
  Sense Strand Starting at position 705 of SEQ ID NO: 316477
ggguuacagagguauauuc

SEQ ID NO: 374142 - RNA, 19 nt, Artificial Sequence
  Description of Artificial Sequence: Synthetic oligonucleotide
  Antisense Strand to SEQ ID NO: 374141
gaauauaccucuguaaccc

SEQ ID NO: 374143 - RNA, 19 nt, Artificial Sequence
  Description of Artificial Sequence: Synthetic oligonucleotide
  Sense Strand Starting at position 705 of SEQ ID NO: 316598
aacgcaagaccucagugua

SEQ ID NO: 374144 - RNA, 19 nt, Artificial Sequence
  Description of Artificial Sequence: Synthetic oligonucleotide
  Antisense Strand to SEQ ID NO: 374143
uacacugaggucuugcguu

SEQ ID NO: 374145 - RNA, 19 nt, Artificial Sequence
  Description of Artificial Sequence: Synthetic oligonucleotide
  Sense Strand Starting at position 705 of SEQ ID NO: 316601
gcaagaccucaguguagga

SEQ ID NO: 374146 - RNA, 19 nt, Artificial Sequence
  Description of Artificial Sequence: Synthetic oligonucleotide
  Antisense Strand to SEQ ID NO: 374145
uccuacacugaggucuugc

SEQ ID NO: 374147 - RNA, 19 nt, Artificial Sequence
  Description of Artificial Sequence: Synthetic oligonucleotide
  Sense Strand Starting at position 705 of SEQ ID NO: 316714
aagguuucggcagggaaga

SEQ ID NO: 374148 - RNA, 19 nt, Artificial Sequence
  Description of Artificial Sequence: Synthetic oligonucleotide
  Antisense Strand to SEQ ID NO: 374147
ucuucccugccgaaaccuu

SEQ ID NO: 374149 - RNA, 19 nt, Artificial Sequence
  Description of Artificial Sequence: Synthetic oligonucleotide
  Sense Strand Starting at position 705 of SEQ ID NO: 316715
agguuucggcagggaagaa

SEQ ID NO: 374150 - RNA, 19 nt, Artificial Sequence
  Description of Artificial Sequence: Synthetic oligonucleotide
  Antisense Strand to SEQ ID NO: 374149
uucuucccugccgaaaccu

SEQ ID NO: 374151 - RNA, 19 nt, Artificial Sequence
  Description of Artificial Sequence: Synthetic oligonucleotide
  Sense Strand Starting at position 705 of SEQ ID NO: 318650
ggugauccuccagggcaga

SEQ ID NO: 374152 - RNA, 19 nt, Artificial Sequence
  Description of Artificial Sequence: Synthetic oligonucleotide
  Antisense Strand to SEQ ID NO: 374151
ucugcccuggaggaucacc

SEQ ID NO: 374153 - RNA, 19 nt, Artificial Sequence
  Description of Artificial Sequence: Synthetic oligonucleotide
  Sense Strand Starting at position 705 of SEQ ID NO: 318821
cccgcacuuggccaagaau

SEQ ID NO: 374154 - RNA, 19 nt, Artificial Sequence
  Description of Artificial Sequence: Synthetic oligonucleotide
  Antisense Strand to SEQ ID NO: 374153
auucuuggccaagugcggg

SEQ ID NO: 374155 - RNA, 19 nt, Artificial Sequence
  Description of Artificial Sequence: Synthetic oligonucleotide
  Sense Strand Starting at position 705 of SEQ ID NO: 318824
gcacuuggccaagaaugau

SEQ ID NO: 374156 - RNA, 19 nt, Artificial Sequence
  Description of Artificial Sequence: Synthetic oligonucleotide
  Antisense Strand to SEQ ID NO: 374155
aucauucuuggccaagugc

SEQ ID NO: 374157 - RNA, 19 nt, Artificial Sequence
  Description of Artificial Sequence: Synthetic oligonucleotide
  Sense Strand Starting at position 705 of SEQ ID NO: 318833
caagaaugauggcugccau

SEQ ID NO: 374158 - RNA, 19 nt, Artificial Sequence
  Description of Artificial Sequence: Synthetic oligonucleotide
  Antisense Strand to SEQ ID NO: 374157
auggcagccaucauucuug

SEQ ID NO: 374159 - RNA, 19 nt, Artificial Sequence
  Description of Artificial Sequence: Synthetic oligonucleotide
  Sense Strand Starting at position 705 of SEQ ID NO: 318834
aagaaugauggcugccauu

SEQ ID NO: 374160 - RNA, 19 nt, Artificial Sequence
  Description of Artificial Sequence: Synthetic oligonucleotide
  Antisense Strand to SEQ ID NO: 374159
aauggcagccaucauucuu

SEQ ID NO: 374161 - RNA, 19 nt, Artificial Sequence
  Description of Artificial Sequence: Synthetic oligonucleotide
  Sense Strand Starting at position 705 of SEQ ID NO: 318990
cacgaaacgagucggaauu

SEQ ID NO: 374162 - RNA, 19 nt, Artificial Sequence
  Description of Artificial Sequence: Synthetic oligonucleotide
  Antisense Strand to SEQ ID NO: 374161
aauuccgacucguuucgug

SEQ ID NO: 374163 - RNA, 19 nt, Artificial Sequence
  Description of Artificial Sequence: Synthetic oligonucleotide
  Sense Strand Starting at position 705 of SEQ ID NO: 319018
gacugauucuaaguuucug

SEQ ID NO: 374164 - RNA, 19 nt, Artificial Sequence
  Description of Artificial Sequence: Synthetic oligonucleotide
  Antisense Strand to SEQ ID NO: 374163
cagaaacuuagaaucaguc

SEQ ID NO: 374165 - RNA, 19 nt, Artificial Sequence
  Description of Artificial Sequence: Synthetic oligonucleotide
  Sense Strand Starting at position 705 of SEQ ID NO: 319148
gugguaaaggcagauucua

SEQ ID NO: 374166 - RNA, 19 nt, Artificial Sequence
  Description of Artificial Sequence: Synthetic oligonucleotide
  Antisense Strand to SEQ ID NO: 374165
uagaaucugccuuuaccac

SEQ ID NO: 374167 - RNA, 19 nt, Artificial Sequence
  Description of Artificial Sequence: Synthetic oligonucleotide
  Sense Strand Starting at position 705 of SEQ ID NO: 319156
ggcagauucuaaccggaag

SEQ ID NO: 374168 - RNA, 19 nt, Artificial Sequence
  Description of Artificial Sequence: Synthetic oligonucleotide
  Antisense Strand to SEQ ID NO: 374167
cuuccgguuagaaucugcc

SEQ ID NO: 374169 - RNA, 19 nt, Artificial Sequence
  Description of Artificial Sequence: Synthetic oligonucleotide
  Sense Strand Starting at position 705 of SEQ ID NO: 319167
accggaagccuuugauaca

SEQ ID NO: 374170 - RNA, 19 nt, Artificial Sequence
  Description of Artificial Sequence: Synthetic oligonucleotide
  Antisense Strand to SEQ ID NO: 374169
uguaucaaaggcuuccggu

SEQ ID NO: 374171 - RNA, 19 nt, Artificial Sequence
  Description of Artificial Sequence: Synthetic oligonucleotide
  Sense Strand Starting at position 705 of SEQ ID NO: 319184
cauaguaggugcucuggaa

SEQ ID NO: 374172 - RNA, 19 nt, Artificial Sequence
  Description of Artificial Sequence: Synthetic oligonucleotide
  Antisense Strand to SEQ ID NO: 374171
uuccagagcaccuacuaug

SEQ ID NO: 374173 - RNA, 19 nt, Artificial Sequence
  Description of Artificial Sequence: Synthetic oligonucleotide
  Sense Strand Starting at position 705 of SEQ ID NO: 319196
ucuggaaaugcugguugaa

SEQ ID NO: 374174 - RNA, 19 nt, Artificial Sequence
  Description of Artificial Sequence: Synthetic oligonucleotide
  Antisense Strand to SEQ ID NO: 374173
uucaaccagcauuuccaga

SEQ ID NO: 374175 - RNA, 19 nt, Artificial Sequence
  Description of Artificial Sequence: Synthetic oligonucleotide
  Sense Strand Starting at position 705 of SEQ ID NO: 319198
uggaaaugcugguugaauc

SEQ ID NO: 374176 - RNA, 19 nt, Artificial Sequence
  Description of Artificial Sequence: Synthetic oligonucleotide
  Antisense Strand to SEQ ID NO: 374175
gauucaaccagcauuucca

SEQ ID NO: 374177 - RNA, 19 nt, Artificial Sequence
  Description of Artificial Sequence: Synthetic oligonucleotide
  Sense Strand Starting at position 705 of SEQ ID NO: 319199
ggaaaugcugguugaaucu

SEQ ID NO: 374178 - RNA, 19 nt, Artificial Sequence
  Description of Artificial Sequence: Synthetic oligonucleotide
  Antisense Strand to SEQ ID NO: 374177
agauucaaccagcauuucc

SEQ ID NO: 374179 - RNA, 19 nt, Artificial Sequence
  Description of Artificial Sequence: Synthetic oligonucleotide
  Sense Strand Starting at position 705 of SEQ ID NO: 319205
gcugguugaaucugaacau

SEQ ID NO: 374180 - RNA, 19 nt, Artificial Sequence
  Description of Artificial Sequence: Synthetic oligonucleotide
  Antisense Strand to SEQ ID NO: 374179
auguucagauucaaccagc

SEQ ID NO: 374181 - RNA, 19 nt, Artificial Sequence
  Description of Artificial Sequence: Synthetic oligonucleotide
  Sense Strand Starting at position 706 of SEQ ID NO: 315566
uugauaggcuucuuaaauu

SEQ ID NO: 374182 - RNA, 19 nt, Artificial Sequence
  Description of Artificial Sequence: Synthetic oligonucleotide
  Antisense Strand to SEQ ID NO: 374181
aauuuaagaagccuaucaa

SEQ ID NO: 374183 - RNA, 19 nt, Artificial Sequence
  Description of Artificial Sequence: Synthetic oligonucleotide
  Sense Strand Starting at position 706 of SEQ ID NO: 315592
ucgcacucucccuaggaau

SEQ ID NO: 374184 - RNA, 19 nt, Artificial Sequence
  Description of Artificial Sequence: Synthetic oligonucleotide
  Antisense Strand to SEQ ID NO: 374183
auuccuagggagagugcga

SEQ ID NO: 374185 - RNA, 19 nt, Artificial Sequence
  Description of Artificial Sequence: Synthetic oligonucleotide
  Sense Strand Starting at position 706 of SEQ ID NO: 315949
ucagauaaggcguaauauu

SEQ ID NO: 374186 - RNA, 19 nt, Artificial Sequence
  Description of Artificial Sequence: Synthetic oligonucleotide
  Antisense Strand to SEQ ID NO: 374185
aauauuacgccuuaucuga

SEQ ID NO: 374187 - RNA, 19 nt, Artificial Sequence
  Description of Artificial Sequence: Synthetic oligonucleotide
  Sense Strand Starting at position 706 of SEQ ID NO: 316191
agaagccaucucugaaacu

SEQ ID NO: 374188 - RNA, 19 nt, Artificial Sequence
  Description of Artificial Sequence: Synthetic oligonucleotide
  Antisense Strand to SEQ ID NO: 374187
aguuucagagauggcuucu

SEQ ID NO: 374189 - RNA, 19 nt, Artificial Sequence
  Description of Artificial Sequence: Synthetic oligonucleotide
  Sense Strand Starting at position 706 of SEQ ID NO: 316228
agcugaagauucuccauca

SEQ ID NO: 374190 - RNA, 19 nt, Artificial Sequence
  Description of Artificial Sequence: Synthetic oligonucleotide
  Antisense Strand to SEQ ID NO: 374189
ugauggagaaucuucagcu

SEQ ID NO: 374191 - RNA, 19 nt, Artificial Sequence
  Description of Artificial Sequence: Synthetic oligonucleotide
  Sense Strand Starting at position 706 of SEQ ID NO: 316229
gcugaagauucuccaucac

SEQ ID NO: 374192 - RNA, 19 nt, Artificial Sequence
  Description of Artificial Sequence: Synthetic oligonucleotide
  Antisense Strand to SEQ ID NO: 374191
gugauggagaaucuucagc

SEQ ID NO: 374193 - RNA, 19 nt, Artificial Sequence
  Description of Artificial Sequence: Synthetic oligonucleotide
  Sense Strand Starting at position 706 of SEQ ID NO: 316396
uuaugagaugcagacugua

SEQ ID NO: 374194 - RNA, 19 nt, Artificial Sequence
  Description of Artificial Sequence: Synthetic oligonucleotide
  Antisense Strand to SEQ ID NO: 374193
uacagucugcaucucauaa

SEQ ID NO: 374195 - RNA, 19 nt, Artificial Sequence
  Description of Artificial Sequence: Synthetic oligonucleotide
  Sense Strand Starting at position 706 of SEQ ID NO: 316585
ggacgcucucaagaacuga

SEQ ID NO: 374196 - RNA, 19 nt, Artificial Sequence
  Description of Artificial Sequence: Synthetic oligonucleotide
  Antisense Strand to SEQ ID NO: 374195
ucaguucuugagagcgucc

SEQ ID NO: 374197 - RNA, 19 nt, Artificial Sequence
  Description of Artificial Sequence: Synthetic oligonucleotide
  Sense Strand Starting at position 706 of SEQ ID NO: 316693
gguggucaauugucagaua

SEQ ID NO: 374198 - RNA, 19 nt, Artificial Sequence
  Description of Artificial Sequence: Synthetic oligonucleotide
  Antisense Strand to SEQ ID NO: 374197
uaucugacaauugaccacc

SEQ ID NO: 374199 - RNA, 19 nt, Artificial Sequence
  Description of Artificial Sequence: Synthetic oligonucleotide
  Sense Strand Starting at position 706 of SEQ ID NO: 316801
cucacaagaggcugucaua

SEQ ID NO: 374200 - RNA, 19 nt, Artificial Sequence
  Description of Artificial Sequence: Synthetic oligonucleotide
  Antisense Strand to SEQ ID NO: 374199
uaugacagccucuugugag

SEQ ID NO: 374201 - RNA, 19 nt, Artificial Sequence
  Description of Artificial Sequence: Synthetic oligonucleotide
  Sense Strand Starting at position 706 of SEQ ID NO: 317007
gcguuaauuuagucagcca

SEQ ID NO: 374202 - RNA, 19 nt, Artificial Sequence
  Description of Artificial Sequence: Synthetic oligonucleotide
  Antisense Strand to SEQ ID NO: 374201
uggcugacuaaauuaacgc

SEQ ID NO: 374203 - RNA, 19 nt, Artificial Sequence
  Description of Artificial Sequence: Synthetic oligonucleotide
  Sense Strand Starting at position 706 of SEQ ID NO: 317176
cggauuauccgggaguucu

SEQ ID NO: 374204 - RNA, 19 nt, Artificial Sequence
  Description of Artificial Sequence: Synthetic oligonucleotide
  Antisense Strand to SEQ ID NO: 374203
agaacucccggauaauccg

SEQ ID NO: 374205 - RNA, 19 nt, Artificial Sequence
  Description of Artificial Sequence: Synthetic oligonucleotide
  Sense Strand Starting at position 706 of SEQ ID NO: 317721
aucgauuugucccuucuuu

SEQ ID NO: 374206 - RNA, 19 nt, Artificial Sequence
  Description of Artificial Sequence: Synthetic oligonucleotide
  Antisense Strand to SEQ ID NO: 374205
aaagaagggacaaaucgau

SEQ ID NO: 374207 - RNA, 19 nt, Artificial Sequence
  Description of Artificial Sequence: Synthetic oligonucleotide
  Sense Strand Starting at position 706 of SEQ ID NO: 317959
ccaucaggguucuccacau

SEQ ID NO: 374208 - RNA, 19 nt, Artificial Sequence
  Description of Artificial Sequence: Synthetic oligonucleotide
  Antisense Strand to SEQ ID NO: 374207
auguggagaacccugaugg

SEQ ID NO: 374209 - RNA, 19 nt, Artificial Sequence
  Description of Artificial Sequence: Synthetic oligonucleotide
  Sense Strand Starting at position 706 of SEQ ID NO: 318127
ucaucagagucuucuucca

SEQ ID NO: 374210 - RNA, 19 nt, Artificial Sequence
  Description of Artificial Sequence: Synthetic oligonucleotide
  Antisense Strand to SEQ ID NO: 374209
uggaagaagacucugauga

SEQ ID NO: 374211 - RNA, 19 nt, Artificial Sequence
  Description of Artificial Sequence: Synthetic oligonucleotide
  Sense Strand Starting at position 706 of SEQ ID NO: 318129
aucagagucuucuuccauc

SEQ ID NO: 374212 - RNA, 19 nt, Artificial Sequence
  Description of Artificial Sequence: Synthetic oligonucleotide
  Antisense Strand to SEQ ID NO: 374211
gauggaagaagacucugau

SEQ ID NO: 374213 - RNA, 19 nt, Artificial Sequence
  Description of Artificial Sequence: Synthetic oligonucleotide
  Sense Strand Starting at position 706 of SEQ ID NO: 318221
aguuccuuguggguaaaga

SEQ ID NO: 374214 - RNA, 19 nt, Artificial Sequence
  Description of Artificial Sequence: Synthetic oligonucleotide
  Antisense Strand to SEQ ID NO: 374213
ucuuuacccacaaggaacu

SEQ ID NO: 374215 - RNA, 19 nt, Artificial Sequence
  Description of Artificial Sequence: Synthetic oligonucleotide
  Sense Strand Starting at position 706 of SEQ ID NO: 318222
guuccuuguggguaaagag

SEQ ID NO: 374216 - RNA, 19 nt, Artificial Sequence
  Description of Artificial Sequence: Synthetic oligonucleotide
  Antisense Strand to SEQ ID NO: 374215
cucuuuacccacaaggaac

SEQ ID NO: 374217 - RNA, 19 nt, Artificial Sequence
  Description of Artificial Sequence: Synthetic oligonucleotide
  Sense Strand Starting at position 706 of SEQ ID NO: 318257
gagccugggauagguuaaa

SEQ ID NO: 374218 - RNA, 19 nt, Artificial Sequence
  Description of Artificial Sequence: Synthetic oligonucleotide
  Antisense Strand to SEQ ID NO: 374217
uuuaaccuaucccaggcuc

SEQ ID NO: 374219 - RNA, 19 nt, Artificial Sequence
  Description of Artificial Sequence: Synthetic oligonucleotide
  Sense Strand Starting at position 706 of SEQ ID NO: 318267
uagguuaaagauuggucua

SEQ ID NO: 374220 - RNA, 19 nt, Artificial Sequence
  Description of Artificial Sequence: Synthetic oligonucleotide
  Antisense Strand to SEQ ID NO: 374219
uagaccaaucuuuaaccua

SEQ ID NO: 374221 - RNA, 19 nt, Artificial Sequence
  Description of Artificial Sequence: Synthetic oligonucleotide
  Sense Strand Starting at position 706 of SEQ ID NO: 318268
agguuaaagauuggucuac

SEQ ID NO: 374222 - RNA, 19 nt, Artificial Sequence
  Description of Artificial Sequence: Synthetic oligonucleotide
  Antisense Strand to SEQ ID NO: 374221
guagaccaaucuuuaaccu

SEQ ID NO: 374223 - RNA, 19 nt, Artificial Sequence
  Description of Artificial Sequence: Synthetic oligonucleotide
  Sense Strand Starting at position 706 of SEQ ID NO: 318272
uaaagauuggucuacguuu

SEQ ID NO: 374224 - RNA, 19 nt, Artificial Sequence
  Description of Artificial Sequence: Synthetic oligonucleotide
  Antisense Strand to SEQ ID NO: 374223
aaacguagaccaaucuuua

SEQ ID NO: 374225 - RNA, 19 nt, Artificial Sequence
  Description of Artificial Sequence: Synthetic oligonucleotide
  Sense Strand Starting at position 706 of SEQ ID NO: 318318
auguccaaauagucauuau

SEQ ID NO: 374226 - RNA, 19 nt, Artificial Sequence
  Description of Artificial Sequence: Synthetic oligonucleotide
  Antisense Strand to SEQ ID NO: 374225
auaaugacuauuuggacau

SEQ ID NO: 374227 - RNA, 19 nt, Artificial Sequence
  Description of Artificial Sequence: Synthetic oligonucleotide
  Sense Strand Starting at position 706 of SEQ ID NO: 318388
acccuauguccugggugaa

SEQ ID NO: 374228 - RNA, 19 nt, Artificial Sequence
  Description of Artificial Sequence: Synthetic oligonucleotide
  Antisense Strand to SEQ ID NO: 374227
uucacccaggacauagggu

SEQ ID NO: 374229 - RNA, 19 nt, Artificial Sequence
  Description of Artificial Sequence: Synthetic oligonucleotide
  Sense Strand Starting at position 706 of SEQ ID NO: 318389
cccuauguccugggugaag

SEQ ID NO: 374230 - RNA, 19 nt, Artificial Sequence
  Description of Artificial Sequence: Synthetic oligonucleotide
  Antisense Strand to SEQ ID NO: 374229
cuucacccaggacauaggg

SEQ ID NO: 374231 - RNA, 19 nt, Artificial Sequence
  Description of Artificial Sequence: Synthetic oligonucleotide
  Sense Strand Starting at position 706 of SEQ ID NO: 318406
agguuuggcaguuaggaau

SEQ ID NO: 374232 - RNA, 19 nt, Artificial Sequence
  Description of Artificial Sequence: Synthetic oligonucleotide
  Antisense Strand to SEQ ID NO: 374231
auuccuaacugccaaaccu

SEQ ID NO: 374233 - RNA, 19 nt, Artificial Sequence
  Description of Artificial Sequence: Synthetic oligonucleotide
  Sense Strand Starting at position 706 of SEQ ID NO: 318417
uuaggaauuggcugacaga

SEQ ID NO: 374234 - RNA, 19 nt, Artificial Sequence
  Description of Artificial Sequence: Synthetic oligonucleotide
  Antisense Strand to SEQ ID NO: 374233
ucugucagccaauuccuaa

SEQ ID NO: 374235 - RNA, 19 nt, Artificial Sequence
  Description of Artificial Sequence: Synthetic oligonucleotide
  Sense Strand Starting at position 706 of SEQ ID NO: 318461
cugguuuccguggugcuaa

SEQ ID NO: 374236 - RNA, 19 nt, Artificial Sequence
  Description of Artificial Sequence: Synthetic oligonucleotide
  Antisense Strand to SEQ ID NO: 374235
uuagcaccacggaaaccag

SEQ ID NO: 374237 - RNA, 19 nt, Artificial Sequence
  Description of Artificial Sequence: Synthetic oligonucleotide
  Sense Strand Starting at position 706 of SEQ ID NO: 318472
ggugcuaacgcuguuguua

SEQ ID NO: 374238 - RNA, 19 nt, Artificial Sequence
  Description of Artificial Sequence: Synthetic oligonucleotide
  Antisense Strand to SEQ ID NO: 374237
uaacaacagcguuagcacc

SEQ ID NO: 374239 - RNA, 19 nt, Artificial Sequence
  Description of Artificial Sequence: Synthetic oligonucleotide
  Sense Strand Starting at position 706 of SEQ ID NO: 318473
gugcuaacgcuguuguuaa

SEQ ID NO: 374240 - RNA, 19 nt, Artificial Sequence
  Description of Artificial Sequence: Synthetic oligonucleotide
  Antisense Strand to SEQ ID NO: 374239
uuaacaacagcguuagcac

SEQ ID NO: 374241 - RNA, 19 nt, Artificial Sequence
  Description of Artificial Sequence: Synthetic oligonucleotide
  Sense Strand Starting at position 706 of SEQ ID NO: 318509
ggaccuaauagaugugacu

SEQ ID NO: 374242 - RNA, 19 nt, Artificial Sequence
  Description of Artificial Sequence: Synthetic oligonucleotide
  Antisense Strand to SEQ ID NO: 374241
agucacaucuauuaggucc

SEQ ID NO: 374243 - RNA, 19 nt, Artificial Sequence
  Description of Artificial Sequence: Synthetic oligonucleotide
  Sense Strand Starting at position 706 of SEQ ID NO: 318674
agaguuuacuaaguugaug

SEQ ID NO: 374244 - RNA, 19 nt, Artificial Sequence
  Description of Artificial Sequence: Synthetic oligonucleotide
  Antisense Strand to SEQ ID NO: 374243
caucaacuuaguaaacucu

SEQ ID NO: 374245 - RNA, 19 nt, Artificial Sequence
  Description of Artificial Sequence: Synthetic oligonucleotide
  Sense Strand Starting at position 706 of SEQ ID NO: 318777
gugaauuaagauggcuauu

SEQ ID NO: 374246 - RNA, 19 nt, Artificial Sequence
  Description of Artificial Sequence: Synthetic oligonucleotide
  Antisense Strand to SEQ ID NO: 374245
aauagccaucuuaauucac

SEQ ID NO: 374247 - RNA, 19 nt, Artificial Sequence
  Description of Artificial Sequence: Synthetic oligonucleotide
  Sense Strand Starting at position 706 of SEQ ID NO: 318801
guauucuaacugcaguuua

SEQ ID NO: 374248 - RNA, 19 nt, Artificial Sequence
  Description of Artificial Sequence: Synthetic oligonucleotide
  Antisense Strand to SEQ ID NO: 374247
uaaacugcaguuagaauac

SEQ ID NO: 374249 - RNA, 19 nt, Artificial Sequence
  Description of Artificial Sequence: Synthetic oligonucleotide
  Sense Strand Starting at position 706 of SEQ ID NO: 318843
ggagauacaguucaguugu

SEQ ID NO: 374250 - RNA, 19 nt, Artificial Sequence
  Description of Artificial Sequence: Synthetic oligonucleotide
  Antisense Strand to SEQ ID NO: 374249
acaacugaacuguaucucc

SEQ ID NO: 374251 - RNA, 19 nt, Artificial Sequence
  Description of Artificial Sequence: Synthetic oligonucleotide
  Sense Strand Starting at position 706 of SEQ ID NO: 319049
agcuauggaacuugaguau

SEQ ID NO: 374252 - RNA, 19 nt, Artificial Sequence
  Description of Artificial Sequence: Synthetic oligonucleotide
  Antisense Strand to SEQ ID NO: 374251
auacucaaguuccauagcu

SEQ ID NO: 374253 - RNA, 19 nt, Artificial Sequence
  Description of Artificial Sequence: Synthetic oligonucleotide
  Sense Strand Starting at position 706 of SEQ ID NO: 319055
ggaacuugaguauggcaaa

SEQ ID NO: 374254 - RNA, 19 nt, Artificial Sequence
  Description of Artificial Sequence: Synthetic oligonucleotide
  Antisense Strand to SEQ ID NO: 374253
uuugccauacucaaguucc

SEQ ID NO: 374255 - RNA, 19 nt, Artificial Sequence
  Description of Artificial Sequence: Synthetic oligonucleotide
  Sense Strand Starting at position 706 of SEQ ID NO: 319087
aguuucuaugcggaaugaa

SEQ ID NO: 374256 - RNA, 19 nt, Artificial Sequence
  Description of Artificial Sequence: Synthetic oligonucleotide
  Antisense Strand to SEQ ID NO: 374255
uucauuccgcauagaaacu

SEQ ID NO: 374257 - RNA, 19 nt, Artificial Sequence
  Description of Artificial Sequence: Synthetic oligonucleotide
  Sense Strand Starting at position 706 of SEQ ID NO: 319090
uucuaugcggaaugaaauc

SEQ ID NO: 374258 - RNA, 19 nt, Artificial Sequence
  Description of Artificial Sequence: Synthetic oligonucleotide
  Antisense Strand to SEQ ID NO: 374257
gauuucauuccgcauagaa

SEQ ID NO: 374259 - RNA, 19 nt, Artificial Sequence
  Description of Artificial Sequence: Synthetic oligonucleotide
  Sense Strand Starting at position 706 of SEQ ID NO: 319096
gcggaaugaaaucagcuuu

SEQ ID NO: 374260 - RNA, 19 nt, Artificial Sequence
  Description of Artificial Sequence: Synthetic oligonucleotide
  Antisense Strand to SEQ ID NO: 374259
aaagcugauuucauuccgc

SEQ ID NO: 374261 - RNA, 19 nt, Artificial Sequence
  Description of Artificial Sequence: Synthetic oligonucleotide
  Sense Strand Starting at position 707 of SEQ ID NO: 315498
gcugguauuccugugcuca

SEQ ID NO: 374262 - RNA, 19 nt, Artificial Sequence
  Description of Artificial Sequence: Synthetic oligonucleotide
  Antisense Strand to SEQ ID NO: 374261
ugagcacaggaauaccagc

SEQ ID NO: 374263 - RNA, 19 nt, Artificial Sequence
  Description of Artificial Sequence: Synthetic oligonucleotide
  Sense Strand Starting at position 707 of SEQ ID NO: 315499
cugguauuccugugcucag

SEQ ID NO: 374264 - RNA, 19 nt, Artificial Sequence
  Description of Artificial Sequence: Synthetic oligonucleotide
  Antisense Strand to SEQ ID NO: 374263
cugagcacaggaauaccag

SEQ ID NO: 374265 - RNA, 19 nt, Artificial Sequence
  Description of Artificial Sequence: Synthetic oligonucleotide
  Sense Strand Starting at position 707 of SEQ ID NO: 315569
cggcccuuuauggaggaau

SEQ ID NO: 374266 - RNA, 19 nt, Artificial Sequence
  Description of Artificial Sequence: Synthetic oligonucleotide
  Antisense Strand to SEQ ID NO: 374265
auuccuccauaaagggccg

SEQ ID NO: 374267 - RNA, 19 nt, Artificial Sequence
  Description of Artificial Sequence: Synthetic oligonucleotide
  Sense Strand Starting at position 707 of SEQ ID NO: 315696
cgaagagggugcucgugua

SEQ ID NO: 374268 - RNA, 19 nt, Artificial Sequence
  Description of Artificial Sequence: Synthetic oligonucleotide
  Antisense Strand to SEQ ID NO: 374267
uacacgagcacccucuucg

SEQ ID NO: 374269 - RNA, 19 nt, Artificial Sequence
  Description of Artificial Sequence: Synthetic oligonucleotide
  Sense Strand Starting at position 707 of SEQ ID NO: 315700
gagggugcucguguagguu

SEQ ID NO: 374270 - RNA, 19 nt, Artificial Sequence
  Description of Artificial Sequence: Synthetic oligonucleotide
  Antisense Strand to SEQ ID NO: 374269
aaccuacacgagcacccuc

SEQ ID NO: 374271 - RNA, 19 nt, Artificial Sequence
  Description of Artificial Sequence: Synthetic oligonucleotide
  Sense Strand Starting at position 707 of SEQ ID NO: 315823
gagugucugcgaugaugcu

SEQ ID NO: 374272 - RNA, 19 nt, Artificial Sequence
  Description of Artificial Sequence: Synthetic oligonucleotide
  Antisense Strand to SEQ ID NO: 374271
agcaucaucgcagacacuc

SEQ ID NO: 374273 - RNA, 19 nt, Artificial Sequence
  Description of Artificial Sequence: Synthetic oligonucleotide
  Sense Strand Starting at position 707 of SEQ ID NO: 315832
cgaugaugcuggcugcaaa

SEQ ID NO: 374274 - RNA, 19 nt, Artificial Sequence
  Description of Artificial Sequence: Synthetic oligonucleotide
  Antisense Strand to SEQ ID NO: 374273
uuugcagccagcaucaucg

SEQ ID NO: 374275 - RNA, 19 nt, Artificial Sequence
  Description of Artificial Sequence: Synthetic oligonucleotide
  Sense Strand Starting at position 707 of SEQ ID NO: 315984
cccaccuucuguguugaaa

SEQ ID NO: 374276 - RNA, 19 nt, Artificial Sequence
  Description of Artificial Sequence: Synthetic oligonucleotide
  Antisense Strand to SEQ ID NO: 374275
uuucaacacagaagguggg

SEQ ID NO: 374277 - RNA, 19 nt, Artificial Sequence
  Description of Artificial Sequence: Synthetic oligonucleotide
  Sense Strand Starting at position 707 of SEQ ID NO: 315987
accuucuguguugaaagua

SEQ ID NO: 374278 - RNA, 19 nt, Artificial Sequence
  Description of Artificial Sequence: Synthetic oligonucleotide
  Antisense Strand to SEQ ID NO: 374277
uacuuucaacacagaaggu

SEQ ID NO: 374279 - RNA, 19 nt, Artificial Sequence
  Description of Artificial Sequence: Synthetic oligonucleotide
  Sense Strand Starting at position 707 of SEQ ID NO: 316429
guggcuucaucguuugcau

SEQ ID NO: 374280 - RNA, 19 nt, Artificial Sequence
  Description of Artificial Sequence: Synthetic oligonucleotide
  Antisense Strand to SEQ ID NO: 374279
augcaaacgaugaagccac

SEQ ID NO: 374281 - RNA, 19 nt, Artificial Sequence
  Description of Artificial Sequence: Synthetic oligonucleotide
  Sense Strand Starting at position 707 of SEQ ID NO: 316436
caucguuugcauugaugag

SEQ ID NO: 374282 - RNA, 19 nt, Artificial Sequence
  Description of Artificial Sequence: Synthetic oligonucleotide
  Antisense Strand to SEQ ID NO: 374281
cucaucaaugcaaacgaug

SEQ ID NO: 374283 - RNA, 19 nt, Artificial Sequence
  Description of Artificial Sequence: Synthetic oligonucleotide
  Sense Strand Starting at position 707 of SEQ ID NO: 316437
aucguuugcauugaugagu

SEQ ID NO: 374284 - RNA, 19 nt, Artificial Sequence
  Description of Artificial Sequence: Synthetic oligonucleotide
  Antisense Strand to SEQ ID NO: 374283
acucaucaaugcaaacgau

SEQ ID NO: 374285 - RNA, 19 nt, Artificial Sequence
  Description of Artificial Sequence: Synthetic oligonucleotide
  Sense Strand Starting at position 707 of SEQ ID NO: 316725
cccaaagucuuccugaguu

SEQ ID NO: 374286 - RNA, 19 nt, Artificial Sequence
  Description of Artificial Sequence: Synthetic oligonucleotide
  Antisense Strand to SEQ ID NO: 374285
aacucaggaagacuuuggg

SEQ ID NO: 374287 - RNA, 19 nt, Artificial Sequence
  Description of Artificial Sequence: Synthetic oligonucleotide
  Sense Strand Starting at position 707 of SEQ ID NO: 317241
gcgaguucccgggcggaau

SEQ ID NO: 374288 - RNA, 19 nt, Artificial Sequence
  Description of Artificial Sequence: Synthetic oligonucleotide
  Antisense Strand to SEQ ID NO: 374287
auuccgcccgggaacucgc

SEQ ID NO: 374289 - RNA, 19 nt, Artificial Sequence
  Description of Artificial Sequence: Synthetic oligonucleotide
  Sense Strand Starting at position 707 of SEQ ID NO: 317447
ccgugucuaacuggagaga

SEQ ID NO: 374290 - RNA, 19 nt, Artificial Sequence
  Description of Artificial Sequence: Synthetic oligonucleotide
  Antisense Strand to SEQ ID NO: 374289
ucucuccaguuagacacgg

SEQ ID NO: 374291 - RNA, 19 nt, Artificial Sequence
  Description of Artificial Sequence: Synthetic oligonucleotide
  Sense Strand Starting at position 707 of SEQ ID NO: 317526
gcuggaggaugaucucauu

SEQ ID NO: 374292 - RNA, 19 nt, Artificial Sequence
  Description of Artificial Sequence: Synthetic oligonucleotide
  Antisense Strand to SEQ ID NO: 374291
aaugagaucauccuccagc

SEQ ID NO: 374293 - RNA, 19 nt, Artificial Sequence
  Description of Artificial Sequence: Synthetic oligonucleotide
  Sense Strand Starting at position 707 of SEQ ID NO: 317937
aggugacuugcccgaguca

SEQ ID NO: 374294 - RNA, 19 nt, Artificial Sequence
  Description of Artificial Sequence: Synthetic oligonucleotide
  Antisense Strand to SEQ ID NO: 374293
ugacucgggcaagucaccu

SEQ ID NO: 374295 - RNA, 19 nt, Artificial Sequence
  Description of Artificial Sequence: Synthetic oligonucleotide
  Sense Strand Starting at position 707 of SEQ ID NO: 317979
agcugauuggaaggugaga

SEQ ID NO: 374296 - RNA, 19 nt, Artificial Sequence
  Description of Artificial Sequence: Synthetic oligonucleotide
  Antisense Strand to SEQ ID NO: 374295
ucucaccuuccaaucagcu

SEQ ID NO: 374297 - RNA, 19 nt, Artificial Sequence
  Description of Artificial Sequence: Synthetic oligonucleotide
  Sense Strand Starting at position 707 of SEQ ID NO: 318087
guggguugaccguauuucu

SEQ ID NO: 374298 - RNA, 19 nt, Artificial Sequence
  Description of Artificial Sequence: Synthetic oligonucleotide
  Antisense Strand to SEQ ID NO: 374297
agaaauacggucaacccac

SEQ ID NO: 374299 - RNA, 19 nt, Artificial Sequence
  Description of Artificial Sequence: Synthetic oligonucleotide
  Sense Strand Starting at position 707 of SEQ ID NO: 318330
aacugaagacauuguuagu

SEQ ID NO: 374300 - RNA, 19 nt, Artificial Sequence
  Description of Artificial Sequence: Synthetic oligonucleotide
  Antisense Strand to SEQ ID NO: 374299
acuaacaaugucuucaguu

SEQ ID NO: 374301 - RNA, 19 nt, Artificial Sequence
  Description of Artificial Sequence: Synthetic oligonucleotide
  Sense Strand Starting at position 707 of SEQ ID NO: 318390
cucugagacucagaaauga

SEQ ID NO: 374302 - RNA, 19 nt, Artificial Sequence
  Description of Artificial Sequence: Synthetic oligonucleotide
  Antisense Strand to SEQ ID NO: 374301
ucauuucugagucucagag

SEQ ID NO: 374303 - RNA, 19 nt, Artificial Sequence
  Description of Artificial Sequence: Synthetic oligonucleotide
  Sense Strand Starting at position 707 of SEQ ID NO: 318414
cucucugacauggguaagu

SEQ ID NO: 374304 - RNA, 19 nt, Artificial Sequence
  Description of Artificial Sequence: Synthetic oligonucleotide
  Antisense Strand to SEQ ID NO: 374303
acuuacccaugucagagag

SEQ ID NO: 374305 - RNA, 19 nt, Artificial Sequence
  Description of Artificial Sequence: Synthetic oligonucleotide
  Sense Strand Starting at position 707 of SEQ ID NO: 318461
gaguuugucuguccuugag

SEQ ID NO: 374306 - RNA, 19 nt, Artificial Sequence
  Description of Artificial Sequence: Synthetic oligonucleotide
  Antisense Strand to SEQ ID NO: 374305
cucaaggacagacaaacuc

SEQ ID NO: 374307 - RNA, 19 nt, Artificial Sequence
  Description of Artificial Sequence: Synthetic oligonucleotide
  Sense Strand Starting at position 707 of SEQ ID NO: 318464
uuugucuguccuugagcuu

SEQ ID NO: 374308 - RNA, 19 nt, Artificial Sequence
  Description of Artificial Sequence: Synthetic oligonucleotide
  Antisense Strand to SEQ ID NO: 374307
aagcucaaggacagacaaa

SEQ ID NO: 374309 - RNA, 19 nt, Artificial Sequence
  Description of Artificial Sequence: Synthetic oligonucleotide
  Sense Strand Starting at position 707 of SEQ ID NO: 318832
gcugauggcuuguccuaag

SEQ ID NO: 374310 - RNA, 19 nt, Artificial Sequence
  Description of Artificial Sequence: Synthetic oligonucleotide
  Antisense Strand to SEQ ID NO: 374309
cuuaggacaagccaucagc

SEQ ID NO: 374311 - RNA, 19 nt, Artificial Sequence
  Description of Artificial Sequence: Synthetic oligonucleotide
  Sense Strand Starting at position 707 of SEQ ID NO: 318835
gauggcuuguccuaagaag

SEQ ID NO: 374312 - RNA, 19 nt, Artificial Sequence
  Description of Artificial Sequence: Synthetic oligonucleotide
  Antisense Strand to SEQ ID NO: 374311
cuucuuaggacaagccauc

SEQ ID NO: 374313 - RNA, 19 nt, Artificial Sequence
  Description of Artificial Sequence: Synthetic oligonucleotide
  Sense Strand Starting at position 707 of SEQ ID NO: 318947
cuggcaggaucuguuugau

SEQ ID NO: 374314 - RNA, 19 nt, Artificial Sequence
  Description of Artificial Sequence: Synthetic oligonucleotide
  Antisense Strand to SEQ ID NO: 374313
aucaaacagauccugccag

SEQ ID NO: 374315 - RNA, 19 nt, Artificial Sequence
  Description of Artificial Sequence: Synthetic oligonucleotide
  Sense Strand Starting at position 707 of SEQ ID NO: 318950
gcaggaucuguuugaugac

SEQ ID NO: 374316 - RNA, 19 nt, Artificial Sequence
  Description of Artificial Sequence: Synthetic oligonucleotide
  Antisense Strand to SEQ ID NO: 374315
gucaucaaacagauccugc

SEQ ID NO: 374317 - RNA, 19 nt, Artificial Sequence
  Description of Artificial Sequence: Synthetic oligonucleotide
  Sense Strand Starting at position 707 of SEQ ID NO: 318953
ggaucuguuugaugacuaa

SEQ ID NO: 374318 - RNA, 19 nt, Artificial Sequence
  Description of Artificial Sequence: Synthetic oligonucleotide
  Antisense Strand to SEQ ID NO: 374317
uuagucaucaaacagaucc

SEQ ID NO: 374319 - RNA, 19 nt, Artificial Sequence
  Description of Artificial Sequence: Synthetic oligonucleotide
  Sense Strand Starting at position 707 of SEQ ID NO: 319021
accauaaccuaagagguuu

SEQ ID NO: 374320 - RNA, 19 nt, Artificial Sequence
  Description of Artificial Sequence: Synthetic oligonucleotide
  Antisense Strand to SEQ ID NO: 374319
aaaccucuuagguuauggu

SEQ ID NO: 374321 - RNA, 19 nt, Artificial Sequence
  Description of Artificial Sequence: Synthetic oligonucleotide
  Sense Strand Starting at position 707 of SEQ ID NO: 319070
uuaucucuugggugucauu

SEQ ID NO: 374322 - RNA, 19 nt, Artificial Sequence
  Description of Artificial Sequence: Synthetic oligonucleotide
  Antisense Strand to SEQ ID NO: 374321
aaugacacccaagagauaa

SEQ ID NO: 374323 - RNA, 19 nt, Artificial Sequence
  Description of Artificial Sequence: Synthetic oligonucleotide
  Sense Strand Starting at position 707 of SEQ ID NO: 319079
gggugucauucagcuguga

SEQ ID NO: 374324 - RNA, 19 nt, Artificial Sequence
  Description of Artificial Sequence: Synthetic oligonucleotide
  Antisense Strand to SEQ ID NO: 374323
ucacagcugaaugacaccc

SEQ ID NO: 374325 - RNA, 19 nt, Artificial Sequence
  Description of Artificial Sequence: Synthetic oligonucleotide
  Sense Strand Starting at position 707 of SEQ ID NO: 319090
agcugugacucaucaguga

SEQ ID NO: 374326 - RNA, 19 nt, Artificial Sequence
  Description of Artificial Sequence: Synthetic oligonucleotide
  Antisense Strand to SEQ ID NO: 374325
ucacugaugagucacagcu

SEQ ID NO: 374327 - RNA, 19 nt, Artificial Sequence
  Description of Artificial Sequence: Synthetic oligonucleotide
  Sense Strand Starting at position 707 of SEQ ID NO: 319093
ugugacucaucagugaacu

SEQ ID NO: 374328 - RNA, 19 nt, Artificial Sequence
  Description of Artificial Sequence: Synthetic oligonucleotide
  Antisense Strand to SEQ ID NO: 374327
aguucacugaugagucaca

SEQ ID NO: 374329 - RNA, 19 nt, Artificial Sequence
  Description of Artificial Sequence: Synthetic oligonucleotide
  Sense Strand Starting at position 707 of SEQ ID NO: 319094
gugacucaucagugaacuu

SEQ ID NO: 374330 - RNA, 19 nt, Artificial Sequence
  Description of Artificial Sequence: Synthetic oligonucleotide
  Antisense Strand to SEQ ID NO: 374329
aaguucacugaugagucac

SEQ ID NO: 374331 - RNA, 19 nt, Artificial Sequence
  Description of Artificial Sequence: Synthetic oligonucleotide
  Sense Strand Starting at position 707 of SEQ ID NO: 319120
cuggguucucagggauucu

SEQ ID NO: 374332 - RNA, 19 nt, Artificial Sequence
  Description of Artificial Sequence: Synthetic oligonucleotide
  Antisense Strand to SEQ ID NO: 374331
agaaucccugagaacccag

SEQ ID NO: 374333 - RNA, 19 nt, Artificial Sequence
  Description of Artificial Sequence: Synthetic oligonucleotide
  Sense Strand Starting at position 707 of SEQ ID NO: 319121
uggguucucagggauucua

SEQ ID NO: 374334 - RNA, 19 nt, Artificial Sequence
  Description of Artificial Sequence: Synthetic oligonucleotide
  Antisense Strand to SEQ ID NO: 374333
uagaaucccugagaaccca

SEQ ID NO: 374335 - RNA, 19 nt, Artificial Sequence
  Description of Artificial Sequence: Synthetic oligonucleotide
  Sense Strand Starting at position 707 of SEQ ID NO: 319173
gcgcaucaccuuuguggaa

SEQ ID NO: 374336 - RNA, 19 nt, Artificial Sequence
  Description of Artificial Sequence: Synthetic oligonucleotide
  Antisense Strand to SEQ ID NO: 374335
uuccacaaaggugaugcgc

SEQ ID NO: 374337 - RNA, 19 nt, Artificial Sequence
  Description of Artificial Sequence: Synthetic oligonucleotide
  Sense Strand Starting at position 707 of SEQ ID NO: 319174
cgcaucaccuuuguggaau

SEQ ID NO: 374338 - RNA, 19 nt, Artificial Sequence
  Description of Artificial Sequence: Synthetic oligonucleotide
  Antisense Strand to SEQ ID NO: 374337
auuccacaaaggugaugcg

SEQ ID NO: 374339 - RNA, 19 nt, Artificial Sequence
  Description of Artificial Sequence: Synthetic oligonucleotide
  Sense Strand Starting at position 707 of SEQ ID NO: 319216
ccaggauucugccauuucu

SEQ ID NO: 374340 - RNA, 19 nt, Artificial Sequence
  Description of Artificial Sequence: Synthetic oligonucleotide
  Antisense Strand to SEQ ID NO: 374339
agaaauggcagaauccugg

SEQ ID NO: 374341 - RNA, 19 nt, Artificial Sequence
  Description of Artificial Sequence: Synthetic oligonucleotide
  Sense Strand Starting at position 708 of SEQ ID NO: 315499
gcugguauuccugugcuca

SEQ ID NO: 374342 - RNA, 19 nt, Artificial Sequence
  Description of Artificial Sequence: Synthetic oligonucleotide
  Antisense Strand to SEQ ID NO: 374341
ugagcacaggaauaccagc

SEQ ID NO: 374343 - RNA, 19 nt, Artificial Sequence
  Description of Artificial Sequence: Synthetic oligonucleotide
  Sense Strand Starting at position 708 of SEQ ID NO: 315500
cugguauuccugugcucag

SEQ ID NO: 374344 - RNA, 19 nt, Artificial Sequence
  Description of Artificial Sequence: Synthetic oligonucleotide
  Antisense Strand to SEQ ID NO: 374343
cugagcacaggaauaccag

SEQ ID NO: 374345 - RNA, 19 nt, Artificial Sequence
  Description of Artificial Sequence: Synthetic oligonucleotide
  Sense Strand Starting at position 708 of SEQ ID NO: 315570
cggcccuuuauggaggaau

SEQ ID NO: 374346 - RNA, 19 nt, Artificial Sequence
  Description of Artificial Sequence: Synthetic oligonucleotide
  Antisense Strand to SEQ ID NO: 374345
auuccuccauaaagggccg

SEQ ID NO: 374347 - RNA, 19 nt, Artificial Sequence
  Description of Artificial Sequence: Synthetic oligonucleotide
  Sense Strand Starting at position 708 of SEQ ID NO: 315697
cgaagagggugcucgugua

SEQ ID NO: 374348 - RNA, 19 nt, Artificial Sequence
  Description of Artificial Sequence: Synthetic oligonucleotide
  Antisense Strand to SEQ ID NO: 374347
uacacgagcacccucuucg

SEQ ID NO: 374349 - RNA, 19 nt, Artificial Sequence
  Description of Artificial Sequence: Synthetic oligonucleotide
  Sense Strand Starting at position 708 of SEQ ID NO: 315701
gagggugcucguguagguu

SEQ ID NO: 374350 - RNA, 19 nt, Artificial Sequence
  Description of Artificial Sequence: Synthetic oligonucleotide
  Antisense Strand to SEQ ID NO: 374349
aaccuacacgagcacccuc

SEQ ID NO: 374351 - RNA, 19 nt, Artificial Sequence
  Description of Artificial Sequence: Synthetic oligonucleotide
  Sense Strand Starting at position 708 of SEQ ID NO: 315824
gagugucugcgaugaugcu

SEQ ID NO: 374352 - RNA, 19 nt, Artificial Sequence
  Description of Artificial Sequence: Synthetic oligonucleotide
  Antisense Strand to SEQ ID NO: 374351
agcaucaucgcagacacuc

SEQ ID NO: 374353 - RNA, 19 nt, Artificial Sequence
  Description of Artificial Sequence: Synthetic oligonucleotide
  Sense Strand Starting at position 708 of SEQ ID NO: 315833
cgaugaugcuggcugcaaa

SEQ ID NO: 374354 - RNA, 19 nt, Artificial Sequence
  Description of Artificial Sequence: Synthetic oligonucleotide
  Antisense Strand to SEQ ID NO: 374353
uuugcagccagcaucaucg

SEQ ID NO: 374355 - RNA, 19 nt, Artificial Sequence
  Description of Artificial Sequence: Synthetic oligonucleotide
  Sense Strand Starting at position 708 of SEQ ID NO: 315985
cccaccuucuguguugaaa

SEQ ID NO: 374356 - RNA, 19 nt, Artificial Sequence
  Description of Artificial Sequence: Synthetic oligonucleotide
  Antisense Strand to SEQ ID NO: 374355
uuucaacacagaagguggg

SEQ ID NO: 374357 - RNA, 19 nt, Artificial Sequence
  Description of Artificial Sequence: Synthetic oligonucleotide
  Sense Strand Starting at position 708 of SEQ ID NO: 315988
accuucuguguugaaagua

SEQ ID NO: 374358 - RNA, 19 nt, Artificial Sequence
  Description of Artificial Sequence: Synthetic oligonucleotide
  Antisense Strand to SEQ ID NO: 374357
uacuuucaacacagaaggu

SEQ ID NO: 374359 - RNA, 19 nt, Artificial Sequence
  Description of Artificial Sequence: Synthetic oligonucleotide
  Sense Strand Starting at position 708 of SEQ ID NO: 316430
guggcuucaucguuugcau

SEQ ID NO: 374360 - RNA, 19 nt, Artificial Sequence
  Description of Artificial Sequence: Synthetic oligonucleotide
  Antisense Strand to SEQ ID NO: 374359
augcaaacgaugaagccac

SEQ ID NO: 374361 - RNA, 19 nt, Artificial Sequence
  Description of Artificial Sequence: Synthetic oligonucleotide
  Sense Strand Starting at position 708 of SEQ ID NO: 316437
caucguuugcauugaugag

SEQ ID NO: 374362 - RNA, 19 nt, Artificial Sequence
  Description of Artificial Sequence: Synthetic oligonucleotide
  Antisense Strand to SEQ ID NO: 374361
cucaucaaugcaaacgaug

SEQ ID NO: 374363 - RNA, 19 nt, Artificial Sequence
  Description of Artificial Sequence: Synthetic oligonucleotide
  Sense Strand Starting at position 708 of SEQ ID NO: 316438
aucguuugcauugaugagu

SEQ ID NO: 374364 - RNA, 19 nt, Artificial Sequence
  Description of Artificial Sequence: Synthetic oligonucleotide
  Antisense Strand to SEQ ID NO: 374363
acucaucaaugcaaacgau

SEQ ID NO: 374365 - RNA, 19 nt, Artificial Sequence
  Description of Artificial Sequence: Synthetic oligonucleotide
  Sense Strand Starting at position 708 of SEQ ID NO: 316726
cccaaagucuuccugaguu

SEQ ID NO: 374366 - RNA, 19 nt, Artificial Sequence
  Description of Artificial Sequence: Synthetic oligonucleotide
  Antisense Strand to SEQ ID NO: 374365
aacucaggaagacuuuggg

SEQ ID NO: 374367 - RNA, 19 nt, Artificial Sequence
  Description of Artificial Sequence: Synthetic oligonucleotide
  Sense Strand Starting at position 708 of SEQ ID NO: 317242
gcgaguucccgggcggaau

SEQ ID NO: 374368 - RNA, 19 nt, Artificial Sequence
  Description of Artificial Sequence: Synthetic oligonucleotide
  Antisense Strand to SEQ ID NO: 374367
auuccgcccgggaacucgc

SEQ ID NO: 374369 - RNA, 19 nt, Artificial Sequence
  Description of Artificial Sequence: Synthetic oligonucleotide
  Sense Strand Starting at position 708 of SEQ ID NO: 317448
ccgugucuaacuggagaga

SEQ ID NO: 374370 - RNA, 19 nt, Artificial Sequence
  Description of Artificial Sequence: Synthetic oligonucleotide
  Antisense Strand to SEQ ID NO: 374369
ucucuccaguuagacacgg

SEQ ID NO: 374371 - RNA, 19 nt, Artificial Sequence
  Description of Artificial Sequence: Synthetic oligonucleotide
  Sense Strand Starting at position 708 of SEQ ID NO: 317527
gcuggaggaugaucucauu

SEQ ID NO: 374372 - RNA, 19 nt, Artificial Sequence
  Description of Artificial Sequence: Synthetic oligonucleotide
  Antisense Strand to SEQ ID NO: 374371
aaugagaucauccuccagc

SEQ ID NO: 374373 - RNA, 19 nt, Artificial Sequence
  Description of Artificial Sequence: Synthetic oligonucleotide
  Sense Strand Starting at position 708 of SEQ ID NO: 317938
aggugacuugcccgaguca

SEQ ID NO: 374374 - RNA, 19 nt, Artificial Sequence
  Description of Artificial Sequence: Synthetic oligonucleotide
  Antisense Strand to SEQ ID NO: 374373
ugacucgggcaagucaccu

SEQ ID NO: 374375 - RNA, 19 nt, Artificial Sequence
  Description of Artificial Sequence: Synthetic oligonucleotide
  Sense Strand Starting at position 708 of SEQ ID NO: 317980
agcugauuggaaggugaga

SEQ ID NO: 374376 - RNA, 19 nt, Artificial Sequence
  Description of Artificial Sequence: Synthetic oligonucleotide
  Antisense Strand to SEQ ID NO: 374375
ucucaccuuccaaucagcu

SEQ ID NO: 374377 - RNA, 19 nt, Artificial Sequence
  Description of Artificial Sequence: Synthetic oligonucleotide
  Sense Strand Starting at position 708 of SEQ ID NO: 318088
guggguugaccguauuucu

SEQ ID NO: 374378 - RNA, 19 nt, Artificial Sequence
  Description of Artificial Sequence: Synthetic oligonucleotide
  Antisense Strand to SEQ ID NO: 374377
agaaauacggucaacccac

SEQ ID NO: 374379 - RNA, 19 nt, Artificial Sequence
  Description of Artificial Sequence: Synthetic oligonucleotide
  Sense Strand Starting at position 708 of SEQ ID NO: 318331
aacugaagacauuguuagu

SEQ ID NO: 374380 - RNA, 19 nt, Artificial Sequence
  Description of Artificial Sequence: Synthetic oligonucleotide
  Antisense Strand to SEQ ID NO: 374379
acuaacaaugucuucaguu

SEQ ID NO: 374381 - RNA, 19 nt, Artificial Sequence
  Description of Artificial Sequence: Synthetic oligonucleotide
  Sense Strand Starting at position 708 of SEQ ID NO: 318391
cucugagacucagaaauga

SEQ ID NO: 374382 - RNA, 19 nt, Artificial Sequence
  Description of Artificial Sequence: Synthetic oligonucleotide
  Antisense Strand to SEQ ID NO: 374381
ucauuucugagucucagag

SEQ ID NO: 374383 - RNA, 19 nt, Artificial Sequence
  Description of Artificial Sequence: Synthetic oligonucleotide
  Sense Strand Starting at position 708 of SEQ ID NO: 318415
cucucugacauggguaagu

SEQ ID NO: 374384 - RNA, 19 nt, Artificial Sequence
  Description of Artificial Sequence: Synthetic oligonucleotide
  Antisense Strand to SEQ ID NO: 374383
acuuacccaugucagagag

SEQ ID NO: 374385 - RNA, 19 nt, Artificial Sequence
  Description of Artificial Sequence: Synthetic oligonucleotide
  Sense Strand Starting at position 708 of SEQ ID NO: 318462
gaguuugucuguccuugag

SEQ ID NO: 374386 - RNA, 19 nt, Artificial Sequence
  Description of Artificial Sequence: Synthetic oligonucleotide
  Antisense Strand to SEQ ID NO: 374385
cucaaggacagacaaacuc

SEQ ID NO: 374387 - RNA, 19 nt, Artificial Sequence
  Description of Artificial Sequence: Synthetic oligonucleotide
  Sense Strand Starting at position 708 of SEQ ID NO: 318465
uuugucuguccuugagcuu

SEQ ID NO: 374388 - RNA, 19 nt, Artificial Sequence
  Description of Artificial Sequence: Synthetic oligonucleotide
  Antisense Strand to SEQ ID NO: 374387
aagcucaaggacagacaaa

SEQ ID NO: 374389 - RNA, 19 nt, Artificial Sequence
  Description of Artificial Sequence: Synthetic oligonucleotide
  Sense Strand Starting at position 708 of SEQ ID NO: 318833
gcugauggcuuguccuaag

SEQ ID NO: 374390 - RNA, 19 nt, Artificial Sequence
  Description of Artificial Sequence: Synthetic oligonucleotide
  Antisense Strand to SEQ ID NO: 374389
cuuaggacaagccaucagc

SEQ ID NO: 374391 - RNA, 19 nt, Artificial Sequence
  Description of Artificial Sequence: Synthetic oligonucleotide
  Sense Strand Starting at position 708 of SEQ ID NO: 318836
gauggcuuguccuaagaag

SEQ ID NO: 374392 - RNA, 19 nt, Artificial Sequence
  Description of Artificial Sequence: Synthetic oligonucleotide
  Antisense Strand to SEQ ID NO: 374391
cuucuuaggacaagccauc

SEQ ID NO: 374393 - RNA, 19 nt, Artificial Sequence
  Description of Artificial Sequence: Synthetic oligonucleotide
  Sense Strand Starting at position 708 of SEQ ID NO: 318948
cuggcaggaucuguuugau

SEQ ID NO: 374394 - RNA, 19 nt, Artificial Sequence
  Description of Artificial Sequence: Synthetic oligonucleotide
  Antisense Strand to SEQ ID NO: 374393
aucaaacagauccugccag

SEQ ID NO: 374395 - RNA, 19 nt, Artificial Sequence
  Description of Artificial Sequence: Synthetic oligonucleotide
  Sense Strand Starting at position 708 of SEQ ID NO: 318951
gcaggaucuguuugaugac

SEQ ID NO: 374396 - RNA, 19 nt, Artificial Sequence
  Description of Artificial Sequence: Synthetic oligonucleotide
  Antisense Strand to SEQ ID NO: 374395
gucaucaaacagauccugc

SEQ ID NO: 374397 - RNA, 19 nt, Artificial Sequence
  Description of Artificial Sequence: Synthetic oligonucleotide
  Sense Strand Starting at position 708 of SEQ ID NO: 318954
ggaucuguuugaugacuaa

SEQ ID NO: 374398 - RNA, 19 nt, Artificial Sequence
  Description of Artificial Sequence: Synthetic oligonucleotide
  Antisense Strand to SEQ ID NO: 374397
uuagucaucaaacagaucc

SEQ ID NO: 374399 - RNA, 19 nt, Artificial Sequence
  Description of Artificial Sequence: Synthetic oligonucleotide
  Sense Strand Starting at position 708 of SEQ ID NO: 319022
accauaaccuaagagguuu

SEQ ID NO: 374400 - RNA, 19 nt, Artificial Sequence
  Description of Artificial Sequence: Synthetic oligonucleotide
  Antisense Strand to SEQ ID NO: 374399
aaaccucuuagguuauggu

SEQ ID NO: 374401 - RNA, 19 nt, Artificial Sequence
  Description of Artificial Sequence: Synthetic oligonucleotide
  Sense Strand Starting at position 708 of SEQ ID NO: 319071
uuaucucuugggugucauu

SEQ ID NO: 374402 - RNA, 19 nt, Artificial Sequence
  Description of Artificial Sequence: Synthetic oligonucleotide
  Antisense Strand to SEQ ID NO: 374401
aaugacacccaagagauaa

SEQ ID NO: 374403 - RNA, 19 nt, Artificial Sequence
  Description of Artificial Sequence: Synthetic oligonucleotide
  Sense Strand Starting at position 708 of SEQ ID NO: 319080
gggugucauucagcuguga

SEQ ID NO: 374404 - RNA, 19 nt, Artificial Sequence
  Description of Artificial Sequence: Synthetic oligonucleotide
  Antisense Strand to SEQ ID NO: 374403
ucacagcugaaugacaccc

SEQ ID NO: 374405 - RNA, 19 nt, Artificial Sequence
  Description of Artificial Sequence: Synthetic oligonucleotide
  Sense Strand Starting at position 708 of SEQ ID NO: 319091
agcugugacucaucaguga

SEQ ID NO: 374406 - RNA, 19 nt, Artificial Sequence
  Description of Artificial Sequence: Synthetic oligonucleotide
  Antisense Strand to SEQ ID NO: 374405
ucacugaugagucacagcu

SEQ ID NO: 374407 - RNA, 19 nt, Artificial Sequence
  Description of Artificial Sequence: Synthetic oligonucleotide
  Sense Strand Starting at position 708 of SEQ ID NO: 319094
ugugacucaucagugaacu

SEQ ID NO: 374408 - RNA, 19 nt, Artificial Sequence
  Description of Artificial Sequence: Synthetic oligonucleotide
  Antisense Strand to SEQ ID NO: 374407
aguucacugaugagucaca

SEQ ID NO: 374409 - RNA, 19 nt, Artificial Sequence
  Description of Artificial Sequence: Synthetic oligonucleotide
  Sense Strand Starting at position 708 of SEQ ID NO: 319095
gugacucaucagugaacuu

SEQ ID NO: 374410 - RNA, 19 nt, Artificial Sequence
  Description of Artificial Sequence: Synthetic oligonucleotide
  Antisense Strand to SEQ ID NO: 374409
aaguucacugaugagucac

SEQ ID NO: 374411 - RNA, 19 nt, Artificial Sequence
  Description of Artificial Sequence: Synthetic oligonucleotide
  Sense Strand Starting at position 708 of SEQ ID NO: 319121
cuggguucucagggauucu

SEQ ID NO: 374412 - RNA, 19 nt, Artificial Sequence
  Description of Artificial Sequence: Synthetic oligonucleotide
  Antisense Strand to SEQ ID NO: 374411
agaaucccugagaacccag

SEQ ID NO: 374413 - RNA, 19 nt, Artificial Sequence
  Description of Artificial Sequence: Synthetic oligonucleotide
  Sense Strand Starting at position 708 of SEQ ID NO: 319122
uggguucucagggauucua

SEQ ID NO: 374414 - RNA, 19 nt, Artificial Sequence
  Description of Artificial Sequence: Synthetic oligonucleotide
  Antisense Strand to SEQ ID NO: 374413
uagaaucccugagaaccca

SEQ ID NO: 374415 - RNA, 19 nt, Artificial Sequence
  Description of Artificial Sequence: Synthetic oligonucleotide
  Sense Strand Starting at position 708 of SEQ ID NO: 319174
gcgcaucaccuuuguggaa

SEQ ID NO: 374416 - RNA, 19 nt, Artificial Sequence
  Description of Artificial Sequence: Synthetic oligonucleotide
  Antisense Strand to SEQ ID NO: 374415
uuccacaaaggugaugcgc

SEQ ID NO: 374417 - RNA, 19 nt, Artificial Sequence
  Description of Artificial Sequence: Synthetic oligonucleotide
  Sense Strand Starting at position 708 of SEQ ID NO: 319175
cgcaucaccuuuguggaau

SEQ ID NO: 374418 - RNA, 19 nt, Artificial Sequence
  Description of Artificial Sequence: Synthetic oligonucleotide
  Antisense Strand to SEQ ID NO: 374417
auuccacaaaggugaugcg

SEQ ID NO: 374419 - RNA, 19 nt, Artificial Sequence
  Description of Artificial Sequence: Synthetic oligonucleotide
  Sense Strand Starting at position 708 of SEQ ID NO: 319217
ccaggauucugccauuucu

SEQ ID NO: 374420 - RNA, 19 nt, Artificial Sequence
  Description of Artificial Sequence: Synthetic oligonucleotide
  Antisense Strand to SEQ ID NO: 374419
agaaauggcagaauccugg

SEQ ID NO: 374421 - RNA, 19 nt, Artificial Sequence
  Description of Artificial Sequence: Synthetic oligonucleotide
  Sense Strand Starting at position 709 of SEQ ID NO: 315497
ucagccucauuugagagaa

SEQ ID NO: 374422 - RNA, 19 nt, Artificial Sequence
  Description of Artificial Sequence: Synthetic oligonucleotide
  Antisense Strand to SEQ ID NO: 374421
uucucucaaaugaggcuga

SEQ ID NO: 374423 - RNA, 19 nt, Artificial Sequence
  Description of Artificial Sequence: Synthetic oligonucleotide
  Sense Strand Starting at position 709 of SEQ ID NO: 315499
agccucauuugagagaaug

SEQ ID NO: 374424 - RNA, 19 nt, Artificial Sequence
  Description of Artificial Sequence: Synthetic oligonucleotide
  Antisense Strand to SEQ ID NO: 374423
cauucucucaaaugaggcu

SEQ ID NO: 374425 - RNA, 19 nt, Artificial Sequence
  Description of Artificial Sequence: Synthetic oligonucleotide
  Sense Strand Starting at position 709 of SEQ ID NO: 315515
augagauaugucugagguc

SEQ ID NO: 374426 - RNA, 19 nt, Artificial Sequence
  Description of Artificial Sequence: Synthetic oligonucleotide
  Antisense Strand to SEQ ID NO: 374425
gaccucagacauaucucau

SEQ ID NO: 374427 - RNA, 19 nt, Artificial Sequence
  Description of Artificial Sequence: Synthetic oligonucleotide
  Sense Strand Starting at position 709 of SEQ ID NO: 315563
caaguauaaugguuaaaug

SEQ ID NO: 374428 - RNA, 19 nt, Artificial Sequence
  Description of Artificial Sequence: Synthetic oligonucleotide
  Antisense Strand to SEQ ID NO: 374427
cauuuaaccauuauacuug

SEQ ID NO: 374429 - RNA, 19 nt, Artificial Sequence
  Description of Artificial Sequence: Synthetic oligonucleotide
  Sense Strand Starting at position 709 of SEQ ID NO: 315628
ugggcaaacuguuuaacuu

SEQ ID NO: 374430 - RNA, 19 nt, Artificial Sequence
  Description of Artificial Sequence: Synthetic oligonucleotide
  Antisense Strand to SEQ ID NO: 374429
aaguuaaacaguuugccca

SEQ ID NO: 374431 - RNA, 19 nt, Artificial Sequence
  Description of Artificial Sequence: Synthetic oligonucleotide
  Sense Strand Starting at position 709 of SEQ ID NO: 315629
gggcaaacuguuuaacuuu

SEQ ID NO: 374432 - RNA, 19 nt, Artificial Sequence
  Description of Artificial Sequence: Synthetic oligonucleotide
  Antisense Strand to SEQ ID NO: 374431
aaaguuaaacaguuugccc

SEQ ID NO: 374433 - RNA, 19 nt, Artificial Sequence
  Description of Artificial Sequence: Synthetic oligonucleotide
  Sense Strand Starting at position 709 of SEQ ID NO: 315837
ucauuaugguacuucucau

SEQ ID NO: 374434 - RNA, 19 nt, Artificial Sequence
  Description of Artificial Sequence: Synthetic oligonucleotide
  Antisense Strand to SEQ ID NO: 374433
augagaaguaccauaauga

SEQ ID NO: 374435 - RNA, 19 nt, Artificial Sequence
  Description of Artificial Sequence: Synthetic oligonucleotide
  Sense Strand Starting at position 709 of SEQ ID NO: 316143
augacacaccagugacauu

SEQ ID NO: 374436 - RNA, 19 nt, Artificial Sequence
  Description of Artificial Sequence: Synthetic oligonucleotide
  Antisense Strand to SEQ ID NO: 374435
aaugucacuggugugucau

SEQ ID NO: 374437 - RNA, 19 nt, Artificial Sequence
  Description of Artificial Sequence: Synthetic oligonucleotide
  Sense Strand Starting at position 709 of SEQ ID NO: 316223
gaguguucuagucagacag

SEQ ID NO: 374438 - RNA, 19 nt, Artificial Sequence
  Description of Artificial Sequence: Synthetic oligonucleotide
  Antisense Strand to SEQ ID NO: 374437
cugucugacuagaacacuc

SEQ ID NO: 374439 - RNA, 19 nt, Artificial Sequence
  Description of Artificial Sequence: Synthetic oligonucleotide
  Sense Strand Starting at position 709 of SEQ ID NO: 316227
guucuagucagacaguuag

SEQ ID NO: 374440 - RNA, 19 nt, Artificial Sequence
  Description of Artificial Sequence: Synthetic oligonucleotide
  Antisense Strand to SEQ ID NO: 374439
cuaacugucugacuagaac

SEQ ID NO: 374441 - RNA, 19 nt, Artificial Sequence
  Description of Artificial Sequence: Synthetic oligonucleotide
  Sense Strand Starting at position 709 of SEQ ID NO: 316343
acuaauugugacuaaguuu

SEQ ID NO: 374442 - RNA, 19 nt, Artificial Sequence
  Description of Artificial Sequence: Synthetic oligonucleotide
  Antisense Strand to SEQ ID NO: 374441
aaacuuagucacaauuagu

SEQ ID NO: 374443 - RNA, 19 nt, Artificial Sequence
  Description of Artificial Sequence: Synthetic oligonucleotide
  Sense Strand Starting at position 709 of SEQ ID NO: 316455
ccugaagcucuaggugagu

SEQ ID NO: 374444 - RNA, 19 nt, Artificial Sequence
  Description of Artificial Sequence: Synthetic oligonucleotide
  Antisense Strand to SEQ ID NO: 374443
acucaccuagagcuucagg

SEQ ID NO: 374445 - RNA, 19 nt, Artificial Sequence
  Description of Artificial Sequence: Synthetic oligonucleotide
  Sense Strand Starting at position 709 of SEQ ID NO: 316467
ggugaguaggaguggauau

SEQ ID NO: 374446 - RNA, 19 nt, Artificial Sequence
  Description of Artificial Sequence: Synthetic oligonucleotide
  Antisense Strand to SEQ ID NO: 374445
auauccacuccuacucacc

SEQ ID NO: 374447 - RNA, 19 nt, Artificial Sequence
  Description of Artificial Sequence: Synthetic oligonucleotide
  Sense Strand Starting at position 709 of SEQ ID NO: 316480
ggauaugcagagugaggaa

SEQ ID NO: 374448 - RNA, 19 nt, Artificial Sequence
  Description of Artificial Sequence: Synthetic oligonucleotide
  Antisense Strand to SEQ ID NO: 374447
uuccucacucugcauaucc

SEQ ID NO: 374449 - RNA, 19 nt, Artificial Sequence
  Description of Artificial Sequence: Synthetic oligonucleotide
  Sense Strand Starting at position 709 of SEQ ID NO: 316524
ggcugacauuuagaaaggu

SEQ ID NO: 374450 - RNA, 19 nt, Artificial Sequence
  Description of Artificial Sequence: Synthetic oligonucleotide
  Antisense Strand to SEQ ID NO: 374449
accuuucuaaaugucagcc

SEQ ID NO: 374451 - RNA, 19 nt, Artificial Sequence
  Description of Artificial Sequence: Synthetic oligonucleotide
  Sense Strand Starting at position 709 of SEQ ID NO: 316572
gccaaaguaccagaaacuu

SEQ ID NO: 374452 - RNA, 19 nt, Artificial Sequence
  Description of Artificial Sequence: Synthetic oligonucleotide
  Antisense Strand to SEQ ID NO: 374451
aaguuucugguacuuuggc

SEQ ID NO: 374453 - RNA, 19 nt, Artificial Sequence
  Description of Artificial Sequence: Synthetic oligonucleotide
  Sense Strand Starting at position 709 of SEQ ID NO: 316615
auaggugguuucucaagaa

SEQ ID NO: 374454 - RNA, 19 nt, Artificial Sequence
  Description of Artificial Sequence: Synthetic oligonucleotide
  Antisense Strand to SEQ ID NO: 374453
uucuugagaaaccaccuau

SEQ ID NO: 374455 - RNA, 19 nt, Artificial Sequence
  Description of Artificial Sequence: Synthetic oligonucleotide
  Sense Strand Starting at position 709 of SEQ ID NO: 316662
cuaauccugguguguacau

SEQ ID NO: 374456 - RNA, 19 nt, Artificial Sequence
  Description of Artificial Sequence: Synthetic oligonucleotide
  Antisense Strand to SEQ ID NO: 374455
auguacacaccaggauuag

SEQ ID NO: 374457 - RNA, 19 nt, Artificial Sequence
  Description of Artificial Sequence: Synthetic oligonucleotide
  Sense Strand Starting at position 709 of SEQ ID NO: 316684
aaggaacaguggccauaaa

SEQ ID NO: 374458 - RNA, 19 nt, Artificial Sequence
  Description of Artificial Sequence: Synthetic oligonucleotide
  Antisense Strand to SEQ ID NO: 374457
uuuauggccacuguuccuu

SEQ ID NO: 374459 - RNA, 19 nt, Artificial Sequence
  Description of Artificial Sequence: Synthetic oligonucleotide
  Sense Strand Starting at position 709 of SEQ ID NO: 316708
cggauucuuccagagaguc

SEQ ID NO: 374460 - RNA, 19 nt, Artificial Sequence
  Description of Artificial Sequence: Synthetic oligonucleotide
  Antisense Strand to SEQ ID NO: 374459
gacucucuggaagaauccg

SEQ ID NO: 374461 - RNA, 19 nt, Artificial Sequence
  Description of Artificial Sequence: Synthetic oligonucleotide
  Sense Strand Starting at position 709 of SEQ ID NO: 316795
gugaacaccugccuuagaa

SEQ ID NO: 374462 - RNA, 19 nt, Artificial Sequence
  Description of Artificial Sequence: Synthetic oligonucleotide
  Antisense Strand to SEQ ID NO: 374461
uucuaaggcagguguucac

SEQ ID NO: 374463 - RNA, 19 nt, Artificial Sequence
  Description of Artificial Sequence: Synthetic oligonucleotide
  Sense Strand Starting at position 709 of SEQ ID NO: 317402
cccucaaaguguccaagua

SEQ ID NO: 374464 - RNA, 19 nt, Artificial Sequence
  Description of Artificial Sequence: Synthetic oligonucleotide
  Antisense Strand to SEQ ID NO: 374463
uacuuggacacuuugaggg

SEQ ID NO: 374465 - RNA, 19 nt, Artificial Sequence
  Description of Artificial Sequence: Synthetic oligonucleotide
  Sense Strand Starting at position 709 of SEQ ID NO: 317403
ccucaaaguguccaaguau

SEQ ID NO: 374466 - RNA, 19 nt, Artificial Sequence
  Description of Artificial Sequence: Synthetic oligonucleotide
  Antisense Strand to SEQ ID NO: 374465
auacuuggacacuuugagg

SEQ ID NO: 374467 - RNA, 19 nt, Artificial Sequence
  Description of Artificial Sequence: Synthetic oligonucleotide
  Sense Strand Starting at position 709 of SEQ ID NO: 317721
ugcagcgaacugugauuua

SEQ ID NO: 374468 - RNA, 19 nt, Artificial Sequence
  Description of Artificial Sequence: Synthetic oligonucleotide
  Antisense Strand to SEQ ID NO: 374467
uaaaucacaguucgcugca

SEQ ID NO: 374469 - RNA, 19 nt, Artificial Sequence
  Description of Artificial Sequence: Synthetic oligonucleotide
  Sense Strand Starting at position 709 of SEQ ID NO: 317815
agaaauccagaucguauua

SEQ ID NO: 374470 - RNA, 19 nt, Artificial Sequence
  Description of Artificial Sequence: Synthetic oligonucleotide
  Antisense Strand to SEQ ID NO: 374469
uaauacgaucuggauuucu

SEQ ID NO: 374471 - RNA, 19 nt, Artificial Sequence
  Description of Artificial Sequence: Synthetic oligonucleotide
  Sense Strand Starting at position 709 of SEQ ID NO: 318255
gcugacuagccagaacuga

SEQ ID NO: 374472 - RNA, 19 nt, Artificial Sequence
  Description of Artificial Sequence: Synthetic oligonucleotide
  Antisense Strand to SEQ ID NO: 374471
ucaguucuggcuagucagc

SEQ ID NO: 374473 - RNA, 19 nt, Artificial Sequence
  Description of Artificial Sequence: Synthetic oligonucleotide
  Sense Strand Starting at position 709 of SEQ ID NO: 318462
gggaguggaagcugucuuu

SEQ ID NO: 374474 - RNA, 19 nt, Artificial Sequence
  Description of Artificial Sequence: Synthetic oligonucleotide
  Antisense Strand to SEQ ID NO: 374473
aaagacagcuuccacuccc

SEQ ID NO: 374475 - RNA, 19 nt, Artificial Sequence
  Description of Artificial Sequence: Synthetic oligonucleotide
  Sense Strand Starting at position 709 of SEQ ID NO: 318552
gcuaauccaucaguucuga

SEQ ID NO: 374476 - RNA, 19 nt, Artificial Sequence
  Description of Artificial Sequence: Synthetic oligonucleotide
  Antisense Strand to SEQ ID NO: 374475
ucagaacugauggauuagc

SEQ ID NO: 374477 - RNA, 19 nt, Artificial Sequence
  Description of Artificial Sequence: Synthetic oligonucleotide
  Sense Strand Starting at position 709 of SEQ ID NO: 318560
aucaguucugagcauaggu

SEQ ID NO: 374478 - RNA, 19 nt, Artificial Sequence
  Description of Artificial Sequence: Synthetic oligonucleotide
  Antisense Strand to SEQ ID NO: 374477
accuaugcucagaacugau

SEQ ID NO: 374479 - RNA, 19 nt, Artificial Sequence
  Description of Artificial Sequence: Synthetic oligonucleotide
  Sense Strand Starting at position 709 of SEQ ID NO: 318569
gagcauagguagucucaaa

SEQ ID NO: 374480 - RNA, 19 nt, Artificial Sequence
  Description of Artificial Sequence: Synthetic oligonucleotide
  Antisense Strand to SEQ ID NO: 374479
uuugagacuaccuaugcuc

SEQ ID NO: 374481 - RNA, 19 nt, Artificial Sequence
  Description of Artificial Sequence: Synthetic oligonucleotide
  Sense Strand Starting at position 709 of SEQ ID NO: 318576
gguagucucaaagggaaca

SEQ ID NO: 374482 - RNA, 19 nt, Artificial Sequence
  Description of Artificial Sequence: Synthetic oligonucleotide
  Antisense Strand to SEQ ID NO: 374481
uguucccuuugagacuacc

SEQ ID NO: 374483 - RNA, 19 nt, Artificial Sequence
  Description of Artificial Sequence: Synthetic oligonucleotide
  Sense Strand Starting at position 709 of SEQ ID NO: 318577
guagucucaaagggaacau

SEQ ID NO: 374484 - RNA, 19 nt, Artificial Sequence
  Description of Artificial Sequence: Synthetic oligonucleotide
  Antisense Strand to SEQ ID NO: 374483
auguucccuuugagacuac

SEQ ID NO: 374485 - RNA, 19 nt, Artificial Sequence
  Description of Artificial Sequence: Synthetic oligonucleotide
  Sense Strand Starting at position 709 of SEQ ID NO: 318711
uaaauuauagcacgguaau

SEQ ID NO: 374486 - RNA, 19 nt, Artificial Sequence
  Description of Artificial Sequence: Synthetic oligonucleotide
  Antisense Strand to SEQ ID NO: 374485
auuaccgugcuauaauuua

SEQ ID NO: 374487 - RNA, 19 nt, Artificial Sequence
  Description of Artificial Sequence: Synthetic oligonucleotide
  Sense Strand Starting at position 709 of SEQ ID NO: 318712
aaauuauagcacgguaauu

SEQ ID NO: 374488 - RNA, 19 nt, Artificial Sequence
  Description of Artificial Sequence: Synthetic oligonucleotide
  Antisense Strand to SEQ ID NO: 374487
aauuaccgugcuauaauuu

SEQ ID NO: 374489 - RNA, 19 nt, Artificial Sequence
  Description of Artificial Sequence: Synthetic oligonucleotide
  Sense Strand Starting at position 709 of SEQ ID NO: 318910
uuugauguaucacugccaa

SEQ ID NO: 374490 - RNA, 19 nt, Artificial Sequence
  Description of Artificial Sequence: Synthetic oligonucleotide
  Antisense Strand to SEQ ID NO: 374489
uuggcagugauacaucaaa

SEQ ID NO: 374491 - RNA, 19 nt, Artificial Sequence
  Description of Artificial Sequence: Synthetic oligonucleotide
  Sense Strand Starting at position 709 of SEQ ID NO: 319082
acucgaauaggcuaaguuu

SEQ ID NO: 374492 - RNA, 19 nt, Artificial Sequence
  Description of Artificial Sequence: Synthetic oligonucleotide
  Antisense Strand to SEQ ID NO: 374491
aaacuuagccuauucgagu

SEQ ID NO: 374493 - RNA, 19 nt, Artificial Sequence
  Description of Artificial Sequence: Synthetic oligonucleotide
  Sense Strand Starting at position 709 of SEQ ID NO: 319090
aggcuaaguuucccacaua

SEQ ID NO: 374494 - RNA, 19 nt, Artificial Sequence
  Description of Artificial Sequence: Synthetic oligonucleotide
  Antisense Strand to SEQ ID NO: 374493
uaugugggaaacuuagccu

SEQ ID NO: 374495 - RNA, 19 nt, Artificial Sequence
  Description of Artificial Sequence: Synthetic oligonucleotide
  Sense Strand Starting at position 709 of SEQ ID NO: 319117
uagccaggucuagaugauu

SEQ ID NO: 374496 - RNA, 19 nt, Artificial Sequence
  Description of Artificial Sequence: Synthetic oligonucleotide
  Antisense Strand to SEQ ID NO: 374495
aaucaucuagaccuggcua

SEQ ID NO: 374497 - RNA, 19 nt, Artificial Sequence
  Description of Artificial Sequence: Synthetic oligonucleotide
  Sense Strand Starting at position 709 of SEQ ID NO: 319149
ucuauuacauguuuaacga

SEQ ID NO: 374498 - RNA, 19 nt, Artificial Sequence
  Description of Artificial Sequence: Synthetic oligonucleotide
  Antisense Strand to SEQ ID NO: 374497
ucguuaaacauguaauaga

SEQ ID NO: 374499 - RNA, 19 nt, Artificial Sequence
  Description of Artificial Sequence: Synthetic oligonucleotide
  Sense Strand Starting at position 709 of SEQ ID NO: 319150
cuauuacauguuuaacgaa

SEQ ID NO: 374500 - RNA, 19 nt, Artificial Sequence
  Description of Artificial Sequence: Synthetic oligonucleotide
  Antisense Strand to SEQ ID NO: 374499
uucguuaaacauguaauag

SEQ ID NO: 374501 - RNA, 19 nt, Artificial Sequence
  Description of Artificial Sequence: Synthetic oligonucleotide
  Sense Strand Starting at position 710 of SEQ ID NO: 315475
aauugagauuccuucguag

SEQ ID NO: 374502 - RNA, 19 nt, Artificial Sequence
  Description of Artificial Sequence: Synthetic oligonucleotide
  Antisense Strand to SEQ ID NO: 374501
cuacgaaggaaucucaauu

SEQ ID NO: 374503 - RNA, 19 nt, Artificial Sequence
  Description of Artificial Sequence: Synthetic oligonucleotide
  Sense Strand Starting at position 710 of SEQ ID NO: 315486
cuucguaggcuacaagaaa

SEQ ID NO: 374504 - RNA, 19 nt, Artificial Sequence
  Description of Artificial Sequence: Synthetic oligonucleotide
  Antisense Strand to SEQ ID NO: 374503
uuucuuguagccuacgaag

SEQ ID NO: 374505 - RNA, 19 nt, Artificial Sequence
  Description of Artificial Sequence: Synthetic oligonucleotide
  Sense Strand Starting at position 710 of SEQ ID NO: 315542
cgaggcuauugguucuaau

SEQ ID NO: 374506 - RNA, 19 nt, Artificial Sequence
  Description of Artificial Sequence: Synthetic oligonucleotide
  Antisense Strand to SEQ ID NO: 374505
auuagaaccaauagccucg

SEQ ID NO: 374507 - RNA, 19 nt, Artificial Sequence
  Description of Artificial Sequence: Synthetic oligonucleotide
  Sense Strand Starting at position 710 of SEQ ID NO: 315586
gaaugaaucuggcuucuga

SEQ ID NO: 374508 - RNA, 19 nt, Artificial Sequence
  Description of Artificial Sequence: Synthetic oligonucleotide
  Antisense Strand to SEQ ID NO: 374507
ucagaagccagauucauuc

SEQ ID NO: 374509 - RNA, 19 nt, Artificial Sequence
  Description of Artificial Sequence: Synthetic oligonucleotide
  Sense Strand Starting at position 710 of SEQ ID NO: 315599
uucugaauucuaggcagau

SEQ ID NO: 374510 - RNA, 19 nt, Artificial Sequence
  Description of Artificial Sequence: Synthetic oligonucleotide
  Antisense Strand to SEQ ID NO: 374509
aucugccuagaauucagaa

SEQ ID NO: 374511 - RNA, 19 nt, Artificial Sequence
  Description of Artificial Sequence: Synthetic oligonucleotide
  Sense Strand Starting at position 710 of SEQ ID NO: 315600
ucugaauucuaggcagaua

SEQ ID NO: 374512 - RNA, 19 nt, Artificial Sequence
  Description of Artificial Sequence: Synthetic oligonucleotide
  Antisense Strand to SEQ ID NO: 374511
uaucugccuagaauucaga

SEQ ID NO: 374513 - RNA, 19 nt, Artificial Sequence
  Description of Artificial Sequence: Synthetic oligonucleotide
  Sense Strand Starting at position 710 of SEQ ID NO: 315876
aguuauccaccauaauguu

SEQ ID NO: 374514 - RNA, 19 nt, Artificial Sequence
  Description of Artificial Sequence: Synthetic oligonucleotide
  Antisense Strand to SEQ ID NO: 374513
aacauuaugguggauaacu

SEQ ID NO: 374515 - RNA, 19 nt, Artificial Sequence
  Description of Artificial Sequence: Synthetic oligonucleotide
  Sense Strand Starting at position 710 of SEQ ID NO: 316088
agucccguccaauaugauu

SEQ ID NO: 374516 - RNA, 19 nt, Artificial Sequence
  Description of Artificial Sequence: Synthetic oligonucleotide
  Antisense Strand to SEQ ID NO: 374515
aaucauauuggacgggacu

SEQ ID NO: 374517 - RNA, 19 nt, Artificial Sequence
  Description of Artificial Sequence: Synthetic oligonucleotide
  Sense Strand Starting at position 710 of SEQ ID NO: 316123
guggaagauuaagagaaca

SEQ ID NO: 374518 - RNA, 19 nt, Artificial Sequence
  Description of Artificial Sequence: Synthetic oligonucleotide
  Antisense Strand to SEQ ID NO: 374517
uguucucuuaaucuuccac

SEQ ID NO: 374519 - RNA, 19 nt, Artificial Sequence
  Description of Artificial Sequence: Synthetic oligonucleotide
  Sense Strand Starting at position 710 of SEQ ID NO: 316154
ugaagcuaucagcaagaca

SEQ ID NO: 374520 - RNA, 19 nt, Artificial Sequence
  Description of Artificial Sequence: Synthetic oligonucleotide
  Antisense Strand to SEQ ID NO: 374519
ugucuugcugauagcuuca

SEQ ID NO: 374521 - RNA, 19 nt, Artificial Sequence
  Description of Artificial Sequence: Synthetic oligonucleotide
  Sense Strand Starting at position 710 of SEQ ID NO: 316247
gcuggacaacauuguaaga

SEQ ID NO: 374522 - RNA, 19 nt, Artificial Sequence
  Description of Artificial Sequence: Synthetic oligonucleotide
  Antisense Strand to SEQ ID NO: 374521
ucuuacaauguuguccagc

SEQ ID NO: 374523 - RNA, 19 nt, Artificial Sequence
  Description of Artificial Sequence: Synthetic oligonucleotide
  Sense Strand Starting at position 710 of SEQ ID NO: 316466
guuguuuaggaacaguuaa

SEQ ID NO: 374524 - RNA, 19 nt, Artificial Sequence
  Description of Artificial Sequence: Synthetic oligonucleotide
  Antisense Strand to SEQ ID NO: 374523
uuaacuguuccuaaacaac

SEQ ID NO: 374525 - RNA, 19 nt, Artificial Sequence
  Description of Artificial Sequence: Synthetic oligonucleotide
  Sense Strand Starting at position 710 of SEQ ID NO: 316479
aguuaaagcuuucugaauu

SEQ ID NO: 374526 - RNA, 19 nt, Artificial Sequence
  Description of Artificial Sequence: Synthetic oligonucleotide
  Antisense Strand to SEQ ID NO: 374525
aauucagaaagcuuuaacu

SEQ ID NO: 374527 - RNA, 19 nt, Artificial Sequence
  Description of Artificial Sequence: Synthetic oligonucleotide
  Sense Strand Starting at position 710 of SEQ ID NO: 317494
ccacaaacuugaucggaca

SEQ ID NO: 374528 - RNA, 19 nt, Artificial Sequence
  Description of Artificial Sequence: Synthetic oligonucleotide
  Antisense Strand to SEQ ID NO: 374527
uguccgaucaaguuugugg

SEQ ID NO: 374529 - RNA, 19 nt, Artificial Sequence
  Description of Artificial Sequence: Synthetic oligonucleotide
  Sense Strand Starting at position 710 of SEQ ID NO: 317534
gugucacguacugggaaua

SEQ ID NO: 374530 - RNA, 19 nt, Artificial Sequence
  Description of Artificial Sequence: Synthetic oligonucleotide
  Antisense Strand to SEQ ID NO: 374529
uauucccaguacgugacac

SEQ ID NO: 374531 - RNA, 19 nt, Artificial Sequence
  Description of Artificial Sequence: Synthetic oligonucleotide
  Sense Strand Starting at position 710 of SEQ ID NO: 317571
gcucccugaccucaaagau

SEQ ID NO: 374532 - RNA, 19 nt, Artificial Sequence
  Description of Artificial Sequence: Synthetic oligonucleotide
  Antisense Strand to SEQ ID NO: 374531
aucuuugaggucagggagc

SEQ ID NO: 374533 - RNA, 19 nt, Artificial Sequence
  Description of Artificial Sequence: Synthetic oligonucleotide
  Sense Strand Starting at position 710 of SEQ ID NO: 317692
auagaaauaucuggaaagg

SEQ ID NO: 374534 - RNA, 19 nt, Artificial Sequence
  Description of Artificial Sequence: Synthetic oligonucleotide
  Antisense Strand to SEQ ID NO: 374533
ccuuuccagauauuucuau

SEQ ID NO: 374535 - RNA, 19 nt, Artificial Sequence
  Description of Artificial Sequence: Synthetic oligonucleotide
  Sense Strand Starting at position 710 of SEQ ID NO: 317813
guaagaaugcgccagucag

SEQ ID NO: 374536 - RNA, 19 nt, Artificial Sequence
  Description of Artificial Sequence: Synthetic oligonucleotide
  Antisense Strand to SEQ ID NO: 374535
cugacuggcgcauucuuac

SEQ ID NO: 374537 - RNA, 19 nt, Artificial Sequence
  Description of Artificial Sequence: Synthetic oligonucleotide
  Sense Strand Starting at position 710 of SEQ ID NO: 317864
ggcaguuacgagggauaau

SEQ ID NO: 374538 - RNA, 19 nt, Artificial Sequence
  Description of Artificial Sequence: Synthetic oligonucleotide
  Antisense Strand to SEQ ID NO: 374537
auuaucccucguaacugcc

SEQ ID NO: 374539 - RNA, 19 nt, Artificial Sequence
  Description of Artificial Sequence: Synthetic oligonucleotide
  Sense Strand Starting at position 710 of SEQ ID NO: 317865
gcaguuacgagggauaaua

SEQ ID NO: 374540 - RNA, 19 nt, Artificial Sequence
  Description of Artificial Sequence: Synthetic oligonucleotide
  Antisense Strand to SEQ ID NO: 374539
uauuaucccucguaacugc

SEQ ID NO: 374541 - RNA, 19 nt, Artificial Sequence
  Description of Artificial Sequence: Synthetic oligonucleotide
  Sense Strand Starting at position 710 of SEQ ID NO: 317899
aacagaacuggguguguau

SEQ ID NO: 374542 - RNA, 19 nt, Artificial Sequence
  Description of Artificial Sequence: Synthetic oligonucleotide
  Antisense Strand to SEQ ID NO: 374541
auacacacccaguucuguu

SEQ ID NO: 374543 - RNA, 19 nt, Artificial Sequence
  Description of Artificial Sequence: Synthetic oligonucleotide
  Sense Strand Starting at position 710 of SEQ ID NO: 317920
guuuguguugaacgacaga

SEQ ID NO: 374544 - RNA, 19 nt, Artificial Sequence
  Description of Artificial Sequence: Synthetic oligonucleotide
  Antisense Strand to SEQ ID NO: 374543
ucugucguucaacacaaac

SEQ ID NO: 374545 - RNA, 19 nt, Artificial Sequence
  Description of Artificial Sequence: Synthetic oligonucleotide
  Sense Strand Starting at position 710 of SEQ ID NO: 317923
uguguugaacgacagagaa

SEQ ID NO: 374546 - RNA, 19 nt, Artificial Sequence
  Description of Artificial Sequence: Synthetic oligonucleotide
  Antisense Strand to SEQ ID NO: 374545
uucucugucguucaacaca

SEQ ID NO: 374547 - RNA, 19 nt, Artificial Sequence
  Description of Artificial Sequence: Synthetic oligonucleotide
  Sense Strand Starting at position 710 of SEQ ID NO: 318135
gaggauuauuaggaagaug

SEQ ID NO: 374548 - RNA, 19 nt, Artificial Sequence
  Description of Artificial Sequence: Synthetic oligonucleotide
  Antisense Strand to SEQ ID NO: 374547
caucuuccuaauaauccuc

SEQ ID NO: 374549 - RNA, 19 nt, Artificial Sequence
  Description of Artificial Sequence: Synthetic oligonucleotide
  Sense Strand Starting at position 710 of SEQ ID NO: 318155
ugcagucguaacgauuaga

SEQ ID NO: 374550 - RNA, 19 nt, Artificial Sequence
  Description of Artificial Sequence: Synthetic oligonucleotide
  Antisense Strand to SEQ ID NO: 374549
ucuaaucguuacgacugca

SEQ ID NO: 374551 - RNA, 19 nt, Artificial Sequence
  Description of Artificial Sequence: Synthetic oligonucleotide
  Sense Strand Starting at position 710 of SEQ ID NO: 318158
agucguaacgauuagagau

SEQ ID NO: 374552 - RNA, 19 nt, Artificial Sequence
  Description of Artificial Sequence: Synthetic oligonucleotide
  Antisense Strand to SEQ ID NO: 374551
aucucuaaucguuacgacu

SEQ ID NO: 374553 - RNA, 19 nt, Artificial Sequence
  Description of Artificial Sequence: Synthetic oligonucleotide
  Sense Strand Starting at position 710 of SEQ ID NO: 318180
gagggccuguuagcaauaa

SEQ ID NO: 374554 - RNA, 19 nt, Artificial Sequence
  Description of Artificial Sequence: Synthetic oligonucleotide
  Antisense Strand to SEQ ID NO: 374553
uuauugcuaacaggcccuc

SEQ ID NO: 374555 - RNA, 19 nt, Artificial Sequence
  Description of Artificial Sequence: Synthetic oligonucleotide
  Sense Strand Starting at position 710 of SEQ ID NO: 318269
gccuaugcgaucugaaaga

SEQ ID NO: 374556 - RNA, 19 nt, Artificial Sequence
  Description of Artificial Sequence: Synthetic oligonucleotide
  Antisense Strand to SEQ ID NO: 374555
ucuuucagaucgcauaggc

SEQ ID NO: 374557 - RNA, 19 nt, Artificial Sequence
  Description of Artificial Sequence: Synthetic oligonucleotide
  Sense Strand Starting at position 710 of SEQ ID NO: 318298
uugagagugucucccagau

SEQ ID NO: 374558 - RNA, 19 nt, Artificial Sequence
  Description of Artificial Sequence: Synthetic oligonucleotide
  Antisense Strand to SEQ ID NO: 374557
aucugggagacacucucaa

SEQ ID NO: 374559 - RNA, 19 nt, Artificial Sequence
  Description of Artificial Sequence: Synthetic oligonucleotide
  Sense Strand Starting at position 710 of SEQ ID NO: 318300
gagagugucucccagauuu

SEQ ID NO: 374560 - RNA, 19 nt, Artificial Sequence
  Description of Artificial Sequence: Synthetic oligonucleotide
  Antisense Strand to SEQ ID NO: 374559
aaaucugggagacacucuc

SEQ ID NO: 374561 - RNA, 19 nt, Artificial Sequence
  Description of Artificial Sequence: Synthetic oligonucleotide
  Sense Strand Starting at position 710 of SEQ ID NO: 318396
cuuugagaugucuauacau

SEQ ID NO: 374562 - RNA, 19 nt, Artificial Sequence
  Description of Artificial Sequence: Synthetic oligonucleotide
  Antisense Strand to SEQ ID NO: 374561
auguauagacaucucaaag

SEQ ID NO: 374563 - RNA, 19 nt, Artificial Sequence
  Description of Artificial Sequence: Synthetic oligonucleotide
  Sense Strand Starting at position 710 of SEQ ID NO: 318454
ggaggagcucccgaucuaa

SEQ ID NO: 374564 - RNA, 19 nt, Artificial Sequence
  Description of Artificial Sequence: Synthetic oligonucleotide
  Antisense Strand to SEQ ID NO: 374563
uuagaucgggagcuccucc

SEQ ID NO: 374565 - RNA, 19 nt, Artificial Sequence
  Description of Artificial Sequence: Synthetic oligonucleotide
  Sense Strand Starting at position 710 of SEQ ID NO: 318476
aacugucuugccgagagga

SEQ ID NO: 374566 - RNA, 19 nt, Artificial Sequence
  Description of Artificial Sequence: Synthetic oligonucleotide
  Antisense Strand to SEQ ID NO: 374565
uccucucggcaagacaguu

SEQ ID NO: 374567 - RNA, 19 nt, Artificial Sequence
  Description of Artificial Sequence: Synthetic oligonucleotide
  Sense Strand Starting at position 710 of SEQ ID NO: 318478
cugucuugccgagaggagu

SEQ ID NO: 374568 - RNA, 19 nt, Artificial Sequence
  Description of Artificial Sequence: Synthetic oligonucleotide
  Antisense Strand to SEQ ID NO: 374567
acuccucucggcaagacag

SEQ ID NO: 374569 - RNA, 19 nt, Artificial Sequence
  Description of Artificial Sequence: Synthetic oligonucleotide
  Sense Strand Starting at position 710 of SEQ ID NO: 318521
uuagucacuucucugucau

SEQ ID NO: 374570 - RNA, 19 nt, Artificial Sequence
  Description of Artificial Sequence: Synthetic oligonucleotide
  Antisense Strand to SEQ ID NO: 374569
augacagagaagugacuaa

SEQ ID NO: 374571 - RNA, 19 nt, Artificial Sequence
  Description of Artificial Sequence: Synthetic oligonucleotide
  Sense Strand Starting at position 710 of SEQ ID NO: 318789
ggcuguugaucauuuguaa

SEQ ID NO: 374572 - RNA, 19 nt, Artificial Sequence
  Description of Artificial Sequence: Synthetic oligonucleotide
  Antisense Strand to SEQ ID NO: 374571
uuacaaaugaucaacagcc

SEQ ID NO: 374573 - RNA, 19 nt, Artificial Sequence
  Description of Artificial Sequence: Synthetic oligonucleotide
  Sense Strand Starting at position 710 of SEQ ID NO: 318792
uguugaucauuuguaaugu

SEQ ID NO: 374574 - RNA, 19 nt, Artificial Sequence
  Description of Artificial Sequence: Synthetic oligonucleotide
  Antisense Strand to SEQ ID NO: 374573
acauuacaaaugaucaaca

SEQ ID NO: 374575 - RNA, 19 nt, Artificial Sequence
  Description of Artificial Sequence: Synthetic oligonucleotide
  Sense Strand Starting at position 710 of SEQ ID NO: 318805
uaauguggauaguuggaaa

SEQ ID NO: 374576 - RNA, 19 nt, Artificial Sequence
  Description of Artificial Sequence: Synthetic oligonucleotide
  Antisense Strand to SEQ ID NO: 374575
uuuccaacuauccacauua

SEQ ID NO: 374577 - RNA, 19 nt, Artificial Sequence
  Description of Artificial Sequence: Synthetic oligonucleotide
  Sense Strand Starting at position 710 of SEQ ID NO: 318824
ggagaugugcaauacguau

SEQ ID NO: 374578 - RNA, 19 nt, Artificial Sequence
  Description of Artificial Sequence: Synthetic oligonucleotide
  Antisense Strand to SEQ ID NO: 374577
auacguauugcacaucucc

SEQ ID NO: 374579 - RNA, 19 nt, Artificial Sequence
  Description of Artificial Sequence: Synthetic oligonucleotide
  Sense Strand Starting at position 710 of SEQ ID NO: 318826
agaugugcaauacguauaa

SEQ ID NO: 374580 - RNA, 19 nt, Artificial Sequence
  Description of Artificial Sequence: Synthetic oligonucleotide
  Antisense Strand to SEQ ID NO: 374579
uuauacguauugcacaucu

SEQ ID NO: 374581 - RNA, 19 nt, Artificial Sequence
  Description of Artificial Sequence: Synthetic oligonucleotide
  Sense Strand Starting at position 711 of SEQ ID NO: 315292
ggugaagauauauguauua

SEQ ID NO: 374582 - RNA, 19 nt, Artificial Sequence
  Description of Artificial Sequence: Synthetic oligonucleotide
  Antisense Strand to SEQ ID NO: 374581
uaauacauauaucuucacc

SEQ ID NO: 374583 - RNA, 19 nt, Artificial Sequence
  Description of Artificial Sequence: Synthetic oligonucleotide
  Sense Strand Starting at position 711 of SEQ ID NO: 315302
uauguauuacuucggguuu

SEQ ID NO: 374584 - RNA, 19 nt, Artificial Sequence
  Description of Artificial Sequence: Synthetic oligonucleotide
  Antisense Strand to SEQ ID NO: 374583
aaacccgaaguaauacaua

SEQ ID NO: 374585 - RNA, 19 nt, Artificial Sequence
  Description of Artificial Sequence: Synthetic oligonucleotide
  Sense Strand Starting at position 711 of SEQ ID NO: 315313
ucggguuucucauccaucu

SEQ ID NO: 374586 - RNA, 19 nt, Artificial Sequence
  Description of Artificial Sequence: Synthetic oligonucleotide
  Antisense Strand to SEQ ID NO: 374585
agauggaugagaaacccga

SEQ ID NO: 374587 - RNA, 19 nt, Artificial Sequence
  Description of Artificial Sequence: Synthetic oligonucleotide
  Sense Strand Starting at position 711 of SEQ ID NO: 315363
uuaaaugaaugccuguaca

SEQ ID NO: 374588 - RNA, 19 nt, Artificial Sequence
  Description of Artificial Sequence: Synthetic oligonucleotide
  Antisense Strand to SEQ ID NO: 374587
uguacaggcauucauuuaa

SEQ ID NO: 374589 - RNA, 19 nt, Artificial Sequence
  Description of Artificial Sequence: Synthetic oligonucleotide
  Sense Strand Starting at position 711 of SEQ ID NO: 315445
uaggauccauaucugaguu

SEQ ID NO: 374590 - RNA, 19 nt, Artificial Sequence
  Description of Artificial Sequence: Synthetic oligonucleotide
  Antisense Strand to SEQ ID NO: 374589
aacucagauauggauccua

SEQ ID NO: 374591 - RNA, 19 nt, Artificial Sequence
  Description of Artificial Sequence: Synthetic oligonucleotide
  Sense Strand Starting at position 711 of SEQ ID NO: 315449
auccauaucugaguuguua

SEQ ID NO: 374592 - RNA, 19 nt, Artificial Sequence
  Description of Artificial Sequence: Synthetic oligonucleotide
  Antisense Strand to SEQ ID NO: 374591
uaacaacucagauauggau

SEQ ID NO: 374593 - RNA, 19 nt, Artificial Sequence
  Description of Artificial Sequence: Synthetic oligonucleotide
  Sense Strand Starting at position 711 of SEQ ID NO: 315529
guuaacauugcucagccua

SEQ ID NO: 374594 - RNA, 19 nt, Artificial Sequence
  Description of Artificial Sequence: Synthetic oligonucleotide
  Antisense Strand to SEQ ID NO: 374593
uaggcugagcaauguuaac

SEQ ID NO: 374595 - RNA, 19 nt, Artificial Sequence
  Description of Artificial Sequence: Synthetic oligonucleotide
  Sense Strand Starting at position 711 of SEQ ID NO: 315564
ggaaguaggucauagagaa

SEQ ID NO: 374596 - RNA, 19 nt, Artificial Sequence
  Description of Artificial Sequence: Synthetic oligonucleotide
  Antisense Strand to SEQ ID NO: 374595
uucucuaugaccuacuucc

SEQ ID NO: 374597 - RNA, 19 nt, Artificial Sequence
  Description of Artificial Sequence: Synthetic oligonucleotide
  Sense Strand Starting at position 711 of SEQ ID NO: 315668
ggaagacuuacuugggugu

SEQ ID NO: 374598 - RNA, 19 nt, Artificial Sequence
  Description of Artificial Sequence: Synthetic oligonucleotide
  Antisense Strand to SEQ ID NO: 374597
acacccaaguaagucuucc

SEQ ID NO: 374599 - RNA, 19 nt, Artificial Sequence
  Description of Artificial Sequence: Synthetic oligonucleotide
  Sense Strand Starting at position 711 of SEQ ID NO: 315716
gguacuguccgucugcauu

SEQ ID NO: 374600 - RNA, 19 nt, Artificial Sequence
  Description of Artificial Sequence: Synthetic oligonucleotide
  Antisense Strand to SEQ ID NO: 374599
aaugcagacggacaguacc

SEQ ID NO: 374601 - RNA, 19 nt, Artificial Sequence
  Description of Artificial Sequence: Synthetic oligonucleotide
  Sense Strand Starting at position 711 of SEQ ID NO: 315786
ggaacuuuccucuggcaug

SEQ ID NO: 374602 - RNA, 19 nt, Artificial Sequence
  Description of Artificial Sequence: Synthetic oligonucleotide
  Antisense Strand to SEQ ID NO: 374601
caugccagaggaaaguucc

SEQ ID NO: 374603 - RNA, 19 nt, Artificial Sequence
  Description of Artificial Sequence: Synthetic oligonucleotide
  Sense Strand Starting at position 711 of SEQ ID NO: 316038
uuaagugccucauuacagu

SEQ ID NO: 374604 - RNA, 19 nt, Artificial Sequence
  Description of Artificial Sequence: Synthetic oligonucleotide
  Antisense Strand to SEQ ID NO: 374603
acuguaaugaggcacuuaa

SEQ ID NO: 374605 - RNA, 19 nt, Artificial Sequence
  Description of Artificial Sequence: Synthetic oligonucleotide
  Sense Strand Starting at position 711 of SEQ ID NO: 316064
ccuucccaucuguguuuau

SEQ ID NO: 374606 - RNA, 19 nt, Artificial Sequence
  Description of Artificial Sequence: Synthetic oligonucleotide
  Antisense Strand to SEQ ID NO: 374605
auaaacacagaugggaagg

SEQ ID NO: 374607 - RNA, 19 nt, Artificial Sequence
  Description of Artificial Sequence: Synthetic oligonucleotide
  Sense Strand Starting at position 711 of SEQ ID NO: 316065
cuucccaucuguguuuauu

SEQ ID NO: 374608 - RNA, 19 nt, Artificial Sequence
  Description of Artificial Sequence: Synthetic oligonucleotide
  Antisense Strand to SEQ ID NO: 374607
aauaaacacagaugggaag

SEQ ID NO: 374609 - RNA, 19 nt, Artificial Sequence
  Description of Artificial Sequence: Synthetic oligonucleotide
  Sense Strand Starting at position 711 of SEQ ID NO: 316124
gcuguaaucaaguggaaau

SEQ ID NO: 374610 - RNA, 19 nt, Artificial Sequence
  Description of Artificial Sequence: Synthetic oligonucleotide
  Antisense Strand to SEQ ID NO: 374609
auuuccacuugauuacagc

SEQ ID NO: 374611 - RNA, 19 nt, Artificial Sequence
  Description of Artificial Sequence: Synthetic oligonucleotide
  Sense Strand Starting at position 711 of SEQ ID NO: 316136
uggaaauuauagucagcuc

SEQ ID NO: 374612 - RNA, 19 nt, Artificial Sequence
  Description of Artificial Sequence: Synthetic oligonucleotide
  Antisense Strand to SEQ ID NO: 374611
gagcugacuauaauuucca

SEQ ID NO: 374613 - RNA, 19 nt, Artificial Sequence
  Description of Artificial Sequence: Synthetic oligonucleotide
  Sense Strand Starting at position 711 of SEQ ID NO: 316147
gucagcucuauggguacaa

SEQ ID NO: 374614 - RNA, 19 nt, Artificial Sequence
  Description of Artificial Sequence: Synthetic oligonucleotide
  Antisense Strand to SEQ ID NO: 374613
uuguacccauagagcugac

SEQ ID NO: 374615 - RNA, 19 nt, Artificial Sequence
  Description of Artificial Sequence: Synthetic oligonucleotide
  Sense Strand Starting at position 711 of SEQ ID NO: 316148
ucagcucuauggguacaaa

SEQ ID NO: 374616 - RNA, 19 nt, Artificial Sequence
  Description of Artificial Sequence: Synthetic oligonucleotide
  Antisense Strand to SEQ ID NO: 374615
uuuguacccauagagcuga

SEQ ID NO: 374617 - RNA, 19 nt, Artificial Sequence
  Description of Artificial Sequence: Synthetic oligonucleotide
  Sense Strand Starting at position 711 of SEQ ID NO: 316237
gguggaugauacucagauu

SEQ ID NO: 374618 - RNA, 19 nt, Artificial Sequence
  Description of Artificial Sequence: Synthetic oligonucleotide
  Antisense Strand to SEQ ID NO: 374617
aaucugaguaucauccacc

SEQ ID NO: 374619 - RNA, 19 nt, Artificial Sequence
  Description of Artificial Sequence: Synthetic oligonucleotide
  Sense Strand Starting at position 711 of SEQ ID NO: 316240
ggaugauacucagauuauu

SEQ ID NO: 374620 - RNA, 19 nt, Artificial Sequence
  Description of Artificial Sequence: Synthetic oligonucleotide
  Antisense Strand to SEQ ID NO: 374619
aauaaucugaguaucaucc

SEQ ID NO: 374621 - RNA, 19 nt, Artificial Sequence
  Description of Artificial Sequence: Synthetic oligonucleotide
  Sense Strand Starting at position 711 of SEQ ID NO: 316330
ccacgacagccuggagaau

SEQ ID NO: 374622 - RNA, 19 nt, Artificial Sequence
  Description of Artificial Sequence: Synthetic oligonucleotide
  Antisense Strand to SEQ ID NO: 374621
auucuccaggcugucgugg

SEQ ID NO: 374623 - RNA, 19 nt, Artificial Sequence
  Description of Artificial Sequence: Synthetic oligonucleotide
  Sense Strand Starting at position 711 of SEQ ID NO: 316538
gcgauucuccacuacuagu

SEQ ID NO: 374624 - RNA, 19 nt, Artificial Sequence
  Description of Artificial Sequence: Synthetic oligonucleotide
  Antisense Strand to SEQ ID NO: 374623
acuaguaguggagaaucgc

SEQ ID NO: 374625 - RNA, 19 nt, Artificial Sequence
  Description of Artificial Sequence: Synthetic oligonucleotide
  Sense Strand Starting at position 711 of SEQ ID NO: 316755
cgaagcugucaucggaaau

SEQ ID NO: 374626 - RNA, 19 nt, Artificial Sequence
  Description of Artificial Sequence: Synthetic oligonucleotide
  Antisense Strand to SEQ ID NO: 374625
auuuccgaugacagcuucg

SEQ ID NO: 374627 - RNA, 19 nt, Artificial Sequence
  Description of Artificial Sequence: Synthetic oligonucleotide
  Sense Strand Starting at position 711 of SEQ ID NO: 316756
gaagcugucaucggaaaug

SEQ ID NO: 374628 - RNA, 19 nt, Artificial Sequence
  Description of Artificial Sequence: Synthetic oligonucleotide
  Antisense Strand to SEQ ID NO: 374627
cauuuccgaugacagcuuc

SEQ ID NO: 374629 - RNA, 19 nt, Artificial Sequence
  Description of Artificial Sequence: Synthetic oligonucleotide
  Sense Strand Starting at position 711 of SEQ ID NO: 316767
cggaaaugccgcugggaaa

SEQ ID NO: 374630 - RNA, 19 nt, Artificial Sequence
  Description of Artificial Sequence: Synthetic oligonucleotide
  Antisense Strand to SEQ ID NO: 374629
uuucccagcggcauuuccg

SEQ ID NO: 374631 - RNA, 19 nt, Artificial Sequence
  Description of Artificial Sequence: Synthetic oligonucleotide
  Sense Strand Starting at position 711 of SEQ ID NO: 317841
gcaauuaaccggucguggu

SEQ ID NO: 374632 - RNA, 19 nt, Artificial Sequence
  Description of Artificial Sequence: Synthetic oligonucleotide
  Antisense Strand to SEQ ID NO: 374631
accacgaccgguuaauugc

SEQ ID NO: 374633 - RNA, 19 nt, Artificial Sequence
  Description of Artificial Sequence: Synthetic oligonucleotide
  Sense Strand Starting at position 711 of SEQ ID NO: 318156
cugagcucuguccaguaua

SEQ ID NO: 374634 - RNA, 19 nt, Artificial Sequence
  Description of Artificial Sequence: Synthetic oligonucleotide
  Antisense Strand to SEQ ID NO: 374633
uauacuggacagagcucag

SEQ ID NO: 374635 - RNA, 19 nt, Artificial Sequence
  Description of Artificial Sequence: Synthetic oligonucleotide
  Sense Strand Starting at position 711 of SEQ ID NO: 318159
agcucuguccaguauaacu

SEQ ID NO: 374636 - RNA, 19 nt, Artificial Sequence
  Description of Artificial Sequence: Synthetic oligonucleotide
  Antisense Strand to SEQ ID NO: 374635
aguuauacuggacagagcu

SEQ ID NO: 374637 - RNA, 19 nt, Artificial Sequence
  Description of Artificial Sequence: Synthetic oligonucleotide
  Sense Strand Starting at position 711 of SEQ ID NO: 318256
cucuuugagccucagucua

SEQ ID NO: 374638 - RNA, 19 nt, Artificial Sequence
  Description of Artificial Sequence: Synthetic oligonucleotide
  Antisense Strand to SEQ ID NO: 374637
uagacugaggcucaaagag

SEQ ID NO: 374639 - RNA, 19 nt, Artificial Sequence
  Description of Artificial Sequence: Synthetic oligonucleotide
  Sense Strand Starting at position 711 of SEQ ID NO: 318282
ucaaccugugagugauaua

SEQ ID NO: 374640 - RNA, 19 nt, Artificial Sequence
  Description of Artificial Sequence: Synthetic oligonucleotide
  Antisense Strand to SEQ ID NO: 374639
uauaucacucacagguuga

SEQ ID NO: 374641 - RNA, 19 nt, Artificial Sequence
  Description of Artificial Sequence: Synthetic oligonucleotide
  Sense Strand Starting at position 711 of SEQ ID NO: 318453
uguggucuaacuugagaaa

SEQ ID NO: 374642 - RNA, 19 nt, Artificial Sequence
  Description of Artificial Sequence: Synthetic oligonucleotide
  Antisense Strand to SEQ ID NO: 374641
uuucucaaguuagaccaca

SEQ ID NO: 374643 - RNA, 19 nt, Artificial Sequence
  Description of Artificial Sequence: Synthetic oligonucleotide
  Sense Strand Starting at position 711 of SEQ ID NO: 318456
ggucuaacuugagaaauaa

SEQ ID NO: 374644 - RNA, 19 nt, Artificial Sequence
  Description of Artificial Sequence: Synthetic oligonucleotide
  Antisense Strand to SEQ ID NO: 374643
uuauuucucaaguuagacc

SEQ ID NO: 374645 - RNA, 19 nt, Artificial Sequence
  Description of Artificial Sequence: Synthetic oligonucleotide
  Sense Strand Starting at position 711 of SEQ ID NO: 318510
cacugcugagcgugacuua

SEQ ID NO: 374646 - RNA, 19 nt, Artificial Sequence
  Description of Artificial Sequence: Synthetic oligonucleotide
  Antisense Strand to SEQ ID NO: 374645
uaagucacgcucagcagug

SEQ ID NO: 374647 - RNA, 19 nt, Artificial Sequence
  Description of Artificial Sequence: Synthetic oligonucleotide
  Sense Strand Starting at position 711 of SEQ ID NO: 318695
ccggauuuccguugguuau

SEQ ID NO: 374648 - RNA, 19 nt, Artificial Sequence
  Description of Artificial Sequence: Synthetic oligonucleotide
  Antisense Strand to SEQ ID NO: 374647
auaaccaacggaaauccgg

SEQ ID NO: 374649 - RNA, 19 nt, Artificial Sequence
  Description of Artificial Sequence: Synthetic oligonucleotide
  Sense Strand Starting at position 711 of SEQ ID NO: 318696
cggauuuccguugguuaua

SEQ ID NO: 374650 - RNA, 19 nt, Artificial Sequence
  Description of Artificial Sequence: Synthetic oligonucleotide
  Antisense Strand to SEQ ID NO: 374649
uauaaccaacggaaauccg

SEQ ID NO: 374651 - RNA, 19 nt, Artificial Sequence
  Description of Artificial Sequence: Synthetic oligonucleotide
  Sense Strand Starting at position 711 of SEQ ID NO: 318698
gauuuccguugguuauaau

SEQ ID NO: 374652 - RNA, 19 nt, Artificial Sequence
  Description of Artificial Sequence: Synthetic oligonucleotide
  Antisense Strand to SEQ ID NO: 374651
auuauaaccaacggaaauc

SEQ ID NO: 374653 - RNA, 19 nt, Artificial Sequence
  Description of Artificial Sequence: Synthetic oligonucleotide
  Sense Strand Starting at position 711 of SEQ ID NO: 318773
ucaaauguuccuggcucua

SEQ ID NO: 374654 - RNA, 19 nt, Artificial Sequence
  Description of Artificial Sequence: Synthetic oligonucleotide
  Antisense Strand to SEQ ID NO: 374653
uagagccaggaacauuuga

SEQ ID NO: 374655 - RNA, 19 nt, Artificial Sequence
  Description of Artificial Sequence: Synthetic oligonucleotide
  Sense Strand Starting at position 711 of SEQ ID NO: 318778
uguuccuggcucuaacauu

SEQ ID NO: 374656 - RNA, 19 nt, Artificial Sequence
  Description of Artificial Sequence: Synthetic oligonucleotide
  Antisense Strand to SEQ ID NO: 374655
aauguuagagccaggaaca

SEQ ID NO: 374657 - RNA, 19 nt, Artificial Sequence
  Description of Artificial Sequence: Synthetic oligonucleotide
  Sense Strand Starting at position 711 of SEQ ID NO: 319146
gaaguugucagagggaucu

SEQ ID NO: 374658 - RNA, 19 nt, Artificial Sequence
  Description of Artificial Sequence: Synthetic oligonucleotide
  Antisense Strand to SEQ ID NO: 374657
agaucccucugacaacuuc

SEQ ID NO: 374659 - RNA, 19 nt, Artificial Sequence
  Description of Artificial Sequence: Synthetic oligonucleotide
  Sense Strand Starting at position 711 of SEQ ID NO: 319148
aguugucagagggaucuca

SEQ ID NO: 374660 - RNA, 19 nt, Artificial Sequence
  Description of Artificial Sequence: Synthetic oligonucleotide
  Antisense Strand to SEQ ID NO: 374659
ugagaucccucugacaacu

SEQ ID NO: 374661 - RNA, 19 nt, Artificial Sequence
  Description of Artificial Sequence: Synthetic oligonucleotide
  Sense Strand Starting at position 712 of SEQ ID NO: 315267
gggugauuacuggagcaca

SEQ ID NO: 374662 - RNA, 19 nt, Artificial Sequence
  Description of Artificial Sequence: Synthetic oligonucleotide
  Antisense Strand to SEQ ID NO: 374661
ugugcuccaguaaucaccc

SEQ ID NO: 374663 - RNA, 19 nt, Artificial Sequence
  Description of Artificial Sequence: Synthetic oligonucleotide
  Sense Strand Starting at position 712 of SEQ ID NO: 315362
caggaaauguucuugucac

SEQ ID NO: 374664 - RNA, 19 nt, Artificial Sequence
  Description of Artificial Sequence: Synthetic oligonucleotide
  Antisense Strand to SEQ ID NO: 374663
gugacaagaacauuuccug

SEQ ID NO: 374665 - RNA, 19 nt, Artificial Sequence
  Description of Artificial Sequence: Synthetic oligonucleotide
  Sense Strand Starting at position 712 of SEQ ID NO: 315384
gccaauugguuaccacaaa

SEQ ID NO: 374666 - RNA, 19 nt, Artificial Sequence
  Description of Artificial Sequence: Synthetic oligonucleotide
  Antisense Strand to SEQ ID NO: 374665
uuugugguaaccaauuggc

SEQ ID NO: 374667 - RNA, 19 nt, Artificial Sequence
  Description of Artificial Sequence: Synthetic oligonucleotide
  Sense Strand Starting at position 712 of SEQ ID NO: 315486
ucuuguguauagucccaau

SEQ ID NO: 374668 - RNA, 19 nt, Artificial Sequence
  Description of Artificial Sequence: Synthetic oligonucleotide
  Antisense Strand to SEQ ID NO: 374667
auugggacuauacacaaga

SEQ ID NO: 374669 - RNA, 19 nt, Artificial Sequence
  Description of Artificial Sequence: Synthetic oligonucleotide
  Sense Strand Starting at position 712 of SEQ ID NO: 315547
caaaguaauugagcuggca

SEQ ID NO: 374670 - RNA, 19 nt, Artificial Sequence
  Description of Artificial Sequence: Synthetic oligonucleotide
  Antisense Strand to SEQ ID NO: 374669
ugccagcucaauuacuuug

SEQ ID NO: 374671 - RNA, 19 nt, Artificial Sequence
  Description of Artificial Sequence: Synthetic oligonucleotide
  Sense Strand Starting at position 712 of SEQ ID NO: 315591
cccuuucuuccuggugaca

SEQ ID NO: 374672 - RNA, 19 nt, Artificial Sequence
  Description of Artificial Sequence: Synthetic oligonucleotide
  Antisense Strand to SEQ ID NO: 374671
ugucaccaggaagaaaggg

SEQ ID NO: 374673 - RNA, 19 nt, Artificial Sequence
  Description of Artificial Sequence: Synthetic oligonucleotide
  Sense Strand Starting at position 712 of SEQ ID NO: 315594
uuucuuccuggugacacau

SEQ ID NO: 374674 - RNA, 19 nt, Artificial Sequence
  Description of Artificial Sequence: Synthetic oligonucleotide
  Antisense Strand to SEQ ID NO: 374673
augugucaccaggaagaaa

SEQ ID NO: 374675 - RNA, 19 nt, Artificial Sequence
  Description of Artificial Sequence: Synthetic oligonucleotide
  Sense Strand Starting at position 712 of SEQ ID NO: 315660
ggugaagauauauguauua

SEQ ID NO: 374676 - RNA, 19 nt, Artificial Sequence
  Description of Artificial Sequence: Synthetic oligonucleotide
  Antisense Strand to SEQ ID NO: 374675
uaauacauauaucuucacc

SEQ ID NO: 374677 - RNA, 19 nt, Artificial Sequence
  Description of Artificial Sequence: Synthetic oligonucleotide
  Sense Strand Starting at position 712 of SEQ ID NO: 315681
ucggguuucucauccaucu

SEQ ID NO: 374678 - RNA, 19 nt, Artificial Sequence
  Description of Artificial Sequence: Synthetic oligonucleotide
  Antisense Strand to SEQ ID NO: 374677
agauggaugagaaacccga

SEQ ID NO: 374679 - RNA, 19 nt, Artificial Sequence
  Description of Artificial Sequence: Synthetic oligonucleotide
  Sense Strand Starting at position 712 of SEQ ID NO: 315731
uuaaaugaaugccuguaca

SEQ ID NO: 374680 - RNA, 19 nt, Artificial Sequence
  Description of Artificial Sequence: Synthetic oligonucleotide
  Antisense Strand to SEQ ID NO: 374679
uguacaggcauucauuuaa

SEQ ID NO: 374681 - RNA, 19 nt, Artificial Sequence
  Description of Artificial Sequence: Synthetic oligonucleotide
  Sense Strand Starting at position 712 of SEQ ID NO: 315813
uaggauccauaucugaguu

SEQ ID NO: 374682 - RNA, 19 nt, Artificial Sequence
  Description of Artificial Sequence: Synthetic oligonucleotide
  Antisense Strand to SEQ ID NO: 374681
aacucagauauggauccua

SEQ ID NO: 374683 - RNA, 19 nt, Artificial Sequence
  Description of Artificial Sequence: Synthetic oligonucleotide
  Sense Strand Starting at position 712 of SEQ ID NO: 315817
auccauaucugaguuguua

SEQ ID NO: 374684 - RNA, 19 nt, Artificial Sequence
  Description of Artificial Sequence: Synthetic oligonucleotide
  Antisense Strand to SEQ ID NO: 374683
uaacaacucagauauggau

SEQ ID NO: 374685 - RNA, 19 nt, Artificial Sequence
  Description of Artificial Sequence: Synthetic oligonucleotide
  Sense Strand Starting at position 712 of SEQ ID NO: 315897
guuaacauugcucagccua

SEQ ID NO: 374686 - RNA, 19 nt, Artificial Sequence
  Description of Artificial Sequence: Synthetic oligonucleotide
  Antisense Strand to SEQ ID NO: 374685
uaggcugagcaauguuaac

SEQ ID NO: 374687 - RNA, 19 nt, Artificial Sequence
  Description of Artificial Sequence: Synthetic oligonucleotide
  Sense Strand Starting at position 712 of SEQ ID NO: 315932
ggaaguaggucauagagaa

SEQ ID NO: 374688 - RNA, 19 nt, Artificial Sequence
  Description of Artificial Sequence: Synthetic oligonucleotide
  Antisense Strand to SEQ ID NO: 374687
uucucuaugaccuacuucc

SEQ ID NO: 374689 - RNA, 19 nt, Artificial Sequence
  Description of Artificial Sequence: Synthetic oligonucleotide
  Sense Strand Starting at position 712 of SEQ ID NO: 316036
ggaagacuuacuugggugu

SEQ ID NO: 374690 - RNA, 19 nt, Artificial Sequence
  Description of Artificial Sequence: Synthetic oligonucleotide
  Antisense Strand to SEQ ID NO: 374689
acacccaaguaagucuucc

SEQ ID NO: 374691 - RNA, 19 nt, Artificial Sequence
  Description of Artificial Sequence: Synthetic oligonucleotide
  Sense Strand Starting at position 712 of SEQ ID NO: 316084
gguacuguccgucugcauu

SEQ ID NO: 374692 - RNA, 19 nt, Artificial Sequence
  Description of Artificial Sequence: Synthetic oligonucleotide
  Antisense Strand to SEQ ID NO: 374691
aaugcagacggacaguacc

SEQ ID NO: 374693 - RNA, 19 nt, Artificial Sequence
  Description of Artificial Sequence: Synthetic oligonucleotide
  Sense Strand Starting at position 712 of SEQ ID NO: 316154
ggaacuuuccucuggcaug

SEQ ID NO: 374694 - RNA, 19 nt, Artificial Sequence
  Description of Artificial Sequence: Synthetic oligonucleotide
  Antisense Strand to SEQ ID NO: 374693
caugccagaggaaaguucc

SEQ ID NO: 374695 - RNA, 19 nt, Artificial Sequence
  Description of Artificial Sequence: Synthetic oligonucleotide
  Sense Strand Starting at position 712 of SEQ ID NO: 316406
uuaagugccucauuacagu

SEQ ID NO: 374696 - RNA, 19 nt, Artificial Sequence
  Description of Artificial Sequence: Synthetic oligonucleotide
  Antisense Strand to SEQ ID NO: 374695
acuguaaugaggcacuuaa

SEQ ID NO: 374697 - RNA, 19 nt, Artificial Sequence
  Description of Artificial Sequence: Synthetic oligonucleotide
  Sense Strand Starting at position 712 of SEQ ID NO: 316492
gcuguaaucaaguggaaau

SEQ ID NO: 374698 - RNA, 19 nt, Artificial Sequence
  Description of Artificial Sequence: Synthetic oligonucleotide
  Antisense Strand to SEQ ID NO: 374697
auuuccacuugauuacagc

SEQ ID NO: 374699 - RNA, 19 nt, Artificial Sequence
  Description of Artificial Sequence: Synthetic oligonucleotide
  Sense Strand Starting at position 712 of SEQ ID NO: 316504
uggaaauuauagucagcuc

SEQ ID NO: 374700 - RNA, 19 nt, Artificial Sequence
  Description of Artificial Sequence: Synthetic oligonucleotide
  Antisense Strand to SEQ ID NO: 374699
gagcugacuauaauuucca

SEQ ID NO: 374701 - RNA, 19 nt, Artificial Sequence
  Description of Artificial Sequence: Synthetic oligonucleotide
  Sense Strand Starting at position 712 of SEQ ID NO: 316515
gucagcucuauggguacaa

SEQ ID NO: 374702 - RNA, 19 nt, Artificial Sequence
  Description of Artificial Sequence: Synthetic oligonucleotide
  Antisense Strand to SEQ ID NO: 374701
uuguacccauagagcugac

SEQ ID NO: 374703 - RNA, 19 nt, Artificial Sequence
  Description of Artificial Sequence: Synthetic oligonucleotide
  Sense Strand Starting at position 712 of SEQ ID NO: 316516
ucagcucuauggguacaaa

SEQ ID NO: 374704 - RNA, 19 nt, Artificial Sequence
  Description of Artificial Sequence: Synthetic oligonucleotide
  Antisense Strand to SEQ ID NO: 374703
uuuguacccauagagcuga

SEQ ID NO: 374705 - RNA, 19 nt, Artificial Sequence
  Description of Artificial Sequence: Synthetic oligonucleotide
  Sense Strand Starting at position 712 of SEQ ID NO: 316605
gguggaugauacucagauu

SEQ ID NO: 374706 - RNA, 19 nt, Artificial Sequence
  Description of Artificial Sequence: Synthetic oligonucleotide
  Antisense Strand to SEQ ID NO: 374705
aaucugaguaucauccacc

SEQ ID NO: 374707 - RNA, 19 nt, Artificial Sequence
  Description of Artificial Sequence: Synthetic oligonucleotide
  Sense Strand Starting at position 712 of SEQ ID NO: 316698
ccacgacagccuggagaau

SEQ ID NO: 374708 - RNA, 19 nt, Artificial Sequence
  Description of Artificial Sequence: Synthetic oligonucleotide
  Antisense Strand to SEQ ID NO: 374707
auucuccaggcugucgugg

SEQ ID NO: 374709 - RNA, 19 nt, Artificial Sequence
  Description of Artificial Sequence: Synthetic oligonucleotide
  Sense Strand Starting at position 712 of SEQ ID NO: 316906
gcgauucuccacuacuagu

SEQ ID NO: 374710 - RNA, 19 nt, Artificial Sequence
  Description of Artificial Sequence: Synthetic oligonucleotide
  Antisense Strand to SEQ ID NO: 374709
acuaguaguggagaaucgc

SEQ ID NO: 374711 - RNA, 19 nt, Artificial Sequence
  Description of Artificial Sequence: Synthetic oligonucleotide
  Sense Strand Starting at position 712 of SEQ ID NO: 317123
cgaagcugucaucggaaau

SEQ ID NO: 374712 - RNA, 19 nt, Artificial Sequence
  Description of Artificial Sequence: Synthetic oligonucleotide
  Antisense Strand to SEQ ID NO: 374711
auuuccgaugacagcuucg

SEQ ID NO: 374713 - RNA, 19 nt, Artificial Sequence
  Description of Artificial Sequence: Synthetic oligonucleotide
  Sense Strand Starting at position 712 of SEQ ID NO: 317124
gaagcugucaucggaaaug

SEQ ID NO: 374714 - RNA, 19 nt, Artificial Sequence
  Description of Artificial Sequence: Synthetic oligonucleotide
  Antisense Strand to SEQ ID NO: 374713
cauuuccgaugacagcuuc

SEQ ID NO: 374715 - RNA, 19 nt, Artificial Sequence
  Description of Artificial Sequence: Synthetic oligonucleotide
  Sense Strand Starting at position 712 of SEQ ID NO: 317135
cggaaaugccgcugggaaa

SEQ ID NO: 374716 - RNA, 19 nt, Artificial Sequence
  Description of Artificial Sequence: Synthetic oligonucleotide
  Antisense Strand to SEQ ID NO: 374715
uuucccagcggcauuuccg

SEQ ID NO: 374717 - RNA, 19 nt, Artificial Sequence
  Description of Artificial Sequence: Synthetic oligonucleotide
  Sense Strand Starting at position 712 of SEQ ID NO: 318209
gcaauuaaccggucguggu

SEQ ID NO: 374718 - RNA, 19 nt, Artificial Sequence
  Description of Artificial Sequence: Synthetic oligonucleotide
  Antisense Strand to SEQ ID NO: 374717
accacgaccgguuaauugc

SEQ ID NO: 374719 - RNA, 19 nt, Artificial Sequence
  Description of Artificial Sequence: Synthetic oligonucleotide
  Sense Strand Starting at position 712 of SEQ ID NO: 318524
cugagcucuguccaguaua

SEQ ID NO: 374720 - RNA, 19 nt, Artificial Sequence
  Description of Artificial Sequence: Synthetic oligonucleotide
  Antisense Strand to SEQ ID NO: 374719
uauacuggacagagcucag

SEQ ID NO: 374721 - RNA, 19 nt, Artificial Sequence
  Description of Artificial Sequence: Synthetic oligonucleotide
  Sense Strand Starting at position 712 of SEQ ID NO: 318527
agcucuguccaguauaacu

SEQ ID NO: 374722 - RNA, 19 nt, Artificial Sequence
  Description of Artificial Sequence: Synthetic oligonucleotide
  Antisense Strand to SEQ ID NO: 374721
aguuauacuggacagagcu

SEQ ID NO: 374723 - RNA, 19 nt, Artificial Sequence
  Description of Artificial Sequence: Synthetic oligonucleotide
  Sense Strand Starting at position 712 of SEQ ID NO: 318624
cucuuugagccucagucua

SEQ ID NO: 374724 - RNA, 19 nt, Artificial Sequence
  Description of Artificial Sequence: Synthetic oligonucleotide
  Antisense Strand to SEQ ID NO: 374723
uagacugaggcucaaagag

SEQ ID NO: 374725 - RNA, 19 nt, Artificial Sequence
  Description of Artificial Sequence: Synthetic oligonucleotide
  Sense Strand Starting at position 712 of SEQ ID NO: 318650
ucaaccugugagugauaua

SEQ ID NO: 374726 - RNA, 19 nt, Artificial Sequence
  Description of Artificial Sequence: Synthetic oligonucleotide
  Antisense Strand to SEQ ID NO: 374725
uauaucacucacagguuga

SEQ ID NO: 374727 - RNA, 19 nt, Artificial Sequence
  Description of Artificial Sequence: Synthetic oligonucleotide
  Sense Strand Starting at position 712 of SEQ ID NO: 318821
uguggucuaacuugagaaa

SEQ ID NO: 374728 - RNA, 19 nt, Artificial Sequence
  Description of Artificial Sequence: Synthetic oligonucleotide
  Antisense Strand to SEQ ID NO: 374727
uuucucaaguuagaccaca

SEQ ID NO: 374729 - RNA, 19 nt, Artificial Sequence
  Description of Artificial Sequence: Synthetic oligonucleotide
  Sense Strand Starting at position 712 of SEQ ID NO: 318824
ggucuaacuugagaaauaa

SEQ ID NO: 374730 - RNA, 19 nt, Artificial Sequence
  Description of Artificial Sequence: Synthetic oligonucleotide
  Antisense Strand to SEQ ID NO: 374729
uuauuucucaaguuagacc

SEQ ID NO: 374731 - RNA, 19 nt, Artificial Sequence
  Description of Artificial Sequence: Synthetic oligonucleotide
  Sense Strand Starting at position 712 of SEQ ID NO: 319063
ccggauuuccguugguuau

SEQ ID NO: 374732 - RNA, 19 nt, Artificial Sequence
  Description of Artificial Sequence: Synthetic oligonucleotide
  Antisense Strand to SEQ ID NO: 374731
auaaccaacggaaauccgg

SEQ ID NO: 374733 - RNA, 19 nt, Artificial Sequence
  Description of Artificial Sequence: Synthetic oligonucleotide
  Sense Strand Starting at position 712 of SEQ ID NO: 319064
cggauuuccguugguuaua

SEQ ID NO: 374734 - RNA, 19 nt, Artificial Sequence
  Description of Artificial Sequence: Synthetic oligonucleotide
  Antisense Strand to SEQ ID NO: 374733
uauaaccaacggaaauccg

SEQ ID NO: 374735 - RNA, 19 nt, Artificial Sequence
  Description of Artificial Sequence: Synthetic oligonucleotide
  Sense Strand Starting at position 712 of SEQ ID NO: 319066
gauuuccguugguuauaau

SEQ ID NO: 374736 - RNA, 19 nt, Artificial Sequence
  Description of Artificial Sequence: Synthetic oligonucleotide
  Antisense Strand to SEQ ID NO: 374735
auuauaaccaacggaaauc

SEQ ID NO: 374737 - RNA, 19 nt, Artificial Sequence
  Description of Artificial Sequence: Synthetic oligonucleotide
  Sense Strand Starting at position 712 of SEQ ID NO: 319141
ucaaauguuccuggcucua

SEQ ID NO: 374738 - RNA, 19 nt, Artificial Sequence
  Description of Artificial Sequence: Synthetic oligonucleotide
  Antisense Strand to SEQ ID NO: 374737
uagagccaggaacauuuga

SEQ ID NO: 374739 - RNA, 19 nt, Artificial Sequence
  Description of Artificial Sequence: Synthetic oligonucleotide
  Sense Strand Starting at position 712 of SEQ ID NO: 319146
uguuccuggcucuaacauu

SEQ ID NO: 374740 - RNA, 19 nt, Artificial Sequence
  Description of Artificial Sequence: Synthetic oligonucleotide
  Antisense Strand to SEQ ID NO: 374739
aauguuagagccaggaaca

SEQ ID NO: 374741 - RNA, 19 nt, Artificial Sequence
  Description of Artificial Sequence: Synthetic oligonucleotide
  Sense Strand Starting at position 713 of SEQ ID NO: 315285
agucuuaagguacauauca

SEQ ID NO: 374742 - RNA, 19 nt, Artificial Sequence
  Description of Artificial Sequence: Synthetic oligonucleotide
  Antisense Strand to SEQ ID NO: 374741
ugauauguaccuuaagacu

SEQ ID NO: 374743 - RNA, 19 nt, Artificial Sequence
  Description of Artificial Sequence: Synthetic oligonucleotide
  Sense Strand Starting at position 713 of SEQ ID NO: 315300
aucauaauuucggaaacag

SEQ ID NO: 374744 - RNA, 19 nt, Artificial Sequence
  Description of Artificial Sequence: Synthetic oligonucleotide
  Antisense Strand to SEQ ID NO: 374743
cuguuuccgaaauuaugau

SEQ ID NO: 374745 - RNA, 19 nt, Artificial Sequence
  Description of Artificial Sequence: Synthetic oligonucleotide
  Sense Strand Starting at position 713 of SEQ ID NO: 315367
aagacaaugcuuugucuag

SEQ ID NO: 374746 - RNA, 19 nt, Artificial Sequence
  Description of Artificial Sequence: Synthetic oligonucleotide
  Antisense Strand to SEQ ID NO: 374745
cuagacaaagcauugucuu

SEQ ID NO: 374747 - RNA, 19 nt, Artificial Sequence
  Description of Artificial Sequence: Synthetic oligonucleotide
  Sense Strand Starting at position 713 of SEQ ID NO: 315368
agacaaugcuuugucuaga

SEQ ID NO: 374748 - RNA, 19 nt, Artificial Sequence
  Description of Artificial Sequence: Synthetic oligonucleotide
  Antisense Strand to SEQ ID NO: 374747
ucuagacaaagcauugucu

SEQ ID NO: 374749 - RNA, 19 nt, Artificial Sequence
  Description of Artificial Sequence: Synthetic oligonucleotide
  Sense Strand Starting at position 713 of SEQ ID NO: 315369
gacaaugcuuugucuagaa

SEQ ID NO: 374750 - RNA, 19 nt, Artificial Sequence
  Description of Artificial Sequence: Synthetic oligonucleotide
  Antisense Strand to SEQ ID NO: 374749
uucuagacaaagcauuguc

SEQ ID NO: 374751 - RNA, 19 nt, Artificial Sequence
  Description of Artificial Sequence: Synthetic oligonucleotide
  Sense Strand Starting at position 713 of SEQ ID NO: 315409
gcccauaagccuuagagac

SEQ ID NO: 374752 - RNA, 19 nt, Artificial Sequence
  Description of Artificial Sequence: Synthetic oligonucleotide
  Antisense Strand to SEQ ID NO: 374751
gucucuaaggcuuaugggc

SEQ ID NO: 374753 - RNA, 19 nt, Artificial Sequence
  Description of Artificial Sequence: Synthetic oligonucleotide
  Sense Strand Starting at position 713 of SEQ ID NO: 315495
uugaguugacuauaagcau

SEQ ID NO: 374754 - RNA, 19 nt, Artificial Sequence
  Description of Artificial Sequence: Synthetic oligonucleotide
  Antisense Strand to SEQ ID NO: 374753
augcuuauagucaacucaa

SEQ ID NO: 374755 - RNA, 19 nt, Artificial Sequence
  Description of Artificial Sequence: Synthetic oligonucleotide
  Sense Strand Starting at position 713 of SEQ ID NO: 315498
aguugacuauaagcauuaa

SEQ ID NO: 374756 - RNA, 19 nt, Artificial Sequence
  Description of Artificial Sequence: Synthetic oligonucleotide
  Antisense Strand to SEQ ID NO: 374755
uuaaugcuuauagucaacu

SEQ ID NO: 374757 - RNA, 19 nt, Artificial Sequence
  Description of Artificial Sequence: Synthetic oligonucleotide
  Sense Strand Starting at position 713 of SEQ ID NO: 315659
ucuauaauauuugaggaca

SEQ ID NO: 374758 - RNA, 19 nt, Artificial Sequence
  Description of Artificial Sequence: Synthetic oligonucleotide
  Antisense Strand to SEQ ID NO: 374757
uguccucaaauauuauaga

SEQ ID NO: 374759 - RNA, 19 nt, Artificial Sequence
  Description of Artificial Sequence: Synthetic oligonucleotide
  Sense Strand Starting at position 713 of SEQ ID NO: 315907
aggauucaagaguaucgua

SEQ ID NO: 374760 - RNA, 19 nt, Artificial Sequence
  Description of Artificial Sequence: Synthetic oligonucleotide
  Antisense Strand to SEQ ID NO: 374759
uacgauacucuugaauccu

SEQ ID NO: 374761 - RNA, 19 nt, Artificial Sequence
  Description of Artificial Sequence: Synthetic oligonucleotide
  Sense Strand Starting at position 713 of SEQ ID NO: 315941
uuuagacaucaguaguuau

SEQ ID NO: 374762 - RNA, 19 nt, Artificial Sequence
  Description of Artificial Sequence: Synthetic oligonucleotide
  Antisense Strand to SEQ ID NO: 374761
auaacuacugaugucuaaa

SEQ ID NO: 374763 - RNA, 19 nt, Artificial Sequence
  Description of Artificial Sequence: Synthetic oligonucleotide
  Sense Strand Starting at position 713 of SEQ ID NO: 316023
cagaguuaccagcaagguu

SEQ ID NO: 374764 - RNA, 19 nt, Artificial Sequence
  Description of Artificial Sequence: Synthetic oligonucleotide
  Antisense Strand to SEQ ID NO: 374763
aaccuugcugguaacucug

SEQ ID NO: 374765 - RNA, 19 nt, Artificial Sequence
  Description of Artificial Sequence: Synthetic oligonucleotide
  Sense Strand Starting at position 713 of SEQ ID NO: 316050
gcaaauuucugggcccuca

SEQ ID NO: 374766 - RNA, 19 nt, Artificial Sequence
  Description of Artificial Sequence: Synthetic oligonucleotide
  Antisense Strand to SEQ ID NO: 374765
ugagggcccagaaauuugc

SEQ ID NO: 374767 - RNA, 19 nt, Artificial Sequence
  Description of Artificial Sequence: Synthetic oligonucleotide
  Sense Strand Starting at position 713 of SEQ ID NO: 316126
auacgcucucuagaugaau

SEQ ID NO: 374768 - RNA, 19 nt, Artificial Sequence
  Description of Artificial Sequence: Synthetic oligonucleotide
  Antisense Strand to SEQ ID NO: 374767
auucaucuagagagcguau

SEQ ID NO: 374769 - RNA, 19 nt, Artificial Sequence
  Description of Artificial Sequence: Synthetic oligonucleotide
  Sense Strand Starting at position 713 of SEQ ID NO: 316260
uuggcucagagauauguua

SEQ ID NO: 374770 - RNA, 19 nt, Artificial Sequence
  Description of Artificial Sequence: Synthetic oligonucleotide
  Antisense Strand to SEQ ID NO: 374769
uaacauaucucugagccaa

SEQ ID NO: 374771 - RNA, 19 nt, Artificial Sequence
  Description of Artificial Sequence: Synthetic oligonucleotide
  Sense Strand Starting at position 713 of SEQ ID NO: 316262
ggcucagagauauguuaau

SEQ ID NO: 374772 - RNA, 19 nt, Artificial Sequence
  Description of Artificial Sequence: Synthetic oligonucleotide
  Antisense Strand to SEQ ID NO: 374771
auuaacauaucucugagcc

SEQ ID NO: 374773 - RNA, 19 nt, Artificial Sequence
  Description of Artificial Sequence: Synthetic oligonucleotide
  Sense Strand Starting at position 713 of SEQ ID NO: 316318
aggagugaucagcaguuau

SEQ ID NO: 374774 - RNA, 19 nt, Artificial Sequence
  Description of Artificial Sequence: Synthetic oligonucleotide
  Antisense Strand to SEQ ID NO: 374773
auaacugcugaucacuccu

SEQ ID NO: 374775 - RNA, 19 nt, Artificial Sequence
  Description of Artificial Sequence: Synthetic oligonucleotide
  Sense Strand Starting at position 713 of SEQ ID NO: 316364
cggacuauaccucaaugua

SEQ ID NO: 374776 - RNA, 19 nt, Artificial Sequence
  Description of Artificial Sequence: Synthetic oligonucleotide
  Antisense Strand to SEQ ID NO: 374775
uacauugagguauaguccg

SEQ ID NO: 374777 - RNA, 19 nt, Artificial Sequence
  Description of Artificial Sequence: Synthetic oligonucleotide
  Sense Strand Starting at position 713 of SEQ ID NO: 316384
uuucgugaccaugagguua

SEQ ID NO: 374778 - RNA, 19 nt, Artificial Sequence
  Description of Artificial Sequence: Synthetic oligonucleotide
  Antisense Strand to SEQ ID NO: 374777
uaaccucauggucacgaaa

SEQ ID NO: 374779 - RNA, 19 nt, Artificial Sequence
  Description of Artificial Sequence: Synthetic oligonucleotide
  Sense Strand Starting at position 713 of SEQ ID NO: 316408
cuugauguccaggaggcaa

SEQ ID NO: 374780 - RNA, 19 nt, Artificial Sequence
  Description of Artificial Sequence: Synthetic oligonucleotide
  Antisense Strand to SEQ ID NO: 374779
uugccuccuggacaucaag

SEQ ID NO: 374781 - RNA, 19 nt, Artificial Sequence
  Description of Artificial Sequence: Synthetic oligonucleotide
  Sense Strand Starting at position 713 of SEQ ID NO: 316441
agaagaagcugaguaaauc

SEQ ID NO: 374782 - RNA, 19 nt, Artificial Sequence
  Description of Artificial Sequence: Synthetic oligonucleotide
  Antisense Strand to SEQ ID NO: 374781
gauuuacucagcuucuucu

SEQ ID NO: 374783 - RNA, 19 nt, Artificial Sequence
  Description of Artificial Sequence: Synthetic oligonucleotide
  Sense Strand Starting at position 713 of SEQ ID NO: 316461
gguuccucugcucaaagau

SEQ ID NO: 374784 - RNA, 19 nt, Artificial Sequence
  Description of Artificial Sequence: Synthetic oligonucleotide
  Antisense Strand to SEQ ID NO: 374783
aucuuugagcagaggaacc

SEQ ID NO: 374785 - RNA, 19 nt, Artificial Sequence
  Description of Artificial Sequence: Synthetic oligonucleotide
  Sense Strand Starting at position 713 of SEQ ID NO: 316476
agaugagcccagugacaug

SEQ ID NO: 374786 - RNA, 19 nt, Artificial Sequence
  Description of Artificial Sequence: Synthetic oligonucleotide
  Antisense Strand to SEQ ID NO: 374785
caugucacugggcucaucu

SEQ ID NO: 374787 - RNA, 19 nt, Artificial Sequence
  Description of Artificial Sequence: Synthetic oligonucleotide
  Sense Strand Starting at position 713 of SEQ ID NO: 316573
agugaauaaccuggucuca

SEQ ID NO: 374788 - RNA, 19 nt, Artificial Sequence
  Description of Artificial Sequence: Synthetic oligonucleotide
  Antisense Strand to SEQ ID NO: 374787
ugagaccagguuauucacu

SEQ ID NO: 374789 - RNA, 19 nt, Artificial Sequence
  Description of Artificial Sequence: Synthetic oligonucleotide
  Sense Strand Starting at position 713 of SEQ ID NO: 316575
ugaauaaccuggucucagu

SEQ ID NO: 374790 - RNA, 19 nt, Artificial Sequence
  Description of Artificial Sequence: Synthetic oligonucleotide
  Antisense Strand to SEQ ID NO: 374789
acugagaccagguuauuca

SEQ ID NO: 374791 - RNA, 19 nt, Artificial Sequence
  Description of Artificial Sequence: Synthetic oligonucleotide
  Sense Strand Starting at position 713 of SEQ ID NO: 316617
cggccaaucguugcggaau

SEQ ID NO: 374792 - RNA, 19 nt, Artificial Sequence
  Description of Artificial Sequence: Synthetic oligonucleotide
  Antisense Strand to SEQ ID NO: 374791
auuccgcaacgauuggccg

SEQ ID NO: 374793 - RNA, 19 nt, Artificial Sequence
  Description of Artificial Sequence: Synthetic oligonucleotide
  Sense Strand Starting at position 713 of SEQ ID NO: 316629
gcggaauuauuugcuggua

SEQ ID NO: 374794 - RNA, 19 nt, Artificial Sequence
  Description of Artificial Sequence: Synthetic oligonucleotide
  Antisense Strand to SEQ ID NO: 374793
uaccagcaaauaauuccgc

SEQ ID NO: 374795 - RNA, 19 nt, Artificial Sequence
  Description of Artificial Sequence: Synthetic oligonucleotide
  Sense Strand Starting at position 713 of SEQ ID NO: 316653
auuggaagcauaugaugua

SEQ ID NO: 374796 - RNA, 19 nt, Artificial Sequence
  Description of Artificial Sequence: Synthetic oligonucleotide
  Antisense Strand to SEQ ID NO: 374795
uacaucauaugcuuccaau

SEQ ID NO: 374797 - RNA, 19 nt, Artificial Sequence
  Description of Artificial Sequence: Synthetic oligonucleotide
  Sense Strand Starting at position 713 of SEQ ID NO: 316730
ucucuuaggcccgacauga

SEQ ID NO: 374798 - RNA, 19 nt, Artificial Sequence
  Description of Artificial Sequence: Synthetic oligonucleotide
  Antisense Strand to SEQ ID NO: 374797
ucaugucgggccuaagaga

SEQ ID NO: 374799 - RNA, 19 nt, Artificial Sequence
  Description of Artificial Sequence: Synthetic oligonucleotide
  Sense Strand Starting at position 713 of SEQ ID NO: 317351
uucuuuaguccauauggaa

SEQ ID NO: 374800 - RNA, 19 nt, Artificial Sequence
  Description of Artificial Sequence: Synthetic oligonucleotide
  Antisense Strand to SEQ ID NO: 374799
uuccauauggacuaaagaa

SEQ ID NO: 374801 - RNA, 19 nt, Artificial Sequence
  Description of Artificial Sequence: Synthetic oligonucleotide
  Sense Strand Starting at position 713 of SEQ ID NO: 317778
agccgagugucauuuauau

SEQ ID NO: 374802 - RNA, 19 nt, Artificial Sequence
  Description of Artificial Sequence: Synthetic oligonucleotide
  Antisense Strand to SEQ ID NO: 374801
auauaaaugacacucggcu

SEQ ID NO: 374803 - RNA, 19 nt, Artificial Sequence
  Description of Artificial Sequence: Synthetic oligonucleotide
  Sense Strand Starting at position 713 of SEQ ID NO: 317853
ugcgacuauggcuauagaa

SEQ ID NO: 374804 - RNA, 19 nt, Artificial Sequence
  Description of Artificial Sequence: Synthetic oligonucleotide
  Antisense Strand to SEQ ID NO: 374803
uucuauagccauagucgca

SEQ ID NO: 374805 - RNA, 19 nt, Artificial Sequence
  Description of Artificial Sequence: Synthetic oligonucleotide
  Sense Strand Starting at position 713 of SEQ ID NO: 317855
cgacuauggcuauagaaac

SEQ ID NO: 374806 - RNA, 19 nt, Artificial Sequence
  Description of Artificial Sequence: Synthetic oligonucleotide
  Antisense Strand to SEQ ID NO: 374805
guuucuauagccauagucg

SEQ ID NO: 374807 - RNA, 19 nt, Artificial Sequence
  Description of Artificial Sequence: Synthetic oligonucleotide
  Sense Strand Starting at position 713 of SEQ ID NO: 318116
cuugucuaguauuugucua

SEQ ID NO: 374808 - RNA, 19 nt, Artificial Sequence
  Description of Artificial Sequence: Synthetic oligonucleotide
  Antisense Strand to SEQ ID NO: 374807
uagacaaauacuagacaag

SEQ ID NO: 374809 - RNA, 19 nt, Artificial Sequence
  Description of Artificial Sequence: Synthetic oligonucleotide
  Sense Strand Starting at position 713 of SEQ ID NO: 318118
ugucuaguauuugucuaaa

SEQ ID NO: 374810 - RNA, 19 nt, Artificial Sequence
  Description of Artificial Sequence: Synthetic oligonucleotide
  Antisense Strand to SEQ ID NO: 374809
uuuagacaaauacuagaca

SEQ ID NO: 374811 - RNA, 19 nt, Artificial Sequence
  Description of Artificial Sequence: Synthetic oligonucleotide
  Sense Strand Starting at position 713 of SEQ ID NO: 318147
auagcaagucuugaauuga

SEQ ID NO: 374812 - RNA, 19 nt, Artificial Sequence
  Description of Artificial Sequence: Synthetic oligonucleotide
  Antisense Strand to SEQ ID NO: 374811
ucaauucaagacuugcuau

SEQ ID NO: 374813 - RNA, 19 nt, Artificial Sequence
  Description of Artificial Sequence: Synthetic oligonucleotide
  Sense Strand Starting at position 713 of SEQ ID NO: 318376
cuaauacucguauaacuag

SEQ ID NO: 374814 - RNA, 19 nt, Artificial Sequence
  Description of Artificial Sequence: Synthetic oligonucleotide
  Antisense Strand to SEQ ID NO: 374813
cuaguuauacgaguauuag

SEQ ID NO: 374815 - RNA, 19 nt, Artificial Sequence
  Description of Artificial Sequence: Synthetic oligonucleotide
  Sense Strand Starting at position 713 of SEQ ID NO: 318494
ugauaugauauugguaaug

SEQ ID NO: 374816 - RNA, 19 nt, Artificial Sequence
  Description of Artificial Sequence: Synthetic oligonucleotide
  Antisense Strand to SEQ ID NO: 374815
cauuaccaauaucauauca

SEQ ID NO: 374817 - RNA, 19 nt, Artificial Sequence
  Description of Artificial Sequence: Synthetic oligonucleotide
  Sense Strand Starting at position 713 of SEQ ID NO: 318752
auacaucuuguguaggagu

SEQ ID NO: 374818 - RNA, 19 nt, Artificial Sequence
  Description of Artificial Sequence: Synthetic oligonucleotide
  Antisense Strand to SEQ ID NO: 374817
acuccuacacaagauguau

SEQ ID NO: 374819 - RNA, 19 nt, Artificial Sequence
  Description of Artificial Sequence: Synthetic oligonucleotide
  Sense Strand Starting at position 713 of SEQ ID NO: 318892
ccaucauuccugugaagaa

SEQ ID NO: 374820 - RNA, 19 nt, Artificial Sequence
  Description of Artificial Sequence: Synthetic oligonucleotide
  Antisense Strand to SEQ ID NO: 374819
uucuucacaggaaugaugg

SEQ ID NO: 374821 - RNA, 19 nt, Artificial Sequence
  Description of Artificial Sequence: Synthetic oligonucleotide
  Sense Strand Starting at position 714 of SEQ ID NO: 315544
guguccucgccuccacauu

SEQ ID NO: 374822 - RNA, 19 nt, Artificial Sequence
  Description of Artificial Sequence: Synthetic oligonucleotide
  Antisense Strand to SEQ ID NO: 374821
aauguggaggcgaggacac

SEQ ID NO: 374823 - RNA, 19 nt, Artificial Sequence
  Description of Artificial Sequence: Synthetic oligonucleotide
  Sense Strand Starting at position 714 of SEQ ID NO: 315662
gggacaaaggcugguaaau

SEQ ID NO: 374824 - RNA, 19 nt, Artificial Sequence
  Description of Artificial Sequence: Synthetic oligonucleotide
  Antisense Strand to SEQ ID NO: 374823
auuuaccagccuuuguccc

SEQ ID NO: 374825 - RNA, 19 nt, Artificial Sequence
  Description of Artificial Sequence: Synthetic oligonucleotide
  Sense Strand Starting at position 714 of SEQ ID NO: 315706
cacaguuaagugugggaau

SEQ ID NO: 374826 - RNA, 19 nt, Artificial Sequence
  Description of Artificial Sequence: Synthetic oligonucleotide
  Antisense Strand to SEQ ID NO: 374825
auucccacacuuaacugug

SEQ ID NO: 374827 - RNA, 19 nt, Artificial Sequence
  Description of Artificial Sequence: Synthetic oligonucleotide
  Sense Strand Starting at position 714 of SEQ ID NO: 315708
caguuaagugugggaauca

SEQ ID NO: 374828 - RNA, 19 nt, Artificial Sequence
  Description of Artificial Sequence: Synthetic oligonucleotide
  Antisense Strand to SEQ ID NO: 374827
ugauucccacacuuaacug

SEQ ID NO: 374829 - RNA, 19 nt, Artificial Sequence
  Description of Artificial Sequence: Synthetic oligonucleotide
  Sense Strand Starting at position 714 of SEQ ID NO: 316005
gggucugcaccugaacaua

SEQ ID NO: 374830 - RNA, 19 nt, Artificial Sequence
  Description of Artificial Sequence: Synthetic oligonucleotide
  Antisense Strand to SEQ ID NO: 374829
uauguucaggugcagaccc

SEQ ID NO: 374831 - RNA, 19 nt, Artificial Sequence
  Description of Artificial Sequence: Synthetic oligonucleotide
  Sense Strand Starting at position 714 of SEQ ID NO: 316369
guagaaguggcauaauugu

SEQ ID NO: 374832 - RNA, 19 nt, Artificial Sequence
  Description of Artificial Sequence: Synthetic oligonucleotide
  Antisense Strand to SEQ ID NO: 374831
acaauuaugccacuucuac

SEQ ID NO: 374833 - RNA, 19 nt, Artificial Sequence
  Description of Artificial Sequence: Synthetic oligonucleotide
  Sense Strand Starting at position 714 of SEQ ID NO: 316536
caacuaguuguggauuaau

SEQ ID NO: 374834 - RNA, 19 nt, Artificial Sequence
  Description of Artificial Sequence: Synthetic oligonucleotide
  Antisense Strand to SEQ ID NO: 374833
auuaauccacaacuaguug

SEQ ID NO: 374835 - RNA, 19 nt, Artificial Sequence
  Description of Artificial Sequence: Synthetic oligonucleotide
  Sense Strand Starting at position 714 of SEQ ID NO: 316545
guggauuaauucucccacu

SEQ ID NO: 374836 - RNA, 19 nt, Artificial Sequence
  Description of Artificial Sequence: Synthetic oligonucleotide
  Antisense Strand to SEQ ID NO: 374835
agugggagaauuaauccac

SEQ ID NO: 374837 - RNA, 19 nt, Artificial Sequence
  Description of Artificial Sequence: Synthetic oligonucleotide
  Sense Strand Starting at position 714 of SEQ ID NO: 316620
gcaauucuacauuaaguag

SEQ ID NO: 374838 - RNA, 19 nt, Artificial Sequence
  Description of Artificial Sequence: Synthetic oligonucleotide
  Antisense Strand to SEQ ID NO: 374837
cuacuuaauguagaauugc

SEQ ID NO: 374839 - RNA, 19 nt, Artificial Sequence
  Description of Artificial Sequence: Synthetic oligonucleotide
  Sense Strand Starting at position 714 of SEQ ID NO: 316813
uuaaucuuaugagcaauga

SEQ ID NO: 374840 - RNA, 19 nt, Artificial Sequence
  Description of Artificial Sequence: Synthetic oligonucleotide
  Antisense Strand to SEQ ID NO: 374839
ucauugcucauaagauuaa

SEQ ID NO: 374841 - RNA, 19 nt, Artificial Sequence
  Description of Artificial Sequence: Synthetic oligonucleotide
  Sense Strand Starting at position 714 of SEQ ID NO: 316848
auaguuuagccacacacua

SEQ ID NO: 374842 - RNA, 19 nt, Artificial Sequence
  Description of Artificial Sequence: Synthetic oligonucleotide
  Antisense Strand to SEQ ID NO: 374841
uaguguguggcuaaacuau

SEQ ID NO: 374843 - RNA, 19 nt, Artificial Sequence
  Description of Artificial Sequence: Synthetic oligonucleotide
  Sense Strand Starting at position 714 of SEQ ID NO: 316966
agagcagauuuauacuuau

SEQ ID NO: 374844 - RNA, 19 nt, Artificial Sequence
  Description of Artificial Sequence: Synthetic oligonucleotide
  Antisense Strand to SEQ ID NO: 374843
auaaguauaaaucugcucu

SEQ ID NO: 374845 - RNA, 19 nt, Artificial Sequence
  Description of Artificial Sequence: Synthetic oligonucleotide
  Sense Strand Starting at position 714 of SEQ ID NO: 317243
ccggaaacuuuaucacaga

SEQ ID NO: 374846 - RNA, 19 nt, Artificial Sequence
  Description of Artificial Sequence: Synthetic oligonucleotide
  Antisense Strand to SEQ ID NO: 374845
ucugugauaaaguuuccgg

SEQ ID NO: 374847 - RNA, 19 nt, Artificial Sequence
  Description of Artificial Sequence: Synthetic oligonucleotide
  Sense Strand Starting at position 714 of SEQ ID NO: 317259
agaagcccugcuuauaaua

SEQ ID NO: 374848 - RNA, 19 nt, Artificial Sequence
  Description of Artificial Sequence: Synthetic oligonucleotide
  Antisense Strand to SEQ ID NO: 374847
uauuauaagcagggcuucu

SEQ ID NO: 374849 - RNA, 19 nt, Artificial Sequence
  Description of Artificial Sequence: Synthetic oligonucleotide
  Sense Strand Starting at position 714 of SEQ ID NO: 317354
gucuuaaauguugauauca

SEQ ID NO: 374850 - RNA, 19 nt, Artificial Sequence
  Description of Artificial Sequence: Synthetic oligonucleotide
  Antisense Strand to SEQ ID NO: 374849
ugauaucaacauuuaagac

SEQ ID NO: 374851 - RNA, 19 nt, Artificial Sequence
  Description of Artificial Sequence: Synthetic oligonucleotide
  Sense Strand Starting at position 714 of SEQ ID NO: 317447
agucaaacucacugucaga

SEQ ID NO: 374852 - RNA, 19 nt, Artificial Sequence
  Description of Artificial Sequence: Synthetic oligonucleotide
  Antisense Strand to SEQ ID NO: 374851
ucugacagugaguuugacu

SEQ ID NO: 374853 - RNA, 19 nt, Artificial Sequence
  Description of Artificial Sequence: Synthetic oligonucleotide
  Sense Strand Starting at position 714 of SEQ ID NO: 317458
cugucagaucaaggccaau

SEQ ID NO: 374854 - RNA, 19 nt, Artificial Sequence
  Description of Artificial Sequence: Synthetic oligonucleotide
  Antisense Strand to SEQ ID NO: 374853
auuggccuugaucugacag

SEQ ID NO: 374855 - RNA, 19 nt, Artificial Sequence
  Description of Artificial Sequence: Synthetic oligonucleotide
  Sense Strand Starting at position 714 of SEQ ID NO: 317661
agaagagacucugugcuga

SEQ ID NO: 374856 - RNA, 19 nt, Artificial Sequence
  Description of Artificial Sequence: Synthetic oligonucleotide
  Antisense Strand to SEQ ID NO: 374855
ucagcacagagucucuucu

SEQ ID NO: 374857 - RNA, 19 nt, Artificial Sequence
  Description of Artificial Sequence: Synthetic oligonucleotide
  Sense Strand Starting at position 714 of SEQ ID NO: 317663
aagagacucugugcugaau

SEQ ID NO: 374858 - RNA, 19 nt, Artificial Sequence
  Description of Artificial Sequence: Synthetic oligonucleotide
  Antisense Strand to SEQ ID NO: 374857
auucagcacagagucucuu

SEQ ID NO: 374859 - RNA, 19 nt, Artificial Sequence
  Description of Artificial Sequence: Synthetic oligonucleotide
  Sense Strand Starting at position 714 of SEQ ID NO: 317666
agacucugugcugaauguu

SEQ ID NO: 374860 - RNA, 19 nt, Artificial Sequence
  Description of Artificial Sequence: Synthetic oligonucleotide
  Antisense Strand to SEQ ID NO: 374859
aacauucagcacagagucu

SEQ ID NO: 374861 - RNA, 19 nt, Artificial Sequence
  Description of Artificial Sequence: Synthetic oligonucleotide
  Sense Strand Starting at position 714 of SEQ ID NO: 318011
agugcuaaacacuguacaa

SEQ ID NO: 374862 - RNA, 19 nt, Artificial Sequence
  Description of Artificial Sequence: Synthetic oligonucleotide
  Antisense Strand to SEQ ID NO: 374861
uuguacaguguuuagcacu

SEQ ID NO: 374863 - RNA, 19 nt, Artificial Sequence
  Description of Artificial Sequence: Synthetic oligonucleotide
  Sense Strand Starting at position 714 of SEQ ID NO: 318063
aguuuccagcuuuaugaaa

SEQ ID NO: 374864 - RNA, 19 nt, Artificial Sequence
  Description of Artificial Sequence: Synthetic oligonucleotide
  Antisense Strand to SEQ ID NO: 374863
uuucauaaagcuggaaacu

SEQ ID NO: 374865 - RNA, 19 nt, Artificial Sequence
  Description of Artificial Sequence: Synthetic oligonucleotide
  Sense Strand Starting at position 714 of SEQ ID NO: 318211
ugucuaaaugcccaggaua

SEQ ID NO: 374866 - RNA, 19 nt, Artificial Sequence
  Description of Artificial Sequence: Synthetic oligonucleotide
  Antisense Strand to SEQ ID NO: 374865
uauccugggcauuuagaca

SEQ ID NO: 374867 - RNA, 19 nt, Artificial Sequence
  Description of Artificial Sequence: Synthetic oligonucleotide
  Sense Strand Starting at position 714 of SEQ ID NO: 318213
ucuaaaugcccaggauaau

SEQ ID NO: 374868 - RNA, 19 nt, Artificial Sequence
  Description of Artificial Sequence: Synthetic oligonucleotide
  Antisense Strand to SEQ ID NO: 374867
auuauccugggcauuuaga

SEQ ID NO: 374869 - RNA, 19 nt, Artificial Sequence
  Description of Artificial Sequence: Synthetic oligonucleotide
  Sense Strand Starting at position 714 of SEQ ID NO: 318383
aguagaaugugcuuauuuc

SEQ ID NO: 374870 - RNA, 19 nt, Artificial Sequence
  Description of Artificial Sequence: Synthetic oligonucleotide
  Antisense Strand to SEQ ID NO: 374869
gaaauaagcacauucuacu

SEQ ID NO: 374871 - RNA, 19 nt, Artificial Sequence
  Description of Artificial Sequence: Synthetic oligonucleotide
  Sense Strand Starting at position 714 of SEQ ID NO: 318458
ggcagauccuaauucuuua

SEQ ID NO: 374872 - RNA, 19 nt, Artificial Sequence
  Description of Artificial Sequence: Synthetic oligonucleotide
  Antisense Strand to SEQ ID NO: 374871
uaaagaauuaggaucugcc

SEQ ID NO: 374873 - RNA, 19 nt, Artificial Sequence
  Description of Artificial Sequence: Synthetic oligonucleotide
  Sense Strand Starting at position 714 of SEQ ID NO: 318538
cagugaggucuuuauuaca

SEQ ID NO: 374874 - RNA, 19 nt, Artificial Sequence
  Description of Artificial Sequence: Synthetic oligonucleotide
  Antisense Strand to SEQ ID NO: 374873
uguaauaaagaccucacug

SEQ ID NO: 374875 - RNA, 19 nt, Artificial Sequence
  Description of Artificial Sequence: Synthetic oligonucleotide
  Sense Strand Starting at position 714 of SEQ ID NO: 318560
agguuuggguaagcagaau

SEQ ID NO: 374876 - RNA, 19 nt, Artificial Sequence
  Description of Artificial Sequence: Synthetic oligonucleotide
  Antisense Strand to SEQ ID NO: 374875
auucugcuuacccaaaccu

SEQ ID NO: 374877 - RNA, 19 nt, Artificial Sequence
  Description of Artificial Sequence: Synthetic oligonucleotide
  Sense Strand Starting at position 714 of SEQ ID NO: 318566
ggguaagcagaaugggaua

SEQ ID NO: 374878 - RNA, 19 nt, Artificial Sequence
  Description of Artificial Sequence: Synthetic oligonucleotide
  Antisense Strand to SEQ ID NO: 374877
uaucccauucugcuuaccc

SEQ ID NO: 374879 - RNA, 19 nt, Artificial Sequence
  Description of Artificial Sequence: Synthetic oligonucleotide
  Sense Strand Starting at position 714 of SEQ ID NO: 318568
guaagcagaaugggauaua

SEQ ID NO: 374880 - RNA, 19 nt, Artificial Sequence
  Description of Artificial Sequence: Synthetic oligonucleotide
  Antisense Strand to SEQ ID NO: 374879
uauaucccauucugcuuac

SEQ ID NO: 374881 - RNA, 19 nt, Artificial Sequence
  Description of Artificial Sequence: Synthetic oligonucleotide
  Sense Strand Starting at position 714 of SEQ ID NO: 318837
ggaauaugaguccagccua

SEQ ID NO: 374882 - RNA, 19 nt, Artificial Sequence
  Description of Artificial Sequence: Synthetic oligonucleotide
  Antisense Strand to SEQ ID NO: 374881
uaggcuggacucauauucc

SEQ ID NO: 374883 - RNA, 19 nt, Artificial Sequence
  Description of Artificial Sequence: Synthetic oligonucleotide
  Sense Strand Starting at position 714 of SEQ ID NO: 319037
uuuacauucccuuggagau

SEQ ID NO: 374884 - RNA, 19 nt, Artificial Sequence
  Description of Artificial Sequence: Synthetic oligonucleotide
  Antisense Strand to SEQ ID NO: 374883
aucuccaagggaauguaaa

SEQ ID NO: 374885 - RNA, 19 nt, Artificial Sequence
  Description of Artificial Sequence: Synthetic oligonucleotide
  Sense Strand Starting at position 714 of SEQ ID NO: 319038
uuacauucccuuggagaua

SEQ ID NO: 374886 - RNA, 19 nt, Artificial Sequence
  Description of Artificial Sequence: Synthetic oligonucleotide
  Antisense Strand to SEQ ID NO: 374885
uaucuccaagggaauguaa

SEQ ID NO: 374887 - RNA, 19 nt, Artificial Sequence
  Description of Artificial Sequence: Synthetic oligonucleotide
  Sense Strand Starting at position 714 of SEQ ID NO: 319050
ggagauagccuagguuaug

SEQ ID NO: 374888 - RNA, 19 nt, Artificial Sequence
  Description of Artificial Sequence: Synthetic oligonucleotide
  Antisense Strand to SEQ ID NO: 374887
cauaaccuaggcuaucucc

SEQ ID NO: 374889 - RNA, 19 nt, Artificial Sequence
  Description of Artificial Sequence: Synthetic oligonucleotide
  Sense Strand Starting at position 714 of SEQ ID NO: 319069
ggaagaaguuucucuucug

SEQ ID NO: 374890 - RNA, 19 nt, Artificial Sequence
  Description of Artificial Sequence: Synthetic oligonucleotide
  Antisense Strand to SEQ ID NO: 374889
cagaagagaaacuucuucc

SEQ ID NO: 374891 - RNA, 19 nt, Artificial Sequence
  Description of Artificial Sequence: Synthetic oligonucleotide
  Sense Strand Starting at position 714 of SEQ ID NO: 319070
gaagaaguuucucuucuga

SEQ ID NO: 374892 - RNA, 19 nt, Artificial Sequence
  Description of Artificial Sequence: Synthetic oligonucleotide
  Antisense Strand to SEQ ID NO: 374891
ucagaagagaaacuucuuc

SEQ ID NO: 374893 - RNA, 19 nt, Artificial Sequence
  Description of Artificial Sequence: Synthetic oligonucleotide
  Sense Strand Starting at position 714 of SEQ ID NO: 319072
agaaguuucucuucugaga

SEQ ID NO: 374894 - RNA, 19 nt, Artificial Sequence
  Description of Artificial Sequence: Synthetic oligonucleotide
  Antisense Strand to SEQ ID NO: 374893
ucucagaagagaaacuucu

SEQ ID NO: 374895 - RNA, 19 nt, Artificial Sequence
  Description of Artificial Sequence: Synthetic oligonucleotide
  Sense Strand Starting at position 714 of SEQ ID NO: 319131
agacaaugugccugacaac

SEQ ID NO: 374896 - RNA, 19 nt, Artificial Sequence
  Description of Artificial Sequence: Synthetic oligonucleotide
  Antisense Strand to SEQ ID NO: 374895
guugucaggcacauugucu

SEQ ID NO: 374897 - RNA, 19 nt, Artificial Sequence
  Description of Artificial Sequence: Synthetic oligonucleotide
  Sense Strand Starting at position 714 of SEQ ID NO: 319132
gacaaugugccugacaaca

SEQ ID NO: 374898 - RNA, 19 nt, Artificial Sequence
  Description of Artificial Sequence: Synthetic oligonucleotide
  Antisense Strand to SEQ ID NO: 374897
uguugucaggcacauuguc

SEQ ID NO: 374899 - RNA, 19 nt, Artificial Sequence
  Description of Artificial Sequence: Synthetic oligonucleotide
  Sense Strand Starting at position 714 of SEQ ID NO: 319158
uggaguucuuaacuugaaa

SEQ ID NO: 374900 - RNA, 19 nt, Artificial Sequence
  Description of Artificial Sequence: Synthetic oligonucleotide
  Antisense Strand to SEQ ID NO: 374899
uuucaaguuaagaacucca

SEQ ID NO: 374901 - RNA, 19 nt, Artificial Sequence
  Description of Artificial Sequence: Synthetic oligonucleotide
  Sense Strand Starting at position 715 of SEQ ID NO: 315239
gaaauuaauuugugggaaa

SEQ ID NO: 374902 - RNA, 19 nt, Artificial Sequence
  Description of Artificial Sequence: Synthetic oligonucleotide
  Antisense Strand to SEQ ID NO: 374901
uuucccacaaauuaauuuc

SEQ ID NO: 374903 - RNA, 19 nt, Artificial Sequence
  Description of Artificial Sequence: Synthetic oligonucleotide
  Sense Strand Starting at position 715 of SEQ ID NO: 315585
aauaguaagucagcaguuu

SEQ ID NO: 374904 - RNA, 19 nt, Artificial Sequence
  Description of Artificial Sequence: Synthetic oligonucleotide
  Antisense Strand to SEQ ID NO: 374903
aaacugcugacuuacuauu

SEQ ID NO: 374905 - RNA, 19 nt, Artificial Sequence
  Description of Artificial Sequence: Synthetic oligonucleotide
  Sense Strand Starting at position 715 of SEQ ID NO: 315978
agcuaagcauuccuuaaag

SEQ ID NO: 374906 - RNA, 19 nt, Artificial Sequence
  Description of Artificial Sequence: Synthetic oligonucleotide
  Antisense Strand to SEQ ID NO: 374905
cuuuaaggaaugcuuagcu

SEQ ID NO: 374907 - RNA, 19 nt, Artificial Sequence
  Description of Artificial Sequence: Synthetic oligonucleotide
  Sense Strand Starting at position 715 of SEQ ID NO: 315997
gagcaaaggcucugaacaa

SEQ ID NO: 374908 - RNA, 19 nt, Artificial Sequence
  Description of Artificial Sequence: Synthetic oligonucleotide
  Antisense Strand to SEQ ID NO: 374907
uuguucagagccuuugcuc

SEQ ID NO: 374909 - RNA, 19 nt, Artificial Sequence
  Description of Artificial Sequence: Synthetic oligonucleotide
  Sense Strand Starting at position 715 of SEQ ID NO: 316194
ggguuauuaaagggcacau

SEQ ID NO: 374910 - RNA, 19 nt, Artificial Sequence
  Description of Artificial Sequence: Synthetic oligonucleotide
  Antisense Strand to SEQ ID NO: 374909
augugcccuuuaauaaccc

SEQ ID NO: 374911 - RNA, 19 nt, Artificial Sequence
  Description of Artificial Sequence: Synthetic oligonucleotide
  Sense Strand Starting at position 715 of SEQ ID NO: 316223
uccuaagcgcuacauuauu

SEQ ID NO: 374912 - RNA, 19 nt, Artificial Sequence
  Description of Artificial Sequence: Synthetic oligonucleotide
  Antisense Strand to SEQ ID NO: 374911
aauaauguagcgcuuagga

SEQ ID NO: 374913 - RNA, 19 nt, Artificial Sequence
  Description of Artificial Sequence: Synthetic oligonucleotide
  Sense Strand Starting at position 715 of SEQ ID NO: 316277
cuguuuaaacugcaagaca

SEQ ID NO: 374914 - RNA, 19 nt, Artificial Sequence
  Description of Artificial Sequence: Synthetic oligonucleotide
  Antisense Strand to SEQ ID NO: 374913
ugucuugcaguuuaaacag

SEQ ID NO: 374915 - RNA, 19 nt, Artificial Sequence
  Description of Artificial Sequence: Synthetic oligonucleotide
  Sense Strand Starting at position 715 of SEQ ID NO: 316440
agcauuuauguuugagcca

SEQ ID NO: 374916 - RNA, 19 nt, Artificial Sequence
  Description of Artificial Sequence: Synthetic oligonucleotide
  Antisense Strand to SEQ ID NO: 374915
uggcucaaacauaaaugcu

SEQ ID NO: 374917 - RNA, 19 nt, Artificial Sequence
  Description of Artificial Sequence: Synthetic oligonucleotide
  Sense Strand Starting at position 715 of SEQ ID NO: 316445
uuauguuugagccagcaga

SEQ ID NO: 374918 - RNA, 19 nt, Artificial Sequence
  Description of Artificial Sequence: Synthetic oligonucleotide
  Antisense Strand to SEQ ID NO: 374917
ucugcuggcucaaacauaa

SEQ ID NO: 374919 - RNA, 19 nt, Artificial Sequence
  Description of Artificial Sequence: Synthetic oligonucleotide
  Sense Strand Starting at position 715 of SEQ ID NO: 316478
acugcagaaucaucugaga

SEQ ID NO: 374920 - RNA, 19 nt, Artificial Sequence
  Description of Artificial Sequence: Synthetic oligonucleotide
  Antisense Strand to SEQ ID NO: 374919
ucucagaugauucugcagu

SEQ ID NO: 374921 - RNA, 19 nt, Artificial Sequence
  Description of Artificial Sequence: Synthetic oligonucleotide
  Sense Strand Starting at position 715 of SEQ ID NO: 316821
ugagguacuuugguuauca

SEQ ID NO: 374922 - RNA, 19 nt, Artificial Sequence
  Description of Artificial Sequence: Synthetic oligonucleotide
  Antisense Strand to SEQ ID NO: 374921
ugauaaccaaaguaccuca

SEQ ID NO: 374923 - RNA, 19 nt, Artificial Sequence
  Description of Artificial Sequence: Synthetic oligonucleotide
  Sense Strand Starting at position 715 of SEQ ID NO: 316822
gagguacuuugguuaucau

SEQ ID NO: 374924 - RNA, 19 nt, Artificial Sequence
  Description of Artificial Sequence: Synthetic oligonucleotide
  Antisense Strand to SEQ ID NO: 374923
augauaaccaaaguaccuc

SEQ ID NO: 374925 - RNA, 19 nt, Artificial Sequence
  Description of Artificial Sequence: Synthetic oligonucleotide
  Sense Strand Starting at position 715 of SEQ ID NO: 316831
ugguuaucaucuguauuac

SEQ ID NO: 374926 - RNA, 19 nt, Artificial Sequence
  Description of Artificial Sequence: Synthetic oligonucleotide
  Antisense Strand to SEQ ID NO: 374925
guaauacagaugauaacca

SEQ ID NO: 374927 - RNA, 19 nt, Artificial Sequence
  Description of Artificial Sequence: Synthetic oligonucleotide
  Sense Strand Starting at position 715 of SEQ ID NO: 316968
gcggaauaggucugaauuc

SEQ ID NO: 374928 - RNA, 19 nt, Artificial Sequence
  Description of Artificial Sequence: Synthetic oligonucleotide
  Antisense Strand to SEQ ID NO: 374927
gaauucagaccuauuccgc

SEQ ID NO: 374929 - RNA, 19 nt, Artificial Sequence
  Description of Artificial Sequence: Synthetic oligonucleotide
  Sense Strand Starting at position 715 of SEQ ID NO: 316975
aggucugaauucccaagau

SEQ ID NO: 374930 - RNA, 19 nt, Artificial Sequence
  Description of Artificial Sequence: Synthetic oligonucleotide
  Antisense Strand to SEQ ID NO: 374929
aucuugggaauucagaccu

SEQ ID NO: 374931 - RNA, 19 nt, Artificial Sequence
  Description of Artificial Sequence: Synthetic oligonucleotide
  Sense Strand Starting at position 715 of SEQ ID NO: 317238
gagauagagugauaauuaa

SEQ ID NO: 374932 - RNA, 19 nt, Artificial Sequence
  Description of Artificial Sequence: Synthetic oligonucleotide
  Antisense Strand to SEQ ID NO: 374931
uuaauuaucacucuaucuc

SEQ ID NO: 374933 - RNA, 19 nt, Artificial Sequence
  Description of Artificial Sequence: Synthetic oligonucleotide
  Sense Strand Starting at position 715 of SEQ ID NO: 317298
guaauugcugccuacuuaa

SEQ ID NO: 374934 - RNA, 19 nt, Artificial Sequence
  Description of Artificial Sequence: Synthetic oligonucleotide
  Antisense Strand to SEQ ID NO: 374933
uuaaguaggcagcaauuac

SEQ ID NO: 374935 - RNA, 19 nt, Artificial Sequence
  Description of Artificial Sequence: Synthetic oligonucleotide
  Sense Strand Starting at position 715 of SEQ ID NO: 317345
ggaggugcuagaugguaau

SEQ ID NO: 374936 - RNA, 19 nt, Artificial Sequence
  Description of Artificial Sequence: Synthetic oligonucleotide
  Antisense Strand to SEQ ID NO: 374935
auuaccaucuagcaccucc

SEQ ID NO: 374937 - RNA, 19 nt, Artificial Sequence
  Description of Artificial Sequence: Synthetic oligonucleotide
  Sense Strand Starting at position 715 of SEQ ID NO: 317351
gcuagaugguaaucauaaa

SEQ ID NO: 374938 - RNA, 19 nt, Artificial Sequence
  Description of Artificial Sequence: Synthetic oligonucleotide
  Antisense Strand to SEQ ID NO: 374937
uuuaugauuaccaucuagc

SEQ ID NO: 374939 - RNA, 19 nt, Artificial Sequence
  Description of Artificial Sequence: Synthetic oligonucleotide
  Sense Strand Starting at position 715 of SEQ ID NO: 317392
acagguuacuuggcuccaa

SEQ ID NO: 374940 - RNA, 19 nt, Artificial Sequence
  Description of Artificial Sequence: Synthetic oligonucleotide
  Antisense Strand to SEQ ID NO: 374939
uuggagccaaguaaccugu

SEQ ID NO: 374941 - RNA, 19 nt, Artificial Sequence
  Description of Artificial Sequence: Synthetic oligonucleotide
  Sense Strand Starting at position 715 of SEQ ID NO: 317393
cagguuacuuggcuccaaa

SEQ ID NO: 374942 - RNA, 19 nt, Artificial Sequence
  Description of Artificial Sequence: Synthetic oligonucleotide
  Antisense Strand to SEQ ID NO: 374941
uuuggagccaaguaaccug

SEQ ID NO: 374943 - RNA, 19 nt, Artificial Sequence
  Description of Artificial Sequence: Synthetic oligonucleotide
  Sense Strand Starting at position 715 of SEQ ID NO: 317762
uugguaaccucuccagaaa

SEQ ID NO: 374944 - RNA, 19 nt, Artificial Sequence
  Description of Artificial Sequence: Synthetic oligonucleotide
  Antisense Strand to SEQ ID NO: 374943
uuucuggagagguuaccaa

SEQ ID NO: 374945 - RNA, 19 nt, Artificial Sequence
  Description of Artificial Sequence: Synthetic oligonucleotide
  Sense Strand Starting at position 715 of SEQ ID NO: 317788
guauuuaacucagagguug

SEQ ID NO: 374946 - RNA, 19 nt, Artificial Sequence
  Description of Artificial Sequence: Synthetic oligonucleotide
  Antisense Strand to SEQ ID NO: 374945
caaccucugaguuaaauac

SEQ ID NO: 374947 - RNA, 19 nt, Artificial Sequence
  Description of Artificial Sequence: Synthetic oligonucleotide
  Sense Strand Starting at position 715 of SEQ ID NO: 317803
guuguuuaccaggacgacu

SEQ ID NO: 374948 - RNA, 19 nt, Artificial Sequence
  Description of Artificial Sequence: Synthetic oligonucleotide
  Antisense Strand to SEQ ID NO: 374947
agucguccugguaaacaac

SEQ ID NO: 374949 - RNA, 19 nt, Artificial Sequence
  Description of Artificial Sequence: Synthetic oligonucleotide
  Sense Strand Starting at position 715 of SEQ ID NO: 317939
agacacuauucccagaaga

SEQ ID NO: 374950 - RNA, 19 nt, Artificial Sequence
  Description of Artificial Sequence: Synthetic oligonucleotide
  Antisense Strand to SEQ ID NO: 374949
ucuucugggaauagugucu

SEQ ID NO: 374951 - RNA, 19 nt, Artificial Sequence
  Description of Artificial Sequence: Synthetic oligonucleotide
  Sense Strand Starting at position 715 of SEQ ID NO: 318010
aucuuuagaugcucagacu

SEQ ID NO: 374952 - RNA, 19 nt, Artificial Sequence
  Description of Artificial Sequence: Synthetic oligonucleotide
  Antisense Strand to SEQ ID NO: 374951
agucugagcaucuaaagau

SEQ ID NO: 374953 - RNA, 19 nt, Artificial Sequence
  Description of Artificial Sequence: Synthetic oligonucleotide
  Sense Strand Starting at position 715 of SEQ ID NO: 318183
agcccugacucucugauaa

SEQ ID NO: 374954 - RNA, 19 nt, Artificial Sequence
  Description of Artificial Sequence: Synthetic oligonucleotide
  Antisense Strand to SEQ ID NO: 374953
uuaucagagagucagggcu

SEQ ID NO: 374955 - RNA, 19 nt, Artificial Sequence
  Description of Artificial Sequence: Synthetic oligonucleotide
  Sense Strand Starting at position 715 of SEQ ID NO: 318205
ugcaaagaauucccugauu

SEQ ID NO: 374956 - RNA, 19 nt, Artificial Sequence
  Description of Artificial Sequence: Synthetic oligonucleotide
  Antisense Strand to SEQ ID NO: 374955
aaucagggaauucuuugca

SEQ ID NO: 374957 - RNA, 19 nt, Artificial Sequence
  Description of Artificial Sequence: Synthetic oligonucleotide
  Sense Strand Starting at position 715 of SEQ ID NO: 318286
ggagucccugucgauaaua

SEQ ID NO: 374958 - RNA, 19 nt, Artificial Sequence
  Description of Artificial Sequence: Synthetic oligonucleotide
  Antisense Strand to SEQ ID NO: 374957
uauuaucgacagggacucc

SEQ ID NO: 374959 - RNA, 19 nt, Artificial Sequence
  Description of Artificial Sequence: Synthetic oligonucleotide
  Sense Strand Starting at position 715 of SEQ ID NO: 318294
ugucgauaauaucucaaug

SEQ ID NO: 374960 - RNA, 19 nt, Artificial Sequence
  Description of Artificial Sequence: Synthetic oligonucleotide
  Antisense Strand to SEQ ID NO: 374959
cauugagauauuaucgaca

SEQ ID NO: 374961 - RNA, 19 nt, Artificial Sequence
  Description of Artificial Sequence: Synthetic oligonucleotide
  Sense Strand Starting at position 715 of SEQ ID NO: 318332
gugguaguuaaagacacau

SEQ ID NO: 374962 - RNA, 19 nt, Artificial Sequence
  Description of Artificial Sequence: Synthetic oligonucleotide
  Antisense Strand to SEQ ID NO: 374961
augugucuuuaacuaccac

SEQ ID NO: 374963 - RNA, 19 nt, Artificial Sequence
  Description of Artificial Sequence: Synthetic oligonucleotide
  Sense Strand Starting at position 715 of SEQ ID NO: 318369
guuagaaucacugggaacu

SEQ ID NO: 374964 - RNA, 19 nt, Artificial Sequence
  Description of Artificial Sequence: Synthetic oligonucleotide
  Antisense Strand to SEQ ID NO: 374963
aguucccagugauucuaac

SEQ ID NO: 374965 - RNA, 19 nt, Artificial Sequence
  Description of Artificial Sequence: Synthetic oligonucleotide
  Sense Strand Starting at position 715 of SEQ ID NO: 318673
ggcagaaguuaugcucauu

SEQ ID NO: 374966 - RNA, 19 nt, Artificial Sequence
  Description of Artificial Sequence: Synthetic oligonucleotide
  Antisense Strand to SEQ ID NO: 374965
aaugagcauaacuucugcc

SEQ ID NO: 374967 - RNA, 19 nt, Artificial Sequence
  Description of Artificial Sequence: Synthetic oligonucleotide
  Sense Strand Starting at position 715 of SEQ ID NO: 318676
agaaguuaugcucauuaca

SEQ ID NO: 374968 - RNA, 19 nt, Artificial Sequence
  Description of Artificial Sequence: Synthetic oligonucleotide
  Antisense Strand to SEQ ID NO: 374967
uguaaugagcauaacuucu

SEQ ID NO: 374969 - RNA, 19 nt, Artificial Sequence
  Description of Artificial Sequence: Synthetic oligonucleotide
  Sense Strand Starting at position 715 of SEQ ID NO: 318919
acuugaugucaucaaguag

SEQ ID NO: 374970 - RNA, 19 nt, Artificial Sequence
  Description of Artificial Sequence: Synthetic oligonucleotide
  Antisense Strand to SEQ ID NO: 374969
cuacuugaugacaucaagu

SEQ ID NO: 374971 - RNA, 19 nt, Artificial Sequence
  Description of Artificial Sequence: Synthetic oligonucleotide
  Sense Strand Starting at position 715 of SEQ ID NO: 318934
guagcaacauuugaagauu

SEQ ID NO: 374972 - RNA, 19 nt, Artificial Sequence
  Description of Artificial Sequence: Synthetic oligonucleotide
  Antisense Strand to SEQ ID NO: 374971
aaucuucaaauguugcuac

SEQ ID NO: 374973 - RNA, 19 nt, Artificial Sequence
  Description of Artificial Sequence: Synthetic oligonucleotide
  Sense Strand Starting at position 715 of SEQ ID NO: 318999
ccuugugaaugauuaagua

SEQ ID NO: 374974 - RNA, 19 nt, Artificial Sequence
  Description of Artificial Sequence: Synthetic oligonucleotide
  Antisense Strand to SEQ ID NO: 374973
uacuuaaucauucacaagg

SEQ ID NO: 374975 - RNA, 19 nt, Artificial Sequence
  Description of Artificial Sequence: Synthetic oligonucleotide
  Sense Strand Starting at position 715 of SEQ ID NO: 319003
gugaaugauuaaguaucca

SEQ ID NO: 374976 - RNA, 19 nt, Artificial Sequence
  Description of Artificial Sequence: Synthetic oligonucleotide
  Antisense Strand to SEQ ID NO: 374975
uggauacuuaaucauucac

SEQ ID NO: 374977 - RNA, 19 nt, Artificial Sequence
  Description of Artificial Sequence: Synthetic oligonucleotide
  Sense Strand Starting at position 715 of SEQ ID NO: 319036
ccuaccuuucuuggaggau

SEQ ID NO: 374978 - RNA, 19 nt, Artificial Sequence
  Description of Artificial Sequence: Synthetic oligonucleotide
  Antisense Strand to SEQ ID NO: 374977
auccuccaagaaagguagg

SEQ ID NO: 374979 - RNA, 19 nt, Artificial Sequence
  Description of Artificial Sequence: Synthetic oligonucleotide
  Sense Strand Starting at position 715 of SEQ ID NO: 319102
ggacuaugcagacaggcau

SEQ ID NO: 374980 - RNA, 19 nt, Artificial Sequence
  Description of Artificial Sequence: Synthetic oligonucleotide
  Antisense Strand to SEQ ID NO: 374979
augccugucugcauagucc

SEQ ID NO: 374981 - RNA, 19 nt, Artificial Sequence
  Description of Artificial Sequence: Synthetic oligonucleotide
  Sense Strand Starting at position 716 of SEQ ID NO: 315399
agaaucagucaccagcuua

SEQ ID NO: 374982 - RNA, 19 nt, Artificial Sequence
  Description of Artificial Sequence: Synthetic oligonucleotide
  Antisense Strand to SEQ ID NO: 374981
uaagcuggugacugauucu

SEQ ID NO: 374983 - RNA, 19 nt, Artificial Sequence
  Description of Artificial Sequence: Synthetic oligonucleotide
  Sense Strand Starting at position 716 of SEQ ID NO: 315436
auaugagcuuggucugcaa

SEQ ID NO: 374984 - RNA, 19 nt, Artificial Sequence
  Description of Artificial Sequence: Synthetic oligonucleotide
  Antisense Strand to SEQ ID NO: 374983
uugcagaccaagcucauau

SEQ ID NO: 374985 - RNA, 19 nt, Artificial Sequence
  Description of Artificial Sequence: Synthetic oligonucleotide
  Sense Strand Starting at position 716 of SEQ ID NO: 315440
gagcuuggucugcaauucu

SEQ ID NO: 374986 - RNA, 19 nt, Artificial Sequence
  Description of Artificial Sequence: Synthetic oligonucleotide
  Antisense Strand to SEQ ID NO: 374985
agaauugcagaccaagcuc

SEQ ID NO: 374987 - RNA, 19 nt, Artificial Sequence
  Description of Artificial Sequence: Synthetic oligonucleotide
  Sense Strand Starting at position 716 of SEQ ID NO: 315494
gaaauuaauuugugggaaa

SEQ ID NO: 374988 - RNA, 19 nt, Artificial Sequence
  Description of Artificial Sequence: Synthetic oligonucleotide
  Antisense Strand to SEQ ID NO: 374987
uuucccacaaauuaauuuc

SEQ ID NO: 374989 - RNA, 19 nt, Artificial Sequence
  Description of Artificial Sequence: Synthetic oligonucleotide
  Sense Strand Starting at position 716 of SEQ ID NO: 315840
aauaguaagucagcaguuu

SEQ ID NO: 374990 - RNA, 19 nt, Artificial Sequence
  Description of Artificial Sequence: Synthetic oligonucleotide
  Antisense Strand to SEQ ID NO: 374989
aaacugcugacuuacuauu

SEQ ID NO: 374991 - RNA, 19 nt, Artificial Sequence
  Description of Artificial Sequence: Synthetic oligonucleotide
  Sense Strand Starting at position 716 of SEQ ID NO: 316233
agcuaagcauuccuuaaag

SEQ ID NO: 374992 - RNA, 19 nt, Artificial Sequence
  Description of Artificial Sequence: Synthetic oligonucleotide
  Antisense Strand to SEQ ID NO: 374991
cuuuaaggaaugcuuagcu

SEQ ID NO: 374993 - RNA, 19 nt, Artificial Sequence
  Description of Artificial Sequence: Synthetic oligonucleotide
  Sense Strand Starting at position 716 of SEQ ID NO: 316252
gagcaaaggcucugaacaa

SEQ ID NO: 374994 - RNA, 19 nt, Artificial Sequence
  Description of Artificial Sequence: Synthetic oligonucleotide
  Antisense Strand to SEQ ID NO: 374993
uuguucagagccuuugcuc

SEQ ID NO: 374995 - RNA, 19 nt, Artificial Sequence
  Description of Artificial Sequence: Synthetic oligonucleotide
  Sense Strand Starting at position 716 of SEQ ID NO: 316311
cggccuugagucggagaaa

SEQ ID NO: 374996 - RNA, 19 nt, Artificial Sequence
  Description of Artificial Sequence: Synthetic oligonucleotide
  Antisense Strand to SEQ ID NO: 374995
uuucuccgacucaaggccg

SEQ ID NO: 374997 - RNA, 19 nt, Artificial Sequence
  Description of Artificial Sequence: Synthetic oligonucleotide
  Sense Strand Starting at position 716 of SEQ ID NO: 316449
ggguuauuaaagggcacau

SEQ ID NO: 374998 - RNA, 19 nt, Artificial Sequence
  Description of Artificial Sequence: Synthetic oligonucleotide
  Antisense Strand to SEQ ID NO: 374997
augugcccuuuaauaaccc

SEQ ID NO: 374999 - RNA, 19 nt, Artificial Sequence
  Description of Artificial Sequence: Synthetic oligonucleotide
  Sense Strand Starting at position 716 of SEQ ID NO: 316478
uccuaagcgcuacauuauu

SEQ ID NO: 375000 - RNA, 19 nt, Artificial Sequence
  Description of Artificial Sequence: Synthetic oligonucleotide
  Antisense Strand to SEQ ID NO: 374999
aauaauguagcgcuuagga

SEQ ID NO: 375001 - RNA, 19 nt, Artificial Sequence
  Description of Artificial Sequence: Synthetic oligonucleotide
  Sense Strand Starting at position 716 of SEQ ID NO: 316532
cuguuuaaacugcaagaca

SEQ ID NO: 375002 - RNA, 19 nt, Artificial Sequence
  Description of Artificial Sequence: Synthetic oligonucleotide
  Antisense Strand to SEQ ID NO: 375001
ugucuugcaguuuaaacag

SEQ ID NO: 375003 - RNA, 19 nt, Artificial Sequence
  Description of Artificial Sequence: Synthetic oligonucleotide
  Sense Strand Starting at position 716 of SEQ ID NO: 316695
agcauuuauguuugagcca

SEQ ID NO: 375004 - RNA, 19 nt, Artificial Sequence
  Description of Artificial Sequence: Synthetic oligonucleotide
  Antisense Strand to SEQ ID NO: 375003
uggcucaaacauaaaugcu

SEQ ID NO: 375005 - RNA, 19 nt, Artificial Sequence
  Description of Artificial Sequence: Synthetic oligonucleotide
  Sense Strand Starting at position 716 of SEQ ID NO: 316700
uuauguuugagccagcaga

SEQ ID NO: 375006 - RNA, 19 nt, Artificial Sequence
  Description of Artificial Sequence: Synthetic oligonucleotide
  Antisense Strand to SEQ ID NO: 375005
ucugcuggcucaaacauaa

SEQ ID NO: 375007 - RNA, 19 nt, Artificial Sequence
  Description of Artificial Sequence: Synthetic oligonucleotide
  Sense Strand Starting at position 716 of SEQ ID NO: 316733
acugcagaaucaucugaga

SEQ ID NO: 375008 - RNA, 19 nt, Artificial Sequence
  Description of Artificial Sequence: Synthetic oligonucleotide
  Antisense Strand to SEQ ID NO: 375007
ucucagaugauucugcagu

SEQ ID NO: 375009 - RNA, 19 nt, Artificial Sequence
  Description of Artificial Sequence: Synthetic oligonucleotide
  Sense Strand Starting at position 716 of SEQ ID NO: 317076
ugagguacuuugguuauca

SEQ ID NO: 375010 - RNA, 19 nt, Artificial Sequence
  Description of Artificial Sequence: Synthetic oligonucleotide
  Antisense Strand to SEQ ID NO: 375009
ugauaaccaaaguaccuca

SEQ ID NO: 375011 - RNA, 19 nt, Artificial Sequence
  Description of Artificial Sequence: Synthetic oligonucleotide
  Sense Strand Starting at position 716 of SEQ ID NO: 317077
gagguacuuugguuaucau

SEQ ID NO: 375012 - RNA, 19 nt, Artificial Sequence
  Description of Artificial Sequence: Synthetic oligonucleotide
  Antisense Strand to SEQ ID NO: 375011
augauaaccaaaguaccuc

SEQ ID NO: 375013 - RNA, 19 nt, Artificial Sequence
  Description of Artificial Sequence: Synthetic oligonucleotide
  Sense Strand Starting at position 716 of SEQ ID NO: 317086
ugguuaucaucuguauuac

SEQ ID NO: 375014 - RNA, 19 nt, Artificial Sequence
  Description of Artificial Sequence: Synthetic oligonucleotide
  Antisense Strand to SEQ ID NO: 375013
guaauacagaugauaacca

SEQ ID NO: 375015 - RNA, 19 nt, Artificial Sequence
  Description of Artificial Sequence: Synthetic oligonucleotide
  Sense Strand Starting at position 716 of SEQ ID NO: 317223
gcggaauaggucugaauuc

SEQ ID NO: 375016 - RNA, 19 nt, Artificial Sequence
  Description of Artificial Sequence: Synthetic oligonucleotide
  Antisense Strand to SEQ ID NO: 375015
gaauucagaccuauuccgc

SEQ ID NO: 375017 - RNA, 19 nt, Artificial Sequence
  Description of Artificial Sequence: Synthetic oligonucleotide
  Sense Strand Starting at position 716 of SEQ ID NO: 317230
aggucugaauucccaagau

SEQ ID NO: 375018 - RNA, 19 nt, Artificial Sequence
  Description of Artificial Sequence: Synthetic oligonucleotide
  Antisense Strand to SEQ ID NO: 375017
aucuugggaauucagaccu

SEQ ID NO: 375019 - RNA, 19 nt, Artificial Sequence
  Description of Artificial Sequence: Synthetic oligonucleotide
  Sense Strand Starting at position 716 of SEQ ID NO: 317493
gagauagagugauaauuaa

SEQ ID NO: 375020 - RNA, 19 nt, Artificial Sequence
  Description of Artificial Sequence: Synthetic oligonucleotide
  Antisense Strand to SEQ ID NO: 375019
uuaauuaucacucuaucuc

SEQ ID NO: 375021 - RNA, 19 nt, Artificial Sequence
  Description of Artificial Sequence: Synthetic oligonucleotide
  Sense Strand Starting at position 716 of SEQ ID NO: 317553
guaauugcugccuacuuaa

SEQ ID NO: 375022 - RNA, 19 nt, Artificial Sequence
  Description of Artificial Sequence: Synthetic oligonucleotide
  Antisense Strand to SEQ ID NO: 375021
uuaaguaggcagcaauuac

SEQ ID NO: 375023 - RNA, 19 nt, Artificial Sequence
  Description of Artificial Sequence: Synthetic oligonucleotide
  Sense Strand Starting at position 716 of SEQ ID NO: 317600
ggaggugcuagaugguaau

SEQ ID NO: 375024 - RNA, 19 nt, Artificial Sequence
  Description of Artificial Sequence: Synthetic oligonucleotide
  Antisense Strand to SEQ ID NO: 375023
auuaccaucuagcaccucc

SEQ ID NO: 375025 - RNA, 19 nt, Artificial Sequence
  Description of Artificial Sequence: Synthetic oligonucleotide
  Sense Strand Starting at position 716 of SEQ ID NO: 317606
gcuagaugguaaucauaaa

SEQ ID NO: 375026 - RNA, 19 nt, Artificial Sequence
  Description of Artificial Sequence: Synthetic oligonucleotide
  Antisense Strand to SEQ ID NO: 375025
uuuaugauuaccaucuagc

SEQ ID NO: 375027 - RNA, 19 nt, Artificial Sequence
  Description of Artificial Sequence: Synthetic oligonucleotide
  Sense Strand Starting at position 716 of SEQ ID NO: 317647
acagguuacuuggcuccaa

SEQ ID NO: 375028 - RNA, 19 nt, Artificial Sequence
  Description of Artificial Sequence: Synthetic oligonucleotide
  Antisense Strand to SEQ ID NO: 375027
uuggagccaaguaaccugu

SEQ ID NO: 375029 - RNA, 19 nt, Artificial Sequence
  Description of Artificial Sequence: Synthetic oligonucleotide
  Sense Strand Starting at position 716 of SEQ ID NO: 317648
cagguuacuuggcuccaaa

SEQ ID NO: 375030 - RNA, 19 nt, Artificial Sequence
  Description of Artificial Sequence: Synthetic oligonucleotide
  Antisense Strand to SEQ ID NO: 375029
uuuggagccaaguaaccug

SEQ ID NO: 375031 - RNA, 19 nt, Artificial Sequence
  Description of Artificial Sequence: Synthetic oligonucleotide
  Sense Strand Starting at position 716 of SEQ ID NO: 318017
uugguaaccucuccagaaa

SEQ ID NO: 375032 - RNA, 19 nt, Artificial Sequence
  Description of Artificial Sequence: Synthetic oligonucleotide
  Antisense Strand to SEQ ID NO: 375031
uuucuggagagguuaccaa

SEQ ID NO: 375033 - RNA, 19 nt, Artificial Sequence
  Description of Artificial Sequence: Synthetic oligonucleotide
  Sense Strand Starting at position 716 of SEQ ID NO: 318043
guauuuaacucagagguug

SEQ ID NO: 375034 - RNA, 19 nt, Artificial Sequence
  Description of Artificial Sequence: Synthetic oligonucleotide
  Antisense Strand to SEQ ID NO: 375033
caaccucugaguuaaauac

SEQ ID NO: 375035 - RNA, 19 nt, Artificial Sequence
  Description of Artificial Sequence: Synthetic oligonucleotide
  Sense Strand Starting at position 716 of SEQ ID NO: 318058
guuguuuaccaggacgacu

SEQ ID NO: 375036 - RNA, 19 nt, Artificial Sequence
  Description of Artificial Sequence: Synthetic oligonucleotide
  Antisense Strand to SEQ ID NO: 375035
agucguccugguaaacaac

SEQ ID NO: 375037 - RNA, 19 nt, Artificial Sequence
  Description of Artificial Sequence: Synthetic oligonucleotide
  Sense Strand Starting at position 716 of SEQ ID NO: 318194
agacacuauucccagaaga

SEQ ID NO: 375038 - RNA, 19 nt, Artificial Sequence
  Description of Artificial Sequence: Synthetic oligonucleotide
  Antisense Strand to SEQ ID NO: 375037
ucuucugggaauagugucu

SEQ ID NO: 375039 - RNA, 19 nt, Artificial Sequence
  Description of Artificial Sequence: Synthetic oligonucleotide
  Sense Strand Starting at position 716 of SEQ ID NO: 318265
aucuuuagaugcucagacu

SEQ ID NO: 375040 - RNA, 19 nt, Artificial Sequence
  Description of Artificial Sequence: Synthetic oligonucleotide
  Antisense Strand to SEQ ID NO: 375039
agucugagcaucuaaagau

SEQ ID NO: 375041 - RNA, 19 nt, Artificial Sequence
  Description of Artificial Sequence: Synthetic oligonucleotide
  Sense Strand Starting at position 716 of SEQ ID NO: 318438
agcccugacucucugauaa

SEQ ID NO: 375042 - RNA, 19 nt, Artificial Sequence
  Description of Artificial Sequence: Synthetic oligonucleotide
  Antisense Strand to SEQ ID NO: 375041
uuaucagagagucagggcu

SEQ ID NO: 375043 - RNA, 19 nt, Artificial Sequence
  Description of Artificial Sequence: Synthetic oligonucleotide
  Sense Strand Starting at position 716 of SEQ ID NO: 318460
ugcaaagaauucccugauu

SEQ ID NO: 375044 - RNA, 19 nt, Artificial Sequence
  Description of Artificial Sequence: Synthetic oligonucleotide
  Antisense Strand to SEQ ID NO: 375043
aaucagggaauucuuugca

SEQ ID NO: 375045 - RNA, 19 nt, Artificial Sequence
  Description of Artificial Sequence: Synthetic oligonucleotide
  Sense Strand Starting at position 716 of SEQ ID NO: 318541
ggagucccugucgauaaua

SEQ ID NO: 375046 - RNA, 19 nt, Artificial Sequence
  Description of Artificial Sequence: Synthetic oligonucleotide
  Antisense Strand to SEQ ID NO: 375045
uauuaucgacagggacucc

SEQ ID NO: 375047 - RNA, 19 nt, Artificial Sequence
  Description of Artificial Sequence: Synthetic oligonucleotide
  Sense Strand Starting at position 716 of SEQ ID NO: 318549
ugucgauaauaucucaaug

SEQ ID NO: 375048 - RNA, 19 nt, Artificial Sequence
  Description of Artificial Sequence: Synthetic oligonucleotide
  Antisense Strand to SEQ ID NO: 375047
cauugagauauuaucgaca

SEQ ID NO: 375049 - RNA, 19 nt, Artificial Sequence
  Description of Artificial Sequence: Synthetic oligonucleotide
  Sense Strand Starting at position 716 of SEQ ID NO: 318587
gugguaguuaaagacacau

SEQ ID NO: 375050 - RNA, 19 nt, Artificial Sequence
  Description of Artificial Sequence: Synthetic oligonucleotide
  Antisense Strand to SEQ ID NO: 375049
augugucuuuaacuaccac

SEQ ID NO: 375051 - RNA, 19 nt, Artificial Sequence
  Description of Artificial Sequence: Synthetic oligonucleotide
  Sense Strand Starting at position 716 of SEQ ID NO: 318624
guuagaaucacugggaacu

SEQ ID NO: 375052 - RNA, 19 nt, Artificial Sequence
  Description of Artificial Sequence: Synthetic oligonucleotide
  Antisense Strand to SEQ ID NO: 375051
aguucccagugauucuaac

SEQ ID NO: 375053 - RNA, 19 nt, Artificial Sequence
  Description of Artificial Sequence: Synthetic oligonucleotide
  Sense Strand Starting at position 716 of SEQ ID NO: 318928
ggcagaaguuaugcucauu

SEQ ID NO: 375054 - RNA, 19 nt, Artificial Sequence
  Description of Artificial Sequence: Synthetic oligonucleotide
  Antisense Strand to SEQ ID NO: 375053
aaugagcauaacuucugcc

SEQ ID NO: 375055 - RNA, 19 nt, Artificial Sequence
  Description of Artificial Sequence: Synthetic oligonucleotide
  Sense Strand Starting at position 716 of SEQ ID NO: 318931
agaaguuaugcucauuaca

SEQ ID NO: 375056 - RNA, 19 nt, Artificial Sequence
  Description of Artificial Sequence: Synthetic oligonucleotide
  Antisense Strand to SEQ ID NO: 375055
uguaaugagcauaacuucu

SEQ ID NO: 375057 - RNA, 19 nt, Artificial Sequence
  Description of Artificial Sequence: Synthetic oligonucleotide
  Sense Strand Starting at position 716 of SEQ ID NO: 319174
acuugaugucaucaaguag

SEQ ID NO: 375058 - RNA, 19 nt, Artificial Sequence
  Description of Artificial Sequence: Synthetic oligonucleotide
  Antisense Strand to SEQ ID NO: 375057
cuacuugaugacaucaagu

SEQ ID NO: 375059 - RNA, 19 nt, Artificial Sequence
  Description of Artificial Sequence: Synthetic oligonucleotide
  Sense Strand Starting at position 716 of SEQ ID NO: 319189
guagcaacauuugaagauu

SEQ ID NO: 375060 - RNA, 19 nt, Artificial Sequence
  Description of Artificial Sequence: Synthetic oligonucleotide
  Antisense Strand to SEQ ID NO: 375059
aaucuucaaauguugcuac

SEQ ID NO: 375061 - RNA, 19 nt, Artificial Sequence
  Description of Artificial Sequence: Synthetic oligonucleotide
  Sense Strand Starting at position 717 of SEQ ID NO: 315343
guguaagcauuugcuuaua

SEQ ID NO: 375062 - RNA, 19 nt, Artificial Sequence
  Description of Artificial Sequence: Synthetic oligonucleotide
  Antisense Strand to SEQ ID NO: 375061
uauaagcaaaugcuuacac

SEQ ID NO: 375063 - RNA, 19 nt, Artificial Sequence
  Description of Artificial Sequence: Synthetic oligonucleotide
  Sense Strand Starting at position 717 of SEQ ID NO: 315345
guaagcauuugcuuauaga

SEQ ID NO: 375064 - RNA, 19 nt, Artificial Sequence
  Description of Artificial Sequence: Synthetic oligonucleotide
  Antisense Strand to SEQ ID NO: 375063
ucuauaagcaaaugcuuac

SEQ ID NO: 375065 - RNA, 19 nt, Artificial Sequence
  Description of Artificial Sequence: Synthetic oligonucleotide
  Sense Strand Starting at position 717 of SEQ ID NO: 315413
cagauaaagcccugaugag

SEQ ID NO: 375066 - RNA, 19 nt, Artificial Sequence
  Description of Artificial Sequence: Synthetic oligonucleotide
  Antisense Strand to SEQ ID NO: 375065
cucaucagggcuuuaucug

SEQ ID NO: 375067 - RNA, 19 nt, Artificial Sequence
  Description of Artificial Sequence: Synthetic oligonucleotide
  Sense Strand Starting at position 717 of SEQ ID NO: 315590
ccgugaagcaucuacaaag

SEQ ID NO: 375068 - RNA, 19 nt, Artificial Sequence
  Description of Artificial Sequence: Synthetic oligonucleotide
  Antisense Strand to SEQ ID NO: 375067
cuuuguagaugcuucacgg

SEQ ID NO: 375069 - RNA, 19 nt, Artificial Sequence
  Description of Artificial Sequence: Synthetic oligonucleotide
  Sense Strand Starting at position 717 of SEQ ID NO: 316087
ucgacagacaagugggaau

SEQ ID NO: 375070 - RNA, 19 nt, Artificial Sequence
  Description of Artificial Sequence: Synthetic oligonucleotide
  Antisense Strand to SEQ ID NO: 375069
auucccacuugucugucga

SEQ ID NO: 375071 - RNA, 19 nt, Artificial Sequence
  Description of Artificial Sequence: Synthetic oligonucleotide
  Sense Strand Starting at position 717 of SEQ ID NO: 316287
gcagguaaggccuggauuu

SEQ ID NO: 375072 - RNA, 19 nt, Artificial Sequence
  Description of Artificial Sequence: Synthetic oligonucleotide
  Antisense Strand to SEQ ID NO: 375071
aaauccaggccuuaccugc

SEQ ID NO: 375073 - RNA, 19 nt, Artificial Sequence
  Description of Artificial Sequence: Synthetic oligonucleotide
  Sense Strand Starting at position 717 of SEQ ID NO: 316300
ggauuugaaugggacucua

SEQ ID NO: 375074 - RNA, 19 nt, Artificial Sequence
  Description of Artificial Sequence: Synthetic oligonucleotide
  Antisense Strand to SEQ ID NO: 375073
uagagucccauucaaaucc

SEQ ID NO: 375075 - RNA, 19 nt, Artificial Sequence
  Description of Artificial Sequence: Synthetic oligonucleotide
  Sense Strand Starting at position 717 of SEQ ID NO: 316323
cagagaguuuaacuugaac

SEQ ID NO: 375076 - RNA, 19 nt, Artificial Sequence
  Description of Artificial Sequence: Synthetic oligonucleotide
  Antisense Strand to SEQ ID NO: 375075
guucaaguuaaacucucug

SEQ ID NO: 375077 - RNA, 19 nt, Artificial Sequence
  Description of Artificial Sequence: Synthetic oligonucleotide
  Sense Strand Starting at position 717 of SEQ ID NO: 317473
agacuuggcuacuuaauau

SEQ ID NO: 375078 - RNA, 19 nt, Artificial Sequence
  Description of Artificial Sequence: Synthetic oligonucleotide
  Antisense Strand to SEQ ID NO: 375077
auauuaaguagccaagucu

SEQ ID NO: 375079 - RNA, 19 nt, Artificial Sequence
  Description of Artificial Sequence: Synthetic oligonucleotide
  Sense Strand Starting at position 717 of SEQ ID NO: 317719
ggaagaacuuuccuucgcu

SEQ ID NO: 375080 - RNA, 19 nt, Artificial Sequence
  Description of Artificial Sequence: Synthetic oligonucleotide
  Antisense Strand to SEQ ID NO: 375079
agcgaaggaaaguucuucc

SEQ ID NO: 375081 - RNA, 19 nt, Artificial Sequence
  Description of Artificial Sequence: Synthetic oligonucleotide
  Sense Strand Starting at position 717 of SEQ ID NO: 317756
uggagaaauuguucuugug

SEQ ID NO: 375082 - RNA, 19 nt, Artificial Sequence
  Description of Artificial Sequence: Synthetic oligonucleotide
  Antisense Strand to SEQ ID NO: 375081
cacaagaacaauuucucca

SEQ ID NO: 375083 - RNA, 19 nt, Artificial Sequence
  Description of Artificial Sequence: Synthetic oligonucleotide
  Sense Strand Starting at position 717 of SEQ ID NO: 317760
gaaauuguucuugugcguu

SEQ ID NO: 375084 - RNA, 19 nt, Artificial Sequence
  Description of Artificial Sequence: Synthetic oligonucleotide
  Antisense Strand to SEQ ID NO: 375083
aacgcacaagaacaauuuc

SEQ ID NO: 375085 - RNA, 19 nt, Artificial Sequence
  Description of Artificial Sequence: Synthetic oligonucleotide
  Sense Strand Starting at position 717 of SEQ ID NO: 317878
uugaaagauucgguuaauu

SEQ ID NO: 375086 - RNA, 19 nt, Artificial Sequence
  Description of Artificial Sequence: Synthetic oligonucleotide
  Antisense Strand to SEQ ID NO: 375085
aauuaaccgaaucuuucaa

SEQ ID NO: 375087 - RNA, 19 nt, Artificial Sequence
  Description of Artificial Sequence: Synthetic oligonucleotide
  Sense Strand Starting at position 717 of SEQ ID NO: 318005
acaagugaacuguacaagu

SEQ ID NO: 375088 - RNA, 19 nt, Artificial Sequence
  Description of Artificial Sequence: Synthetic oligonucleotide
  Antisense Strand to SEQ ID NO: 375087
acuuguacaguucacuugu

SEQ ID NO: 375089 - RNA, 19 nt, Artificial Sequence
  Description of Artificial Sequence: Synthetic oligonucleotide
  Sense Strand Starting at position 717 of SEQ ID NO: 318007
aagugaacuguacaagugu

SEQ ID NO: 375090 - RNA, 19 nt, Artificial Sequence
  Description of Artificial Sequence: Synthetic oligonucleotide
  Antisense Strand to SEQ ID NO: 375089
acacuuguacaguucacuu

SEQ ID NO: 375091 - RNA, 19 nt, Artificial Sequence
  Description of Artificial Sequence: Synthetic oligonucleotide
  Sense Strand Starting at position 717 of SEQ ID NO: 318089
gcucauuuguacuucuagu

SEQ ID NO: 375092 - RNA, 19 nt, Artificial Sequence
  Description of Artificial Sequence: Synthetic oligonucleotide
  Antisense Strand to SEQ ID NO: 375091
acuagaaguacaaaugagc

SEQ ID NO: 375093 - RNA, 19 nt, Artificial Sequence
  Description of Artificial Sequence: Synthetic oligonucleotide
  Sense Strand Starting at position 717 of SEQ ID NO: 318105
aguucuucccucugauuag

SEQ ID NO: 375094 - RNA, 19 nt, Artificial Sequence
  Description of Artificial Sequence: Synthetic oligonucleotide
  Antisense Strand to SEQ ID NO: 375093
cuaaucagagggaagaacu

SEQ ID NO: 375095 - RNA, 19 nt, Artificial Sequence
  Description of Artificial Sequence: Synthetic oligonucleotide
  Sense Strand Starting at position 717 of SEQ ID NO: 318176
gcaguauagaguuacagug

SEQ ID NO: 375096 - RNA, 19 nt, Artificial Sequence
  Description of Artificial Sequence: Synthetic oligonucleotide
  Antisense Strand to SEQ ID NO: 375095
cacuguaacucuauacugc

SEQ ID NO: 375097 - RNA, 19 nt, Artificial Sequence
  Description of Artificial Sequence: Synthetic oligonucleotide
  Sense Strand Starting at position 717 of SEQ ID NO: 318239
uaagaagagcugugcaauc

SEQ ID NO: 375098 - RNA, 19 nt, Artificial Sequence
  Description of Artificial Sequence: Synthetic oligonucleotide
  Antisense Strand to SEQ ID NO: 375097
gauugcacagcucuucuua

SEQ ID NO: 375099 - RNA, 19 nt, Artificial Sequence
  Description of Artificial Sequence: Synthetic oligonucleotide
  Sense Strand Starting at position 717 of SEQ ID NO: 318266
gucacuugguuccuagaag

SEQ ID NO: 375100 - RNA, 19 nt, Artificial Sequence
  Description of Artificial Sequence: Synthetic oligonucleotide
  Antisense Strand to SEQ ID NO: 375099
cuucuaggaaccaagugac

SEQ ID NO: 375101 - RNA, 19 nt, Artificial Sequence
  Description of Artificial Sequence: Synthetic oligonucleotide
  Sense Strand Starting at position 717 of SEQ ID NO: 318359
gaaagugauuugcaaucua

SEQ ID NO: 375102 - RNA, 19 nt, Artificial Sequence
  Description of Artificial Sequence: Synthetic oligonucleotide
  Antisense Strand to SEQ ID NO: 375101
uagauugcaaaucacuuuc

SEQ ID NO: 375103 - RNA, 19 nt, Artificial Sequence
  Description of Artificial Sequence: Synthetic oligonucleotide
  Sense Strand Starting at position 717 of SEQ ID NO: 318392
aguggucauucuuuauuag

SEQ ID NO: 375104 - RNA, 19 nt, Artificial Sequence
  Description of Artificial Sequence: Synthetic oligonucleotide
  Antisense Strand to SEQ ID NO: 375103
cuaauaaagaaugaccacu

SEQ ID NO: 375105 - RNA, 19 nt, Artificial Sequence
  Description of Artificial Sequence: Synthetic oligonucleotide
  Sense Strand Starting at position 717 of SEQ ID NO: 318399
auucuuuauuaggucuuga

SEQ ID NO: 375106 - RNA, 19 nt, Artificial Sequence
  Description of Artificial Sequence: Synthetic oligonucleotide
  Antisense Strand to SEQ ID NO: 375105
ucaagaccuaauaaagaau

SEQ ID NO: 375107 - RNA, 19 nt, Artificial Sequence
  Description of Artificial Sequence: Synthetic oligonucleotide
  Sense Strand Starting at position 717 of SEQ ID NO: 318404
uuauuaggucuugaaguua

SEQ ID NO: 375108 - RNA, 19 nt, Artificial Sequence
  Description of Artificial Sequence: Synthetic oligonucleotide
  Antisense Strand to SEQ ID NO: 375107
uaacuucaagaccuaauaa

SEQ ID NO: 375109 - RNA, 19 nt, Artificial Sequence
  Description of Artificial Sequence: Synthetic oligonucleotide
  Sense Strand Starting at position 717 of SEQ ID NO: 318476
cuaaaugacuguccuagga

SEQ ID NO: 375110 - RNA, 19 nt, Artificial Sequence
  Description of Artificial Sequence: Synthetic oligonucleotide
  Antisense Strand to SEQ ID NO: 375109
uccuaggacagucauuuag

SEQ ID NO: 375111 - RNA, 19 nt, Artificial Sequence
  Description of Artificial Sequence: Synthetic oligonucleotide
  Sense Strand Starting at position 717 of SEQ ID NO: 318525
gggcaccucccaggaguua

SEQ ID NO: 375112 - RNA, 19 nt, Artificial Sequence
  Description of Artificial Sequence: Synthetic oligonucleotide
  Antisense Strand to SEQ ID NO: 375111
uaacuccugggaggugccc

SEQ ID NO: 375113 - RNA, 19 nt, Artificial Sequence
  Description of Artificial Sequence: Synthetic oligonucleotide
  Sense Strand Starting at position 717 of SEQ ID NO: 318605
guaggauggaucgauguua

SEQ ID NO: 375114 - RNA, 19 nt, Artificial Sequence
  Description of Artificial Sequence: Synthetic oligonucleotide
  Antisense Strand to SEQ ID NO: 375113
uaacaucgauccauccuac

SEQ ID NO: 375115 - RNA, 19 nt, Artificial Sequence
  Description of Artificial Sequence: Synthetic oligonucleotide
  Sense Strand Starting at position 717 of SEQ ID NO: 318628
uggaguucucaaggugauu

SEQ ID NO: 375116 - RNA, 19 nt, Artificial Sequence
  Description of Artificial Sequence: Synthetic oligonucleotide
  Antisense Strand to SEQ ID NO: 375115
aaucaccuugagaacucca

SEQ ID NO: 375117 - RNA, 19 nt, Artificial Sequence
  Description of Artificial Sequence: Synthetic oligonucleotide
  Sense Strand Starting at position 717 of SEQ ID NO: 318845
gcuggaaauuagcugucaa

SEQ ID NO: 375118 - RNA, 19 nt, Artificial Sequence
  Description of Artificial Sequence: Synthetic oligonucleotide
  Antisense Strand to SEQ ID NO: 375117
uugacagcuaauuuccagc

SEQ ID NO: 375119 - RNA, 19 nt, Artificial Sequence
  Description of Artificial Sequence: Synthetic oligonucleotide
  Sense Strand Starting at position 717 of SEQ ID NO: 318890
ucauguucucugggagaga

SEQ ID NO: 375120 - RNA, 19 nt, Artificial Sequence
  Description of Artificial Sequence: Synthetic oligonucleotide
  Antisense Strand to SEQ ID NO: 375119
ucucucccagagaacauga

SEQ ID NO: 375121 - RNA, 19 nt, Artificial Sequence
  Description of Artificial Sequence: Synthetic oligonucleotide
  Sense Strand Starting at position 717 of SEQ ID NO: 318972
aauuaucagugcuuggaau

SEQ ID NO: 375122 - RNA, 19 nt, Artificial Sequence
  Description of Artificial Sequence: Synthetic oligonucleotide
  Antisense Strand to SEQ ID NO: 375121
auuccaagcacugauaauu

SEQ ID NO: 375123 - RNA, 19 nt, Artificial Sequence
  Description of Artificial Sequence: Synthetic oligonucleotide
  Sense Strand Starting at position 717 of SEQ ID NO: 318973
auuaucagugcuuggaaua

SEQ ID NO: 375124 - RNA, 19 nt, Artificial Sequence
  Description of Artificial Sequence: Synthetic oligonucleotide
  Antisense Strand to SEQ ID NO: 375123
uauuccaagcacugauaau

SEQ ID NO: 375125 - RNA, 19 nt, Artificial Sequence
  Description of Artificial Sequence: Synthetic oligonucleotide
  Sense Strand Starting at position 717 of SEQ ID NO: 318974
uuaucagugcuuggaauau

SEQ ID NO: 375126 - RNA, 19 nt, Artificial Sequence
  Description of Artificial Sequence: Synthetic oligonucleotide
  Antisense Strand to SEQ ID NO: 375125
auauuccaagcacugauaa

SEQ ID NO: 375127 - RNA, 19 nt, Artificial Sequence
  Description of Artificial Sequence: Synthetic oligonucleotide
  Sense Strand Starting at position 717 of SEQ ID NO: 319012
auaacuuauggauguuaca

SEQ ID NO: 375128 - RNA, 19 nt, Artificial Sequence
  Description of Artificial Sequence: Synthetic oligonucleotide
  Antisense Strand to SEQ ID NO: 375127
uguaacauccauaaguuau

SEQ ID NO: 375129 - RNA, 19 nt, Artificial Sequence
  Description of Artificial Sequence: Synthetic oligonucleotide
  Sense Strand Starting at position 717 of SEQ ID NO: 319019
auggauguuacagacguuu

SEQ ID NO: 375130 - RNA, 19 nt, Artificial Sequence
  Description of Artificial Sequence: Synthetic oligonucleotide
  Antisense Strand to SEQ ID NO: 375129
aaacgucuguaacauccau

SEQ ID NO: 375131 - RNA, 19 nt, Artificial Sequence
  Description of Artificial Sequence: Synthetic oligonucleotide
  Sense Strand Starting at position 717 of SEQ ID NO: 319021
ggauguuacagacguuuaa

SEQ ID NO: 375132 - RNA, 19 nt, Artificial Sequence
  Description of Artificial Sequence: Synthetic oligonucleotide
  Antisense Strand to SEQ ID NO: 375131
uuaaacgucuguaacaucc

SEQ ID NO: 375133 - RNA, 19 nt, Artificial Sequence
  Description of Artificial Sequence: Synthetic oligonucleotide
  Sense Strand Starting at position 717 of SEQ ID NO: 319128
ugggaagcugccuaaucuu

SEQ ID NO: 375134 - RNA, 19 nt, Artificial Sequence
  Description of Artificial Sequence: Synthetic oligonucleotide
  Antisense Strand to SEQ ID NO: 375133
aagauuaggcagcuuccca

SEQ ID NO: 375135 - RNA, 19 nt, Artificial Sequence
  Description of Artificial Sequence: Synthetic oligonucleotide
  Sense Strand Starting at position 717 of SEQ ID NO: 319146
uugggcucaccagaaguuu

SEQ ID NO: 375136 - RNA, 19 nt, Artificial Sequence
  Description of Artificial Sequence: Synthetic oligonucleotide
  Antisense Strand to SEQ ID NO: 375135
aaacuucuggugagcccaa

SEQ ID NO: 375137 - RNA, 19 nt, Artificial Sequence
  Description of Artificial Sequence: Synthetic oligonucleotide
  Sense Strand Starting at position 717 of SEQ ID NO: 319182
uacggauccucuucucaga

SEQ ID NO: 375138 - RNA, 19 nt, Artificial Sequence
  Description of Artificial Sequence: Synthetic oligonucleotide
  Antisense Strand to SEQ ID NO: 375137
ucugagaagaggauccgua

SEQ ID NO: 375139 - RNA, 19 nt, Artificial Sequence
  Description of Artificial Sequence: Synthetic oligonucleotide
  Sense Strand Starting at position 717 of SEQ ID NO: 319184
cggauccucuucucagaaa

SEQ ID NO: 375140 - RNA, 19 nt, Artificial Sequence
  Description of Artificial Sequence: Synthetic oligonucleotide
  Antisense Strand to SEQ ID NO: 375139
uuucugagaagaggauccg

SEQ ID NO: 375141 - RNA, 19 nt, Artificial Sequence
  Description of Artificial Sequence: Synthetic oligonucleotide
  Sense Strand Starting at position 718 of SEQ ID NO: 315334
ugaaaugguaucugcugaa

SEQ ID NO: 375142 - RNA, 19 nt, Artificial Sequence
  Description of Artificial Sequence: Synthetic oligonucleotide
  Antisense Strand to SEQ ID NO: 375141
uucagcagauaccauuuca

SEQ ID NO: 375143 - RNA, 19 nt, Artificial Sequence
  Description of Artificial Sequence: Synthetic oligonucleotide
  Sense Strand Starting at position 718 of SEQ ID NO: 315338
augguaucugcugaacauc

SEQ ID NO: 375144 - RNA, 19 nt, Artificial Sequence
  Description of Artificial Sequence: Synthetic oligonucleotide
  Antisense Strand to SEQ ID NO: 375143
gauguucagcagauaccau

SEQ ID NO: 375145 - RNA, 19 nt, Artificial Sequence
  Description of Artificial Sequence: Synthetic oligonucleotide
  Sense Strand Starting at position 718 of SEQ ID NO: 315341
guaucugcugaacaucuua

SEQ ID NO: 375146 - RNA, 19 nt, Artificial Sequence
  Description of Artificial Sequence: Synthetic oligonucleotide
  Antisense Strand to SEQ ID NO: 375145
uaagauguucagcagauac

SEQ ID NO: 375147 - RNA, 19 nt, Artificial Sequence
  Description of Artificial Sequence: Synthetic oligonucleotide
  Sense Strand Starting at position 718 of SEQ ID NO: 315384
acaaguuacuuucuaggga

SEQ ID NO: 375148 - RNA, 19 nt, Artificial Sequence
  Description of Artificial Sequence: Synthetic oligonucleotide
  Antisense Strand to SEQ ID NO: 375147
ucccuagaaaguaacuugu

SEQ ID NO: 375149 - RNA, 19 nt, Artificial Sequence
  Description of Artificial Sequence: Synthetic oligonucleotide
  Sense Strand Starting at position 718 of SEQ ID NO: 315516
guuaaugggcaauaacuca

SEQ ID NO: 375150 - RNA, 19 nt, Artificial Sequence
  Description of Artificial Sequence: Synthetic oligonucleotide
  Antisense Strand to SEQ ID NO: 375149
ugaguuauugcccauuaac

SEQ ID NO: 375151 - RNA, 19 nt, Artificial Sequence
  Description of Artificial Sequence: Synthetic oligonucleotide
  Sense Strand Starting at position 718 of SEQ ID NO: 315523
ggcaauaacucagugaaca

SEQ ID NO: 375152 - RNA, 19 nt, Artificial Sequence
  Description of Artificial Sequence: Synthetic oligonucleotide
  Antisense Strand to SEQ ID NO: 375151
uguucacugaguuauugcc

SEQ ID NO: 375153 - RNA, 19 nt, Artificial Sequence
  Description of Artificial Sequence: Synthetic oligonucleotide
  Sense Strand Starting at position 718 of SEQ ID NO: 315524
gcaauaacucagugaacaa

SEQ ID NO: 375154 - RNA, 19 nt, Artificial Sequence
  Description of Artificial Sequence: Synthetic oligonucleotide
  Antisense Strand to SEQ ID NO: 375153
uuguucacugaguuauugc

SEQ ID NO: 375155 - RNA, 19 nt, Artificial Sequence
  Description of Artificial Sequence: Synthetic oligonucleotide
  Sense Strand Starting at position 718 of SEQ ID NO: 315571
ucauucugagaguguauaa

SEQ ID NO: 375156 - RNA, 19 nt, Artificial Sequence
  Description of Artificial Sequence: Synthetic oligonucleotide
  Antisense Strand to SEQ ID NO: 375155
uuauacacucucagaauga

SEQ ID NO: 375157 - RNA, 19 nt, Artificial Sequence
  Description of Artificial Sequence: Synthetic oligonucleotide
  Sense Strand Starting at position 718 of SEQ ID NO: 315580
gaguguauaagggaagcau

SEQ ID NO: 375158 - RNA, 19 nt, Artificial Sequence
  Description of Artificial Sequence: Synthetic oligonucleotide
  Antisense Strand to SEQ ID NO: 375157
augcuucccuuauacacuc

SEQ ID NO: 375159 - RNA, 19 nt, Artificial Sequence
  Description of Artificial Sequence: Synthetic oligonucleotide
  Sense Strand Starting at position 718 of SEQ ID NO: 315782
gagaaugaaucacaaagag

SEQ ID NO: 375160 - RNA, 19 nt, Artificial Sequence
  Description of Artificial Sequence: Synthetic oligonucleotide
  Antisense Strand to SEQ ID NO: 375159
cucuuugugauucauucuc

SEQ ID NO: 375161 - RNA, 19 nt, Artificial Sequence
  Description of Artificial Sequence: Synthetic oligonucleotide
  Sense Strand Starting at position 718 of SEQ ID NO: 315924
agaggugaguaauuaagcu

SEQ ID NO: 375162 - RNA, 19 nt, Artificial Sequence
  Description of Artificial Sequence: Synthetic oligonucleotide
  Antisense Strand to SEQ ID NO: 375161
agcuuaauuacucaccucu

SEQ ID NO: 375163 - RNA, 19 nt, Artificial Sequence
  Description of Artificial Sequence: Synthetic oligonucleotide
  Sense Strand Starting at position 718 of SEQ ID NO: 315939
agcuguuaugacgacauaa

SEQ ID NO: 375164 - RNA, 19 nt, Artificial Sequence
  Description of Artificial Sequence: Synthetic oligonucleotide
  Antisense Strand to SEQ ID NO: 375163
uuaugucgucauaacagcu

SEQ ID NO: 375165 - RNA, 19 nt, Artificial Sequence
  Description of Artificial Sequence: Synthetic oligonucleotide
  Sense Strand Starting at position 718 of SEQ ID NO: 316282
augauuaagcuccagaggu

SEQ ID NO: 375166 - RNA, 19 nt, Artificial Sequence
  Description of Artificial Sequence: Synthetic oligonucleotide
  Antisense Strand to SEQ ID NO: 375165
accucuggagcuuaaucau

SEQ ID NO: 375167 - RNA, 19 nt, Artificial Sequence
  Description of Artificial Sequence: Synthetic oligonucleotide
  Sense Strand Starting at position 718 of SEQ ID NO: 316313
aguugauuugcuugaaugc

SEQ ID NO: 375168 - RNA, 19 nt, Artificial Sequence
  Description of Artificial Sequence: Synthetic oligonucleotide
  Antisense Strand to SEQ ID NO: 375167
gcauucaagcaaaucaacu

SEQ ID NO: 375169 - RNA, 19 nt, Artificial Sequence
  Description of Artificial Sequence: Synthetic oligonucleotide
  Sense Strand Starting at position 718 of SEQ ID NO: 316376
aucaccuaacagugaaagu

SEQ ID NO: 375170 - RNA, 19 nt, Artificial Sequence
  Description of Artificial Sequence: Synthetic oligonucleotide
  Antisense Strand to SEQ ID NO: 375169
acuuucacuguuaggugau

SEQ ID NO: 375171 - RNA, 19 nt, Artificial Sequence
  Description of Artificial Sequence: Synthetic oligonucleotide
  Sense Strand Starting at position 718 of SEQ ID NO: 316415
ggaacuauacucuguuuag

SEQ ID NO: 375172 - RNA, 19 nt, Artificial Sequence
  Description of Artificial Sequence: Synthetic oligonucleotide
  Antisense Strand to SEQ ID NO: 375171
cuaaacagaguauaguucc

SEQ ID NO: 375173 - RNA, 19 nt, Artificial Sequence
  Description of Artificial Sequence: Synthetic oligonucleotide
  Sense Strand Starting at position 718 of SEQ ID NO: 316655
caguguuuacaaugggaga

SEQ ID NO: 375174 - RNA, 19 nt, Artificial Sequence
  Description of Artificial Sequence: Synthetic oligonucleotide
  Antisense Strand to SEQ ID NO: 375173
ucucccauuguaaacacug

SEQ ID NO: 375175 - RNA, 19 nt, Artificial Sequence
  Description of Artificial Sequence: Synthetic oligonucleotide
  Sense Strand Starting at position 718 of SEQ ID NO: 316868
caaggauauuggguuagca

SEQ ID NO: 375176 - RNA, 19 nt, Artificial Sequence
  Description of Artificial Sequence: Synthetic oligonucleotide
  Antisense Strand to SEQ ID NO: 375175
ugcuaacccaauauccuug

SEQ ID NO: 375177 - RNA, 19 nt, Artificial Sequence
  Description of Artificial Sequence: Synthetic oligonucleotide
  Sense Strand Starting at position 718 of SEQ ID NO: 316870
aggauauuggguuagcauu

SEQ ID NO: 375178 - RNA, 19 nt, Artificial Sequence
  Description of Artificial Sequence: Synthetic oligonucleotide
  Antisense Strand to SEQ ID NO: 375177
aaugcuaacccaauauccu

SEQ ID NO: 375179 - RNA, 19 nt, Artificial Sequence
  Description of Artificial Sequence: Synthetic oligonucleotide
  Sense Strand Starting at position 718 of SEQ ID NO: 316958
acagcugaagcugauuaaa

SEQ ID NO: 375180 - RNA, 19 nt, Artificial Sequence
  Description of Artificial Sequence: Synthetic oligonucleotide
  Antisense Strand to SEQ ID NO: 375179
uuuaaucagcuucagcugu

SEQ ID NO: 375181 - RNA, 19 nt, Artificial Sequence
  Description of Artificial Sequence: Synthetic oligonucleotide
  Sense Strand Starting at position 718 of SEQ ID NO: 316970
gauuaaagccagugagaag

SEQ ID NO: 375182 - RNA, 19 nt, Artificial Sequence
  Description of Artificial Sequence: Synthetic oligonucleotide
  Antisense Strand to SEQ ID NO: 375181
cuucucacuggcuuuaauc

SEQ ID NO: 375183 - RNA, 19 nt, Artificial Sequence
  Description of Artificial Sequence: Synthetic oligonucleotide
  Sense Strand Starting at position 718 of SEQ ID NO: 316971
auuaaagccagugagaagu

SEQ ID NO: 375184 - RNA, 19 nt, Artificial Sequence
  Description of Artificial Sequence: Synthetic oligonucleotide
  Antisense Strand to SEQ ID NO: 375183
acuucucacuggcuuuaau

SEQ ID NO: 375185 - RNA, 19 nt, Artificial Sequence
  Description of Artificial Sequence: Synthetic oligonucleotide
  Sense Strand Starting at position 718 of SEQ ID NO: 317082
cgggauuauuuccagaaua

SEQ ID NO: 375186 - RNA, 19 nt, Artificial Sequence
  Description of Artificial Sequence: Synthetic oligonucleotide
  Antisense Strand to SEQ ID NO: 375185
uauucuggaaauaaucccg

SEQ ID NO: 375187 - RNA, 19 nt, Artificial Sequence
  Description of Artificial Sequence: Synthetic oligonucleotide
  Sense Strand Starting at position 718 of SEQ ID NO: 317261
ugauaaggcccuggaaacu

SEQ ID NO: 375188 - RNA, 19 nt, Artificial Sequence
  Description of Artificial Sequence: Synthetic oligonucleotide
  Antisense Strand to SEQ ID NO: 375187
aguuuccagggccuuauca

SEQ ID NO: 375189 - RNA, 19 nt, Artificial Sequence
  Description of Artificial Sequence: Synthetic oligonucleotide
  Sense Strand Starting at position 718 of SEQ ID NO: 317332
agcagaccuguuuaaucca

SEQ ID NO: 375190 - RNA, 19 nt, Artificial Sequence
  Description of Artificial Sequence: Synthetic oligonucleotide
  Antisense Strand to SEQ ID NO: 375189
uggauuaaacaggucugcu

SEQ ID NO: 375191 - RNA, 19 nt, Artificial Sequence
  Description of Artificial Sequence: Synthetic oligonucleotide
  Sense Strand Starting at position 718 of SEQ ID NO: 317335
agaccuguuuaauccagua

SEQ ID NO: 375192 - RNA, 19 nt, Artificial Sequence
  Description of Artificial Sequence: Synthetic oligonucleotide
  Antisense Strand to SEQ ID NO: 375191
uacuggauuaaacaggucu

SEQ ID NO: 375193 - RNA, 19 nt, Artificial Sequence
  Description of Artificial Sequence: Synthetic oligonucleotide
  Sense Strand Starting at position 718 of SEQ ID NO: 317340
uguuuaauccaguaccuac

SEQ ID NO: 375194 - RNA, 19 nt, Artificial Sequence
  Description of Artificial Sequence: Synthetic oligonucleotide
  Antisense Strand to SEQ ID NO: 375193
guagguacuggauuaaaca

SEQ ID NO: 375195 - RNA, 19 nt, Artificial Sequence
  Description of Artificial Sequence: Synthetic oligonucleotide
  Sense Strand Starting at position 718 of SEQ ID NO: 317510
gacugcacauuauuagaga

SEQ ID NO: 375196 - RNA, 19 nt, Artificial Sequence
  Description of Artificial Sequence: Synthetic oligonucleotide
  Antisense Strand to SEQ ID NO: 375195
ucucuaauaaugugcaguc

SEQ ID NO: 375197 - RNA, 19 nt, Artificial Sequence
  Description of Artificial Sequence: Synthetic oligonucleotide
  Sense Strand Starting at position 718 of SEQ ID NO: 317559
gugaauugucaacacuuac

SEQ ID NO: 375198 - RNA, 19 nt, Artificial Sequence
  Description of Artificial Sequence: Synthetic oligonucleotide
  Antisense Strand to SEQ ID NO: 375197
guaaguguugacaauucac

SEQ ID NO: 375199 - RNA, 19 nt, Artificial Sequence
  Description of Artificial Sequence: Synthetic oligonucleotide
  Sense Strand Starting at position 718 of SEQ ID NO: 317702
ggagcuugauaauugaaua

SEQ ID NO: 375200 - RNA, 19 nt, Artificial Sequence
  Description of Artificial Sequence: Synthetic oligonucleotide
  Antisense Strand to SEQ ID NO: 375199
uauucaauuaucaagcucc

SEQ ID NO: 375201 - RNA, 19 nt, Artificial Sequence
  Description of Artificial Sequence: Synthetic oligonucleotide
  Sense Strand Starting at position 718 of SEQ ID NO: 317879
ccauaaacuguguauucuu

SEQ ID NO: 375202 - RNA, 19 nt, Artificial Sequence
  Description of Artificial Sequence: Synthetic oligonucleotide
  Antisense Strand to SEQ ID NO: 375201
aagaauacacaguuuaugg

SEQ ID NO: 375203 - RNA, 19 nt, Artificial Sequence
  Description of Artificial Sequence: Synthetic oligonucleotide
  Sense Strand Starting at position 718 of SEQ ID NO: 317918
uucugaacacauugguaua

SEQ ID NO: 375204 - RNA, 19 nt, Artificial Sequence
  Description of Artificial Sequence: Synthetic oligonucleotide
  Antisense Strand to SEQ ID NO: 375203
uauaccaauguguucagaa

SEQ ID NO: 375205 - RNA, 19 nt, Artificial Sequence
  Description of Artificial Sequence: Synthetic oligonucleotide
  Sense Strand Starting at position 718 of SEQ ID NO: 318046
aaagaugcccuacagaguu

SEQ ID NO: 375206 - RNA, 19 nt, Artificial Sequence
  Description of Artificial Sequence: Synthetic oligonucleotide
  Antisense Strand to SEQ ID NO: 375205
aacucuguagggcaucuuu

SEQ ID NO: 375207 - RNA, 19 nt, Artificial Sequence
  Description of Artificial Sequence: Synthetic oligonucleotide
  Sense Strand Starting at position 718 of SEQ ID NO: 318281
ccucuaaugcuaggaaaua

SEQ ID NO: 375208 - RNA, 19 nt, Artificial Sequence
  Description of Artificial Sequence: Synthetic oligonucleotide
  Antisense Strand to SEQ ID NO: 375207
uauuuccuagcauuagagg

SEQ ID NO: 375209 - RNA, 19 nt, Artificial Sequence
  Description of Artificial Sequence: Synthetic oligonucleotide
  Sense Strand Starting at position 718 of SEQ ID NO: 318307
aggagucucggccaaacua

SEQ ID NO: 375210 - RNA, 19 nt, Artificial Sequence
  Description of Artificial Sequence: Synthetic oligonucleotide
  Antisense Strand to SEQ ID NO: 375209
uaguuuggccgagacuccu

SEQ ID NO: 375211 - RNA, 19 nt, Artificial Sequence
  Description of Artificial Sequence: Synthetic oligonucleotide
  Sense Strand Starting at position 718 of SEQ ID NO: 318560
ggacuucuggucugagauc

SEQ ID NO: 375212 - RNA, 19 nt, Artificial Sequence
  Description of Artificial Sequence: Synthetic oligonucleotide
  Antisense Strand to SEQ ID NO: 375211
gaucucagaccagaagucc

SEQ ID NO: 375213 - RNA, 19 nt, Artificial Sequence
  Description of Artificial Sequence: Synthetic oligonucleotide
  Sense Strand Starting at position 718 of SEQ ID NO: 318642
gaacuaugaggugggaagu

SEQ ID NO: 375214 - RNA, 19 nt, Artificial Sequence
  Description of Artificial Sequence: Synthetic oligonucleotide
  Antisense Strand to SEQ ID NO: 375213
acuucccaccucauaguuc

SEQ ID NO: 375215 - RNA, 19 nt, Artificial Sequence
  Description of Artificial Sequence: Synthetic oligonucleotide
  Sense Strand Starting at position 718 of SEQ ID NO: 318769
gggaaaggucacugauucu

SEQ ID NO: 375216 - RNA, 19 nt, Artificial Sequence
  Description of Artificial Sequence: Synthetic oligonucleotide
  Antisense Strand to SEQ ID NO: 375215
agaaucagugaccuuuccc

SEQ ID NO: 375217 - RNA, 19 nt, Artificial Sequence
  Description of Artificial Sequence: Synthetic oligonucleotide
  Sense Strand Starting at position 718 of SEQ ID NO: 319202
gacguuuauuuauccaggu

SEQ ID NO: 375218 - RNA, 19 nt, Artificial Sequence
  Description of Artificial Sequence: Synthetic oligonucleotide
  Antisense Strand to SEQ ID NO: 375217
accuggauaaauaaacguc

SEQ ID NO: 375219 - RNA, 19 nt, Artificial Sequence
  Description of Artificial Sequence: Synthetic oligonucleotide
  Sense Strand Starting at position 718 of SEQ ID NO: 319203
acguuuauuuauccagguu

SEQ ID NO: 375220 - RNA, 19 nt, Artificial Sequence
  Description of Artificial Sequence: Synthetic oligonucleotide
  Antisense Strand to SEQ ID NO: 375219
aaccuggauaaauaaacgu

SEQ ID NO: 375221 - RNA, 19 nt, Artificial Sequence
  Description of Artificial Sequence: Synthetic oligonucleotide
  Sense Strand Starting at position 719 of SEQ ID NO: 315270
acaccucugucacuuggaa

SEQ ID NO: 375222 - RNA, 19 nt, Artificial Sequence
  Description of Artificial Sequence: Synthetic oligonucleotide
  Antisense Strand to SEQ ID NO: 375221
uuccaagugacagaggugu

SEQ ID NO: 375223 - RNA, 19 nt, Artificial Sequence
  Description of Artificial Sequence: Synthetic oligonucleotide
  Sense Strand Starting at position 719 of SEQ ID NO: 315535
ucaagcuaucuccagguau

SEQ ID NO: 375224 - RNA, 19 nt, Artificial Sequence
  Description of Artificial Sequence: Synthetic oligonucleotide
  Antisense Strand to SEQ ID NO: 375223
auaccuggagauagcuuga

SEQ ID NO: 375225 - RNA, 19 nt, Artificial Sequence
  Description of Artificial Sequence: Synthetic oligonucleotide
  Sense Strand Starting at position 719 of SEQ ID NO: 315566
ccaagaugauccugauuua

SEQ ID NO: 375226 - RNA, 19 nt, Artificial Sequence
  Description of Artificial Sequence: Synthetic oligonucleotide
  Antisense Strand to SEQ ID NO: 375225
uaaaucaggaucaucuugg

SEQ ID NO: 375227 - RNA, 19 nt, Artificial Sequence
  Description of Artificial Sequence: Synthetic oligonucleotide
  Sense Strand Starting at position 719 of SEQ ID NO: 315629
aagucuuucugagcauaag

SEQ ID NO: 375228 - RNA, 19 nt, Artificial Sequence
  Description of Artificial Sequence: Synthetic oligonucleotide
  Antisense Strand to SEQ ID NO: 375227
cuuaugcucagaaagacuu

SEQ ID NO: 375229 - RNA, 19 nt, Artificial Sequence
  Description of Artificial Sequence: Synthetic oligonucleotide
  Sense Strand Starting at position 719 of SEQ ID NO: 315632
ucuuucugagcauaagauu

SEQ ID NO: 375230 - RNA, 19 nt, Artificial Sequence
  Description of Artificial Sequence: Synthetic oligonucleotide
  Antisense Strand to SEQ ID NO: 375229
aaucuuaugcucagaaaga

SEQ ID NO: 375231 - RNA, 19 nt, Artificial Sequence
  Description of Artificial Sequence: Synthetic oligonucleotide
  Sense Strand Starting at position 719 of SEQ ID NO: 315725
uguggacacuucuuagaug

SEQ ID NO: 375232 - RNA, 19 nt, Artificial Sequence
  Description of Artificial Sequence: Synthetic oligonucleotide
  Antisense Strand to SEQ ID NO: 375231
caucuaagaaguguccaca

SEQ ID NO: 375233 - RNA, 19 nt, Artificial Sequence
  Description of Artificial Sequence: Synthetic oligonucleotide
  Sense Strand Starting at position 719 of SEQ ID NO: 315968
gugcaaauuucugacaaca

SEQ ID NO: 375234 - RNA, 19 nt, Artificial Sequence
  Description of Artificial Sequence: Synthetic oligonucleotide
  Antisense Strand to SEQ ID NO: 375233
uguugucagaaauuugcac

SEQ ID NO: 375235 - RNA, 19 nt, Artificial Sequence
  Description of Artificial Sequence: Synthetic oligonucleotide
  Sense Strand Starting at position 719 of SEQ ID NO: 315970
gcaaauuucugacaacagc

SEQ ID NO: 375236 - RNA, 19 nt, Artificial Sequence
  Description of Artificial Sequence: Synthetic oligonucleotide
  Antisense Strand to SEQ ID NO: 375235
gcuguugucagaaauuugc

SEQ ID NO: 375237 - RNA, 19 nt, Artificial Sequence
  Description of Artificial Sequence: Synthetic oligonucleotide
  Sense Strand Starting at position 719 of SEQ ID NO: 316276
ccaagcaaugaggguguua

SEQ ID NO: 375238 - RNA, 19 nt, Artificial Sequence
  Description of Artificial Sequence: Synthetic oligonucleotide
  Antisense Strand to SEQ ID NO: 375237
uaacacccucauugcuugg

SEQ ID NO: 375239 - RNA, 19 nt, Artificial Sequence
  Description of Artificial Sequence: Synthetic oligonucleotide
  Sense Strand Starting at position 719 of SEQ ID NO: 316278
aagcaaugaggguguuaca

SEQ ID NO: 375240 - RNA, 19 nt, Artificial Sequence
  Description of Artificial Sequence: Synthetic oligonucleotide
  Antisense Strand to SEQ ID NO: 375239
uguaacacccucauugcuu

SEQ ID NO: 375241 - RNA, 19 nt, Artificial Sequence
  Description of Artificial Sequence: Synthetic oligonucleotide
  Sense Strand Starting at position 719 of SEQ ID NO: 316376
ucgcauuucuccucguaaa

SEQ ID NO: 375242 - RNA, 19 nt, Artificial Sequence
  Description of Artificial Sequence: Synthetic oligonucleotide
  Antisense Strand to SEQ ID NO: 375241
uuuacgaggagaaaugcga

SEQ ID NO: 375243 - RNA, 19 nt, Artificial Sequence
  Description of Artificial Sequence: Synthetic oligonucleotide
  Sense Strand Starting at position 719 of SEQ ID NO: 316377
cgcauuucuccucguaaau

SEQ ID NO: 375244 - RNA, 19 nt, Artificial Sequence
  Description of Artificial Sequence: Synthetic oligonucleotide
  Antisense Strand to SEQ ID NO: 375243
auuuacgaggagaaaugcg

SEQ ID NO: 375245 - RNA, 19 nt, Artificial Sequence
  Description of Artificial Sequence: Synthetic oligonucleotide
  Sense Strand Starting at position 719 of SEQ ID NO: 316394
auggcucucucaguaagau

SEQ ID NO: 375246 - RNA, 19 nt, Artificial Sequence
  Description of Artificial Sequence: Synthetic oligonucleotide
  Antisense Strand to SEQ ID NO: 375245
aucuuacugagagagccau

SEQ ID NO: 375247 - RNA, 19 nt, Artificial Sequence
  Description of Artificial Sequence: Synthetic oligonucleotide
  Sense Strand Starting at position 719 of SEQ ID NO: 316395
uggcucucucaguaagaua

SEQ ID NO: 375248 - RNA, 19 nt, Artificial Sequence
  Description of Artificial Sequence: Synthetic oligonucleotide
  Antisense Strand to SEQ ID NO: 375247
uaucuuacugagagagcca

SEQ ID NO: 375249 - RNA, 19 nt, Artificial Sequence
  Description of Artificial Sequence: Synthetic oligonucleotide
  Sense Strand Starting at position 719 of SEQ ID NO: 316408
aagauaaaugagugucaac

SEQ ID NO: 375250 - RNA, 19 nt, Artificial Sequence
  Description of Artificial Sequence: Synthetic oligonucleotide
  Antisense Strand to SEQ ID NO: 375249
guugacacucauuuaucuu

SEQ ID NO: 375251 - RNA, 19 nt, Artificial Sequence
  Description of Artificial Sequence: Synthetic oligonucleotide
  Sense Strand Starting at position 719 of SEQ ID NO: 316470
acuacuaaguugucuuacu

SEQ ID NO: 375252 - RNA, 19 nt, Artificial Sequence
  Description of Artificial Sequence: Synthetic oligonucleotide
  Antisense Strand to SEQ ID NO: 375251
aguaagacaacuuaguagu

SEQ ID NO: 375253 - RNA, 19 nt, Artificial Sequence
  Description of Artificial Sequence: Synthetic oligonucleotide
  Sense Strand Starting at position 719 of SEQ ID NO: 316475
uaaguugucuuacugugaa

SEQ ID NO: 375254 - RNA, 19 nt, Artificial Sequence
  Description of Artificial Sequence: Synthetic oligonucleotide
  Antisense Strand to SEQ ID NO: 375253
uucacaguaagacaacuua

SEQ ID NO: 375255 - RNA, 19 nt, Artificial Sequence
  Description of Artificial Sequence: Synthetic oligonucleotide
  Sense Strand Starting at position 719 of SEQ ID NO: 316485
uacugugaagucugaugau

SEQ ID NO: 375256 - RNA, 19 nt, Artificial Sequence
  Description of Artificial Sequence: Synthetic oligonucleotide
  Antisense Strand to SEQ ID NO: 375255
aucaucagacuucacagua

SEQ ID NO: 375257 - RNA, 19 nt, Artificial Sequence
  Description of Artificial Sequence: Synthetic oligonucleotide
  Sense Strand Starting at position 719 of SEQ ID NO: 316491
gaagucugaugauaaugaa

SEQ ID NO: 375258 - RNA, 19 nt, Artificial Sequence
  Description of Artificial Sequence: Synthetic oligonucleotide
  Antisense Strand to SEQ ID NO: 375257
uucauuaucaucagacuuc

SEQ ID NO: 375259 - RNA, 19 nt, Artificial Sequence
  Description of Artificial Sequence: Synthetic oligonucleotide
  Sense Strand Starting at position 719 of SEQ ID NO: 316594
cuuguuaacucucugcaag

SEQ ID NO: 375260 - RNA, 19 nt, Artificial Sequence
  Description of Artificial Sequence: Synthetic oligonucleotide
  Antisense Strand to SEQ ID NO: 375259
cuugcagagaguuaacaag

SEQ ID NO: 375261 - RNA, 19 nt, Artificial Sequence
  Description of Artificial Sequence: Synthetic oligonucleotide
  Sense Strand Starting at position 719 of SEQ ID NO: 316597
guuaacucucugcaaguuu

SEQ ID NO: 375262 - RNA, 19 nt, Artificial Sequence
  Description of Artificial Sequence: Synthetic oligonucleotide
  Antisense Strand to SEQ ID NO: 375261
aaacuugcagagaguuaac

SEQ ID NO: 375263 - RNA, 19 nt, Artificial Sequence
  Description of Artificial Sequence: Synthetic oligonucleotide
  Sense Strand Starting at position 719 of SEQ ID NO: 316639
cuuugaggcccucauaauc

SEQ ID NO: 375264 - RNA, 19 nt, Artificial Sequence
  Description of Artificial Sequence: Synthetic oligonucleotide
  Antisense Strand to SEQ ID NO: 375263
gauuaugagggccucaaag

SEQ ID NO: 375265 - RNA, 19 nt, Artificial Sequence
  Description of Artificial Sequence: Synthetic oligonucleotide
  Sense Strand Starting at position 719 of SEQ ID NO: 316921
gcucgcucugccucgcaaa

SEQ ID NO: 375266 - RNA, 19 nt, Artificial Sequence
  Description of Artificial Sequence: Synthetic oligonucleotide
  Antisense Strand to SEQ ID NO: 375265
uuugcgaggcagagcgagc

SEQ ID NO: 375267 - RNA, 19 nt, Artificial Sequence
  Description of Artificial Sequence: Synthetic oligonucleotide
  Sense Strand Starting at position 719 of SEQ ID NO: 316949
cgaacagccgaguaacuuu

SEQ ID NO: 375268 - RNA, 19 nt, Artificial Sequence
  Description of Artificial Sequence: Synthetic oligonucleotide
  Antisense Strand to SEQ ID NO: 375267
aaaguuacucggcuguucg

SEQ ID NO: 375269 - RNA, 19 nt, Artificial Sequence
  Description of Artificial Sequence: Synthetic oligonucleotide
  Sense Strand Starting at position 719 of SEQ ID NO: 317384
cagucuuaucccgaugccu

SEQ ID NO: 375270 - RNA, 19 nt, Artificial Sequence
  Description of Artificial Sequence: Synthetic oligonucleotide
  Antisense Strand to SEQ ID NO: 375269
aggcaucgggauaagacug

SEQ ID NO: 375271 - RNA, 19 nt, Artificial Sequence
  Description of Artificial Sequence: Synthetic oligonucleotide
  Sense Strand Starting at position 719 of SEQ ID NO: 317426
cccgaucgccaagaguauu

SEQ ID NO: 375272 - RNA, 19 nt, Artificial Sequence
  Description of Artificial Sequence: Synthetic oligonucleotide
  Antisense Strand to SEQ ID NO: 375271
aauacucuuggcgaucggg

SEQ ID NO: 375273 - RNA, 19 nt, Artificial Sequence
  Description of Artificial Sequence: Synthetic oligonucleotide
  Sense Strand Starting at position 719 of SEQ ID NO: 317609
ggaaauuccuuagcucucu

SEQ ID NO: 375274 - RNA, 19 nt, Artificial Sequence
  Description of Artificial Sequence: Synthetic oligonucleotide
  Antisense Strand to SEQ ID NO: 375273
agagagcuaaggaauuucc

SEQ ID NO: 375275 - RNA, 19 nt, Artificial Sequence
  Description of Artificial Sequence: Synthetic oligonucleotide
  Sense Strand Starting at position 719 of SEQ ID NO: 317774
ugcagauucugcucccaca

SEQ ID NO: 375276 - RNA, 19 nt, Artificial Sequence
  Description of Artificial Sequence: Synthetic oligonucleotide
  Antisense Strand to SEQ ID NO: 375275
ugugggagcagaaucugca

SEQ ID NO: 375277 - RNA, 19 nt, Artificial Sequence
  Description of Artificial Sequence: Synthetic oligonucleotide
  Sense Strand Starting at position 719 of SEQ ID NO: 318108
cauaaaucggaucauguca

SEQ ID NO: 375278 - RNA, 19 nt, Artificial Sequence
  Description of Artificial Sequence: Synthetic oligonucleotide
  Antisense Strand to SEQ ID NO: 375277
ugacaugauccgauuuaug

SEQ ID NO: 375279 - RNA, 19 nt, Artificial Sequence
  Description of Artificial Sequence: Synthetic oligonucleotide
  Sense Strand Starting at position 719 of SEQ ID NO: 318146
augguuucucauugcuuaa

SEQ ID NO: 375280 - RNA, 19 nt, Artificial Sequence
  Description of Artificial Sequence: Synthetic oligonucleotide
  Antisense Strand to SEQ ID NO: 375279
uuaagcaaugagaaaccau

SEQ ID NO: 375281 - RNA, 19 nt, Artificial Sequence
  Description of Artificial Sequence: Synthetic oligonucleotide
  Sense Strand Starting at position 719 of SEQ ID NO: 318433
gagguugagccggaaggau

SEQ ID NO: 375282 - RNA, 19 nt, Artificial Sequence
  Description of Artificial Sequence: Synthetic oligonucleotide
  Antisense Strand to SEQ ID NO: 375281
auccuuccggcucaaccuc

SEQ ID NO: 375283 - RNA, 19 nt, Artificial Sequence
  Description of Artificial Sequence: Synthetic oligonucleotide
  Sense Strand Starting at position 719 of SEQ ID NO: 318448
ggauccuuugagcauaguu

SEQ ID NO: 375284 - RNA, 19 nt, Artificial Sequence
  Description of Artificial Sequence: Synthetic oligonucleotide
  Antisense Strand to SEQ ID NO: 375283
aacuaugcucaaaggaucc

SEQ ID NO: 375285 - RNA, 19 nt, Artificial Sequence
  Description of Artificial Sequence: Synthetic oligonucleotide
  Sense Strand Starting at position 719 of SEQ ID NO: 318536
ugguccuucccaggcaaua

SEQ ID NO: 375286 - RNA, 19 nt, Artificial Sequence
  Description of Artificial Sequence: Synthetic oligonucleotide
  Antisense Strand to SEQ ID NO: 375285
uauugccugggaaggacca

SEQ ID NO: 375287 - RNA, 19 nt, Artificial Sequence
  Description of Artificial Sequence: Synthetic oligonucleotide
  Sense Strand Starting at position 719 of SEQ ID NO: 318601
guuuaacuguucuugacuu

SEQ ID NO: 375288 - RNA, 19 nt, Artificial Sequence
  Description of Artificial Sequence: Synthetic oligonucleotide
  Antisense Strand to SEQ ID NO: 375287
aagucaagaacaguuaaac

SEQ ID NO: 375289 - RNA, 19 nt, Artificial Sequence
  Description of Artificial Sequence: Synthetic oligonucleotide
  Sense Strand Starting at position 719 of SEQ ID NO: 318685
gagaucuuuccauguuaug

SEQ ID NO: 375290 - RNA, 19 nt, Artificial Sequence
  Description of Artificial Sequence: Synthetic oligonucleotide
  Antisense Strand to SEQ ID NO: 375289
cauaacauggaaagaucuc

SEQ ID NO: 375291 - RNA, 19 nt, Artificial Sequence
  Description of Artificial Sequence: Synthetic oligonucleotide
  Sense Strand Starting at position 719 of SEQ ID NO: 318694
ccauguuauguauguauag

SEQ ID NO: 375292 - RNA, 19 nt, Artificial Sequence
  Description of Artificial Sequence: Synthetic oligonucleotide
  Antisense Strand to SEQ ID NO: 375291
cuauacauacauaacaugg

SEQ ID NO: 375293 - RNA, 19 nt, Artificial Sequence
  Description of Artificial Sequence: Synthetic oligonucleotide
  Sense Strand Starting at position 719 of SEQ ID NO: 318696
auguuauguauguauagcu

SEQ ID NO: 375294 - RNA, 19 nt, Artificial Sequence
  Description of Artificial Sequence: Synthetic oligonucleotide
  Antisense Strand to SEQ ID NO: 375293
agcuauacauacauaacau

SEQ ID NO: 375295 - RNA, 19 nt, Artificial Sequence
  Description of Artificial Sequence: Synthetic oligonucleotide
  Sense Strand Starting at position 719 of SEQ ID NO: 318758
aaugaaugagcaugguaua

SEQ ID NO: 375296 - RNA, 19 nt, Artificial Sequence
  Description of Artificial Sequence: Synthetic oligonucleotide
  Antisense Strand to SEQ ID NO: 375295
uauaccaugcucauucauu

SEQ ID NO: 375297 - RNA, 19 nt, Artificial Sequence
  Description of Artificial Sequence: Synthetic oligonucleotide
  Sense Strand Starting at position 719 of SEQ ID NO: 318759
augaaugagcaugguauau

SEQ ID NO: 375298 - RNA, 19 nt, Artificial Sequence
  Description of Artificial Sequence: Synthetic oligonucleotide
  Antisense Strand to SEQ ID NO: 375297
auauaccaugcucauucau

SEQ ID NO: 375299 - RNA, 19 nt, Artificial Sequence
  Description of Artificial Sequence: Synthetic oligonucleotide
  Sense Strand Starting at position 719 of SEQ ID NO: 318846
cagugucuugaauauugca

SEQ ID NO: 375300 - RNA, 19 nt, Artificial Sequence
  Description of Artificial Sequence: Synthetic oligonucleotide
  Antisense Strand to SEQ ID NO: 375299
ugcaauauucaagacacug

SEQ ID NO: 375301 - RNA, 19 nt, Artificial Sequence
  Description of Artificial Sequence: Synthetic oligonucleotide
  Sense Strand Starting at position 720 of SEQ ID NO: 315343
acgagagucuguccaagaa

SEQ ID NO: 375302 - RNA, 19 nt, Artificial Sequence
  Description of Artificial Sequence: Synthetic oligonucleotide
  Antisense Strand to SEQ ID NO: 375301
uucuuggacagacucucgu

SEQ ID NO: 375303 - RNA, 19 nt, Artificial Sequence
  Description of Artificial Sequence: Synthetic oligonucleotide
  Sense Strand Starting at position 720 of SEQ ID NO: 315721
auaccuggagcugguuaaa

SEQ ID NO: 375304 - RNA, 19 nt, Artificial Sequence
  Description of Artificial Sequence: Synthetic oligonucleotide
  Antisense Strand to SEQ ID NO: 375303
uuuaaccagcuccagguau

SEQ ID NO: 375305 - RNA, 19 nt, Artificial Sequence
  Description of Artificial Sequence: Synthetic oligonucleotide
  Sense Strand Starting at position 720 of SEQ ID NO: 315884
auuuaauccucauagggac

SEQ ID NO: 375306 - RNA, 19 nt, Artificial Sequence
  Description of Artificial Sequence: Synthetic oligonucleotide
  Antisense Strand to SEQ ID NO: 375305
gucccuaugaggauuaaau

SEQ ID NO: 375307 - RNA, 19 nt, Artificial Sequence
  Description of Artificial Sequence: Synthetic oligonucleotide
  Sense Strand Starting at position 720 of SEQ ID NO: 315933
gaaggugaguagucaacuc

SEQ ID NO: 375308 - RNA, 19 nt, Artificial Sequence
  Description of Artificial Sequence: Synthetic oligonucleotide
  Antisense Strand to SEQ ID NO: 375307
gaguugacuacucaccuuc

SEQ ID NO: 375309 - RNA, 19 nt, Artificial Sequence
  Description of Artificial Sequence: Synthetic oligonucleotide
  Sense Strand Starting at position 720 of SEQ ID NO: 316001
ggguaaacucuagggagca

SEQ ID NO: 375310 - RNA, 19 nt, Artificial Sequence
  Description of Artificial Sequence: Synthetic oligonucleotide
  Antisense Strand to SEQ ID NO: 375309
ugcucccuagaguuuaccc

SEQ ID NO: 375311 - RNA, 19 nt, Artificial Sequence
  Description of Artificial Sequence: Synthetic oligonucleotide
  Sense Strand Starting at position 720 of SEQ ID NO: 316003
guaaacucuagggagcauu

SEQ ID NO: 375312 - RNA, 19 nt, Artificial Sequence
  Description of Artificial Sequence: Synthetic oligonucleotide
  Antisense Strand to SEQ ID NO: 375311
aaugcucccuagaguuuac

SEQ ID NO: 375313 - RNA, 19 nt, Artificial Sequence
  Description of Artificial Sequence: Synthetic oligonucleotide
  Sense Strand Starting at position 720 of SEQ ID NO: 316112
ggccgauccuaauccuauu

SEQ ID NO: 375314 - RNA, 19 nt, Artificial Sequence
  Description of Artificial Sequence: Synthetic oligonucleotide
  Antisense Strand to SEQ ID NO: 375313
aauaggauuaggaucggcc

SEQ ID NO: 375315 - RNA, 19 nt, Artificial Sequence
  Description of Artificial Sequence: Synthetic oligonucleotide
  Sense Strand Starting at position 720 of SEQ ID NO: 316512
uagcgcucucagcaagaga

SEQ ID NO: 375316 - RNA, 19 nt, Artificial Sequence
  Description of Artificial Sequence: Synthetic oligonucleotide
  Antisense Strand to SEQ ID NO: 375315
ucucuugcugagagcgcua

SEQ ID NO: 375317 - RNA, 19 nt, Artificial Sequence
  Description of Artificial Sequence: Synthetic oligonucleotide
  Sense Strand Starting at position 720 of SEQ ID NO: 316557
uggugucuacaguggaaau

SEQ ID NO: 375318 - RNA, 19 nt, Artificial Sequence
  Description of Artificial Sequence: Synthetic oligonucleotide
  Antisense Strand to SEQ ID NO: 375317
auuuccacuguagacacca

SEQ ID NO: 375319 - RNA, 19 nt, Artificial Sequence
  Description of Artificial Sequence: Synthetic oligonucleotide
  Sense Strand Starting at position 720 of SEQ ID NO: 316558
ggugucuacaguggaaaua

SEQ ID NO: 375320 - RNA, 19 nt, Artificial Sequence
  Description of Artificial Sequence: Synthetic oligonucleotide
  Antisense Strand to SEQ ID NO: 375319
uauuuccacuguagacacc

SEQ ID NO: 375321 - RNA, 19 nt, Artificial Sequence
  Description of Artificial Sequence: Synthetic oligonucleotide
  Sense Strand Starting at position 720 of SEQ ID NO: 316657
accuguuugucacugaaac

SEQ ID NO: 375322 - RNA, 19 nt, Artificial Sequence
  Description of Artificial Sequence: Synthetic oligonucleotide
  Antisense Strand to SEQ ID NO: 375321
guuucagugacaaacaggu

SEQ ID NO: 375323 - RNA, 19 nt, Artificial Sequence
  Description of Artificial Sequence: Synthetic oligonucleotide
  Sense Strand Starting at position 720 of SEQ ID NO: 316658
ccuguuugucacugaaacu

SEQ ID NO: 375324 - RNA, 19 nt, Artificial Sequence
  Description of Artificial Sequence: Synthetic oligonucleotide
  Antisense Strand to SEQ ID NO: 375323
aguuucagugacaaacagg

SEQ ID NO: 375325 - RNA, 19 nt, Artificial Sequence
  Description of Artificial Sequence: Synthetic oligonucleotide
  Sense Strand Starting at position 720 of SEQ ID NO: 316738
guuagccucugagcacaua

SEQ ID NO: 375326 - RNA, 19 nt, Artificial Sequence
  Description of Artificial Sequence: Synthetic oligonucleotide
  Antisense Strand to SEQ ID NO: 375325
uaugugcucagaggcuaac

SEQ ID NO: 375327 - RNA, 19 nt, Artificial Sequence
  Description of Artificial Sequence: Synthetic oligonucleotide
  Sense Strand Starting at position 720 of SEQ ID NO: 316770
aaaucauaugagcagguuu

SEQ ID NO: 375328 - RNA, 19 nt, Artificial Sequence
  Description of Artificial Sequence: Synthetic oligonucleotide
  Antisense Strand to SEQ ID NO: 375327
aaaccugcucauaugauuu

SEQ ID NO: 375329 - RNA, 19 nt, Artificial Sequence
  Description of Artificial Sequence: Synthetic oligonucleotide
  Sense Strand Starting at position 720 of SEQ ID NO: 316816
ugcacuugucacugcagga

SEQ ID NO: 375330 - RNA, 19 nt, Artificial Sequence
  Description of Artificial Sequence: Synthetic oligonucleotide
  Antisense Strand to SEQ ID NO: 375329
uccugcagugacaagugca

SEQ ID NO: 375331 - RNA, 19 nt, Artificial Sequence
  Description of Artificial Sequence: Synthetic oligonucleotide
  Sense Strand Starting at position 720 of SEQ ID NO: 316871
gacugcaucucaggauuua

SEQ ID NO: 375332 - RNA, 19 nt, Artificial Sequence
  Description of Artificial Sequence: Synthetic oligonucleotide
  Antisense Strand to SEQ ID NO: 375331
uaaauccugagaugcaguc

SEQ ID NO: 375333 - RNA, 19 nt, Artificial Sequence
  Description of Artificial Sequence: Synthetic oligonucleotide
  Sense Strand Starting at position 720 of SEQ ID NO: 317061
uuucuugauguccauuagu

SEQ ID NO: 375334 - RNA, 19 nt, Artificial Sequence
  Description of Artificial Sequence: Synthetic oligonucleotide
  Antisense Strand to SEQ ID NO: 375333
acuaauggacaucaagaaa

SEQ ID NO: 375335 - RNA, 19 nt, Artificial Sequence
  Description of Artificial Sequence: Synthetic oligonucleotide
  Sense Strand Starting at position 720 of SEQ ID NO: 317064
cuugauguccauuaguaaa

SEQ ID NO: 375336 - RNA, 19 nt, Artificial Sequence
  Description of Artificial Sequence: Synthetic oligonucleotide
  Antisense Strand to SEQ ID NO: 375335
uuuacuaauggacaucaag

SEQ ID NO: 375337 - RNA, 19 nt, Artificial Sequence
  Description of Artificial Sequence: Synthetic oligonucleotide
  Sense Strand Starting at position 720 of SEQ ID NO: 317076
uaguaaauggauuagcgau

SEQ ID NO: 375338 - RNA, 19 nt, Artificial Sequence
  Description of Artificial Sequence: Synthetic oligonucleotide
  Antisense Strand to SEQ ID NO: 375337
aucgcuaauccauuuacua

SEQ ID NO: 375339 - RNA, 19 nt, Artificial Sequence
  Description of Artificial Sequence: Synthetic oligonucleotide
  Sense Strand Starting at position 720 of SEQ ID NO: 317082
auggauuagcgaugcuaac

SEQ ID NO: 375340 - RNA, 19 nt, Artificial Sequence
  Description of Artificial Sequence: Synthetic oligonucleotide
  Antisense Strand to SEQ ID NO: 375339
guuagcaucgcuaauccau

SEQ ID NO: 375341 - RNA, 19 nt, Artificial Sequence
  Description of Artificial Sequence: Synthetic oligonucleotide
  Sense Strand Starting at position 720 of SEQ ID NO: 317175
agauguauuucucacagug

SEQ ID NO: 375342 - RNA, 19 nt, Artificial Sequence
  Description of Artificial Sequence: Synthetic oligonucleotide
  Antisense Strand to SEQ ID NO: 375341
cacugugagaaauacaucu

SEQ ID NO: 375343 - RNA, 19 nt, Artificial Sequence
  Description of Artificial Sequence: Synthetic oligonucleotide
  Sense Strand Starting at position 720 of SEQ ID NO: 317183
uucucacagugguugaauu

SEQ ID NO: 375344 - RNA, 19 nt, Artificial Sequence
  Description of Artificial Sequence: Synthetic oligonucleotide
  Antisense Strand to SEQ ID NO: 375343
aauucaaccacugugagaa

SEQ ID NO: 375345 - RNA, 19 nt, Artificial Sequence
  Description of Artificial Sequence: Synthetic oligonucleotide
  Sense Strand Starting at position 720 of SEQ ID NO: 317322
gaaccugaucaauggugau

SEQ ID NO: 375346 - RNA, 19 nt, Artificial Sequence
  Description of Artificial Sequence: Synthetic oligonucleotide
  Antisense Strand to SEQ ID NO: 375345
aucaccauugaucagguuc

SEQ ID NO: 375347 - RNA, 19 nt, Artificial Sequence
  Description of Artificial Sequence: Synthetic oligonucleotide
  Sense Strand Starting at position 720 of SEQ ID NO: 317326
cugaucaauggugauguca

SEQ ID NO: 375348 - RNA, 19 nt, Artificial Sequence
  Description of Artificial Sequence: Synthetic oligonucleotide
  Antisense Strand to SEQ ID NO: 375347
ugacaucaccauugaucag

SEQ ID NO: 375349 - RNA, 19 nt, Artificial Sequence
  Description of Artificial Sequence: Synthetic oligonucleotide
  Sense Strand Starting at position 720 of SEQ ID NO: 317337
ugaugucauccugacugau

SEQ ID NO: 375350 - RNA, 19 nt, Artificial Sequence
  Description of Artificial Sequence: Synthetic oligonucleotide
  Antisense Strand to SEQ ID NO: 375349
aucagucaggaugacauca

SEQ ID NO: 375351 - RNA, 19 nt, Artificial Sequence
  Description of Artificial Sequence: Synthetic oligonucleotide
  Sense Strand Starting at position 720 of SEQ ID NO: 317424
gcuaguuucuauuuguuua

SEQ ID NO: 375352 - RNA, 19 nt, Artificial Sequence
  Description of Artificial Sequence: Synthetic oligonucleotide
  Antisense Strand to SEQ ID NO: 375351
uaaacaaauagaaacuagc

SEQ ID NO: 375353 - RNA, 19 nt, Artificial Sequence
  Description of Artificial Sequence: Synthetic oligonucleotide
  Sense Strand Starting at position 720 of SEQ ID NO: 317450
uguuuaugguaacugauaa

SEQ ID NO: 375354 - RNA, 19 nt, Artificial Sequence
  Description of Artificial Sequence: Synthetic oligonucleotide
  Antisense Strand to SEQ ID NO: 375353
uuaucaguuaccauaaaca

SEQ ID NO: 375355 - RNA, 19 nt, Artificial Sequence
  Description of Artificial Sequence: Synthetic oligonucleotide
  Sense Strand Starting at position 720 of SEQ ID NO: 317563
auauuuccgucagaacucu

SEQ ID NO: 375356 - RNA, 19 nt, Artificial Sequence
  Description of Artificial Sequence: Synthetic oligonucleotide
  Antisense Strand to SEQ ID NO: 375355
agaguucugacggaaauau

SEQ ID NO: 375357 - RNA, 19 nt, Artificial Sequence
  Description of Artificial Sequence: Synthetic oligonucleotide
  Sense Strand Starting at position 720 of SEQ ID NO: 317943
guucccagaauugguuaga

SEQ ID NO: 375358 - RNA, 19 nt, Artificial Sequence
  Description of Artificial Sequence: Synthetic oligonucleotide
  Antisense Strand to SEQ ID NO: 375357
ucuaaccaauucugggaac

SEQ ID NO: 375359 - RNA, 19 nt, Artificial Sequence
  Description of Artificial Sequence: Synthetic oligonucleotide
  Sense Strand Starting at position 720 of SEQ ID NO: 317944
uucccagaauugguuagau

SEQ ID NO: 375360 - RNA, 19 nt, Artificial Sequence
  Description of Artificial Sequence: Synthetic oligonucleotide
  Antisense Strand to SEQ ID NO: 375359
aucuaaccaauucugggaa

SEQ ID NO: 375361 - RNA, 19 nt, Artificial Sequence
  Description of Artificial Sequence: Synthetic oligonucleotide
  Sense Strand Starting at position 720 of SEQ ID NO: 317956
guuagaucauuuguuguug

SEQ ID NO: 375362 - RNA, 19 nt, Artificial Sequence
  Description of Artificial Sequence: Synthetic oligonucleotide
  Antisense Strand to SEQ ID NO: 375361
caacaacaaaugaucuaac

SEQ ID NO: 375363 - RNA, 19 nt, Artificial Sequence
  Description of Artificial Sequence: Synthetic oligonucleotide
  Sense Strand Starting at position 720 of SEQ ID NO: 318085
aguuaacagcccuguuaga

SEQ ID NO: 375364 - RNA, 19 nt, Artificial Sequence
  Description of Artificial Sequence: Synthetic oligonucleotide
  Antisense Strand to SEQ ID NO: 375363
ucuaacagggcuguuaacu

SEQ ID NO: 375365 - RNA, 19 nt, Artificial Sequence
  Description of Artificial Sequence: Synthetic oligonucleotide
  Sense Strand Starting at position 720 of SEQ ID NO: 318175
uguugugacucaucugggu

SEQ ID NO: 375366 - RNA, 19 nt, Artificial Sequence
  Description of Artificial Sequence: Synthetic oligonucleotide
  Antisense Strand to SEQ ID NO: 375365
acccagaugagucacaaca

SEQ ID NO: 375367 - RNA, 19 nt, Artificial Sequence
  Description of Artificial Sequence: Synthetic oligonucleotide
  Sense Strand Starting at position 720 of SEQ ID NO: 318177
uugugacucaucugggugu

SEQ ID NO: 375368 - RNA, 19 nt, Artificial Sequence
  Description of Artificial Sequence: Synthetic oligonucleotide
  Antisense Strand to SEQ ID NO: 375367
acacccagaugagucacaa

SEQ ID NO: 375369 - RNA, 19 nt, Artificial Sequence
  Description of Artificial Sequence: Synthetic oligonucleotide
  Sense Strand Starting at position 720 of SEQ ID NO: 318179
gugacucaucuggguguua

SEQ ID NO: 375370 - RNA, 19 nt, Artificial Sequence
  Description of Artificial Sequence: Synthetic oligonucleotide
  Antisense Strand to SEQ ID NO: 375369
uaacacccagaugagucac

SEQ ID NO: 375371 - RNA, 19 nt, Artificial Sequence
  Description of Artificial Sequence: Synthetic oligonucleotide
  Sense Strand Starting at position 720 of SEQ ID NO: 318180
ugacucaucuggguguuaa

SEQ ID NO: 375372 - RNA, 19 nt, Artificial Sequence
  Description of Artificial Sequence: Synthetic oligonucleotide
  Antisense Strand to SEQ ID NO: 375371
uuaacacccagaugaguca

SEQ ID NO: 375373 - RNA, 19 nt, Artificial Sequence
  Description of Artificial Sequence: Synthetic oligonucleotide
  Sense Strand Starting at position 720 of SEQ ID NO: 318181
gacucaucuggguguuaau

SEQ ID NO: 375374 - RNA, 19 nt, Artificial Sequence
  Description of Artificial Sequence: Synthetic oligonucleotide
  Antisense Strand to SEQ ID NO: 375373
auuaacacccagaugaguc

SEQ ID NO: 375375 - RNA, 19 nt, Artificial Sequence
  Description of Artificial Sequence: Synthetic oligonucleotide
  Sense Strand Starting at position 720 of SEQ ID NO: 318192
guguuaauaauaugggagu

SEQ ID NO: 375376 - RNA, 19 nt, Artificial Sequence
  Description of Artificial Sequence: Synthetic oligonucleotide
  Antisense Strand to SEQ ID NO: 375375
acucccauauuauuaacac

SEQ ID NO: 375377 - RNA, 19 nt, Artificial Sequence
  Description of Artificial Sequence: Synthetic oligonucleotide
  Sense Strand Starting at position 720 of SEQ ID NO: 318194
guuaauaauaugggaguau

SEQ ID NO: 375378 - RNA, 19 nt, Artificial Sequence
  Description of Artificial Sequence: Synthetic oligonucleotide
  Antisense Strand to SEQ ID NO: 375377
auacucccauauuauuaac

SEQ ID NO: 375379 - RNA, 19 nt, Artificial Sequence
  Description of Artificial Sequence: Synthetic oligonucleotide
  Sense Strand Starting at position 720 of SEQ ID NO: 318975
auauucuacuuucuggaga

SEQ ID NO: 375380 - RNA, 19 nt, Artificial Sequence
  Description of Artificial Sequence: Synthetic oligonucleotide
  Antisense Strand to SEQ ID NO: 375379
ucuccagaaaguagaauau

SEQ ID NO: 375381 - RNA, 19 nt, Artificial Sequence
  Description of Artificial Sequence: Synthetic oligonucleotide
  Sense Strand Starting at position 721 of SEQ ID NO: 315372
ccgagaugguaguuauguc

SEQ ID NO: 375382 - RNA, 19 nt, Artificial Sequence
  Description of Artificial Sequence: Synthetic oligonucleotide
  Antisense Strand to SEQ ID NO: 375381
gacauaacuaccaucucgg

SEQ ID NO: 375383 - RNA, 19 nt, Artificial Sequence
  Description of Artificial Sequence: Synthetic oligonucleotide
  Sense Strand Starting at position 721 of SEQ ID NO: 315373
cgagaugguaguuauguca

SEQ ID NO: 375384 - RNA, 19 nt, Artificial Sequence
  Description of Artificial Sequence: Synthetic oligonucleotide
  Antisense Strand to SEQ ID NO: 375383
ugacauaacuaccaucucg

SEQ ID NO: 375385 - RNA, 19 nt, Artificial Sequence
  Description of Artificial Sequence: Synthetic oligonucleotide
  Sense Strand Starting at position 721 of SEQ ID NO: 315380
guaguuaugucaccugcaa

SEQ ID NO: 375386 - RNA, 19 nt, Artificial Sequence
  Description of Artificial Sequence: Synthetic oligonucleotide
  Antisense Strand to SEQ ID NO: 375385
uugcaggugacauaacuac

SEQ ID NO: 375387 - RNA, 19 nt, Artificial Sequence
  Description of Artificial Sequence: Synthetic oligonucleotide
  Sense Strand Starting at position 721 of SEQ ID NO: 317256
cugcuuucccauuggacau

SEQ ID NO: 375388 - RNA, 19 nt, Artificial Sequence
  Description of Artificial Sequence: Synthetic oligonucleotide
  Antisense Strand to SEQ ID NO: 375387
auguccaaugggaaagcag

SEQ ID NO: 375389 - RNA, 19 nt, Artificial Sequence
  Description of Artificial Sequence: Synthetic oligonucleotide
  Sense Strand Starting at position 721 of SEQ ID NO: 317266
auuggacauugcucuguga

SEQ ID NO: 375390 - RNA, 19 nt, Artificial Sequence
  Description of Artificial Sequence: Synthetic oligonucleotide
  Antisense Strand to SEQ ID NO: 375389
ucacagagcaauguccaau

SEQ ID NO: 375391 - RNA, 19 nt, Artificial Sequence
  Description of Artificial Sequence: Synthetic oligonucleotide
  Sense Strand Starting at position 721 of SEQ ID NO: 317269
ggacauugcucugugacgu

SEQ ID NO: 375392 - RNA, 19 nt, Artificial Sequence
  Description of Artificial Sequence: Synthetic oligonucleotide
  Antisense Strand to SEQ ID NO: 375391
acgucacagagcaaugucc

SEQ ID NO: 375393 - RNA, 19 nt, Artificial Sequence
  Description of Artificial Sequence: Synthetic oligonucleotide
  Sense Strand Starting at position 721 of SEQ ID NO: 317270
gacauugcucugugacguc

SEQ ID NO: 375394 - RNA, 19 nt, Artificial Sequence
  Description of Artificial Sequence: Synthetic oligonucleotide
  Antisense Strand to SEQ ID NO: 375393
gacgucacagagcaauguc

SEQ ID NO: 375395 - RNA, 19 nt, Artificial Sequence
  Description of Artificial Sequence: Synthetic oligonucleotide
  Sense Strand Starting at position 721 of SEQ ID NO: 317348
aggcgagaagucuggccuu

SEQ ID NO: 375396 - RNA, 19 nt, Artificial Sequence
  Description of Artificial Sequence: Synthetic oligonucleotide
  Antisense Strand to SEQ ID NO: 375395
aaggccagacuucucgccu

SEQ ID NO: 375397 - RNA, 19 nt, Artificial Sequence
  Description of Artificial Sequence: Synthetic oligonucleotide
  Sense Strand Starting at position 721 of SEQ ID NO: 317394
gcuccugugggaugggaua

SEQ ID NO: 375398 - RNA, 19 nt, Artificial Sequence
  Description of Artificial Sequence: Synthetic oligonucleotide
  Antisense Strand to SEQ ID NO: 375397
uaucccaucccacaggagc

SEQ ID NO: 375399 - RNA, 19 nt, Artificial Sequence
  Description of Artificial Sequence: Synthetic oligonucleotide
  Sense Strand Starting at position 721 of SEQ ID NO: 317525
ggucaagauuuggaccaga

SEQ ID NO: 375400 - RNA, 19 nt, Artificial Sequence
  Description of Artificial Sequence: Synthetic oligonucleotide
  Antisense Strand to SEQ ID NO: 375399
ucugguccaaaucuugacc

SEQ ID NO: 375401 - RNA, 19 nt, Artificial Sequence
  Description of Artificial Sequence: Synthetic oligonucleotide
  Sense Strand Starting at position 721 of SEQ ID NO: 317574
uucugucauccacaggaau

SEQ ID NO: 375402 - RNA, 19 nt, Artificial Sequence
  Description of Artificial Sequence: Synthetic oligonucleotide
  Antisense Strand to SEQ ID NO: 375401
auuccuguggaugacagaa

SEQ ID NO: 375403 - RNA, 19 nt, Artificial Sequence
  Description of Artificial Sequence: Synthetic oligonucleotide
  Sense Strand Starting at position 721 of SEQ ID NO: 317589
gaauuaguccuguauccga

SEQ ID NO: 375404 - RNA, 19 nt, Artificial Sequence
  Description of Artificial Sequence: Synthetic oligonucleotide
  Antisense Strand to SEQ ID NO: 375403
ucggauacaggacuaauuc

SEQ ID NO: 375405 - RNA, 19 nt, Artificial Sequence
  Description of Artificial Sequence: Synthetic oligonucleotide
  Sense Strand Starting at position 721 of SEQ ID NO: 317603
uccgaaacauucucuggua

SEQ ID NO: 375406 - RNA, 19 nt, Artificial Sequence
  Description of Artificial Sequence: Synthetic oligonucleotide
  Antisense Strand to SEQ ID NO: 375405
uaccagagaauguuucgga

SEQ ID NO: 375407 - RNA, 19 nt, Artificial Sequence
  Description of Artificial Sequence: Synthetic oligonucleotide
  Sense Strand Starting at position 721 of SEQ ID NO: 317605
cgaaacauucucugguagu

SEQ ID NO: 375408 - RNA, 19 nt, Artificial Sequence
  Description of Artificial Sequence: Synthetic oligonucleotide
  Antisense Strand to SEQ ID NO: 375407
acuaccagagaauguuucg

SEQ ID NO: 375409 - RNA, 19 nt, Artificial Sequence
  Description of Artificial Sequence: Synthetic oligonucleotide
  Sense Strand Starting at position 721 of SEQ ID NO: 317632
gugagcaaauaauaagaaa

SEQ ID NO: 375410 - RNA, 19 nt, Artificial Sequence
  Description of Artificial Sequence: Synthetic oligonucleotide
  Antisense Strand to SEQ ID NO: 375409
uuucuuauuauuugcucac

SEQ ID NO: 375411 - RNA, 19 nt, Artificial Sequence
  Description of Artificial Sequence: Synthetic oligonucleotide
  Sense Strand Starting at position 721 of SEQ ID NO: 317669
uuaguacaguuagcaaaua

SEQ ID NO: 375412 - RNA, 19 nt, Artificial Sequence
  Description of Artificial Sequence: Synthetic oligonucleotide
  Antisense Strand to SEQ ID NO: 375411
uauuugcuaacuguacuaa

SEQ ID NO: 375413 - RNA, 19 nt, Artificial Sequence
  Description of Artificial Sequence: Synthetic oligonucleotide
  Sense Strand Starting at position 721 of SEQ ID NO: 317674
acaguuagcaaauagugua

SEQ ID NO: 375414 - RNA, 19 nt, Artificial Sequence
  Description of Artificial Sequence: Synthetic oligonucleotide
  Antisense Strand to SEQ ID NO: 375413
uacacuauuugcuaacugu

SEQ ID NO: 375415 - RNA, 19 nt, Artificial Sequence
  Description of Artificial Sequence: Synthetic oligonucleotide
  Sense Strand Starting at position 721 of SEQ ID NO: 317687
aguguacucaguuguugaa

SEQ ID NO: 375416 - RNA, 19 nt, Artificial Sequence
  Description of Artificial Sequence: Synthetic oligonucleotide
  Antisense Strand to SEQ ID NO: 375415
uucaacaacugaguacacu

SEQ ID NO: 375417 - RNA, 19 nt, Artificial Sequence
  Description of Artificial Sequence: Synthetic oligonucleotide
  Sense Strand Starting at position 721 of SEQ ID NO: 317694
ucaguuguugaaggaaaug

SEQ ID NO: 375418 - RNA, 19 nt, Artificial Sequence
  Description of Artificial Sequence: Synthetic oligonucleotide
  Antisense Strand to SEQ ID NO: 375417
cauuuccuucaacaacuga

SEQ ID NO: 375419 - RNA, 19 nt, Artificial Sequence
  Description of Artificial Sequence: Synthetic oligonucleotide
  Sense Strand Starting at position 721 of SEQ ID NO: 317753
ugagaaagcugcucucuuu

SEQ ID NO: 375420 - RNA, 19 nt, Artificial Sequence
  Description of Artificial Sequence: Synthetic oligonucleotide
  Antisense Strand to SEQ ID NO: 375419
aaagagagcagcuuucuca

SEQ ID NO: 375421 - RNA, 19 nt, Artificial Sequence
  Description of Artificial Sequence: Synthetic oligonucleotide
  Sense Strand Starting at position 721 of SEQ ID NO: 317802
gaucaagucucacugcgau

SEQ ID NO: 375422 - RNA, 19 nt, Artificial Sequence
  Description of Artificial Sequence: Synthetic oligonucleotide
  Antisense Strand to SEQ ID NO: 375421
aucgcagugagacuugauc

SEQ ID NO: 375423 - RNA, 19 nt, Artificial Sequence
  Description of Artificial Sequence: Synthetic oligonucleotide
  Sense Strand Starting at position 721 of SEQ ID NO: 317940
uuacauuuaucagggagcu

SEQ ID NO: 375424 - RNA, 19 nt, Artificial Sequence
  Description of Artificial Sequence: Synthetic oligonucleotide
  Antisense Strand to SEQ ID NO: 375423
agcucccugauaaauguaa

SEQ ID NO: 375425 - RNA, 19 nt, Artificial Sequence
  Description of Artificial Sequence: Synthetic oligonucleotide
  Sense Strand Starting at position 721 of SEQ ID NO: 317950
cagggagcuuucuauuuau

SEQ ID NO: 375426 - RNA, 19 nt, Artificial Sequence
  Description of Artificial Sequence: Synthetic oligonucleotide
  Antisense Strand to SEQ ID NO: 375425
auaaauagaaagcucccug

SEQ ID NO: 375427 - RNA, 19 nt, Artificial Sequence
  Description of Artificial Sequence: Synthetic oligonucleotide
  Sense Strand Starting at position 721 of SEQ ID NO: 318110
gaggaacaucgugauagug

SEQ ID NO: 375428 - RNA, 19 nt, Artificial Sequence
  Description of Artificial Sequence: Synthetic oligonucleotide
  Antisense Strand to SEQ ID NO: 375427
cacuaucacgauguuccuc

SEQ ID NO: 375429 - RNA, 19 nt, Artificial Sequence
  Description of Artificial Sequence: Synthetic oligonucleotide
  Sense Strand Starting at position 721 of SEQ ID NO: 318219
ggagaagaaugguaagagu

SEQ ID NO: 375430 - RNA, 19 nt, Artificial Sequence
  Description of Artificial Sequence: Synthetic oligonucleotide
  Antisense Strand to SEQ ID NO: 375429
acucuuaccauucuucucc

SEQ ID NO: 375431 - RNA, 19 nt, Artificial Sequence
  Description of Artificial Sequence: Synthetic oligonucleotide
  Sense Strand Starting at position 721 of SEQ ID NO: 318222
gaagaaugguaagaguaua

SEQ ID NO: 375432 - RNA, 19 nt, Artificial Sequence
  Description of Artificial Sequence: Synthetic oligonucleotide
  Antisense Strand to SEQ ID NO: 375431
uauacucuuaccauucuuc

SEQ ID NO: 375433 - RNA, 19 nt, Artificial Sequence
  Description of Artificial Sequence: Synthetic oligonucleotide
  Sense Strand Starting at position 721 of SEQ ID NO: 318306
ggcugucuugcagagauaa

SEQ ID NO: 375434 - RNA, 19 nt, Artificial Sequence
  Description of Artificial Sequence: Synthetic oligonucleotide
  Antisense Strand to SEQ ID NO: 375433
uuaucucugcaagacagcc

SEQ ID NO: 375435 - RNA, 19 nt, Artificial Sequence
  Description of Artificial Sequence: Synthetic oligonucleotide
  Sense Strand Starting at position 721 of SEQ ID NO: 318308
cugucuugcagagauaaag

SEQ ID NO: 375436 - RNA, 19 nt, Artificial Sequence
  Description of Artificial Sequence: Synthetic oligonucleotide
  Antisense Strand to SEQ ID NO: 375435
cuuuaucucugcaagacag

SEQ ID NO: 375437 - RNA, 19 nt, Artificial Sequence
  Description of Artificial Sequence: Synthetic oligonucleotide
  Sense Strand Starting at position 721 of SEQ ID NO: 318375
gcacuuugccagcaugaag

SEQ ID NO: 375438 - RNA, 19 nt, Artificial Sequence
  Description of Artificial Sequence: Synthetic oligonucleotide
  Antisense Strand to SEQ ID NO: 375437
cuucaugcuggcaaagugc

SEQ ID NO: 375439 - RNA, 19 nt, Artificial Sequence
  Description of Artificial Sequence: Synthetic oligonucleotide
  Sense Strand Starting at position 721 of SEQ ID NO: 318456
auuuaaucguuuggaucuu

SEQ ID NO: 375440 - RNA, 19 nt, Artificial Sequence
  Description of Artificial Sequence: Synthetic oligonucleotide
  Antisense Strand to SEQ ID NO: 375439
aagauccaaacgauuaaau

SEQ ID NO: 375441 - RNA, 19 nt, Artificial Sequence
  Description of Artificial Sequence: Synthetic oligonucleotide
  Sense Strand Starting at position 721 of SEQ ID NO: 318778
aauggaguaaguuauguga

SEQ ID NO: 375442 - RNA, 19 nt, Artificial Sequence
  Description of Artificial Sequence: Synthetic oligonucleotide
  Antisense Strand to SEQ ID NO: 375441
ucacauaacuuacuccauu

SEQ ID NO: 375443 - RNA, 19 nt, Artificial Sequence
  Description of Artificial Sequence: Synthetic oligonucleotide
  Sense Strand Starting at position 721 of SEQ ID NO: 318781
ggaguaaguuaugugauaa

SEQ ID NO: 375444 - RNA, 19 nt, Artificial Sequence
  Description of Artificial Sequence: Synthetic oligonucleotide
  Antisense Strand to SEQ ID NO: 375443
uuaucacauaacuuacucc

SEQ ID NO: 375445 - RNA, 19 nt, Artificial Sequence
  Description of Artificial Sequence: Synthetic oligonucleotide
  Sense Strand Starting at position 721 of SEQ ID NO: 318840
uuuguaauguuacccucua

SEQ ID NO: 375446 - RNA, 19 nt, Artificial Sequence
  Description of Artificial Sequence: Synthetic oligonucleotide
  Antisense Strand to SEQ ID NO: 375445
uagaggguaacauuacaaa

SEQ ID NO: 375447 - RNA, 19 nt, Artificial Sequence
  Description of Artificial Sequence: Synthetic oligonucleotide
  Sense Strand Starting at position 721 of SEQ ID NO: 318856
cuaguuucugugggaacuu

SEQ ID NO: 375448 - RNA, 19 nt, Artificial Sequence
  Description of Artificial Sequence: Synthetic oligonucleotide
  Antisense Strand to SEQ ID NO: 375447
aaguucccacagaaacuag

SEQ ID NO: 375449 - RNA, 19 nt, Artificial Sequence
  Description of Artificial Sequence: Synthetic oligonucleotide
  Sense Strand Starting at position 721 of SEQ ID NO: 318914
cagguuagucagggaauua

SEQ ID NO: 375450 - RNA, 19 nt, Artificial Sequence
  Description of Artificial Sequence: Synthetic oligonucleotide
  Antisense Strand to SEQ ID NO: 375449
uaauucccugacuaaccug

SEQ ID NO: 375451 - RNA, 19 nt, Artificial Sequence
  Description of Artificial Sequence: Synthetic oligonucleotide
  Sense Strand Starting at position 721 of SEQ ID NO: 318930
uuagcugaaccuugugaaa

SEQ ID NO: 375452 - RNA, 19 nt, Artificial Sequence
  Description of Artificial Sequence: Synthetic oligonucleotide
  Antisense Strand to SEQ ID NO: 375451
uuucacaagguucagcuaa

SEQ ID NO: 375453 - RNA, 19 nt, Artificial Sequence
  Description of Artificial Sequence: Synthetic oligonucleotide
  Sense Strand Starting at position 721 of SEQ ID NO: 318949
gcaguuuggaucuaaugac

SEQ ID NO: 375454 - RNA, 19 nt, Artificial Sequence
  Description of Artificial Sequence: Synthetic oligonucleotide
  Antisense Strand to SEQ ID NO: 375453
gucauuagauccaaacugc

SEQ ID NO: 375455 - RNA, 19 nt, Artificial Sequence
  Description of Artificial Sequence: Synthetic oligonucleotide
  Sense Strand Starting at position 721 of SEQ ID NO: 319144
ccuggacuuggcuguaaau

SEQ ID NO: 375456 - RNA, 19 nt, Artificial Sequence
  Description of Artificial Sequence: Synthetic oligonucleotide
  Antisense Strand to SEQ ID NO: 375455
auuuacagccaaguccagg

SEQ ID NO: 375457 - RNA, 19 nt, Artificial Sequence
  Description of Artificial Sequence: Synthetic oligonucleotide
  Sense Strand Starting at position 721 of SEQ ID NO: 319146
uggacuuggcuguaaauau

SEQ ID NO: 375458 - RNA, 19 nt, Artificial Sequence
  Description of Artificial Sequence: Synthetic oligonucleotide
  Antisense Strand to SEQ ID NO: 375457
auauuuacagccaagucca

SEQ ID NO: 375459 - RNA, 19 nt, Artificial Sequence
  Description of Artificial Sequence: Synthetic oligonucleotide
  Sense Strand Starting at position 721 of SEQ ID NO: 319209
guaggcacuccauaugcau

SEQ ID NO: 375460 - RNA, 19 nt, Artificial Sequence
  Description of Artificial Sequence: Synthetic oligonucleotide
  Antisense Strand to SEQ ID NO: 375459
augcauauggagugccuac

SEQ ID NO: 375461 - RNA, 19 nt, Artificial Sequence
  Description of Artificial Sequence: Synthetic oligonucleotide
  Sense Strand Starting at position 722 of SEQ ID NO: 315844
aguauucuggcacaguaca

SEQ ID NO: 375462 - RNA, 19 nt, Artificial Sequence
  Description of Artificial Sequence: Synthetic oligonucleotide
  Antisense Strand to SEQ ID NO: 375461
uguacugugccagaauacu

SEQ ID NO: 375463 - RNA, 19 nt, Artificial Sequence
  Description of Artificial Sequence: Synthetic oligonucleotide
  Sense Strand Starting at position 722 of SEQ ID NO: 316052
ucccauugcccugaauagu

SEQ ID NO: 375464 - RNA, 19 nt, Artificial Sequence
  Description of Artificial Sequence: Synthetic oligonucleotide
  Antisense Strand to SEQ ID NO: 375463
acuauucagggcaauggga

SEQ ID NO: 375465 - RNA, 19 nt, Artificial Sequence
  Description of Artificial Sequence: Synthetic oligonucleotide
  Sense Strand Starting at position 722 of SEQ ID NO: 316179
ugacauaacguuuaggugu

SEQ ID NO: 375466 - RNA, 19 nt, Artificial Sequence
  Description of Artificial Sequence: Synthetic oligonucleotide
  Antisense Strand to SEQ ID NO: 375465
acaccuaaacguuauguca

SEQ ID NO: 375467 - RNA, 19 nt, Artificial Sequence
  Description of Artificial Sequence: Synthetic oligonucleotide
  Sense Strand Starting at position 722 of SEQ ID NO: 316475
aaugaauugugccuuugga

SEQ ID NO: 375468 - RNA, 19 nt, Artificial Sequence
  Description of Artificial Sequence: Synthetic oligonucleotide
  Antisense Strand to SEQ ID NO: 375467
uccaaaggcacaauucauu

SEQ ID NO: 375469 - RNA, 19 nt, Artificial Sequence
  Description of Artificial Sequence: Synthetic oligonucleotide
  Sense Strand Starting at position 722 of SEQ ID NO: 316499
acagaugauuucuggaaug

SEQ ID NO: 375470 - RNA, 19 nt, Artificial Sequence
  Description of Artificial Sequence: Synthetic oligonucleotide
  Antisense Strand to SEQ ID NO: 375469
cauuccagaaaucaucugu

SEQ ID NO: 375471 - RNA, 19 nt, Artificial Sequence
  Description of Artificial Sequence: Synthetic oligonucleotide
  Sense Strand Starting at position 722 of SEQ ID NO: 316646
cuuaguuaacgguaccauu

SEQ ID NO: 375472 - RNA, 19 nt, Artificial Sequence
  Description of Artificial Sequence: Synthetic oligonucleotide
  Antisense Strand to SEQ ID NO: 375471
aaugguaccguuaacuaag

SEQ ID NO: 375473 - RNA, 19 nt, Artificial Sequence
  Description of Artificial Sequence: Synthetic oligonucleotide
  Sense Strand Starting at position 722 of SEQ ID NO: 316666
agacaacacuacguauauu

SEQ ID NO: 375474 - RNA, 19 nt, Artificial Sequence
  Description of Artificial Sequence: Synthetic oligonucleotide
  Antisense Strand to SEQ ID NO: 375473
aauauacguaguguugucu

SEQ ID NO: 375475 - RNA, 19 nt, Artificial Sequence
  Description of Artificial Sequence: Synthetic oligonucleotide
  Sense Strand Starting at position 722 of SEQ ID NO: 316677
cguauauuccuccacuuac

SEQ ID NO: 375476 - RNA, 19 nt, Artificial Sequence
  Description of Artificial Sequence: Synthetic oligonucleotide
  Antisense Strand to SEQ ID NO: 375475
guaaguggaggaauauacg

SEQ ID NO: 375477 - RNA, 19 nt, Artificial Sequence
  Description of Artificial Sequence: Synthetic oligonucleotide
  Sense Strand Starting at position 722 of SEQ ID NO: 316876
cguuaagucguagcccuua

SEQ ID NO: 375478 - RNA, 19 nt, Artificial Sequence
  Description of Artificial Sequence: Synthetic oligonucleotide
  Antisense Strand to SEQ ID NO: 375477
uaagggcuacgacuuaacg

SEQ ID NO: 375479 - RNA, 19 nt, Artificial Sequence
  Description of Artificial Sequence: Synthetic oligonucleotide
  Sense Strand Starting at position 722 of SEQ ID NO: 317259
gcccgcuaccuagaaggau

SEQ ID NO: 375480 - RNA, 19 nt, Artificial Sequence
  Description of Artificial Sequence: Synthetic oligonucleotide
  Antisense Strand to SEQ ID NO: 375479
auccuucuagguagcgggc

SEQ ID NO: 375481 - RNA, 19 nt, Artificial Sequence
  Description of Artificial Sequence: Synthetic oligonucleotide
  Sense Strand Starting at position 722 of SEQ ID NO: 317386
gcuugugugccucugcuga

SEQ ID NO: 375482 - RNA, 19 nt, Artificial Sequence
  Description of Artificial Sequence: Synthetic oligonucleotide
  Antisense Strand to SEQ ID NO: 375481
ucagcagaggcacacaagc

SEQ ID NO: 375483 - RNA, 19 nt, Artificial Sequence
  Description of Artificial Sequence: Synthetic oligonucleotide
  Sense Strand Starting at position 722 of SEQ ID NO: 317580
gcguuauuuggugguggag

SEQ ID NO: 375484 - RNA, 19 nt, Artificial Sequence
  Description of Artificial Sequence: Synthetic oligonucleotide
  Antisense Strand to SEQ ID NO: 375483
cuccaccaccaaauaacgc

SEQ ID NO: 375485 - RNA, 19 nt, Artificial Sequence
  Description of Artificial Sequence: Synthetic oligonucleotide
  Sense Strand Starting at position 722 of SEQ ID NO: 317883
ggagguguugcugagagag

SEQ ID NO: 375486 - RNA, 19 nt, Artificial Sequence
  Description of Artificial Sequence: Synthetic oligonucleotide
  Antisense Strand to SEQ ID NO: 375485
cucucucagcaacaccucc

SEQ ID NO: 375487 - RNA, 19 nt, Artificial Sequence
  Description of Artificial Sequence: Synthetic oligonucleotide
  Sense Strand Starting at position 722 of SEQ ID NO: 317913
gcauguaagcguccugcaa

SEQ ID NO: 375488 - RNA, 19 nt, Artificial Sequence
  Description of Artificial Sequence: Synthetic oligonucleotide
  Antisense Strand to SEQ ID NO: 375487
uugcaggacgcuuacaugc

SEQ ID NO: 375489 - RNA, 19 nt, Artificial Sequence
  Description of Artificial Sequence: Synthetic oligonucleotide
  Sense Strand Starting at position 722 of SEQ ID NO: 317935
guugacuuaucuccagaua

SEQ ID NO: 375490 - RNA, 19 nt, Artificial Sequence
  Description of Artificial Sequence: Synthetic oligonucleotide
  Antisense Strand to SEQ ID NO: 375489
uaucuggagauaagucaac

SEQ ID NO: 375491 - RNA, 19 nt, Artificial Sequence
  Description of Artificial Sequence: Synthetic oligonucleotide
  Sense Strand Starting at position 722 of SEQ ID NO: 317963
agaggauccugagcauuga

SEQ ID NO: 375492 - RNA, 19 nt, Artificial Sequence
  Description of Artificial Sequence: Synthetic oligonucleotide
  Antisense Strand to SEQ ID NO: 375491
ucaaugcucaggauccucu

SEQ ID NO: 375493 - RNA, 19 nt, Artificial Sequence
  Description of Artificial Sequence: Synthetic oligonucleotide
  Sense Strand Starting at position 722 of SEQ ID NO: 317972
ugagcauugacaggaaucu

SEQ ID NO: 375494 - RNA, 19 nt, Artificial Sequence
  Description of Artificial Sequence: Synthetic oligonucleotide
  Antisense Strand to SEQ ID NO: 375493
agauuccugucaaugcuca

SEQ ID NO: 375495 - RNA, 19 nt, Artificial Sequence
  Description of Artificial Sequence: Synthetic oligonucleotide
  Sense Strand Starting at position 722 of SEQ ID NO: 318107
cugaguuggaggugcaaga

SEQ ID NO: 375496 - RNA, 19 nt, Artificial Sequence
  Description of Artificial Sequence: Synthetic oligonucleotide
  Antisense Strand to SEQ ID NO: 375495
ucuugcaccuccaacucag

SEQ ID NO: 375497 - RNA, 19 nt, Artificial Sequence
  Description of Artificial Sequence: Synthetic oligonucleotide
  Sense Strand Starting at position 722 of SEQ ID NO: 318245
cgacccauacuuugaggau

SEQ ID NO: 375498 - RNA, 19 nt, Artificial Sequence
  Description of Artificial Sequence: Synthetic oligonucleotide
  Antisense Strand to SEQ ID NO: 375497
auccucaaaguaugggucg

SEQ ID NO: 375499 - RNA, 19 nt, Artificial Sequence
  Description of Artificial Sequence: Synthetic oligonucleotide
  Sense Strand Starting at position 722 of SEQ ID NO: 318269
gugagaacucaggacucgu

SEQ ID NO: 375500 - RNA, 19 nt, Artificial Sequence
  Description of Artificial Sequence: Synthetic oligonucleotide
  Antisense Strand to SEQ ID NO: 375499
acgaguccugaguucucac

SEQ ID NO: 375501 - RNA, 19 nt, Artificial Sequence
  Description of Artificial Sequence: Synthetic oligonucleotide
  Sense Strand Starting at position 722 of SEQ ID NO: 318284
ucgucucauacaugagaga

SEQ ID NO: 375502 - RNA, 19 nt, Artificial Sequence
  Description of Artificial Sequence: Synthetic oligonucleotide
  Antisense Strand to SEQ ID NO: 375501
ucucucauguaugagacga

SEQ ID NO: 375503 - RNA, 19 nt, Artificial Sequence
  Description of Artificial Sequence: Synthetic oligonucleotide
  Sense Strand Starting at position 722 of SEQ ID NO: 318371
gcuccuaugauguagaugu

SEQ ID NO: 375504 - RNA, 19 nt, Artificial Sequence
  Description of Artificial Sequence: Synthetic oligonucleotide
  Antisense Strand to SEQ ID NO: 375503
acaucuacaucauaggagc

SEQ ID NO: 375505 - RNA, 19 nt, Artificial Sequence
  Description of Artificial Sequence: Synthetic oligonucleotide
  Sense Strand Starting at position 722 of SEQ ID NO: 318373
uccuaugauguagauguua

SEQ ID NO: 375506 - RNA, 19 nt, Artificial Sequence
  Description of Artificial Sequence: Synthetic oligonucleotide
  Antisense Strand to SEQ ID NO: 375505
uaacaucuacaucauagga

SEQ ID NO: 375507 - RNA, 19 nt, Artificial Sequence
  Description of Artificial Sequence: Synthetic oligonucleotide
  Sense Strand Starting at position 722 of SEQ ID NO: 318406
accauauccgaauggauag

SEQ ID NO: 375508 - RNA, 19 nt, Artificial Sequence
  Description of Artificial Sequence: Synthetic oligonucleotide
  Antisense Strand to SEQ ID NO: 375507
cuauccauucggauauggu

SEQ ID NO: 375509 - RNA, 19 nt, Artificial Sequence
  Description of Artificial Sequence: Synthetic oligonucleotide
  Sense Strand Starting at position 722 of SEQ ID NO: 318407
ccauauccgaauggauagu

SEQ ID NO: 375510 - RNA, 19 nt, Artificial Sequence
  Description of Artificial Sequence: Synthetic oligonucleotide
  Antisense Strand to SEQ ID NO: 375509
acuauccauucggauaugg

SEQ ID NO: 375511 - RNA, 19 nt, Artificial Sequence
  Description of Artificial Sequence: Synthetic oligonucleotide
  Sense Strand Starting at position 722 of SEQ ID NO: 318483
ugaaucagagcauggugaa

SEQ ID NO: 375512 - RNA, 19 nt, Artificial Sequence
  Description of Artificial Sequence: Synthetic oligonucleotide
  Antisense Strand to SEQ ID NO: 375511
uucaccaugcucugauuca

SEQ ID NO: 375513 - RNA, 19 nt, Artificial Sequence
  Description of Artificial Sequence: Synthetic oligonucleotide
  Sense Strand Starting at position 722 of SEQ ID NO: 318484
gaaucagagcauggugaaa

SEQ ID NO: 375514 - RNA, 19 nt, Artificial Sequence
  Description of Artificial Sequence: Synthetic oligonucleotide
  Antisense Strand to SEQ ID NO: 375513
uuucaccaugcucugauuc

SEQ ID NO: 375515 - RNA, 19 nt, Artificial Sequence
  Description of Artificial Sequence: Synthetic oligonucleotide
  Sense Strand Starting at position 722 of SEQ ID NO: 318503
ggguuaauggacgaugucu

SEQ ID NO: 375516 - RNA, 19 nt, Artificial Sequence
  Description of Artificial Sequence: Synthetic oligonucleotide
  Antisense Strand to SEQ ID NO: 375515
agacaucguccauuaaccc

SEQ ID NO: 375517 - RNA, 19 nt, Artificial Sequence
  Description of Artificial Sequence: Synthetic oligonucleotide
  Sense Strand Starting at position 722 of SEQ ID NO: 318585
agcguucuugguuucagua

SEQ ID NO: 375518 - RNA, 19 nt, Artificial Sequence
  Description of Artificial Sequence: Synthetic oligonucleotide
  Antisense Strand to SEQ ID NO: 375517
uacugaaaccaagaacgcu

SEQ ID NO: 375519 - RNA, 19 nt, Artificial Sequence
  Description of Artificial Sequence: Synthetic oligonucleotide
  Sense Strand Starting at position 722 of SEQ ID NO: 318631
aaacaauggcuuugugacu

SEQ ID NO: 375520 - RNA, 19 nt, Artificial Sequence
  Description of Artificial Sequence: Synthetic oligonucleotide
  Antisense Strand to SEQ ID NO: 375519
agucacaaagccauuguuu

SEQ ID NO: 375521 - RNA, 19 nt, Artificial Sequence
  Description of Artificial Sequence: Synthetic oligonucleotide
  Sense Strand Starting at position 722 of SEQ ID NO: 318652
ggcuucuugguggacauua

SEQ ID NO: 375522 - RNA, 19 nt, Artificial Sequence
  Description of Artificial Sequence: Synthetic oligonucleotide
  Antisense Strand to SEQ ID NO: 375521
uaauguccaccaagaagcc

SEQ ID NO: 375523 - RNA, 19 nt, Artificial Sequence
  Description of Artificial Sequence: Synthetic oligonucleotide
  Sense Strand Starting at position 722 of SEQ ID NO: 318681
ucgagaacucagugaagaa

SEQ ID NO: 375524 - RNA, 19 nt, Artificial Sequence
  Description of Artificial Sequence: Synthetic oligonucleotide
  Antisense Strand to SEQ ID NO: 375523
uucuucacugaguucucga

SEQ ID NO: 375525 - RNA, 19 nt, Artificial Sequence
  Description of Artificial Sequence: Synthetic oligonucleotide
  Sense Strand Starting at position 722 of SEQ ID NO: 318804
agacuuuccugcccucaga

SEQ ID NO: 375526 - RNA, 19 nt, Artificial Sequence
  Description of Artificial Sequence: Synthetic oligonucleotide
  Antisense Strand to SEQ ID NO: 375525
ucugagggcaggaaagucu

SEQ ID NO: 375527 - RNA, 19 nt, Artificial Sequence
  Description of Artificial Sequence: Synthetic oligonucleotide
  Sense Strand Starting at position 722 of SEQ ID NO: 318807
cuuuccugcccucagagaa

SEQ ID NO: 375528 - RNA, 19 nt, Artificial Sequence
  Description of Artificial Sequence: Synthetic oligonucleotide
  Antisense Strand to SEQ ID NO: 375527
uucucugagggcaggaaag

SEQ ID NO: 375529 - RNA, 19 nt, Artificial Sequence
  Description of Artificial Sequence: Synthetic oligonucleotide
  Sense Strand Starting at position 722 of SEQ ID NO: 318823
gaaguuguugaugagcuaa

SEQ ID NO: 375530 - RNA, 19 nt, Artificial Sequence
  Description of Artificial Sequence: Synthetic oligonucleotide
  Antisense Strand to SEQ ID NO: 375529
uuagcucaucaacaacuuc

SEQ ID NO: 375531 - RNA, 19 nt, Artificial Sequence
  Description of Artificial Sequence: Synthetic oligonucleotide
  Sense Strand Starting at position 722 of SEQ ID NO: 318870
auuugauccugauagguau

SEQ ID NO: 375532 - RNA, 19 nt, Artificial Sequence
  Description of Artificial Sequence: Synthetic oligonucleotide
  Antisense Strand to SEQ ID NO: 375531
auaccuaucaggaucaaau

SEQ ID NO: 375533 - RNA, 19 nt, Artificial Sequence
  Description of Artificial Sequence: Synthetic oligonucleotide
  Sense Strand Starting at position 722 of SEQ ID NO: 318873
ugauccugauagguaucaa

SEQ ID NO: 375534 - RNA, 19 nt, Artificial Sequence
  Description of Artificial Sequence: Synthetic oligonucleotide
  Antisense Strand to SEQ ID NO: 375533
uugauaccuaucaggauca

SEQ ID NO: 375535 - RNA, 19 nt, Artificial Sequence
  Description of Artificial Sequence: Synthetic oligonucleotide
  Sense Strand Starting at position 722 of SEQ ID NO: 318881
auagguaucaaauggugau

SEQ ID NO: 375536 - RNA, 19 nt, Artificial Sequence
  Description of Artificial Sequence: Synthetic oligonucleotide
  Antisense Strand to SEQ ID NO: 375535
aucaccauuugauaccuau

SEQ ID NO: 375537 - RNA, 19 nt, Artificial Sequence
  Description of Artificial Sequence: Synthetic oligonucleotide
  Sense Strand Starting at position 722 of SEQ ID NO: 318885
guaucaaauggugaucugu

SEQ ID NO: 375538 - RNA, 19 nt, Artificial Sequence
  Description of Artificial Sequence: Synthetic oligonucleotide
  Antisense Strand to SEQ ID NO: 375537
acagaucaccauuugauac

SEQ ID NO: 375539 - RNA, 19 nt, Artificial Sequence
  Description of Artificial Sequence: Synthetic oligonucleotide
  Sense Strand Starting at position 722 of SEQ ID NO: 319158
guuugauaguaaccaaauc

SEQ ID NO: 375540 - RNA, 19 nt, Artificial Sequence
  Description of Artificial Sequence: Synthetic oligonucleotide
  Antisense Strand to SEQ ID NO: 375539
gauuugguuacuaucaaac

SEQ ID NO: 375541 - RNA, 19 nt, Artificial Sequence
  Description of Artificial Sequence: Synthetic oligonucleotide
  Sense Strand Starting at position 723 of SEQ ID NO: 315289
gagaaagaguuaucuauuc

SEQ ID NO: 375542 - RNA, 19 nt, Artificial Sequence
  Description of Artificial Sequence: Synthetic oligonucleotide
  Antisense Strand to SEQ ID NO: 375541
gaauagauaacucuuucuc

SEQ ID NO: 375543 - RNA, 19 nt, Artificial Sequence
  Description of Artificial Sequence: Synthetic oligonucleotide
  Sense Strand Starting at position 723 of SEQ ID NO: 315695
gaaguuguauuagucaucu

SEQ ID NO: 375544 - RNA, 19 nt, Artificial Sequence
  Description of Artificial Sequence: Synthetic oligonucleotide
  Antisense Strand to SEQ ID NO: 375543
agaugacuaauacaacuuc

SEQ ID NO: 375545 - RNA, 19 nt, Artificial Sequence
  Description of Artificial Sequence: Synthetic oligonucleotide
  Sense Strand Starting at position 723 of SEQ ID NO: 315699
uuguauuagucaucucaac

SEQ ID NO: 375546 - RNA, 19 nt, Artificial Sequence
  Description of Artificial Sequence: Synthetic oligonucleotide
  Antisense Strand to SEQ ID NO: 375545
guugagaugacuaauacaa

SEQ ID NO: 375547 - RNA, 19 nt, Artificial Sequence
  Description of Artificial Sequence: Synthetic oligonucleotide
  Sense Strand Starting at position 723 of SEQ ID NO: 316271
aguauucuggcacaguaca

SEQ ID NO: 375548 - RNA, 19 nt, Artificial Sequence
  Description of Artificial Sequence: Synthetic oligonucleotide
  Antisense Strand to SEQ ID NO: 375547
uguacugugccagaauacu

SEQ ID NO: 375549 - RNA, 19 nt, Artificial Sequence
  Description of Artificial Sequence: Synthetic oligonucleotide
  Sense Strand Starting at position 723 of SEQ ID NO: 316478
gucccauugcccugaauag

SEQ ID NO: 375550 - RNA, 19 nt, Artificial Sequence
  Description of Artificial Sequence: Synthetic oligonucleotide
  Antisense Strand to SEQ ID NO: 375549
cuauucagggcaaugggac

SEQ ID NO: 375551 - RNA, 19 nt, Artificial Sequence
  Description of Artificial Sequence: Synthetic oligonucleotide
  Sense Strand Starting at position 723 of SEQ ID NO: 316479
ucccauugcccugaauagu

SEQ ID NO: 375552 - RNA, 19 nt, Artificial Sequence
  Description of Artificial Sequence: Synthetic oligonucleotide
  Antisense Strand to SEQ ID NO: 375551
acuauucagggcaauggga

SEQ ID NO: 375553 - RNA, 19 nt, Artificial Sequence
  Description of Artificial Sequence: Synthetic oligonucleotide
  Sense Strand Starting at position 723 of SEQ ID NO: 316606
ugacauaacguuuaggugu

SEQ ID NO: 375554 - RNA, 19 nt, Artificial Sequence
  Description of Artificial Sequence: Synthetic oligonucleotide
  Antisense Strand to SEQ ID NO: 375553
acaccuaaacguuauguca

SEQ ID NO: 375555 - RNA, 19 nt, Artificial Sequence
  Description of Artificial Sequence: Synthetic oligonucleotide
  Sense Strand Starting at position 723 of SEQ ID NO: 316902
aaugaauugugccuuugga

SEQ ID NO: 375556 - RNA, 19 nt, Artificial Sequence
  Description of Artificial Sequence: Synthetic oligonucleotide
  Antisense Strand to SEQ ID NO: 375555
uccaaaggcacaauucauu

SEQ ID NO: 375557 - RNA, 19 nt, Artificial Sequence
  Description of Artificial Sequence: Synthetic oligonucleotide
  Sense Strand Starting at position 723 of SEQ ID NO: 316926
acagaugauuucuggaaug

SEQ ID NO: 375558 - RNA, 19 nt, Artificial Sequence
  Description of Artificial Sequence: Synthetic oligonucleotide
  Antisense Strand to SEQ ID NO: 375557
cauuccagaaaucaucugu

SEQ ID NO: 375559 - RNA, 19 nt, Artificial Sequence
  Description of Artificial Sequence: Synthetic oligonucleotide
  Sense Strand Starting at position 723 of SEQ ID NO: 317031
gcauguucugcauacauaa

SEQ ID NO: 375560 - RNA, 19 nt, Artificial Sequence
  Description of Artificial Sequence: Synthetic oligonucleotide
  Antisense Strand to SEQ ID NO: 375559
uuauguaugcagaacaugc

SEQ ID NO: 375561 - RNA, 19 nt, Artificial Sequence
  Description of Artificial Sequence: Synthetic oligonucleotide
  Sense Strand Starting at position 723 of SEQ ID NO: 317073
cuuaguuaacgguaccauu

SEQ ID NO: 375562 - RNA, 19 nt, Artificial Sequence
  Description of Artificial Sequence: Synthetic oligonucleotide
  Antisense Strand to SEQ ID NO: 375561
aaugguaccguuaacuaag

SEQ ID NO: 375563 - RNA, 19 nt, Artificial Sequence
  Description of Artificial Sequence: Synthetic oligonucleotide
  Sense Strand Starting at position 723 of SEQ ID NO: 317093
agacaacacuacguauauu

SEQ ID NO: 375564 - RNA, 19 nt, Artificial Sequence
  Description of Artificial Sequence: Synthetic oligonucleotide
  Antisense Strand to SEQ ID NO: 375563
aauauacguaguguugucu

SEQ ID NO: 375565 - RNA, 19 nt, Artificial Sequence
  Description of Artificial Sequence: Synthetic oligonucleotide
  Sense Strand Starting at position 723 of SEQ ID NO: 317104
cguauauuccuccacuuac

SEQ ID NO: 375566 - RNA, 19 nt, Artificial Sequence
  Description of Artificial Sequence: Synthetic oligonucleotide
  Antisense Strand to SEQ ID NO: 375565
guaaguggaggaauauacg

SEQ ID NO: 375567 - RNA, 19 nt, Artificial Sequence
  Description of Artificial Sequence: Synthetic oligonucleotide
  Sense Strand Starting at position 723 of SEQ ID NO: 317303
cguuaagucguagcccuua

SEQ ID NO: 375568 - RNA, 19 nt, Artificial Sequence
  Description of Artificial Sequence: Synthetic oligonucleotide
  Antisense Strand to SEQ ID NO: 375567
uaagggcuacgacuuaacg

SEQ ID NO: 375569 - RNA, 19 nt, Artificial Sequence
  Description of Artificial Sequence: Synthetic oligonucleotide
  Sense Strand Starting at position 723 of SEQ ID NO: 317686
gcccgcuaccuagaaggau

SEQ ID NO: 375570 - RNA, 19 nt, Artificial Sequence
  Description of Artificial Sequence: Synthetic oligonucleotide
  Antisense Strand to SEQ ID NO: 375569
auccuucuagguagcgggc

SEQ ID NO: 375571 - RNA, 19 nt, Artificial Sequence
  Description of Artificial Sequence: Synthetic oligonucleotide
  Sense Strand Starting at position 723 of SEQ ID NO: 317813
gcuugugugccucugcuga

SEQ ID NO: 375572 - RNA, 19 nt, Artificial Sequence
  Description of Artificial Sequence: Synthetic oligonucleotide
  Antisense Strand to SEQ ID NO: 375571
ucagcagaggcacacaagc

SEQ ID NO: 375573 - RNA, 19 nt, Artificial Sequence
  Description of Artificial Sequence: Synthetic oligonucleotide
  Sense Strand Starting at position 723 of SEQ ID NO: 318007
gcguuauuuggugguggag

SEQ ID NO: 375574 - RNA, 19 nt, Artificial Sequence
  Description of Artificial Sequence: Synthetic oligonucleotide
  Antisense Strand to SEQ ID NO: 375573
cuccaccaccaaauaacgc

SEQ ID NO: 375575 - RNA, 19 nt, Artificial Sequence
  Description of Artificial Sequence: Synthetic oligonucleotide
  Sense Strand Starting at position 723 of SEQ ID NO: 318310
ggagguguugcugagagag

SEQ ID NO: 375576 - RNA, 19 nt, Artificial Sequence
  Description of Artificial Sequence: Synthetic oligonucleotide
  Antisense Strand to SEQ ID NO: 375575
cucucucagcaacaccucc

SEQ ID NO: 375577 - RNA, 19 nt, Artificial Sequence
  Description of Artificial Sequence: Synthetic oligonucleotide
  Sense Strand Starting at position 723 of SEQ ID NO: 318340
gcauguaagcguccugcaa

SEQ ID NO: 375578 - RNA, 19 nt, Artificial Sequence
  Description of Artificial Sequence: Synthetic oligonucleotide
  Antisense Strand to SEQ ID NO: 375577
uugcaggacgcuuacaugc

SEQ ID NO: 375579 - RNA, 19 nt, Artificial Sequence
  Description of Artificial Sequence: Synthetic oligonucleotide
  Sense Strand Starting at position 723 of SEQ ID NO: 318362
guugacuuaucuccagaua

SEQ ID NO: 375580 - RNA, 19 nt, Artificial Sequence
  Description of Artificial Sequence: Synthetic oligonucleotide
  Antisense Strand to SEQ ID NO: 375579
uaucuggagauaagucaac

SEQ ID NO: 375581 - RNA, 19 nt, Artificial Sequence
  Description of Artificial Sequence: Synthetic oligonucleotide
  Sense Strand Starting at position 723 of SEQ ID NO: 318390
agaggauccugagcauuga

SEQ ID NO: 375582 - RNA, 19 nt, Artificial Sequence
  Description of Artificial Sequence: Synthetic oligonucleotide
  Antisense Strand to SEQ ID NO: 375581
ucaaugcucaggauccucu

SEQ ID NO: 375583 - RNA, 19 nt, Artificial Sequence
  Description of Artificial Sequence: Synthetic oligonucleotide
  Sense Strand Starting at position 723 of SEQ ID NO: 318399
ugagcauugacaggaaucu

SEQ ID NO: 375584 - RNA, 19 nt, Artificial Sequence
  Description of Artificial Sequence: Synthetic oligonucleotide
  Antisense Strand to SEQ ID NO: 375583
agauuccugucaaugcuca

SEQ ID NO: 375585 - RNA, 19 nt, Artificial Sequence
  Description of Artificial Sequence: Synthetic oligonucleotide
  Sense Strand Starting at position 723 of SEQ ID NO: 318534
cugaguuggaggugcaaga

SEQ ID NO: 375586 - RNA, 19 nt, Artificial Sequence
  Description of Artificial Sequence: Synthetic oligonucleotide
  Antisense Strand to SEQ ID NO: 375585
ucuugcaccuccaacucag

SEQ ID NO: 375587 - RNA, 19 nt, Artificial Sequence
  Description of Artificial Sequence: Synthetic oligonucleotide
  Sense Strand Starting at position 723 of SEQ ID NO: 318672
cgacccauacuuugaggau

SEQ ID NO: 375588 - RNA, 19 nt, Artificial Sequence
  Description of Artificial Sequence: Synthetic oligonucleotide
  Antisense Strand to SEQ ID NO: 375587
auccucaaaguaugggucg

SEQ ID NO: 375589 - RNA, 19 nt, Artificial Sequence
  Description of Artificial Sequence: Synthetic oligonucleotide
  Sense Strand Starting at position 723 of SEQ ID NO: 318696
gugagaacucaggacucgu

SEQ ID NO: 375590 - RNA, 19 nt, Artificial Sequence
  Description of Artificial Sequence: Synthetic oligonucleotide
  Antisense Strand to SEQ ID NO: 375589
acgaguccugaguucucac

SEQ ID NO: 375591 - RNA, 19 nt, Artificial Sequence
  Description of Artificial Sequence: Synthetic oligonucleotide
  Sense Strand Starting at position 723 of SEQ ID NO: 318711
ucgucucauacaugagaga

SEQ ID NO: 375592 - RNA, 19 nt, Artificial Sequence
  Description of Artificial Sequence: Synthetic oligonucleotide
  Antisense Strand to SEQ ID NO: 375591
ucucucauguaugagacga

SEQ ID NO: 375593 - RNA, 19 nt, Artificial Sequence
  Description of Artificial Sequence: Synthetic oligonucleotide
  Sense Strand Starting at position 723 of SEQ ID NO: 318798
gcuccuaugauguagaugu

SEQ ID NO: 375594 - RNA, 19 nt, Artificial Sequence
  Description of Artificial Sequence: Synthetic oligonucleotide
  Antisense Strand to SEQ ID NO: 375593
acaucuacaucauaggagc

SEQ ID NO: 375595 - RNA, 19 nt, Artificial Sequence
  Description of Artificial Sequence: Synthetic oligonucleotide
  Sense Strand Starting at position 723 of SEQ ID NO: 318800
uccuaugauguagauguua

SEQ ID NO: 375596 - RNA, 19 nt, Artificial Sequence
  Description of Artificial Sequence: Synthetic oligonucleotide
  Antisense Strand to SEQ ID NO: 375595
uaacaucuacaucauagga

SEQ ID NO: 375597 - RNA, 19 nt, Artificial Sequence
  Description of Artificial Sequence: Synthetic oligonucleotide
  Sense Strand Starting at position 723 of SEQ ID NO: 318833
accauauccgaauggauag

SEQ ID NO: 375598 - RNA, 19 nt, Artificial Sequence
  Description of Artificial Sequence: Synthetic oligonucleotide
  Antisense Strand to SEQ ID NO: 375597
cuauccauucggauauggu

SEQ ID NO: 375599 - RNA, 19 nt, Artificial Sequence
  Description of Artificial Sequence: Synthetic oligonucleotide
  Sense Strand Starting at position 723 of SEQ ID NO: 318834
ccauauccgaauggauagu

SEQ ID NO: 375600 - RNA, 19 nt, Artificial Sequence
  Description of Artificial Sequence: Synthetic oligonucleotide
  Antisense Strand to SEQ ID NO: 375599
acuauccauucggauaugg

SEQ ID NO: 375601 - RNA, 19 nt, Artificial Sequence
  Description of Artificial Sequence: Synthetic oligonucleotide
  Sense Strand Starting at position 723 of SEQ ID NO: 318910
ugaaucagagcauggugaa

SEQ ID NO: 375602 - RNA, 19 nt, Artificial Sequence
  Description of Artificial Sequence: Synthetic oligonucleotide
  Antisense Strand to SEQ ID NO: 375601
uucaccaugcucugauuca

SEQ ID NO: 375603 - RNA, 19 nt, Artificial Sequence
  Description of Artificial Sequence: Synthetic oligonucleotide
  Sense Strand Starting at position 723 of SEQ ID NO: 318911
gaaucagagcauggugaaa

SEQ ID NO: 375604 - RNA, 19 nt, Artificial Sequence
  Description of Artificial Sequence: Synthetic oligonucleotide
  Antisense Strand to SEQ ID NO: 375603
uuucaccaugcucugauuc

SEQ ID NO: 375605 - RNA, 19 nt, Artificial Sequence
  Description of Artificial Sequence: Synthetic oligonucleotide
  Sense Strand Starting at position 723 of SEQ ID NO: 318930
ggguuaauggacgaugucu

SEQ ID NO: 375606 - RNA, 19 nt, Artificial Sequence
  Description of Artificial Sequence: Synthetic oligonucleotide
  Antisense Strand to SEQ ID NO: 375605
agacaucguccauuaaccc

SEQ ID NO: 375607 - RNA, 19 nt, Artificial Sequence
  Description of Artificial Sequence: Synthetic oligonucleotide
  Sense Strand Starting at position 723 of SEQ ID NO: 318932
guuaauggacgaugucuga

SEQ ID NO: 375608 - RNA, 19 nt, Artificial Sequence
  Description of Artificial Sequence: Synthetic oligonucleotide
  Antisense Strand to SEQ ID NO: 375607
ucagacaucguccauuaac

SEQ ID NO: 375609 - RNA, 19 nt, Artificial Sequence
  Description of Artificial Sequence: Synthetic oligonucleotide
  Sense Strand Starting at position 723 of SEQ ID NO: 319012
agcguucuugguuucagua

SEQ ID NO: 375610 - RNA, 19 nt, Artificial Sequence
  Description of Artificial Sequence: Synthetic oligonucleotide
  Antisense Strand to SEQ ID NO: 375609
uacugaaaccaagaacgcu

SEQ ID NO: 375611 - RNA, 19 nt, Artificial Sequence
  Description of Artificial Sequence: Synthetic oligonucleotide
  Sense Strand Starting at position 723 of SEQ ID NO: 319058
aaacaauggcuuugugacu

SEQ ID NO: 375612 - RNA, 19 nt, Artificial Sequence
  Description of Artificial Sequence: Synthetic oligonucleotide
  Antisense Strand to SEQ ID NO: 375611
agucacaaagccauuguuu

SEQ ID NO: 375613 - RNA, 19 nt, Artificial Sequence
  Description of Artificial Sequence: Synthetic oligonucleotide
  Sense Strand Starting at position 723 of SEQ ID NO: 319079
ggcuucuugguggacauua

SEQ ID NO: 375614 - RNA, 19 nt, Artificial Sequence
  Description of Artificial Sequence: Synthetic oligonucleotide
  Antisense Strand to SEQ ID NO: 375613
uaauguccaccaagaagcc

SEQ ID NO: 375615 - RNA, 19 nt, Artificial Sequence
  Description of Artificial Sequence: Synthetic oligonucleotide
  Sense Strand Starting at position 723 of SEQ ID NO: 319108
ucgagaacucagugaagaa

SEQ ID NO: 375616 - RNA, 19 nt, Artificial Sequence
  Description of Artificial Sequence: Synthetic oligonucleotide
  Antisense Strand to SEQ ID NO: 375615
uucuucacugaguucucga

SEQ ID NO: 375617 - RNA, 19 nt, Artificial Sequence
  Description of Artificial Sequence: Synthetic oligonucleotide
  Sense Strand Starting at position 723 of SEQ ID NO: 319125
aauuacgaguuaguaaagu

SEQ ID NO: 375618 - RNA, 19 nt, Artificial Sequence
  Description of Artificial Sequence: Synthetic oligonucleotide
  Antisense Strand to SEQ ID NO: 375617
acuuuacuaacucguaauu

SEQ ID NO: 375619 - RNA, 19 nt, Artificial Sequence
  Description of Artificial Sequence: Synthetic oligonucleotide
  Sense Strand Starting at position 723 of SEQ ID NO: 319177
uuucgaaguuaagcugaau

SEQ ID NO: 375620 - RNA, 19 nt, Artificial Sequence
  Description of Artificial Sequence: Synthetic oligonucleotide
  Antisense Strand to SEQ ID NO: 375619
auucagcuuaacuucgaaa

SEQ ID NO: 375621 - RNA, 19 nt, Artificial Sequence
  Description of Artificial Sequence: Synthetic oligonucleotide
  Sense Strand Starting at position 724 of SEQ ID NO: 315275
ugaggcuuauagucccaua

SEQ ID NO: 375622 - RNA, 19 nt, Artificial Sequence
  Description of Artificial Sequence: Synthetic oligonucleotide
  Antisense Strand to SEQ ID NO: 375621
uaugggacuauaagccuca

SEQ ID NO: 375623 - RNA, 19 nt, Artificial Sequence
  Description of Artificial Sequence: Synthetic oligonucleotide
  Sense Strand Starting at position 724 of SEQ ID NO: 315452
cgacaauauuaccaacaga

SEQ ID NO: 375624 - RNA, 19 nt, Artificial Sequence
  Description of Artificial Sequence: Synthetic oligonucleotide
  Antisense Strand to SEQ ID NO: 375623
ucuguugguaauauugucg

SEQ ID NO: 375625 - RNA, 19 nt, Artificial Sequence
  Description of Artificial Sequence: Synthetic oligonucleotide
  Sense Strand Starting at position 724 of SEQ ID NO: 315531
accaguugagcauaagcau

SEQ ID NO: 375626 - RNA, 19 nt, Artificial Sequence
  Description of Artificial Sequence: Synthetic oligonucleotide
  Antisense Strand to SEQ ID NO: 375625
augcuuaugcucaacuggu

SEQ ID NO: 375627 - RNA, 19 nt, Artificial Sequence
  Description of Artificial Sequence: Synthetic oligonucleotide
  Sense Strand Starting at position 724 of SEQ ID NO: 315546
gcauuacuauaucagacag

SEQ ID NO: 375628 - RNA, 19 nt, Artificial Sequence
  Description of Artificial Sequence: Synthetic oligonucleotide
  Antisense Strand to SEQ ID NO: 375627
cugucugauauaguaaugc

SEQ ID NO: 375629 - RNA, 19 nt, Artificial Sequence
  Description of Artificial Sequence: Synthetic oligonucleotide
  Sense Strand Starting at position 724 of SEQ ID NO: 315693
gaagcugugcuaugcaauu

SEQ ID NO: 375630 - RNA, 19 nt, Artificial Sequence
  Description of Artificial Sequence: Synthetic oligonucleotide
  Antisense Strand to SEQ ID NO: 375629
aauugcauagcacagcuuc

SEQ ID NO: 375631 - RNA, 19 nt, Artificial Sequence
  Description of Artificial Sequence: Synthetic oligonucleotide
  Sense Strand Starting at position 724 of SEQ ID NO: 315706
gcaauuacaguuuguucua

SEQ ID NO: 375632 - RNA, 19 nt, Artificial Sequence
  Description of Artificial Sequence: Synthetic oligonucleotide
  Antisense Strand to SEQ ID NO: 375631
uagaacaaacuguaauugc

SEQ ID NO: 375633 - RNA, 19 nt, Artificial Sequence
  Description of Artificial Sequence: Synthetic oligonucleotide
  Sense Strand Starting at position 724 of SEQ ID NO: 315711
uacaguuuguucuauggaa

SEQ ID NO: 375634 - RNA, 19 nt, Artificial Sequence
  Description of Artificial Sequence: Synthetic oligonucleotide
  Antisense Strand to SEQ ID NO: 375633
uuccauagaacaaacugua

SEQ ID NO: 375635 - RNA, 19 nt, Artificial Sequence
  Description of Artificial Sequence: Synthetic oligonucleotide
  Sense Strand Starting at position 724 of SEQ ID NO: 315713
caguuuguucuauggaaac

SEQ ID NO: 375636 - RNA, 19 nt, Artificial Sequence
  Description of Artificial Sequence: Synthetic oligonucleotide
  Antisense Strand to SEQ ID NO: 375635
guuuccauagaacaaacug

SEQ ID NO: 375637 - RNA, 19 nt, Artificial Sequence
  Description of Artificial Sequence: Synthetic oligonucleotide
  Sense Strand Starting at position 724 of SEQ ID NO: 315715
guuuguucuauggaaacug

SEQ ID NO: 375638 - RNA, 19 nt, Artificial Sequence
  Description of Artificial Sequence: Synthetic oligonucleotide
  Antisense Strand to SEQ ID NO: 375637
caguuuccauagaacaaac

SEQ ID NO: 375639 - RNA, 19 nt, Artificial Sequence
  Description of Artificial Sequence: Synthetic oligonucleotide
  Sense Strand Starting at position 724 of SEQ ID NO: 315767
uuaaacugugucugcagaa

SEQ ID NO: 375640 - RNA, 19 nt, Artificial Sequence
  Description of Artificial Sequence: Synthetic oligonucleotide
  Antisense Strand to SEQ ID NO: 375639
uucugcagacacaguuuaa

SEQ ID NO: 375641 - RNA, 19 nt, Artificial Sequence
  Description of Artificial Sequence: Synthetic oligonucleotide
  Sense Strand Starting at position 724 of SEQ ID NO: 315768
uaaacugugucugcagaag

SEQ ID NO: 375642 - RNA, 19 nt, Artificial Sequence
  Description of Artificial Sequence: Synthetic oligonucleotide
  Antisense Strand to SEQ ID NO: 375641
cuucugcagacacaguuua

SEQ ID NO: 375643 - RNA, 19 nt, Artificial Sequence
  Description of Artificial Sequence: Synthetic oligonucleotide
  Sense Strand Starting at position 724 of SEQ ID NO: 315816
ucuucuuguuucccagaca

SEQ ID NO: 375644 - RNA, 19 nt, Artificial Sequence
  Description of Artificial Sequence: Synthetic oligonucleotide
  Antisense Strand to SEQ ID NO: 375643
ugucugggaaacaagaaga

SEQ ID NO: 375645 - RNA, 19 nt, Artificial Sequence
  Description of Artificial Sequence: Synthetic oligonucleotide
  Sense Strand Starting at position 724 of SEQ ID NO: 315844
uguuucccagccugaaaua

SEQ ID NO: 375646 - RNA, 19 nt, Artificial Sequence
  Description of Artificial Sequence: Synthetic oligonucleotide
  Antisense Strand to SEQ ID NO: 375645
uauuucaggcugggaaaca

SEQ ID NO: 375647 - RNA, 19 nt, Artificial Sequence
  Description of Artificial Sequence: Synthetic oligonucleotide
  Sense Strand Starting at position 724 of SEQ ID NO: 315853
gccugaaauacggaguucu

SEQ ID NO: 375648 - RNA, 19 nt, Artificial Sequence
  Description of Artificial Sequence: Synthetic oligonucleotide
  Antisense Strand to SEQ ID NO: 375647
agaacuccguauuucaggc

SEQ ID NO: 375649 - RNA, 19 nt, Artificial Sequence
  Description of Artificial Sequence: Synthetic oligonucleotide
  Sense Strand Starting at position 724 of SEQ ID NO: 315863
cggaguucuggacacgaag

SEQ ID NO: 375650 - RNA, 19 nt, Artificial Sequence
  Description of Artificial Sequence: Synthetic oligonucleotide
  Antisense Strand to SEQ ID NO: 375649
cuucguguccagaacuccg

SEQ ID NO: 375651 - RNA, 19 nt, Artificial Sequence
  Description of Artificial Sequence: Synthetic oligonucleotide
  Sense Strand Starting at position 724 of SEQ ID NO: 316116
gaggaaucgacuugaucga

SEQ ID NO: 375652 - RNA, 19 nt, Artificial Sequence
  Description of Artificial Sequence: Synthetic oligonucleotide
  Antisense Strand to SEQ ID NO: 375651
ucgaucaagucgauuccuc

SEQ ID NO: 375653 - RNA, 19 nt, Artificial Sequence
  Description of Artificial Sequence: Synthetic oligonucleotide
  Sense Strand Starting at position 724 of SEQ ID NO: 316120
aaucgacuugaucgagaag

SEQ ID NO: 375654 - RNA, 19 nt, Artificial Sequence
  Description of Artificial Sequence: Synthetic oligonucleotide
  Antisense Strand to SEQ ID NO: 375653
cuucucgaucaagucgauu

SEQ ID NO: 375655 - RNA, 19 nt, Artificial Sequence
  Description of Artificial Sequence: Synthetic oligonucleotide
  Sense Strand Starting at position 724 of SEQ ID NO: 316123
cgacuugaucgagaagcua

SEQ ID NO: 375656 - RNA, 19 nt, Artificial Sequence
  Description of Artificial Sequence: Synthetic oligonucleotide
  Antisense Strand to SEQ ID NO: 375655
uagcuucucgaucaagucg

SEQ ID NO: 375657 - RNA, 19 nt, Artificial Sequence
  Description of Artificial Sequence: Synthetic oligonucleotide
  Sense Strand Starting at position 724 of SEQ ID NO: 316148
gauauuugguugcaauuac

SEQ ID NO: 375658 - RNA, 19 nt, Artificial Sequence
  Description of Artificial Sequence: Synthetic oligonucleotide
  Antisense Strand to SEQ ID NO: 375657
guaauugcaaccaaauauc

SEQ ID NO: 375659 - RNA, 19 nt, Artificial Sequence
  Description of Artificial Sequence: Synthetic oligonucleotide
  Sense Strand Starting at position 724 of SEQ ID NO: 316251
ccgaccaacccuugugaga

SEQ ID NO: 375660 - RNA, 19 nt, Artificial Sequence
  Description of Artificial Sequence: Synthetic oligonucleotide
  Antisense Strand to SEQ ID NO: 375659
ucucacaaggguuggucgg

SEQ ID NO: 375661 - RNA, 19 nt, Artificial Sequence
  Description of Artificial Sequence: Synthetic oligonucleotide
  Sense Strand Starting at position 724 of SEQ ID NO: 316873
gggacucaccagugggauu

SEQ ID NO: 375662 - RNA, 19 nt, Artificial Sequence
  Description of Artificial Sequence: Synthetic oligonucleotide
  Antisense Strand to SEQ ID NO: 375661
aaucccacuggugaguccc

SEQ ID NO: 375663 - RNA, 19 nt, Artificial Sequence
  Description of Artificial Sequence: Synthetic oligonucleotide
  Sense Strand Starting at position 724 of SEQ ID NO: 317291
ggagcaguucccuggguga

SEQ ID NO: 375664 - RNA, 19 nt, Artificial Sequence
  Description of Artificial Sequence: Synthetic oligonucleotide
  Antisense Strand to SEQ ID NO: 375663
ucacccagggaacugcucc

SEQ ID NO: 375665 - RNA, 19 nt, Artificial Sequence
  Description of Artificial Sequence: Synthetic oligonucleotide
  Sense Strand Starting at position 724 of SEQ ID NO: 317313
gaagguuuccgcuaggucu

SEQ ID NO: 375666 - RNA, 19 nt, Artificial Sequence
  Description of Artificial Sequence: Synthetic oligonucleotide
  Antisense Strand to SEQ ID NO: 375665
agaccuagcggaaaccuuc

SEQ ID NO: 375667 - RNA, 19 nt, Artificial Sequence
  Description of Artificial Sequence: Synthetic oligonucleotide
  Sense Strand Starting at position 724 of SEQ ID NO: 317320
uccgcuaggucucccaaau

SEQ ID NO: 375668 - RNA, 19 nt, Artificial Sequence
  Description of Artificial Sequence: Synthetic oligonucleotide
  Antisense Strand to SEQ ID NO: 375667
auuugggagaccuagcgga

SEQ ID NO: 375669 - RNA, 19 nt, Artificial Sequence
  Description of Artificial Sequence: Synthetic oligonucleotide
  Sense Strand Starting at position 724 of SEQ ID NO: 317505
gggauucucuaguccugag

SEQ ID NO: 375670 - RNA, 19 nt, Artificial Sequence
  Description of Artificial Sequence: Synthetic oligonucleotide
  Antisense Strand to SEQ ID NO: 375669
cucaggacuagagaauccc

SEQ ID NO: 375671 - RNA, 19 nt, Artificial Sequence
  Description of Artificial Sequence: Synthetic oligonucleotide
  Sense Strand Starting at position 724 of SEQ ID NO: 317779
cucucaugucaagaucuga

SEQ ID NO: 375672 - RNA, 19 nt, Artificial Sequence
  Description of Artificial Sequence: Synthetic oligonucleotide
  Antisense Strand to SEQ ID NO: 375671
ucagaucuugacaugagag

SEQ ID NO: 375673 - RNA, 19 nt, Artificial Sequence
  Description of Artificial Sequence: Synthetic oligonucleotide
  Sense Strand Starting at position 724 of SEQ ID NO: 317784
augucaagaucugaacuga

SEQ ID NO: 375674 - RNA, 19 nt, Artificial Sequence
  Description of Artificial Sequence: Synthetic oligonucleotide
  Antisense Strand to SEQ ID NO: 375673
ucaguucagaucuugacau

SEQ ID NO: 375675 - RNA, 19 nt, Artificial Sequence
  Description of Artificial Sequence: Synthetic oligonucleotide
  Sense Strand Starting at position 724 of SEQ ID NO: 317916
acugaaaucagccguaaug

SEQ ID NO: 375676 - RNA, 19 nt, Artificial Sequence
  Description of Artificial Sequence: Synthetic oligonucleotide
  Antisense Strand to SEQ ID NO: 375675
cauuacggcugauuucagu

SEQ ID NO: 375677 - RNA, 19 nt, Artificial Sequence
  Description of Artificial Sequence: Synthetic oligonucleotide
  Sense Strand Starting at position 724 of SEQ ID NO: 317993
agcgauuccuccucaaagg

SEQ ID NO: 375678 - RNA, 19 nt, Artificial Sequence
  Description of Artificial Sequence: Synthetic oligonucleotide
  Antisense Strand to SEQ ID NO: 375677
ccuuugaggaggaaucgcu

SEQ ID NO: 375679 - RNA, 19 nt, Artificial Sequence
  Description of Artificial Sequence: Synthetic oligonucleotide
  Sense Strand Starting at position 724 of SEQ ID NO: 318048
aaaggcaguuucuuuguaa

SEQ ID NO: 375680 - RNA, 19 nt, Artificial Sequence
  Description of Artificial Sequence: Synthetic oligonucleotide
  Antisense Strand to SEQ ID NO: 375679
uuacaaagaaacugccuuu

SEQ ID NO: 375681 - RNA, 19 nt, Artificial Sequence
  Description of Artificial Sequence: Synthetic oligonucleotide
  Sense Strand Starting at position 724 of SEQ ID NO: 318049
aaggcaguuucuuuguaaa

SEQ ID NO: 375682 - RNA, 19 nt, Artificial Sequence
  Description of Artificial Sequence: Synthetic oligonucleotide
  Antisense Strand to SEQ ID NO: 375681
uuuacaaagaaacugccuu

SEQ ID NO: 375683 - RNA, 19 nt, Artificial Sequence
  Description of Artificial Sequence: Synthetic oligonucleotide
  Sense Strand Starting at position 724 of SEQ ID NO: 318137
guguacaaguaccuuuaau

SEQ ID NO: 375684 - RNA, 19 nt, Artificial Sequence
  Description of Artificial Sequence: Synthetic oligonucleotide
  Antisense Strand to SEQ ID NO: 375683
auuaaagguacuuguacac

SEQ ID NO: 375685 - RNA, 19 nt, Artificial Sequence
  Description of Artificial Sequence: Synthetic oligonucleotide
  Sense Strand Starting at position 724 of SEQ ID NO: 318273
uggguuugcaauuaucugu

SEQ ID NO: 375686 - RNA, 19 nt, Artificial Sequence
  Description of Artificial Sequence: Synthetic oligonucleotide
  Antisense Strand to SEQ ID NO: 375685
acagauaauugcaaaccca

SEQ ID NO: 375687 - RNA, 19 nt, Artificial Sequence
  Description of Artificial Sequence: Synthetic oligonucleotide
  Sense Strand Starting at position 724 of SEQ ID NO: 318527
gcuuucucugugcaucuua

SEQ ID NO: 375688 - RNA, 19 nt, Artificial Sequence
  Description of Artificial Sequence: Synthetic oligonucleotide
  Antisense Strand to SEQ ID NO: 375687
uaagaugcacagagaaagc

SEQ ID NO: 375689 - RNA, 19 nt, Artificial Sequence
  Description of Artificial Sequence: Synthetic oligonucleotide
  Sense Strand Starting at position 724 of SEQ ID NO: 318572
ucccgaaauauugguguuu

SEQ ID NO: 375690 - RNA, 19 nt, Artificial Sequence
  Description of Artificial Sequence: Synthetic oligonucleotide
  Antisense Strand to SEQ ID NO: 375689
aaacaccaauauuucggga

SEQ ID NO: 375691 - RNA, 19 nt, Artificial Sequence
  Description of Artificial Sequence: Synthetic oligonucleotide
  Sense Strand Starting at position 724 of SEQ ID NO: 319064
gauagucgacaguauggau

SEQ ID NO: 375692 - RNA, 19 nt, Artificial Sequence
  Description of Artificial Sequence: Synthetic oligonucleotide
  Antisense Strand to SEQ ID NO: 375691
auccauacugucgacuauc

SEQ ID NO: 375693 - RNA, 19 nt, Artificial Sequence
  Description of Artificial Sequence: Synthetic oligonucleotide
  Sense Strand Starting at position 724 of SEQ ID NO: 319071
gacaguauggauugguaac

SEQ ID NO: 375694 - RNA, 19 nt, Artificial Sequence
  Description of Artificial Sequence: Synthetic oligonucleotide
  Antisense Strand to SEQ ID NO: 375693
guuaccaauccauacuguc

SEQ ID NO: 375695 - RNA, 19 nt, Artificial Sequence
  Description of Artificial Sequence: Synthetic oligonucleotide
  Sense Strand Starting at position 724 of SEQ ID NO: 319072
acaguauggauugguaacu

SEQ ID NO: 375696 - RNA, 19 nt, Artificial Sequence
  Description of Artificial Sequence: Synthetic oligonucleotide
  Antisense Strand to SEQ ID NO: 375695
aguuaccaauccauacugu

SEQ ID NO: 375697 - RNA, 19 nt, Artificial Sequence
  Description of Artificial Sequence: Synthetic oligonucleotide
  Sense Strand Starting at position 724 of SEQ ID NO: 319084
gguaacugguuucccagaa

SEQ ID NO: 375698 - RNA, 19 nt, Artificial Sequence
  Description of Artificial Sequence: Synthetic oligonucleotide
  Antisense Strand to SEQ ID NO: 375697
uucugggaaaccaguuacc

SEQ ID NO: 375699 - RNA, 19 nt, Artificial Sequence
  Description of Artificial Sequence: Synthetic oligonucleotide
  Sense Strand Starting at position 724 of SEQ ID NO: 319085
guaacugguuucccagaac

SEQ ID NO: 375700 - RNA, 19 nt, Artificial Sequence
  Description of Artificial Sequence: Synthetic oligonucleotide
  Antisense Strand to SEQ ID NO: 375699
guucugggaaaccaguuac

SEQ ID NO: 375701 - RNA, 19 nt, Artificial Sequence
  Description of Artificial Sequence: Synthetic oligonucleotide
  Sense Strand Starting at position 725 of SEQ ID NO: 315237
guaaaugcccuguaaauuc

SEQ ID NO: 375702 - RNA, 19 nt, Artificial Sequence
  Description of Artificial Sequence: Synthetic oligonucleotide
  Antisense Strand to SEQ ID NO: 375701
gaauuuacagggcauuuac

SEQ ID NO: 375703 - RNA, 19 nt, Artificial Sequence
  Description of Artificial Sequence: Synthetic oligonucleotide
  Sense Strand Starting at position 725 of SEQ ID NO: 315309
gcagaaaugaugcaaguuu

SEQ ID NO: 375704 - RNA, 19 nt, Artificial Sequence
  Description of Artificial Sequence: Synthetic oligonucleotide
  Antisense Strand to SEQ ID NO: 375703
aaacuugcaucauuucugc

SEQ ID NO: 375705 - RNA, 19 nt, Artificial Sequence
  Description of Artificial Sequence: Synthetic oligonucleotide
  Sense Strand Starting at position 725 of SEQ ID NO: 315333
ccuaauuaacuuugucguu

SEQ ID NO: 375706 - RNA, 19 nt, Artificial Sequence
  Description of Artificial Sequence: Synthetic oligonucleotide
  Antisense Strand to SEQ ID NO: 375705
aacgacaaaguuaauuagg

SEQ ID NO: 375707 - RNA, 19 nt, Artificial Sequence
  Description of Artificial Sequence: Synthetic oligonucleotide
  Sense Strand Starting at position 725 of SEQ ID NO: 315358
caguuaauucuggaagguu

SEQ ID NO: 375708 - RNA, 19 nt, Artificial Sequence
  Description of Artificial Sequence: Synthetic oligonucleotide
  Antisense Strand to SEQ ID NO: 375707
aaccuuccagaauuaacug

SEQ ID NO: 375709 - RNA, 19 nt, Artificial Sequence
  Description of Artificial Sequence: Synthetic oligonucleotide
  Sense Strand Starting at position 725 of SEQ ID NO: 315410
ucuggaaucucacugugga

SEQ ID NO: 375710 - RNA, 19 nt, Artificial Sequence
  Description of Artificial Sequence: Synthetic oligonucleotide
  Antisense Strand to SEQ ID NO: 375709
uccacagugagauuccaga

SEQ ID NO: 375711 - RNA, 19 nt, Artificial Sequence
  Description of Artificial Sequence: Synthetic oligonucleotide
  Sense Strand Starting at position 725 of SEQ ID NO: 315411
cuggaaucucacuguggaa

SEQ ID NO: 375712 - RNA, 19 nt, Artificial Sequence
  Description of Artificial Sequence: Synthetic oligonucleotide
  Antisense Strand to SEQ ID NO: 375711
uuccacagugagauuccag

SEQ ID NO: 375713 - RNA, 19 nt, Artificial Sequence
  Description of Artificial Sequence: Synthetic oligonucleotide
  Sense Strand Starting at position 725 of SEQ ID NO: 315413
ggaaucucacuguggaaca

SEQ ID NO: 375714 - RNA, 19 nt, Artificial Sequence
  Description of Artificial Sequence: Synthetic oligonucleotide
  Antisense Strand to SEQ ID NO: 375713
uguuccacagugagauucc

SEQ ID NO: 375715 - RNA, 19 nt, Artificial Sequence
  Description of Artificial Sequence: Synthetic oligonucleotide
  Sense Strand Starting at position 725 of SEQ ID NO: 315423
uguggaacauaugacuaaa

SEQ ID NO: 375716 - RNA, 19 nt, Artificial Sequence
  Description of Artificial Sequence: Synthetic oligonucleotide
  Antisense Strand to SEQ ID NO: 375715
uuuagucauauguuccaca

SEQ ID NO: 375717 - RNA, 19 nt, Artificial Sequence
  Description of Artificial Sequence: Synthetic oligonucleotide
  Sense Strand Starting at position 725 of SEQ ID NO: 315544
ugaggcuuauagucccaua

SEQ ID NO: 375718 - RNA, 19 nt, Artificial Sequence
  Description of Artificial Sequence: Synthetic oligonucleotide
  Antisense Strand to SEQ ID NO: 375717
uaugggacuauaagccuca

SEQ ID NO: 375719 - RNA, 19 nt, Artificial Sequence
  Description of Artificial Sequence: Synthetic oligonucleotide
  Sense Strand Starting at position 725 of SEQ ID NO: 315721
cgacaauauuaccaacaga

SEQ ID NO: 375720 - RNA, 19 nt, Artificial Sequence
  Description of Artificial Sequence: Synthetic oligonucleotide
  Antisense Strand to SEQ ID NO: 375719
ucuguugguaauauugucg

SEQ ID NO: 375721 - RNA, 19 nt, Artificial Sequence
  Description of Artificial Sequence: Synthetic oligonucleotide
  Sense Strand Starting at position 725 of SEQ ID NO: 315800
accaguugagcauaagcau

SEQ ID NO: 375722 - RNA, 19 nt, Artificial Sequence
  Description of Artificial Sequence: Synthetic oligonucleotide
  Antisense Strand to SEQ ID NO: 375721
augcuuaugcucaacuggu

SEQ ID NO: 375723 - RNA, 19 nt, Artificial Sequence
  Description of Artificial Sequence: Synthetic oligonucleotide
  Sense Strand Starting at position 725 of SEQ ID NO: 315975
gcaauuacaguuuguucua

SEQ ID NO: 375724 - RNA, 19 nt, Artificial Sequence
  Description of Artificial Sequence: Synthetic oligonucleotide
  Antisense Strand to SEQ ID NO: 375723
uagaacaaacuguaauugc

SEQ ID NO: 375725 - RNA, 19 nt, Artificial Sequence
  Description of Artificial Sequence: Synthetic oligonucleotide
  Sense Strand Starting at position 725 of SEQ ID NO: 315982
caguuuguucuauggaaac

SEQ ID NO: 375726 - RNA, 19 nt, Artificial Sequence
  Description of Artificial Sequence: Synthetic oligonucleotide
  Antisense Strand to SEQ ID NO: 375725
guuuccauagaacaaacug

SEQ ID NO: 375727 - RNA, 19 nt, Artificial Sequence
  Description of Artificial Sequence: Synthetic oligonucleotide
  Sense Strand Starting at position 725 of SEQ ID NO: 315984
guuuguucuauggaaacug

SEQ ID NO: 375728 - RNA, 19 nt, Artificial Sequence
  Description of Artificial Sequence: Synthetic oligonucleotide
  Antisense Strand to SEQ ID NO: 375727
caguuuccauagaacaaac

SEQ ID NO: 375729 - RNA, 19 nt, Artificial Sequence
  Description of Artificial Sequence: Synthetic oligonucleotide
  Sense Strand Starting at position 725 of SEQ ID NO: 316036
uuaaacugugucugcagaa

SEQ ID NO: 375730 - RNA, 19 nt, Artificial Sequence
  Description of Artificial Sequence: Synthetic oligonucleotide
  Antisense Strand to SEQ ID NO: 375729
uucugcagacacaguuuaa

SEQ ID NO: 375731 - RNA, 19 nt, Artificial Sequence
  Description of Artificial Sequence: Synthetic oligonucleotide
  Sense Strand Starting at position 725 of SEQ ID NO: 316037
uaaacugugucugcagaag

SEQ ID NO: 375732 - RNA, 19 nt, Artificial Sequence
  Description of Artificial Sequence: Synthetic oligonucleotide
  Antisense Strand to SEQ ID NO: 375731
cuucugcagacacaguuua

SEQ ID NO: 375733 - RNA, 19 nt, Artificial Sequence
  Description of Artificial Sequence: Synthetic oligonucleotide
  Sense Strand Starting at position 725 of SEQ ID NO: 316085
ucuucuuguuucccagaca

SEQ ID NO: 375734 - RNA, 19 nt, Artificial Sequence
  Description of Artificial Sequence: Synthetic oligonucleotide
  Antisense Strand to SEQ ID NO: 375733
ugucugggaaacaagaaga

SEQ ID NO: 375735 - RNA, 19 nt, Artificial Sequence
  Description of Artificial Sequence: Synthetic oligonucleotide
  Sense Strand Starting at position 725 of SEQ ID NO: 316113
uguuucccagccugaaaua

SEQ ID NO: 375736 - RNA, 19 nt, Artificial Sequence
  Description of Artificial Sequence: Synthetic oligonucleotide
  Antisense Strand to SEQ ID NO: 375735
uauuucaggcugggaaaca

SEQ ID NO: 375737 - RNA, 19 nt, Artificial Sequence
  Description of Artificial Sequence: Synthetic oligonucleotide
  Sense Strand Starting at position 725 of SEQ ID NO: 316122
gccugaaauacggaguucu

SEQ ID NO: 375738 - RNA, 19 nt, Artificial Sequence
  Description of Artificial Sequence: Synthetic oligonucleotide
  Antisense Strand to SEQ ID NO: 375737
agaacuccguauuucaggc

SEQ ID NO: 375739 - RNA, 19 nt, Artificial Sequence
  Description of Artificial Sequence: Synthetic oligonucleotide
  Sense Strand Starting at position 725 of SEQ ID NO: 316132
cggaguucuggacacgaag

SEQ ID NO: 375740 - RNA, 19 nt, Artificial Sequence
  Description of Artificial Sequence: Synthetic oligonucleotide
  Antisense Strand to SEQ ID NO: 375739
cuucguguccagaacuccg

SEQ ID NO: 375741 - RNA, 19 nt, Artificial Sequence
  Description of Artificial Sequence: Synthetic oligonucleotide
  Sense Strand Starting at position 725 of SEQ ID NO: 316385
gaggaaucgacuugaucga

SEQ ID NO: 375742 - RNA, 19 nt, Artificial Sequence
  Description of Artificial Sequence: Synthetic oligonucleotide
  Antisense Strand to SEQ ID NO: 375741
ucgaucaagucgauuccuc

SEQ ID NO: 375743 - RNA, 19 nt, Artificial Sequence
  Description of Artificial Sequence: Synthetic oligonucleotide
  Sense Strand Starting at position 725 of SEQ ID NO: 316389
aaucgacuugaucgagaag

SEQ ID NO: 375744 - RNA, 19 nt, Artificial Sequence
  Description of Artificial Sequence: Synthetic oligonucleotide
  Antisense Strand to SEQ ID NO: 375743
cuucucgaucaagucgauu

SEQ ID NO: 375745 - RNA, 19 nt, Artificial Sequence
  Description of Artificial Sequence: Synthetic oligonucleotide
  Sense Strand Starting at position 725 of SEQ ID NO: 316392
cgacuugaucgagaagcua

SEQ ID NO: 375746 - RNA, 19 nt, Artificial Sequence
  Description of Artificial Sequence: Synthetic oligonucleotide
  Antisense Strand to SEQ ID NO: 375745
uagcuucucgaucaagucg

SEQ ID NO: 375747 - RNA, 19 nt, Artificial Sequence
  Description of Artificial Sequence: Synthetic oligonucleotide
  Sense Strand Starting at position 725 of SEQ ID NO: 316417
gauauuugguugcaauuac

SEQ ID NO: 375748 - RNA, 19 nt, Artificial Sequence
  Description of Artificial Sequence: Synthetic oligonucleotide
  Antisense Strand to SEQ ID NO: 375747
guaauugcaaccaaauauc

SEQ ID NO: 375749 - RNA, 19 nt, Artificial Sequence
  Description of Artificial Sequence: Synthetic oligonucleotide
  Sense Strand Starting at position 725 of SEQ ID NO: 316520
ccgaccaacccuugugaga

SEQ ID NO: 375750 - RNA, 19 nt, Artificial Sequence
  Description of Artificial Sequence: Synthetic oligonucleotide
  Antisense Strand to SEQ ID NO: 375749
ucucacaaggguuggucgg

SEQ ID NO: 375751 - RNA, 19 nt, Artificial Sequence
  Description of Artificial Sequence: Synthetic oligonucleotide
  Sense Strand Starting at position 725 of SEQ ID NO: 317142
gggacucaccagugggauu

SEQ ID NO: 375752 - RNA, 19 nt, Artificial Sequence
  Description of Artificial Sequence: Synthetic oligonucleotide
  Antisense Strand to SEQ ID NO: 375751
aaucccacuggugaguccc

SEQ ID NO: 375753 - RNA, 19 nt, Artificial Sequence
  Description of Artificial Sequence: Synthetic oligonucleotide
  Sense Strand Starting at position 725 of SEQ ID NO: 317560
ggagcaguucccuggguga

SEQ ID NO: 375754 - RNA, 19 nt, Artificial Sequence
  Description of Artificial Sequence: Synthetic oligonucleotide
  Antisense Strand to SEQ ID NO: 375753
ucacccagggaacugcucc

SEQ ID NO: 375755 - RNA, 19 nt, Artificial Sequence
  Description of Artificial Sequence: Synthetic oligonucleotide
  Sense Strand Starting at position 725 of SEQ ID NO: 317582
gaagguuuccgcuaggucu

SEQ ID NO: 375756 - RNA, 19 nt, Artificial Sequence
  Description of Artificial Sequence: Synthetic oligonucleotide
  Antisense Strand to SEQ ID NO: 375755
agaccuagcggaaaccuuc

SEQ ID NO: 375757 - RNA, 19 nt, Artificial Sequence
  Description of Artificial Sequence: Synthetic oligonucleotide
  Sense Strand Starting at position 725 of SEQ ID NO: 317589
uccgcuaggucucccaaau

SEQ ID NO: 375758 - RNA, 19 nt, Artificial Sequence
  Description of Artificial Sequence: Synthetic oligonucleotide
  Antisense Strand to SEQ ID NO: 375757
auuugggagaccuagcgga

SEQ ID NO: 375759 - RNA, 19 nt, Artificial Sequence
  Description of Artificial Sequence: Synthetic oligonucleotide
  Sense Strand Starting at position 725 of SEQ ID NO: 317774
gggauucucuaguccugag

SEQ ID NO: 375760 - RNA, 19 nt, Artificial Sequence
  Description of Artificial Sequence: Synthetic oligonucleotide
  Antisense Strand to SEQ ID NO: 375759
cucaggacuagagaauccc

SEQ ID NO: 375761 - RNA, 19 nt, Artificial Sequence
  Description of Artificial Sequence: Synthetic oligonucleotide
  Sense Strand Starting at position 725 of SEQ ID NO: 318048
cucucaugucaagaucuga

SEQ ID NO: 375762 - RNA, 19 nt, Artificial Sequence
  Description of Artificial Sequence: Synthetic oligonucleotide
  Antisense Strand to SEQ ID NO: 375761
ucagaucuugacaugagag

SEQ ID NO: 375763 - RNA, 19 nt, Artificial Sequence
  Description of Artificial Sequence: Synthetic oligonucleotide
  Sense Strand Starting at position 725 of SEQ ID NO: 318053
augucaagaucugaacuga

SEQ ID NO: 375764 - RNA, 19 nt, Artificial Sequence
  Description of Artificial Sequence: Synthetic oligonucleotide
  Antisense Strand to SEQ ID NO: 375763
ucaguucagaucuugacau

SEQ ID NO: 375765 - RNA, 19 nt, Artificial Sequence
  Description of Artificial Sequence: Synthetic oligonucleotide
  Sense Strand Starting at position 725 of SEQ ID NO: 318185
acugaaaucagccguaaug

SEQ ID NO: 375766 - RNA, 19 nt, Artificial Sequence
  Description of Artificial Sequence: Synthetic oligonucleotide
  Antisense Strand to SEQ ID NO: 375765
cauuacggcugauuucagu

SEQ ID NO: 375767 - RNA, 19 nt, Artificial Sequence
  Description of Artificial Sequence: Synthetic oligonucleotide
  Sense Strand Starting at position 725 of SEQ ID NO: 318262
agcgauuccuccucaaagg

SEQ ID NO: 375768 - RNA, 19 nt, Artificial Sequence
  Description of Artificial Sequence: Synthetic oligonucleotide
  Antisense Strand to SEQ ID NO: 375767
ccuuugaggaggaaucgcu

SEQ ID NO: 375769 - RNA, 19 nt, Artificial Sequence
  Description of Artificial Sequence: Synthetic oligonucleotide
  Sense Strand Starting at position 725 of SEQ ID NO: 318317
aaaggcaguuucuuuguaa

SEQ ID NO: 375770 - RNA, 19 nt, Artificial Sequence
  Description of Artificial Sequence: Synthetic oligonucleotide
  Antisense Strand to SEQ ID NO: 375769
uuacaaagaaacugccuuu

SEQ ID NO: 375771 - RNA, 19 nt, Artificial Sequence
  Description of Artificial Sequence: Synthetic oligonucleotide
  Sense Strand Starting at position 725 of SEQ ID NO: 318318
aaggcaguuucuuuguaaa

SEQ ID NO: 375772 - RNA, 19 nt, Artificial Sequence
  Description of Artificial Sequence: Synthetic oligonucleotide
  Antisense Strand to SEQ ID NO: 375771
uuuacaaagaaacugccuu

SEQ ID NO: 375773 - RNA, 19 nt, Artificial Sequence
  Description of Artificial Sequence: Synthetic oligonucleotide
  Sense Strand Starting at position 725 of SEQ ID NO: 318406
guguacaaguaccuuuaau

SEQ ID NO: 375774 - RNA, 19 nt, Artificial Sequence
  Description of Artificial Sequence: Synthetic oligonucleotide
  Antisense Strand to SEQ ID NO: 375773
auuaaagguacuuguacac

SEQ ID NO: 375775 - RNA, 19 nt, Artificial Sequence
  Description of Artificial Sequence: Synthetic oligonucleotide
  Sense Strand Starting at position 725 of SEQ ID NO: 318542
uggguuugcaauuaucugu

SEQ ID NO: 375776 - RNA, 19 nt, Artificial Sequence
  Description of Artificial Sequence: Synthetic oligonucleotide
  Antisense Strand to SEQ ID NO: 375775
acagauaauugcaaaccca

SEQ ID NO: 375777 - RNA, 19 nt, Artificial Sequence
  Description of Artificial Sequence: Synthetic oligonucleotide
  Sense Strand Starting at position 725 of SEQ ID NO: 318796
gcuuucucugugcaucuua

SEQ ID NO: 375778 - RNA, 19 nt, Artificial Sequence
  Description of Artificial Sequence: Synthetic oligonucleotide
  Antisense Strand to SEQ ID NO: 375777
uaagaugcacagagaaagc

SEQ ID NO: 375779 - RNA, 19 nt, Artificial Sequence
  Description of Artificial Sequence: Synthetic oligonucleotide
  Sense Strand Starting at position 725 of SEQ ID NO: 318841
ucccgaaauauugguguuu

SEQ ID NO: 375780 - RNA, 19 nt, Artificial Sequence
  Description of Artificial Sequence: Synthetic oligonucleotide
  Antisense Strand to SEQ ID NO: 375779
aaacaccaauauuucggga

SEQ ID NO: 375781 - RNA, 19 nt, Artificial Sequence
  Description of Artificial Sequence: Synthetic oligonucleotide
  Sense Strand Starting at position 726 of SEQ ID NO: 315250
ugccuugugguguaguaaa

SEQ ID NO: 375782 - RNA, 19 nt, Artificial Sequence
  Description of Artificial Sequence: Synthetic oligonucleotide
  Antisense Strand to SEQ ID NO: 375781
uuuacuacaccacaaggca

SEQ ID NO: 375783 - RNA, 19 nt, Artificial Sequence
  Description of Artificial Sequence: Synthetic oligonucleotide
  Sense Strand Starting at position 726 of SEQ ID NO: 315281
gcauuucuuucucccugua

SEQ ID NO: 375784 - RNA, 19 nt, Artificial Sequence
  Description of Artificial Sequence: Synthetic oligonucleotide
  Antisense Strand to SEQ ID NO: 375783
uacagggagaaagaaaugc

SEQ ID NO: 375785 - RNA, 19 nt, Artificial Sequence
  Description of Artificial Sequence: Synthetic oligonucleotide
  Sense Strand Starting at position 726 of SEQ ID NO: 315286
ucuuucucccuguaaguua

SEQ ID NO: 375786 - RNA, 19 nt, Artificial Sequence
  Description of Artificial Sequence: Synthetic oligonucleotide
  Antisense Strand to SEQ ID NO: 375785
uaacuuacagggagaaaga

SEQ ID NO: 375787 - RNA, 19 nt, Artificial Sequence
  Description of Artificial Sequence: Synthetic oligonucleotide
  Sense Strand Starting at position 726 of SEQ ID NO: 315481
ucuuguaaaugcccuguaa

SEQ ID NO: 375788 - RNA, 19 nt, Artificial Sequence
  Description of Artificial Sequence: Synthetic oligonucleotide
  Antisense Strand to SEQ ID NO: 375787
uuacagggcauuuacaaga

SEQ ID NO: 375789 - RNA, 19 nt, Artificial Sequence
  Description of Artificial Sequence: Synthetic oligonucleotide
  Sense Strand Starting at position 726 of SEQ ID NO: 315483
uuguaaaugcccuguaaau

SEQ ID NO: 375790 - RNA, 19 nt, Artificial Sequence
  Description of Artificial Sequence: Synthetic oligonucleotide
  Antisense Strand to SEQ ID NO: 375789
auuuacagggcauuuacaa

SEQ ID NO: 375791 - RNA, 19 nt, Artificial Sequence
  Description of Artificial Sequence: Synthetic oligonucleotide
  Sense Strand Starting at position 726 of SEQ ID NO: 315485
guaaaugcccuguaaauuc

SEQ ID NO: 375792 - RNA, 19 nt, Artificial Sequence
  Description of Artificial Sequence: Synthetic oligonucleotide
  Antisense Strand to SEQ ID NO: 375791
gaauuuacagggcauuuac

SEQ ID NO: 375793 - RNA, 19 nt, Artificial Sequence
  Description of Artificial Sequence: Synthetic oligonucleotide
  Sense Strand Starting at position 726 of SEQ ID NO: 315557
gcagaaaugaugcaaguuu

SEQ ID NO: 375794 - RNA, 19 nt, Artificial Sequence
  Description of Artificial Sequence: Synthetic oligonucleotide
  Antisense Strand to SEQ ID NO: 375793
aaacuugcaucauuucugc

SEQ ID NO: 375795 - RNA, 19 nt, Artificial Sequence
  Description of Artificial Sequence: Synthetic oligonucleotide
  Sense Strand Starting at position 726 of SEQ ID NO: 315606
caguuaauucuggaagguu

SEQ ID NO: 375796 - RNA, 19 nt, Artificial Sequence
  Description of Artificial Sequence: Synthetic oligonucleotide
  Antisense Strand to SEQ ID NO: 375795
aaccuuccagaauuaacug

SEQ ID NO: 375797 - RNA, 19 nt, Artificial Sequence
  Description of Artificial Sequence: Synthetic oligonucleotide
  Sense Strand Starting at position 726 of SEQ ID NO: 315658
ucuggaaucucacugugga

SEQ ID NO: 375798 - RNA, 19 nt, Artificial Sequence
  Description of Artificial Sequence: Synthetic oligonucleotide
  Antisense Strand to SEQ ID NO: 375797
uccacagugagauuccaga

SEQ ID NO: 375799 - RNA, 19 nt, Artificial Sequence
  Description of Artificial Sequence: Synthetic oligonucleotide
  Sense Strand Starting at position 726 of SEQ ID NO: 315659
cuggaaucucacuguggaa

SEQ ID NO: 375800 - RNA, 19 nt, Artificial Sequence
  Description of Artificial Sequence: Synthetic oligonucleotide
  Antisense Strand to SEQ ID NO: 375799
uuccacagugagauuccag

SEQ ID NO: 375801 - RNA, 19 nt, Artificial Sequence
  Description of Artificial Sequence: Synthetic oligonucleotide
  Sense Strand Starting at position 726 of SEQ ID NO: 315661
ggaaucucacuguggaaca

SEQ ID NO: 375802 - RNA, 19 nt, Artificial Sequence
  Description of Artificial Sequence: Synthetic oligonucleotide
  Antisense Strand to SEQ ID NO: 375801
uguuccacagugagauucc

SEQ ID NO: 375803 - RNA, 19 nt, Artificial Sequence
  Description of Artificial Sequence: Synthetic oligonucleotide
  Sense Strand Starting at position 726 of SEQ ID NO: 315671
uguggaacauaugacuaaa

SEQ ID NO: 375804 - RNA, 19 nt, Artificial Sequence
  Description of Artificial Sequence: Synthetic oligonucleotide
  Antisense Strand to SEQ ID NO: 375803
uuuagucauauguuccaca

SEQ ID NO: 375805 - RNA, 19 nt, Artificial Sequence
  Description of Artificial Sequence: Synthetic oligonucleotide
  Sense Strand Starting at position 726 of SEQ ID NO: 315792
ugaggcuuauagucccaua

SEQ ID NO: 375806 - RNA, 19 nt, Artificial Sequence
  Description of Artificial Sequence: Synthetic oligonucleotide
  Antisense Strand to SEQ ID NO: 375805
uaugggacuauaagccuca

SEQ ID NO: 375807 - RNA, 19 nt, Artificial Sequence
  Description of Artificial Sequence: Synthetic oligonucleotide
  Sense Strand Starting at position 726 of SEQ ID NO: 316048
accaguugagcauaagcau

SEQ ID NO: 375808 - RNA, 19 nt, Artificial Sequence
  Description of Artificial Sequence: Synthetic oligonucleotide
  Antisense Strand to SEQ ID NO: 375807
augcuuaugcucaacuggu

SEQ ID NO: 375809 - RNA, 19 nt, Artificial Sequence
  Description of Artificial Sequence: Synthetic oligonucleotide
  Sense Strand Starting at position 726 of SEQ ID NO: 316223
gcaauuacaguuuguucua

SEQ ID NO: 375810 - RNA, 19 nt, Artificial Sequence
  Description of Artificial Sequence: Synthetic oligonucleotide
  Antisense Strand to SEQ ID NO: 375809
uagaacaaacuguaauugc

SEQ ID NO: 375811 - RNA, 19 nt, Artificial Sequence
  Description of Artificial Sequence: Synthetic oligonucleotide
  Sense Strand Starting at position 726 of SEQ ID NO: 316230
caguuuguucuauggaaac

SEQ ID NO: 375812 - RNA, 19 nt, Artificial Sequence
  Description of Artificial Sequence: Synthetic oligonucleotide
  Antisense Strand to SEQ ID NO: 375811
guuuccauagaacaaacug

SEQ ID NO: 375813 - RNA, 19 nt, Artificial Sequence
  Description of Artificial Sequence: Synthetic oligonucleotide
  Sense Strand Starting at position 726 of SEQ ID NO: 316232
guuuguucuauggaaacug

SEQ ID NO: 375814 - RNA, 19 nt, Artificial Sequence
  Description of Artificial Sequence: Synthetic oligonucleotide
  Antisense Strand to SEQ ID NO: 375813
caguuuccauagaacaaac

SEQ ID NO: 375815 - RNA, 19 nt, Artificial Sequence
  Description of Artificial Sequence: Synthetic oligonucleotide
  Sense Strand Starting at position 726 of SEQ ID NO: 316284
uuaaacugugucugcagaa

SEQ ID NO: 375816 - RNA, 19 nt, Artificial Sequence
  Description of Artificial Sequence: Synthetic oligonucleotide
  Antisense Strand to SEQ ID NO: 375815
uucugcagacacaguuuaa

SEQ ID NO: 375817 - RNA, 19 nt, Artificial Sequence
  Description of Artificial Sequence: Synthetic oligonucleotide
  Sense Strand Starting at position 726 of SEQ ID NO: 316285
uaaacugugucugcagaag

SEQ ID NO: 375818 - RNA, 19 nt, Artificial Sequence
  Description of Artificial Sequence: Synthetic oligonucleotide
  Antisense Strand to SEQ ID NO: 375817
cuucugcagacacaguuua

SEQ ID NO: 375819 - RNA, 19 nt, Artificial Sequence
  Description of Artificial Sequence: Synthetic oligonucleotide
  Sense Strand Starting at position 726 of SEQ ID NO: 316333
ucuucuuguuucccagaca

SEQ ID NO: 375820 - RNA, 19 nt, Artificial Sequence
  Description of Artificial Sequence: Synthetic oligonucleotide
  Antisense Strand to SEQ ID NO: 375819
ugucugggaaacaagaaga

SEQ ID NO: 375821 - RNA, 19 nt, Artificial Sequence
  Description of Artificial Sequence: Synthetic oligonucleotide
  Sense Strand Starting at position 726 of SEQ ID NO: 316361
uguuucccagccugaaaua

SEQ ID NO: 375822 - RNA, 19 nt, Artificial Sequence
  Description of Artificial Sequence: Synthetic oligonucleotide
  Antisense Strand to SEQ ID NO: 375821
uauuucaggcugggaaaca

SEQ ID NO: 375823 - RNA, 19 nt, Artificial Sequence
  Description of Artificial Sequence: Synthetic oligonucleotide
  Sense Strand Starting at position 726 of SEQ ID NO: 316370
gccugaaauacggaguucu

SEQ ID NO: 375824 - RNA, 19 nt, Artificial Sequence
  Description of Artificial Sequence: Synthetic oligonucleotide
  Antisense Strand to SEQ ID NO: 375823
agaacuccguauuucaggc

SEQ ID NO: 375825 - RNA, 19 nt, Artificial Sequence
  Description of Artificial Sequence: Synthetic oligonucleotide
  Sense Strand Starting at position 726 of SEQ ID NO: 316380
cggaguucuggacacgaag

SEQ ID NO: 375826 - RNA, 19 nt, Artificial Sequence
  Description of Artificial Sequence: Synthetic oligonucleotide
  Antisense Strand to SEQ ID NO: 375825
cuucguguccagaacuccg

SEQ ID NO: 375827 - RNA, 19 nt, Artificial Sequence
  Description of Artificial Sequence: Synthetic oligonucleotide
  Sense Strand Starting at position 726 of SEQ ID NO: 316633
gaggaaucgacuugaucga

SEQ ID NO: 375828 - RNA, 19 nt, Artificial Sequence
  Description of Artificial Sequence: Synthetic oligonucleotide
  Antisense Strand to SEQ ID NO: 375827
ucgaucaagucgauuccuc

SEQ ID NO: 375829 - RNA, 19 nt, Artificial Sequence
  Description of Artificial Sequence: Synthetic oligonucleotide
  Sense Strand Starting at position 726 of SEQ ID NO: 316637
aaucgacuugaucgagaag

SEQ ID NO: 375830 - RNA, 19 nt, Artificial Sequence
  Description of Artificial Sequence: Synthetic oligonucleotide
  Antisense Strand to SEQ ID NO: 375829
cuucucgaucaagucgauu

SEQ ID NO: 375831 - RNA, 19 nt, Artificial Sequence
  Description of Artificial Sequence: Synthetic oligonucleotide
  Sense Strand Starting at position 726 of SEQ ID NO: 316640
cgacuugaucgagaagcua

SEQ ID NO: 375832 - RNA, 19 nt, Artificial Sequence
  Description of Artificial Sequence: Synthetic oligonucleotide
  Antisense Strand to SEQ ID NO: 375831
uagcuucucgaucaagucg

SEQ ID NO: 375833 - RNA, 19 nt, Artificial Sequence
  Description of Artificial Sequence: Synthetic oligonucleotide
  Sense Strand Starting at position 726 of SEQ ID NO: 316665
gauauuugguugcaauuac

SEQ ID NO: 375834 - RNA, 19 nt, Artificial Sequence
  Description of Artificial Sequence: Synthetic oligonucleotide
  Antisense Strand to SEQ ID NO: 375833
guaauugcaaccaaauauc

SEQ ID NO: 375835 - RNA, 19 nt, Artificial Sequence
  Description of Artificial Sequence: Synthetic oligonucleotide
  Sense Strand Starting at position 726 of SEQ ID NO: 316768
ccgaccaacccuugugaga

SEQ ID NO: 375836 - RNA, 19 nt, Artificial Sequence
  Description of Artificial Sequence: Synthetic oligonucleotide
  Antisense Strand to SEQ ID NO: 375835
ucucacaaggguuggucgg

SEQ ID NO: 375837 - RNA, 19 nt, Artificial Sequence
  Description of Artificial Sequence: Synthetic oligonucleotide
  Sense Strand Starting at position 726 of SEQ ID NO: 317390
gggacucaccagugggauu

SEQ ID NO: 375838 - RNA, 19 nt, Artificial Sequence
  Description of Artificial Sequence: Synthetic oligonucleotide
  Antisense Strand to SEQ ID NO: 375837
aaucccacuggugaguccc

SEQ ID NO: 375839 - RNA, 19 nt, Artificial Sequence
  Description of Artificial Sequence: Synthetic oligonucleotide
  Sense Strand Starting at position 726 of SEQ ID NO: 317808
ggagcaguucccuggguga

SEQ ID NO: 375840 - RNA, 19 nt, Artificial Sequence
  Description of Artificial Sequence: Synthetic oligonucleotide
  Antisense Strand to SEQ ID NO: 375839
ucacccagggaacugcucc

SEQ ID NO: 375841 - RNA, 19 nt, Artificial Sequence
  Description of Artificial Sequence: Synthetic oligonucleotide
  Sense Strand Starting at position 726 of SEQ ID NO: 317830
gaagguuuccgcuaggucu

SEQ ID NO: 375842 - RNA, 19 nt, Artificial Sequence
  Description of Artificial Sequence: Synthetic oligonucleotide
  Antisense Strand to SEQ ID NO: 375841
agaccuagcggaaaccuuc

SEQ ID NO: 375843 - RNA, 19 nt, Artificial Sequence
  Description of Artificial Sequence: Synthetic oligonucleotide
  Sense Strand Starting at position 726 of SEQ ID NO: 318022
gggauucucuaguccugag

SEQ ID NO: 375844 - RNA, 19 nt, Artificial Sequence
  Description of Artificial Sequence: Synthetic oligonucleotide
  Antisense Strand to SEQ ID NO: 375843
cucaggacuagagaauccc

SEQ ID NO: 375845 - RNA, 19 nt, Artificial Sequence
  Description of Artificial Sequence: Synthetic oligonucleotide
  Sense Strand Starting at position 726 of SEQ ID NO: 318296
cucucaugucaagaucuga

SEQ ID NO: 375846 - RNA, 19 nt, Artificial Sequence
  Description of Artificial Sequence: Synthetic oligonucleotide
  Antisense Strand to SEQ ID NO: 375845
ucagaucuugacaugagag

SEQ ID NO: 375847 - RNA, 19 nt, Artificial Sequence
  Description of Artificial Sequence: Synthetic oligonucleotide
  Sense Strand Starting at position 726 of SEQ ID NO: 318433
acugaaaucagccguaaug

SEQ ID NO: 375848 - RNA, 19 nt, Artificial Sequence
  Description of Artificial Sequence: Synthetic oligonucleotide
  Antisense Strand to SEQ ID NO: 375847
cauuacggcugauuucagu

SEQ ID NO: 375849 - RNA, 19 nt, Artificial Sequence
  Description of Artificial Sequence: Synthetic oligonucleotide
  Sense Strand Starting at position 726 of SEQ ID NO: 318510
agcgauuccuccucaaagg

SEQ ID NO: 375850 - RNA, 19 nt, Artificial Sequence
  Description of Artificial Sequence: Synthetic oligonucleotide
  Antisense Strand to SEQ ID NO: 375849
ccuuugaggaggaaucgcu

SEQ ID NO: 375851 - RNA, 19 nt, Artificial Sequence
  Description of Artificial Sequence: Synthetic oligonucleotide
  Sense Strand Starting at position 726 of SEQ ID NO: 318565
aaaggcaguuucuuuguaa

SEQ ID NO: 375852 - RNA, 19 nt, Artificial Sequence
  Description of Artificial Sequence: Synthetic oligonucleotide
  Antisense Strand to SEQ ID NO: 375851
uuacaaagaaacugccuuu

SEQ ID NO: 375853 - RNA, 19 nt, Artificial Sequence
  Description of Artificial Sequence: Synthetic oligonucleotide
  Sense Strand Starting at position 726 of SEQ ID NO: 318566
aaggcaguuucuuuguaaa

SEQ ID NO: 375854 - RNA, 19 nt, Artificial Sequence
  Description of Artificial Sequence: Synthetic oligonucleotide
  Antisense Strand to SEQ ID NO: 375853
uuuacaaagaaacugccuu

SEQ ID NO: 375855 - RNA, 19 nt, Artificial Sequence
  Description of Artificial Sequence: Synthetic oligonucleotide
  Sense Strand Starting at position 726 of SEQ ID NO: 318654
guguacaaguaccuuuaau

SEQ ID NO: 375856 - RNA, 19 nt, Artificial Sequence
  Description of Artificial Sequence: Synthetic oligonucleotide
  Antisense Strand to SEQ ID NO: 375855
auuaaagguacuuguacac

SEQ ID NO: 375857 - RNA, 19 nt, Artificial Sequence
  Description of Artificial Sequence: Synthetic oligonucleotide
  Sense Strand Starting at position 726 of SEQ ID NO: 318790
uggguuugcaauuaucugu

SEQ ID NO: 375858 - RNA, 19 nt, Artificial Sequence
  Description of Artificial Sequence: Synthetic oligonucleotide
  Antisense Strand to SEQ ID NO: 375857
acagauaauugcaaaccca

SEQ ID NO: 375859 - RNA, 19 nt, Artificial Sequence
  Description of Artificial Sequence: Synthetic oligonucleotide
  Sense Strand Starting at position 726 of SEQ ID NO: 319089
ucccgaaauauugguguuu

SEQ ID NO: 375860 - RNA, 19 nt, Artificial Sequence
  Description of Artificial Sequence: Synthetic oligonucleotide
  Antisense Strand to SEQ ID NO: 375859
aaacaccaauauuucggga

SEQ ID NO: 375861 - RNA, 19 nt, Artificial Sequence
  Description of Artificial Sequence: Synthetic oligonucleotide
  Sense Strand Starting at position 727 of SEQ ID NO: 315335
cagccucaggguuaaauua

SEQ ID NO: 375862 - RNA, 19 nt, Artificial Sequence
  Description of Artificial Sequence: Synthetic oligonucleotide
  Antisense Strand to SEQ ID NO: 375861
uaauuuaacccugaggcug

SEQ ID NO: 375863 - RNA, 19 nt, Artificial Sequence
  Description of Artificial Sequence: Synthetic oligonucleotide
  Sense Strand Starting at position 727 of SEQ ID NO: 315353
acaggugcucuguggaaac

SEQ ID NO: 375864 - RNA, 19 nt, Artificial Sequence
  Description of Artificial Sequence: Synthetic oligonucleotide
  Antisense Strand to SEQ ID NO: 375863
guuuccacagagcaccugu

SEQ ID NO: 375865 - RNA, 19 nt, Artificial Sequence
  Description of Artificial Sequence: Synthetic oligonucleotide
  Sense Strand Starting at position 727 of SEQ ID NO: 315407
gcauuucuuucucccugua

SEQ ID NO: 375866 - RNA, 19 nt, Artificial Sequence
  Description of Artificial Sequence: Synthetic oligonucleotide
  Antisense Strand to SEQ ID NO: 375865
uacagggagaaagaaaugc

SEQ ID NO: 375867 - RNA, 19 nt, Artificial Sequence
  Description of Artificial Sequence: Synthetic oligonucleotide
  Sense Strand Starting at position 727 of SEQ ID NO: 315412
ucuuucucccuguaaguua

SEQ ID NO: 375868 - RNA, 19 nt, Artificial Sequence
  Description of Artificial Sequence: Synthetic oligonucleotide
  Antisense Strand to SEQ ID NO: 375867
uaacuuacagggagaaaga

SEQ ID NO: 375869 - RNA, 19 nt, Artificial Sequence
  Description of Artificial Sequence: Synthetic oligonucleotide
  Sense Strand Starting at position 727 of SEQ ID NO: 315607
ucuuguaaaugcccuguaa

SEQ ID NO: 375870 - RNA, 19 nt, Artificial Sequence
  Description of Artificial Sequence: Synthetic oligonucleotide
  Antisense Strand to SEQ ID NO: 375869
uuacagggcauuuacaaga

SEQ ID NO: 375871 - RNA, 19 nt, Artificial Sequence
  Description of Artificial Sequence: Synthetic oligonucleotide
  Sense Strand Starting at position 727 of SEQ ID NO: 315609
uuguaaaugcccuguaaau

SEQ ID NO: 375872 - RNA, 19 nt, Artificial Sequence
  Description of Artificial Sequence: Synthetic oligonucleotide
  Antisense Strand to SEQ ID NO: 375871
auuuacagggcauuuacaa

SEQ ID NO: 375873 - RNA, 19 nt, Artificial Sequence
  Description of Artificial Sequence: Synthetic oligonucleotide
  Sense Strand Starting at position 727 of SEQ ID NO: 315611
guaaaugcccuguaaauuc

SEQ ID NO: 375874 - RNA, 19 nt, Artificial Sequence
  Description of Artificial Sequence: Synthetic oligonucleotide
  Antisense Strand to SEQ ID NO: 375873
gaauuuacagggcauuuac

SEQ ID NO: 375875 - RNA, 19 nt, Artificial Sequence
  Description of Artificial Sequence: Synthetic oligonucleotide
  Sense Strand Starting at position 727 of SEQ ID NO: 315683
gcagaaaugaugcaaguuu

SEQ ID NO: 375876 - RNA, 19 nt, Artificial Sequence
  Description of Artificial Sequence: Synthetic oligonucleotide
  Antisense Strand to SEQ ID NO: 375875
aaacuugcaucauuucugc

SEQ ID NO: 375877 - RNA, 19 nt, Artificial Sequence
  Description of Artificial Sequence: Synthetic oligonucleotide
  Sense Strand Starting at position 727 of SEQ ID NO: 315732
caguuaauucuggaagguu

SEQ ID NO: 375878 - RNA, 19 nt, Artificial Sequence
  Description of Artificial Sequence: Synthetic oligonucleotide
  Antisense Strand to SEQ ID NO: 375877
aaccuuccagaauuaacug

SEQ ID NO: 375879 - RNA, 19 nt, Artificial Sequence
  Description of Artificial Sequence: Synthetic oligonucleotide
  Sense Strand Starting at position 727 of SEQ ID NO: 315784
ucuggaaucucacugugga

SEQ ID NO: 375880 - RNA, 19 nt, Artificial Sequence
  Description of Artificial Sequence: Synthetic oligonucleotide
  Antisense Strand to SEQ ID NO: 375879
uccacagugagauuccaga

SEQ ID NO: 375881 - RNA, 19 nt, Artificial Sequence
  Description of Artificial Sequence: Synthetic oligonucleotide
  Sense Strand Starting at position 727 of SEQ ID NO: 315785
cuggaaucucacuguggaa

SEQ ID NO: 375882 - RNA, 19 nt, Artificial Sequence
  Description of Artificial Sequence: Synthetic oligonucleotide
  Antisense Strand to SEQ ID NO: 375881
uuccacagugagauuccag

SEQ ID NO: 375883 - RNA, 19 nt, Artificial Sequence
  Description of Artificial Sequence: Synthetic oligonucleotide
  Sense Strand Starting at position 727 of SEQ ID NO: 315787
ggaaucucacuguggaaca

SEQ ID NO: 375884 - RNA, 19 nt, Artificial Sequence
  Description of Artificial Sequence: Synthetic oligonucleotide
  Antisense Strand to SEQ ID NO: 375883
uguuccacagugagauucc

SEQ ID NO: 375885 - RNA, 19 nt, Artificial Sequence
  Description of Artificial Sequence: Synthetic oligonucleotide
  Sense Strand Starting at position 727 of SEQ ID NO: 315918
ugaggcuuauagucccaua

SEQ ID NO: 375886 - RNA, 19 nt, Artificial Sequence
  Description of Artificial Sequence: Synthetic oligonucleotide
  Antisense Strand to SEQ ID NO: 375885
uaugggacuauaagccuca

SEQ ID NO: 375887 - RNA, 19 nt, Artificial Sequence
  Description of Artificial Sequence: Synthetic oligonucleotide
  Sense Strand Starting at position 727 of SEQ ID NO: 316174
accaguugagcauaagcau

SEQ ID NO: 375888 - RNA, 19 nt, Artificial Sequence
  Description of Artificial Sequence: Synthetic oligonucleotide
  Antisense Strand to SEQ ID NO: 375887
augcuuaugcucaacuggu

SEQ ID NO: 375889 - RNA, 19 nt, Artificial Sequence
  Description of Artificial Sequence: Synthetic oligonucleotide
  Sense Strand Starting at position 727 of SEQ ID NO: 316349
gcaauuacaguuuguucua

SEQ ID NO: 375890 - RNA, 19 nt, Artificial Sequence
  Description of Artificial Sequence: Synthetic oligonucleotide
  Antisense Strand to SEQ ID NO: 375889
uagaacaaacuguaauugc

SEQ ID NO: 375891 - RNA, 19 nt, Artificial Sequence
  Description of Artificial Sequence: Synthetic oligonucleotide
  Sense Strand Starting at position 727 of SEQ ID NO: 316356
caguuuguucuauggaaac

SEQ ID NO: 375892 - RNA, 19 nt, Artificial Sequence
  Description of Artificial Sequence: Synthetic oligonucleotide
  Antisense Strand to SEQ ID NO: 375891
guuuccauagaacaaacug

SEQ ID NO: 375893 - RNA, 19 nt, Artificial Sequence
  Description of Artificial Sequence: Synthetic oligonucleotide
  Sense Strand Starting at position 727 of SEQ ID NO: 316358
guuuguucuauggaaacug

SEQ ID NO: 375894 - RNA, 19 nt, Artificial Sequence
  Description of Artificial Sequence: Synthetic oligonucleotide
  Antisense Strand to SEQ ID NO: 375893
caguuuccauagaacaaac

SEQ ID NO: 375895 - RNA, 19 nt, Artificial Sequence
  Description of Artificial Sequence: Synthetic oligonucleotide
  Sense Strand Starting at position 727 of SEQ ID NO: 316410
uuaaacugugucugcagaa

SEQ ID NO: 375896 - RNA, 19 nt, Artificial Sequence
  Description of Artificial Sequence: Synthetic oligonucleotide
  Antisense Strand to SEQ ID NO: 375895
uucugcagacacaguuuaa

SEQ ID NO: 375897 - RNA, 19 nt, Artificial Sequence
  Description of Artificial Sequence: Synthetic oligonucleotide
  Sense Strand Starting at position 727 of SEQ ID NO: 316411
uaaacugugucugcagaag

SEQ ID NO: 375898 - RNA, 19 nt, Artificial Sequence
  Description of Artificial Sequence: Synthetic oligonucleotide
  Antisense Strand to SEQ ID NO: 375897
cuucugcagacacaguuua

SEQ ID NO: 375899 - RNA, 19 nt, Artificial Sequence
  Description of Artificial Sequence: Synthetic oligonucleotide
  Sense Strand Starting at position 727 of SEQ ID NO: 316459
ucuucuuguuucccagaca

SEQ ID NO: 375900 - RNA, 19 nt, Artificial Sequence
  Description of Artificial Sequence: Synthetic oligonucleotide
  Antisense Strand to SEQ ID NO: 375899
ugucugggaaacaagaaga

SEQ ID NO: 375901 - RNA, 19 nt, Artificial Sequence
  Description of Artificial Sequence: Synthetic oligonucleotide
  Sense Strand Starting at position 727 of SEQ ID NO: 316487
uguuucccagccugaaaua

SEQ ID NO: 375902 - RNA, 19 nt, Artificial Sequence
  Description of Artificial Sequence: Synthetic oligonucleotide
  Antisense Strand to SEQ ID NO: 375901
uauuucaggcugggaaaca

SEQ ID NO: 375903 - RNA, 19 nt, Artificial Sequence
  Description of Artificial Sequence: Synthetic oligonucleotide
  Sense Strand Starting at position 727 of SEQ ID NO: 316496
gccugaaauacggaguucu

SEQ ID NO: 375904 - RNA, 19 nt, Artificial Sequence
  Description of Artificial Sequence: Synthetic oligonucleotide
  Antisense Strand to SEQ ID NO: 375903
agaacuccguauuucaggc

SEQ ID NO: 375905 - RNA, 19 nt, Artificial Sequence
  Description of Artificial Sequence: Synthetic oligonucleotide
  Sense Strand Starting at position 727 of SEQ ID NO: 316506
cggaguucuggacacgaag

SEQ ID NO: 375906 - RNA, 19 nt, Artificial Sequence
  Description of Artificial Sequence: Synthetic oligonucleotide
  Antisense Strand to SEQ ID NO: 375905
cuucguguccagaacuccg

SEQ ID NO: 375907 - RNA, 19 nt, Artificial Sequence
  Description of Artificial Sequence: Synthetic oligonucleotide
  Sense Strand Starting at position 727 of SEQ ID NO: 316759
gaggaaucgacuugaucga

SEQ ID NO: 375908 - RNA, 19 nt, Artificial Sequence
  Description of Artificial Sequence: Synthetic oligonucleotide
  Antisense Strand to SEQ ID NO: 375907
ucgaucaagucgauuccuc

SEQ ID NO: 375909 - RNA, 19 nt, Artificial Sequence
  Description of Artificial Sequence: Synthetic oligonucleotide
  Sense Strand Starting at position 727 of SEQ ID NO: 316763
aaucgacuugaucgagaag

SEQ ID NO: 375910 - RNA, 19 nt, Artificial Sequence
  Description of Artificial Sequence: Synthetic oligonucleotide
  Antisense Strand to SEQ ID NO: 375909
cuucucgaucaagucgauu

SEQ ID NO: 375911 - RNA, 19 nt, Artificial Sequence
  Description of Artificial Sequence: Synthetic oligonucleotide
  Sense Strand Starting at position 727 of SEQ ID NO: 316766
cgacuugaucgagaagcua

SEQ ID NO: 375912 - RNA, 19 nt, Artificial Sequence
  Description of Artificial Sequence: Synthetic oligonucleotide
  Antisense Strand to SEQ ID NO: 375911
uagcuucucgaucaagucg

SEQ ID NO: 375913 - RNA, 19 nt, Artificial Sequence
  Description of Artificial Sequence: Synthetic oligonucleotide
  Sense Strand Starting at position 727 of SEQ ID NO: 316791
gauauuugguugcaauuac

SEQ ID NO: 375914 - RNA, 19 nt, Artificial Sequence
  Description of Artificial Sequence: Synthetic oligonucleotide
  Antisense Strand to SEQ ID NO: 375913
guaauugcaaccaaauauc

SEQ ID NO: 375915 - RNA, 19 nt, Artificial Sequence
  Description of Artificial Sequence: Synthetic oligonucleotide
  Sense Strand Starting at position 727 of SEQ ID NO: 316894
ccgaccaacccuugugaga

SEQ ID NO: 375916 - RNA, 19 nt, Artificial Sequence
  Description of Artificial Sequence: Synthetic oligonucleotide
  Antisense Strand to SEQ ID NO: 375915
ucucacaaggguuggucgg

SEQ ID NO: 375917 - RNA, 19 nt, Artificial Sequence
  Description of Artificial Sequence: Synthetic oligonucleotide
  Sense Strand Starting at position 727 of SEQ ID NO: 317516
gggacucaccagugggauu

SEQ ID NO: 375918 - RNA, 19 nt, Artificial Sequence
  Description of Artificial Sequence: Synthetic oligonucleotide
  Antisense Strand to SEQ ID NO: 375917
aaucccacuggugaguccc

SEQ ID NO: 375919 - RNA, 19 nt, Artificial Sequence
  Description of Artificial Sequence: Synthetic oligonucleotide
  Sense Strand Starting at position 727 of SEQ ID NO: 317934
ggagcaguucccuggguga

SEQ ID NO: 375920 - RNA, 19 nt, Artificial Sequence
  Description of Artificial Sequence: Synthetic oligonucleotide
  Antisense Strand to SEQ ID NO: 375919
ucacccagggaacugcucc

SEQ ID NO: 375921 - RNA, 19 nt, Artificial Sequence
  Description of Artificial Sequence: Synthetic oligonucleotide
  Sense Strand Starting at position 727 of SEQ ID NO: 317956
gaagguuuccgcuaggucu

SEQ ID NO: 375922 - RNA, 19 nt, Artificial Sequence
  Description of Artificial Sequence: Synthetic oligonucleotide
  Antisense Strand to SEQ ID NO: 375921
agaccuagcggaaaccuuc

SEQ ID NO: 375923 - RNA, 19 nt, Artificial Sequence
  Description of Artificial Sequence: Synthetic oligonucleotide
  Sense Strand Starting at position 727 of SEQ ID NO: 318148
gggauucucuaguccugag

SEQ ID NO: 375924 - RNA, 19 nt, Artificial Sequence
  Description of Artificial Sequence: Synthetic oligonucleotide
  Antisense Strand to SEQ ID NO: 375923
cucaggacuagagaauccc

SEQ ID NO: 375925 - RNA, 19 nt, Artificial Sequence
  Description of Artificial Sequence: Synthetic oligonucleotide
  Sense Strand Starting at position 727 of SEQ ID NO: 318422
cucucaugucaagaucuga

SEQ ID NO: 375926 - RNA, 19 nt, Artificial Sequence
  Description of Artificial Sequence: Synthetic oligonucleotide
  Antisense Strand to SEQ ID NO: 375925
ucagaucuugacaugagag

SEQ ID NO: 375927 - RNA, 19 nt, Artificial Sequence
  Description of Artificial Sequence: Synthetic oligonucleotide
  Sense Strand Starting at position 727 of SEQ ID NO: 318559
acugaaaucagccguaaug

SEQ ID NO: 375928 - RNA, 19 nt, Artificial Sequence
  Description of Artificial Sequence: Synthetic oligonucleotide
  Antisense Strand to SEQ ID NO: 375927
cauuacggcugauuucagu

SEQ ID NO: 375929 - RNA, 19 nt, Artificial Sequence
  Description of Artificial Sequence: Synthetic oligonucleotide
  Sense Strand Starting at position 727 of SEQ ID NO: 318636
agcgauuccuccucaaagg

SEQ ID NO: 375930 - RNA, 19 nt, Artificial Sequence
  Description of Artificial Sequence: Synthetic oligonucleotide
  Antisense Strand to SEQ ID NO: 375929
ccuuugaggaggaaucgcu

SEQ ID NO: 375931 - RNA, 19 nt, Artificial Sequence
  Description of Artificial Sequence: Synthetic oligonucleotide
  Sense Strand Starting at position 727 of SEQ ID NO: 318691
aaaggcaguuucuuuguaa

SEQ ID NO: 375932 - RNA, 19 nt, Artificial Sequence
  Description of Artificial Sequence: Synthetic oligonucleotide
  Antisense Strand to SEQ ID NO: 375931
uuacaaagaaacugccuuu

SEQ ID NO: 375933 - RNA, 19 nt, Artificial Sequence
  Description of Artificial Sequence: Synthetic oligonucleotide
  Sense Strand Starting at position 727 of SEQ ID NO: 318692
aaggcaguuucuuuguaaa

SEQ ID NO: 375934 - RNA, 19 nt, Artificial Sequence
  Description of Artificial Sequence: Synthetic oligonucleotide
  Antisense Strand to SEQ ID NO: 375933
uuuacaaagaaacugccuu

SEQ ID NO: 375935 - RNA, 19 nt, Artificial Sequence
  Description of Artificial Sequence: Synthetic oligonucleotide
  Sense Strand Starting at position 727 of SEQ ID NO: 318780
guguacaaguaccuuuaau

SEQ ID NO: 375936 - RNA, 19 nt, Artificial Sequence
  Description of Artificial Sequence: Synthetic oligonucleotide
  Antisense Strand to SEQ ID NO: 375935
auuaaagguacuuguacac

SEQ ID NO: 375937 - RNA, 19 nt, Artificial Sequence
  Description of Artificial Sequence: Synthetic oligonucleotide
  Sense Strand Starting at position 727 of SEQ ID NO: 318916
uggguuugcaauuaucugu

SEQ ID NO: 375938 - RNA, 19 nt, Artificial Sequence
  Description of Artificial Sequence: Synthetic oligonucleotide
  Antisense Strand to SEQ ID NO: 375937
acagauaauugcaaaccca

SEQ ID NO: 375939 - RNA, 19 nt, Artificial Sequence
  Description of Artificial Sequence: Synthetic oligonucleotide
  Sense Strand Starting at position 727 of SEQ ID NO: 319215
ucccgaaauauugguguuu

SEQ ID NO: 375940 - RNA, 19 nt, Artificial Sequence
  Description of Artificial Sequence: Synthetic oligonucleotide
  Antisense Strand to SEQ ID NO: 375939
aaacaccaauauuucggga

SEQ ID NO: 375941 - RNA, 19 nt, Artificial Sequence
  Description of Artificial Sequence: Synthetic oligonucleotide
  Sense Strand Starting at position 728 of SEQ ID NO: 315270
ggucaugcaugguucucaa

SEQ ID NO: 375942 - RNA, 19 nt, Artificial Sequence
  Description of Artificial Sequence: Synthetic oligonucleotide
  Antisense Strand to SEQ ID NO: 375941
uugagaaccaugcaugacc

SEQ ID NO: 375943 - RNA, 19 nt, Artificial Sequence
  Description of Artificial Sequence: Synthetic oligonucleotide
  Sense Strand Starting at position 728 of SEQ ID NO: 315285
ucaauucgcuccuuggaca

SEQ ID NO: 375944 - RNA, 19 nt, Artificial Sequence
  Description of Artificial Sequence: Synthetic oligonucleotide
  Antisense Strand to SEQ ID NO: 375943
uguccaaggagcgaauuga

SEQ ID NO: 375945 - RNA, 19 nt, Artificial Sequence
  Description of Artificial Sequence: Synthetic oligonucleotide
  Sense Strand Starting at position 728 of SEQ ID NO: 316169
gaaagagaaugauaaagga

SEQ ID NO: 375946 - RNA, 19 nt, Artificial Sequence
  Description of Artificial Sequence: Synthetic oligonucleotide
  Antisense Strand to SEQ ID NO: 375945
uccuuuaucauucucuuuc

SEQ ID NO: 375947 - RNA, 19 nt, Artificial Sequence
  Description of Artificial Sequence: Synthetic oligonucleotide
  Sense Strand Starting at position 728 of SEQ ID NO: 316200
caggaacaucuggguaauu

SEQ ID NO: 375948 - RNA, 19 nt, Artificial Sequence
  Description of Artificial Sequence: Synthetic oligonucleotide
  Antisense Strand to SEQ ID NO: 375947
aauuacccagauguuccug

SEQ ID NO: 375949 - RNA, 19 nt, Artificial Sequence
  Description of Artificial Sequence: Synthetic oligonucleotide
  Sense Strand Starting at position 728 of SEQ ID NO: 316211
ggguaauuuggcugcaccu

SEQ ID NO: 375950 - RNA, 19 nt, Artificial Sequence
  Description of Artificial Sequence: Synthetic oligonucleotide
  Antisense Strand to SEQ ID NO: 375949
aggugcagccaaauuaccc

SEQ ID NO: 375951 - RNA, 19 nt, Artificial Sequence
  Description of Artificial Sequence: Synthetic oligonucleotide
  Sense Strand Starting at position 728 of SEQ ID NO: 316292
ccaacaaguuuccugucau

SEQ ID NO: 375952 - RNA, 19 nt, Artificial Sequence
  Description of Artificial Sequence: Synthetic oligonucleotide
  Antisense Strand to SEQ ID NO: 375951
augacaggaaacuuguugg

SEQ ID NO: 375953 - RNA, 19 nt, Artificial Sequence
  Description of Artificial Sequence: Synthetic oligonucleotide
  Sense Strand Starting at position 728 of SEQ ID NO: 316298
aguuuccugucauucuaaa

SEQ ID NO: 375954 - RNA, 19 nt, Artificial Sequence
  Description of Artificial Sequence: Synthetic oligonucleotide
  Antisense Strand to SEQ ID NO: 375953
uuuagaaugacaggaaacu

SEQ ID NO: 375955 - RNA, 19 nt, Artificial Sequence
  Description of Artificial Sequence: Synthetic oligonucleotide
  Sense Strand Starting at position 728 of SEQ ID NO: 316507
cuaagauauucuguaucag

SEQ ID NO: 375956 - RNA, 19 nt, Artificial Sequence
  Description of Artificial Sequence: Synthetic oligonucleotide
  Antisense Strand to SEQ ID NO: 375955
cugauacagaauaucuuag

SEQ ID NO: 375957 - RNA, 19 nt, Artificial Sequence
  Description of Artificial Sequence: Synthetic oligonucleotide
  Sense Strand Starting at position 728 of SEQ ID NO: 316530
agcauuagcgccuuuccau

SEQ ID NO: 375958 - RNA, 19 nt, Artificial Sequence
  Description of Artificial Sequence: Synthetic oligonucleotide
  Antisense Strand to SEQ ID NO: 375957
auggaaaggcgcuaaugcu

SEQ ID NO: 375959 - RNA, 19 nt, Artificial Sequence
  Description of Artificial Sequence: Synthetic oligonucleotide
  Sense Strand Starting at position 728 of SEQ ID NO: 316531
gcauuagcgccuuuccauu

SEQ ID NO: 375960 - RNA, 19 nt, Artificial Sequence
  Description of Artificial Sequence: Synthetic oligonucleotide
  Antisense Strand to SEQ ID NO: 375959
aauggaaaggcgcuaaugc

SEQ ID NO: 375961 - RNA, 19 nt, Artificial Sequence
  Description of Artificial Sequence: Synthetic oligonucleotide
  Sense Strand Starting at position 728 of SEQ ID NO: 316586
agauuugggcuuuguuguu

SEQ ID NO: 375962 - RNA, 19 nt, Artificial Sequence
  Description of Artificial Sequence: Synthetic oligonucleotide
  Antisense Strand to SEQ ID NO: 375961
aacaacaaagcccaaaucu

SEQ ID NO: 375963 - RNA, 19 nt, Artificial Sequence
  Description of Artificial Sequence: Synthetic oligonucleotide
  Sense Strand Starting at position 728 of SEQ ID NO: 316592
gggcuuuguuguuccauua

SEQ ID NO: 375964 - RNA, 19 nt, Artificial Sequence
  Description of Artificial Sequence: Synthetic oligonucleotide
  Antisense Strand to SEQ ID NO: 375963
uaauggaacaacaaagccc

SEQ ID NO: 375965 - RNA, 19 nt, Artificial Sequence
  Description of Artificial Sequence: Synthetic oligonucleotide
  Sense Strand Starting at position 728 of SEQ ID NO: 316628
auccaacuguaugaggaaa

SEQ ID NO: 375966 - RNA, 19 nt, Artificial Sequence
  Description of Artificial Sequence: Synthetic oligonucleotide
  Antisense Strand to SEQ ID NO: 375965
uuuccucauacaguuggau

SEQ ID NO: 375967 - RNA, 19 nt, Artificial Sequence
  Description of Artificial Sequence: Synthetic oligonucleotide
  Sense Strand Starting at position 728 of SEQ ID NO: 316653
guuccuagauaagaagaaa

SEQ ID NO: 375968 - RNA, 19 nt, Artificial Sequence
  Description of Artificial Sequence: Synthetic oligonucleotide
  Antisense Strand to SEQ ID NO: 375967
uuucuucuuaucuaggaac

SEQ ID NO: 375969 - RNA, 19 nt, Artificial Sequence
  Description of Artificial Sequence: Synthetic oligonucleotide
  Sense Strand Starting at position 728 of SEQ ID NO: 316779
gggcuuugaaucugaggaa

SEQ ID NO: 375970 - RNA, 19 nt, Artificial Sequence
  Description of Artificial Sequence: Synthetic oligonucleotide
  Antisense Strand to SEQ ID NO: 375969
uuccucagauucaaagccc

SEQ ID NO: 375971 - RNA, 19 nt, Artificial Sequence
  Description of Artificial Sequence: Synthetic oligonucleotide
  Sense Strand Starting at position 728 of SEQ ID NO: 316831
ucagacgauuuccaaacau

SEQ ID NO: 375972 - RNA, 19 nt, Artificial Sequence
  Description of Artificial Sequence: Synthetic oligonucleotide
  Antisense Strand to SEQ ID NO: 375971
auguuuggaaaucgucuga

SEQ ID NO: 375973 - RNA, 19 nt, Artificial Sequence
  Description of Artificial Sequence: Synthetic oligonucleotide
  Sense Strand Starting at position 728 of SEQ ID NO: 316924
ccuuguauguccucucaau

SEQ ID NO: 375974 - RNA, 19 nt, Artificial Sequence
  Description of Artificial Sequence: Synthetic oligonucleotide
  Antisense Strand to SEQ ID NO: 375973
auugagaggacauacaagg

SEQ ID NO: 375975 - RNA, 19 nt, Artificial Sequence
  Description of Artificial Sequence: Synthetic oligonucleotide
  Sense Strand Starting at position 728 of SEQ ID NO: 316945
ugacuauucuuacagaaag

SEQ ID NO: 375976 - RNA, 19 nt, Artificial Sequence
  Description of Artificial Sequence: Synthetic oligonucleotide
  Antisense Strand to SEQ ID NO: 375975
cuuucuguaagaauaguca

SEQ ID NO: 375977 - RNA, 19 nt, Artificial Sequence
  Description of Artificial Sequence: Synthetic oligonucleotide
  Sense Strand Starting at position 728 of SEQ ID NO: 317726
ugacaaauuccaggaguuu

SEQ ID NO: 375978 - RNA, 19 nt, Artificial Sequence
  Description of Artificial Sequence: Synthetic oligonucleotide
  Antisense Strand to SEQ ID NO: 375977
aaacuccuggaauuuguca

SEQ ID NO: 375979 - RNA, 19 nt, Artificial Sequence
  Description of Artificial Sequence: Synthetic oligonucleotide
  Sense Strand Starting at position 728 of SEQ ID NO: 317847
uuguacacuugauuagcaa

SEQ ID NO: 375980 - RNA, 19 nt, Artificial Sequence
  Description of Artificial Sequence: Synthetic oligonucleotide
  Antisense Strand to SEQ ID NO: 375979
uugcuaaucaaguguacaa

SEQ ID NO: 375981 - RNA, 19 nt, Artificial Sequence
  Description of Artificial Sequence: Synthetic oligonucleotide
  Sense Strand Starting at position 728 of SEQ ID NO: 317854
cuugauuagcaagagucua

SEQ ID NO: 375982 - RNA, 19 nt, Artificial Sequence
  Description of Artificial Sequence: Synthetic oligonucleotide
  Antisense Strand to SEQ ID NO: 375981
uagacucuugcuaaucaag

SEQ ID NO: 375983 - RNA, 19 nt, Artificial Sequence
  Description of Artificial Sequence: Synthetic oligonucleotide
  Sense Strand Starting at position 728 of SEQ ID NO: 317859
uuagcaagagucuaaucca

SEQ ID NO: 375984 - RNA, 19 nt, Artificial Sequence
  Description of Artificial Sequence: Synthetic oligonucleotide
  Antisense Strand to SEQ ID NO: 375983
uggauuagacucuugcuaa

SEQ ID NO: 375985 - RNA, 19 nt, Artificial Sequence
  Description of Artificial Sequence: Synthetic oligonucleotide
  Sense Strand Starting at position 728 of SEQ ID NO: 317862
gcaagagucuaauccaguc

SEQ ID NO: 375986 - RNA, 19 nt, Artificial Sequence
  Description of Artificial Sequence: Synthetic oligonucleotide
  Antisense Strand to SEQ ID NO: 375985
gacuggauuagacucuugc

SEQ ID NO: 375987 - RNA, 19 nt, Artificial Sequence
  Description of Artificial Sequence: Synthetic oligonucleotide
  Sense Strand Starting at position 728 of SEQ ID NO: 317961
aucucuuauguugaacagu

SEQ ID NO: 375988 - RNA, 19 nt, Artificial Sequence
  Description of Artificial Sequence: Synthetic oligonucleotide
  Antisense Strand to SEQ ID NO: 375987
acuguucaacauaagagau

SEQ ID NO: 375989 - RNA, 19 nt, Artificial Sequence
  Description of Artificial Sequence: Synthetic oligonucleotide
  Sense Strand Starting at position 728 of SEQ ID NO: 317970
guugaacaguuucugcgaa

SEQ ID NO: 375990 - RNA, 19 nt, Artificial Sequence
  Description of Artificial Sequence: Synthetic oligonucleotide
  Antisense Strand to SEQ ID NO: 375989
uucgcagaaacuguucaac

SEQ ID NO: 375991 - RNA, 19 nt, Artificial Sequence
  Description of Artificial Sequence: Synthetic oligonucleotide
  Sense Strand Starting at position 728 of SEQ ID NO: 317972
ugaacaguuucugcgaaug

SEQ ID NO: 375992 - RNA, 19 nt, Artificial Sequence
  Description of Artificial Sequence: Synthetic oligonucleotide
  Antisense Strand to SEQ ID NO: 375991
cauucgcagaaacuguuca

SEQ ID NO: 375993 - RNA, 19 nt, Artificial Sequence
  Description of Artificial Sequence: Synthetic oligonucleotide
  Sense Strand Starting at position 728 of SEQ ID NO: 317977
aguuucugcgaaugauaaa

SEQ ID NO: 375994 - RNA, 19 nt, Artificial Sequence
  Description of Artificial Sequence: Synthetic oligonucleotide
  Antisense Strand to SEQ ID NO: 375993
uuuaucauucgcagaaacu

SEQ ID NO: 375995 - RNA, 19 nt, Artificial Sequence
  Description of Artificial Sequence: Synthetic oligonucleotide
  Sense Strand Starting at position 728 of SEQ ID NO: 317978
guuucugcgaaugauaaau

SEQ ID NO: 375996 - RNA, 19 nt, Artificial Sequence
  Description of Artificial Sequence: Synthetic oligonucleotide
  Antisense Strand to SEQ ID NO: 375995
auuuaucauucgcagaaac

SEQ ID NO: 375997 - RNA, 19 nt, Artificial Sequence
  Description of Artificial Sequence: Synthetic oligonucleotide
  Sense Strand Starting at position 728 of SEQ ID NO: 318180
augaaagcuuacuucugaa

SEQ ID NO: 375998 - RNA, 19 nt, Artificial Sequence
  Description of Artificial Sequence: Synthetic oligonucleotide
  Antisense Strand to SEQ ID NO: 375997
uucagaaguaagcuuucau

SEQ ID NO: 375999 - RNA, 19 nt, Artificial Sequence
  Description of Artificial Sequence: Synthetic oligonucleotide
  Sense Strand Starting at position 728 of SEQ ID NO: 318245
ccuccaugacaguguaaua

SEQ ID NO: 376000 - RNA, 19 nt, Artificial Sequence
  Description of Artificial Sequence: Synthetic oligonucleotide
  Antisense Strand to SEQ ID NO: 375999
uauuacacugucauggagg

SEQ ID NO: 376001 - RNA, 19 nt, Artificial Sequence
  Description of Artificial Sequence: Synthetic oligonucleotide
  Sense Strand Starting at position 728 of SEQ ID NO: 318282
ccaaguuucucuuuaggcu

SEQ ID NO: 376002 - RNA, 19 nt, Artificial Sequence
  Description of Artificial Sequence: Synthetic oligonucleotide
  Antisense Strand to SEQ ID NO: 376001
agccuaaagagaaacuugg

SEQ ID NO: 376003 - RNA, 19 nt, Artificial Sequence
  Description of Artificial Sequence: Synthetic oligonucleotide
  Sense Strand Starting at position 728 of SEQ ID NO: 318298
gcucuugucucaguaaaga

SEQ ID NO: 376004 - RNA, 19 nt, Artificial Sequence
  Description of Artificial Sequence: Synthetic oligonucleotide
  Antisense Strand to SEQ ID NO: 376003
ucuuuacugagacaagagc

SEQ ID NO: 376005 - RNA, 19 nt, Artificial Sequence
  Description of Artificial Sequence: Synthetic oligonucleotide
  Sense Strand Starting at position 728 of SEQ ID NO: 318337
aagguaauccagugagacu

SEQ ID NO: 376006 - RNA, 19 nt, Artificial Sequence
  Description of Artificial Sequence: Synthetic oligonucleotide
  Antisense Strand to SEQ ID NO: 376005
agucucacuggauuaccuu

SEQ ID NO: 376007 - RNA, 19 nt, Artificial Sequence
  Description of Artificial Sequence: Synthetic oligonucleotide
  Sense Strand Starting at position 728 of SEQ ID NO: 318691
ggccucuucguauacuaac

SEQ ID NO: 376008 - RNA, 19 nt, Artificial Sequence
  Description of Artificial Sequence: Synthetic oligonucleotide
  Antisense Strand to SEQ ID NO: 376007
guuaguauacgaagaggcc

SEQ ID NO: 376009 - RNA, 19 nt, Artificial Sequence
  Description of Artificial Sequence: Synthetic oligonucleotide
  Sense Strand Starting at position 728 of SEQ ID NO: 318741
gaguuauagacguaugcug

SEQ ID NO: 376010 - RNA, 19 nt, Artificial Sequence
  Description of Artificial Sequence: Synthetic oligonucleotide
  Antisense Strand to SEQ ID NO: 376009
cagcauacgucuauaacuc

SEQ ID NO: 376011 - RNA, 19 nt, Artificial Sequence
  Description of Artificial Sequence: Synthetic oligonucleotide
  Sense Strand Starting at position 728 of SEQ ID NO: 318750
acguaugcugguugauuca

SEQ ID NO: 376012 - RNA, 19 nt, Artificial Sequence
  Description of Artificial Sequence: Synthetic oligonucleotide
  Antisense Strand to SEQ ID NO: 376011
ugaaucaaccagcauacgu

SEQ ID NO: 376013 - RNA, 19 nt, Artificial Sequence
  Description of Artificial Sequence: Synthetic oligonucleotide
  Sense Strand Starting at position 728 of SEQ ID NO: 318831
aggguaagaugguuuagag

SEQ ID NO: 376014 - RNA, 19 nt, Artificial Sequence
  Description of Artificial Sequence: Synthetic oligonucleotide
  Antisense Strand to SEQ ID NO: 376013
cucuaaaccaucuuacccu

SEQ ID NO: 376015 - RNA, 19 nt, Artificial Sequence
  Description of Artificial Sequence: Synthetic oligonucleotide
  Sense Strand Starting at position 728 of SEQ ID NO: 318900
ggauuugagugaggacuaa

SEQ ID NO: 376016 - RNA, 19 nt, Artificial Sequence
  Description of Artificial Sequence: Synthetic oligonucleotide
  Antisense Strand to SEQ ID NO: 376015
uuaguccucacucaaaucc

SEQ ID NO: 376017 - RNA, 19 nt, Artificial Sequence
  Description of Artificial Sequence: Synthetic oligonucleotide
  Sense Strand Starting at position 728 of SEQ ID NO: 318927
auauguguucacuggugga

SEQ ID NO: 376018 - RNA, 19 nt, Artificial Sequence
  Description of Artificial Sequence: Synthetic oligonucleotide
  Antisense Strand to SEQ ID NO: 376017
uccaccagugaacacauau

SEQ ID NO: 376019 - RNA, 19 nt, Artificial Sequence
  Description of Artificial Sequence: Synthetic oligonucleotide
  Sense Strand Starting at position 728 of SEQ ID NO: 318931
guguucacugguggaaaga

SEQ ID NO: 376020 - RNA, 19 nt, Artificial Sequence
  Description of Artificial Sequence: Synthetic oligonucleotide
  Antisense Strand to SEQ ID NO: 376019
ucuuuccaccagugaacac

SEQ ID NO: 376021 - RNA, 19 nt, Artificial Sequence
  Description of Artificial Sequence: Synthetic oligonucleotide
  Sense Strand Starting at position 729 of SEQ ID NO: 315300
gucugcguacugucuacau

SEQ ID NO: 376022 - RNA, 19 nt, Artificial Sequence
  Description of Artificial Sequence: Synthetic oligonucleotide
  Antisense Strand to SEQ ID NO: 376021
auguagacaguacgcagac

SEQ ID NO: 376023 - RNA, 19 nt, Artificial Sequence
  Description of Artificial Sequence: Synthetic oligonucleotide
  Sense Strand Starting at position 729 of SEQ ID NO: 315366
ggccuuaguggugacccaa

SEQ ID NO: 376024 - RNA, 19 nt, Artificial Sequence
  Description of Artificial Sequence: Synthetic oligonucleotide
  Antisense Strand to SEQ ID NO: 376023
uugggucaccacuaaggcc

SEQ ID NO: 376025 - RNA, 19 nt, Artificial Sequence
  Description of Artificial Sequence: Synthetic oligonucleotide
  Sense Strand Starting at position 729 of SEQ ID NO: 315487
acaagugcuggguaucaga

SEQ ID NO: 376026 - RNA, 19 nt, Artificial Sequence
  Description of Artificial Sequence: Synthetic oligonucleotide
  Antisense Strand to SEQ ID NO: 376025
ucugauacccagcacuugu

SEQ ID NO: 376027 - RNA, 19 nt, Artificial Sequence
  Description of Artificial Sequence: Synthetic oligonucleotide
  Sense Strand Starting at position 729 of SEQ ID NO: 315823
ggcacugaucccuacacga

SEQ ID NO: 376028 - RNA, 19 nt, Artificial Sequence
  Description of Artificial Sequence: Synthetic oligonucleotide
  Antisense Strand to SEQ ID NO: 376027
ucguguagggaucagugcc

SEQ ID NO: 376029 - RNA, 19 nt, Artificial Sequence
  Description of Artificial Sequence: Synthetic oligonucleotide
  Sense Strand Starting at position 729 of SEQ ID NO: 315825
cacugaucccuacacgaug

SEQ ID NO: 376030 - RNA, 19 nt, Artificial Sequence
  Description of Artificial Sequence: Synthetic oligonucleotide
  Antisense Strand to SEQ ID NO: 376029
caucguguagggaucagug

SEQ ID NO: 376031 - RNA, 19 nt, Artificial Sequence
  Description of Artificial Sequence: Synthetic oligonucleotide
  Sense Strand Starting at position 729 of SEQ ID NO: 315932
acuuuacagguaugcaaua

SEQ ID NO: 376032 - RNA, 19 nt, Artificial Sequence
  Description of Artificial Sequence: Synthetic oligonucleotide
  Antisense Strand to SEQ ID NO: 376031
uauugcauaccuguaaagu

SEQ ID NO: 376033 - RNA, 19 nt, Artificial Sequence
  Description of Artificial Sequence: Synthetic oligonucleotide
  Sense Strand Starting at position 729 of SEQ ID NO: 315987
ugguauugccacugagauu

SEQ ID NO: 376034 - RNA, 19 nt, Artificial Sequence
  Description of Artificial Sequence: Synthetic oligonucleotide
  Antisense Strand to SEQ ID NO: 376033
aaucucaguggcaauacca

SEQ ID NO: 376035 - RNA, 19 nt, Artificial Sequence
  Description of Artificial Sequence: Synthetic oligonucleotide
  Sense Strand Starting at position 729 of SEQ ID NO: 315988
gguauugccacugagauug

SEQ ID NO: 376036 - RNA, 19 nt, Artificial Sequence
  Description of Artificial Sequence: Synthetic oligonucleotide
  Antisense Strand to SEQ ID NO: 376035
caaucucaguggcaauacc

SEQ ID NO: 376037 - RNA, 19 nt, Artificial Sequence
  Description of Artificial Sequence: Synthetic oligonucleotide
  Sense Strand Starting at position 729 of SEQ ID NO: 316018
aguguguugggagauggau

SEQ ID NO: 376038 - RNA, 19 nt, Artificial Sequence
  Description of Artificial Sequence: Synthetic oligonucleotide
  Antisense Strand to SEQ ID NO: 376037
auccaucucccaacacacu

SEQ ID NO: 376039 - RNA, 19 nt, Artificial Sequence
  Description of Artificial Sequence: Synthetic oligonucleotide
  Sense Strand Starting at position 729 of SEQ ID NO: 316069
uacggauauugauuagagu

SEQ ID NO: 376040 - RNA, 19 nt, Artificial Sequence
  Description of Artificial Sequence: Synthetic oligonucleotide
  Antisense Strand to SEQ ID NO: 376039
acucuaaucaauauccgua

SEQ ID NO: 376041 - RNA, 19 nt, Artificial Sequence
  Description of Artificial Sequence: Synthetic oligonucleotide
  Sense Strand Starting at position 729 of SEQ ID NO: 316108
aggcauaggcauugaggaa

SEQ ID NO: 376042 - RNA, 19 nt, Artificial Sequence
  Description of Artificial Sequence: Synthetic oligonucleotide
  Antisense Strand to SEQ ID NO: 376041
uuccucaaugccuaugccu

SEQ ID NO: 376043 - RNA, 19 nt, Artificial Sequence
  Description of Artificial Sequence: Synthetic oligonucleotide
  Sense Strand Starting at position 729 of SEQ ID NO: 316139
aucuguuaccauggucaau

SEQ ID NO: 376044 - RNA, 19 nt, Artificial Sequence
  Description of Artificial Sequence: Synthetic oligonucleotide
  Antisense Strand to SEQ ID NO: 376043
auugaccaugguaacagau

SEQ ID NO: 376045 - RNA, 19 nt, Artificial Sequence
  Description of Artificial Sequence: Synthetic oligonucleotide
  Sense Strand Starting at position 729 of SEQ ID NO: 316141
cuguuaccauggucaauaa

SEQ ID NO: 376046 - RNA, 19 nt, Artificial Sequence
  Description of Artificial Sequence: Synthetic oligonucleotide
  Antisense Strand to SEQ ID NO: 376045
uuauugaccaugguaacag

SEQ ID NO: 376047 - RNA, 19 nt, Artificial Sequence
  Description of Artificial Sequence: Synthetic oligonucleotide
  Sense Strand Starting at position 729 of SEQ ID NO: 316142
uguuaccauggucaauaau

SEQ ID NO: 376048 - RNA, 19 nt, Artificial Sequence
  Description of Artificial Sequence: Synthetic oligonucleotide
  Antisense Strand to SEQ ID NO: 376047
auuauugaccaugguaaca

SEQ ID NO: 376049 - RNA, 19 nt, Artificial Sequence
  Description of Artificial Sequence: Synthetic oligonucleotide
  Sense Strand Starting at position 729 of SEQ ID NO: 317237
cuggaaaucgccgaugcaa

SEQ ID NO: 376050 - RNA, 19 nt, Artificial Sequence
  Description of Artificial Sequence: Synthetic oligonucleotide
  Antisense Strand to SEQ ID NO: 376049
uugcaucggcgauuuccag

SEQ ID NO: 376051 - RNA, 19 nt, Artificial Sequence
  Description of Artificial Sequence: Synthetic oligonucleotide
  Sense Strand Starting at position 729 of SEQ ID NO: 317501
uuuagagacccauguaaga

SEQ ID NO: 376052 - RNA, 19 nt, Artificial Sequence
  Description of Artificial Sequence: Synthetic oligonucleotide
  Antisense Strand to SEQ ID NO: 376051
ucuuacaugggucucuaaa

SEQ ID NO: 376053 - RNA, 19 nt, Artificial Sequence
  Description of Artificial Sequence: Synthetic oligonucleotide
  Sense Strand Starting at position 729 of SEQ ID NO: 317815
aucagagcauaguuauauu

SEQ ID NO: 376054 - RNA, 19 nt, Artificial Sequence
  Description of Artificial Sequence: Synthetic oligonucleotide
  Antisense Strand to SEQ ID NO: 376053
aauauaacuaugcucugau

SEQ ID NO: 376055 - RNA, 19 nt, Artificial Sequence
  Description of Artificial Sequence: Synthetic oligonucleotide
  Sense Strand Starting at position 729 of SEQ ID NO: 317823
auaguuauauuuggagaag

SEQ ID NO: 376056 - RNA, 19 nt, Artificial Sequence
  Description of Artificial Sequence: Synthetic oligonucleotide
  Antisense Strand to SEQ ID NO: 376055
cuucuccaaauauaacuau

SEQ ID NO: 376057 - RNA, 19 nt, Artificial Sequence
  Description of Artificial Sequence: Synthetic oligonucleotide
  Sense Strand Starting at position 729 of SEQ ID NO: 317824
uaguuauauuuggagaagg

SEQ ID NO: 376058 - RNA, 19 nt, Artificial Sequence
  Description of Artificial Sequence: Synthetic oligonucleotide
  Antisense Strand to SEQ ID NO: 376057
ccuucuccaaauauaacua

SEQ ID NO: 376059 - RNA, 19 nt, Artificial Sequence
  Description of Artificial Sequence: Synthetic oligonucleotide
  Sense Strand Starting at position 729 of SEQ ID NO: 317872
gagcuugcuggagacugaa

SEQ ID NO: 376060 - RNA, 19 nt, Artificial Sequence
  Description of Artificial Sequence: Synthetic oligonucleotide
  Antisense Strand to SEQ ID NO: 376059
uucagucuccagcaagcuc

SEQ ID NO: 376061 - RNA, 19 nt, Artificial Sequence
  Description of Artificial Sequence: Synthetic oligonucleotide
  Sense Strand Starting at position 729 of SEQ ID NO: 317896
uccuucuaggaaugugaca

SEQ ID NO: 376062 - RNA, 19 nt, Artificial Sequence
  Description of Artificial Sequence: Synthetic oligonucleotide
  Antisense Strand to SEQ ID NO: 376061
ugucacauuccuagaagga

SEQ ID NO: 376063 - RNA, 19 nt, Artificial Sequence
  Description of Artificial Sequence: Synthetic oligonucleotide
  Sense Strand Starting at position 729 of SEQ ID NO: 317898
cuucuaggaaugugacaga

SEQ ID NO: 376064 - RNA, 19 nt, Artificial Sequence
  Description of Artificial Sequence: Synthetic oligonucleotide
  Antisense Strand to SEQ ID NO: 376063
ucugucacauuccuagaag

SEQ ID NO: 376065 - RNA, 19 nt, Artificial Sequence
  Description of Artificial Sequence: Synthetic oligonucleotide
  Sense Strand Starting at position 729 of SEQ ID NO: 317964
ggacuuacgugacuaucaa

SEQ ID NO: 376066 - RNA, 19 nt, Artificial Sequence
  Description of Artificial Sequence: Synthetic oligonucleotide
  Antisense Strand to SEQ ID NO: 376065
uugauagucacguaagucc

SEQ ID NO: 376067 - RNA, 19 nt, Artificial Sequence
  Description of Artificial Sequence: Synthetic oligonucleotide
  Sense Strand Starting at position 729 of SEQ ID NO: 317965
gacuuacgugacuaucaau

SEQ ID NO: 376068 - RNA, 19 nt, Artificial Sequence
  Description of Artificial Sequence: Synthetic oligonucleotide
  Antisense Strand to SEQ ID NO: 376067
auugauagucacguaaguc

SEQ ID NO: 376069 - RNA, 19 nt, Artificial Sequence
  Description of Artificial Sequence: Synthetic oligonucleotide
  Sense Strand Starting at position 729 of SEQ ID NO: 317989
ggaaucaacuuaguuaaug

SEQ ID NO: 376070 - RNA, 19 nt, Artificial Sequence
  Description of Artificial Sequence: Synthetic oligonucleotide
  Antisense Strand to SEQ ID NO: 376069
cauuaacuaaguugauucc

SEQ ID NO: 376071 - RNA, 19 nt, Artificial Sequence
  Description of Artificial Sequence: Synthetic oligonucleotide
  Sense Strand Starting at position 729 of SEQ ID NO: 317997
cuuaguuaaugggcauaaa

SEQ ID NO: 376072 - RNA, 19 nt, Artificial Sequence
  Description of Artificial Sequence: Synthetic oligonucleotide
  Antisense Strand to SEQ ID NO: 376071
uuuaugcccauuaacuaag

SEQ ID NO: 376073 - RNA, 19 nt, Artificial Sequence
  Description of Artificial Sequence: Synthetic oligonucleotide
  Sense Strand Starting at position 729 of SEQ ID NO: 318025
gagaaugucucugcucuca

SEQ ID NO: 376074 - RNA, 19 nt, Artificial Sequence
  Description of Artificial Sequence: Synthetic oligonucleotide
  Antisense Strand to SEQ ID NO: 376073
ugagagcagagacauucuc

SEQ ID NO: 376075 - RNA, 19 nt, Artificial Sequence
  Description of Artificial Sequence: Synthetic oligonucleotide
  Sense Strand Starting at position 729 of SEQ ID NO: 318056
ucagguuggagaugcauau

SEQ ID NO: 376076 - RNA, 19 nt, Artificial Sequence
  Description of Artificial Sequence: Synthetic oligonucleotide
  Antisense Strand to SEQ ID NO: 376075
auaugcaucuccaaccuga

SEQ ID NO: 376077 - RNA, 19 nt, Artificial Sequence
  Description of Artificial Sequence: Synthetic oligonucleotide
  Sense Strand Starting at position 729 of SEQ ID NO: 318076
ugcaguauguaauuacaaa

SEQ ID NO: 376078 - RNA, 19 nt, Artificial Sequence
  Description of Artificial Sequence: Synthetic oligonucleotide
  Antisense Strand to SEQ ID NO: 376077
uuuguaauuacauacugca

SEQ ID NO: 376079 - RNA, 19 nt, Artificial Sequence
  Description of Artificial Sequence: Synthetic oligonucleotide
  Sense Strand Starting at position 729 of SEQ ID NO: 318099
uguuauguuggccaauaca

SEQ ID NO: 376080 - RNA, 19 nt, Artificial Sequence
  Description of Artificial Sequence: Synthetic oligonucleotide
  Antisense Strand to SEQ ID NO: 376079
uguauuggccaacauaaca

SEQ ID NO: 376081 - RNA, 19 nt, Artificial Sequence
  Description of Artificial Sequence: Synthetic oligonucleotide
  Sense Strand Starting at position 729 of SEQ ID NO: 318110
ccaauacaaguguguacaa

SEQ ID NO: 376082 - RNA, 19 nt, Artificial Sequence
  Description of Artificial Sequence: Synthetic oligonucleotide
  Antisense Strand to SEQ ID NO: 376081
uuguacacacuuguauugg

SEQ ID NO: 376083 - RNA, 19 nt, Artificial Sequence
  Description of Artificial Sequence: Synthetic oligonucleotide
  Sense Strand Starting at position 729 of SEQ ID NO: 318326
cucuguuugugaucaucaa

SEQ ID NO: 376084 - RNA, 19 nt, Artificial Sequence
  Description of Artificial Sequence: Synthetic oligonucleotide
  Antisense Strand to SEQ ID NO: 376083
uugaugaucacaaacagag

SEQ ID NO: 376085 - RNA, 19 nt, Artificial Sequence
  Description of Artificial Sequence: Synthetic oligonucleotide
  Sense Strand Starting at position 729 of SEQ ID NO: 318327
ucuguuugugaucaucaaa

SEQ ID NO: 376086 - RNA, 19 nt, Artificial Sequence
  Description of Artificial Sequence: Synthetic oligonucleotide
  Antisense Strand to SEQ ID NO: 376085
uuugaugaucacaaacaga

SEQ ID NO: 376087 - RNA, 19 nt, Artificial Sequence
  Description of Artificial Sequence: Synthetic oligonucleotide
  Sense Strand Starting at position 729 of SEQ ID NO: 319048
aaaucaugcugaguccagu

SEQ ID NO: 376088 - RNA, 19 nt, Artificial Sequence
  Description of Artificial Sequence: Synthetic oligonucleotide
  Antisense Strand to SEQ ID NO: 376087
acuggacucagcaugauuu

SEQ ID NO: 376089 - RNA, 19 nt, Artificial Sequence
  Description of Artificial Sequence: Synthetic oligonucleotide
  Sense Strand Starting at position 729 of SEQ ID NO: 319057
ugaguccaguccucaagaa

SEQ ID NO: 376090 - RNA, 19 nt, Artificial Sequence
  Description of Artificial Sequence: Synthetic oligonucleotide
  Antisense Strand to SEQ ID NO: 376089
uucuugaggacuggacuca

SEQ ID NO: 376091 - RNA, 19 nt, Artificial Sequence
  Description of Artificial Sequence: Synthetic oligonucleotide
  Sense Strand Starting at position 729 of SEQ ID NO: 319101
gcaaguaagugauuagaau

SEQ ID NO: 376092 - RNA, 19 nt, Artificial Sequence
  Description of Artificial Sequence: Synthetic oligonucleotide
  Antisense Strand to SEQ ID NO: 376091
auucuaaucacuuacuugc

SEQ ID NO: 376093 - RNA, 19 nt, Artificial Sequence
  Description of Artificial Sequence: Synthetic oligonucleotide
  Sense Strand Starting at position 729 of SEQ ID NO: 319107
aagugauuagaaugcacau

SEQ ID NO: 376094 - RNA, 19 nt, Artificial Sequence
  Description of Artificial Sequence: Synthetic oligonucleotide
  Antisense Strand to SEQ ID NO: 376093
augugcauucuaaucacuu

SEQ ID NO: 376095 - RNA, 19 nt, Artificial Sequence
  Description of Artificial Sequence: Synthetic oligonucleotide
  Sense Strand Starting at position 729 of SEQ ID NO: 319127
augugcuaauggccagaaa

SEQ ID NO: 376096 - RNA, 19 nt, Artificial Sequence
  Description of Artificial Sequence: Synthetic oligonucleotide
  Antisense Strand to SEQ ID NO: 376095
uuucuggccauuagcacau

SEQ ID NO: 376097 - RNA, 19 nt, Artificial Sequence
  Description of Artificial Sequence: Synthetic oligonucleotide
  Sense Strand Starting at position 729 of SEQ ID NO: 319169
aaguacaagucacugagau

SEQ ID NO: 376098 - RNA, 19 nt, Artificial Sequence
  Description of Artificial Sequence: Synthetic oligonucleotide
  Antisense Strand to SEQ ID NO: 376097
aucucagugacuuguacuu

SEQ ID NO: 376099 - RNA, 19 nt, Artificial Sequence
  Description of Artificial Sequence: Synthetic oligonucleotide
  Sense Strand Starting at position 729 of SEQ ID NO: 319170
aguacaagucacugagaug

SEQ ID NO: 376100 - RNA, 19 nt, Artificial Sequence
  Description of Artificial Sequence: Synthetic oligonucleotide
  Antisense Strand to SEQ ID NO: 376099
caucucagugacuuguacu

SEQ ID NO: 376101 - RNA, 19 nt, Artificial Sequence
  Description of Artificial Sequence: Synthetic oligonucleotide
  Sense Strand Starting at position 730 of SEQ ID NO: 315274
gugggcuuuagcugacuaa

SEQ ID NO: 376102 - RNA, 19 nt, Artificial Sequence
  Description of Artificial Sequence: Synthetic oligonucleotide
  Antisense Strand to SEQ ID NO: 376101
uuagucagcuaaagcccac

SEQ ID NO: 376103 - RNA, 19 nt, Artificial Sequence
  Description of Artificial Sequence: Synthetic oligonucleotide
  Sense Strand Starting at position 730 of SEQ ID NO: 315454
cagccagaggccugaugaa

SEQ ID NO: 376104 - RNA, 19 nt, Artificial Sequence
  Description of Artificial Sequence: Synthetic oligonucleotide
  Antisense Strand to SEQ ID NO: 376103
uucaucaggccucuggcug

SEQ ID NO: 376105 - RNA, 19 nt, Artificial Sequence
  Description of Artificial Sequence: Synthetic oligonucleotide
  Sense Strand Starting at position 730 of SEQ ID NO: 315473
gcaaacagcucucugaaua

SEQ ID NO: 376106 - RNA, 19 nt, Artificial Sequence
  Description of Artificial Sequence: Synthetic oligonucleotide
  Antisense Strand to SEQ ID NO: 376105
uauucagagagcuguuugc

SEQ ID NO: 376107 - RNA, 19 nt, Artificial Sequence
  Description of Artificial Sequence: Synthetic oligonucleotide
  Sense Strand Starting at position 730 of SEQ ID NO: 315654
gggaacccuucucagacaa

SEQ ID NO: 376108 - RNA, 19 nt, Artificial Sequence
  Description of Artificial Sequence: Synthetic oligonucleotide
  Antisense Strand to SEQ ID NO: 376107
uugucugagaaggguuccc

SEQ ID NO: 376109 - RNA, 19 nt, Artificial Sequence
  Description of Artificial Sequence: Synthetic oligonucleotide
  Sense Strand Starting at position 730 of SEQ ID NO: 315703
cuagaagugcccugcuaug

SEQ ID NO: 376110 - RNA, 19 nt, Artificial Sequence
  Description of Artificial Sequence: Synthetic oligonucleotide
  Antisense Strand to SEQ ID NO: 376109
cauagcagggcacuucuag

SEQ ID NO: 376111 - RNA, 19 nt, Artificial Sequence
  Description of Artificial Sequence: Synthetic oligonucleotide
  Sense Strand Starting at position 730 of SEQ ID NO: 315713
ccugcuaugccugugagca

SEQ ID NO: 376112 - RNA, 19 nt, Artificial Sequence
  Description of Artificial Sequence: Synthetic oligonucleotide
  Antisense Strand to SEQ ID NO: 376111
ugcucacaggcauagcagg

SEQ ID NO: 376113 - RNA, 19 nt, Artificial Sequence
  Description of Artificial Sequence: Synthetic oligonucleotide
  Sense Strand Starting at position 730 of SEQ ID NO: 315726
ugagcaaugucaccaaaca

SEQ ID NO: 376114 - RNA, 19 nt, Artificial Sequence
  Description of Artificial Sequence: Synthetic oligonucleotide
  Antisense Strand to SEQ ID NO: 376113
uguuuggugacauugcuca

SEQ ID NO: 376115 - RNA, 19 nt, Artificial Sequence
  Description of Artificial Sequence: Synthetic oligonucleotide
  Sense Strand Starting at position 730 of SEQ ID NO: 315850
cccucuucuugcuuggaua

SEQ ID NO: 376116 - RNA, 19 nt, Artificial Sequence
  Description of Artificial Sequence: Synthetic oligonucleotide
  Antisense Strand to SEQ ID NO: 376115
uauccaagcaagaagaggg

SEQ ID NO: 376117 - RNA, 19 nt, Artificial Sequence
  Description of Artificial Sequence: Synthetic oligonucleotide
  Sense Strand Starting at position 730 of SEQ ID NO: 316073
gcaaacuugugcccagaaa

SEQ ID NO: 376118 - RNA, 19 nt, Artificial Sequence
  Description of Artificial Sequence: Synthetic oligonucleotide
  Antisense Strand to SEQ ID NO: 376117
uuucugggcacaaguuugc

SEQ ID NO: 376119 - RNA, 19 nt, Artificial Sequence
  Description of Artificial Sequence: Synthetic oligonucleotide
  Sense Strand Starting at position 730 of SEQ ID NO: 316074
caaacuugugcccagaaag

SEQ ID NO: 376120 - RNA, 19 nt, Artificial Sequence
  Description of Artificial Sequence: Synthetic oligonucleotide
  Antisense Strand to SEQ ID NO: 376119
cuuucugggcacaaguuug

SEQ ID NO: 376121 - RNA, 19 nt, Artificial Sequence
  Description of Artificial Sequence: Synthetic oligonucleotide
  Sense Strand Starting at position 730 of SEQ ID NO: 316524
gacucuaccggccgaauau

SEQ ID NO: 376122 - RNA, 19 nt, Artificial Sequence
  Description of Artificial Sequence: Synthetic oligonucleotide
  Antisense Strand to SEQ ID NO: 376121
auauucggccgguagaguc

SEQ ID NO: 376123 - RNA, 19 nt, Artificial Sequence
  Description of Artificial Sequence: Synthetic oligonucleotide
  Sense Strand Starting at position 730 of SEQ ID NO: 316819
gcagucaacucaccuguuu

SEQ ID NO: 376124 - RNA, 19 nt, Artificial Sequence
  Description of Artificial Sequence: Synthetic oligonucleotide
  Antisense Strand to SEQ ID NO: 376123
aaacaggugaguugacugc

SEQ ID NO: 376125 - RNA, 19 nt, Artificial Sequence
  Description of Artificial Sequence: Synthetic oligonucleotide
  Sense Strand Starting at position 730 of SEQ ID NO: 317116
aaauguaguccuuagcguu

SEQ ID NO: 376126 - RNA, 19 nt, Artificial Sequence
  Description of Artificial Sequence: Synthetic oligonucleotide
  Antisense Strand to SEQ ID NO: 376125
aacgcuaaggacuacauuu

SEQ ID NO: 376127 - RNA, 19 nt, Artificial Sequence
  Description of Artificial Sequence: Synthetic oligonucleotide
  Sense Strand Starting at position 730 of SEQ ID NO: 317347
ggacguuaggauuguuucu

SEQ ID NO: 376128 - RNA, 19 nt, Artificial Sequence
  Description of Artificial Sequence: Synthetic oligonucleotide
  Antisense Strand to SEQ ID NO: 376127
agaaacaauccuaacgucc

SEQ ID NO: 376129 - RNA, 19 nt, Artificial Sequence
  Description of Artificial Sequence: Synthetic oligonucleotide
  Sense Strand Starting at position 730 of SEQ ID NO: 317359
uguuucucccacugauugu

SEQ ID NO: 376130 - RNA, 19 nt, Artificial Sequence
  Description of Artificial Sequence: Synthetic oligonucleotide
  Antisense Strand to SEQ ID NO: 376129
acaaucagugggagaaaca

SEQ ID NO: 376131 - RNA, 19 nt, Artificial Sequence
  Description of Artificial Sequence: Synthetic oligonucleotide
  Sense Strand Starting at position 730 of SEQ ID NO: 317405
ggauaaaugucauuagugg

SEQ ID NO: 376132 - RNA, 19 nt, Artificial Sequence
  Description of Artificial Sequence: Synthetic oligonucleotide
  Antisense Strand to SEQ ID NO: 376131
ccacuaaugacauuuaucc

SEQ ID NO: 376133 - RNA, 19 nt, Artificial Sequence
  Description of Artificial Sequence: Synthetic oligonucleotide
  Sense Strand Starting at position 730 of SEQ ID NO: 317467
ucgcacuaauuguuucuaa

SEQ ID NO: 376134 - RNA, 19 nt, Artificial Sequence
  Description of Artificial Sequence: Synthetic oligonucleotide
  Antisense Strand to SEQ ID NO: 376133
uuagaaacaauuagugcga

SEQ ID NO: 376135 - RNA, 19 nt, Artificial Sequence
  Description of Artificial Sequence: Synthetic oligonucleotide
  Sense Strand Starting at position 730 of SEQ ID NO: 317468
cgcacuaauuguuucuaaa

SEQ ID NO: 376136 - RNA, 19 nt, Artificial Sequence
  Description of Artificial Sequence: Synthetic oligonucleotide
  Antisense Strand to SEQ ID NO: 376135
uuuagaaacaauuagugcg

SEQ ID NO: 376137 - RNA, 19 nt, Artificial Sequence
  Description of Artificial Sequence: Synthetic oligonucleotide
  Sense Strand Starting at position 730 of SEQ ID NO: 317515
ucaguauaaugcucuagaa

SEQ ID NO: 376138 - RNA, 19 nt, Artificial Sequence
  Description of Artificial Sequence: Synthetic oligonucleotide
  Antisense Strand to SEQ ID NO: 376137
uucuagagcauuauacuga

SEQ ID NO: 376139 - RNA, 19 nt, Artificial Sequence
  Description of Artificial Sequence: Synthetic oligonucleotide
  Sense Strand Starting at position 730 of SEQ ID NO: 317517
aguauaaugcucuagaacg

SEQ ID NO: 376140 - RNA, 19 nt, Artificial Sequence
  Description of Artificial Sequence: Synthetic oligonucleotide
  Antisense Strand to SEQ ID NO: 376139
cguucuagagcauuauacu

SEQ ID NO: 376141 - RNA, 19 nt, Artificial Sequence
  Description of Artificial Sequence: Synthetic oligonucleotide
  Sense Strand Starting at position 730 of SEQ ID NO: 317525
gcucuagaacgguaguucu

SEQ ID NO: 376142 - RNA, 19 nt, Artificial Sequence
  Description of Artificial Sequence: Synthetic oligonucleotide
  Antisense Strand to SEQ ID NO: 376141
agaacuaccguucuagagc

SEQ ID NO: 376143 - RNA, 19 nt, Artificial Sequence
  Description of Artificial Sequence: Synthetic oligonucleotide
  Sense Strand Starting at position 730 of SEQ ID NO: 317528
cuagaacgguaguucucaa

SEQ ID NO: 376144 - RNA, 19 nt, Artificial Sequence
  Description of Artificial Sequence: Synthetic oligonucleotide
  Antisense Strand to SEQ ID NO: 376143
uugagaacuaccguucuag

SEQ ID NO: 376145 - RNA, 19 nt, Artificial Sequence
  Description of Artificial Sequence: Synthetic oligonucleotide
  Sense Strand Starting at position 730 of SEQ ID NO: 317561
agaauaagccgggaagcuu

SEQ ID NO: 376146 - RNA, 19 nt, Artificial Sequence
  Description of Artificial Sequence: Synthetic oligonucleotide
  Antisense Strand to SEQ ID NO: 376145
aagcuucccggcuuauucu

SEQ ID NO: 376147 - RNA, 19 nt, Artificial Sequence
  Description of Artificial Sequence: Synthetic oligonucleotide
  Sense Strand Starting at position 730 of SEQ ID NO: 318425
ugaagauggcuuugcauaa

SEQ ID NO: 376148 - RNA, 19 nt, Artificial Sequence
  Description of Artificial Sequence: Synthetic oligonucleotide
  Antisense Strand to SEQ ID NO: 376147
uuaugcaaagccaucuuca

SEQ ID NO: 376149 - RNA, 19 nt, Artificial Sequence
  Description of Artificial Sequence: Synthetic oligonucleotide
  Sense Strand Starting at position 730 of SEQ ID NO: 318426
gaagauggcuuugcauaag

SEQ ID NO: 376150 - RNA, 19 nt, Artificial Sequence
  Description of Artificial Sequence: Synthetic oligonucleotide
  Antisense Strand to SEQ ID NO: 376149
cuuaugcaaagccaucuuc

SEQ ID NO: 376151 - RNA, 19 nt, Artificial Sequence
  Description of Artificial Sequence: Synthetic oligonucleotide
  Sense Strand Starting at position 730 of SEQ ID NO: 318445
gcuaucaaguucuugcaca

SEQ ID NO: 376152 - RNA, 19 nt, Artificial Sequence
  Description of Artificial Sequence: Synthetic oligonucleotide
  Antisense Strand to SEQ ID NO: 376151
ugugcaagaacuugauagc

SEQ ID NO: 376153 - RNA, 19 nt, Artificial Sequence
  Description of Artificial Sequence: Synthetic oligonucleotide
  Sense Strand Starting at position 730 of SEQ ID NO: 318549
ucuccaggucuccacagau

SEQ ID NO: 376154 - RNA, 19 nt, Artificial Sequence
  Description of Artificial Sequence: Synthetic oligonucleotide
  Antisense Strand to SEQ ID NO: 376153
aucuguggagaccuggaga

SEQ ID NO: 376155 - RNA, 19 nt, Artificial Sequence
  Description of Artificial Sequence: Synthetic oligonucleotide
  Sense Strand Starting at position 730 of SEQ ID NO: 318584
uccucauuagcucagaagu

SEQ ID NO: 376156 - RNA, 19 nt, Artificial Sequence
  Description of Artificial Sequence: Synthetic oligonucleotide
  Antisense Strand to SEQ ID NO: 376155
acuucugagcuaaugagga

SEQ ID NO: 376157 - RNA, 19 nt, Artificial Sequence
  Description of Artificial Sequence: Synthetic oligonucleotide
  Sense Strand Starting at position 730 of SEQ ID NO: 318611
ccucccuuagggcaagaau

SEQ ID NO: 376158 - RNA, 19 nt, Artificial Sequence
  Description of Artificial Sequence: Synthetic oligonucleotide
  Antisense Strand to SEQ ID NO: 376157
auucuugcccuaagggagg

SEQ ID NO: 376159 - RNA, 19 nt, Artificial Sequence
  Description of Artificial Sequence: Synthetic oligonucleotide
  Sense Strand Starting at position 730 of SEQ ID NO: 318661
acuauaagaguuugagcca

SEQ ID NO: 376160 - RNA, 19 nt, Artificial Sequence
  Description of Artificial Sequence: Synthetic oligonucleotide
  Antisense Strand to SEQ ID NO: 376159
uggcucaaacucuuauagu

SEQ ID NO: 376161 - RNA, 19 nt, Artificial Sequence
  Description of Artificial Sequence: Synthetic oligonucleotide
  Sense Strand Starting at position 730 of SEQ ID NO: 318664
auaagaguuugagccauga

SEQ ID NO: 376162 - RNA, 19 nt, Artificial Sequence
  Description of Artificial Sequence: Synthetic oligonucleotide
  Antisense Strand to SEQ ID NO: 376161
ucauggcucaaacucuuau

SEQ ID NO: 376163 - RNA, 19 nt, Artificial Sequence
  Description of Artificial Sequence: Synthetic oligonucleotide
  Sense Strand Starting at position 730 of SEQ ID NO: 318668
gaguuugagccaugagcug

SEQ ID NO: 376164 - RNA, 19 nt, Artificial Sequence
  Description of Artificial Sequence: Synthetic oligonucleotide
  Antisense Strand to SEQ ID NO: 376163
cagcucauggcucaaacuc

SEQ ID NO: 376165 - RNA, 19 nt, Artificial Sequence
  Description of Artificial Sequence: Synthetic oligonucleotide
  Sense Strand Starting at position 730 of SEQ ID NO: 318799
ggagaaaguuaagaaagaa

SEQ ID NO: 376166 - RNA, 19 nt, Artificial Sequence
  Description of Artificial Sequence: Synthetic oligonucleotide
  Antisense Strand to SEQ ID NO: 376165
uucuuucuuaacuuucucc

SEQ ID NO: 376167 - RNA, 19 nt, Artificial Sequence
  Description of Artificial Sequence: Synthetic oligonucleotide
  Sense Strand Starting at position 730 of SEQ ID NO: 318876
acauucucugcuugguaca

SEQ ID NO: 376168 - RNA, 19 nt, Artificial Sequence
  Description of Artificial Sequence: Synthetic oligonucleotide
  Antisense Strand to SEQ ID NO: 376167
uguaccaagcagagaaugu

SEQ ID NO: 376169 - RNA, 19 nt, Artificial Sequence
  Description of Artificial Sequence: Synthetic oligonucleotide
  Sense Strand Starting at position 730 of SEQ ID NO: 318878
auucucugcuugguacaga

SEQ ID NO: 376170 - RNA, 19 nt, Artificial Sequence
  Description of Artificial Sequence: Synthetic oligonucleotide
  Antisense Strand to SEQ ID NO: 376169
ucuguaccaagcagagaau

SEQ ID NO: 376171 - RNA, 19 nt, Artificial Sequence
  Description of Artificial Sequence: Synthetic oligonucleotide
  Sense Strand Starting at position 730 of SEQ ID NO: 318881
cucugcuugguacagaaau

SEQ ID NO: 376172 - RNA, 19 nt, Artificial Sequence
  Description of Artificial Sequence: Synthetic oligonucleotide
  Antisense Strand to SEQ ID NO: 376171
auuucuguaccaagcagag

SEQ ID NO: 376173 - RNA, 19 nt, Artificial Sequence
  Description of Artificial Sequence: Synthetic oligonucleotide
  Sense Strand Starting at position 730 of SEQ ID NO: 318883
cugcuugguacagaaaugu

SEQ ID NO: 376174 - RNA, 19 nt, Artificial Sequence
  Description of Artificial Sequence: Synthetic oligonucleotide
  Antisense Strand to SEQ ID NO: 376173
acauuucuguaccaagcag

SEQ ID NO: 376175 - RNA, 19 nt, Artificial Sequence
  Description of Artificial Sequence: Synthetic oligonucleotide
  Sense Strand Starting at position 730 of SEQ ID NO: 318893
cagaaauguccuggcuaug

SEQ ID NO: 376176 - RNA, 19 nt, Artificial Sequence
  Description of Artificial Sequence: Synthetic oligonucleotide
  Antisense Strand to SEQ ID NO: 376175
cauagccaggacauuucug

SEQ ID NO: 376177 - RNA, 19 nt, Artificial Sequence
  Description of Artificial Sequence: Synthetic oligonucleotide
  Sense Strand Starting at position 730 of SEQ ID NO: 318948
uuuagagauggugguuuca

SEQ ID NO: 376178 - RNA, 19 nt, Artificial Sequence
  Description of Artificial Sequence: Synthetic oligonucleotide
  Antisense Strand to SEQ ID NO: 376177
ugaaaccaccaucucuaaa

SEQ ID NO: 376179 - RNA, 19 nt, Artificial Sequence
  Description of Artificial Sequence: Synthetic oligonucleotide
  Sense Strand Starting at position 730 of SEQ ID NO: 318964
ucacuaugcuauguugaca

SEQ ID NO: 376180 - RNA, 19 nt, Artificial Sequence
  Description of Artificial Sequence: Synthetic oligonucleotide
  Antisense Strand to SEQ ID NO: 376179
ugucaacauagcauaguga

SEQ ID NO: 376181 - RNA, 19 nt, Artificial Sequence
  Description of Artificial Sequence: Synthetic oligonucleotide
  Sense Strand Starting at position 731 of SEQ ID NO: 315390
ucuggaguagucuggacaa

SEQ ID NO: 376182 - RNA, 19 nt, Artificial Sequence
  Description of Artificial Sequence: Synthetic oligonucleotide
  Antisense Strand to SEQ ID NO: 376181
uuguccagacuacuccaga

SEQ ID NO: 376183 - RNA, 19 nt, Artificial Sequence
  Description of Artificial Sequence: Synthetic oligonucleotide
  Sense Strand Starting at position 731 of SEQ ID NO: 315488
gcaugcacucuggauugga

SEQ ID NO: 376184 - RNA, 19 nt, Artificial Sequence
  Description of Artificial Sequence: Synthetic oligonucleotide
  Antisense Strand to SEQ ID NO: 376183
uccaauccagagugcaugc

SEQ ID NO: 376185 - RNA, 19 nt, Artificial Sequence
  Description of Artificial Sequence: Synthetic oligonucleotide
  Sense Strand Starting at position 731 of SEQ ID NO: 315492
gcacucuggauuggacaua

SEQ ID NO: 376186 - RNA, 19 nt, Artificial Sequence
  Description of Artificial Sequence: Synthetic oligonucleotide
  Antisense Strand to SEQ ID NO: 376185
uauguccaauccagagugc

SEQ ID NO: 376187 - RNA, 19 nt, Artificial Sequence
  Description of Artificial Sequence: Synthetic oligonucleotide
  Sense Strand Starting at position 731 of SEQ ID NO: 316239
aacugaguaucugcugaau

SEQ ID NO: 376188 - RNA, 19 nt, Artificial Sequence
  Description of Artificial Sequence: Synthetic oligonucleotide
  Antisense Strand to SEQ ID NO: 376187
auucagcagauacucaguu

SEQ ID NO: 376189 - RNA, 19 nt, Artificial Sequence
  Description of Artificial Sequence: Synthetic oligonucleotide
  Sense Strand Starting at position 731 of SEQ ID NO: 316242
ugaguaucugcugaauauu

SEQ ID NO: 376190 - RNA, 19 nt, Artificial Sequence
  Description of Artificial Sequence: Synthetic oligonucleotide
  Antisense Strand to SEQ ID NO: 376189
aauauucagcagauacuca

SEQ ID NO: 376191 - RNA, 19 nt, Artificial Sequence
  Description of Artificial Sequence: Synthetic oligonucleotide
  Sense Strand Starting at position 731 of SEQ ID NO: 316361
uuugguacaucccugauau

SEQ ID NO: 376192 - RNA, 19 nt, Artificial Sequence
  Description of Artificial Sequence: Synthetic oligonucleotide
  Antisense Strand to SEQ ID NO: 376191
auaucagggauguaccaaa

SEQ ID NO: 376193 - RNA, 19 nt, Artificial Sequence
  Description of Artificial Sequence: Synthetic oligonucleotide
  Sense Strand Starting at position 731 of SEQ ID NO: 316362
uugguacaucccugauauc

SEQ ID NO: 376194 - RNA, 19 nt, Artificial Sequence
  Description of Artificial Sequence: Synthetic oligonucleotide
  Antisense Strand to SEQ ID NO: 376193
gauaucagggauguaccaa

SEQ ID NO: 376195 - RNA, 19 nt, Artificial Sequence
  Description of Artificial Sequence: Synthetic oligonucleotide
  Sense Strand Starting at position 731 of SEQ ID NO: 316363
ugguacaucccugauaucu

SEQ ID NO: 376196 - RNA, 19 nt, Artificial Sequence
  Description of Artificial Sequence: Synthetic oligonucleotide
  Antisense Strand to SEQ ID NO: 376195
agauaucagggauguacca

SEQ ID NO: 376197 - RNA, 19 nt, Artificial Sequence
  Description of Artificial Sequence: Synthetic oligonucleotide
  Sense Strand Starting at position 731 of SEQ ID NO: 316493
cugcuauaauuugcuguau

SEQ ID NO: 376198 - RNA, 19 nt, Artificial Sequence
  Description of Artificial Sequence: Synthetic oligonucleotide
  Antisense Strand to SEQ ID NO: 376197
auacagcaaauuauagcag

SEQ ID NO: 376199 - RNA, 19 nt, Artificial Sequence
  Description of Artificial Sequence: Synthetic oligonucleotide
  Sense Strand Starting at position 731 of SEQ ID NO: 316553
cugcaaucugacuaucuga

SEQ ID NO: 376200 - RNA, 19 nt, Artificial Sequence
  Description of Artificial Sequence: Synthetic oligonucleotide
  Antisense Strand to SEQ ID NO: 376199
ucagauagucagauugcag

SEQ ID NO: 376201 - RNA, 19 nt, Artificial Sequence
  Description of Artificial Sequence: Synthetic oligonucleotide
  Sense Strand Starting at position 731 of SEQ ID NO: 316644
ugagauuccuauccuuaga

SEQ ID NO: 376202 - RNA, 19 nt, Artificial Sequence
  Description of Artificial Sequence: Synthetic oligonucleotide
  Antisense Strand to SEQ ID NO: 376201
ucuaaggauaggaaucuca

SEQ ID NO: 376203 - RNA, 19 nt, Artificial Sequence
  Description of Artificial Sequence: Synthetic oligonucleotide
  Sense Strand Starting at position 731 of SEQ ID NO: 316691
ggccauagaguuugaaauc

SEQ ID NO: 376204 - RNA, 19 nt, Artificial Sequence
  Description of Artificial Sequence: Synthetic oligonucleotide
  Antisense Strand to SEQ ID NO: 376203
gauuucaaacucuauggcc

SEQ ID NO: 376205 - RNA, 19 nt, Artificial Sequence
  Description of Artificial Sequence: Synthetic oligonucleotide
  Sense Strand Starting at position 731 of SEQ ID NO: 316700
guuugaaaucaauauaugc

SEQ ID NO: 376206 - RNA, 19 nt, Artificial Sequence
  Description of Artificial Sequence: Synthetic oligonucleotide
  Antisense Strand to SEQ ID NO: 376205
gcauauauugauuucaaac

SEQ ID NO: 376207 - RNA, 19 nt, Artificial Sequence
  Description of Artificial Sequence: Synthetic oligonucleotide
  Sense Strand Starting at position 731 of SEQ ID NO: 316719
aaauuacucuguuugaagg

SEQ ID NO: 376208 - RNA, 19 nt, Artificial Sequence
  Description of Artificial Sequence: Synthetic oligonucleotide
  Antisense Strand to SEQ ID NO: 376207
ccuucaaacagaguaauuu

SEQ ID NO: 376209 - RNA, 19 nt, Artificial Sequence
  Description of Artificial Sequence: Synthetic oligonucleotide
  Sense Strand Starting at position 731 of SEQ ID NO: 316762
guguguuaggcagacuaag

SEQ ID NO: 376210 - RNA, 19 nt, Artificial Sequence
  Description of Artificial Sequence: Synthetic oligonucleotide
  Antisense Strand to SEQ ID NO: 376209
cuuagucugccuaacacac

SEQ ID NO: 376211 - RNA, 19 nt, Artificial Sequence
  Description of Artificial Sequence: Synthetic oligonucleotide
  Sense Strand Starting at position 731 of SEQ ID NO: 316783
uaggcaggauugguagaau

SEQ ID NO: 376212 - RNA, 19 nt, Artificial Sequence
  Description of Artificial Sequence: Synthetic oligonucleotide
  Antisense Strand to SEQ ID NO: 376211
auucuaccaauccugccua

SEQ ID NO: 376213 - RNA, 19 nt, Artificial Sequence
  Description of Artificial Sequence: Synthetic oligonucleotide
  Sense Strand Starting at position 731 of SEQ ID NO: 316805
aguucugcugaccaacaau

SEQ ID NO: 376214 - RNA, 19 nt, Artificial Sequence
  Description of Artificial Sequence: Synthetic oligonucleotide
  Antisense Strand to SEQ ID NO: 376213
auuguuggucagcagaacu

SEQ ID NO: 376215 - RNA, 19 nt, Artificial Sequence
  Description of Artificial Sequence: Synthetic oligonucleotide
  Sense Strand Starting at position 731 of SEQ ID NO: 316866
cuugguguucacugaagag

SEQ ID NO: 376216 - RNA, 19 nt, Artificial Sequence
  Description of Artificial Sequence: Synthetic oligonucleotide
  Antisense Strand to SEQ ID NO: 376215
cucuucagugaacaccaag

SEQ ID NO: 376217 - RNA, 19 nt, Artificial Sequence
  Description of Artificial Sequence: Synthetic oligonucleotide
  Sense Strand Starting at position 731 of SEQ ID NO: 317317
cucaguugucucgcgaggu

SEQ ID NO: 376218 - RNA, 19 nt, Artificial Sequence
  Description of Artificial Sequence: Synthetic oligonucleotide
  Antisense Strand to SEQ ID NO: 376217
accucgcgagacaacugag

SEQ ID NO: 376219 - RNA, 19 nt, Artificial Sequence
  Description of Artificial Sequence: Synthetic oligonucleotide
  Sense Strand Starting at position 731 of SEQ ID NO: 317344
uggucuuggagccacaauu

SEQ ID NO: 376220 - RNA, 19 nt, Artificial Sequence
  Description of Artificial Sequence: Synthetic oligonucleotide
  Antisense Strand to SEQ ID NO: 376219
aauuguggcuccaagacca

SEQ ID NO: 376221 - RNA, 19 nt, Artificial Sequence
  Description of Artificial Sequence: Synthetic oligonucleotide
  Sense Strand Starting at position 731 of SEQ ID NO: 317354
gccacaauuugagaaugac

SEQ ID NO: 376222 - RNA, 19 nt, Artificial Sequence
  Description of Artificial Sequence: Synthetic oligonucleotide
  Antisense Strand to SEQ ID NO: 376221
gucauucucaaauuguggc

SEQ ID NO: 376223 - RNA, 19 nt, Artificial Sequence
  Description of Artificial Sequence: Synthetic oligonucleotide
  Sense Strand Starting at position 731 of SEQ ID NO: 317379
gaguuagagucuccuggaa

SEQ ID NO: 376224 - RNA, 19 nt, Artificial Sequence
  Description of Artificial Sequence: Synthetic oligonucleotide
  Antisense Strand to SEQ ID NO: 376223
uuccaggagacucuaacuc

SEQ ID NO: 376225 - RNA, 19 nt, Artificial Sequence
  Description of Artificial Sequence: Synthetic oligonucleotide
  Sense Strand Starting at position 731 of SEQ ID NO: 317666
ucuugaguugaucauguuu

SEQ ID NO: 376226 - RNA, 19 nt, Artificial Sequence
  Description of Artificial Sequence: Synthetic oligonucleotide
  Antisense Strand to SEQ ID NO: 376225
aaacaugaucaacucaaga

SEQ ID NO: 376227 - RNA, 19 nt, Artificial Sequence
  Description of Artificial Sequence: Synthetic oligonucleotide
  Sense Strand Starting at position 731 of SEQ ID NO: 317883
uggcucaaugccuagauau

SEQ ID NO: 376228 - RNA, 19 nt, Artificial Sequence
  Description of Artificial Sequence: Synthetic oligonucleotide
  Antisense Strand to SEQ ID NO: 376227
auaucuaggcauugagcca

SEQ ID NO: 376229 - RNA, 19 nt, Artificial Sequence
  Description of Artificial Sequence: Synthetic oligonucleotide
  Sense Strand Starting at position 731 of SEQ ID NO: 317885
gcucaaugccuagauauuc

SEQ ID NO: 376230 - RNA, 19 nt, Artificial Sequence
  Description of Artificial Sequence: Synthetic oligonucleotide
  Antisense Strand to SEQ ID NO: 376229
gaauaucuaggcauugagc

SEQ ID NO: 376231 - RNA, 19 nt, Artificial Sequence
  Description of Artificial Sequence: Synthetic oligonucleotide
  Sense Strand Starting at position 731 of SEQ ID NO: 317997
guagaacagcuguauaaau

SEQ ID NO: 376232 - RNA, 19 nt, Artificial Sequence
  Description of Artificial Sequence: Synthetic oligonucleotide
  Antisense Strand to SEQ ID NO: 376231
auuuauacagcuguucuac

SEQ ID NO: 376233 - RNA, 19 nt, Artificial Sequence
  Description of Artificial Sequence: Synthetic oligonucleotide
  Sense Strand Starting at position 731 of SEQ ID NO: 318184
cuagauguguuuguaauuu

SEQ ID NO: 376234 - RNA, 19 nt, Artificial Sequence
  Description of Artificial Sequence: Synthetic oligonucleotide
  Antisense Strand to SEQ ID NO: 376233
aaauuacaaacacaucuag

SEQ ID NO: 376235 - RNA, 19 nt, Artificial Sequence
  Description of Artificial Sequence: Synthetic oligonucleotide
  Sense Strand Starting at position 731 of SEQ ID NO: 318207
gcaucauacaggcagugaa

SEQ ID NO: 376236 - RNA, 19 nt, Artificial Sequence
  Description of Artificial Sequence: Synthetic oligonucleotide
  Antisense Strand to SEQ ID NO: 376235
uucacugccuguaugaugc

SEQ ID NO: 376237 - RNA, 19 nt, Artificial Sequence
  Description of Artificial Sequence: Synthetic oligonucleotide
  Sense Strand Starting at position 731 of SEQ ID NO: 318350
ggaacaugauguucuaauu

SEQ ID NO: 376238 - RNA, 19 nt, Artificial Sequence
  Description of Artificial Sequence: Synthetic oligonucleotide
  Antisense Strand to SEQ ID NO: 376237
aauuagaacaucauguucc

SEQ ID NO: 376239 - RNA, 19 nt, Artificial Sequence
  Description of Artificial Sequence: Synthetic oligonucleotide
  Sense Strand Starting at position 731 of SEQ ID NO: 318563
ugacaagucucuucuggau

SEQ ID NO: 376240 - RNA, 19 nt, Artificial Sequence
  Description of Artificial Sequence: Synthetic oligonucleotide
  Antisense Strand to SEQ ID NO: 376239
auccagaagagacuuguca

SEQ ID NO: 376241 - RNA, 19 nt, Artificial Sequence
  Description of Artificial Sequence: Synthetic oligonucleotide
  Sense Strand Starting at position 731 of SEQ ID NO: 318659
auuaguaaaggcuguaaua

SEQ ID NO: 376242 - RNA, 19 nt, Artificial Sequence
  Description of Artificial Sequence: Synthetic oligonucleotide
  Antisense Strand to SEQ ID NO: 376241
uauuacagccuuuacuaau

SEQ ID NO: 376243 - RNA, 19 nt, Artificial Sequence
  Description of Artificial Sequence: Synthetic oligonucleotide
  Sense Strand Starting at position 731 of SEQ ID NO: 318661
uaguaaaggcuguaauauc

SEQ ID NO: 376244 - RNA, 19 nt, Artificial Sequence
  Description of Artificial Sequence: Synthetic oligonucleotide
  Antisense Strand to SEQ ID NO: 376243
gauauuacagccuuuacua

SEQ ID NO: 376245 - RNA, 19 nt, Artificial Sequence
  Description of Artificial Sequence: Synthetic oligonucleotide
  Sense Strand Starting at position 731 of SEQ ID NO: 318692
gagggaagggugugauuau

SEQ ID NO: 376246 - RNA, 19 nt, Artificial Sequence
  Description of Artificial Sequence: Synthetic oligonucleotide
  Antisense Strand to SEQ ID NO: 376245
auaaucacacccuucccuc

SEQ ID NO: 376247 - RNA, 19 nt, Artificial Sequence
  Description of Artificial Sequence: Synthetic oligonucleotide
  Sense Strand Starting at position 731 of SEQ ID NO: 318703
gugauuauugcagaagcac

SEQ ID NO: 376248 - RNA, 19 nt, Artificial Sequence
  Description of Artificial Sequence: Synthetic oligonucleotide
  Antisense Strand to SEQ ID NO: 376247
gugcuucugcaauaaucac

SEQ ID NO: 376249 - RNA, 19 nt, Artificial Sequence
  Description of Artificial Sequence: Synthetic oligonucleotide
  Sense Strand Starting at position 731 of SEQ ID NO: 318727
cuuauaaucugagcagaga

SEQ ID NO: 376250 - RNA, 19 nt, Artificial Sequence
  Description of Artificial Sequence: Synthetic oligonucleotide
  Antisense Strand to SEQ ID NO: 376249
ucucugcucagauuauaag

SEQ ID NO: 376251 - RNA, 19 nt, Artificial Sequence
  Description of Artificial Sequence: Synthetic oligonucleotide
  Sense Strand Starting at position 731 of SEQ ID NO: 318738
agcagagacuuccuacagu

SEQ ID NO: 376252 - RNA, 19 nt, Artificial Sequence
  Description of Artificial Sequence: Synthetic oligonucleotide
  Antisense Strand to SEQ ID NO: 376251
acuguaggaagucucugcu

SEQ ID NO: 376253 - RNA, 19 nt, Artificial Sequence
  Description of Artificial Sequence: Synthetic oligonucleotide
  Sense Strand Starting at position 731 of SEQ ID NO: 318787
cugguuagccuggaugaca

SEQ ID NO: 376254 - RNA, 19 nt, Artificial Sequence
  Description of Artificial Sequence: Synthetic oligonucleotide
  Antisense Strand to SEQ ID NO: 376253
ugucauccaggcuaaccag

SEQ ID NO: 376255 - RNA, 19 nt, Artificial Sequence
  Description of Artificial Sequence: Synthetic oligonucleotide
  Sense Strand Starting at position 731 of SEQ ID NO: 319090
ucaucuaaugauugguacu

SEQ ID NO: 376256 - RNA, 19 nt, Artificial Sequence
  Description of Artificial Sequence: Synthetic oligonucleotide
  Antisense Strand to SEQ ID NO: 376255
aguaccaaucauuagauga

SEQ ID NO: 376257 - RNA, 19 nt, Artificial Sequence
  Description of Artificial Sequence: Synthetic oligonucleotide
  Sense Strand Starting at position 731 of SEQ ID NO: 319092
aucuaaugauugguacuga

SEQ ID NO: 376258 - RNA, 19 nt, Artificial Sequence
  Description of Artificial Sequence: Synthetic oligonucleotide
  Antisense Strand to SEQ ID NO: 376257
ucaguaccaaucauuagau

SEQ ID NO: 376259 - RNA, 19 nt, Artificial Sequence
  Description of Artificial Sequence: Synthetic oligonucleotide
  Sense Strand Starting at position 731 of SEQ ID NO: 319116
aggaaagccuguuugggau

SEQ ID NO: 376260 - RNA, 19 nt, Artificial Sequence
  Description of Artificial Sequence: Synthetic oligonucleotide
  Antisense Strand to SEQ ID NO: 376259
aucccaaacaggcuuuccu

SEQ ID NO: 376261 - RNA, 19 nt, Artificial Sequence
  Description of Artificial Sequence: Synthetic oligonucleotide
  Sense Strand Starting at position 732 of SEQ ID NO: 315238
aagugucuuauguagguga

SEQ ID NO: 376262 - RNA, 19 nt, Artificial Sequence
  Description of Artificial Sequence: Synthetic oligonucleotide
  Antisense Strand to SEQ ID NO: 376261
ucaccuacauaagacacuu

SEQ ID NO: 376263 - RNA, 19 nt, Artificial Sequence
  Description of Artificial Sequence: Synthetic oligonucleotide
  Sense Strand Starting at position 732 of SEQ ID NO: 315240
gugucuuauguaggugaaa

SEQ ID NO: 376264 - RNA, 19 nt, Artificial Sequence
  Description of Artificial Sequence: Synthetic oligonucleotide
  Antisense Strand to SEQ ID NO: 376263
uuucaccuacauaagacac

SEQ ID NO: 376265 - RNA, 19 nt, Artificial Sequence
  Description of Artificial Sequence: Synthetic oligonucleotide
  Sense Strand Starting at position 732 of SEQ ID NO: 315279
cugucuuauggaggagcga

SEQ ID NO: 376266 - RNA, 19 nt, Artificial Sequence
  Description of Artificial Sequence: Synthetic oligonucleotide
  Antisense Strand to SEQ ID NO: 376265
ucgcuccuccauaagacag

SEQ ID NO: 376267 - RNA, 19 nt, Artificial Sequence
  Description of Artificial Sequence: Synthetic oligonucleotide
  Sense Strand Starting at position 732 of SEQ ID NO: 315280
ugucuuauggaggagcgaa

SEQ ID NO: 376268 - RNA, 19 nt, Artificial Sequence
  Description of Artificial Sequence: Synthetic oligonucleotide
  Antisense Strand to SEQ ID NO: 376267
uucgcuccuccauaagaca

SEQ ID NO: 376269 - RNA, 19 nt, Artificial Sequence
  Description of Artificial Sequence: Synthetic oligonucleotide
  Sense Strand Starting at position 732 of SEQ ID NO: 315377
aggaaaugccgaggucaca

SEQ ID NO: 376270 - RNA, 19 nt, Artificial Sequence
  Description of Artificial Sequence: Synthetic oligonucleotide
  Antisense Strand to SEQ ID NO: 376269
ugugaccucggcauuuccu

SEQ ID NO: 376271 - RNA, 19 nt, Artificial Sequence
  Description of Artificial Sequence: Synthetic oligonucleotide
  Sense Strand Starting at position 732 of SEQ ID NO: 315404
gucaguuuccaccagagca

SEQ ID NO: 376272 - RNA, 19 nt, Artificial Sequence
  Description of Artificial Sequence: Synthetic oligonucleotide
  Antisense Strand to SEQ ID NO: 376271
ugcucugguggaaacugac

SEQ ID NO: 376273 - RNA, 19 nt, Artificial Sequence
  Description of Artificial Sequence: Synthetic oligonucleotide
  Sense Strand Starting at position 732 of SEQ ID NO: 315619
ucagcagggacaugugauu

SEQ ID NO: 376274 - RNA, 19 nt, Artificial Sequence
  Description of Artificial Sequence: Synthetic oligonucleotide
  Antisense Strand to SEQ ID NO: 376273
aaucacaugucccugcuga

SEQ ID NO: 376275 - RNA, 19 nt, Artificial Sequence
  Description of Artificial Sequence: Synthetic oligonucleotide
  Sense Strand Starting at position 732 of SEQ ID NO: 315628
acaugugauuuacaggaaa

SEQ ID NO: 376276 - RNA, 19 nt, Artificial Sequence
  Description of Artificial Sequence: Synthetic oligonucleotide
  Antisense Strand to SEQ ID NO: 376275
uuuccuguaaaucacaugu

SEQ ID NO: 376277 - RNA, 19 nt, Artificial Sequence
  Description of Artificial Sequence: Synthetic oligonucleotide
  Sense Strand Starting at position 732 of SEQ ID NO: 315663
auguuagcagcucaaguuu

SEQ ID NO: 376278 - RNA, 19 nt, Artificial Sequence
  Description of Artificial Sequence: Synthetic oligonucleotide
  Antisense Strand to SEQ ID NO: 376277
aaacuugagcugcuaacau

SEQ ID NO: 376279 - RNA, 19 nt, Artificial Sequence
  Description of Artificial Sequence: Synthetic oligonucleotide
  Sense Strand Starting at position 732 of SEQ ID NO: 315709
cucuaagaaccguauccga

SEQ ID NO: 376280 - RNA, 19 nt, Artificial Sequence
  Description of Artificial Sequence: Synthetic oligonucleotide
  Antisense Strand to SEQ ID NO: 376279
ucggauacgguucuuagag

SEQ ID NO: 376281 - RNA, 19 nt, Artificial Sequence
  Description of Artificial Sequence: Synthetic oligonucleotide
  Sense Strand Starting at position 732 of SEQ ID NO: 315716
aaccguauccgagaaagug

SEQ ID NO: 376282 - RNA, 19 nt, Artificial Sequence
  Description of Artificial Sequence: Synthetic oligonucleotide
  Antisense Strand to SEQ ID NO: 376281
cacuuucucggauacgguu

SEQ ID NO: 376283 - RNA, 19 nt, Artificial Sequence
  Description of Artificial Sequence: Synthetic oligonucleotide
  Sense Strand Starting at position 732 of SEQ ID NO: 315754
ucugacacgagucaguuau

SEQ ID NO: 376284 - RNA, 19 nt, Artificial Sequence
  Description of Artificial Sequence: Synthetic oligonucleotide
  Antisense Strand to SEQ ID NO: 376283
auaacugacucgugucaga

SEQ ID NO: 376285 - RNA, 19 nt, Artificial Sequence
  Description of Artificial Sequence: Synthetic oligonucleotide
  Sense Strand Starting at position 732 of SEQ ID NO: 315756
ugacacgagucaguuauua

SEQ ID NO: 376286 - RNA, 19 nt, Artificial Sequence
  Description of Artificial Sequence: Synthetic oligonucleotide
  Antisense Strand to SEQ ID NO: 376285
uaauaacugacucguguca

SEQ ID NO: 376287 - RNA, 19 nt, Artificial Sequence
  Description of Artificial Sequence: Synthetic oligonucleotide
  Sense Strand Starting at position 732 of SEQ ID NO: 315760
acgagucaguuauuaauac

SEQ ID NO: 376288 - RNA, 19 nt, Artificial Sequence
  Description of Artificial Sequence: Synthetic oligonucleotide
  Antisense Strand to SEQ ID NO: 376287
guauuaauaacugacucgu

SEQ ID NO: 376289 - RNA, 19 nt, Artificial Sequence
  Description of Artificial Sequence: Synthetic oligonucleotide
  Sense Strand Starting at position 732 of SEQ ID NO: 315808
accagugaaugucuauagu

SEQ ID NO: 376290 - RNA, 19 nt, Artificial Sequence
  Description of Artificial Sequence: Synthetic oligonucleotide
  Antisense Strand to SEQ ID NO: 376289
acuauagacauucacuggu

SEQ ID NO: 376291 - RNA, 19 nt, Artificial Sequence
  Description of Artificial Sequence: Synthetic oligonucleotide
  Sense Strand Starting at position 732 of SEQ ID NO: 315811
agugaaugucuauagugaa

SEQ ID NO: 376292 - RNA, 19 nt, Artificial Sequence
  Description of Artificial Sequence: Synthetic oligonucleotide
  Antisense Strand to SEQ ID NO: 376291
uucacuauagacauucacu

SEQ ID NO: 376293 - RNA, 19 nt, Artificial Sequence
  Description of Artificial Sequence: Synthetic oligonucleotide
  Sense Strand Starting at position 732 of SEQ ID NO: 315924
agauaugaucuugggcaag

SEQ ID NO: 376294 - RNA, 19 nt, Artificial Sequence
  Description of Artificial Sequence: Synthetic oligonucleotide
  Antisense Strand to SEQ ID NO: 376293
cuugcccaagaucauaucu

SEQ ID NO: 376295 - RNA, 19 nt, Artificial Sequence
  Description of Artificial Sequence: Synthetic oligonucleotide
  Sense Strand Starting at position 732 of SEQ ID NO: 316000
ggaggugucuugucaagag

SEQ ID NO: 376296 - RNA, 19 nt, Artificial Sequence
  Description of Artificial Sequence: Synthetic oligonucleotide
  Antisense Strand to SEQ ID NO: 376295
cucuugacaagacaccucc

SEQ ID NO: 376297 - RNA, 19 nt, Artificial Sequence
  Description of Artificial Sequence: Synthetic oligonucleotide
  Sense Strand Starting at position 732 of SEQ ID NO: 316004
gugucuugucaagaggugu

SEQ ID NO: 376298 - RNA, 19 nt, Artificial Sequence
  Description of Artificial Sequence: Synthetic oligonucleotide
  Antisense Strand to SEQ ID NO: 376297
acaccucuugacaagacac

SEQ ID NO: 376299 - RNA, 19 nt, Artificial Sequence
  Description of Artificial Sequence: Synthetic oligonucleotide
  Sense Strand Starting at position 732 of SEQ ID NO: 316015
agaggugucuugucaaaug

SEQ ID NO: 376300 - RNA, 19 nt, Artificial Sequence
  Description of Artificial Sequence: Synthetic oligonucleotide
  Antisense Strand to SEQ ID NO: 376299
cauuugacaagacaccucu

SEQ ID NO: 376301 - RNA, 19 nt, Artificial Sequence
  Description of Artificial Sequence: Synthetic oligonucleotide
  Sense Strand Starting at position 732 of SEQ ID NO: 316020
ugucuugucaaaugaugag

SEQ ID NO: 376302 - RNA, 19 nt, Artificial Sequence
  Description of Artificial Sequence: Synthetic oligonucleotide
  Antisense Strand to SEQ ID NO: 376301
cucaucauuugacaagaca

SEQ ID NO: 376303 - RNA, 19 nt, Artificial Sequence
  Description of Artificial Sequence: Synthetic oligonucleotide
  Sense Strand Starting at position 732 of SEQ ID NO: 316026
gucaaaugaugagcaaauc

SEQ ID NO: 376304 - RNA, 19 nt, Artificial Sequence
  Description of Artificial Sequence: Synthetic oligonucleotide
  Antisense Strand to SEQ ID NO: 376303
gauuugcucaucauuugac

SEQ ID NO: 376305 - RNA, 19 nt, Artificial Sequence
  Description of Artificial Sequence: Synthetic oligonucleotide
  Sense Strand Starting at position 732 of SEQ ID NO: 316083
cuguuauuacaguggaguu

SEQ ID NO: 376306 - RNA, 19 nt, Artificial Sequence
  Description of Artificial Sequence: Synthetic oligonucleotide
  Antisense Strand to SEQ ID NO: 376305
aacuccacuguaauaacag

SEQ ID NO: 376307 - RNA, 19 nt, Artificial Sequence
  Description of Artificial Sequence: Synthetic oligonucleotide
  Sense Strand Starting at position 732 of SEQ ID NO: 316084
uguuauuacaguggaguuu

SEQ ID NO: 376308 - RNA, 19 nt, Artificial Sequence
  Description of Artificial Sequence: Synthetic oligonucleotide
  Antisense Strand to SEQ ID NO: 376307
aaacuccacuguaauaaca

SEQ ID NO: 376309 - RNA, 19 nt, Artificial Sequence
  Description of Artificial Sequence: Synthetic oligonucleotide
  Sense Strand Starting at position 732 of SEQ ID NO: 316212
gugaguccuagaggagcaa

SEQ ID NO: 376310 - RNA, 19 nt, Artificial Sequence
  Description of Artificial Sequence: Synthetic oligonucleotide
  Antisense Strand to SEQ ID NO: 376309
uugcuccucuaggacucac

SEQ ID NO: 376311 - RNA, 19 nt, Artificial Sequence
  Description of Artificial Sequence: Synthetic oligonucleotide
  Sense Strand Starting at position 732 of SEQ ID NO: 316278
auggcagagcucuaugauc

SEQ ID NO: 376312 - RNA, 19 nt, Artificial Sequence
  Description of Artificial Sequence: Synthetic oligonucleotide
  Antisense Strand to SEQ ID NO: 376311
gaucauagagcucugccau

SEQ ID NO: 376313 - RNA, 19 nt, Artificial Sequence
  Description of Artificial Sequence: Synthetic oligonucleotide
  Sense Strand Starting at position 732 of SEQ ID NO: 316280
ggcagagcucuaugaucaa

SEQ ID NO: 376314 - RNA, 19 nt, Artificial Sequence
  Description of Artificial Sequence: Synthetic oligonucleotide
  Antisense Strand to SEQ ID NO: 376313
uugaucauagagcucugcc

SEQ ID NO: 376315 - RNA, 19 nt, Artificial Sequence
  Description of Artificial Sequence: Synthetic oligonucleotide
  Sense Strand Starting at position 732 of SEQ ID NO: 316860
cuguaauuaccaugaaagg

SEQ ID NO: 376316 - RNA, 19 nt, Artificial Sequence
  Description of Artificial Sequence: Synthetic oligonucleotide
  Antisense Strand to SEQ ID NO: 376315
ccuuucaugguaauuacag

SEQ ID NO: 376317 - RNA, 19 nt, Artificial Sequence
  Description of Artificial Sequence: Synthetic oligonucleotide
  Sense Strand Starting at position 732 of SEQ ID NO: 317568
agcacuuacccgggucaga

SEQ ID NO: 376318 - RNA, 19 nt, Artificial Sequence
  Description of Artificial Sequence: Synthetic oligonucleotide
  Antisense Strand to SEQ ID NO: 376317
ucugacccggguaagugcu

SEQ ID NO: 376319 - RNA, 19 nt, Artificial Sequence
  Description of Artificial Sequence: Synthetic oligonucleotide
  Sense Strand Starting at position 732 of SEQ ID NO: 318416
agaacuacccguuagcagu

SEQ ID NO: 376320 - RNA, 19 nt, Artificial Sequence
  Description of Artificial Sequence: Synthetic oligonucleotide
  Antisense Strand to SEQ ID NO: 376319
acugcuaacggguaguucu

SEQ ID NO: 376321 - RNA, 19 nt, Artificial Sequence
  Description of Artificial Sequence: Synthetic oligonucleotide
  Sense Strand Starting at position 732 of SEQ ID NO: 318576
guaaccaauguuuaaugau

SEQ ID NO: 376322 - RNA, 19 nt, Artificial Sequence
  Description of Artificial Sequence: Synthetic oligonucleotide
  Antisense Strand to SEQ ID NO: 376321
aucauuaaacauugguuac

SEQ ID NO: 376323 - RNA, 19 nt, Artificial Sequence
  Description of Artificial Sequence: Synthetic oligonucleotide
  Sense Strand Starting at position 732 of SEQ ID NO: 318654
acuguaugucuauacguuu

SEQ ID NO: 376324 - RNA, 19 nt, Artificial Sequence
  Description of Artificial Sequence: Synthetic oligonucleotide
  Antisense Strand to SEQ ID NO: 376323
aaacguauagacauacagu

SEQ ID NO: 376325 - RNA, 19 nt, Artificial Sequence
  Description of Artificial Sequence: Synthetic oligonucleotide
  Sense Strand Starting at position 732 of SEQ ID NO: 318673
uguuuaucccugcaucacu

SEQ ID NO: 376326 - RNA, 19 nt, Artificial Sequence
  Description of Artificial Sequence: Synthetic oligonucleotide
  Antisense Strand to SEQ ID NO: 376325
agugaugcagggauaaaca

SEQ ID NO: 376327 - RNA, 19 nt, Artificial Sequence
  Description of Artificial Sequence: Synthetic oligonucleotide
  Sense Strand Starting at position 732 of SEQ ID NO: 318681
ccugcaucacuugauggau

SEQ ID NO: 376328 - RNA, 19 nt, Artificial Sequence
  Description of Artificial Sequence: Synthetic oligonucleotide
  Antisense Strand to SEQ ID NO: 376327
auccaucaagugaugcagg

SEQ ID NO: 376329 - RNA, 19 nt, Artificial Sequence
  Description of Artificial Sequence: Synthetic oligonucleotide
  Sense Strand Starting at position 732 of SEQ ID NO: 318684
gcaucacuugauggauauu

SEQ ID NO: 376330 - RNA, 19 nt, Artificial Sequence
  Description of Artificial Sequence: Synthetic oligonucleotide
  Antisense Strand to SEQ ID NO: 376329
aauauccaucaagugaugc

SEQ ID NO: 376331 - RNA, 19 nt, Artificial Sequence
  Description of Artificial Sequence: Synthetic oligonucleotide
  Sense Strand Starting at position 732 of SEQ ID NO: 318816
ccuggaucauauguuaacu

SEQ ID NO: 376332 - RNA, 19 nt, Artificial Sequence
  Description of Artificial Sequence: Synthetic oligonucleotide
  Antisense Strand to SEQ ID NO: 376331
aguuaacauaugauccagg

SEQ ID NO: 376333 - RNA, 19 nt, Artificial Sequence
  Description of Artificial Sequence: Synthetic oligonucleotide
  Sense Strand Starting at position 732 of SEQ ID NO: 319014
uuugauugucagcaucauu

SEQ ID NO: 376334 - RNA, 19 nt, Artificial Sequence
  Description of Artificial Sequence: Synthetic oligonucleotide
  Antisense Strand to SEQ ID NO: 376333
aaugaugcugacaaucaaa

SEQ ID NO: 376335 - RNA, 19 nt, Artificial Sequence
  Description of Artificial Sequence: Synthetic oligonucleotide
  Sense Strand Starting at position 732 of SEQ ID NO: 319019
uugucagcaucauuucuga

SEQ ID NO: 376336 - RNA, 19 nt, Artificial Sequence
  Description of Artificial Sequence: Synthetic oligonucleotide
  Antisense Strand to SEQ ID NO: 376335
ucagaaaugaugcugacaa

SEQ ID NO: 376337 - RNA, 19 nt, Artificial Sequence
  Description of Artificial Sequence: Synthetic oligonucleotide
  Sense Strand Starting at position 732 of SEQ ID NO: 319054
gguggaccucaaugacuua

SEQ ID NO: 376338 - RNA, 19 nt, Artificial Sequence
  Description of Artificial Sequence: Synthetic oligonucleotide
  Antisense Strand to SEQ ID NO: 376337
uaagucauugagguccacc

SEQ ID NO: 376339 - RNA, 19 nt, Artificial Sequence
  Description of Artificial Sequence: Synthetic oligonucleotide
  Sense Strand Starting at position 732 of SEQ ID NO: 319079
gcuuuacauguccagggaa

SEQ ID NO: 376340 - RNA, 19 nt, Artificial Sequence
  Description of Artificial Sequence: Synthetic oligonucleotide
  Antisense Strand to SEQ ID NO: 376339
uucccuggacauguaaagc

SEQ ID NO: 376341 - RNA, 19 nt, Artificial Sequence
  Description of Artificial Sequence: Synthetic oligonucleotide
  Sense Strand Starting at position 733 of SEQ ID NO: 315250
ccaggaggcuggucaacau

SEQ ID NO: 376342 - RNA, 19 nt, Artificial Sequence
  Description of Artificial Sequence: Synthetic oligonucleotide
  Antisense Strand to SEQ ID NO: 376341
auguugaccagccuccugg

SEQ ID NO: 376343 - RNA, 19 nt, Artificial Sequence
  Description of Artificial Sequence: Synthetic oligonucleotide
  Sense Strand Starting at position 733 of SEQ ID NO: 315267
augugauucugacugaggu

SEQ ID NO: 376344 - RNA, 19 nt, Artificial Sequence
  Description of Artificial Sequence: Synthetic oligonucleotide
  Antisense Strand to SEQ ID NO: 376343
accucagucagaaucacau

SEQ ID NO: 376345 - RNA, 19 nt, Artificial Sequence
  Description of Artificial Sequence: Synthetic oligonucleotide
  Sense Strand Starting at position 733 of SEQ ID NO: 315268
ugugauucugacugagguu

SEQ ID NO: 376346 - RNA, 19 nt, Artificial Sequence
  Description of Artificial Sequence: Synthetic oligonucleotide
  Antisense Strand to SEQ ID NO: 376345
aaccucagucagaaucaca

SEQ ID NO: 376347 - RNA, 19 nt, Artificial Sequence
  Description of Artificial Sequence: Synthetic oligonucleotide
  Sense Strand Starting at position 733 of SEQ ID NO: 315269
gugauucugacugagguua

SEQ ID NO: 376348 - RNA, 19 nt, Artificial Sequence
  Description of Artificial Sequence: Synthetic oligonucleotide
  Antisense Strand to SEQ ID NO: 376347
uaaccucagucagaaucac

SEQ ID NO: 376349 - RNA, 19 nt, Artificial Sequence
  Description of Artificial Sequence: Synthetic oligonucleotide
  Sense Strand Starting at position 733 of SEQ ID NO: 315280
ugagguuaggaccagucau

SEQ ID NO: 376350 - RNA, 19 nt, Artificial Sequence
  Description of Artificial Sequence: Synthetic oligonucleotide
  Antisense Strand to SEQ ID NO: 376349
augacugguccuaaccuca

SEQ ID NO: 376351 - RNA, 19 nt, Artificial Sequence
  Description of Artificial Sequence: Synthetic oligonucleotide
  Sense Strand Starting at position 733 of SEQ ID NO: 315292
cagucaucccaggagccua

SEQ ID NO: 376352 - RNA, 19 nt, Artificial Sequence
  Description of Artificial Sequence: Synthetic oligonucleotide
  Antisense Strand to SEQ ID NO: 376351
uaggcuccugggaugacug

SEQ ID NO: 376353 - RNA, 19 nt, Artificial Sequence
  Description of Artificial Sequence: Synthetic oligonucleotide
  Sense Strand Starting at position 733 of SEQ ID NO: 315315
aucagaggccaauagucau

SEQ ID NO: 376354 - RNA, 19 nt, Artificial Sequence
  Description of Artificial Sequence: Synthetic oligonucleotide
  Antisense Strand to SEQ ID NO: 376353
augacuauuggccucugau

SEQ ID NO: 376355 - RNA, 19 nt, Artificial Sequence
  Description of Artificial Sequence: Synthetic oligonucleotide
  Sense Strand Starting at position 733 of SEQ ID NO: 315339
guuccaggugaucacuaga

SEQ ID NO: 376356 - RNA, 19 nt, Artificial Sequence
  Description of Artificial Sequence: Synthetic oligonucleotide
  Antisense Strand to SEQ ID NO: 376355
ucuagugaucaccuggaac

SEQ ID NO: 376357 - RNA, 19 nt, Artificial Sequence
  Description of Artificial Sequence: Synthetic oligonucleotide
  Sense Strand Starting at position 733 of SEQ ID NO: 315342
ccaggugaucacuagagcu

SEQ ID NO: 376358 - RNA, 19 nt, Artificial Sequence
  Description of Artificial Sequence: Synthetic oligonucleotide
  Antisense Strand to SEQ ID NO: 376357
agcucuagugaucaccugg

SEQ ID NO: 376359 - RNA, 19 nt, Artificial Sequence
  Description of Artificial Sequence: Synthetic oligonucleotide
  Sense Strand Starting at position 733 of SEQ ID NO: 315344
aggugaucacuagagcuua

SEQ ID NO: 376360 - RNA, 19 nt, Artificial Sequence
  Description of Artificial Sequence: Synthetic oligonucleotide
  Antisense Strand to SEQ ID NO: 376359
uaagcucuagugaucaccu

SEQ ID NO: 376361 - RNA, 19 nt, Artificial Sequence
  Description of Artificial Sequence: Synthetic oligonucleotide
  Sense Strand Starting at position 733 of SEQ ID NO: 315380
aaggguaacugacuuguca

SEQ ID NO: 376362 - RNA, 19 nt, Artificial Sequence
  Description of Artificial Sequence: Synthetic oligonucleotide
  Antisense Strand to SEQ ID NO: 376361
ugacaagucaguuacccuu

SEQ ID NO: 376363 - RNA, 19 nt, Artificial Sequence
  Description of Artificial Sequence: Synthetic oligonucleotide
  Sense Strand Starting at position 733 of SEQ ID NO: 315382
ggguaacugacuugucacu

SEQ ID NO: 376364 - RNA, 19 nt, Artificial Sequence
  Description of Artificial Sequence: Synthetic oligonucleotide
  Antisense Strand to SEQ ID NO: 376363
agugacaagucaguuaccc

SEQ ID NO: 376365 - RNA, 19 nt, Artificial Sequence
  Description of Artificial Sequence: Synthetic oligonucleotide
  Sense Strand Starting at position 733 of SEQ ID NO: 315607
cuggacuugucacuuuaua

SEQ ID NO: 376366 - RNA, 19 nt, Artificial Sequence
  Description of Artificial Sequence: Synthetic oligonucleotide
  Antisense Strand to SEQ ID NO: 376365
uauaaagugacaaguccag

SEQ ID NO: 376367 - RNA, 19 nt, Artificial Sequence
  Description of Artificial Sequence: Synthetic oligonucleotide
  Sense Strand Starting at position 733 of SEQ ID NO: 315636
acgaacugaguaugaaaua

SEQ ID NO: 376368 - RNA, 19 nt, Artificial Sequence
  Description of Artificial Sequence: Synthetic oligonucleotide
  Antisense Strand to SEQ ID NO: 376367
uauuucauacucaguucgu

SEQ ID NO: 376369 - RNA, 19 nt, Artificial Sequence
  Description of Artificial Sequence: Synthetic oligonucleotide
  Sense Strand Starting at position 733 of SEQ ID NO: 315648
ugaaauaccaguggcuaga

SEQ ID NO: 376370 - RNA, 19 nt, Artificial Sequence
  Description of Artificial Sequence: Synthetic oligonucleotide
  Antisense Strand to SEQ ID NO: 376369
ucuagccacugguauuuca

SEQ ID NO: 376371 - RNA, 19 nt, Artificial Sequence
  Description of Artificial Sequence: Synthetic oligonucleotide
  Sense Strand Starting at position 733 of SEQ ID NO: 315657
aguggcuagagcuaauaau

SEQ ID NO: 376372 - RNA, 19 nt, Artificial Sequence
  Description of Artificial Sequence: Synthetic oligonucleotide
  Antisense Strand to SEQ ID NO: 376371
auuauuagcucuagccacu

SEQ ID NO: 376373 - RNA, 19 nt, Artificial Sequence
  Description of Artificial Sequence: Synthetic oligonucleotide
  Sense Strand Starting at position 733 of SEQ ID NO: 315700
aagugucuuauguagguga

SEQ ID NO: 376374 - RNA, 19 nt, Artificial Sequence
  Description of Artificial Sequence: Synthetic oligonucleotide
  Antisense Strand to SEQ ID NO: 376373
ucaccuacauaagacacuu

SEQ ID NO: 376375 - RNA, 19 nt, Artificial Sequence
  Description of Artificial Sequence: Synthetic oligonucleotide
  Sense Strand Starting at position 733 of SEQ ID NO: 315742
ugucuuauggaggagcgaa

SEQ ID NO: 376376 - RNA, 19 nt, Artificial Sequence
  Description of Artificial Sequence: Synthetic oligonucleotide
  Antisense Strand to SEQ ID NO: 376375
uucgcuccuccauaagaca

SEQ ID NO: 376377 - RNA, 19 nt, Artificial Sequence
  Description of Artificial Sequence: Synthetic oligonucleotide
  Sense Strand Starting at position 733 of SEQ ID NO: 315839
aggaaaugccgaggucaca

SEQ ID NO: 376378 - RNA, 19 nt, Artificial Sequence
  Description of Artificial Sequence: Synthetic oligonucleotide
  Antisense Strand to SEQ ID NO: 376377
ugugaccucggcauuuccu

SEQ ID NO: 376379 - RNA, 19 nt, Artificial Sequence
  Description of Artificial Sequence: Synthetic oligonucleotide
  Sense Strand Starting at position 733 of SEQ ID NO: 315866
gucaguuuccaccagagca

SEQ ID NO: 376380 - RNA, 19 nt, Artificial Sequence
  Description of Artificial Sequence: Synthetic oligonucleotide
  Antisense Strand to SEQ ID NO: 376379
ugcucugguggaaacugac

SEQ ID NO: 376381 - RNA, 19 nt, Artificial Sequence
  Description of Artificial Sequence: Synthetic oligonucleotide
  Sense Strand Starting at position 733 of SEQ ID NO: 316081
ucagcagggacaugugauu

SEQ ID NO: 376382 - RNA, 19 nt, Artificial Sequence
  Description of Artificial Sequence: Synthetic oligonucleotide
  Antisense Strand to SEQ ID NO: 376381
aaucacaugucccugcuga

SEQ ID NO: 376383 - RNA, 19 nt, Artificial Sequence
  Description of Artificial Sequence: Synthetic oligonucleotide
  Sense Strand Starting at position 733 of SEQ ID NO: 316090
acaugugauuuacaggaaa

SEQ ID NO: 376384 - RNA, 19 nt, Artificial Sequence
  Description of Artificial Sequence: Synthetic oligonucleotide
  Antisense Strand to SEQ ID NO: 376383
uuuccuguaaaucacaugu

SEQ ID NO: 376385 - RNA, 19 nt, Artificial Sequence
  Description of Artificial Sequence: Synthetic oligonucleotide
  Sense Strand Starting at position 733 of SEQ ID NO: 316171
cucuaagaaccguauccga

SEQ ID NO: 376386 - RNA, 19 nt, Artificial Sequence
  Description of Artificial Sequence: Synthetic oligonucleotide
  Antisense Strand to SEQ ID NO: 376385
ucggauacgguucuuagag

SEQ ID NO: 376387 - RNA, 19 nt, Artificial Sequence
  Description of Artificial Sequence: Synthetic oligonucleotide
  Sense Strand Starting at position 733 of SEQ ID NO: 316178
aaccguauccgagaaagug

SEQ ID NO: 376388 - RNA, 19 nt, Artificial Sequence
  Description of Artificial Sequence: Synthetic oligonucleotide
  Antisense Strand to SEQ ID NO: 376387
cacuuucucggauacgguu

SEQ ID NO: 376389 - RNA, 19 nt, Artificial Sequence
  Description of Artificial Sequence: Synthetic oligonucleotide
  Sense Strand Starting at position 733 of SEQ ID NO: 316216
ucugacacgagucaguuau

SEQ ID NO: 376390 - RNA, 19 nt, Artificial Sequence
  Description of Artificial Sequence: Synthetic oligonucleotide
  Antisense Strand to SEQ ID NO: 376389
auaacugacucgugucaga

SEQ ID NO: 376391 - RNA, 19 nt, Artificial Sequence
  Description of Artificial Sequence: Synthetic oligonucleotide
  Sense Strand Starting at position 733 of SEQ ID NO: 316222
acgagucaguuauuaauac

SEQ ID NO: 376392 - RNA, 19 nt, Artificial Sequence
  Description of Artificial Sequence: Synthetic oligonucleotide
  Antisense Strand to SEQ ID NO: 376391
guauuaauaacugacucgu

SEQ ID NO: 376393 - RNA, 19 nt, Artificial Sequence
  Description of Artificial Sequence: Synthetic oligonucleotide
  Sense Strand Starting at position 733 of SEQ ID NO: 316270
accagugaaugucuauagu

SEQ ID NO: 376394 - RNA, 19 nt, Artificial Sequence
  Description of Artificial Sequence: Synthetic oligonucleotide
  Antisense Strand to SEQ ID NO: 376393
acuauagacauucacuggu

SEQ ID NO: 376395 - RNA, 19 nt, Artificial Sequence
  Description of Artificial Sequence: Synthetic oligonucleotide
  Sense Strand Starting at position 733 of SEQ ID NO: 316273
agugaaugucuauagugaa

SEQ ID NO: 376396 - RNA, 19 nt, Artificial Sequence
  Description of Artificial Sequence: Synthetic oligonucleotide
  Antisense Strand to SEQ ID NO: 376395
uucacuauagacauucacu

SEQ ID NO: 376397 - RNA, 19 nt, Artificial Sequence
  Description of Artificial Sequence: Synthetic oligonucleotide
  Sense Strand Starting at position 733 of SEQ ID NO: 316386
agauaugaucuugggcaag

SEQ ID NO: 376398 - RNA, 19 nt, Artificial Sequence
  Description of Artificial Sequence: Synthetic oligonucleotide
  Antisense Strand to SEQ ID NO: 376397
cuugcccaagaucauaucu

SEQ ID NO: 376399 - RNA, 19 nt, Artificial Sequence
  Description of Artificial Sequence: Synthetic oligonucleotide
  Sense Strand Starting at position 733 of SEQ ID NO: 316462
ggaggugucuugucaagag

SEQ ID NO: 376400 - RNA, 19 nt, Artificial Sequence
  Description of Artificial Sequence: Synthetic oligonucleotide
  Antisense Strand to SEQ ID NO: 376399
cucuugacaagacaccucc

SEQ ID NO: 376401 - RNA, 19 nt, Artificial Sequence
  Description of Artificial Sequence: Synthetic oligonucleotide
  Sense Strand Starting at position 733 of SEQ ID NO: 316477
agaggugucuugucaaaug

SEQ ID NO: 376402 - RNA, 19 nt, Artificial Sequence
  Description of Artificial Sequence: Synthetic oligonucleotide
  Antisense Strand to SEQ ID NO: 376401
cauuugacaagacaccucu

SEQ ID NO: 376403 - RNA, 19 nt, Artificial Sequence
  Description of Artificial Sequence: Synthetic oligonucleotide
  Sense Strand Starting at position 733 of SEQ ID NO: 316482
ugucuugucaaaugaugag

SEQ ID NO: 376404 - RNA, 19 nt, Artificial Sequence
  Description of Artificial Sequence: Synthetic oligonucleotide
  Antisense Strand to SEQ ID NO: 376403
cucaucauuugacaagaca

SEQ ID NO: 376405 - RNA, 19 nt, Artificial Sequence
  Description of Artificial Sequence: Synthetic oligonucleotide
  Sense Strand Starting at position 733 of SEQ ID NO: 316488
gucaaaugaugagcaaauc

SEQ ID NO: 376406 - RNA, 19 nt, Artificial Sequence
  Description of Artificial Sequence: Synthetic oligonucleotide
  Antisense Strand to SEQ ID NO: 376405
gauuugcucaucauuugac

SEQ ID NO: 376407 - RNA, 19 nt, Artificial Sequence
  Description of Artificial Sequence: Synthetic oligonucleotide
  Sense Strand Starting at position 733 of SEQ ID NO: 316674
gugaguccuagaggagcaa

SEQ ID NO: 376408 - RNA, 19 nt, Artificial Sequence
  Description of Artificial Sequence: Synthetic oligonucleotide
  Antisense Strand to SEQ ID NO: 376407
uugcuccucuaggacucac

SEQ ID NO: 376409 - RNA, 19 nt, Artificial Sequence
  Description of Artificial Sequence: Synthetic oligonucleotide
  Sense Strand Starting at position 733 of SEQ ID NO: 316740
auggcagagcucuaugauc

SEQ ID NO: 376410 - RNA, 19 nt, Artificial Sequence
  Description of Artificial Sequence: Synthetic oligonucleotide
  Antisense Strand to SEQ ID NO: 376409
gaucauagagcucugccau

SEQ ID NO: 376411 - RNA, 19 nt, Artificial Sequence
  Description of Artificial Sequence: Synthetic oligonucleotide
  Sense Strand Starting at position 733 of SEQ ID NO: 316742
ggcagagcucuaugaucaa

SEQ ID NO: 376412 - RNA, 19 nt, Artificial Sequence
  Description of Artificial Sequence: Synthetic oligonucleotide
  Antisense Strand to SEQ ID NO: 376411
uugaucauagagcucugcc

SEQ ID NO: 376413 - RNA, 19 nt, Artificial Sequence
  Description of Artificial Sequence: Synthetic oligonucleotide
  Sense Strand Starting at position 733 of SEQ ID NO: 317322
cuguaauuaccaugaaagg

SEQ ID NO: 376414 - RNA, 19 nt, Artificial Sequence
  Description of Artificial Sequence: Synthetic oligonucleotide
  Antisense Strand to SEQ ID NO: 376413
ccuuucaugguaauuacag

SEQ ID NO: 376415 - RNA, 19 nt, Artificial Sequence
  Description of Artificial Sequence: Synthetic oligonucleotide
  Sense Strand Starting at position 733 of SEQ ID NO: 319038
guaaccaauguuuaaugau

SEQ ID NO: 376416 - RNA, 19 nt, Artificial Sequence
  Description of Artificial Sequence: Synthetic oligonucleotide
  Antisense Strand to SEQ ID NO: 376415
aucauuaaacauugguuac

SEQ ID NO: 376417 - RNA, 19 nt, Artificial Sequence
  Description of Artificial Sequence: Synthetic oligonucleotide
  Sense Strand Starting at position 733 of SEQ ID NO: 319143
ccugcaucacuugauggau

SEQ ID NO: 376418 - RNA, 19 nt, Artificial Sequence
  Description of Artificial Sequence: Synthetic oligonucleotide
  Antisense Strand to SEQ ID NO: 376417
auccaucaagugaugcagg

SEQ ID NO: 376419 - RNA, 19 nt, Artificial Sequence
  Description of Artificial Sequence: Synthetic oligonucleotide
  Sense Strand Starting at position 733 of SEQ ID NO: 319146
gcaucacuugauggauauu

SEQ ID NO: 376420 - RNA, 19 nt, Artificial Sequence
  Description of Artificial Sequence: Synthetic oligonucleotide
  Antisense Strand to SEQ ID NO: 376419
aauauccaucaagugaugc

SEQ ID NO: 376421 - RNA, 19 nt, Artificial Sequence
  Description of Artificial Sequence: Synthetic oligonucleotide
  Sense Strand Starting at position 734 of SEQ ID NO: 315260
auggcagagcucuaugauc

SEQ ID NO: 376422 - RNA, 19 nt, Artificial Sequence
  Description of Artificial Sequence: Synthetic oligonucleotide
  Antisense Strand to SEQ ID NO: 376421
gaucauagagcucugccau

SEQ ID NO: 376423 - RNA, 19 nt, Artificial Sequence
  Description of Artificial Sequence: Synthetic oligonucleotide
  Sense Strand Starting at position 734 of SEQ ID NO: 315262
ggcagagcucuaugaucaa

SEQ ID NO: 376424 - RNA, 19 nt, Artificial Sequence
  Description of Artificial Sequence: Synthetic oligonucleotide
  Antisense Strand to SEQ ID NO: 376423
uugaucauagagcucugcc

SEQ ID NO: 376425 - RNA, 19 nt, Artificial Sequence
  Description of Artificial Sequence: Synthetic oligonucleotide
  Sense Strand Starting at position 734 of SEQ ID NO: 315371
cuggguguccaguguauac

SEQ ID NO: 376426 - RNA, 19 nt, Artificial Sequence
  Description of Artificial Sequence: Synthetic oligonucleotide
  Antisense Strand to SEQ ID NO: 376425
guauacacuggacacccag

SEQ ID NO: 376427 - RNA, 19 nt, Artificial Sequence
  Description of Artificial Sequence: Synthetic oligonucleotide
  Sense Strand Starting at position 734 of SEQ ID NO: 315842
cuguaauuaccaugaaagg

SEQ ID NO: 376428 - RNA, 19 nt, Artificial Sequence
  Description of Artificial Sequence: Synthetic oligonucleotide
  Antisense Strand to SEQ ID NO: 376427
ccuuucaugguaauuacag

SEQ ID NO: 376429 - RNA, 19 nt, Artificial Sequence
  Description of Artificial Sequence: Synthetic oligonucleotide
  Sense Strand Starting at position 734 of SEQ ID NO: 316550
agcacuuacccgggucaga

SEQ ID NO: 376430 - RNA, 19 nt, Artificial Sequence
  Description of Artificial Sequence: Synthetic oligonucleotide
  Antisense Strand to SEQ ID NO: 376429
ucugacccggguaagugcu

SEQ ID NO: 376431 - RNA, 19 nt, Artificial Sequence
  Description of Artificial Sequence: Synthetic oligonucleotide
  Sense Strand Starting at position 734 of SEQ ID NO: 317338
augagcuaauuccagaaca

SEQ ID NO: 376432 - RNA, 19 nt, Artificial Sequence
  Description of Artificial Sequence: Synthetic oligonucleotide
  Antisense Strand to SEQ ID NO: 376431
uguucuggaauuagcucau

SEQ ID NO: 376433 - RNA, 19 nt, Artificial Sequence
  Description of Artificial Sequence: Synthetic oligonucleotide
  Sense Strand Starting at position 734 of SEQ ID NO: 317398
agaacuacccguuagcagu

SEQ ID NO: 376434 - RNA, 19 nt, Artificial Sequence
  Description of Artificial Sequence: Synthetic oligonucleotide
  Antisense Strand to SEQ ID NO: 376433
acugcuaacggguaguucu

SEQ ID NO: 376435 - RNA, 19 nt, Artificial Sequence
  Description of Artificial Sequence: Synthetic oligonucleotide
  Sense Strand Starting at position 734 of SEQ ID NO: 317558
guaaccaauguuuaaugau

SEQ ID NO: 376436 - RNA, 19 nt, Artificial Sequence
  Description of Artificial Sequence: Synthetic oligonucleotide
  Antisense Strand to SEQ ID NO: 376435
aucauuaaacauugguuac

SEQ ID NO: 376437 - RNA, 19 nt, Artificial Sequence
  Description of Artificial Sequence: Synthetic oligonucleotide
  Sense Strand Starting at position 734 of SEQ ID NO: 317584
uguuguaacauguagcagu

SEQ ID NO: 376438 - RNA, 19 nt, Artificial Sequence
  Description of Artificial Sequence: Synthetic oligonucleotide
  Antisense Strand to SEQ ID NO: 376437
acugcuacauguuacaaca

SEQ ID NO: 376439 - RNA, 19 nt, Artificial Sequence
  Description of Artificial Sequence: Synthetic oligonucleotide
  Sense Strand Starting at position 734 of SEQ ID NO: 317636
acuguaugucuauacguuu

SEQ ID NO: 376440 - RNA, 19 nt, Artificial Sequence
  Description of Artificial Sequence: Synthetic oligonucleotide
  Antisense Strand to SEQ ID NO: 376439
aaacguauagacauacagu

SEQ ID NO: 376441 - RNA, 19 nt, Artificial Sequence
  Description of Artificial Sequence: Synthetic oligonucleotide
  Sense Strand Starting at position 734 of SEQ ID NO: 317653
uuuguuuaucccugcauca

SEQ ID NO: 376442 - RNA, 19 nt, Artificial Sequence
  Description of Artificial Sequence: Synthetic oligonucleotide
  Antisense Strand to SEQ ID NO: 376441
ugaugcagggauaaacaaa

SEQ ID NO: 376443 - RNA, 19 nt, Artificial Sequence
  Description of Artificial Sequence: Synthetic oligonucleotide
  Sense Strand Starting at position 734 of SEQ ID NO: 317655
uguuuaucccugcaucacu

SEQ ID NO: 376444 - RNA, 19 nt, Artificial Sequence
  Description of Artificial Sequence: Synthetic oligonucleotide
  Antisense Strand to SEQ ID NO: 376443
agugaugcagggauaaaca

SEQ ID NO: 376445 - RNA, 19 nt, Artificial Sequence
  Description of Artificial Sequence: Synthetic oligonucleotide
  Sense Strand Starting at position 734 of SEQ ID NO: 317663
ccugcaucacuugauggau

SEQ ID NO: 376446 - RNA, 19 nt, Artificial Sequence
  Description of Artificial Sequence: Synthetic oligonucleotide
  Antisense Strand to SEQ ID NO: 376445
auccaucaagugaugcagg

SEQ ID NO: 376447 - RNA, 19 nt, Artificial Sequence
  Description of Artificial Sequence: Synthetic oligonucleotide
  Sense Strand Starting at position 734 of SEQ ID NO: 317665
ugcaucacuugauggauau

SEQ ID NO: 376448 - RNA, 19 nt, Artificial Sequence
  Description of Artificial Sequence: Synthetic oligonucleotide
  Antisense Strand to SEQ ID NO: 376447
auauccaucaagugaugca

SEQ ID NO: 376449 - RNA, 19 nt, Artificial Sequence
  Description of Artificial Sequence: Synthetic oligonucleotide
  Sense Strand Starting at position 734 of SEQ ID NO: 317666
gcaucacuugauggauauu

SEQ ID NO: 376450 - RNA, 19 nt, Artificial Sequence
  Description of Artificial Sequence: Synthetic oligonucleotide
  Antisense Strand to SEQ ID NO: 376449
aauauccaucaagugaugc

SEQ ID NO: 376451 - RNA, 19 nt, Artificial Sequence
  Description of Artificial Sequence: Synthetic oligonucleotide
  Sense Strand Starting at position 734 of SEQ ID NO: 317798
ccuggaucauauguuaacu

SEQ ID NO: 376452 - RNA, 19 nt, Artificial Sequence
  Description of Artificial Sequence: Synthetic oligonucleotide
  Antisense Strand to SEQ ID NO: 376451
aguuaacauaugauccagg

SEQ ID NO: 376453 - RNA, 19 nt, Artificial Sequence
  Description of Artificial Sequence: Synthetic oligonucleotide
  Sense Strand Starting at position 734 of SEQ ID NO: 317921
ugcaaacacuuguaauugu

SEQ ID NO: 376454 - RNA, 19 nt, Artificial Sequence
  Description of Artificial Sequence: Synthetic oligonucleotide
  Antisense Strand to SEQ ID NO: 376453
acaauuacaaguguuugca

SEQ ID NO: 376455 - RNA, 19 nt, Artificial Sequence
  Description of Artificial Sequence: Synthetic oligonucleotide
  Sense Strand Starting at position 734 of SEQ ID NO: 317928
acuuguaauugugugucuu

SEQ ID NO: 376456 - RNA, 19 nt, Artificial Sequence
  Description of Artificial Sequence: Synthetic oligonucleotide
  Antisense Strand to SEQ ID NO: 376455
aagacacacaauuacaagu

SEQ ID NO: 376457 - RNA, 19 nt, Artificial Sequence
  Description of Artificial Sequence: Synthetic oligonucleotide
  Sense Strand Starting at position 734 of SEQ ID NO: 317929
cuuguaauugugugucuuu

SEQ ID NO: 376458 - RNA, 19 nt, Artificial Sequence
  Description of Artificial Sequence: Synthetic oligonucleotide
  Antisense Strand to SEQ ID NO: 376457
aaagacacacaauuacaag

SEQ ID NO: 376459 - RNA, 19 nt, Artificial Sequence
  Description of Artificial Sequence: Synthetic oligonucleotide
  Sense Strand Starting at position 734 of SEQ ID NO: 317996
uuugauugucagcaucauu

SEQ ID NO: 376460 - RNA, 19 nt, Artificial Sequence
  Description of Artificial Sequence: Synthetic oligonucleotide
  Antisense Strand to SEQ ID NO: 376459
aaugaugcugacaaucaaa

SEQ ID NO: 376461 - RNA, 19 nt, Artificial Sequence
  Description of Artificial Sequence: Synthetic oligonucleotide
  Sense Strand Starting at position 734 of SEQ ID NO: 318001
uugucagcaucauuucuga

SEQ ID NO: 376462 - RNA, 19 nt, Artificial Sequence
  Description of Artificial Sequence: Synthetic oligonucleotide
  Antisense Strand to SEQ ID NO: 376461
ucagaaaugaugcugacaa

SEQ ID NO: 376463 - RNA, 19 nt, Artificial Sequence
  Description of Artificial Sequence: Synthetic oligonucleotide
  Sense Strand Starting at position 734 of SEQ ID NO: 318036
gguggaccucaaugacuua

SEQ ID NO: 376464 - RNA, 19 nt, Artificial Sequence
  Description of Artificial Sequence: Synthetic oligonucleotide
  Antisense Strand to SEQ ID NO: 376463
uaagucauugagguccacc

SEQ ID NO: 376465 - RNA, 19 nt, Artificial Sequence
  Description of Artificial Sequence: Synthetic oligonucleotide
  Sense Strand Starting at position 734 of SEQ ID NO: 318061
gcuuuacauguccagggaa

SEQ ID NO: 376466 - RNA, 19 nt, Artificial Sequence
  Description of Artificial Sequence: Synthetic oligonucleotide
  Antisense Strand to SEQ ID NO: 376465
uucccuggacauguaaagc

SEQ ID NO: 376467 - RNA, 19 nt, Artificial Sequence
  Description of Artificial Sequence: Synthetic oligonucleotide
  Sense Strand Starting at position 734 of SEQ ID NO: 318321
guaucucuccuuggcagua

SEQ ID NO: 376468 - RNA, 19 nt, Artificial Sequence
  Description of Artificial Sequence: Synthetic oligonucleotide
  Antisense Strand to SEQ ID NO: 376467
uacugccaaggagagauac

SEQ ID NO: 376469 - RNA, 19 nt, Artificial Sequence
  Description of Artificial Sequence: Synthetic oligonucleotide
  Sense Strand Starting at position 734 of SEQ ID NO: 318377
acaguaguuuaccucgacu

SEQ ID NO: 376470 - RNA, 19 nt, Artificial Sequence
  Description of Artificial Sequence: Synthetic oligonucleotide
  Antisense Strand to SEQ ID NO: 376469
agucgagguaaacuacugu

SEQ ID NO: 376471 - RNA, 19 nt, Artificial Sequence
  Description of Artificial Sequence: Synthetic oligonucleotide
  Sense Strand Starting at position 734 of SEQ ID NO: 318379
aguaguuuaccucgacugu

SEQ ID NO: 376472 - RNA, 19 nt, Artificial Sequence
  Description of Artificial Sequence: Synthetic oligonucleotide
  Antisense Strand to SEQ ID NO: 376471
acagucgagguaaacuacu

SEQ ID NO: 376473 - RNA, 19 nt, Artificial Sequence
  Description of Artificial Sequence: Synthetic oligonucleotide
  Sense Strand Starting at position 734 of SEQ ID NO: 318460
cgggcagggaucuguacau

SEQ ID NO: 376474 - RNA, 19 nt, Artificial Sequence
  Description of Artificial Sequence: Synthetic oligonucleotide
  Antisense Strand to SEQ ID NO: 376473
auguacagaucccugcccg

SEQ ID NO: 376475 - RNA, 19 nt, Artificial Sequence
  Description of Artificial Sequence: Synthetic oligonucleotide
  Sense Strand Starting at position 734 of SEQ ID NO: 318580
agccaacaucuaugcaaga

SEQ ID NO: 376476 - RNA, 19 nt, Artificial Sequence
  Description of Artificial Sequence: Synthetic oligonucleotide
  Antisense Strand to SEQ ID NO: 376475
ucuugcauagauguuggcu

SEQ ID NO: 376477 - RNA, 19 nt, Artificial Sequence
  Description of Artificial Sequence: Synthetic oligonucleotide
  Sense Strand Starting at position 734 of SEQ ID NO: 318585
acaucuaugcaagagucaa

SEQ ID NO: 376478 - RNA, 19 nt, Artificial Sequence
  Description of Artificial Sequence: Synthetic oligonucleotide
  Antisense Strand to SEQ ID NO: 376477
uugacucuugcauagaugu

SEQ ID NO: 376479 - RNA, 19 nt, Artificial Sequence
  Description of Artificial Sequence: Synthetic oligonucleotide
  Sense Strand Starting at position 734 of SEQ ID NO: 318766
gcuauaaugcagucgcaug

SEQ ID NO: 376480 - RNA, 19 nt, Artificial Sequence
  Description of Artificial Sequence: Synthetic oligonucleotide
  Antisense Strand to SEQ ID NO: 376479
caugcgacugcauuauagc

SEQ ID NO: 376481 - RNA, 19 nt, Artificial Sequence
  Description of Artificial Sequence: Synthetic oligonucleotide
  Sense Strand Starting at position 734 of SEQ ID NO: 318767
cuauaaugcagucgcauga

SEQ ID NO: 376482 - RNA, 19 nt, Artificial Sequence
  Description of Artificial Sequence: Synthetic oligonucleotide
  Antisense Strand to SEQ ID NO: 376481
ucaugcgacugcauuauag

SEQ ID NO: 376483 - RNA, 19 nt, Artificial Sequence
  Description of Artificial Sequence: Synthetic oligonucleotide
  Sense Strand Starting at position 734 of SEQ ID NO: 318780
gcaugaucauagcaucaua

SEQ ID NO: 376484 - RNA, 19 nt, Artificial Sequence
  Description of Artificial Sequence: Synthetic oligonucleotide
  Antisense Strand to SEQ ID NO: 376483
uaugaugcuaugaucaugc

SEQ ID NO: 376485 - RNA, 19 nt, Artificial Sequence
  Description of Artificial Sequence: Synthetic oligonucleotide
  Sense Strand Starting at position 734 of SEQ ID NO: 318914
agauguucccgaggcugau

SEQ ID NO: 376486 - RNA, 19 nt, Artificial Sequence
  Description of Artificial Sequence: Synthetic oligonucleotide
  Antisense Strand to SEQ ID NO: 376485
aucagccucgggaacaucu

SEQ ID NO: 376487 - RNA, 19 nt, Artificial Sequence
  Description of Artificial Sequence: Synthetic oligonucleotide
  Sense Strand Starting at position 734 of SEQ ID NO: 319000
agacacugugcuugaccua

SEQ ID NO: 376488 - RNA, 19 nt, Artificial Sequence
  Description of Artificial Sequence: Synthetic oligonucleotide
  Antisense Strand to SEQ ID NO: 376487
uaggucaagcacagugucu

SEQ ID NO: 376489 - RNA, 19 nt, Artificial Sequence
  Description of Artificial Sequence: Synthetic oligonucleotide
  Sense Strand Starting at position 734 of SEQ ID NO: 319026
uugccuaauggugagagua

SEQ ID NO: 376490 - RNA, 19 nt, Artificial Sequence
  Description of Artificial Sequence: Synthetic oligonucleotide
  Antisense Strand to SEQ ID NO: 376489
uacucucaccauuaggcaa

SEQ ID NO: 376491 - RNA, 19 nt, Artificial Sequence
  Description of Artificial Sequence: Synthetic oligonucleotide
  Sense Strand Starting at position 734 of SEQ ID NO: 319028
gccuaauggugagaguaaa

SEQ ID NO: 376492 - RNA, 19 nt, Artificial Sequence
  Description of Artificial Sequence: Synthetic oligonucleotide
  Antisense Strand to SEQ ID NO: 376491
uuuacucucaccauuaggc

SEQ ID NO: 376493 - RNA, 19 nt, Artificial Sequence
  Description of Artificial Sequence: Synthetic oligonucleotide
  Sense Strand Starting at position 734 of SEQ ID NO: 319038
gagaguaaaucuugcagau

SEQ ID NO: 376494 - RNA, 19 nt, Artificial Sequence
  Description of Artificial Sequence: Synthetic oligonucleotide
  Antisense Strand to SEQ ID NO: 376493
aucugcaagauuuacucuc

SEQ ID NO: 376495 - RNA, 19 nt, Artificial Sequence
  Description of Artificial Sequence: Synthetic oligonucleotide
  Sense Strand Starting at position 734 of SEQ ID NO: 319040
gaguaaaucuugcagauug

SEQ ID NO: 376496 - RNA, 19 nt, Artificial Sequence
  Description of Artificial Sequence: Synthetic oligonucleotide
  Antisense Strand to SEQ ID NO: 376495
caaucugcaagauuuacuc

SEQ ID NO: 376497 - RNA, 19 nt, Artificial Sequence
  Description of Artificial Sequence: Synthetic oligonucleotide
  Sense Strand Starting at position 734 of SEQ ID NO: 319051
gcagauugcgauugcggau

SEQ ID NO: 376498 - RNA, 19 nt, Artificial Sequence
  Description of Artificial Sequence: Synthetic oligonucleotide
  Antisense Strand to SEQ ID NO: 376497
auccgcaaucgcaaucugc

SEQ ID NO: 376499 - RNA, 19 nt, Artificial Sequence
  Description of Artificial Sequence: Synthetic oligonucleotide
  Sense Strand Starting at position 734 of SEQ ID NO: 319126
ggcucaguugcuggcaaau

SEQ ID NO: 376500 - RNA, 19 nt, Artificial Sequence
  Description of Artificial Sequence: Synthetic oligonucleotide
  Antisense Strand to SEQ ID NO: 376499
auuugccagcaacugagcc

SEQ ID NO: 376501 - RNA, 19 nt, Artificial Sequence
  Description of Artificial Sequence: Synthetic oligonucleotide
  Sense Strand Starting at position 735 of SEQ ID NO: 315329
cuggacuugucacuuuaua

SEQ ID NO: 376502 - RNA, 19 nt, Artificial Sequence
  Description of Artificial Sequence: Synthetic oligonucleotide
  Antisense Strand to SEQ ID NO: 376501
uauaaagugacaaguccag

SEQ ID NO: 376503 - RNA, 19 nt, Artificial Sequence
  Description of Artificial Sequence: Synthetic oligonucleotide
  Sense Strand Starting at position 735 of SEQ ID NO: 315358
acgaacugaguaugaaaua

SEQ ID NO: 376504 - RNA, 19 nt, Artificial Sequence
  Description of Artificial Sequence: Synthetic oligonucleotide
  Antisense Strand to SEQ ID NO: 376503
uauuucauacucaguucgu

SEQ ID NO: 376505 - RNA, 19 nt, Artificial Sequence
  Description of Artificial Sequence: Synthetic oligonucleotide
  Sense Strand Starting at position 735 of SEQ ID NO: 315370
ugaaauaccaguggcuaga

SEQ ID NO: 376506 - RNA, 19 nt, Artificial Sequence
  Description of Artificial Sequence: Synthetic oligonucleotide
  Antisense Strand to SEQ ID NO: 376505
ucuagccacugguauuuca

SEQ ID NO: 376507 - RNA, 19 nt, Artificial Sequence
  Description of Artificial Sequence: Synthetic oligonucleotide
  Sense Strand Starting at position 735 of SEQ ID NO: 315379
aguggcuagagcuaauaau

SEQ ID NO: 376508 - RNA, 19 nt, Artificial Sequence
  Description of Artificial Sequence: Synthetic oligonucleotide
  Antisense Strand to SEQ ID NO: 376507
auuauuagcucuagccacu

SEQ ID NO: 376509 - RNA, 19 nt, Artificial Sequence
  Description of Artificial Sequence: Synthetic oligonucleotide
  Sense Strand Starting at position 735 of SEQ ID NO: 315422
aagugucuuauguagguga

SEQ ID NO: 376510 - RNA, 19 nt, Artificial Sequence
  Description of Artificial Sequence: Synthetic oligonucleotide
  Antisense Strand to SEQ ID NO: 376509
ucaccuacauaagacacuu

SEQ ID NO: 376511 - RNA, 19 nt, Artificial Sequence
  Description of Artificial Sequence: Synthetic oligonucleotide
  Sense Strand Starting at position 735 of SEQ ID NO: 315424
gugucuuauguaggugaaa

SEQ ID NO: 376512 - RNA, 19 nt, Artificial Sequence
  Description of Artificial Sequence: Synthetic oligonucleotide
  Antisense Strand to SEQ ID NO: 376511
uuucaccuacauaagacac

SEQ ID NO: 376513 - RNA, 19 nt, Artificial Sequence
  Description of Artificial Sequence: Synthetic oligonucleotide
  Sense Strand Starting at position 735 of SEQ ID NO: 315463
cugucuuauggaggagcga

SEQ ID NO: 376514 - RNA, 19 nt, Artificial Sequence
  Description of Artificial Sequence: Synthetic oligonucleotide
  Antisense Strand to SEQ ID NO: 376513
ucgcuccuccauaagacag

SEQ ID NO: 376515 - RNA, 19 nt, Artificial Sequence
  Description of Artificial Sequence: Synthetic oligonucleotide
  Sense Strand Starting at position 735 of SEQ ID NO: 315464
ugucuuauggaggagcgaa

SEQ ID NO: 376516 - RNA, 19 nt, Artificial Sequence
  Description of Artificial Sequence: Synthetic oligonucleotide
  Antisense Strand to SEQ ID NO: 376515
uucgcuccuccauaagaca

SEQ ID NO: 376517 - RNA, 19 nt, Artificial Sequence
  Description of Artificial Sequence: Synthetic oligonucleotide
  Sense Strand Starting at position 735 of SEQ ID NO: 315561
aggaaaugccgaggucaca

SEQ ID NO: 376518 - RNA, 19 nt, Artificial Sequence
  Description of Artificial Sequence: Synthetic oligonucleotide
  Antisense Strand to SEQ ID NO: 376517
ugugaccucggcauuuccu

SEQ ID NO: 376519 - RNA, 19 nt, Artificial Sequence
  Description of Artificial Sequence: Synthetic oligonucleotide
  Sense Strand Starting at position 735 of SEQ ID NO: 315588
gucaguuuccaccagagca

SEQ ID NO: 376520 - RNA, 19 nt, Artificial Sequence
  Description of Artificial Sequence: Synthetic oligonucleotide
  Antisense Strand to SEQ ID NO: 376519
ugcucugguggaaacugac

SEQ ID NO: 376521 - RNA, 19 nt, Artificial Sequence
  Description of Artificial Sequence: Synthetic oligonucleotide
  Sense Strand Starting at position 735 of SEQ ID NO: 315803
ucagcagggacaugugauu

SEQ ID NO: 376522 - RNA, 19 nt, Artificial Sequence
  Description of Artificial Sequence: Synthetic oligonucleotide
  Antisense Strand to SEQ ID NO: 376521
aaucacaugucccugcuga

SEQ ID NO: 376523 - RNA, 19 nt, Artificial Sequence
  Description of Artificial Sequence: Synthetic oligonucleotide
  Sense Strand Starting at position 735 of SEQ ID NO: 315812
acaugugauuuacaggaaa

SEQ ID NO: 376524 - RNA, 19 nt, Artificial Sequence
  Description of Artificial Sequence: Synthetic oligonucleotide
  Antisense Strand to SEQ ID NO: 376523
uuuccuguaaaucacaugu

SEQ ID NO: 376525 - RNA, 19 nt, Artificial Sequence
  Description of Artificial Sequence: Synthetic oligonucleotide
  Sense Strand Starting at position 735 of SEQ ID NO: 315847
auguuagcagcucaaguuu

SEQ ID NO: 376526 - RNA, 19 nt, Artificial Sequence
  Description of Artificial Sequence: Synthetic oligonucleotide
  Antisense Strand to SEQ ID NO: 376525
aaacuugagcugcuaacau

SEQ ID NO: 376527 - RNA, 19 nt, Artificial Sequence
  Description of Artificial Sequence: Synthetic oligonucleotide
  Sense Strand Starting at position 735 of SEQ ID NO: 315893
cucuaagaaccguauccga

SEQ ID NO: 376528 - RNA, 19 nt, Artificial Sequence
  Description of Artificial Sequence: Synthetic oligonucleotide
  Antisense Strand to SEQ ID NO: 376527
ucggauacgguucuuagag

SEQ ID NO: 376529 - RNA, 19 nt, Artificial Sequence
  Description of Artificial Sequence: Synthetic oligonucleotide
  Sense Strand Starting at position 735 of SEQ ID NO: 315900
aaccguauccgagaaagug

SEQ ID NO: 376530 - RNA, 19 nt, Artificial Sequence
  Description of Artificial Sequence: Synthetic oligonucleotide
  Antisense Strand to SEQ ID NO: 376529
cacuuucucggauacgguu

SEQ ID NO: 376531 - RNA, 19 nt, Artificial Sequence
  Description of Artificial Sequence: Synthetic oligonucleotide
  Sense Strand Starting at position 735 of SEQ ID NO: 315938
ucugacacgagucaguuau

SEQ ID NO: 376532 - RNA, 19 nt, Artificial Sequence
  Description of Artificial Sequence: Synthetic oligonucleotide
  Antisense Strand to SEQ ID NO: 376531
auaacugacucgugucaga

SEQ ID NO: 376533 - RNA, 19 nt, Artificial Sequence
  Description of Artificial Sequence: Synthetic oligonucleotide
  Sense Strand Starting at position 735 of SEQ ID NO: 315940
ugacacgagucaguuauua

SEQ ID NO: 376534 - RNA, 19 nt, Artificial Sequence
  Description of Artificial Sequence: Synthetic oligonucleotide
  Antisense Strand to SEQ ID NO: 376533
uaauaacugacucguguca

SEQ ID NO: 376535 - RNA, 19 nt, Artificial Sequence
  Description of Artificial Sequence: Synthetic oligonucleotide
  Sense Strand Starting at position 735 of SEQ ID NO: 315944
acgagucaguuauuaauac

SEQ ID NO: 376536 - RNA, 19 nt, Artificial Sequence
  Description of Artificial Sequence: Synthetic oligonucleotide
  Antisense Strand to SEQ ID NO: 376535
guauuaauaacugacucgu

SEQ ID NO: 376537 - RNA, 19 nt, Artificial Sequence
  Description of Artificial Sequence: Synthetic oligonucleotide
  Sense Strand Starting at position 735 of SEQ ID NO: 315992
accagugaaugucuauagu

SEQ ID NO: 376538 - RNA, 19 nt, Artificial Sequence
  Description of Artificial Sequence: Synthetic oligonucleotide
  Antisense Strand to SEQ ID NO: 376537
acuauagacauucacuggu

SEQ ID NO: 376539 - RNA, 19 nt, Artificial Sequence
  Description of Artificial Sequence: Synthetic oligonucleotide
  Sense Strand Starting at position 735 of SEQ ID NO: 315995
agugaaugucuauagugaa

SEQ ID NO: 376540 - RNA, 19 nt, Artificial Sequence
  Description of Artificial Sequence: Synthetic oligonucleotide
  Antisense Strand to SEQ ID NO: 376539
uucacuauagacauucacu

SEQ ID NO: 376541 - RNA, 19 nt, Artificial Sequence
  Description of Artificial Sequence: Synthetic oligonucleotide
  Sense Strand Starting at position 735 of SEQ ID NO: 316108
agauaugaucuugggcaag

SEQ ID NO: 376542 - RNA, 19 nt, Artificial Sequence
  Description of Artificial Sequence: Synthetic oligonucleotide
  Antisense Strand to SEQ ID NO: 376541
cuugcccaagaucauaucu

SEQ ID NO: 376543 - RNA, 19 nt, Artificial Sequence
  Description of Artificial Sequence: Synthetic oligonucleotide
  Sense Strand Starting at position 735 of SEQ ID NO: 316184
ggaggugucuugucaagag

SEQ ID NO: 376544 - RNA, 19 nt, Artificial Sequence
  Description of Artificial Sequence: Synthetic oligonucleotide
  Antisense Strand to SEQ ID NO: 376543
cucuugacaagacaccucc

SEQ ID NO: 376545 - RNA, 19 nt, Artificial Sequence
  Description of Artificial Sequence: Synthetic oligonucleotide
  Sense Strand Starting at position 735 of SEQ ID NO: 316199
agaggugucuugucaaaug

SEQ ID NO: 376546 - RNA, 19 nt, Artificial Sequence
  Description of Artificial Sequence: Synthetic oligonucleotide
  Antisense Strand to SEQ ID NO: 376545
cauuugacaagacaccucu

SEQ ID NO: 376547 - RNA, 19 nt, Artificial Sequence
  Description of Artificial Sequence: Synthetic oligonucleotide
  Sense Strand Starting at position 735 of SEQ ID NO: 316204
ugucuugucaaaugaugag

SEQ ID NO: 376548 - RNA, 19 nt, Artificial Sequence
  Description of Artificial Sequence: Synthetic oligonucleotide
  Antisense Strand to SEQ ID NO: 376547
cucaucauuugacaagaca

SEQ ID NO: 376549 - RNA, 19 nt, Artificial Sequence
  Description of Artificial Sequence: Synthetic oligonucleotide
  Sense Strand Starting at position 735 of SEQ ID NO: 316210
gucaaaugaugagcaaauc

SEQ ID NO: 376550 - RNA, 19 nt, Artificial Sequence
  Description of Artificial Sequence: Synthetic oligonucleotide
  Antisense Strand to SEQ ID NO: 376549
gauuugcucaucauuugac

SEQ ID NO: 376551 - RNA, 19 nt, Artificial Sequence
  Description of Artificial Sequence: Synthetic oligonucleotide
  Sense Strand Starting at position 735 of SEQ ID NO: 316267
cuguuauuacaguggaguu

SEQ ID NO: 376552 - RNA, 19 nt, Artificial Sequence
  Description of Artificial Sequence: Synthetic oligonucleotide
  Antisense Strand to SEQ ID NO: 376551
aacuccacuguaauaacag

SEQ ID NO: 376553 - RNA, 19 nt, Artificial Sequence
  Description of Artificial Sequence: Synthetic oligonucleotide
  Sense Strand Starting at position 735 of SEQ ID NO: 316268
uguuauuacaguggaguuu

SEQ ID NO: 376554 - RNA, 19 nt, Artificial Sequence
  Description of Artificial Sequence: Synthetic oligonucleotide
  Antisense Strand to SEQ ID NO: 376553
aaacuccacuguaauaaca

SEQ ID NO: 376555 - RNA, 19 nt, Artificial Sequence
  Description of Artificial Sequence: Synthetic oligonucleotide
  Sense Strand Starting at position 735 of SEQ ID NO: 316396
gugaguccuagaggagcaa

SEQ ID NO: 376556 - RNA, 19 nt, Artificial Sequence
  Description of Artificial Sequence: Synthetic oligonucleotide
  Antisense Strand to SEQ ID NO: 376555
uugcuccucuaggacucac

SEQ ID NO: 376557 - RNA, 19 nt, Artificial Sequence
  Description of Artificial Sequence: Synthetic oligonucleotide
  Sense Strand Starting at position 735 of SEQ ID NO: 316462
auggcagagcucuaugauc

SEQ ID NO: 376558 - RNA, 19 nt, Artificial Sequence
  Description of Artificial Sequence: Synthetic oligonucleotide
  Antisense Strand to SEQ ID NO: 376557
gaucauagagcucugccau

SEQ ID NO: 376559 - RNA, 19 nt, Artificial Sequence
  Description of Artificial Sequence: Synthetic oligonucleotide
  Sense Strand Starting at position 735 of SEQ ID NO: 316464
ggcagagcucuaugaucaa

SEQ ID NO: 376560 - RNA, 19 nt, Artificial Sequence
  Description of Artificial Sequence: Synthetic oligonucleotide
  Antisense Strand to SEQ ID NO: 376559
uugaucauagagcucugcc

SEQ ID NO: 376561 - RNA, 19 nt, Artificial Sequence
  Description of Artificial Sequence: Synthetic oligonucleotide
  Sense Strand Starting at position 735 of SEQ ID NO: 317044
cuguaauuaccaugaaagg

SEQ ID NO: 376562 - RNA, 19 nt, Artificial Sequence
  Description of Artificial Sequence: Synthetic oligonucleotide
  Antisense Strand to SEQ ID NO: 376561
ccuuucaugguaauuacag

SEQ ID NO: 376563 - RNA, 19 nt, Artificial Sequence
  Description of Artificial Sequence: Synthetic oligonucleotide
  Sense Strand Starting at position 735 of SEQ ID NO: 317752
agcacuuacccgggucaga

SEQ ID NO: 376564 - RNA, 19 nt, Artificial Sequence
  Description of Artificial Sequence: Synthetic oligonucleotide
  Antisense Strand to SEQ ID NO: 376563
ucugacccggguaagugcu

SEQ ID NO: 376565 - RNA, 19 nt, Artificial Sequence
  Description of Artificial Sequence: Synthetic oligonucleotide
  Sense Strand Starting at position 735 of SEQ ID NO: 318600
agaacuacccguuagcagu

SEQ ID NO: 376566 - RNA, 19 nt, Artificial Sequence
  Description of Artificial Sequence: Synthetic oligonucleotide
  Antisense Strand to SEQ ID NO: 376565
acugcuaacggguaguucu

SEQ ID NO: 376567 - RNA, 19 nt, Artificial Sequence
  Description of Artificial Sequence: Synthetic oligonucleotide
  Sense Strand Starting at position 735 of SEQ ID NO: 318760
guaaccaauguuuaaugau

SEQ ID NO: 376568 - RNA, 19 nt, Artificial Sequence
  Description of Artificial Sequence: Synthetic oligonucleotide
  Antisense Strand to SEQ ID NO: 376567
aucauuaaacauugguuac

SEQ ID NO: 376569 - RNA, 19 nt, Artificial Sequence
  Description of Artificial Sequence: Synthetic oligonucleotide
  Sense Strand Starting at position 735 of SEQ ID NO: 318857
uguuuaucccugcaucacu

SEQ ID NO: 376570 - RNA, 19 nt, Artificial Sequence
  Description of Artificial Sequence: Synthetic oligonucleotide
  Antisense Strand to SEQ ID NO: 376569
agugaugcagggauaaaca

SEQ ID NO: 376571 - RNA, 19 nt, Artificial Sequence
  Description of Artificial Sequence: Synthetic oligonucleotide
  Sense Strand Starting at position 735 of SEQ ID NO: 318865
ccugcaucacuugauggau

SEQ ID NO: 376572 - RNA, 19 nt, Artificial Sequence
  Description of Artificial Sequence: Synthetic oligonucleotide
  Antisense Strand to SEQ ID NO: 376571
auccaucaagugaugcagg

SEQ ID NO: 376573 - RNA, 19 nt, Artificial Sequence
  Description of Artificial Sequence: Synthetic oligonucleotide
  Sense Strand Starting at position 735 of SEQ ID NO: 318868
gcaucacuugauggauauu

SEQ ID NO: 376574 - RNA, 19 nt, Artificial Sequence
  Description of Artificial Sequence: Synthetic oligonucleotide
  Antisense Strand to SEQ ID NO: 376573
aauauccaucaagugaugc

SEQ ID NO: 376575 - RNA, 19 nt, Artificial Sequence
  Description of Artificial Sequence: Synthetic oligonucleotide
  Sense Strand Starting at position 735 of SEQ ID NO: 319000
ccuggaucauauguuaacu

SEQ ID NO: 376576 - RNA, 19 nt, Artificial Sequence
  Description of Artificial Sequence: Synthetic oligonucleotide
  Antisense Strand to SEQ ID NO: 376575
aguuaacauaugauccagg

SEQ ID NO: 376577 - RNA, 19 nt, Artificial Sequence
  Description of Artificial Sequence: Synthetic oligonucleotide
  Sense Strand Starting at position 735 of SEQ ID NO: 319198
uuugauugucagcaucauu

SEQ ID NO: 376578 - RNA, 19 nt, Artificial Sequence
  Description of Artificial Sequence: Synthetic oligonucleotide
  Antisense Strand to SEQ ID NO: 376577
aaugaugcugacaaucaaa

SEQ ID NO: 376579 - RNA, 19 nt, Artificial Sequence
  Description of Artificial Sequence: Synthetic oligonucleotide
  Sense Strand Starting at position 735 of SEQ ID NO: 319203
uugucagcaucauuucuga

SEQ ID NO: 376580 - RNA, 19 nt, Artificial Sequence
  Description of Artificial Sequence: Synthetic oligonucleotide
  Antisense Strand to SEQ ID NO: 376579
ucagaaaugaugcugacaa

SEQ ID NO: 376581 - RNA, 19 nt, Artificial Sequence
  Description of Artificial Sequence: Synthetic oligonucleotide
  Sense Strand Starting at position 736 of SEQ ID NO: 315377
ccaaaucuacagugcuaga

SEQ ID NO: 376582 - RNA, 19 nt, Artificial Sequence
  Description of Artificial Sequence: Synthetic oligonucleotide
  Antisense Strand to SEQ ID NO: 376581
ucuagcacuguagauuugg

SEQ ID NO: 376583 - RNA, 19 nt, Artificial Sequence
  Description of Artificial Sequence: Synthetic oligonucleotide
  Sense Strand Starting at position 736 of SEQ ID NO: 315404
agugaacauccaugcaaca

SEQ ID NO: 376584 - RNA, 19 nt, Artificial Sequence
  Description of Artificial Sequence: Synthetic oligonucleotide
  Antisense Strand to SEQ ID NO: 376583
uguugcauggauguucacu

SEQ ID NO: 376585 - RNA, 19 nt, Artificial Sequence
  Description of Artificial Sequence: Synthetic oligonucleotide
  Sense Strand Starting at position 736 of SEQ ID NO: 315665
auuaucaaguagucacuau

SEQ ID NO: 376586 - RNA, 19 nt, Artificial Sequence
  Description of Artificial Sequence: Synthetic oligonucleotide
  Antisense Strand to SEQ ID NO: 376585
auagugacuacuugauaau

SEQ ID NO: 376587 - RNA, 19 nt, Artificial Sequence
  Description of Artificial Sequence: Synthetic oligonucleotide
  Sense Strand Starting at position 736 of SEQ ID NO: 315669
ucaaguagucacuaugauu

SEQ ID NO: 376588 - RNA, 19 nt, Artificial Sequence
  Description of Artificial Sequence: Synthetic oligonucleotide
  Antisense Strand to SEQ ID NO: 376587
aaucauagugacuacuuga

SEQ ID NO: 376589 - RNA, 19 nt, Artificial Sequence
  Description of Artificial Sequence: Synthetic oligonucleotide
  Sense Strand Starting at position 736 of SEQ ID NO: 315701
gccacacaguaauuaggaa

SEQ ID NO: 376590 - RNA, 19 nt, Artificial Sequence
  Description of Artificial Sequence: Synthetic oligonucleotide
  Antisense Strand to SEQ ID NO: 376589
uuccuaauuacuguguggc

SEQ ID NO: 376591 - RNA, 19 nt, Artificial Sequence
  Description of Artificial Sequence: Synthetic oligonucleotide
  Sense Strand Starting at position 736 of SEQ ID NO: 315750
cugguucccaaggauguau

SEQ ID NO: 376592 - RNA, 19 nt, Artificial Sequence
  Description of Artificial Sequence: Synthetic oligonucleotide
  Antisense Strand to SEQ ID NO: 376591
auacauccuugggaaccag

SEQ ID NO: 376593 - RNA, 19 nt, Artificial Sequence
  Description of Artificial Sequence: Synthetic oligonucleotide
  Sense Strand Starting at position 736 of SEQ ID NO: 315761
ggauguauaggccaugguu

SEQ ID NO: 376594 - RNA, 19 nt, Artificial Sequence
  Description of Artificial Sequence: Synthetic oligonucleotide
  Antisense Strand to SEQ ID NO: 376593
aaccauggccuauacaucc

SEQ ID NO: 376595 - RNA, 19 nt, Artificial Sequence
  Description of Artificial Sequence: Synthetic oligonucleotide
  Sense Strand Starting at position 736 of SEQ ID NO: 316096
cccacauuccuucggauaa

SEQ ID NO: 376596 - RNA, 19 nt, Artificial Sequence
  Description of Artificial Sequence: Synthetic oligonucleotide
  Antisense Strand to SEQ ID NO: 376595
uuauccgaaggaauguggg

SEQ ID NO: 376597 - RNA, 19 nt, Artificial Sequence
  Description of Artificial Sequence: Synthetic oligonucleotide
  Sense Strand Starting at position 736 of SEQ ID NO: 316109
ggauaaggcucacauuuaa

SEQ ID NO: 376598 - RNA, 19 nt, Artificial Sequence
  Description of Artificial Sequence: Synthetic oligonucleotide
  Antisense Strand to SEQ ID NO: 376597
uuaaaugugagccuuaucc

SEQ ID NO: 376599 - RNA, 19 nt, Artificial Sequence
  Description of Artificial Sequence: Synthetic oligonucleotide
  Sense Strand Starting at position 736 of SEQ ID NO: 316233
uuggaaguguaccuuaaua

SEQ ID NO: 376600 - RNA, 19 nt, Artificial Sequence
  Description of Artificial Sequence: Synthetic oligonucleotide
  Antisense Strand to SEQ ID NO: 376599
uauuaagguacacuuccaa

SEQ ID NO: 376601 - RNA, 19 nt, Artificial Sequence
  Description of Artificial Sequence: Synthetic oligonucleotide
  Sense Strand Starting at position 736 of SEQ ID NO: 316235
ggaaguguaccuuaauagu

SEQ ID NO: 376602 - RNA, 19 nt, Artificial Sequence
  Description of Artificial Sequence: Synthetic oligonucleotide
  Antisense Strand to SEQ ID NO: 376601
acuauuaagguacacuucc

SEQ ID NO: 376603 - RNA, 19 nt, Artificial Sequence
  Description of Artificial Sequence: Synthetic oligonucleotide
  Sense Strand Starting at position 736 of SEQ ID NO: 316288
uugaucuuugucuaacaag

SEQ ID NO: 376604 - RNA, 19 nt, Artificial Sequence
  Description of Artificial Sequence: Synthetic oligonucleotide
  Antisense Strand to SEQ ID NO: 376603
cuuguuagacaaagaucaa

SEQ ID NO: 376605 - RNA, 19 nt, Artificial Sequence
  Description of Artificial Sequence: Synthetic oligonucleotide
  Sense Strand Starting at position 736 of SEQ ID NO: 316350
gaagaaacugggugugcaa

SEQ ID NO: 376606 - RNA, 19 nt, Artificial Sequence
  Description of Artificial Sequence: Synthetic oligonucleotide
  Antisense Strand to SEQ ID NO: 376605
uugcacacccaguuucuuc

SEQ ID NO: 376607 - RNA, 19 nt, Artificial Sequence
  Description of Artificial Sequence: Synthetic oligonucleotide
  Sense Strand Starting at position 736 of SEQ ID NO: 316710
aagauaugauugcuguuaa

SEQ ID NO: 376608 - RNA, 19 nt, Artificial Sequence
  Description of Artificial Sequence: Synthetic oligonucleotide
  Antisense Strand to SEQ ID NO: 376607
uuaacagcaaucauaucuu

SEQ ID NO: 376609 - RNA, 19 nt, Artificial Sequence
  Description of Artificial Sequence: Synthetic oligonucleotide
  Sense Strand Starting at position 736 of SEQ ID NO: 317457
gaggcaaugcauuaugcua

SEQ ID NO: 376610 - RNA, 19 nt, Artificial Sequence
  Description of Artificial Sequence: Synthetic oligonucleotide
  Antisense Strand to SEQ ID NO: 376609
uagcauaaugcauugccuc

SEQ ID NO: 376611 - RNA, 19 nt, Artificial Sequence
  Description of Artificial Sequence: Synthetic oligonucleotide
  Sense Strand Starting at position 736 of SEQ ID NO: 317611
cagaguuggcacugaaaca

SEQ ID NO: 376612 - RNA, 19 nt, Artificial Sequence
  Description of Artificial Sequence: Synthetic oligonucleotide
  Antisense Strand to SEQ ID NO: 376611
uguuucagugccaacucug

SEQ ID NO: 376613 - RNA, 19 nt, Artificial Sequence
  Description of Artificial Sequence: Synthetic oligonucleotide
  Sense Strand Starting at position 736 of SEQ ID NO: 317638
auguguuaucaauagacua

SEQ ID NO: 376614 - RNA, 19 nt, Artificial Sequence
  Description of Artificial Sequence: Synthetic oligonucleotide
  Antisense Strand to SEQ ID NO: 376613
uagucuauugauaacacau

SEQ ID NO: 376615 - RNA, 19 nt, Artificial Sequence
  Description of Artificial Sequence: Synthetic oligonucleotide
  Sense Strand Starting at position 736 of SEQ ID NO: 317679
cuucuagggcuggaucaua

SEQ ID NO: 376616 - RNA, 19 nt, Artificial Sequence
  Description of Artificial Sequence: Synthetic oligonucleotide
  Antisense Strand to SEQ ID NO: 376615
uaugauccagcccuagaag

SEQ ID NO: 376617 - RNA, 19 nt, Artificial Sequence
  Description of Artificial Sequence: Synthetic oligonucleotide
  Sense Strand Starting at position 736 of SEQ ID NO: 317868
gcaacucauggagacguua

SEQ ID NO: 376618 - RNA, 19 nt, Artificial Sequence
  Description of Artificial Sequence: Synthetic oligonucleotide
  Antisense Strand to SEQ ID NO: 376617
uaacgucuccaugaguugc

SEQ ID NO: 376619 - RNA, 19 nt, Artificial Sequence
  Description of Artificial Sequence: Synthetic oligonucleotide
  Sense Strand Starting at position 736 of SEQ ID NO: 317910
gcucaugaauuacugacua

SEQ ID NO: 376620 - RNA, 19 nt, Artificial Sequence
  Description of Artificial Sequence: Synthetic oligonucleotide
  Antisense Strand to SEQ ID NO: 376619
uagucaguaauucaugagc

SEQ ID NO: 376621 - RNA, 19 nt, Artificial Sequence
  Description of Artificial Sequence: Synthetic oligonucleotide
  Sense Strand Starting at position 736 of SEQ ID NO: 317971
gucauuaagcuuuagggua

SEQ ID NO: 376622 - RNA, 19 nt, Artificial Sequence
  Description of Artificial Sequence: Synthetic oligonucleotide
  Antisense Strand to SEQ ID NO: 376621
uacccuaaagcuuaaugac

SEQ ID NO: 376623 - RNA, 19 nt, Artificial Sequence
  Description of Artificial Sequence: Synthetic oligonucleotide
  Sense Strand Starting at position 736 of SEQ ID NO: 317979
gcuuuaggguaauuuguua

SEQ ID NO: 376624 - RNA, 19 nt, Artificial Sequence
  Description of Artificial Sequence: Synthetic oligonucleotide
  Antisense Strand to SEQ ID NO: 376623
uaacaaauuacccuaaagc

SEQ ID NO: 376625 - RNA, 19 nt, Artificial Sequence
  Description of Artificial Sequence: Synthetic oligonucleotide
  Sense Strand Starting at position 736 of SEQ ID NO: 318116
ucagauuacuguuuguaga

SEQ ID NO: 376626 - RNA, 19 nt, Artificial Sequence
  Description of Artificial Sequence: Synthetic oligonucleotide
  Antisense Strand to SEQ ID NO: 376625
ucuacaaacaguaaucuga

SEQ ID NO: 376627 - RNA, 19 nt, Artificial Sequence
  Description of Artificial Sequence: Synthetic oligonucleotide
  Sense Strand Starting at position 736 of SEQ ID NO: 318117
cagauuacuguuuguagaa

SEQ ID NO: 376628 - RNA, 19 nt, Artificial Sequence
  Description of Artificial Sequence: Synthetic oligonucleotide
  Antisense Strand to SEQ ID NO: 376627
uucuacaaacaguaaucug

SEQ ID NO: 376629 - RNA, 19 nt, Artificial Sequence
  Description of Artificial Sequence: Synthetic oligonucleotide
  Sense Strand Starting at position 736 of SEQ ID NO: 318118
agauuacuguuuguagaaa

SEQ ID NO: 376630 - RNA, 19 nt, Artificial Sequence
  Description of Artificial Sequence: Synthetic oligonucleotide
  Antisense Strand to SEQ ID NO: 376629
uuucuacaaacaguaaucu

SEQ ID NO: 376631 - RNA, 19 nt, Artificial Sequence
  Description of Artificial Sequence: Synthetic oligonucleotide
  Sense Strand Starting at position 736 of SEQ ID NO: 318187
uagagaucuggcuaucuug

SEQ ID NO: 376632 - RNA, 19 nt, Artificial Sequence
  Description of Artificial Sequence: Synthetic oligonucleotide
  Antisense Strand to SEQ ID NO: 376631
caagauagccagaucucua

SEQ ID NO: 376633 - RNA, 19 nt, Artificial Sequence
  Description of Artificial Sequence: Synthetic oligonucleotide
  Sense Strand Starting at position 736 of SEQ ID NO: 318214
gguccagacaauggucaau

SEQ ID NO: 376634 - RNA, 19 nt, Artificial Sequence
  Description of Artificial Sequence: Synthetic oligonucleotide
  Antisense Strand to SEQ ID NO: 376633
auugaccauugucuggacc

SEQ ID NO: 376635 - RNA, 19 nt, Artificial Sequence
  Description of Artificial Sequence: Synthetic oligonucleotide
  Sense Strand Starting at position 736 of SEQ ID NO: 318247
uggacuuuagugggcuaaa

SEQ ID NO: 376636 - RNA, 19 nt, Artificial Sequence
  Description of Artificial Sequence: Synthetic oligonucleotide
  Antisense Strand to SEQ ID NO: 376635
uuuagcccacuaaagucca

SEQ ID NO: 376637 - RNA, 19 nt, Artificial Sequence
  Description of Artificial Sequence: Synthetic oligonucleotide
  Sense Strand Starting at position 736 of SEQ ID NO: 318295
cacucauugcuguugcagu

SEQ ID NO: 376638 - RNA, 19 nt, Artificial Sequence
  Description of Artificial Sequence: Synthetic oligonucleotide
  Antisense Strand to SEQ ID NO: 376637
acugcaacagcaaugagug

SEQ ID NO: 376639 - RNA, 19 nt, Artificial Sequence
  Description of Artificial Sequence: Synthetic oligonucleotide
  Sense Strand Starting at position 736 of SEQ ID NO: 318386
ccuggcuucccagauacuu

SEQ ID NO: 376640 - RNA, 19 nt, Artificial Sequence
  Description of Artificial Sequence: Synthetic oligonucleotide
  Antisense Strand to SEQ ID NO: 376639
aaguaucugggaagccagg

SEQ ID NO: 376641 - RNA, 19 nt, Artificial Sequence
  Description of Artificial Sequence: Synthetic oligonucleotide
  Sense Strand Starting at position 736 of SEQ ID NO: 318624
acagcauaugucugaggau

SEQ ID NO: 376642 - RNA, 19 nt, Artificial Sequence
  Description of Artificial Sequence: Synthetic oligonucleotide
  Antisense Strand to SEQ ID NO: 376641
auccucagacauaugcugu

SEQ ID NO: 376643 - RNA, 19 nt, Artificial Sequence
  Description of Artificial Sequence: Synthetic oligonucleotide
  Sense Strand Starting at position 736 of SEQ ID NO: 318684
uggacuuaaggcugaguga

SEQ ID NO: 376644 - RNA, 19 nt, Artificial Sequence
  Description of Artificial Sequence: Synthetic oligonucleotide
  Antisense Strand to SEQ ID NO: 376643
ucacucagccuuaagucca

SEQ ID NO: 376645 - RNA, 19 nt, Artificial Sequence
  Description of Artificial Sequence: Synthetic oligonucleotide
  Sense Strand Starting at position 736 of SEQ ID NO: 318685
ggacuuaaggcugagugau

SEQ ID NO: 376646 - RNA, 19 nt, Artificial Sequence
  Description of Artificial Sequence: Synthetic oligonucleotide
  Antisense Strand to SEQ ID NO: 376645
aucacucagccuuaagucc

SEQ ID NO: 376647 - RNA, 19 nt, Artificial Sequence
  Description of Artificial Sequence: Synthetic oligonucleotide
  Sense Strand Starting at position 736 of SEQ ID NO: 318744
gggugcugucaagaagaaa

SEQ ID NO: 376648 - RNA, 19 nt, Artificial Sequence
  Description of Artificial Sequence: Synthetic oligonucleotide
  Antisense Strand to SEQ ID NO: 376647
uuucuucuugacagcaccc

SEQ ID NO: 376649 - RNA, 19 nt, Artificial Sequence
  Description of Artificial Sequence: Synthetic oligonucleotide
  Sense Strand Starting at position 736 of SEQ ID NO: 318773
gcaauuggauaucuugaua

SEQ ID NO: 376650 - RNA, 19 nt, Artificial Sequence
  Description of Artificial Sequence: Synthetic oligonucleotide
  Antisense Strand to SEQ ID NO: 376649
uaucaagauauccaauugc

SEQ ID NO: 376651 - RNA, 19 nt, Artificial Sequence
  Description of Artificial Sequence: Synthetic oligonucleotide
  Sense Strand Starting at position 736 of SEQ ID NO: 318788
gauagucuuuguucuagag

SEQ ID NO: 376652 - RNA, 19 nt, Artificial Sequence
  Description of Artificial Sequence: Synthetic oligonucleotide
  Antisense Strand to SEQ ID NO: 376651
cucuagaacaaagacuauc

SEQ ID NO: 376653 - RNA, 19 nt, Artificial Sequence
  Description of Artificial Sequence: Synthetic oligonucleotide
  Sense Strand Starting at position 736 of SEQ ID NO: 318792
gucuuuguucuagagacag

SEQ ID NO: 376654 - RNA, 19 nt, Artificial Sequence
  Description of Artificial Sequence: Synthetic oligonucleotide
  Antisense Strand to SEQ ID NO: 376653
cugucucuagaacaaagac

SEQ ID NO: 376655 - RNA, 19 nt, Artificial Sequence
  Description of Artificial Sequence: Synthetic oligonucleotide
  Sense Strand Starting at position 736 of SEQ ID NO: 318828
ugggcaugauguucauaag

SEQ ID NO: 376656 - RNA, 19 nt, Artificial Sequence
  Description of Artificial Sequence: Synthetic oligonucleotide
  Antisense Strand to SEQ ID NO: 376655
cuuaugaacaucaugccca

SEQ ID NO: 376657 - RNA, 19 nt, Artificial Sequence
  Description of Artificial Sequence: Synthetic oligonucleotide
  Sense Strand Starting at position 736 of SEQ ID NO: 318863
agaauaaggaacuguuagu

SEQ ID NO: 376658 - RNA, 19 nt, Artificial Sequence
  Description of Artificial Sequence: Synthetic oligonucleotide
  Antisense Strand to SEQ ID NO: 376657
acuaacaguuccuuauucu

SEQ ID NO: 376659 - RNA, 19 nt, Artificial Sequence
  Description of Artificial Sequence: Synthetic oligonucleotide
  Sense Strand Starting at position 736 of SEQ ID NO: 318907
caguacggucuguaagaaa

SEQ ID NO: 376660 - RNA, 19 nt, Artificial Sequence
  Description of Artificial Sequence: Synthetic oligonucleotide
  Antisense Strand to SEQ ID NO: 376659
uuucuuacagaccguacug

SEQ ID NO: 376661 - RNA, 19 nt, Artificial Sequence
  Description of Artificial Sequence: Synthetic oligonucleotide
  Sense Strand Starting at position 737 of SEQ ID NO: 315291
ucuaguccuuuccuugaca

SEQ ID NO: 376662 - RNA, 19 nt, Artificial Sequence
  Description of Artificial Sequence: Synthetic oligonucleotide
  Antisense Strand to SEQ ID NO: 376661
ugucaaggaaaggacuaga

SEQ ID NO: 376663 - RNA, 19 nt, Artificial Sequence
  Description of Artificial Sequence: Synthetic oligonucleotide
  Sense Strand Starting at position 737 of SEQ ID NO: 315294
aguccuuuccuugacaaug

SEQ ID NO: 376664 - RNA, 19 nt, Artificial Sequence
  Description of Artificial Sequence: Synthetic oligonucleotide
  Antisense Strand to SEQ ID NO: 376663
cauugucaaggaaaggacu

SEQ ID NO: 376665 - RNA, 19 nt, Artificial Sequence
  Description of Artificial Sequence: Synthetic oligonucleotide
  Sense Strand Starting at position 737 of SEQ ID NO: 315299
uuuccuugacaauguggua

SEQ ID NO: 376666 - RNA, 19 nt, Artificial Sequence
  Description of Artificial Sequence: Synthetic oligonucleotide
  Antisense Strand to SEQ ID NO: 376665
uaccacauugucaaggaaa

SEQ ID NO: 376667 - RNA, 19 nt, Artificial Sequence
  Description of Artificial Sequence: Synthetic oligonucleotide
  Sense Strand Starting at position 737 of SEQ ID NO: 315306
gacaaugugguaugaagua

SEQ ID NO: 376668 - RNA, 19 nt, Artificial Sequence
  Description of Artificial Sequence: Synthetic oligonucleotide
  Antisense Strand to SEQ ID NO: 376667
uacuucauaccacauuguc

SEQ ID NO: 376669 - RNA, 19 nt, Artificial Sequence
  Description of Artificial Sequence: Synthetic oligonucleotide
  Sense Strand Starting at position 737 of SEQ ID NO: 315311
ugugguaugaaguaaucua

SEQ ID NO: 376670 - RNA, 19 nt, Artificial Sequence
  Description of Artificial Sequence: Synthetic oligonucleotide
  Antisense Strand to SEQ ID NO: 376669
uagauuacuucauaccaca

SEQ ID NO: 376671 - RNA, 19 nt, Artificial Sequence
  Description of Artificial Sequence: Synthetic oligonucleotide
  Sense Strand Starting at position 737 of SEQ ID NO: 315318
ugaaguaaucuauauuggu

SEQ ID NO: 376672 - RNA, 19 nt, Artificial Sequence
  Description of Artificial Sequence: Synthetic oligonucleotide
  Antisense Strand to SEQ ID NO: 376671
accaauauagauuacuuca

SEQ ID NO: 376673 - RNA, 19 nt, Artificial Sequence
  Description of Artificial Sequence: Synthetic oligonucleotide
  Sense Strand Starting at position 737 of SEQ ID NO: 315323
uaaucuauauuggugaaag

SEQ ID NO: 376674 - RNA, 19 nt, Artificial Sequence
  Description of Artificial Sequence: Synthetic oligonucleotide
  Antisense Strand to SEQ ID NO: 376673
cuuucaccaauauagauua

SEQ ID NO: 376675 - RNA, 19 nt, Artificial Sequence
  Description of Artificial Sequence: Synthetic oligonucleotide
  Sense Strand Starting at position 737 of SEQ ID NO: 315335
gugaaaggaugucacauuu

SEQ ID NO: 376676 - RNA, 19 nt, Artificial Sequence
  Description of Artificial Sequence: Synthetic oligonucleotide
  Antisense Strand to SEQ ID NO: 376675
aaaugugacauccuuucac

SEQ ID NO: 376677 - RNA, 19 nt, Artificial Sequence
  Description of Artificial Sequence: Synthetic oligonucleotide
  Sense Strand Starting at position 737 of SEQ ID NO: 315355
guguacucuuaggcaacaa

SEQ ID NO: 376678 - RNA, 19 nt, Artificial Sequence
  Description of Artificial Sequence: Synthetic oligonucleotide
  Antisense Strand to SEQ ID NO: 376677
uuguugccuaagaguacac

SEQ ID NO: 376679 - RNA, 19 nt, Artificial Sequence
  Description of Artificial Sequence: Synthetic oligonucleotide
  Sense Strand Starting at position 737 of SEQ ID NO: 315506
aggguuucugcacaagaau

SEQ ID NO: 376680 - RNA, 19 nt, Artificial Sequence
  Description of Artificial Sequence: Synthetic oligonucleotide
  Antisense Strand to SEQ ID NO: 376679
auucuugugcagaaacccu

SEQ ID NO: 376681 - RNA, 19 nt, Artificial Sequence
  Description of Artificial Sequence: Synthetic oligonucleotide
  Sense Strand Starting at position 737 of SEQ ID NO: 315509
guuucugcacaagaauuaa

SEQ ID NO: 376682 - RNA, 19 nt, Artificial Sequence
  Description of Artificial Sequence: Synthetic oligonucleotide
  Antisense Strand to SEQ ID NO: 376681
uuaauucuugugcagaaac

SEQ ID NO: 376683 - RNA, 19 nt, Artificial Sequence
  Description of Artificial Sequence: Synthetic oligonucleotide
  Sense Strand Starting at position 737 of SEQ ID NO: 315710
agaagcugcuaccuuauaa

SEQ ID NO: 376684 - RNA, 19 nt, Artificial Sequence
  Description of Artificial Sequence: Synthetic oligonucleotide
  Antisense Strand to SEQ ID NO: 376683
uuauaagguagcagcuucu

SEQ ID NO: 376685 - RNA, 19 nt, Artificial Sequence
  Description of Artificial Sequence: Synthetic oligonucleotide
  Sense Strand Starting at position 737 of SEQ ID NO: 315734
gagguaacauaguuacaca

SEQ ID NO: 376686 - RNA, 19 nt, Artificial Sequence
  Description of Artificial Sequence: Synthetic oligonucleotide
  Antisense Strand to SEQ ID NO: 376685
uguguaacuauguuaccuc

SEQ ID NO: 376687 - RNA, 19 nt, Artificial Sequence
  Description of Artificial Sequence: Synthetic oligonucleotide
  Sense Strand Starting at position 737 of SEQ ID NO: 315991
guagcacgugccuuauagu

SEQ ID NO: 376688 - RNA, 19 nt, Artificial Sequence
  Description of Artificial Sequence: Synthetic oligonucleotide
  Antisense Strand to SEQ ID NO: 376687
acuauaaggcacgugcuac

SEQ ID NO: 376689 - RNA, 19 nt, Artificial Sequence
  Description of Artificial Sequence: Synthetic oligonucleotide
  Sense Strand Starting at position 737 of SEQ ID NO: 316200
ucaguaauucugcaucuag

SEQ ID NO: 376690 - RNA, 19 nt, Artificial Sequence
  Description of Artificial Sequence: Synthetic oligonucleotide
  Antisense Strand to SEQ ID NO: 376689
cuagaugcagaauuacuga

SEQ ID NO: 376691 - RNA, 19 nt, Artificial Sequence
  Description of Artificial Sequence: Synthetic oligonucleotide
  Sense Strand Starting at position 737 of SEQ ID NO: 316317
gcagcuaagaaugguuuaa

SEQ ID NO: 376692 - RNA, 19 nt, Artificial Sequence
  Description of Artificial Sequence: Synthetic oligonucleotide
  Antisense Strand to SEQ ID NO: 376691
uuaaaccauucuuagcugc

SEQ ID NO: 376693 - RNA, 19 nt, Artificial Sequence
  Description of Artificial Sequence: Synthetic oligonucleotide
  Sense Strand Starting at position 737 of SEQ ID NO: 316343
ugugcaucuggaugauaaa

SEQ ID NO: 376694 - RNA, 19 nt, Artificial Sequence
  Description of Artificial Sequence: Synthetic oligonucleotide
  Antisense Strand to SEQ ID NO: 376693
uuuaucauccagaugcaca

SEQ ID NO: 376695 - RNA, 19 nt, Artificial Sequence
  Description of Artificial Sequence: Synthetic oligonucleotide
  Sense Strand Starting at position 737 of SEQ ID NO: 316344
gugcaucuggaugauaaau

SEQ ID NO: 376696 - RNA, 19 nt, Artificial Sequence
  Description of Artificial Sequence: Synthetic oligonucleotide
  Antisense Strand to SEQ ID NO: 376695
auuuaucauccagaugcac

SEQ ID NO: 376697 - RNA, 19 nt, Artificial Sequence
  Description of Artificial Sequence: Synthetic oligonucleotide
  Sense Strand Starting at position 737 of SEQ ID NO: 316411
cugagaugauuugaaacua

SEQ ID NO: 376698 - RNA, 19 nt, Artificial Sequence
  Description of Artificial Sequence: Synthetic oligonucleotide
  Antisense Strand to SEQ ID NO: 376697
uaguuucaaaucaucucag

SEQ ID NO: 376699 - RNA, 19 nt, Artificial Sequence
  Description of Artificial Sequence: Synthetic oligonucleotide
  Sense Strand Starting at position 737 of SEQ ID NO: 316678
agaaguuacuaaguuacca

SEQ ID NO: 376700 - RNA, 19 nt, Artificial Sequence
  Description of Artificial Sequence: Synthetic oligonucleotide
  Antisense Strand to SEQ ID NO: 376699
ugguaacuuaguaacuucu

SEQ ID NO: 376701 - RNA, 19 nt, Artificial Sequence
  Description of Artificial Sequence: Synthetic oligonucleotide
  Sense Strand Starting at position 737 of SEQ ID NO: 316682
guuacuaaguuaccaguua

SEQ ID NO: 376702 - RNA, 19 nt, Artificial Sequence
  Description of Artificial Sequence: Synthetic oligonucleotide
  Antisense Strand to SEQ ID NO: 376701
uaacugguaacuuaguaac

SEQ ID NO: 376703 - RNA, 19 nt, Artificial Sequence
  Description of Artificial Sequence: Synthetic oligonucleotide
  Sense Strand Starting at position 737 of SEQ ID NO: 316787
aaacaucuucgguaaaguu

SEQ ID NO: 376704 - RNA, 19 nt, Artificial Sequence
  Description of Artificial Sequence: Synthetic oligonucleotide
  Antisense Strand to SEQ ID NO: 376703
aacuuuaccgaagauguuu

SEQ ID NO: 376705 - RNA, 19 nt, Artificial Sequence
  Description of Artificial Sequence: Synthetic oligonucleotide
  Sense Strand Starting at position 737 of SEQ ID NO: 316824
ccaagaggaugcuucugua

SEQ ID NO: 376706 - RNA, 19 nt, Artificial Sequence
  Description of Artificial Sequence: Synthetic oligonucleotide
  Antisense Strand to SEQ ID NO: 376705
uacagaagcauccucuugg

SEQ ID NO: 376707 - RNA, 19 nt, Artificial Sequence
  Description of Artificial Sequence: Synthetic oligonucleotide
  Sense Strand Starting at position 737 of SEQ ID NO: 316828
gaggaugcuucuguacuua

SEQ ID NO: 376708 - RNA, 19 nt, Artificial Sequence
  Description of Artificial Sequence: Synthetic oligonucleotide
  Antisense Strand to SEQ ID NO: 376707
uaaguacagaagcauccuc

SEQ ID NO: 376709 - RNA, 19 nt, Artificial Sequence
  Description of Artificial Sequence: Synthetic oligonucleotide
  Sense Strand Starting at position 737 of SEQ ID NO: 316832
augcuucuguacuuauaga

SEQ ID NO: 376710 - RNA, 19 nt, Artificial Sequence
  Description of Artificial Sequence: Synthetic oligonucleotide
  Antisense Strand to SEQ ID NO: 376709
ucuauaaguacagaagcau

SEQ ID NO: 376711 - RNA, 19 nt, Artificial Sequence
  Description of Artificial Sequence: Synthetic oligonucleotide
  Sense Strand Starting at position 737 of SEQ ID NO: 316952
gagcgacuucuccaagguc

SEQ ID NO: 376712 - RNA, 19 nt, Artificial Sequence
  Description of Artificial Sequence: Synthetic oligonucleotide
  Antisense Strand to SEQ ID NO: 376711
gaccuuggagaagucgcuc

SEQ ID NO: 376713 - RNA, 19 nt, Artificial Sequence
  Description of Artificial Sequence: Synthetic oligonucleotide
  Sense Strand Starting at position 737 of SEQ ID NO: 317088
gggcaaaccuacuuuauac

SEQ ID NO: 376714 - RNA, 19 nt, Artificial Sequence
  Description of Artificial Sequence: Synthetic oligonucleotide
  Antisense Strand to SEQ ID NO: 376713
guauaaaguagguuugccc

SEQ ID NO: 376715 - RNA, 19 nt, Artificial Sequence
  Description of Artificial Sequence: Synthetic oligonucleotide
  Sense Strand Starting at position 737 of SEQ ID NO: 317140
guuauuaacgaucgggaag

SEQ ID NO: 376716 - RNA, 19 nt, Artificial Sequence
  Description of Artificial Sequence: Synthetic oligonucleotide
  Antisense Strand to SEQ ID NO: 376715
cuucccgaucguuaauaac

SEQ ID NO: 376717 - RNA, 19 nt, Artificial Sequence
  Description of Artificial Sequence: Synthetic oligonucleotide
  Sense Strand Starting at position 737 of SEQ ID NO: 317141
uuauuaacgaucgggaaga

SEQ ID NO: 376718 - RNA, 19 nt, Artificial Sequence
  Description of Artificial Sequence: Synthetic oligonucleotide
  Antisense Strand to SEQ ID NO: 376717
ucuucccgaucguuaauaa

SEQ ID NO: 376719 - RNA, 19 nt, Artificial Sequence
  Description of Artificial Sequence: Synthetic oligonucleotide
  Sense Strand Starting at position 737 of SEQ ID NO: 317332
uuguccucauugguaaauu

SEQ ID NO: 376720 - RNA, 19 nt, Artificial Sequence
  Description of Artificial Sequence: Synthetic oligonucleotide
  Antisense Strand to SEQ ID NO: 376719
aauuuaccaaugaggacaa

SEQ ID NO: 376721 - RNA, 19 nt, Artificial Sequence
  Description of Artificial Sequence: Synthetic oligonucleotide
  Sense Strand Starting at position 737 of SEQ ID NO: 317662
cggagcacgagcuauauga

SEQ ID NO: 376722 - RNA, 19 nt, Artificial Sequence
  Description of Artificial Sequence: Synthetic oligonucleotide
  Antisense Strand to SEQ ID NO: 376721
ucauauagcucgugcuccg

SEQ ID NO: 376723 - RNA, 19 nt, Artificial Sequence
  Description of Artificial Sequence: Synthetic oligonucleotide
  Sense Strand Starting at position 737 of SEQ ID NO: 317703
auagaucguguuuacauua

SEQ ID NO: 376724 - RNA, 19 nt, Artificial Sequence
  Description of Artificial Sequence: Synthetic oligonucleotide
  Antisense Strand to SEQ ID NO: 376723
uaauguaaacacgaucuau

SEQ ID NO: 376725 - RNA, 19 nt, Artificial Sequence
  Description of Artificial Sequence: Synthetic oligonucleotide
  Sense Strand Starting at position 737 of SEQ ID NO: 317773
ggaugaagcugagucuaga

SEQ ID NO: 376726 - RNA, 19 nt, Artificial Sequence
  Description of Artificial Sequence: Synthetic oligonucleotide
  Antisense Strand to SEQ ID NO: 376725
ucuagacucagcuucaucc

SEQ ID NO: 376727 - RNA, 19 nt, Artificial Sequence
  Description of Artificial Sequence: Synthetic oligonucleotide
  Sense Strand Starting at position 737 of SEQ ID NO: 317799
agagcugagaucuguaucu

SEQ ID NO: 376728 - RNA, 19 nt, Artificial Sequence
  Description of Artificial Sequence: Synthetic oligonucleotide
  Antisense Strand to SEQ ID NO: 376727
agauacagaucucagcucu

SEQ ID NO: 376729 - RNA, 19 nt, Artificial Sequence
  Description of Artificial Sequence: Synthetic oligonucleotide
  Sense Strand Starting at position 737 of SEQ ID NO: 317882
aaagucaucuugccgagaa

SEQ ID NO: 376730 - RNA, 19 nt, Artificial Sequence
  Description of Artificial Sequence: Synthetic oligonucleotide
  Antisense Strand to SEQ ID NO: 376729
uucucggcaagaugacuuu

SEQ ID NO: 376731 - RNA, 19 nt, Artificial Sequence
  Description of Artificial Sequence: Synthetic oligonucleotide
  Sense Strand Starting at position 737 of SEQ ID NO: 318167
gccugaacccaugauaguu

SEQ ID NO: 376732 - RNA, 19 nt, Artificial Sequence
  Description of Artificial Sequence: Synthetic oligonucleotide
  Antisense Strand to SEQ ID NO: 376731
aacuaucauggguucaggc

SEQ ID NO: 376733 - RNA, 19 nt, Artificial Sequence
  Description of Artificial Sequence: Synthetic oligonucleotide
  Sense Strand Starting at position 737 of SEQ ID NO: 318266
gccuguauuauguucguuu

SEQ ID NO: 376734 - RNA, 19 nt, Artificial Sequence
  Description of Artificial Sequence: Synthetic oligonucleotide
  Antisense Strand to SEQ ID NO: 376733
aaacgaacauaauacaggc

SEQ ID NO: 376735 - RNA, 19 nt, Artificial Sequence
  Description of Artificial Sequence: Synthetic oligonucleotide
  Sense Strand Starting at position 737 of SEQ ID NO: 318781
uguacuuuauuaucucaga

SEQ ID NO: 376736 - RNA, 19 nt, Artificial Sequence
  Description of Artificial Sequence: Synthetic oligonucleotide
  Antisense Strand to SEQ ID NO: 376735
ucugagauaauaaaguaca

SEQ ID NO: 376737 - RNA, 19 nt, Artificial Sequence
  Description of Artificial Sequence: Synthetic oligonucleotide
  Sense Strand Starting at position 737 of SEQ ID NO: 318782
guacuuuauuaucucagag

SEQ ID NO: 376738 - RNA, 19 nt, Artificial Sequence
  Description of Artificial Sequence: Synthetic oligonucleotide
  Antisense Strand to SEQ ID NO: 376737
cucugagauaauaaaguac

SEQ ID NO: 376739 - RNA, 19 nt, Artificial Sequence
  Description of Artificial Sequence: Synthetic oligonucleotide
  Sense Strand Starting at position 737 of SEQ ID NO: 318794
cucagagacucugcaaaga

SEQ ID NO: 376740 - RNA, 19 nt, Artificial Sequence
  Description of Artificial Sequence: Synthetic oligonucleotide
  Antisense Strand to SEQ ID NO: 376739
ucuuugcagagucucugag

SEQ ID NO: 376741 - RNA, 19 nt, Artificial Sequence
  Description of Artificial Sequence: Synthetic oligonucleotide
  Sense Strand Starting at position 738 of SEQ ID NO: 315242
agccauuuguuccuaguca

SEQ ID NO: 376742 - RNA, 19 nt, Artificial Sequence
  Description of Artificial Sequence: Synthetic oligonucleotide
  Antisense Strand to SEQ ID NO: 376741
ugacuaggaacaaauggcu

SEQ ID NO: 376743 - RNA, 19 nt, Artificial Sequence
  Description of Artificial Sequence: Synthetic oligonucleotide
  Sense Strand Starting at position 738 of SEQ ID NO: 315282
uugguaucccuacagauuc

SEQ ID NO: 376744 - RNA, 19 nt, Artificial Sequence
  Description of Artificial Sequence: Synthetic oligonucleotide
  Antisense Strand to SEQ ID NO: 376743
gaaucuguagggauaccaa

SEQ ID NO: 376745 - RNA, 19 nt, Artificial Sequence
  Description of Artificial Sequence: Synthetic oligonucleotide
  Sense Strand Starting at position 738 of SEQ ID NO: 315324
cucagauucuuacucgaug

SEQ ID NO: 376746 - RNA, 19 nt, Artificial Sequence
  Description of Artificial Sequence: Synthetic oligonucleotide
  Antisense Strand to SEQ ID NO: 376745
caucgaguaagaaucugag

SEQ ID NO: 376747 - RNA, 19 nt, Artificial Sequence
  Description of Artificial Sequence: Synthetic oligonucleotide
  Sense Strand Starting at position 738 of SEQ ID NO: 315325
ucagauucuuacucgauga

SEQ ID NO: 376748 - RNA, 19 nt, Artificial Sequence
  Description of Artificial Sequence: Synthetic oligonucleotide
  Antisense Strand to SEQ ID NO: 376747
ucaucgaguaagaaucuga

SEQ ID NO: 376749 - RNA, 19 nt, Artificial Sequence
  Description of Artificial Sequence: Synthetic oligonucleotide
  Sense Strand Starting at position 738 of SEQ ID NO: 315327
agauucuuacucgaugauu

SEQ ID NO: 376750 - RNA, 19 nt, Artificial Sequence
  Description of Artificial Sequence: Synthetic oligonucleotide
  Antisense Strand to SEQ ID NO: 376749
aaucaucgaguaagaaucu

SEQ ID NO: 376751 - RNA, 19 nt, Artificial Sequence
  Description of Artificial Sequence: Synthetic oligonucleotide
  Sense Strand Starting at position 738 of SEQ ID NO: 315538
ggccauacaggccagaaau

SEQ ID NO: 376752 - RNA, 19 nt, Artificial Sequence
  Description of Artificial Sequence: Synthetic oligonucleotide
  Antisense Strand to SEQ ID NO: 376751
auuucuggccuguauggcc

SEQ ID NO: 376753 - RNA, 19 nt, Artificial Sequence
  Description of Artificial Sequence: Synthetic oligonucleotide
  Sense Strand Starting at position 738 of SEQ ID NO: 315597
agccaauagcaguaguaau

SEQ ID NO: 376754 - RNA, 19 nt, Artificial Sequence
  Description of Artificial Sequence: Synthetic oligonucleotide
  Antisense Strand to SEQ ID NO: 376753
auuacuacugcuauuggcu

SEQ ID NO: 376755 - RNA, 19 nt, Artificial Sequence
  Description of Artificial Sequence: Synthetic oligonucleotide
  Sense Strand Starting at position 738 of SEQ ID NO: 315629
aucaaauagcuguaguaau

SEQ ID NO: 376756 - RNA, 19 nt, Artificial Sequence
  Description of Artificial Sequence: Synthetic oligonucleotide
  Antisense Strand to SEQ ID NO: 376755
auuacuacagcuauuugau

SEQ ID NO: 376757 - RNA, 19 nt, Artificial Sequence
  Description of Artificial Sequence: Synthetic oligonucleotide
  Sense Strand Starting at position 738 of SEQ ID NO: 315765
acacgaagauuaucccaau

SEQ ID NO: 376758 - RNA, 19 nt, Artificial Sequence
  Description of Artificial Sequence: Synthetic oligonucleotide
  Antisense Strand to SEQ ID NO: 376757
auugggauaaucuucgugu

SEQ ID NO: 376759 - RNA, 19 nt, Artificial Sequence
  Description of Artificial Sequence: Synthetic oligonucleotide
  Sense Strand Starting at position 738 of SEQ ID NO: 316099
agugaugugcucuaugaag

SEQ ID NO: 376760 - RNA, 19 nt, Artificial Sequence
  Description of Artificial Sequence: Synthetic oligonucleotide
  Antisense Strand to SEQ ID NO: 376759
cuucauagagcacaucacu

SEQ ID NO: 376761 - RNA, 19 nt, Artificial Sequence
  Description of Artificial Sequence: Synthetic oligonucleotide
  Sense Strand Starting at position 738 of SEQ ID NO: 316316
ugucccaaauagguuuaau

SEQ ID NO: 376762 - RNA, 19 nt, Artificial Sequence
  Description of Artificial Sequence: Synthetic oligonucleotide
  Antisense Strand to SEQ ID NO: 376761
auuaaaccuauuugggaca

SEQ ID NO: 376763 - RNA, 19 nt, Artificial Sequence
  Description of Artificial Sequence: Synthetic oligonucleotide
  Sense Strand Starting at position 738 of SEQ ID NO: 316770
ugaguucccacagggaaau

SEQ ID NO: 376764 - RNA, 19 nt, Artificial Sequence
  Description of Artificial Sequence: Synthetic oligonucleotide
  Antisense Strand to SEQ ID NO: 376763
auuucccugugggaacuca

SEQ ID NO: 376765 - RNA, 19 nt, Artificial Sequence
  Description of Artificial Sequence: Synthetic oligonucleotide
  Sense Strand Starting at position 738 of SEQ ID NO: 316781
agggaaaugucugugucag

SEQ ID NO: 376766 - RNA, 19 nt, Artificial Sequence
  Description of Artificial Sequence: Synthetic oligonucleotide
  Antisense Strand to SEQ ID NO: 376765
cugacacagacauuucccu

SEQ ID NO: 376767 - RNA, 19 nt, Artificial Sequence
  Description of Artificial Sequence: Synthetic oligonucleotide
  Sense Strand Starting at position 738 of SEQ ID NO: 316789
gucugugucagucuuaguu

SEQ ID NO: 376768 - RNA, 19 nt, Artificial Sequence
  Description of Artificial Sequence: Synthetic oligonucleotide
  Antisense Strand to SEQ ID NO: 376767
aacuaagacugacacagac

SEQ ID NO: 376769 - RNA, 19 nt, Artificial Sequence
  Description of Artificial Sequence: Synthetic oligonucleotide
  Sense Strand Starting at position 738 of SEQ ID NO: 316866
aguugagugagugaacgaa

SEQ ID NO: 376770 - RNA, 19 nt, Artificial Sequence
  Description of Artificial Sequence: Synthetic oligonucleotide
  Antisense Strand to SEQ ID NO: 376769
uucguucacucacucaacu

SEQ ID NO: 376771 - RNA, 19 nt, Artificial Sequence
  Description of Artificial Sequence: Synthetic oligonucleotide
  Sense Strand Starting at position 738 of SEQ ID NO: 316887
aacagauaugcaggugaug

SEQ ID NO: 376772 - RNA, 19 nt, Artificial Sequence
  Description of Artificial Sequence: Synthetic oligonucleotide
  Antisense Strand to SEQ ID NO: 376771
caucaccugcauaucuguu

SEQ ID NO: 376773 - RNA, 19 nt, Artificial Sequence
  Description of Artificial Sequence: Synthetic oligonucleotide
  Sense Strand Starting at position 738 of SEQ ID NO: 317004
ggaucuacgucucccagaa

SEQ ID NO: 376774 - RNA, 19 nt, Artificial Sequence
  Description of Artificial Sequence: Synthetic oligonucleotide
  Antisense Strand to SEQ ID NO: 376773
uucugggagacguagaucc

SEQ ID NO: 376775 - RNA, 19 nt, Artificial Sequence
  Description of Artificial Sequence: Synthetic oligonucleotide
  Sense Strand Starting at position 738 of SEQ ID NO: 317008
cuacgucucccagaagaac

SEQ ID NO: 376776 - RNA, 19 nt, Artificial Sequence
  Description of Artificial Sequence: Synthetic oligonucleotide
  Antisense Strand to SEQ ID NO: 376775
guucuucugggagacguag

SEQ ID NO: 376777 - RNA, 19 nt, Artificial Sequence
  Description of Artificial Sequence: Synthetic oligonucleotide
  Sense Strand Starting at position 738 of SEQ ID NO: 317220
gggcgccaugauuaucaga

SEQ ID NO: 376778 - RNA, 19 nt, Artificial Sequence
  Description of Artificial Sequence: Synthetic oligonucleotide
  Antisense Strand to SEQ ID NO: 376777
ucugauaaucauggcgccc

SEQ ID NO: 376779 - RNA, 19 nt, Artificial Sequence
  Description of Artificial Sequence: Synthetic oligonucleotide
  Sense Strand Starting at position 738 of SEQ ID NO: 317303
ggaaauguagucuaguuaa

SEQ ID NO: 376780 - RNA, 19 nt, Artificial Sequence
  Description of Artificial Sequence: Synthetic oligonucleotide
  Antisense Strand to SEQ ID NO: 376779
uuaacuagacuacauuucc

SEQ ID NO: 376781 - RNA, 19 nt, Artificial Sequence
  Description of Artificial Sequence: Synthetic oligonucleotide
  Sense Strand Starting at position 738 of SEQ ID NO: 317306
aauguagucuaguuaaagg

SEQ ID NO: 376782 - RNA, 19 nt, Artificial Sequence
  Description of Artificial Sequence: Synthetic oligonucleotide
  Antisense Strand to SEQ ID NO: 376781
ccuuuaacuagacuacauu

SEQ ID NO: 376783 - RNA, 19 nt, Artificial Sequence
  Description of Artificial Sequence: Synthetic oligonucleotide
  Sense Strand Starting at position 738 of SEQ ID NO: 318310
uuugacuuagcuggaugaa

SEQ ID NO: 376784 - RNA, 19 nt, Artificial Sequence
  Description of Artificial Sequence: Synthetic oligonucleotide
  Antisense Strand to SEQ ID NO: 376783
uucauccagcuaagucaaa

SEQ ID NO: 376785 - RNA, 19 nt, Artificial Sequence
  Description of Artificial Sequence: Synthetic oligonucleotide
  Sense Strand Starting at position 738 of SEQ ID NO: 318313
gacuuagcuggaugaauag

SEQ ID NO: 376786 - RNA, 19 nt, Artificial Sequence
  Description of Artificial Sequence: Synthetic oligonucleotide
  Antisense Strand to SEQ ID NO: 376785
cuauucauccagcuaaguc

SEQ ID NO: 376787 - RNA, 19 nt, Artificial Sequence
  Description of Artificial Sequence: Synthetic oligonucleotide
  Sense Strand Starting at position 738 of SEQ ID NO: 318432
uaggcuuggugccuauuua

SEQ ID NO: 376788 - RNA, 19 nt, Artificial Sequence
  Description of Artificial Sequence: Synthetic oligonucleotide
  Antisense Strand to SEQ ID NO: 376787
uaaauaggcaccaagccua

SEQ ID NO: 376789 - RNA, 19 nt, Artificial Sequence
  Description of Artificial Sequence: Synthetic oligonucleotide
  Sense Strand Starting at position 738 of SEQ ID NO: 318498
gcaggugucagagacuagu

SEQ ID NO: 376790 - RNA, 19 nt, Artificial Sequence
  Description of Artificial Sequence: Synthetic oligonucleotide
  Antisense Strand to SEQ ID NO: 376789
acuagucucugacaccugc

SEQ ID NO: 376791 - RNA, 19 nt, Artificial Sequence
  Description of Artificial Sequence: Synthetic oligonucleotide
  Sense Strand Starting at position 738 of SEQ ID NO: 318509
agacuaguggcaggaugaa

SEQ ID NO: 376792 - RNA, 19 nt, Artificial Sequence
  Description of Artificial Sequence: Synthetic oligonucleotide
  Antisense Strand to SEQ ID NO: 376791
uucauccugccacuagucu

SEQ ID NO: 376793 - RNA, 19 nt, Artificial Sequence
  Description of Artificial Sequence: Synthetic oligonucleotide
  Sense Strand Starting at position 738 of SEQ ID NO: 318655
acacuuagugcaggaugaa

SEQ ID NO: 376794 - RNA, 19 nt, Artificial Sequence
  Description of Artificial Sequence: Synthetic oligonucleotide
  Antisense Strand to SEQ ID NO: 376793
uucauccugcacuaagugu

SEQ ID NO: 376795 - RNA, 19 nt, Artificial Sequence
  Description of Artificial Sequence: Synthetic oligonucleotide
  Sense Strand Starting at position 738 of SEQ ID NO: 318656
cacuuagugcaggaugaau

SEQ ID NO: 376796 - RNA, 19 nt, Artificial Sequence
  Description of Artificial Sequence: Synthetic oligonucleotide
  Antisense Strand to SEQ ID NO: 376795
auucauccugcacuaagug

SEQ ID NO: 376797 - RNA, 19 nt, Artificial Sequence
  Description of Artificial Sequence: Synthetic oligonucleotide
  Sense Strand Starting at position 738 of SEQ ID NO: 318772
acaauuccgcaugagaaau

SEQ ID NO: 376798 - RNA, 19 nt, Artificial Sequence
  Description of Artificial Sequence: Synthetic oligonucleotide
  Antisense Strand to SEQ ID NO: 376797
auuucucaugcggaauugu

SEQ ID NO: 376799 - RNA, 19 nt, Artificial Sequence
  Description of Artificial Sequence: Synthetic oligonucleotide
  Sense Strand Starting at position 738 of SEQ ID NO: 318798
caguauuacugagcugaaa

SEQ ID NO: 376800 - RNA, 19 nt, Artificial Sequence
  Description of Artificial Sequence: Synthetic oligonucleotide
  Antisense Strand to SEQ ID NO: 376799
uuucagcucaguaauacug

SEQ ID NO: 376801 - RNA, 19 nt, Artificial Sequence
  Description of Artificial Sequence: Synthetic oligonucleotide
  Sense Strand Starting at position 738 of SEQ ID NO: 318838
uagagucuaucucuggaga

SEQ ID NO: 376802 - RNA, 19 nt, Artificial Sequence
  Description of Artificial Sequence: Synthetic oligonucleotide
  Antisense Strand to SEQ ID NO: 376801
ucuccagagauagacucua

SEQ ID NO: 376803 - RNA, 19 nt, Artificial Sequence
  Description of Artificial Sequence: Synthetic oligonucleotide
  Sense Strand Starting at position 738 of SEQ ID NO: 318839
agagucuaucucuggagaa

SEQ ID NO: 376804 - RNA, 19 nt, Artificial Sequence
  Description of Artificial Sequence: Synthetic oligonucleotide
  Antisense Strand to SEQ ID NO: 376803
uucuccagagauagacucu

SEQ ID NO: 376805 - RNA, 19 nt, Artificial Sequence
  Description of Artificial Sequence: Synthetic oligonucleotide
  Sense Strand Starting at position 738 of SEQ ID NO: 318878
ccaguuucugaugacugua

SEQ ID NO: 376806 - RNA, 19 nt, Artificial Sequence
  Description of Artificial Sequence: Synthetic oligonucleotide
  Antisense Strand to SEQ ID NO: 376805
uacagucaucagaaacugg

SEQ ID NO: 376807 - RNA, 19 nt, Artificial Sequence
  Description of Artificial Sequence: Synthetic oligonucleotide
  Sense Strand Starting at position 738 of SEQ ID NO: 318880
aguuucugaugacuguaaa

SEQ ID NO: 376808 - RNA, 19 nt, Artificial Sequence
  Description of Artificial Sequence: Synthetic oligonucleotide
  Antisense Strand to SEQ ID NO: 376807
uuuacagucaucagaaacu

SEQ ID NO: 376809 - RNA, 19 nt, Artificial Sequence
  Description of Artificial Sequence: Synthetic oligonucleotide
  Sense Strand Starting at position 738 of SEQ ID NO: 318881
guuucugaugacuguaaac

SEQ ID NO: 376810 - RNA, 19 nt, Artificial Sequence
  Description of Artificial Sequence: Synthetic oligonucleotide
  Antisense Strand to SEQ ID NO: 376809
guuuacagucaucagaaac

SEQ ID NO: 376811 - RNA, 19 nt, Artificial Sequence
  Description of Artificial Sequence: Synthetic oligonucleotide
  Sense Strand Starting at position 738 of SEQ ID NO: 318994
uucuuauaaggauguaugu

SEQ ID NO: 376812 - RNA, 19 nt, Artificial Sequence
  Description of Artificial Sequence: Synthetic oligonucleotide
  Antisense Strand to SEQ ID NO: 376811
acauacauccuuauaagaa

SEQ ID NO: 376813 - RNA, 19 nt, Artificial Sequence
  Description of Artificial Sequence: Synthetic oligonucleotide
  Sense Strand Starting at position 738 of SEQ ID NO: 319011
gugauugcauaaucacuga

SEQ ID NO: 376814 - RNA, 19 nt, Artificial Sequence
  Description of Artificial Sequence: Synthetic oligonucleotide
  Antisense Strand to SEQ ID NO: 376813
ucagugauuaugcaaucac

SEQ ID NO: 376815 - RNA, 19 nt, Artificial Sequence
  Description of Artificial Sequence: Synthetic oligonucleotide
  Sense Strand Starting at position 738 of SEQ ID NO: 319118
ccacaaguuccauggauua

SEQ ID NO: 376816 - RNA, 19 nt, Artificial Sequence
  Description of Artificial Sequence: Synthetic oligonucleotide
  Antisense Strand to SEQ ID NO: 376815
uaauccauggaacuugugg

SEQ ID NO: 376817 - RNA, 19 nt, Artificial Sequence
  Description of Artificial Sequence: Synthetic oligonucleotide
  Sense Strand Starting at position 738 of SEQ ID NO: 319130
uggauuagagugcaguuau

SEQ ID NO: 376818 - RNA, 19 nt, Artificial Sequence
  Description of Artificial Sequence: Synthetic oligonucleotide
  Antisense Strand to SEQ ID NO: 376817
auaacugcacucuaaucca

SEQ ID NO: 376819 - RNA, 19 nt, Artificial Sequence
  Description of Artificial Sequence: Synthetic oligonucleotide
  Sense Strand Starting at position 738 of SEQ ID NO: 319141
gcaguuauacuugggagga

SEQ ID NO: 376820 - RNA, 19 nt, Artificial Sequence
  Description of Artificial Sequence: Synthetic oligonucleotide
  Antisense Strand to SEQ ID NO: 376819
uccucccaaguauaacugc

SEQ ID NO: 376821 - RNA, 19 nt, Artificial Sequence
  Description of Artificial Sequence: Synthetic oligonucleotide
  Sense Strand Starting at position 739 of SEQ ID NO: 315247
ggacuuggcccucaaauac

SEQ ID NO: 376822 - RNA, 19 nt, Artificial Sequence
  Description of Artificial Sequence: Synthetic oligonucleotide
  Antisense Strand to SEQ ID NO: 376821
guauuugagggccaagucc

SEQ ID NO: 376823 - RNA, 19 nt, Artificial Sequence
  Description of Artificial Sequence: Synthetic oligonucleotide
  Sense Strand Starting at position 739 of SEQ ID NO: 315524
ggcuguuuguaucccauuu

SEQ ID NO: 376824 - RNA, 19 nt, Artificial Sequence
  Description of Artificial Sequence: Synthetic oligonucleotide
  Antisense Strand to SEQ ID NO: 376823
aaaugggauacaaacagcc

SEQ ID NO: 376825 - RNA, 19 nt, Artificial Sequence
  Description of Artificial Sequence: Synthetic oligonucleotide
  Sense Strand Starting at position 739 of SEQ ID NO: 315559
aauaucugagaauguaagu

SEQ ID NO: 376826 - RNA, 19 nt, Artificial Sequence
  Description of Artificial Sequence: Synthetic oligonucleotide
  Antisense Strand to SEQ ID NO: 376825
acuuacauucucagauauu

SEQ ID NO: 376827 - RNA, 19 nt, Artificial Sequence
  Description of Artificial Sequence: Synthetic oligonucleotide
  Sense Strand Starting at position 739 of SEQ ID NO: 315598
uugauuggcuggccauuua

SEQ ID NO: 376828 - RNA, 19 nt, Artificial Sequence
  Description of Artificial Sequence: Synthetic oligonucleotide
  Antisense Strand to SEQ ID NO: 376827
uaaauggccagccaaucaa

SEQ ID NO: 376829 - RNA, 19 nt, Artificial Sequence
  Description of Artificial Sequence: Synthetic oligonucleotide
  Sense Strand Starting at position 739 of SEQ ID NO: 315663
augagaaauucuccacgga

SEQ ID NO: 376830 - RNA, 19 nt, Artificial Sequence
  Description of Artificial Sequence: Synthetic oligonucleotide
  Antisense Strand to SEQ ID NO: 376829
uccguggagaauuucucau

SEQ ID NO: 376831 - RNA, 19 nt, Artificial Sequence
  Description of Artificial Sequence: Synthetic oligonucleotide
  Sense Strand Starting at position 739 of SEQ ID NO: 315821
guagguuaugaaggaguau

SEQ ID NO: 376832 - RNA, 19 nt, Artificial Sequence
  Description of Artificial Sequence: Synthetic oligonucleotide
  Antisense Strand to SEQ ID NO: 376831
auacuccuucauaaccuac

SEQ ID NO: 376833 - RNA, 19 nt, Artificial Sequence
  Description of Artificial Sequence: Synthetic oligonucleotide
  Sense Strand Starting at position 739 of SEQ ID NO: 315912
gcagguccaaguuaucaga

SEQ ID NO: 376834 - RNA, 19 nt, Artificial Sequence
  Description of Artificial Sequence: Synthetic oligonucleotide
  Antisense Strand to SEQ ID NO: 376833
ucugauaacuuggaccugc

SEQ ID NO: 376835 - RNA, 19 nt, Artificial Sequence
  Description of Artificial Sequence: Synthetic oligonucleotide
  Sense Strand Starting at position 739 of SEQ ID NO: 315914
agguccaaguuaucagauu

SEQ ID NO: 376836 - RNA, 19 nt, Artificial Sequence
  Description of Artificial Sequence: Synthetic oligonucleotide
  Antisense Strand to SEQ ID NO: 376835
aaucugauaacuuggaccu

SEQ ID NO: 376837 - RNA, 19 nt, Artificial Sequence
  Description of Artificial Sequence: Synthetic oligonucleotide
  Sense Strand Starting at position 739 of SEQ ID NO: 316152
cucagaguguacucaauaa

SEQ ID NO: 376838 - RNA, 19 nt, Artificial Sequence
  Description of Artificial Sequence: Synthetic oligonucleotide
  Antisense Strand to SEQ ID NO: 376837
uuauugaguacacucugag

SEQ ID NO: 376839 - RNA, 19 nt, Artificial Sequence
  Description of Artificial Sequence: Synthetic oligonucleotide
  Sense Strand Starting at position 739 of SEQ ID NO: 316156
gaguguacucaauaaaugu

SEQ ID NO: 376840 - RNA, 19 nt, Artificial Sequence
  Description of Artificial Sequence: Synthetic oligonucleotide
  Antisense Strand to SEQ ID NO: 376839
acauuuauugaguacacuc

SEQ ID NO: 376841 - RNA, 19 nt, Artificial Sequence
  Description of Artificial Sequence: Synthetic oligonucleotide
  Sense Strand Starting at position 739 of SEQ ID NO: 316442
ggagcugcaaguuacuuaa

SEQ ID NO: 376842 - RNA, 19 nt, Artificial Sequence
  Description of Artificial Sequence: Synthetic oligonucleotide
  Antisense Strand to SEQ ID NO: 376841
uuaaguaacuugcagcucc

SEQ ID NO: 376843 - RNA, 19 nt, Artificial Sequence
  Description of Artificial Sequence: Synthetic oligonucleotide
  Sense Strand Starting at position 739 of SEQ ID NO: 316504
gguuucucuaggcaucaga

SEQ ID NO: 376844 - RNA, 19 nt, Artificial Sequence
  Description of Artificial Sequence: Synthetic oligonucleotide
  Antisense Strand to SEQ ID NO: 376843
ucugaugccuagagaaacc

SEQ ID NO: 376845 - RNA, 19 nt, Artificial Sequence
  Description of Artificial Sequence: Synthetic oligonucleotide
  Sense Strand Starting at position 739 of SEQ ID NO: 316544
uucagaacugugcgagaua

SEQ ID NO: 376846 - RNA, 19 nt, Artificial Sequence
  Description of Artificial Sequence: Synthetic oligonucleotide
  Antisense Strand to SEQ ID NO: 376845
uaucucgcacaguucugaa

SEQ ID NO: 376847 - RNA, 19 nt, Artificial Sequence
  Description of Artificial Sequence: Synthetic oligonucleotide
  Sense Strand Starting at position 739 of SEQ ID NO: 316547
agaacugugcgagauauga

SEQ ID NO: 376848 - RNA, 19 nt, Artificial Sequence
  Description of Artificial Sequence: Synthetic oligonucleotide
  Antisense Strand to SEQ ID NO: 376847
ucauaucucgcacaguucu

SEQ ID NO: 376849 - RNA, 19 nt, Artificial Sequence
  Description of Artificial Sequence: Synthetic oligonucleotide
  Sense Strand Starting at position 739 of SEQ ID NO: 316555
gcgagauaugaucaguguu

SEQ ID NO: 376850 - RNA, 19 nt, Artificial Sequence
  Description of Artificial Sequence: Synthetic oligonucleotide
  Antisense Strand to SEQ ID NO: 376849
aacacugaucauaucucgc

SEQ ID NO: 376851 - RNA, 19 nt, Artificial Sequence
  Description of Artificial Sequence: Synthetic oligonucleotide
  Sense Strand Starting at position 739 of SEQ ID NO: 316567
caguguucgccgcuguuau

SEQ ID NO: 376852 - RNA, 19 nt, Artificial Sequence
  Description of Artificial Sequence: Synthetic oligonucleotide
  Antisense Strand to SEQ ID NO: 376851
auaacagcggcgaacacug

SEQ ID NO: 376853 - RNA, 19 nt, Artificial Sequence
  Description of Artificial Sequence: Synthetic oligonucleotide
  Sense Strand Starting at position 739 of SEQ ID NO: 316569
guguucgccgcuguuauuu

SEQ ID NO: 376854 - RNA, 19 nt, Artificial Sequence
  Description of Artificial Sequence: Synthetic oligonucleotide
  Antisense Strand to SEQ ID NO: 376853
aaauaacagcggcgaacac

SEQ ID NO: 376855 - RNA, 19 nt, Artificial Sequence
  Description of Artificial Sequence: Synthetic oligonucleotide
  Sense Strand Starting at position 739 of SEQ ID NO: 316577
cgcuguuauuucucucauu

SEQ ID NO: 376856 - RNA, 19 nt, Artificial Sequence
  Description of Artificial Sequence: Synthetic oligonucleotide
  Antisense Strand to SEQ ID NO: 376855
aaugagagaaauaacagcg

SEQ ID NO: 376857 - RNA, 19 nt, Artificial Sequence
  Description of Artificial Sequence: Synthetic oligonucleotide
  Sense Strand Starting at position 739 of SEQ ID NO: 317379
uagguugucgcguccugua

SEQ ID NO: 376858 - RNA, 19 nt, Artificial Sequence
  Description of Artificial Sequence: Synthetic oligonucleotide
  Antisense Strand to SEQ ID NO: 376857
uacaggacgcgacaaccua

SEQ ID NO: 376859 - RNA, 19 nt, Artificial Sequence
  Description of Artificial Sequence: Synthetic oligonucleotide
  Sense Strand Starting at position 739 of SEQ ID NO: 317381
gguugucgcguccuguaaa

SEQ ID NO: 376860 - RNA, 19 nt, Artificial Sequence
  Description of Artificial Sequence: Synthetic oligonucleotide
  Antisense Strand to SEQ ID NO: 376859
uuuacaggacgcgacaacc

SEQ ID NO: 376861 - RNA, 19 nt, Artificial Sequence
  Description of Artificial Sequence: Synthetic oligonucleotide
  Sense Strand Starting at position 739 of SEQ ID NO: 317389
cguccuguaaauuagucau

SEQ ID NO: 376862 - RNA, 19 nt, Artificial Sequence
  Description of Artificial Sequence: Synthetic oligonucleotide
  Antisense Strand to SEQ ID NO: 376861
augacuaauuuacaggacg

SEQ ID NO: 376863 - RNA, 19 nt, Artificial Sequence
  Description of Artificial Sequence: Synthetic oligonucleotide
  Sense Strand Starting at position 739 of SEQ ID NO: 317476
caggaaagcucaguuugga

SEQ ID NO: 376864 - RNA, 19 nt, Artificial Sequence
  Description of Artificial Sequence: Synthetic oligonucleotide
  Antisense Strand to SEQ ID NO: 376863
uccaaacugagcuuuccug

SEQ ID NO: 376865 - RNA, 19 nt, Artificial Sequence
  Description of Artificial Sequence: Synthetic oligonucleotide
  Sense Strand Starting at position 739 of SEQ ID NO: 317493
gauaccaagucagcugaua

SEQ ID NO: 376866 - RNA, 19 nt, Artificial Sequence
  Description of Artificial Sequence: Synthetic oligonucleotide
  Antisense Strand to SEQ ID NO: 376865
uaucagcugacuugguauc

SEQ ID NO: 376867 - RNA, 19 nt, Artificial Sequence
  Description of Artificial Sequence: Synthetic oligonucleotide
  Sense Strand Starting at position 739 of SEQ ID NO: 317584
acuuucugacguugacuua

SEQ ID NO: 376868 - RNA, 19 nt, Artificial Sequence
  Description of Artificial Sequence: Synthetic oligonucleotide
  Antisense Strand to SEQ ID NO: 376867
uaagucaacgucagaaagu

SEQ ID NO: 376869 - RNA, 19 nt, Artificial Sequence
  Description of Artificial Sequence: Synthetic oligonucleotide
  Sense Strand Starting at position 739 of SEQ ID NO: 317585
cuuucugacguugacuuaa

SEQ ID NO: 376870 - RNA, 19 nt, Artificial Sequence
  Description of Artificial Sequence: Synthetic oligonucleotide
  Antisense Strand to SEQ ID NO: 376869
uuaagucaacgucagaaag

SEQ ID NO: 376871 - RNA, 19 nt, Artificial Sequence
  Description of Artificial Sequence: Synthetic oligonucleotide
  Sense Strand Starting at position 739 of SEQ ID NO: 317633
ugggaucaauuccuuccua

SEQ ID NO: 376872 - RNA, 19 nt, Artificial Sequence
  Description of Artificial Sequence: Synthetic oligonucleotide
  Antisense Strand to SEQ ID NO: 376871
uaggaaggaauugauccca

SEQ ID NO: 376873 - RNA, 19 nt, Artificial Sequence
  Description of Artificial Sequence: Synthetic oligonucleotide
  Sense Strand Starting at position 739 of SEQ ID NO: 317634
gggaucaauuccuuccuaa

SEQ ID NO: 376874 - RNA, 19 nt, Artificial Sequence
  Description of Artificial Sequence: Synthetic oligonucleotide
  Antisense Strand to SEQ ID NO: 376873
uuaggaaggaauugauccc

SEQ ID NO: 376875 - RNA, 19 nt, Artificial Sequence
  Description of Artificial Sequence: Synthetic oligonucleotide
  Sense Strand Starting at position 739 of SEQ ID NO: 318005
agauacauuucugaaguac

SEQ ID NO: 376876 - RNA, 19 nt, Artificial Sequence
  Description of Artificial Sequence: Synthetic oligonucleotide
  Antisense Strand to SEQ ID NO: 376875
guacuucagaaauguaucu

SEQ ID NO: 376877 - RNA, 19 nt, Artificial Sequence
  Description of Artificial Sequence: Synthetic oligonucleotide
  Sense Strand Starting at position 739 of SEQ ID NO: 318020
guacucuugaucugaaagg

SEQ ID NO: 376878 - RNA, 19 nt, Artificial Sequence
  Description of Artificial Sequence: Synthetic oligonucleotide
  Antisense Strand to SEQ ID NO: 376877
ccuuucagaucaagaguac

SEQ ID NO: 376879 - RNA, 19 nt, Artificial Sequence
  Description of Artificial Sequence: Synthetic oligonucleotide
  Sense Strand Starting at position 739 of SEQ ID NO: 318074
gauuuagaauucuagguua

SEQ ID NO: 376880 - RNA, 19 nt, Artificial Sequence
  Description of Artificial Sequence: Synthetic oligonucleotide
  Antisense Strand to SEQ ID NO: 376879
uaaccuagaauucuaaauc

SEQ ID NO: 376881 - RNA, 19 nt, Artificial Sequence
  Description of Artificial Sequence: Synthetic oligonucleotide
  Sense Strand Starting at position 739 of SEQ ID NO: 318077
uuagaauucuagguuagug

SEQ ID NO: 376882 - RNA, 19 nt, Artificial Sequence
  Description of Artificial Sequence: Synthetic oligonucleotide
  Antisense Strand to SEQ ID NO: 376881
cacuaaccuagaauucuaa

SEQ ID NO: 376883 - RNA, 19 nt, Artificial Sequence
  Description of Artificial Sequence: Synthetic oligonucleotide
  Sense Strand Starting at position 739 of SEQ ID NO: 318079
agaauucuagguuaguguu

SEQ ID NO: 376884 - RNA, 19 nt, Artificial Sequence
  Description of Artificial Sequence: Synthetic oligonucleotide
  Antisense Strand to SEQ ID NO: 376883
aacacuaaccuagaauucu

SEQ ID NO: 376885 - RNA, 19 nt, Artificial Sequence
  Description of Artificial Sequence: Synthetic oligonucleotide
  Sense Strand Starting at position 739 of SEQ ID NO: 318526
guuagaauaagguaaugca

SEQ ID NO: 376886 - RNA, 19 nt, Artificial Sequence
  Description of Artificial Sequence: Synthetic oligonucleotide
  Antisense Strand to SEQ ID NO: 376885
ugcauuaccuuauucuaac

SEQ ID NO: 376887 - RNA, 19 nt, Artificial Sequence
  Description of Artificial Sequence: Synthetic oligonucleotide
  Sense Strand Starting at position 739 of SEQ ID NO: 318539
aaugcagaucuguagaugu

SEQ ID NO: 376888 - RNA, 19 nt, Artificial Sequence
  Description of Artificial Sequence: Synthetic oligonucleotide
  Antisense Strand to SEQ ID NO: 376887
acaucuacagaucugcauu

SEQ ID NO: 376889 - RNA, 19 nt, Artificial Sequence
  Description of Artificial Sequence: Synthetic oligonucleotide
  Sense Strand Starting at position 739 of SEQ ID NO: 318541
ugcagaucuguagauguuu

SEQ ID NO: 376890 - RNA, 19 nt, Artificial Sequence
  Description of Artificial Sequence: Synthetic oligonucleotide
  Antisense Strand to SEQ ID NO: 376889
aaacaucuacagaucugca

SEQ ID NO: 376891 - RNA, 19 nt, Artificial Sequence
  Description of Artificial Sequence: Synthetic oligonucleotide
  Sense Strand Starting at position 739 of SEQ ID NO: 318715
cuggaauugccucauaguu

SEQ ID NO: 376892 - RNA, 19 nt, Artificial Sequence
  Description of Artificial Sequence: Synthetic oligonucleotide
  Antisense Strand to SEQ ID NO: 376891
aacuaugaggcaauuccag

SEQ ID NO: 376893 - RNA, 19 nt, Artificial Sequence
  Description of Artificial Sequence: Synthetic oligonucleotide
  Sense Strand Starting at position 739 of SEQ ID NO: 318725
cucauaguucucgaauguu

SEQ ID NO: 376894 - RNA, 19 nt, Artificial Sequence
  Description of Artificial Sequence: Synthetic oligonucleotide
  Antisense Strand to SEQ ID NO: 376893
aacauucgagaacuaugag

SEQ ID NO: 376895 - RNA, 19 nt, Artificial Sequence
  Description of Artificial Sequence: Synthetic oligonucleotide
  Sense Strand Starting at position 739 of SEQ ID NO: 318754
gauggagguucucuuugca

SEQ ID NO: 376896 - RNA, 19 nt, Artificial Sequence
  Description of Artificial Sequence: Synthetic oligonucleotide
  Antisense Strand to SEQ ID NO: 376895
ugcaaagagaaccuccauc

SEQ ID NO: 376897 - RNA, 19 nt, Artificial Sequence
  Description of Artificial Sequence: Synthetic oligonucleotide
  Sense Strand Starting at position 739 of SEQ ID NO: 318757
ggagguucucuuugcauuu

SEQ ID NO: 376898 - RNA, 19 nt, Artificial Sequence
  Description of Artificial Sequence: Synthetic oligonucleotide
  Antisense Strand to SEQ ID NO: 376897
aaaugcaaagagaaccucc

SEQ ID NO: 376899 - RNA, 19 nt, Artificial Sequence
  Description of Artificial Sequence: Synthetic oligonucleotide
  Sense Strand Starting at position 739 of SEQ ID NO: 318813
uuuaaucuuugguuaugga

SEQ ID NO: 376900 - RNA, 19 nt, Artificial Sequence
  Description of Artificial Sequence: Synthetic oligonucleotide
  Antisense Strand to SEQ ID NO: 376899
uccauaaccaaagauuaaa

SEQ ID NO: 376901 - RNA, 19 nt, Artificial Sequence
  Description of Artificial Sequence: Synthetic oligonucleotide
  Sense Strand Starting at position 740 of SEQ ID NO: 315379
gcauguuugaaaggacaaa

SEQ ID NO: 376902 - RNA, 19 nt, Artificial Sequence
  Description of Artificial Sequence: Synthetic oligonucleotide
  Antisense Strand to SEQ ID NO: 376901
uuuguccuuucaaacaugc

SEQ ID NO: 376903 - RNA, 19 nt, Artificial Sequence
  Description of Artificial Sequence: Synthetic oligonucleotide
  Sense Strand Starting at position 740 of SEQ ID NO: 315455
aagguaguagcgggucaaa

SEQ ID NO: 376904 - RNA, 19 nt, Artificial Sequence
  Description of Artificial Sequence: Synthetic oligonucleotide
  Antisense Strand to SEQ ID NO: 376903
uuugacccgcuacuaccuu

SEQ ID NO: 376905 - RNA, 19 nt, Artificial Sequence
  Description of Artificial Sequence: Synthetic oligonucleotide
  Sense Strand Starting at position 740 of SEQ ID NO: 315644
ugucaaugcugggcugaau

SEQ ID NO: 376906 - RNA, 19 nt, Artificial Sequence
  Description of Artificial Sequence: Synthetic oligonucleotide
  Antisense Strand to SEQ ID NO: 376905
auucagcccagcauugaca

SEQ ID NO: 376907 - RNA, 19 nt, Artificial Sequence
  Description of Artificial Sequence: Synthetic oligonucleotide
  Sense Strand Starting at position 740 of SEQ ID NO: 315769
gcuacucaaucauaaggga

SEQ ID NO: 376908 - RNA, 19 nt, Artificial Sequence
  Description of Artificial Sequence: Synthetic oligonucleotide
  Antisense Strand to SEQ ID NO: 376907
ucccuuaugauugaguagc

SEQ ID NO: 376909 - RNA, 19 nt, Artificial Sequence
  Description of Artificial Sequence: Synthetic oligonucleotide
  Sense Strand Starting at position 740 of SEQ ID NO: 315772
acucaaucauaagggagaa

SEQ ID NO: 376910 - RNA, 19 nt, Artificial Sequence
  Description of Artificial Sequence: Synthetic oligonucleotide
  Antisense Strand to SEQ ID NO: 376909
uucucccuuaugauugagu

SEQ ID NO: 376911 - RNA, 19 nt, Artificial Sequence
  Description of Artificial Sequence: Synthetic oligonucleotide
  Sense Strand Starting at position 740 of SEQ ID NO: 315790
agcagaacucacgaucuuu

SEQ ID NO: 376912 - RNA, 19 nt, Artificial Sequence
  Description of Artificial Sequence: Synthetic oligonucleotide
  Antisense Strand to SEQ ID NO: 376911
aaagaucgugaguucugcu

SEQ ID NO: 376913 - RNA, 19 nt, Artificial Sequence
  Description of Artificial Sequence: Synthetic oligonucleotide
  Sense Strand Starting at position 740 of SEQ ID NO: 315809
uccauaggaugaugugaaa

SEQ ID NO: 376914 - RNA, 19 nt, Artificial Sequence
  Description of Artificial Sequence: Synthetic oligonucleotide
  Antisense Strand to SEQ ID NO: 376913
uuucacaucauccuaugga

SEQ ID NO: 376915 - RNA, 19 nt, Artificial Sequence
  Description of Artificial Sequence: Synthetic oligonucleotide
  Sense Strand Starting at position 740 of SEQ ID NO: 315812
auaggaugaugugaaauaa

SEQ ID NO: 376916 - RNA, 19 nt, Artificial Sequence
  Description of Artificial Sequence: Synthetic oligonucleotide
  Antisense Strand to SEQ ID NO: 376915
uuauuucacaucauccuau

SEQ ID NO: 376917 - RNA, 19 nt, Artificial Sequence
  Description of Artificial Sequence: Synthetic oligonucleotide
  Sense Strand Starting at position 740 of SEQ ID NO: 315827
auaagaaagcccugucaga

SEQ ID NO: 376918 - RNA, 19 nt, Artificial Sequence
  Description of Artificial Sequence: Synthetic oligonucleotide
  Antisense Strand to SEQ ID NO: 376917
ucugacagggcuuucuuau

SEQ ID NO: 376919 - RNA, 19 nt, Artificial Sequence
  Description of Artificial Sequence: Synthetic oligonucleotide
  Sense Strand Starting at position 740 of SEQ ID NO: 316007
agcuauuaauaggaacuua

SEQ ID NO: 376920 - RNA, 19 nt, Artificial Sequence
  Description of Artificial Sequence: Synthetic oligonucleotide
  Antisense Strand to SEQ ID NO: 376919
uaaguuccuauuaauagcu

SEQ ID NO: 376921 - RNA, 19 nt, Artificial Sequence
  Description of Artificial Sequence: Synthetic oligonucleotide
  Sense Strand Starting at position 740 of SEQ ID NO: 316186
gcuguuucagcaggacaga

SEQ ID NO: 376922 - RNA, 19 nt, Artificial Sequence
  Description of Artificial Sequence: Synthetic oligonucleotide
  Antisense Strand to SEQ ID NO: 376921
ucuguccugcugaaacagc

SEQ ID NO: 376923 - RNA, 19 nt, Artificial Sequence
  Description of Artificial Sequence: Synthetic oligonucleotide
  Sense Strand Starting at position 740 of SEQ ID NO: 316378
ggaguagagugagagguua

SEQ ID NO: 376924 - RNA, 19 nt, Artificial Sequence
  Description of Artificial Sequence: Synthetic oligonucleotide
  Antisense Strand to SEQ ID NO: 376923
uaaccucucacucuacucc

SEQ ID NO: 376925 - RNA, 19 nt, Artificial Sequence
  Description of Artificial Sequence: Synthetic oligonucleotide
  Sense Strand Starting at position 740 of SEQ ID NO: 316386
gugagagguuaccaugaaa

SEQ ID NO: 376926 - RNA, 19 nt, Artificial Sequence
  Description of Artificial Sequence: Synthetic oligonucleotide
  Antisense Strand to SEQ ID NO: 376925
uuucaugguaaccucucac

SEQ ID NO: 376927 - RNA, 19 nt, Artificial Sequence
  Description of Artificial Sequence: Synthetic oligonucleotide
  Sense Strand Starting at position 740 of SEQ ID NO: 316516
ggugauuugcccugggcga

SEQ ID NO: 376928 - RNA, 19 nt, Artificial Sequence
  Description of Artificial Sequence: Synthetic oligonucleotide
  Antisense Strand to SEQ ID NO: 376927
ucgcccagggcaaaucacc

SEQ ID NO: 376929 - RNA, 19 nt, Artificial Sequence
  Description of Artificial Sequence: Synthetic oligonucleotide
  Sense Strand Starting at position 740 of SEQ ID NO: 316529
gggcgacuauuccucuaag

SEQ ID NO: 376930 - RNA, 19 nt, Artificial Sequence
  Description of Artificial Sequence: Synthetic oligonucleotide
  Antisense Strand to SEQ ID NO: 376929
cuuagaggaauagucgccc

SEQ ID NO: 376931 - RNA, 19 nt, Artificial Sequence
  Description of Artificial Sequence: Synthetic oligonucleotide
  Sense Strand Starting at position 740 of SEQ ID NO: 316532
cgacuauuccucuaaggug

SEQ ID NO: 376932 - RNA, 19 nt, Artificial Sequence
  Description of Artificial Sequence: Synthetic oligonucleotide
  Antisense Strand to SEQ ID NO: 376931
caccuuagaggaauagucg

SEQ ID NO: 376933 - RNA, 19 nt, Artificial Sequence
  Description of Artificial Sequence: Synthetic oligonucleotide
  Sense Strand Starting at position 740 of SEQ ID NO: 316549
uguuaagugucugucacca

SEQ ID NO: 376934 - RNA, 19 nt, Artificial Sequence
  Description of Artificial Sequence: Synthetic oligonucleotide
  Antisense Strand to SEQ ID NO: 376933
uggugacagacacuuaaca

SEQ ID NO: 376935 - RNA, 19 nt, Artificial Sequence
  Description of Artificial Sequence: Synthetic oligonucleotide
  Sense Strand Starting at position 740 of SEQ ID NO: 316558
ucugucaccagucagagua

SEQ ID NO: 376936 - RNA, 19 nt, Artificial Sequence
  Description of Artificial Sequence: Synthetic oligonucleotide
  Antisense Strand to SEQ ID NO: 376935
uacucugacuggugacaga

SEQ ID NO: 376937 - RNA, 19 nt, Artificial Sequence
  Description of Artificial Sequence: Synthetic oligonucleotide
  Sense Strand Starting at position 740 of SEQ ID NO: 316584
augacuuacucaguuacuu

SEQ ID NO: 376938 - RNA, 19 nt, Artificial Sequence
  Description of Artificial Sequence: Synthetic oligonucleotide
  Antisense Strand to SEQ ID NO: 376937
aaguaacugaguaagucau

SEQ ID NO: 376939 - RNA, 19 nt, Artificial Sequence
  Description of Artificial Sequence: Synthetic oligonucleotide
  Sense Strand Starting at position 740 of SEQ ID NO: 316606
uguuuaugaccuuaaguac

SEQ ID NO: 376940 - RNA, 19 nt, Artificial Sequence
  Description of Artificial Sequence: Synthetic oligonucleotide
  Antisense Strand to SEQ ID NO: 376939
guacuuaaggucauaaaca

SEQ ID NO: 376941 - RNA, 19 nt, Artificial Sequence
  Description of Artificial Sequence: Synthetic oligonucleotide
  Sense Strand Starting at position 740 of SEQ ID NO: 316617
uuaaguaccugucuugcaa

SEQ ID NO: 376942 - RNA, 19 nt, Artificial Sequence
  Description of Artificial Sequence: Synthetic oligonucleotide
  Antisense Strand to SEQ ID NO: 376941
uugcaagacagguacuuaa

SEQ ID NO: 376943 - RNA, 19 nt, Artificial Sequence
  Description of Artificial Sequence: Synthetic oligonucleotide
  Sense Strand Starting at position 740 of SEQ ID NO: 316690
gauagagaaugcuggauaa

SEQ ID NO: 376944 - RNA, 19 nt, Artificial Sequence
  Description of Artificial Sequence: Synthetic oligonucleotide
  Antisense Strand to SEQ ID NO: 376943
uuauccagcauucucuauc

SEQ ID NO: 376945 - RNA, 19 nt, Artificial Sequence
  Description of Artificial Sequence: Synthetic oligonucleotide
  Sense Strand Starting at position 740 of SEQ ID NO: 316794
accuuaacgugccugaauu

SEQ ID NO: 376946 - RNA, 19 nt, Artificial Sequence
  Description of Artificial Sequence: Synthetic oligonucleotide
  Antisense Strand to SEQ ID NO: 376945
aauucaggcacguuaaggu

SEQ ID NO: 376947 - RNA, 19 nt, Artificial Sequence
  Description of Artificial Sequence: Synthetic oligonucleotide
  Sense Strand Starting at position 740 of SEQ ID NO: 316795
ccuuaacgugccugaauuu

SEQ ID NO: 376948 - RNA, 19 nt, Artificial Sequence
  Description of Artificial Sequence: Synthetic oligonucleotide
  Antisense Strand to SEQ ID NO: 376947
aaauucaggcacguuaagg

SEQ ID NO: 376949 - RNA, 19 nt, Artificial Sequence
  Description of Artificial Sequence: Synthetic oligonucleotide
  Sense Strand Starting at position 740 of SEQ ID NO: 316804
gccugaauuucccagguuc

SEQ ID NO: 376950 - RNA, 19 nt, Artificial Sequence
  Description of Artificial Sequence: Synthetic oligonucleotide
  Antisense Strand to SEQ ID NO: 376949
gaaccugggaaauucaggc

SEQ ID NO: 376951 - RNA, 19 nt, Artificial Sequence
  Description of Artificial Sequence: Synthetic oligonucleotide
  Sense Strand Starting at position 740 of SEQ ID NO: 316812
uucccagguucugacuaaa

SEQ ID NO: 376952 - RNA, 19 nt, Artificial Sequence
  Description of Artificial Sequence: Synthetic oligonucleotide
  Antisense Strand to SEQ ID NO: 376951
uuuagucagaaccugggaa

SEQ ID NO: 376953 - RNA, 19 nt, Artificial Sequence
  Description of Artificial Sequence: Synthetic oligonucleotide
  Sense Strand Starting at position 740 of SEQ ID NO: 316864
agaauauuaaguggagcau

SEQ ID NO: 376954 - RNA, 19 nt, Artificial Sequence
  Description of Artificial Sequence: Synthetic oligonucleotide
  Antisense Strand to SEQ ID NO: 376953
augcuccacuuaauauucu

SEQ ID NO: 376955 - RNA, 19 nt, Artificial Sequence
  Description of Artificial Sequence: Synthetic oligonucleotide
  Sense Strand Starting at position 740 of SEQ ID NO: 316883
gcauauuacugcuuuggca

SEQ ID NO: 376956 - RNA, 19 nt, Artificial Sequence
  Description of Artificial Sequence: Synthetic oligonucleotide
  Antisense Strand to SEQ ID NO: 376955
ugccaaagcaguaauaugc

SEQ ID NO: 376957 - RNA, 19 nt, Artificial Sequence
  Description of Artificial Sequence: Synthetic oligonucleotide
  Sense Strand Starting at position 740 of SEQ ID NO: 316885
auauuacugcuuuggcagu

SEQ ID NO: 376958 - RNA, 19 nt, Artificial Sequence
  Description of Artificial Sequence: Synthetic oligonucleotide
  Antisense Strand to SEQ ID NO: 376957
acugccaaagcaguaauau

SEQ ID NO: 376959 - RNA, 19 nt, Artificial Sequence
  Description of Artificial Sequence: Synthetic oligonucleotide
  Sense Strand Starting at position 740 of SEQ ID NO: 317201
cucgcuguuaaccgucaaa

SEQ ID NO: 376960 - RNA, 19 nt, Artificial Sequence
  Description of Artificial Sequence: Synthetic oligonucleotide
  Antisense Strand to SEQ ID NO: 376959
uuugacgguuaacagcgag

SEQ ID NO: 376961 - RNA, 19 nt, Artificial Sequence
  Description of Artificial Sequence: Synthetic oligonucleotide
  Sense Strand Starting at position 740 of SEQ ID NO: 317224
caaagcauuuguggaggaa

SEQ ID NO: 376962 - RNA, 19 nt, Artificial Sequence
  Description of Artificial Sequence: Synthetic oligonucleotide
  Antisense Strand to SEQ ID NO: 376961
uuccuccacaaaugcuuug

SEQ ID NO: 376963 - RNA, 19 nt, Artificial Sequence
  Description of Artificial Sequence: Synthetic oligonucleotide
  Sense Strand Starting at position 740 of SEQ ID NO: 317414
gcggcaaagguuuaagaaa

SEQ ID NO: 376964 - RNA, 19 nt, Artificial Sequence
  Description of Artificial Sequence: Synthetic oligonucleotide
  Antisense Strand to SEQ ID NO: 376963
uuucuuaaaccuuugccgc

SEQ ID NO: 376965 - RNA, 19 nt, Artificial Sequence
  Description of Artificial Sequence: Synthetic oligonucleotide
  Sense Strand Starting at position 740 of SEQ ID NO: 317531
ugcacaaagcgguaugaaa

SEQ ID NO: 376966 - RNA, 19 nt, Artificial Sequence
  Description of Artificial Sequence: Synthetic oligonucleotide
  Antisense Strand to SEQ ID NO: 376965
uuucauaccgcuuugugca

SEQ ID NO: 376967 - RNA, 19 nt, Artificial Sequence
  Description of Artificial Sequence: Synthetic oligonucleotide
  Sense Strand Starting at position 740 of SEQ ID NO: 317755
aagggacugucggaaguaa

SEQ ID NO: 376968 - RNA, 19 nt, Artificial Sequence
  Description of Artificial Sequence: Synthetic oligonucleotide
  Antisense Strand to SEQ ID NO: 376967
uuacuuccgacagucccuu

SEQ ID NO: 376969 - RNA, 19 nt, Artificial Sequence
  Description of Artificial Sequence: Synthetic oligonucleotide
  Sense Strand Starting at position 740 of SEQ ID NO: 317772
aaggcaagagccuguuaau

SEQ ID NO: 376970 - RNA, 19 nt, Artificial Sequence
  Description of Artificial Sequence: Synthetic oligonucleotide
  Antisense Strand to SEQ ID NO: 376969
auuaacaggcucuugccuu

SEQ ID NO: 376971 - RNA, 19 nt, Artificial Sequence
  Description of Artificial Sequence: Synthetic oligonucleotide
  Sense Strand Starting at position 740 of SEQ ID NO: 317783
cuguuaaucucaguaaacg

SEQ ID NO: 376972 - RNA, 19 nt, Artificial Sequence
  Description of Artificial Sequence: Synthetic oligonucleotide
  Antisense Strand to SEQ ID NO: 376971
cguuuacugagauuaacag

SEQ ID NO: 376973 - RNA, 19 nt, Artificial Sequence
  Description of Artificial Sequence: Synthetic oligonucleotide
  Sense Strand Starting at position 740 of SEQ ID NO: 317835
ggcggcucgcggaaaugua

SEQ ID NO: 376974 - RNA, 19 nt, Artificial Sequence
  Description of Artificial Sequence: Synthetic oligonucleotide
  Antisense Strand to SEQ ID NO: 376973
uacauuuccgcgagccgcc

SEQ ID NO: 376975 - RNA, 19 nt, Artificial Sequence
  Description of Artificial Sequence: Synthetic oligonucleotide
  Sense Strand Starting at position 740 of SEQ ID NO: 317850
uguagagagcaguagcauu

SEQ ID NO: 376976 - RNA, 19 nt, Artificial Sequence
  Description of Artificial Sequence: Synthetic oligonucleotide
  Antisense Strand to SEQ ID NO: 376975
aaugcuacugcucucuaca

SEQ ID NO: 376977 - RNA, 19 nt, Artificial Sequence
  Description of Artificial Sequence: Synthetic oligonucleotide
  Sense Strand Starting at position 740 of SEQ ID NO: 317966
ugcaacaauucggaagaaa

SEQ ID NO: 376978 - RNA, 19 nt, Artificial Sequence
  Description of Artificial Sequence: Synthetic oligonucleotide
  Antisense Strand to SEQ ID NO: 376977
uuucuuccgaauuguugca

SEQ ID NO: 376979 - RNA, 19 nt, Artificial Sequence
  Description of Artificial Sequence: Synthetic oligonucleotide
  Sense Strand Starting at position 740 of SEQ ID NO: 318111
gagagaaaccagcguucga

SEQ ID NO: 376980 - RNA, 19 nt, Artificial Sequence
  Description of Artificial Sequence: Synthetic oligonucleotide
  Antisense Strand to SEQ ID NO: 376979
ucgaacgcugguuucucuc

SEQ ID NO: 376981 - RNA, 19 nt, Artificial Sequence
  Description of Artificial Sequence: Synthetic oligonucleotide
  Sense Strand Starting at position 741 of SEQ ID NO: 315239
uuaaguaccugucuugcaa

SEQ ID NO: 376982 - RNA, 19 nt, Artificial Sequence
  Description of Artificial Sequence: Synthetic oligonucleotide
  Antisense Strand to SEQ ID NO: 376981
uugcaagacagguacuuaa

SEQ ID NO: 376983 - RNA, 19 nt, Artificial Sequence
  Description of Artificial Sequence: Synthetic oligonucleotide
  Sense Strand Starting at position 741 of SEQ ID NO: 315416
accuuaacgugccugaauu

SEQ ID NO: 376984 - RNA, 19 nt, Artificial Sequence
  Description of Artificial Sequence: Synthetic oligonucleotide
  Antisense Strand to SEQ ID NO: 376983
aauucaggcacguuaaggu

SEQ ID NO: 376985 - RNA, 19 nt, Artificial Sequence
  Description of Artificial Sequence: Synthetic oligonucleotide
  Sense Strand Starting at position 741 of SEQ ID NO: 315417
ccuuaacgugccugaauuu

SEQ ID NO: 376986 - RNA, 19 nt, Artificial Sequence
  Description of Artificial Sequence: Synthetic oligonucleotide
  Antisense Strand to SEQ ID NO: 376985
aaauucaggcacguuaagg

SEQ ID NO: 376987 - RNA, 19 nt, Artificial Sequence
  Description of Artificial Sequence: Synthetic oligonucleotide
  Sense Strand Starting at position 741 of SEQ ID NO: 315486
agaauauuaaguggagcau

SEQ ID NO: 376988 - RNA, 19 nt, Artificial Sequence
  Description of Artificial Sequence: Synthetic oligonucleotide
  Antisense Strand to SEQ ID NO: 376987
augcuccacuuaauauucu

SEQ ID NO: 376989 - RNA, 19 nt, Artificial Sequence
  Description of Artificial Sequence: Synthetic oligonucleotide
  Sense Strand Starting at position 741 of SEQ ID NO: 315507
auauuacugcuuuggcagu

SEQ ID NO: 376990 - RNA, 19 nt, Artificial Sequence
  Description of Artificial Sequence: Synthetic oligonucleotide
  Antisense Strand to SEQ ID NO: 376989
acugccaaagcaguaauau

SEQ ID NO: 376991 - RNA, 19 nt, Artificial Sequence
  Description of Artificial Sequence: Synthetic oligonucleotide
  Sense Strand Starting at position 741 of SEQ ID NO: 315846
caaagcauuuguggaggaa

SEQ ID NO: 376992 - RNA, 19 nt, Artificial Sequence
  Description of Artificial Sequence: Synthetic oligonucleotide
  Antisense Strand to SEQ ID NO: 376991
uuccuccacaaaugcuuug

SEQ ID NO: 376993 - RNA, 19 nt, Artificial Sequence
  Description of Artificial Sequence: Synthetic oligonucleotide
  Sense Strand Starting at position 741 of SEQ ID NO: 316036
gcggcaaagguuuaagaaa

SEQ ID NO: 376994 - RNA, 19 nt, Artificial Sequence
  Description of Artificial Sequence: Synthetic oligonucleotide
  Antisense Strand to SEQ ID NO: 376993
uuucuuaaaccuuugccgc

SEQ ID NO: 376995 - RNA, 19 nt, Artificial Sequence
  Description of Artificial Sequence: Synthetic oligonucleotide
  Sense Strand Starting at position 741 of SEQ ID NO: 316153
ugcacaaagcgguaugaaa

SEQ ID NO: 376996 - RNA, 19 nt, Artificial Sequence
  Description of Artificial Sequence: Synthetic oligonucleotide
  Antisense Strand to SEQ ID NO: 376995
uuucauaccgcuuugugca

SEQ ID NO: 376997 - RNA, 19 nt, Artificial Sequence
  Description of Artificial Sequence: Synthetic oligonucleotide
  Sense Strand Starting at position 741 of SEQ ID NO: 316394
aaggcaagagccuguuaau

SEQ ID NO: 376998 - RNA, 19 nt, Artificial Sequence
  Description of Artificial Sequence: Synthetic oligonucleotide
  Antisense Strand to SEQ ID NO: 376997
auuaacaggcucuugccuu

SEQ ID NO: 376999 - RNA, 19 nt, Artificial Sequence
  Description of Artificial Sequence: Synthetic oligonucleotide
  Sense Strand Starting at position 741 of SEQ ID NO: 316405
cuguuaaucucaguaaacg

SEQ ID NO: 377000 - RNA, 19 nt, Artificial Sequence
  Description of Artificial Sequence: Synthetic oligonucleotide
  Antisense Strand to SEQ ID NO: 376999
cguuuacugagauuaacag

SEQ ID NO: 377001 - RNA, 19 nt, Artificial Sequence
  Description of Artificial Sequence: Synthetic oligonucleotide
  Sense Strand Starting at position 741 of SEQ ID NO: 316457
ggcggcucgcggaaaugua

SEQ ID NO: 377002 - RNA, 19 nt, Artificial Sequence
  Description of Artificial Sequence: Synthetic oligonucleotide
  Antisense Strand to SEQ ID NO: 377001
uacauuuccgcgagccgcc

SEQ ID NO: 377003 - RNA, 19 nt, Artificial Sequence
  Description of Artificial Sequence: Synthetic oligonucleotide
  Sense Strand Starting at position 741 of SEQ ID NO: 316472
uguagagagcaguagcauu

SEQ ID NO: 377004 - RNA, 19 nt, Artificial Sequence
  Description of Artificial Sequence: Synthetic oligonucleotide
  Antisense Strand to SEQ ID NO: 377003
aaugcuacugcucucuaca

SEQ ID NO: 377005 - RNA, 19 nt, Artificial Sequence
  Description of Artificial Sequence: Synthetic oligonucleotide
  Sense Strand Starting at position 741 of SEQ ID NO: 316733
gagagaaaccagcguucga

SEQ ID NO: 377006 - RNA, 19 nt, Artificial Sequence
  Description of Artificial Sequence: Synthetic oligonucleotide
  Antisense Strand to SEQ ID NO: 377005
ucgaacgcugguuucucuc

SEQ ID NO: 377007 - RNA, 19 nt, Artificial Sequence
  Description of Artificial Sequence: Synthetic oligonucleotide
  Sense Strand Starting at position 741 of SEQ ID NO: 318083
gugggcuguggugaaacau

SEQ ID NO: 377008 - RNA, 19 nt, Artificial Sequence
  Description of Artificial Sequence: Synthetic oligonucleotide
  Antisense Strand to SEQ ID NO: 377007
auguuucaccacagcccac

SEQ ID NO: 377009 - RNA, 19 nt, Artificial Sequence
  Description of Artificial Sequence: Synthetic oligonucleotide
  Sense Strand Starting at position 741 of SEQ ID NO: 318092
ggugaaacauucguuagcu

SEQ ID NO: 377010 - RNA, 19 nt, Artificial Sequence
  Description of Artificial Sequence: Synthetic oligonucleotide
  Antisense Strand to SEQ ID NO: 377009
agcuaacgaauguuucacc

SEQ ID NO: 377011 - RNA, 19 nt, Artificial Sequence
  Description of Artificial Sequence: Synthetic oligonucleotide
  Sense Strand Starting at position 741 of SEQ ID NO: 318093
gugaaacauucguuagcug

SEQ ID NO: 377012 - RNA, 19 nt, Artificial Sequence
  Description of Artificial Sequence: Synthetic oligonucleotide
  Antisense Strand to SEQ ID NO: 377011
cagcuaacgaauguuucac

SEQ ID NO: 377013 - RNA, 19 nt, Artificial Sequence
  Description of Artificial Sequence: Synthetic oligonucleotide
  Sense Strand Starting at position 741 of SEQ ID NO: 318136
gcaggcuucccgcauuaca

SEQ ID NO: 377014 - RNA, 19 nt, Artificial Sequence
  Description of Artificial Sequence: Synthetic oligonucleotide
  Antisense Strand to SEQ ID NO: 377013
uguaaugcgggaagccugc

SEQ ID NO: 377015 - RNA, 19 nt, Artificial Sequence
  Description of Artificial Sequence: Synthetic oligonucleotide
  Sense Strand Starting at position 741 of SEQ ID NO: 318624
ccgagcucucaccggaaca

SEQ ID NO: 377016 - RNA, 19 nt, Artificial Sequence
  Description of Artificial Sequence: Synthetic oligonucleotide
  Antisense Strand to SEQ ID NO: 377015
uguuccggugagagcucgg

SEQ ID NO: 377017 - RNA, 19 nt, Artificial Sequence
  Description of Artificial Sequence: Synthetic oligonucleotide
  Sense Strand Starting at position 741 of SEQ ID NO: 318626
gagcucucaccggaacaga

SEQ ID NO: 377018 - RNA, 19 nt, Artificial Sequence
  Description of Artificial Sequence: Synthetic oligonucleotide
  Antisense Strand to SEQ ID NO: 377017
ucuguuccggugagagcuc

SEQ ID NO: 377019 - RNA, 19 nt, Artificial Sequence
  Description of Artificial Sequence: Synthetic oligonucleotide
  Sense Strand Starting at position 741 of SEQ ID NO: 318711
ccuagcucuucugugugaa

SEQ ID NO: 377020 - RNA, 19 nt, Artificial Sequence
  Description of Artificial Sequence: Synthetic oligonucleotide
  Antisense Strand to SEQ ID NO: 377019
uucacacagaagagcuagg

SEQ ID NO: 377021 - RNA, 19 nt, Artificial Sequence
  Description of Artificial Sequence: Synthetic oligonucleotide
  Sense Strand Starting at position 741 of SEQ ID NO: 318713
uagcucuucugugugaaca

SEQ ID NO: 377022 - RNA, 19 nt, Artificial Sequence
  Description of Artificial Sequence: Synthetic oligonucleotide
  Antisense Strand to SEQ ID NO: 377021
uguucacacagaagagcua

SEQ ID NO: 377023 - RNA, 19 nt, Artificial Sequence
  Description of Artificial Sequence: Synthetic oligonucleotide
  Sense Strand Starting at position 741 of SEQ ID NO: 318714
agcucuucugugugaacag

SEQ ID NO: 377024 - RNA, 19 nt, Artificial Sequence
  Description of Artificial Sequence: Synthetic oligonucleotide
  Antisense Strand to SEQ ID NO: 377023
cuguucacacagaagagcu

SEQ ID NO: 377025 - RNA, 19 nt, Artificial Sequence
  Description of Artificial Sequence: Synthetic oligonucleotide
  Sense Strand Starting at position 741 of SEQ ID NO: 318725
gugaacagaugucuugaag

SEQ ID NO: 377026 - RNA, 19 nt, Artificial Sequence
  Description of Artificial Sequence: Synthetic oligonucleotide
  Antisense Strand to SEQ ID NO: 377025
cuucaagacaucuguucac

SEQ ID NO: 377027 - RNA, 19 nt, Artificial Sequence
  Description of Artificial Sequence: Synthetic oligonucleotide
  Sense Strand Starting at position 741 of SEQ ID NO: 318734
ugucuugaagaaugcguga

SEQ ID NO: 377028 - RNA, 19 nt, Artificial Sequence
  Description of Artificial Sequence: Synthetic oligonucleotide
  Antisense Strand to SEQ ID NO: 377027
ucacgcauucuucaagaca

SEQ ID NO: 377029 - RNA, 19 nt, Artificial Sequence
  Description of Artificial Sequence: Synthetic oligonucleotide
  Sense Strand Starting at position 741 of SEQ ID NO: 318736
ucuugaagaaugcgugauc

SEQ ID NO: 377030 - RNA, 19 nt, Artificial Sequence
  Description of Artificial Sequence: Synthetic oligonucleotide
  Antisense Strand to SEQ ID NO: 377029
gaucacgcauucuucaaga

SEQ ID NO: 377031 - RNA, 19 nt, Artificial Sequence
  Description of Artificial Sequence: Synthetic oligonucleotide
  Sense Strand Starting at position 741 of SEQ ID NO: 318739
ugaagaaugcgugaucuug

SEQ ID NO: 377032 - RNA, 19 nt, Artificial Sequence
  Description of Artificial Sequence: Synthetic oligonucleotide
  Antisense Strand to SEQ ID NO: 377031
caagaucacgcauucuuca

SEQ ID NO: 377033 - RNA, 19 nt, Artificial Sequence
  Description of Artificial Sequence: Synthetic oligonucleotide
  Sense Strand Starting at position 741 of SEQ ID NO: 318749
gugaucuugcucuagaaca

SEQ ID NO: 377034 - RNA, 19 nt, Artificial Sequence
  Description of Artificial Sequence: Synthetic oligonucleotide
  Antisense Strand to SEQ ID NO: 377033
uguucuagagcaagaucac

SEQ ID NO: 377035 - RNA, 19 nt, Artificial Sequence
  Description of Artificial Sequence: Synthetic oligonucleotide
  Sense Strand Starting at position 741 of SEQ ID NO: 318943
ggaagcauuucuuaucucu

SEQ ID NO: 377036 - RNA, 19 nt, Artificial Sequence
  Description of Artificial Sequence: Synthetic oligonucleotide
  Antisense Strand to SEQ ID NO: 377035
agagauaagaaaugcuucc

SEQ ID NO: 377037 - RNA, 19 nt, Artificial Sequence
  Description of Artificial Sequence: Synthetic oligonucleotide
  Sense Strand Starting at position 741 of SEQ ID NO: 318946
agcauuucuuaucucugua

SEQ ID NO: 377038 - RNA, 19 nt, Artificial Sequence
  Description of Artificial Sequence: Synthetic oligonucleotide
  Antisense Strand to SEQ ID NO: 377037
uacagagauaagaaaugcu

SEQ ID NO: 377039 - RNA, 19 nt, Artificial Sequence
  Description of Artificial Sequence: Synthetic oligonucleotide
  Sense Strand Starting at position 741 of SEQ ID NO: 319001
guagguacucuauacguuu

SEQ ID NO: 377040 - RNA, 19 nt, Artificial Sequence
  Description of Artificial Sequence: Synthetic oligonucleotide
  Antisense Strand to SEQ ID NO: 377039
aaacguauagaguaccuac

SEQ ID NO: 377041 - RNA, 19 nt, Artificial Sequence
  Description of Artificial Sequence: Synthetic oligonucleotide
  Sense Strand Starting at position 741 of SEQ ID NO: 319007
acucuauacguuugcaaag

SEQ ID NO: 377042 - RNA, 19 nt, Artificial Sequence
  Description of Artificial Sequence: Synthetic oligonucleotide
  Antisense Strand to SEQ ID NO: 377041
cuuugcaaacguauagagu

SEQ ID NO: 377043 - RNA, 19 nt, Artificial Sequence
  Description of Artificial Sequence: Synthetic oligonucleotide
  Sense Strand Starting at position 741 of SEQ ID NO: 319029
aaauuaugaugcguguaaa

SEQ ID NO: 377044 - RNA, 19 nt, Artificial Sequence
  Description of Artificial Sequence: Synthetic oligonucleotide
  Antisense Strand to SEQ ID NO: 377043
uuuacacgcaucauaauuu

SEQ ID NO: 377045 - RNA, 19 nt, Artificial Sequence
  Description of Artificial Sequence: Synthetic oligonucleotide
  Sense Strand Starting at position 741 of SEQ ID NO: 319030
aauuaugaugcguguaaau

SEQ ID NO: 377046 - RNA, 19 nt, Artificial Sequence
  Description of Artificial Sequence: Synthetic oligonucleotide
  Antisense Strand to SEQ ID NO: 377045
auuuacacgcaucauaauu

SEQ ID NO: 377047 - RNA, 19 nt, Artificial Sequence
  Description of Artificial Sequence: Synthetic oligonucleotide
  Sense Strand Starting at position 741 of SEQ ID NO: 319032
uuaugaugcguguaaaucu

SEQ ID NO: 377048 - RNA, 19 nt, Artificial Sequence
  Description of Artificial Sequence: Synthetic oligonucleotide
  Antisense Strand to SEQ ID NO: 377047
agauuuacacgcaucauaa

SEQ ID NO: 377049 - RNA, 19 nt, Artificial Sequence
  Description of Artificial Sequence: Synthetic oligonucleotide
  Sense Strand Starting at position 741 of SEQ ID NO: 319048
ucuauuguggcacauguua

SEQ ID NO: 377050 - RNA, 19 nt, Artificial Sequence
  Description of Artificial Sequence: Synthetic oligonucleotide
  Antisense Strand to SEQ ID NO: 377049
uaacaugugccacaauaga

SEQ ID NO: 377051 - RNA, 19 nt, Artificial Sequence
  Description of Artificial Sequence: Synthetic oligonucleotide
  Sense Strand Starting at position 741 of SEQ ID NO: 319082
acguauauggaacauguaa

SEQ ID NO: 377052 - RNA, 19 nt, Artificial Sequence
  Description of Artificial Sequence: Synthetic oligonucleotide
  Antisense Strand to SEQ ID NO: 377051
uuacauguuccauauacgu

SEQ ID NO: 377053 - RNA, 19 nt, Artificial Sequence
  Description of Artificial Sequence: Synthetic oligonucleotide
  Sense Strand Starting at position 741 of SEQ ID NO: 319090
ggaacauguaaauguggua

SEQ ID NO: 377054 - RNA, 19 nt, Artificial Sequence
  Description of Artificial Sequence: Synthetic oligonucleotide
  Antisense Strand to SEQ ID NO: 377053
uaccacauuuacauguucc

SEQ ID NO: 377055 - RNA, 19 nt, Artificial Sequence
  Description of Artificial Sequence: Synthetic oligonucleotide
  Sense Strand Starting at position 741 of SEQ ID NO: 319103
gugguacguguuaguuaca

SEQ ID NO: 377056 - RNA, 19 nt, Artificial Sequence
  Description of Artificial Sequence: Synthetic oligonucleotide
  Antisense Strand to SEQ ID NO: 377055
uguaacuaacacguaccac

SEQ ID NO: 377057 - RNA, 19 nt, Artificial Sequence
  Description of Artificial Sequence: Synthetic oligonucleotide
  Sense Strand Starting at position 741 of SEQ ID NO: 319142
aggaauaguuaagauauca

SEQ ID NO: 377058 - RNA, 19 nt, Artificial Sequence
  Description of Artificial Sequence: Synthetic oligonucleotide
  Antisense Strand to SEQ ID NO: 377057
ugauaucuuaacuauuccu

SEQ ID NO: 377059 - RNA, 19 nt, Artificial Sequence
  Description of Artificial Sequence: Synthetic oligonucleotide
  Sense Strand Starting at position 741 of SEQ ID NO: 319147
uaguuaagauaucaaggga

SEQ ID NO: 377060 - RNA, 19 nt, Artificial Sequence
  Description of Artificial Sequence: Synthetic oligonucleotide
  Antisense Strand to SEQ ID NO: 377059
ucccuugauaucuuaacua

SEQ ID NO: 377061 - RNA, 19 nt, Artificial Sequence
  Description of Artificial Sequence: Synthetic oligonucleotide
  Sense Strand Starting at position 742 of SEQ ID NO: 315836
uugugaucauuugggaacu

SEQ ID NO: 377062 - RNA, 19 nt, Artificial Sequence
  Description of Artificial Sequence: Synthetic oligonucleotide
  Antisense Strand to SEQ ID NO: 377061
aguucccaaaugaucacaa

SEQ ID NO: 377063 - RNA, 19 nt, Artificial Sequence
  Description of Artificial Sequence: Synthetic oligonucleotide
  Sense Strand Starting at position 742 of SEQ ID NO: 315837
ugugaucauuugggaacuu

SEQ ID NO: 377064 - RNA, 19 nt, Artificial Sequence
  Description of Artificial Sequence: Synthetic oligonucleotide
  Antisense Strand to SEQ ID NO: 377063
aaguucccaaaugaucaca

SEQ ID NO: 377065 - RNA, 19 nt, Artificial Sequence
  Description of Artificial Sequence: Synthetic oligonucleotide
  Sense Strand Starting at position 742 of SEQ ID NO: 315942
guacguagucugggagcaa

SEQ ID NO: 377066 - RNA, 19 nt, Artificial Sequence
  Description of Artificial Sequence: Synthetic oligonucleotide
  Antisense Strand to SEQ ID NO: 377065
uugcucccagacuacguac

SEQ ID NO: 377067 - RNA, 19 nt, Artificial Sequence
  Description of Artificial Sequence: Synthetic oligonucleotide
  Sense Strand Starting at position 742 of SEQ ID NO: 316612
cgggcucagaucuaacaca

SEQ ID NO: 377068 - RNA, 19 nt, Artificial Sequence
  Description of Artificial Sequence: Synthetic oligonucleotide
  Antisense Strand to SEQ ID NO: 377067
uguguuagaucugagcccg

SEQ ID NO: 377069 - RNA, 19 nt, Artificial Sequence
  Description of Artificial Sequence: Synthetic oligonucleotide
  Sense Strand Starting at position 742 of SEQ ID NO: 316775
aggcauaugcuagguuaga

SEQ ID NO: 377070 - RNA, 19 nt, Artificial Sequence
  Description of Artificial Sequence: Synthetic oligonucleotide
  Antisense Strand to SEQ ID NO: 377069
ucuaaccuagcauaugccu

SEQ ID NO: 377071 - RNA, 19 nt, Artificial Sequence
  Description of Artificial Sequence: Synthetic oligonucleotide
  Sense Strand Starting at position 742 of SEQ ID NO: 316776
ggcauaugcuagguuagag

SEQ ID NO: 377072 - RNA, 19 nt, Artificial Sequence
  Description of Artificial Sequence: Synthetic oligonucleotide
  Antisense Strand to SEQ ID NO: 377071
cucuaaccuagcauaugcc

SEQ ID NO: 377073 - RNA, 19 nt, Artificial Sequence
  Description of Artificial Sequence: Synthetic oligonucleotide
  Sense Strand Starting at position 742 of SEQ ID NO: 316894
cuaagugggcaaugucuau

SEQ ID NO: 377074 - RNA, 19 nt, Artificial Sequence
  Description of Artificial Sequence: Synthetic oligonucleotide
  Antisense Strand to SEQ ID NO: 377073
auagacauugcccacuuag

SEQ ID NO: 377075 - RNA, 19 nt, Artificial Sequence
  Description of Artificial Sequence: Synthetic oligonucleotide
  Sense Strand Starting at position 742 of SEQ ID NO: 316900
gggcaaugucuauguguuc

SEQ ID NO: 377076 - RNA, 19 nt, Artificial Sequence
  Description of Artificial Sequence: Synthetic oligonucleotide
  Antisense Strand to SEQ ID NO: 377075
gaacacauagacauugccc

SEQ ID NO: 377077 - RNA, 19 nt, Artificial Sequence
  Description of Artificial Sequence: Synthetic oligonucleotide
  Sense Strand Starting at position 742 of SEQ ID NO: 317287
ucccauaggucaguugcaa

SEQ ID NO: 377078 - RNA, 19 nt, Artificial Sequence
  Description of Artificial Sequence: Synthetic oligonucleotide
  Antisense Strand to SEQ ID NO: 377077
uugcaacugaccuauggga

SEQ ID NO: 377079 - RNA, 19 nt, Artificial Sequence
  Description of Artificial Sequence: Synthetic oligonucleotide
  Sense Strand Starting at position 742 of SEQ ID NO: 317403
gcccaagggcauugugaaa

SEQ ID NO: 377080 - RNA, 19 nt, Artificial Sequence
  Description of Artificial Sequence: Synthetic oligonucleotide
  Antisense Strand to SEQ ID NO: 377079
uuucacaaugcccuugggc

SEQ ID NO: 377081 - RNA, 19 nt, Artificial Sequence
  Description of Artificial Sequence: Synthetic oligonucleotide
  Sense Strand Starting at position 742 of SEQ ID NO: 317641
gugucaucccagggaaggu

SEQ ID NO: 377082 - RNA, 19 nt, Artificial Sequence
  Description of Artificial Sequence: Synthetic oligonucleotide
  Antisense Strand to SEQ ID NO: 377081
accuucccugggaugacac

SEQ ID NO: 377083 - RNA, 19 nt, Artificial Sequence
  Description of Artificial Sequence: Synthetic oligonucleotide
  Sense Strand Starting at position 742 of SEQ ID NO: 317794
agggauuccgguuagcaug

SEQ ID NO: 377084 - RNA, 19 nt, Artificial Sequence
  Description of Artificial Sequence: Synthetic oligonucleotide
  Antisense Strand to SEQ ID NO: 377083
caugcuaaccggaaucccu

SEQ ID NO: 377085 - RNA, 19 nt, Artificial Sequence
  Description of Artificial Sequence: Synthetic oligonucleotide
  Sense Strand Starting at position 742 of SEQ ID NO: 317875
ggccuuucggcgaagcuga

SEQ ID NO: 377086 - RNA, 19 nt, Artificial Sequence
  Description of Artificial Sequence: Synthetic oligonucleotide
  Antisense Strand to SEQ ID NO: 377085
ucagcuucgccgaaaggcc

SEQ ID NO: 377087 - RNA, 19 nt, Artificial Sequence
  Description of Artificial Sequence: Synthetic oligonucleotide
  Sense Strand Starting at position 742 of SEQ ID NO: 317987
gcaagcgugcgcgugauuu

SEQ ID NO: 377088 - RNA, 19 nt, Artificial Sequence
  Description of Artificial Sequence: Synthetic oligonucleotide
  Antisense Strand to SEQ ID NO: 377087
aaaucacgcgcacgcuugc

SEQ ID NO: 377089 - RNA, 19 nt, Artificial Sequence
  Description of Artificial Sequence: Synthetic oligonucleotide
  Sense Strand Starting at position 742 of SEQ ID NO: 318169
gcagggaucugggugcgaa

SEQ ID NO: 377090 - RNA, 19 nt, Artificial Sequence
  Description of Artificial Sequence: Synthetic oligonucleotide
  Antisense Strand to SEQ ID NO: 377089
uucgcacccagaucccugc

SEQ ID NO: 377091 - RNA, 19 nt, Artificial Sequence
  Description of Artificial Sequence: Synthetic oligonucleotide
  Sense Strand Starting at position 742 of SEQ ID NO: 318170
cagggaucugggugcgaaa

SEQ ID NO: 377092 - RNA, 19 nt, Artificial Sequence
  Description of Artificial Sequence: Synthetic oligonucleotide
  Antisense Strand to SEQ ID NO: 377091
uuucgcacccagaucccug

SEQ ID NO: 377093 - RNA, 19 nt, Artificial Sequence
  Description of Artificial Sequence: Synthetic oligonucleotide
  Sense Strand Starting at position 742 of SEQ ID NO: 318292
ggaguagguucaguucuga

SEQ ID NO: 377094 - RNA, 19 nt, Artificial Sequence
  Description of Artificial Sequence: Synthetic oligonucleotide
  Antisense Strand to SEQ ID NO: 377093
ucagaacugaaccuacucc

SEQ ID NO: 377095 - RNA, 19 nt, Artificial Sequence
  Description of Artificial Sequence: Synthetic oligonucleotide
  Sense Strand Starting at position 742 of SEQ ID NO: 318434
aaggucugcucaucaaaug

SEQ ID NO: 377096 - RNA, 19 nt, Artificial Sequence
  Description of Artificial Sequence: Synthetic oligonucleotide
  Antisense Strand to SEQ ID NO: 377095
cauuugaugagcagaccuu

SEQ ID NO: 377097 - RNA, 19 nt, Artificial Sequence
  Description of Artificial Sequence: Synthetic oligonucleotide
  Sense Strand Starting at position 742 of SEQ ID NO: 318435
aggucugcucaucaaauga

SEQ ID NO: 377098 - RNA, 19 nt, Artificial Sequence
  Description of Artificial Sequence: Synthetic oligonucleotide
  Antisense Strand to SEQ ID NO: 377097
ucauuugaugagcagaccu

SEQ ID NO: 377099 - RNA, 19 nt, Artificial Sequence
  Description of Artificial Sequence: Synthetic oligonucleotide
  Sense Strand Starting at position 742 of SEQ ID NO: 318446
ucaaaugaaugacugaguu

SEQ ID NO: 377100 - RNA, 19 nt, Artificial Sequence
  Description of Artificial Sequence: Synthetic oligonucleotide
  Antisense Strand to SEQ ID NO: 377099
aacucagucauucauuuga

SEQ ID NO: 377101 - RNA, 19 nt, Artificial Sequence
  Description of Artificial Sequence: Synthetic oligonucleotide
  Sense Strand Starting at position 742 of SEQ ID NO: 318450
augaaugacugaguuuaau

SEQ ID NO: 377102 - RNA, 19 nt, Artificial Sequence
  Description of Artificial Sequence: Synthetic oligonucleotide
  Antisense Strand to SEQ ID NO: 377101
auuaaacucagucauucau

SEQ ID NO: 377103 - RNA, 19 nt, Artificial Sequence
  Description of Artificial Sequence: Synthetic oligonucleotide
  Sense Strand Starting at position 742 of SEQ ID NO: 318456
gacugaguuuaaucagauc

SEQ ID NO: 377104 - RNA, 19 nt, Artificial Sequence
  Description of Artificial Sequence: Synthetic oligonucleotide
  Antisense Strand to SEQ ID NO: 377103
gaucugauuaaacucaguc

SEQ ID NO: 377105 - RNA, 19 nt, Artificial Sequence
  Description of Artificial Sequence: Synthetic oligonucleotide
  Sense Strand Starting at position 742 of SEQ ID NO: 318459
ugaguuuaaucagaucuuc

SEQ ID NO: 377106 - RNA, 19 nt, Artificial Sequence
  Description of Artificial Sequence: Synthetic oligonucleotide
  Antisense Strand to SEQ ID NO: 377105
gaagaucugauuaaacuca

SEQ ID NO: 377107 - RNA, 19 nt, Artificial Sequence
  Description of Artificial Sequence: Synthetic oligonucleotide
  Sense Strand Starting at position 742 of SEQ ID NO: 318477
caacuacucugguagugaa

SEQ ID NO: 377108 - RNA, 19 nt, Artificial Sequence
  Description of Artificial Sequence: Synthetic oligonucleotide
  Antisense Strand to SEQ ID NO: 377107
uucacuaccagaguaguug

SEQ ID NO: 377109 - RNA, 19 nt, Artificial Sequence
  Description of Artificial Sequence: Synthetic oligonucleotide
  Sense Strand Starting at position 742 of SEQ ID NO: 318579
aggguuuguggcgggagua

SEQ ID NO: 377110 - RNA, 19 nt, Artificial Sequence
  Description of Artificial Sequence: Synthetic oligonucleotide
  Antisense Strand to SEQ ID NO: 377109
uacucccgccacaaacccu

SEQ ID NO: 377111 - RNA, 19 nt, Artificial Sequence
  Description of Artificial Sequence: Synthetic oligonucleotide
  Sense Strand Starting at position 742 of SEQ ID NO: 318581
gguuuguggcgggaguaga

SEQ ID NO: 377112 - RNA, 19 nt, Artificial Sequence
  Description of Artificial Sequence: Synthetic oligonucleotide
  Antisense Strand to SEQ ID NO: 377111
ucuacucccgccacaaacc

SEQ ID NO: 377113 - RNA, 19 nt, Artificial Sequence
  Description of Artificial Sequence: Synthetic oligonucleotide
  Sense Strand Starting at position 742 of SEQ ID NO: 318682
accugcgcugucuaauaga

SEQ ID NO: 377114 - RNA, 19 nt, Artificial Sequence
  Description of Artificial Sequence: Synthetic oligonucleotide
  Antisense Strand to SEQ ID NO: 377113
ucuauuagacagcgcaggu

SEQ ID NO: 377115 - RNA, 19 nt, Artificial Sequence
  Description of Artificial Sequence: Synthetic oligonucleotide
  Sense Strand Starting at position 742 of SEQ ID NO: 318701
acuuuauaugaugguggga

SEQ ID NO: 377116 - RNA, 19 nt, Artificial Sequence
  Description of Artificial Sequence: Synthetic oligonucleotide
  Antisense Strand to SEQ ID NO: 377115
ucccaccaucauauaaagu

SEQ ID NO: 377117 - RNA, 19 nt, Artificial Sequence
  Description of Artificial Sequence: Synthetic oligonucleotide
  Sense Strand Starting at position 742 of SEQ ID NO: 318729
cuuugugcuguccaacaga

SEQ ID NO: 377118 - RNA, 19 nt, Artificial Sequence
  Description of Artificial Sequence: Synthetic oligonucleotide
  Antisense Strand to SEQ ID NO: 377117
ucuguuggacagcacaaag

SEQ ID NO: 377119 - RNA, 19 nt, Artificial Sequence
  Description of Artificial Sequence: Synthetic oligonucleotide
  Sense Strand Starting at position 742 of SEQ ID NO: 318732
ugugcuguccaacagagua

SEQ ID NO: 377120 - RNA, 19 nt, Artificial Sequence
  Description of Artificial Sequence: Synthetic oligonucleotide
  Antisense Strand to SEQ ID NO: 377119
uacucuguuggacagcaca

SEQ ID NO: 377121 - RNA, 19 nt, Artificial Sequence
  Description of Artificial Sequence: Synthetic oligonucleotide
  Sense Strand Starting at position 742 of SEQ ID NO: 318757
agccacauguggucauuga

SEQ ID NO: 377122 - RNA, 19 nt, Artificial Sequence
  Description of Artificial Sequence: Synthetic oligonucleotide
  Antisense Strand to SEQ ID NO: 377121
ucaaugaccacauguggcu

SEQ ID NO: 377123 - RNA, 19 nt, Artificial Sequence
  Description of Artificial Sequence: Synthetic oligonucleotide
  Sense Strand Starting at position 742 of SEQ ID NO: 318758
gccacauguggucauugaa

SEQ ID NO: 377124 - RNA, 19 nt, Artificial Sequence
  Description of Artificial Sequence: Synthetic oligonucleotide
  Antisense Strand to SEQ ID NO: 377123
uucaaugaccacauguggc

SEQ ID NO: 377125 - RNA, 19 nt, Artificial Sequence
  Description of Artificial Sequence: Synthetic oligonucleotide
  Sense Strand Starting at position 742 of SEQ ID NO: 318761
acauguggucauugaacuc

SEQ ID NO: 377126 - RNA, 19 nt, Artificial Sequence
  Description of Artificial Sequence: Synthetic oligonucleotide
  Antisense Strand to SEQ ID NO: 377125
gaguucaaugaccacaugu

SEQ ID NO: 377127 - RNA, 19 nt, Artificial Sequence
  Description of Artificial Sequence: Synthetic oligonucleotide
  Sense Strand Starting at position 742 of SEQ ID NO: 318789
ggcuaaggcaacugagaaa

SEQ ID NO: 377128 - RNA, 19 nt, Artificial Sequence
  Description of Artificial Sequence: Synthetic oligonucleotide
  Antisense Strand to SEQ ID NO: 377127
uuucucaguugccuuagcc

SEQ ID NO: 377129 - RNA, 19 nt, Artificial Sequence
  Description of Artificial Sequence: Synthetic oligonucleotide
  Sense Strand Starting at position 742 of SEQ ID NO: 318942
gcaacaugaugugagggau

SEQ ID NO: 377130 - RNA, 19 nt, Artificial Sequence
  Description of Artificial Sequence: Synthetic oligonucleotide
  Antisense Strand to SEQ ID NO: 377129
aucccucacaucauguugc

SEQ ID NO: 377131 - RNA, 19 nt, Artificial Sequence
  Description of Artificial Sequence: Synthetic oligonucleotide
  Sense Strand Starting at position 742 of SEQ ID NO: 319033
ccacaugugugagugggaa

SEQ ID NO: 377132 - RNA, 19 nt, Artificial Sequence
  Description of Artificial Sequence: Synthetic oligonucleotide
  Antisense Strand to SEQ ID NO: 377131
uucccacucacacaugugg

SEQ ID NO: 377133 - RNA, 19 nt, Artificial Sequence
  Description of Artificial Sequence: Synthetic oligonucleotide
  Sense Strand Starting at position 742 of SEQ ID NO: 319041
gugagugggaauggugaaa

SEQ ID NO: 377134 - RNA, 19 nt, Artificial Sequence
  Description of Artificial Sequence: Synthetic oligonucleotide
  Antisense Strand to SEQ ID NO: 377133
uuucaccauucccacucac

SEQ ID NO: 377135 - RNA, 19 nt, Artificial Sequence
  Description of Artificial Sequence: Synthetic oligonucleotide
  Sense Strand Starting at position 742 of SEQ ID NO: 319054
gugaaacuaucaggaccau

SEQ ID NO: 377136 - RNA, 19 nt, Artificial Sequence
  Description of Artificial Sequence: Synthetic oligonucleotide
  Antisense Strand to SEQ ID NO: 377135
augguccugauaguuucac

SEQ ID NO: 377137 - RNA, 19 nt, Artificial Sequence
  Description of Artificial Sequence: Synthetic oligonucleotide
  Sense Strand Starting at position 742 of SEQ ID NO: 319125
gggaguaagugggacuuau

SEQ ID NO: 377138 - RNA, 19 nt, Artificial Sequence
  Description of Artificial Sequence: Synthetic oligonucleotide
  Antisense Strand to SEQ ID NO: 377137
auaagucccacuuacuccc

SEQ ID NO: 377139 - RNA, 19 nt, Artificial Sequence
  Description of Artificial Sequence: Synthetic oligonucleotide
  Sense Strand Starting at position 742 of SEQ ID NO: 319134
ugggacuuauggcuagaga

SEQ ID NO: 377140 - RNA, 19 nt, Artificial Sequence
  Description of Artificial Sequence: Synthetic oligonucleotide
  Antisense Strand to SEQ ID NO: 377139
ucucuagccauaaguccca

SEQ ID NO: 377141 - RNA, 19 nt, Artificial Sequence
  Description of Artificial Sequence: Synthetic oligonucleotide
  Sense Strand Starting at position 743 of SEQ ID NO: 315239
agcugugagucugugaauc

SEQ ID NO: 377142 - RNA, 19 nt, Artificial Sequence
  Description of Artificial Sequence: Synthetic oligonucleotide
  Antisense Strand to SEQ ID NO: 377141
gauucacagacucacagcu

SEQ ID NO: 377143 - RNA, 19 nt, Artificial Sequence
  Description of Artificial Sequence: Synthetic oligonucleotide
  Sense Strand Starting at position 743 of SEQ ID NO: 315247
gucugugaaucugugagca

SEQ ID NO: 377144 - RNA, 19 nt, Artificial Sequence
  Description of Artificial Sequence: Synthetic oligonucleotide
  Antisense Strand to SEQ ID NO: 377143
ugcucacagauucacagac

SEQ ID NO: 377145 - RNA, 19 nt, Artificial Sequence
  Description of Artificial Sequence: Synthetic oligonucleotide
  Sense Strand Starting at position 743 of SEQ ID NO: 315249
cugugaaucugugagcauc

SEQ ID NO: 377146 - RNA, 19 nt, Artificial Sequence
  Description of Artificial Sequence: Synthetic oligonucleotide
  Antisense Strand to SEQ ID NO: 377145
gaugcucacagauucacag

SEQ ID NO: 377147 - RNA, 19 nt, Artificial Sequence
  Description of Artificial Sequence: Synthetic oligonucleotide
  Sense Strand Starting at position 743 of SEQ ID NO: 315259
gugagcaucucccugugua

SEQ ID NO: 377148 - RNA, 19 nt, Artificial Sequence
  Description of Artificial Sequence: Synthetic oligonucleotide
  Antisense Strand to SEQ ID NO: 377147
uacacagggagaugcucac

SEQ ID NO: 377149 - RNA, 19 nt, Artificial Sequence
  Description of Artificial Sequence: Synthetic oligonucleotide
  Sense Strand Starting at position 743 of SEQ ID NO: 315260
ugagcaucucccuguguau

SEQ ID NO: 377150 - RNA, 19 nt, Artificial Sequence
  Description of Artificial Sequence: Synthetic oligonucleotide
  Antisense Strand to SEQ ID NO: 377149
auacacagggagaugcuca

SEQ ID NO: 377151 - RNA, 19 nt, Artificial Sequence
  Description of Artificial Sequence: Synthetic oligonucleotide
  Sense Strand Starting at position 743 of SEQ ID NO: 315262
agcaucucccuguguauuu

SEQ ID NO: 377152 - RNA, 19 nt, Artificial Sequence
  Description of Artificial Sequence: Synthetic oligonucleotide
  Antisense Strand to SEQ ID NO: 377151
aaauacacagggagaugcu

SEQ ID NO: 377153 - RNA, 19 nt, Artificial Sequence
  Description of Artificial Sequence: Synthetic oligonucleotide
  Sense Strand Starting at position 743 of SEQ ID NO: 315340
cugcgugugucccugagga

SEQ ID NO: 377154 - RNA, 19 nt, Artificial Sequence
  Description of Artificial Sequence: Synthetic oligonucleotide
  Antisense Strand to SEQ ID NO: 377153
uccucagggacacacgcag

SEQ ID NO: 377155 - RNA, 19 nt, Artificial Sequence
  Description of Artificial Sequence: Synthetic oligonucleotide
  Sense Strand Starting at position 743 of SEQ ID NO: 315342
gcgugugucccugaggaua

SEQ ID NO: 377156 - RNA, 19 nt, Artificial Sequence
  Description of Artificial Sequence: Synthetic oligonucleotide
  Antisense Strand to SEQ ID NO: 377155
uauccucagggacacacgc

SEQ ID NO: 377157 - RNA, 19 nt, Artificial Sequence
  Description of Artificial Sequence: Synthetic oligonucleotide
  Sense Strand Starting at position 743 of SEQ ID NO: 315356
ggauaugggugguggacaa

SEQ ID NO: 377158 - RNA, 19 nt, Artificial Sequence
  Description of Artificial Sequence: Synthetic oligonucleotide
  Antisense Strand to SEQ ID NO: 377157
uuguccaccacccauaucc

SEQ ID NO: 377159 - RNA, 19 nt, Artificial Sequence
  Description of Artificial Sequence: Synthetic oligonucleotide
  Sense Strand Starting at position 743 of SEQ ID NO: 315381
gggaaugcccaucauucua

SEQ ID NO: 377160 - RNA, 19 nt, Artificial Sequence
  Description of Artificial Sequence: Synthetic oligonucleotide
  Antisense Strand to SEQ ID NO: 377159
uagaaugaugggcauuccc

SEQ ID NO: 377161 - RNA, 19 nt, Artificial Sequence
  Description of Artificial Sequence: Synthetic oligonucleotide
  Sense Strand Starting at position 743 of SEQ ID NO: 315412
gagcuaugcuaacagagac

SEQ ID NO: 377162 - RNA, 19 nt, Artificial Sequence
  Description of Artificial Sequence: Synthetic oligonucleotide
  Antisense Strand to SEQ ID NO: 377161
gucucuguuagcauagcuc

SEQ ID NO: 377163 - RNA, 19 nt, Artificial Sequence
  Description of Artificial Sequence: Synthetic oligonucleotide
  Sense Strand Starting at position 743 of SEQ ID NO: 315424
cagagacacgguuauguaa

SEQ ID NO: 377164 - RNA, 19 nt, Artificial Sequence
  Description of Artificial Sequence: Synthetic oligonucleotide
  Antisense Strand to SEQ ID NO: 377163
uuacauaaccgugucucug

SEQ ID NO: 377165 - RNA, 19 nt, Artificial Sequence
  Description of Artificial Sequence: Synthetic oligonucleotide
  Sense Strand Starting at position 743 of SEQ ID NO: 315544
gagcuaagccuccagugua

SEQ ID NO: 377166 - RNA, 19 nt, Artificial Sequence
  Description of Artificial Sequence: Synthetic oligonucleotide
  Antisense Strand to SEQ ID NO: 377165
uacacuggaggcuuagcuc

SEQ ID NO: 377167 - RNA, 19 nt, Artificial Sequence
  Description of Artificial Sequence: Synthetic oligonucleotide
  Sense Strand Starting at position 743 of SEQ ID NO: 316061
ggagcaaaucugcagucga

SEQ ID NO: 377168 - RNA, 19 nt, Artificial Sequence
  Description of Artificial Sequence: Synthetic oligonucleotide
  Antisense Strand to SEQ ID NO: 377167
ucgacugcagauuugcucc

SEQ ID NO: 377169 - RNA, 19 nt, Artificial Sequence
  Description of Artificial Sequence: Synthetic oligonucleotide
  Sense Strand Starting at position 743 of SEQ ID NO: 316148
gcacuaggaucaucuguca

SEQ ID NO: 377170 - RNA, 19 nt, Artificial Sequence
  Description of Artificial Sequence: Synthetic oligonucleotide
  Antisense Strand to SEQ ID NO: 377169
ugacagaugauccuagugc

SEQ ID NO: 377171 - RNA, 19 nt, Artificial Sequence
  Description of Artificial Sequence: Synthetic oligonucleotide
  Sense Strand Starting at position 743 of SEQ ID NO: 316177
cuguacagucaggaaguau

SEQ ID NO: 377172 - RNA, 19 nt, Artificial Sequence
  Description of Artificial Sequence: Synthetic oligonucleotide
  Antisense Strand to SEQ ID NO: 377171
auacuuccugacuguacag

SEQ ID NO: 377173 - RNA, 19 nt, Artificial Sequence
  Description of Artificial Sequence: Synthetic oligonucleotide
  Sense Strand Starting at position 743 of SEQ ID NO: 316229
ucaauacuguaggagacaa

SEQ ID NO: 377174 - RNA, 19 nt, Artificial Sequence
  Description of Artificial Sequence: Synthetic oligonucleotide
  Antisense Strand to SEQ ID NO: 377173
uugucuccuacaguauuga

SEQ ID NO: 377175 - RNA, 19 nt, Artificial Sequence
  Description of Artificial Sequence: Synthetic oligonucleotide
  Sense Strand Starting at position 743 of SEQ ID NO: 316305
ccuugagacgccugauaga

SEQ ID NO: 377176 - RNA, 19 nt, Artificial Sequence
  Description of Artificial Sequence: Synthetic oligonucleotide
  Antisense Strand to SEQ ID NO: 377175
ucuaucaggcgucucaagg

SEQ ID NO: 377177 - RNA, 19 nt, Artificial Sequence
  Description of Artificial Sequence: Synthetic oligonucleotide
  Sense Strand Starting at position 743 of SEQ ID NO: 316354
ggcugcguccagugaggau

SEQ ID NO: 377178 - RNA, 19 nt, Artificial Sequence
  Description of Artificial Sequence: Synthetic oligonucleotide
  Antisense Strand to SEQ ID NO: 377177
auccucacuggacgcagcc

SEQ ID NO: 377179 - RNA, 19 nt, Artificial Sequence
  Description of Artificial Sequence: Synthetic oligonucleotide
  Sense Strand Starting at position 743 of SEQ ID NO: 316367
gaggaugccacguagaaau

SEQ ID NO: 377180 - RNA, 19 nt, Artificial Sequence
  Description of Artificial Sequence: Synthetic oligonucleotide
  Antisense Strand to SEQ ID NO: 377179
auuucuacguggcauccuc

SEQ ID NO: 377181 - RNA, 19 nt, Artificial Sequence
  Description of Artificial Sequence: Synthetic oligonucleotide
  Sense Strand Starting at position 743 of SEQ ID NO: 316450
gcagucaucgggccgguua

SEQ ID NO: 377182 - RNA, 19 nt, Artificial Sequence
  Description of Artificial Sequence: Synthetic oligonucleotide
  Antisense Strand to SEQ ID NO: 377181
uaaccggcccgaugacugc

SEQ ID NO: 377183 - RNA, 19 nt, Artificial Sequence
  Description of Artificial Sequence: Synthetic oligonucleotide
  Sense Strand Starting at position 743 of SEQ ID NO: 316451
cagucaucgggccgguuau

SEQ ID NO: 377184 - RNA, 19 nt, Artificial Sequence
  Description of Artificial Sequence: Synthetic oligonucleotide
  Antisense Strand to SEQ ID NO: 377183
auaaccggcccgaugacug

SEQ ID NO: 377185 - RNA, 19 nt, Artificial Sequence
  Description of Artificial Sequence: Synthetic oligonucleotide
  Sense Strand Starting at position 743 of SEQ ID NO: 316463
cgguuauggugggcugaga

SEQ ID NO: 377186 - RNA, 19 nt, Artificial Sequence
  Description of Artificial Sequence: Synthetic oligonucleotide
  Antisense Strand to SEQ ID NO: 377185
ucucagcccaccauaaccg

SEQ ID NO: 377187 - RNA, 19 nt, Artificial Sequence
  Description of Artificial Sequence: Synthetic oligonucleotide
  Sense Strand Starting at position 743 of SEQ ID NO: 316606
caccuuugugucuguguca

SEQ ID NO: 377188 - RNA, 19 nt, Artificial Sequence
  Description of Artificial Sequence: Synthetic oligonucleotide
  Antisense Strand to SEQ ID NO: 377187
ugacacagacacaaaggug

SEQ ID NO: 377189 - RNA, 19 nt, Artificial Sequence
  Description of Artificial Sequence: Synthetic oligonucleotide
  Sense Strand Starting at position 743 of SEQ ID NO: 316743
gauugcguauggcuacaaa

SEQ ID NO: 377190 - RNA, 19 nt, Artificial Sequence
  Description of Artificial Sequence: Synthetic oligonucleotide
  Antisense Strand to SEQ ID NO: 377189
uuuguagccauacgcaauc

SEQ ID NO: 377191 - RNA, 19 nt, Artificial Sequence
  Description of Artificial Sequence: Synthetic oligonucleotide
  Sense Strand Starting at position 743 of SEQ ID NO: 317630
ccaggauuguguggaagac

SEQ ID NO: 377192 - RNA, 19 nt, Artificial Sequence
  Description of Artificial Sequence: Synthetic oligonucleotide
  Antisense Strand to SEQ ID NO: 377191
gucuuccacacaauccugg

SEQ ID NO: 377193 - RNA, 19 nt, Artificial Sequence
  Description of Artificial Sequence: Synthetic oligonucleotide
  Sense Strand Starting at position 743 of SEQ ID NO: 317693
cacccuuugugggaaagga

SEQ ID NO: 377194 - RNA, 19 nt, Artificial Sequence
  Description of Artificial Sequence: Synthetic oligonucleotide
  Antisense Strand to SEQ ID NO: 377193
uccuuucccacaaagggug

SEQ ID NO: 377195 - RNA, 19 nt, Artificial Sequence
  Description of Artificial Sequence: Synthetic oligonucleotide
  Sense Strand Starting at position 743 of SEQ ID NO: 318041
ugugcuucuccugagcuau

SEQ ID NO: 377196 - RNA, 19 nt, Artificial Sequence
  Description of Artificial Sequence: Synthetic oligonucleotide
  Antisense Strand to SEQ ID NO: 377195
auagcucaggagaagcaca

SEQ ID NO: 377197 - RNA, 19 nt, Artificial Sequence
  Description of Artificial Sequence: Synthetic oligonucleotide
  Sense Strand Starting at position 743 of SEQ ID NO: 318043
ugcuucuccugagcuauca

SEQ ID NO: 377198 - RNA, 19 nt, Artificial Sequence
  Description of Artificial Sequence: Synthetic oligonucleotide
  Antisense Strand to SEQ ID NO: 377197
ugauagcucaggagaagca

SEQ ID NO: 377199 - RNA, 19 nt, Artificial Sequence
  Description of Artificial Sequence: Synthetic oligonucleotide
  Sense Strand Starting at position 743 of SEQ ID NO: 318052
ugagcuaucagcgacaaga

SEQ ID NO: 377200 - RNA, 19 nt, Artificial Sequence
  Description of Artificial Sequence: Synthetic oligonucleotide
  Antisense Strand to SEQ ID NO: 377199
ucuugucgcugauagcuca

SEQ ID NO: 377201 - RNA, 19 nt, Artificial Sequence
  Description of Artificial Sequence: Synthetic oligonucleotide
  Sense Strand Starting at position 743 of SEQ ID NO: 318065
acaagauggugucagagga

SEQ ID NO: 377202 - RNA, 19 nt, Artificial Sequence
  Description of Artificial Sequence: Synthetic oligonucleotide
  Antisense Strand to SEQ ID NO: 377201
uccucugacaccaucuugu

SEQ ID NO: 377203 - RNA, 19 nt, Artificial Sequence
  Description of Artificial Sequence: Synthetic oligonucleotide
  Sense Strand Starting at position 743 of SEQ ID NO: 318075
gucagaggaagguguguua

SEQ ID NO: 377204 - RNA, 19 nt, Artificial Sequence
  Description of Artificial Sequence: Synthetic oligonucleotide
  Antisense Strand to SEQ ID NO: 377203
uaacacaccuuccucugac

SEQ ID NO: 377205 - RNA, 19 nt, Artificial Sequence
  Description of Artificial Sequence: Synthetic oligonucleotide
  Sense Strand Starting at position 743 of SEQ ID NO: 318112
ccauaagggucuuaggaug

SEQ ID NO: 377206 - RNA, 19 nt, Artificial Sequence
  Description of Artificial Sequence: Synthetic oligonucleotide
  Antisense Strand to SEQ ID NO: 377205
cauccuaagacccuuaugg

SEQ ID NO: 377207 - RNA, 19 nt, Artificial Sequence
  Description of Artificial Sequence: Synthetic oligonucleotide
  Sense Strand Starting at position 743 of SEQ ID NO: 318207
guauauggaagcuguauaa

SEQ ID NO: 377208 - RNA, 19 nt, Artificial Sequence
  Description of Artificial Sequence: Synthetic oligonucleotide
  Antisense Strand to SEQ ID NO: 377207
uuauacagcuuccauauac

SEQ ID NO: 377209 - RNA, 19 nt, Artificial Sequence
  Description of Artificial Sequence: Synthetic oligonucleotide
  Sense Strand Starting at position 743 of SEQ ID NO: 318662
uggugaaacuaucuccacu

SEQ ID NO: 377210 - RNA, 19 nt, Artificial Sequence
  Description of Artificial Sequence: Synthetic oligonucleotide
  Antisense Strand to SEQ ID NO: 377209
aguggagauaguuucacca

SEQ ID NO: 377211 - RNA, 19 nt, Artificial Sequence
  Description of Artificial Sequence: Synthetic oligonucleotide
  Sense Strand Starting at position 743 of SEQ ID NO: 318860
cguaguuccgacuagguga

SEQ ID NO: 377212 - RNA, 19 nt, Artificial Sequence
  Description of Artificial Sequence: Synthetic oligonucleotide
  Antisense Strand to SEQ ID NO: 377211
ucaccuagucggaacuacg

SEQ ID NO: 377213 - RNA, 19 nt, Artificial Sequence
  Description of Artificial Sequence: Synthetic oligonucleotide
  Sense Strand Starting at position 743 of SEQ ID NO: 318894
ucuucuguuuaugaggagu

SEQ ID NO: 377214 - RNA, 19 nt, Artificial Sequence
  Description of Artificial Sequence: Synthetic oligonucleotide
  Antisense Strand to SEQ ID NO: 377213
acuccucauaaacagaaga

SEQ ID NO: 377215 - RNA, 19 nt, Artificial Sequence
  Description of Artificial Sequence: Synthetic oligonucleotide
  Sense Strand Starting at position 743 of SEQ ID NO: 319002
acaaccuuagccugacaga

SEQ ID NO: 377216 - RNA, 19 nt, Artificial Sequence
  Description of Artificial Sequence: Synthetic oligonucleotide
  Antisense Strand to SEQ ID NO: 377215
ucugucaggcuaagguugu

SEQ ID NO: 377217 - RNA, 19 nt, Artificial Sequence
  Description of Artificial Sequence: Synthetic oligonucleotide
  Sense Strand Starting at position 743 of SEQ ID NO: 319073
gggucugggcugugaacua

SEQ ID NO: 377218 - RNA, 19 nt, Artificial Sequence
  Description of Artificial Sequence: Synthetic oligonucleotide
  Antisense Strand to SEQ ID NO: 377217
uaguucacagcccagaccc

SEQ ID NO: 377219 - RNA, 19 nt, Artificial Sequence
  Description of Artificial Sequence: Synthetic oligonucleotide
  Sense Strand Starting at position 743 of SEQ ID NO: 319167
ggagcuauaucuccucacu

SEQ ID NO: 377220 - RNA, 19 nt, Artificial Sequence
  Description of Artificial Sequence: Synthetic oligonucleotide
  Antisense Strand to SEQ ID NO: 377219
agugaggagauauagcucc

SEQ ID NO: 377221 - RNA, 19 nt, Artificial Sequence
  Description of Artificial Sequence: Synthetic oligonucleotide
  Sense Strand Starting at position 744 of SEQ ID NO: 315370
gagaccaugucucuaggaa

SEQ ID NO: 377222 - RNA, 19 nt, Artificial Sequence
  Description of Artificial Sequence: Synthetic oligonucleotide
  Antisense Strand to SEQ ID NO: 377221
uuccuagagacauggucuc

SEQ ID NO: 377223 - RNA, 19 nt, Artificial Sequence
  Description of Artificial Sequence: Synthetic oligonucleotide
  Sense Strand Starting at position 744 of SEQ ID NO: 315492
guaagucaugguugcacca

SEQ ID NO: 377224 - RNA, 19 nt, Artificial Sequence
  Description of Artificial Sequence: Synthetic oligonucleotide
  Antisense Strand to SEQ ID NO: 377223
uggugcaaccaugacuuac

SEQ ID NO: 377225 - RNA, 19 nt, Artificial Sequence
  Description of Artificial Sequence: Synthetic oligonucleotide
  Sense Strand Starting at position 744 of SEQ ID NO: 315906
cagaaauucugacuuggua

SEQ ID NO: 377226 - RNA, 19 nt, Artificial Sequence
  Description of Artificial Sequence: Synthetic oligonucleotide
  Antisense Strand to SEQ ID NO: 377225
uaccaagucagaauuucug

SEQ ID NO: 377227 - RNA, 19 nt, Artificial Sequence
  Description of Artificial Sequence: Synthetic oligonucleotide
  Sense Strand Starting at position 744 of SEQ ID NO: 316066
guccaauccuuacugaagu

SEQ ID NO: 377228 - RNA, 19 nt, Artificial Sequence
  Description of Artificial Sequence: Synthetic oligonucleotide
  Antisense Strand to SEQ ID NO: 377227
acuucaguaaggauuggac

SEQ ID NO: 377229 - RNA, 19 nt, Artificial Sequence
  Description of Artificial Sequence: Synthetic oligonucleotide
  Sense Strand Starting at position 744 of SEQ ID NO: 316079
ugaagucuucccuggguua

SEQ ID NO: 377230 - RNA, 19 nt, Artificial Sequence
  Description of Artificial Sequence: Synthetic oligonucleotide
  Antisense Strand to SEQ ID NO: 377229
uaacccagggaagacuuca

SEQ ID NO: 377231 - RNA, 19 nt, Artificial Sequence
  Description of Artificial Sequence: Synthetic oligonucleotide
  Sense Strand Starting at position 744 of SEQ ID NO: 316080
gaagucuucccuggguuac

SEQ ID NO: 377232 - RNA, 19 nt, Artificial Sequence
  Description of Artificial Sequence: Synthetic oligonucleotide
  Antisense Strand to SEQ ID NO: 377231
guaacccagggaagacuuc

SEQ ID NO: 377233 - RNA, 19 nt, Artificial Sequence
  Description of Artificial Sequence: Synthetic oligonucleotide
  Sense Strand Starting at position 744 of SEQ ID NO: 316081
aagucuucccuggguuacu

SEQ ID NO: 377234 - RNA, 19 nt, Artificial Sequence
  Description of Artificial Sequence: Synthetic oligonucleotide
  Antisense Strand to SEQ ID NO: 377233
aguaacccagggaagacuu

SEQ ID NO: 377235 - RNA, 19 nt, Artificial Sequence
  Description of Artificial Sequence: Synthetic oligonucleotide
  Sense Strand Starting at position 744 of SEQ ID NO: 316082
agucuucccuggguuacuu

SEQ ID NO: 377236 - RNA, 19 nt, Artificial Sequence
  Description of Artificial Sequence: Synthetic oligonucleotide
  Antisense Strand to SEQ ID NO: 377235
aaguaacccagggaagacu

SEQ ID NO: 377237 - RNA, 19 nt, Artificial Sequence
  Description of Artificial Sequence: Synthetic oligonucleotide
  Sense Strand Starting at position 744 of SEQ ID NO: 316137
cacgguaaucucugagguc

SEQ ID NO: 377238 - RNA, 19 nt, Artificial Sequence
  Description of Artificial Sequence: Synthetic oligonucleotide
  Antisense Strand to SEQ ID NO: 377237
gaccucagagauuaccgug

SEQ ID NO: 377239 - RNA, 19 nt, Artificial Sequence
  Description of Artificial Sequence: Synthetic oligonucleotide
  Sense Strand Starting at position 744 of SEQ ID NO: 316158
aucagaguucuguggugca

SEQ ID NO: 377240 - RNA, 19 nt, Artificial Sequence
  Description of Artificial Sequence: Synthetic oligonucleotide
  Antisense Strand to SEQ ID NO: 377239
ugcaccacagaacucugau

SEQ ID NO: 377241 - RNA, 19 nt, Artificial Sequence
  Description of Artificial Sequence: Synthetic oligonucleotide
  Sense Strand Starting at position 744 of SEQ ID NO: 316459
aagucaugcugagaccuua

SEQ ID NO: 377242 - RNA, 19 nt, Artificial Sequence
  Description of Artificial Sequence: Synthetic oligonucleotide
  Antisense Strand to SEQ ID NO: 377241
uaaggucucagcaugacuu

SEQ ID NO: 377243 - RNA, 19 nt, Artificial Sequence
  Description of Artificial Sequence: Synthetic oligonucleotide
  Sense Strand Starting at position 744 of SEQ ID NO: 316509
gcuccauucugaccucuga

SEQ ID NO: 377244 - RNA, 19 nt, Artificial Sequence
  Description of Artificial Sequence: Synthetic oligonucleotide
  Antisense Strand to SEQ ID NO: 377243
ucagaggucagaauggagc

SEQ ID NO: 377245 - RNA, 19 nt, Artificial Sequence
  Description of Artificial Sequence: Synthetic oligonucleotide
  Sense Strand Starting at position 744 of SEQ ID NO: 316532
gaggaaucgucucccuauu

SEQ ID NO: 377246 - RNA, 19 nt, Artificial Sequence
  Description of Artificial Sequence: Synthetic oligonucleotide
  Antisense Strand to SEQ ID NO: 377245
aauagggagacgauuccuc

SEQ ID NO: 377247 - RNA, 19 nt, Artificial Sequence
  Description of Artificial Sequence: Synthetic oligonucleotide
  Sense Strand Starting at position 744 of SEQ ID NO: 316761
cgacucuuauacuccggau

SEQ ID NO: 377248 - RNA, 19 nt, Artificial Sequence
  Description of Artificial Sequence: Synthetic oligonucleotide
  Antisense Strand to SEQ ID NO: 377247
auccggaguauaagagucg

SEQ ID NO: 377249 - RNA, 19 nt, Artificial Sequence
  Description of Artificial Sequence: Synthetic oligonucleotide
  Sense Strand Starting at position 744 of SEQ ID NO: 316871
cucuguaacuucccaaguu

SEQ ID NO: 377250 - RNA, 19 nt, Artificial Sequence
  Description of Artificial Sequence: Synthetic oligonucleotide
  Antisense Strand to SEQ ID NO: 377249
aacuugggaaguuacagag

SEQ ID NO: 377251 - RNA, 19 nt, Artificial Sequence
  Description of Artificial Sequence: Synthetic oligonucleotide
  Sense Strand Starting at position 744 of SEQ ID NO: 317229
ggauguuuacuccgacucu

SEQ ID NO: 377252 - RNA, 19 nt, Artificial Sequence
  Description of Artificial Sequence: Synthetic oligonucleotide
  Antisense Strand to SEQ ID NO: 377251
agagucggaguaaacaucc

SEQ ID NO: 377253 - RNA, 19 nt, Artificial Sequence
  Description of Artificial Sequence: Synthetic oligonucleotide
  Sense Strand Starting at position 744 of SEQ ID NO: 317805
gcaacaaauuaguacuaga

SEQ ID NO: 377254 - RNA, 19 nt, Artificial Sequence
  Description of Artificial Sequence: Synthetic oligonucleotide
  Antisense Strand to SEQ ID NO: 377253
ucuaguacuaauuuguugc

SEQ ID NO: 377255 - RNA, 19 nt, Artificial Sequence
  Description of Artificial Sequence: Synthetic oligonucleotide
  Sense Strand Starting at position 744 of SEQ ID NO: 317918
cggauuaugaagugaggca

SEQ ID NO: 377256 - RNA, 19 nt, Artificial Sequence
  Description of Artificial Sequence: Synthetic oligonucleotide
  Antisense Strand to SEQ ID NO: 377255
ugccucacuucauaauccg

SEQ ID NO: 377257 - RNA, 19 nt, Artificial Sequence
  Description of Artificial Sequence: Synthetic oligonucleotide
  Sense Strand Starting at position 744 of SEQ ID NO: 317947
gccugaucaacgcagugaa

SEQ ID NO: 377258 - RNA, 19 nt, Artificial Sequence
  Description of Artificial Sequence: Synthetic oligonucleotide
  Antisense Strand to SEQ ID NO: 377257
uucacugcguugaucaggc

SEQ ID NO: 377259 - RNA, 19 nt, Artificial Sequence
  Description of Artificial Sequence: Synthetic oligonucleotide
  Sense Strand Starting at position 744 of SEQ ID NO: 318192
acaacaucccugugaguac

SEQ ID NO: 377260 - RNA, 19 nt, Artificial Sequence
  Description of Artificial Sequence: Synthetic oligonucleotide
  Antisense Strand to SEQ ID NO: 377259
guacucacagggauguugu

SEQ ID NO: 377261 - RNA, 19 nt, Artificial Sequence
  Description of Artificial Sequence: Synthetic oligonucleotide
  Sense Strand Starting at position 744 of SEQ ID NO: 318201
cugugaguacagugcauua

SEQ ID NO: 377262 - RNA, 19 nt, Artificial Sequence
  Description of Artificial Sequence: Synthetic oligonucleotide
  Antisense Strand to SEQ ID NO: 377261
uaaugcacuguacucacag

SEQ ID NO: 377263 - RNA, 19 nt, Artificial Sequence
  Description of Artificial Sequence: Synthetic oligonucleotide
  Sense Strand Starting at position 744 of SEQ ID NO: 318203
gugaguacagugcauuaua

SEQ ID NO: 377264 - RNA, 19 nt, Artificial Sequence
  Description of Artificial Sequence: Synthetic oligonucleotide
  Antisense Strand to SEQ ID NO: 377263
uauaaugcacuguacucac

SEQ ID NO: 377265 - RNA, 19 nt, Artificial Sequence
  Description of Artificial Sequence: Synthetic oligonucleotide
  Sense Strand Starting at position 744 of SEQ ID NO: 318206
aguacagugcauuauauca

SEQ ID NO: 377266 - RNA, 19 nt, Artificial Sequence
  Description of Artificial Sequence: Synthetic oligonucleotide
  Antisense Strand to SEQ ID NO: 377265
ugauauaaugcacuguacu

SEQ ID NO: 377267 - RNA, 19 nt, Artificial Sequence
  Description of Artificial Sequence: Synthetic oligonucleotide
  Sense Strand Starting at position 744 of SEQ ID NO: 318267
ugaagcgacugccuugaaa

SEQ ID NO: 377268 - RNA, 19 nt, Artificial Sequence
  Description of Artificial Sequence: Synthetic oligonucleotide
  Antisense Strand to SEQ ID NO: 377267
uuucaaggcagucgcuuca

SEQ ID NO: 377269 - RNA, 19 nt, Artificial Sequence
  Description of Artificial Sequence: Synthetic oligonucleotide
  Sense Strand Starting at position 744 of SEQ ID NO: 318269
aagcgacugccuugaaauu

SEQ ID NO: 377270 - RNA, 19 nt, Artificial Sequence
  Description of Artificial Sequence: Synthetic oligonucleotide
  Antisense Strand to SEQ ID NO: 377269
aauuucaaggcagucgcuu

SEQ ID NO: 377271 - RNA, 19 nt, Artificial Sequence
  Description of Artificial Sequence: Synthetic oligonucleotide
  Sense Strand Starting at position 744 of SEQ ID NO: 318278
ccuugaaauucugugauga

SEQ ID NO: 377272 - RNA, 19 nt, Artificial Sequence
  Description of Artificial Sequence: Synthetic oligonucleotide
  Antisense Strand to SEQ ID NO: 377271
ucaucacagaauuucaagg

SEQ ID NO: 377273 - RNA, 19 nt, Artificial Sequence
  Description of Artificial Sequence: Synthetic oligonucleotide
  Sense Strand Starting at position 744 of SEQ ID NO: 318280
uugaaauucugugaugaga

SEQ ID NO: 377274 - RNA, 19 nt, Artificial Sequence
  Description of Artificial Sequence: Synthetic oligonucleotide
  Antisense Strand to SEQ ID NO: 377273
ucucaucacagaauuucaa

SEQ ID NO: 377275 - RNA, 19 nt, Artificial Sequence
  Description of Artificial Sequence: Synthetic oligonucleotide
  Sense Strand Starting at position 744 of SEQ ID NO: 318282
gaaauucugugaugagaag

SEQ ID NO: 377276 - RNA, 19 nt, Artificial Sequence
  Description of Artificial Sequence: Synthetic oligonucleotide
  Antisense Strand to SEQ ID NO: 377275
cuucucaucacagaauuuc

SEQ ID NO: 377277 - RNA, 19 nt, Artificial Sequence
  Description of Artificial Sequence: Synthetic oligonucleotide
  Sense Strand Starting at position 744 of SEQ ID NO: 318294
ugagaagccucucauuauu

SEQ ID NO: 377278 - RNA, 19 nt, Artificial Sequence
  Description of Artificial Sequence: Synthetic oligonucleotide
  Antisense Strand to SEQ ID NO: 377277
aauaaugagaggcuucuca

SEQ ID NO: 377279 - RNA, 19 nt, Artificial Sequence
  Description of Artificial Sequence: Synthetic oligonucleotide
  Sense Strand Starting at position 744 of SEQ ID NO: 318410
cugcuuaucuauccuguuu

SEQ ID NO: 377280 - RNA, 19 nt, Artificial Sequence
  Description of Artificial Sequence: Synthetic oligonucleotide
  Antisense Strand to SEQ ID NO: 377279
aaacaggauagauaagcag

SEQ ID NO: 377281 - RNA, 19 nt, Artificial Sequence
  Description of Artificial Sequence: Synthetic oligonucleotide
  Sense Strand Starting at position 744 of SEQ ID NO: 318438
cuucccauccagggaauua

SEQ ID NO: 377282 - RNA, 19 nt, Artificial Sequence
  Description of Artificial Sequence: Synthetic oligonucleotide
  Antisense Strand to SEQ ID NO: 377281
uaauucccuggaugggaag

SEQ ID NO: 377283 - RNA, 19 nt, Artificial Sequence
  Description of Artificial Sequence: Synthetic oligonucleotide
  Sense Strand Starting at position 744 of SEQ ID NO: 318490
agcugugaauacuuaagca

SEQ ID NO: 377284 - RNA, 19 nt, Artificial Sequence
  Description of Artificial Sequence: Synthetic oligonucleotide
  Antisense Strand to SEQ ID NO: 377283
ugcuuaaguauucacagcu

SEQ ID NO: 377285 - RNA, 19 nt, Artificial Sequence
  Description of Artificial Sequence: Synthetic oligonucleotide
  Sense Strand Starting at position 744 of SEQ ID NO: 318553
auauaaggcuauuaacaug

SEQ ID NO: 377286 - RNA, 19 nt, Artificial Sequence
  Description of Artificial Sequence: Synthetic oligonucleotide
  Antisense Strand to SEQ ID NO: 377285
cauguuaauagccuuauau

SEQ ID NO: 377287 - RNA, 19 nt, Artificial Sequence
  Description of Artificial Sequence: Synthetic oligonucleotide
  Sense Strand Starting at position 744 of SEQ ID NO: 318592
uccuuaauguggucuaaua

SEQ ID NO: 377288 - RNA, 19 nt, Artificial Sequence
  Description of Artificial Sequence: Synthetic oligonucleotide
  Antisense Strand to SEQ ID NO: 377287
uauuagaccacauuaagga

SEQ ID NO: 377289 - RNA, 19 nt, Artificial Sequence
  Description of Artificial Sequence: Synthetic oligonucleotide
  Sense Strand Starting at position 744 of SEQ ID NO: 318619
gaaugaaaguaauucguuu

SEQ ID NO: 377290 - RNA, 19 nt, Artificial Sequence
  Description of Artificial Sequence: Synthetic oligonucleotide
  Antisense Strand to SEQ ID NO: 377289
aaacgaauuacuuucauuc

SEQ ID NO: 377291 - RNA, 19 nt, Artificial Sequence
  Description of Artificial Sequence: Synthetic oligonucleotide
  Sense Strand Starting at position 744 of SEQ ID NO: 318652
auagaaguaugauauguac

SEQ ID NO: 377292 - RNA, 19 nt, Artificial Sequence
  Description of Artificial Sequence: Synthetic oligonucleotide
  Antisense Strand to SEQ ID NO: 377291
guacauaucauacuucuau

SEQ ID NO: 377293 - RNA, 19 nt, Artificial Sequence
  Description of Artificial Sequence: Synthetic oligonucleotide
  Sense Strand Starting at position 744 of SEQ ID NO: 319021
uaccgagucucaccauguu

SEQ ID NO: 377294 - RNA, 19 nt, Artificial Sequence
  Description of Artificial Sequence: Synthetic oligonucleotide
  Antisense Strand to SEQ ID NO: 377293
aacauggugagacucggua

SEQ ID NO: 377295 - RNA, 19 nt, Artificial Sequence
  Description of Artificial Sequence: Synthetic oligonucleotide
  Sense Strand Starting at position 744 of SEQ ID NO: 319161
auacgcauuugucuuaaac

SEQ ID NO: 377296 - RNA, 19 nt, Artificial Sequence
  Description of Artificial Sequence: Synthetic oligonucleotide
  Antisense Strand to SEQ ID NO: 377295
guuuaagacaaaugcguau

SEQ ID NO: 377297 - RNA, 19 nt, Artificial Sequence
  Description of Artificial Sequence: Synthetic oligonucleotide
  Sense Strand Starting at position 744 of SEQ ID NO: 319163
acgcauuugucuuaaacac

SEQ ID NO: 377298 - RNA, 19 nt, Artificial Sequence
  Description of Artificial Sequence: Synthetic oligonucleotide
  Antisense Strand to SEQ ID NO: 377297
guguuuaagacaaaugcgu

SEQ ID NO: 377299 - RNA, 19 nt, Artificial Sequence
  Description of Artificial Sequence: Synthetic oligonucleotide
  Sense Strand Starting at position 744 of SEQ ID NO: 319198
uggauuauaugguguuaaa

SEQ ID NO: 377300 - RNA, 19 nt, Artificial Sequence
  Description of Artificial Sequence: Synthetic oligonucleotide
  Antisense Strand to SEQ ID NO: 377299
uuuaacaccauauaaucca

SEQ ID NO: 377301 - RNA, 19 nt, Artificial Sequence
  Description of Artificial Sequence: Synthetic oligonucleotide
  Sense Strand Starting at position 745 of SEQ ID NO: 315319
uggguucucugggucaaga

SEQ ID NO: 377302 - RNA, 19 nt, Artificial Sequence
  Description of Artificial Sequence: Synthetic oligonucleotide
  Antisense Strand to SEQ ID NO: 377301
ucuugacccagagaaccca

SEQ ID NO: 377303 - RNA, 19 nt, Artificial Sequence
  Description of Artificial Sequence: Synthetic oligonucleotide
  Sense Strand Starting at position 745 of SEQ ID NO: 315321
gguucucugggucaagaaa

SEQ ID NO: 377304 - RNA, 19 nt, Artificial Sequence
  Description of Artificial Sequence: Synthetic oligonucleotide
  Antisense Strand to SEQ ID NO: 377303
uuucuugacccagagaacc

SEQ ID NO: 377305 - RNA, 19 nt, Artificial Sequence
  Description of Artificial Sequence: Synthetic oligonucleotide
  Sense Strand Starting at position 745 of SEQ ID NO: 315359
ucccuugagccucaaugau

SEQ ID NO: 377306 - RNA, 19 nt, Artificial Sequence
  Description of Artificial Sequence: Synthetic oligonucleotide
  Antisense Strand to SEQ ID NO: 377305
aucauugaggcucaaggga

SEQ ID NO: 377307 - RNA, 19 nt, Artificial Sequence
  Description of Artificial Sequence: Synthetic oligonucleotide
  Sense Strand Starting at position 745 of SEQ ID NO: 315624
gcauuaagagcuugaaacc

SEQ ID NO: 377308 - RNA, 19 nt, Artificial Sequence
  Description of Artificial Sequence: Synthetic oligonucleotide
  Antisense Strand to SEQ ID NO: 377307
gguuucaagcucuuaaugc

SEQ ID NO: 377309 - RNA, 19 nt, Artificial Sequence
  Description of Artificial Sequence: Synthetic oligonucleotide
  Sense Strand Starting at position 745 of SEQ ID NO: 315676
auuccaguucucugaaagg

SEQ ID NO: 377310 - RNA, 19 nt, Artificial Sequence
  Description of Artificial Sequence: Synthetic oligonucleotide
  Antisense Strand to SEQ ID NO: 377309
ccuuucagagaacuggaau

SEQ ID NO: 377311 - RNA, 19 nt, Artificial Sequence
  Description of Artificial Sequence: Synthetic oligonucleotide
  Sense Strand Starting at position 745 of SEQ ID NO: 315681
aguucucugaaagggcuua

SEQ ID NO: 377312 - RNA, 19 nt, Artificial Sequence
  Description of Artificial Sequence: Synthetic oligonucleotide
  Antisense Strand to SEQ ID NO: 377311
uaagcccuuucagagaacu

SEQ ID NO: 377313 - RNA, 19 nt, Artificial Sequence
  Description of Artificial Sequence: Synthetic oligonucleotide
  Sense Strand Starting at position 745 of SEQ ID NO: 315915
cuguuaugucauuauccac

SEQ ID NO: 377314 - RNA, 19 nt, Artificial Sequence
  Description of Artificial Sequence: Synthetic oligonucleotide
  Antisense Strand to SEQ ID NO: 377313
guggauaaugacauaacag

SEQ ID NO: 377315 - RNA, 19 nt, Artificial Sequence
  Description of Artificial Sequence: Synthetic oligonucleotide
  Sense Strand Starting at position 745 of SEQ ID NO: 315992
gacugucuccaaggaucuu

SEQ ID NO: 377316 - RNA, 19 nt, Artificial Sequence
  Description of Artificial Sequence: Synthetic oligonucleotide
  Antisense Strand to SEQ ID NO: 377315
aagauccuuggagacaguc

SEQ ID NO: 377317 - RNA, 19 nt, Artificial Sequence
  Description of Artificial Sequence: Synthetic oligonucleotide
  Sense Strand Starting at position 745 of SEQ ID NO: 316196
caggaaguuggguguucau

SEQ ID NO: 377318 - RNA, 19 nt, Artificial Sequence
  Description of Artificial Sequence: Synthetic oligonucleotide
  Antisense Strand to SEQ ID NO: 377317
augaacacccaacuuccug

SEQ ID NO: 377319 - RNA, 19 nt, Artificial Sequence
  Description of Artificial Sequence: Synthetic oligonucleotide
  Sense Strand Starting at position 745 of SEQ ID NO: 316218
gaagguuccuggguacaca

SEQ ID NO: 377320 - RNA, 19 nt, Artificial Sequence
  Description of Artificial Sequence: Synthetic oligonucleotide
  Antisense Strand to SEQ ID NO: 377319
uguguacccaggaaccuuc

SEQ ID NO: 377321 - RNA, 19 nt, Artificial Sequence
  Description of Artificial Sequence: Synthetic oligonucleotide
  Sense Strand Starting at position 745 of SEQ ID NO: 316365
ccacauguggcccauagaa

SEQ ID NO: 377322 - RNA, 19 nt, Artificial Sequence
  Description of Artificial Sequence: Synthetic oligonucleotide
  Antisense Strand to SEQ ID NO: 377321
uucuaugggccacaugugg

SEQ ID NO: 377323 - RNA, 19 nt, Artificial Sequence
  Description of Artificial Sequence: Synthetic oligonucleotide
  Sense Strand Starting at position 745 of SEQ ID NO: 316403
gagaguacaugucugaagu

SEQ ID NO: 377324 - RNA, 19 nt, Artificial Sequence
  Description of Artificial Sequence: Synthetic oligonucleotide
  Antisense Strand to SEQ ID NO: 377323
acuucagacauguacucuc

SEQ ID NO: 377325 - RNA, 19 nt, Artificial Sequence
  Description of Artificial Sequence: Synthetic oligonucleotide
  Sense Strand Starting at position 745 of SEQ ID NO: 316404
agaguacaugucugaaguc

SEQ ID NO: 377326 - RNA, 19 nt, Artificial Sequence
  Description of Artificial Sequence: Synthetic oligonucleotide
  Antisense Strand to SEQ ID NO: 377325
gacuucagacauguacucu

SEQ ID NO: 377327 - RNA, 19 nt, Artificial Sequence
  Description of Artificial Sequence: Synthetic oligonucleotide
  Sense Strand Starting at position 745 of SEQ ID NO: 316411
augucugaagucuaaucaa

SEQ ID NO: 377328 - RNA, 19 nt, Artificial Sequence
  Description of Artificial Sequence: Synthetic oligonucleotide
  Antisense Strand to SEQ ID NO: 377327
uugauuagacuucagacau

SEQ ID NO: 377329 - RNA, 19 nt, Artificial Sequence
  Description of Artificial Sequence: Synthetic oligonucleotide
  Sense Strand Starting at position 745 of SEQ ID NO: 316418
aagucuaaucaacgugaca

SEQ ID NO: 377330 - RNA, 19 nt, Artificial Sequence
  Description of Artificial Sequence: Synthetic oligonucleotide
  Antisense Strand to SEQ ID NO: 377329
ugucacguugauuagacuu

SEQ ID NO: 377331 - RNA, 19 nt, Artificial Sequence
  Description of Artificial Sequence: Synthetic oligonucleotide
  Sense Strand Starting at position 745 of SEQ ID NO: 316421
ucuaaucaacgugacaauu

SEQ ID NO: 377332 - RNA, 19 nt, Artificial Sequence
  Description of Artificial Sequence: Synthetic oligonucleotide
  Antisense Strand to SEQ ID NO: 377331
aauugucacguugauuaga

SEQ ID NO: 377333 - RNA, 19 nt, Artificial Sequence
  Description of Artificial Sequence: Synthetic oligonucleotide
  Sense Strand Starting at position 745 of SEQ ID NO: 316469
aaguacauuugugaaagga

SEQ ID NO: 377334 - RNA, 19 nt, Artificial Sequence
  Description of Artificial Sequence: Synthetic oligonucleotide
  Antisense Strand to SEQ ID NO: 377333
uccuuucacaaauguacuu

SEQ ID NO: 377335 - RNA, 19 nt, Artificial Sequence
  Description of Artificial Sequence: Synthetic oligonucleotide
  Sense Strand Starting at position 745 of SEQ ID NO: 316529
gauccagaacgcuauagua

SEQ ID NO: 377336 - RNA, 19 nt, Artificial Sequence
  Description of Artificial Sequence: Synthetic oligonucleotide
  Antisense Strand to SEQ ID NO: 377335
uacuauagcguucuggauc

SEQ ID NO: 377337 - RNA, 19 nt, Artificial Sequence
  Description of Artificial Sequence: Synthetic oligonucleotide
  Sense Strand Starting at position 745 of SEQ ID NO: 316531
uccagaacgcuauaguaga

SEQ ID NO: 377338 - RNA, 19 nt, Artificial Sequence
  Description of Artificial Sequence: Synthetic oligonucleotide
  Antisense Strand to SEQ ID NO: 377337
ucuacuauagcguucugga

SEQ ID NO: 377339 - RNA, 19 nt, Artificial Sequence
  Description of Artificial Sequence: Synthetic oligonucleotide
  Sense Strand Starting at position 745 of SEQ ID NO: 316605
aagagaaaccucugguuug

SEQ ID NO: 377340 - RNA, 19 nt, Artificial Sequence
  Description of Artificial Sequence: Synthetic oligonucleotide
  Antisense Strand to SEQ ID NO: 377339
caaaccagagguuucucuu

SEQ ID NO: 377341 - RNA, 19 nt, Artificial Sequence
  Description of Artificial Sequence: Synthetic oligonucleotide
  Sense Strand Starting at position 745 of SEQ ID NO: 317055
cugggagaauugguagcua

SEQ ID NO: 377342 - RNA, 19 nt, Artificial Sequence
  Description of Artificial Sequence: Synthetic oligonucleotide
  Antisense Strand to SEQ ID NO: 377341
uagcuaccaauucucccag

SEQ ID NO: 377343 - RNA, 19 nt, Artificial Sequence
  Description of Artificial Sequence: Synthetic oligonucleotide
  Sense Strand Starting at position 745 of SEQ ID NO: 317080
ugcugauucuaccucaaag

SEQ ID NO: 377344 - RNA, 19 nt, Artificial Sequence
  Description of Artificial Sequence: Synthetic oligonucleotide
  Antisense Strand to SEQ ID NO: 377343
cuuugagguagaaucagca

SEQ ID NO: 377345 - RNA, 19 nt, Artificial Sequence
  Description of Artificial Sequence: Synthetic oligonucleotide
  Sense Strand Starting at position 745 of SEQ ID NO: 317140
cuuaccuguguuuacagaa

SEQ ID NO: 377346 - RNA, 19 nt, Artificial Sequence
  Description of Artificial Sequence: Synthetic oligonucleotide
  Antisense Strand to SEQ ID NO: 377345
uucuguaaacacagguaag

SEQ ID NO: 377347 - RNA, 19 nt, Artificial Sequence
  Description of Artificial Sequence: Synthetic oligonucleotide
  Sense Strand Starting at position 745 of SEQ ID NO: 317264
cugucuuucggguacaaag

SEQ ID NO: 377348 - RNA, 19 nt, Artificial Sequence
  Description of Artificial Sequence: Synthetic oligonucleotide
  Antisense Strand to SEQ ID NO: 377347
cuuuguacccgaaagacag

SEQ ID NO: 377349 - RNA, 19 nt, Artificial Sequence
  Description of Artificial Sequence: Synthetic oligonucleotide
  Sense Strand Starting at position 745 of SEQ ID NO: 317325
gcuagcauuuggccaaaua

SEQ ID NO: 377350 - RNA, 19 nt, Artificial Sequence
  Description of Artificial Sequence: Synthetic oligonucleotide
  Antisense Strand to SEQ ID NO: 377349
uauuuggccaaaugcuagc

SEQ ID NO: 377351 - RNA, 19 nt, Artificial Sequence
  Description of Artificial Sequence: Synthetic oligonucleotide
  Sense Strand Starting at position 745 of SEQ ID NO: 317380
uggagcuggccuuacgaau

SEQ ID NO: 377352 - RNA, 19 nt, Artificial Sequence
  Description of Artificial Sequence: Synthetic oligonucleotide
  Antisense Strand to SEQ ID NO: 377351
auucguaaggccagcucca

SEQ ID NO: 377353 - RNA, 19 nt, Artificial Sequence
  Description of Artificial Sequence: Synthetic oligonucleotide
  Sense Strand Starting at position 745 of SEQ ID NO: 317436
uuccaaauauccuugugag

SEQ ID NO: 377354 - RNA, 19 nt, Artificial Sequence
  Description of Artificial Sequence: Synthetic oligonucleotide
  Antisense Strand to SEQ ID NO: 377353
cucacaaggauauuuggaa

SEQ ID NO: 377355 - RNA, 19 nt, Artificial Sequence
  Description of Artificial Sequence: Synthetic oligonucleotide
  Sense Strand Starting at position 745 of SEQ ID NO: 317437
uccaaauauccuugugagg

SEQ ID NO: 377356 - RNA, 19 nt, Artificial Sequence
  Description of Artificial Sequence: Synthetic oligonucleotide
  Antisense Strand to SEQ ID NO: 377355
ccucacaaggauauuugga

SEQ ID NO: 377357 - RNA, 19 nt, Artificial Sequence
  Description of Artificial Sequence: Synthetic oligonucleotide
  Sense Strand Starting at position 745 of SEQ ID NO: 317464
acaugaguuugguuaaucu

SEQ ID NO: 377358 - RNA, 19 nt, Artificial Sequence
  Description of Artificial Sequence: Synthetic oligonucleotide
  Antisense Strand to SEQ ID NO: 377357
agauuaaccaaacucaugu

SEQ ID NO: 377359 - RNA, 19 nt, Artificial Sequence
  Description of Artificial Sequence: Synthetic oligonucleotide
  Sense Strand Starting at position 745 of SEQ ID NO: 317471
uuugguuaaucucuugaua

SEQ ID NO: 377360 - RNA, 19 nt, Artificial Sequence
  Description of Artificial Sequence: Synthetic oligonucleotide
  Antisense Strand to SEQ ID NO: 377359
uaucaagagauuaaccaaa

SEQ ID NO: 377361 - RNA, 19 nt, Artificial Sequence
  Description of Artificial Sequence: Synthetic oligonucleotide
  Sense Strand Starting at position 745 of SEQ ID NO: 317474
gguuaaucucuugauaucu

SEQ ID NO: 377362 - RNA, 19 nt, Artificial Sequence
  Description of Artificial Sequence: Synthetic oligonucleotide
  Antisense Strand to SEQ ID NO: 377361
agauaucaagagauuaacc

SEQ ID NO: 377363 - RNA, 19 nt, Artificial Sequence
  Description of Artificial Sequence: Synthetic oligonucleotide
  Sense Strand Starting at position 745 of SEQ ID NO: 317629
ggacuuacauguuucccaa

SEQ ID NO: 377364 - RNA, 19 nt, Artificial Sequence
  Description of Artificial Sequence: Synthetic oligonucleotide
  Antisense Strand to SEQ ID NO: 377363
uugggaaacauguaagucc

SEQ ID NO: 377365 - RNA, 19 nt, Artificial Sequence
  Description of Artificial Sequence: Synthetic oligonucleotide
  Sense Strand Starting at position 745 of SEQ ID NO: 317708
gauggucaugucuagcaac

SEQ ID NO: 377366 - RNA, 19 nt, Artificial Sequence
  Description of Artificial Sequence: Synthetic oligonucleotide
  Antisense Strand to SEQ ID NO: 377365
guugcuagacaugaccauc

SEQ ID NO: 377367 - RNA, 19 nt, Artificial Sequence
  Description of Artificial Sequence: Synthetic oligonucleotide
  Sense Strand Starting at position 745 of SEQ ID NO: 317750
cugugacucuaccuggaua

SEQ ID NO: 377368 - RNA, 19 nt, Artificial Sequence
  Description of Artificial Sequence: Synthetic oligonucleotide
  Antisense Strand to SEQ ID NO: 377367
uauccagguagagucacag

SEQ ID NO: 377369 - RNA, 19 nt, Artificial Sequence
  Description of Artificial Sequence: Synthetic oligonucleotide
  Sense Strand Starting at position 745 of SEQ ID NO: 317752
gugacucuaccuggauaca

SEQ ID NO: 377370 - RNA, 19 nt, Artificial Sequence
  Description of Artificial Sequence: Synthetic oligonucleotide
  Antisense Strand to SEQ ID NO: 377369
uguauccagguagagucac

SEQ ID NO: 377371 - RNA, 19 nt, Artificial Sequence
  Description of Artificial Sequence: Synthetic oligonucleotide
  Sense Strand Starting at position 745 of SEQ ID NO: 317860
gggaguuggcaauaaagua

SEQ ID NO: 377372 - RNA, 19 nt, Artificial Sequence
  Description of Artificial Sequence: Synthetic oligonucleotide
  Antisense Strand to SEQ ID NO: 377371
uacuuuauugccaacuccc

SEQ ID NO: 377373 - RNA, 19 nt, Artificial Sequence
  Description of Artificial Sequence: Synthetic oligonucleotide
  Sense Strand Starting at position 745 of SEQ ID NO: 318018
agcuuuacugcuuggauuu

SEQ ID NO: 377374 - RNA, 19 nt, Artificial Sequence
  Description of Artificial Sequence: Synthetic oligonucleotide
  Antisense Strand to SEQ ID NO: 377373
aaauccaagcaguaaagcu

SEQ ID NO: 377375 - RNA, 19 nt, Artificial Sequence
  Description of Artificial Sequence: Synthetic oligonucleotide
  Sense Strand Starting at position 745 of SEQ ID NO: 318019
gcuuuacugcuuggauuug

SEQ ID NO: 377376 - RNA, 19 nt, Artificial Sequence
  Description of Artificial Sequence: Synthetic oligonucleotide
  Antisense Strand to SEQ ID NO: 377375
caaauccaagcaguaaagc

SEQ ID NO: 377377 - RNA, 19 nt, Artificial Sequence
  Description of Artificial Sequence: Synthetic oligonucleotide
  Sense Strand Starting at position 745 of SEQ ID NO: 318037
gggucuucuuaaucuaauu

SEQ ID NO: 377378 - RNA, 19 nt, Artificial Sequence
  Description of Artificial Sequence: Synthetic oligonucleotide
  Antisense Strand to SEQ ID NO: 377377
aauuagauuaagaagaccc

SEQ ID NO: 377379 - RNA, 19 nt, Artificial Sequence
  Description of Artificial Sequence: Synthetic oligonucleotide
  Sense Strand Starting at position 745 of SEQ ID NO: 318676
ugaauaacuccuggcauca

SEQ ID NO: 377380 - RNA, 19 nt, Artificial Sequence
  Description of Artificial Sequence: Synthetic oligonucleotide
  Antisense Strand to SEQ ID NO: 377379
ugaugccaggaguuauuca

SEQ ID NO: 377381 - RNA, 19 nt, Artificial Sequence
  Description of Artificial Sequence: Synthetic oligonucleotide
  Sense Strand Starting at position 746 of SEQ ID NO: 315824
gauucuggcuccgaggagu

SEQ ID NO: 377382 - RNA, 19 nt, Artificial Sequence
  Description of Artificial Sequence: Synthetic oligonucleotide
  Antisense Strand to SEQ ID NO: 377381
acuccucggagccagaauc

SEQ ID NO: 377383 - RNA, 19 nt, Artificial Sequence
  Description of Artificial Sequence: Synthetic oligonucleotide
  Sense Strand Starting at position 746 of SEQ ID NO: 315951
aauguaugauaaugaugca

SEQ ID NO: 377384 - RNA, 19 nt, Artificial Sequence
  Description of Artificial Sequence: Synthetic oligonucleotide
  Antisense Strand to SEQ ID NO: 377383
ugcaucauuaucauacauu

SEQ ID NO: 377385 - RNA, 19 nt, Artificial Sequence
  Description of Artificial Sequence: Synthetic oligonucleotide
  Sense Strand Starting at position 746 of SEQ ID NO: 315954
guaugauaaugaugcauca

SEQ ID NO: 377386 - RNA, 19 nt, Artificial Sequence
  Description of Artificial Sequence: Synthetic oligonucleotide
  Antisense Strand to SEQ ID NO: 377385
ugaugcaucauuaucauac

SEQ ID NO: 377387 - RNA, 19 nt, Artificial Sequence
  Description of Artificial Sequence: Synthetic oligonucleotide
  Sense Strand Starting at position 746 of SEQ ID NO: 315975
guagguuccucaguccuau

SEQ ID NO: 377388 - RNA, 19 nt, Artificial Sequence
  Description of Artificial Sequence: Synthetic oligonucleotide
  Antisense Strand to SEQ ID NO: 377387
auaggacugaggaaccuac

SEQ ID NO: 377389 - RNA, 19 nt, Artificial Sequence
  Description of Artificial Sequence: Synthetic oligonucleotide
  Sense Strand Starting at position 746 of SEQ ID NO: 315979
guuccucaguccuaucaaa

SEQ ID NO: 377390 - RNA, 19 nt, Artificial Sequence
  Description of Artificial Sequence: Synthetic oligonucleotide
  Antisense Strand to SEQ ID NO: 377389
uuugauaggacugaggaac

SEQ ID NO: 377391 - RNA, 19 nt, Artificial Sequence
  Description of Artificial Sequence: Synthetic oligonucleotide
  Sense Strand Starting at position 746 of SEQ ID NO: 316381
cgagguuuagagggagcau

SEQ ID NO: 377392 - RNA, 19 nt, Artificial Sequence
  Description of Artificial Sequence: Synthetic oligonucleotide
  Antisense Strand to SEQ ID NO: 377391
augcucccucuaaaccucg

SEQ ID NO: 377393 - RNA, 19 nt, Artificial Sequence
  Description of Artificial Sequence: Synthetic oligonucleotide
  Sense Strand Starting at position 746 of SEQ ID NO: 316760
gguugauuagcguguacug

SEQ ID NO: 377394 - RNA, 19 nt, Artificial Sequence
  Description of Artificial Sequence: Synthetic oligonucleotide
  Antisense Strand to SEQ ID NO: 377393
caguacacgcuaaucaacc

SEQ ID NO: 377395 - RNA, 19 nt, Artificial Sequence
  Description of Artificial Sequence: Synthetic oligonucleotide
  Sense Strand Starting at position 746 of SEQ ID NO: 316803
cacacaucgucaugguuga

SEQ ID NO: 377396 - RNA, 19 nt, Artificial Sequence
  Description of Artificial Sequence: Synthetic oligonucleotide
  Antisense Strand to SEQ ID NO: 377395
ucaaccaugacgaugugug

SEQ ID NO: 377397 - RNA, 19 nt, Artificial Sequence
  Description of Artificial Sequence: Synthetic oligonucleotide
  Sense Strand Starting at position 746 of SEQ ID NO: 316804
acacaucgucaugguugau

SEQ ID NO: 377398 - RNA, 19 nt, Artificial Sequence
  Description of Artificial Sequence: Synthetic oligonucleotide
  Antisense Strand to SEQ ID NO: 377397
aucaaccaugacgaugugu

SEQ ID NO: 377399 - RNA, 19 nt, Artificial Sequence
  Description of Artificial Sequence: Synthetic oligonucleotide
  Sense Strand Starting at position 746 of SEQ ID NO: 316957
aaggguggcucauacugaa

SEQ ID NO: 377400 - RNA, 19 nt, Artificial Sequence
  Description of Artificial Sequence: Synthetic oligonucleotide
  Antisense Strand to SEQ ID NO: 377399
uucaguaugagccacccuu

SEQ ID NO: 377401 - RNA, 19 nt, Artificial Sequence
  Description of Artificial Sequence: Synthetic oligonucleotide
  Sense Strand Starting at position 746 of SEQ ID NO: 316960
gguggcucauacugaaauu

SEQ ID NO: 377402 - RNA, 19 nt, Artificial Sequence
  Description of Artificial Sequence: Synthetic oligonucleotide
  Antisense Strand to SEQ ID NO: 377401
aauuucaguaugagccacc

SEQ ID NO: 377403 - RNA, 19 nt, Artificial Sequence
  Description of Artificial Sequence: Synthetic oligonucleotide
  Sense Strand Starting at position 746 of SEQ ID NO: 317285
gccuuccuugcccgguaaa

SEQ ID NO: 377404 - RNA, 19 nt, Artificial Sequence
  Description of Artificial Sequence: Synthetic oligonucleotide
  Antisense Strand to SEQ ID NO: 377403
uuuaccgggcaaggaaggc

SEQ ID NO: 377405 - RNA, 19 nt, Artificial Sequence
  Description of Artificial Sequence: Synthetic oligonucleotide
  Sense Strand Starting at position 746 of SEQ ID NO: 317321
auuugaagauauggaauca

SEQ ID NO: 377406 - RNA, 19 nt, Artificial Sequence
  Description of Artificial Sequence: Synthetic oligonucleotide
  Antisense Strand to SEQ ID NO: 377405
ugauuccauaucuucaaau

SEQ ID NO: 377407 - RNA, 19 nt, Artificial Sequence
  Description of Artificial Sequence: Synthetic oligonucleotide
  Sense Strand Starting at position 746 of SEQ ID NO: 317393
aguguacaguaaugagauc

SEQ ID NO: 377408 - RNA, 19 nt, Artificial Sequence
  Description of Artificial Sequence: Synthetic oligonucleotide
  Antisense Strand to SEQ ID NO: 377407
gaucucauuacuguacacu

SEQ ID NO: 377409 - RNA, 19 nt, Artificial Sequence
  Description of Artificial Sequence: Synthetic oligonucleotide
  Sense Strand Starting at position 746 of SEQ ID NO: 317739
auguauuagguaugcugaa

SEQ ID NO: 377410 - RNA, 19 nt, Artificial Sequence
  Description of Artificial Sequence: Synthetic oligonucleotide
  Antisense Strand to SEQ ID NO: 377409
uucagcauaccuaauacau

SEQ ID NO: 377411 - RNA, 19 nt, Artificial Sequence
  Description of Artificial Sequence: Synthetic oligonucleotide
  Sense Strand Starting at position 746 of SEQ ID NO: 318055
ucaagagaucuuugcggcu

SEQ ID NO: 377412 - RNA, 19 nt, Artificial Sequence
  Description of Artificial Sequence: Synthetic oligonucleotide
  Antisense Strand to SEQ ID NO: 377411
agccgcaaagaucucuuga

SEQ ID NO: 377413 - RNA, 19 nt, Artificial Sequence
  Description of Artificial Sequence: Synthetic oligonucleotide
  Sense Strand Starting at position 746 of SEQ ID NO: 318057
aagagaucuuugcggcuca

SEQ ID NO: 377414 - RNA, 19 nt, Artificial Sequence
  Description of Artificial Sequence: Synthetic oligonucleotide
  Antisense Strand to SEQ ID NO: 377413
ugagccgcaaagaucucuu

SEQ ID NO: 377415 - RNA, 19 nt, Artificial Sequence
  Description of Artificial Sequence: Synthetic oligonucleotide
  Sense Strand Starting at position 746 of SEQ ID NO: 318124
accuucgaauucuugauaa

SEQ ID NO: 377416 - RNA, 19 nt, Artificial Sequence
  Description of Artificial Sequence: Synthetic oligonucleotide
  Antisense Strand to SEQ ID NO: 377415
uuaucaagaauucgaaggu

SEQ ID NO: 377417 - RNA, 19 nt, Artificial Sequence
  Description of Artificial Sequence: Synthetic oligonucleotide
  Sense Strand Starting at position 746 of SEQ ID NO: 318126
cuucgaauucuugauaacc

SEQ ID NO: 377418 - RNA, 19 nt, Artificial Sequence
  Description of Artificial Sequence: Synthetic oligonucleotide
  Antisense Strand to SEQ ID NO: 377417
gguuaucaagaauucgaag

SEQ ID NO: 377419 - RNA, 19 nt, Artificial Sequence
  Description of Artificial Sequence: Synthetic oligonucleotide
  Sense Strand Starting at position 746 of SEQ ID NO: 318196
uaaggaaacugaggugaaa

SEQ ID NO: 377420 - RNA, 19 nt, Artificial Sequence
  Description of Artificial Sequence: Synthetic oligonucleotide
  Antisense Strand to SEQ ID NO: 377419
uuucaccucaguuuccuua

SEQ ID NO: 377421 - RNA, 19 nt, Artificial Sequence
  Description of Artificial Sequence: Synthetic oligonucleotide
  Sense Strand Starting at position 746 of SEQ ID NO: 318234
aucauaacguauggagaga

SEQ ID NO: 377422 - RNA, 19 nt, Artificial Sequence
  Description of Artificial Sequence: Synthetic oligonucleotide
  Antisense Strand to SEQ ID NO: 377421
ucucuccauacguuaugau

SEQ ID NO: 377423 - RNA, 19 nt, Artificial Sequence
  Description of Artificial Sequence: Synthetic oligonucleotide
  Sense Strand Starting at position 746 of SEQ ID NO: 318260
uggugugcuggagggaaau

SEQ ID NO: 377424 - RNA, 19 nt, Artificial Sequence
  Description of Artificial Sequence: Synthetic oligonucleotide
  Antisense Strand to SEQ ID NO: 377423
auuucccuccagcacacca

SEQ ID NO: 377425 - RNA, 19 nt, Artificial Sequence
  Description of Artificial Sequence: Synthetic oligonucleotide
  Sense Strand Starting at position 746 of SEQ ID NO: 318261
ggugugcuggagggaaauu

SEQ ID NO: 377426 - RNA, 19 nt, Artificial Sequence
  Description of Artificial Sequence: Synthetic oligonucleotide
  Antisense Strand to SEQ ID NO: 377425
aauuucccuccagcacacc

SEQ ID NO: 377427 - RNA, 19 nt, Artificial Sequence
  Description of Artificial Sequence: Synthetic oligonucleotide
  Sense Strand Starting at position 746 of SEQ ID NO: 318262
gugugcuggagggaaauua

SEQ ID NO: 377428 - RNA, 19 nt, Artificial Sequence
  Description of Artificial Sequence: Synthetic oligonucleotide
  Antisense Strand to SEQ ID NO: 377427
uaauuucccuccagcacac

SEQ ID NO: 377429 - RNA, 19 nt, Artificial Sequence
  Description of Artificial Sequence: Synthetic oligonucleotide
  Sense Strand Starting at position 746 of SEQ ID NO: 318911
uaauguaaaugugcagaaa

SEQ ID NO: 377430 - RNA, 19 nt, Artificial Sequence
  Description of Artificial Sequence: Synthetic oligonucleotide
  Antisense Strand to SEQ ID NO: 377429
uuucugcacauuuacauua

SEQ ID NO: 377431 - RNA, 19 nt, Artificial Sequence
  Description of Artificial Sequence: Synthetic oligonucleotide
  Sense Strand Starting at position 746 of SEQ ID NO: 318975
ccaugaacccuauggagua

SEQ ID NO: 377432 - RNA, 19 nt, Artificial Sequence
  Description of Artificial Sequence: Synthetic oligonucleotide
  Antisense Strand to SEQ ID NO: 377431
uacuccauaggguucaugg

SEQ ID NO: 377433 - RNA, 19 nt, Artificial Sequence
  Description of Artificial Sequence: Synthetic oligonucleotide
  Sense Strand Starting at position 746 of SEQ ID NO: 319151
ggaugcaucucugaacuag

SEQ ID NO: 377434 - RNA, 19 nt, Artificial Sequence
  Description of Artificial Sequence: Synthetic oligonucleotide
  Antisense Strand to SEQ ID NO: 377433
cuaguucagagaugcaucc

SEQ ID NO: 377435 - RNA, 19 nt, Artificial Sequence
  Description of Artificial Sequence: Synthetic oligonucleotide
  Sense Strand Starting at position 747 of SEQ ID NO: 315243
cgcucugggagucaugauu

SEQ ID NO: 377436 - RNA, 19 nt, Artificial Sequence
  Description of Artificial Sequence: Synthetic oligonucleotide
  Antisense Strand to SEQ ID NO: 377435
aaucaugacucccagagcg

SEQ ID NO: 377437 - RNA, 19 nt, Artificial Sequence
  Description of Artificial Sequence: Synthetic oligonucleotide
  Sense Strand Starting at position 747 of SEQ ID NO: 315251
gagucaugauucccgugga

SEQ ID NO: 377438 - RNA, 19 nt, Artificial Sequence
  Description of Artificial Sequence: Synthetic oligonucleotide
  Antisense Strand to SEQ ID NO: 377437
uccacgggaaucaugacuc

SEQ ID NO: 377439 - RNA, 19 nt, Artificial Sequence
  Description of Artificial Sequence: Synthetic oligonucleotide
  Sense Strand Starting at position 747 of SEQ ID NO: 315254
ucaugauucccguggagac

SEQ ID NO: 377440 - RNA, 19 nt, Artificial Sequence
  Description of Artificial Sequence: Synthetic oligonucleotide
  Antisense Strand to SEQ ID NO: 377439
gucuccacgggaaucauga

SEQ ID NO: 377441 - RNA, 19 nt, Artificial Sequence
  Description of Artificial Sequence: Synthetic oligonucleotide
  Sense Strand Starting at position 747 of SEQ ID NO: 315255
caugauucccguggagacu

SEQ ID NO: 377442 - RNA, 19 nt, Artificial Sequence
  Description of Artificial Sequence: Synthetic oligonucleotide
  Antisense Strand to SEQ ID NO: 377441
agucuccacgggaaucaug

SEQ ID NO: 377443 - RNA, 19 nt, Artificial Sequence
  Description of Artificial Sequence: Synthetic oligonucleotide
  Sense Strand Starting at position 747 of SEQ ID NO: 315447
gaaacaucccgagguggaa

SEQ ID NO: 377444 - RNA, 19 nt, Artificial Sequence
  Description of Artificial Sequence: Synthetic oligonucleotide
  Antisense Strand to SEQ ID NO: 377443
uuccaccucgggauguuuc

SEQ ID NO: 377445 - RNA, 19 nt, Artificial Sequence
  Description of Artificial Sequence: Synthetic oligonucleotide
  Sense Strand Starting at position 747 of SEQ ID NO: 315531
ccaggaagcuccucaaaua

SEQ ID NO: 377446 - RNA, 19 nt, Artificial Sequence
  Description of Artificial Sequence: Synthetic oligonucleotide
  Antisense Strand to SEQ ID NO: 377445
uauuugaggagcuuccugg

SEQ ID NO: 377447 - RNA, 19 nt, Artificial Sequence
  Description of Artificial Sequence: Synthetic oligonucleotide
  Sense Strand Starting at position 747 of SEQ ID NO: 315547
auaugcgcccaagaaauau

SEQ ID NO: 377448 - RNA, 19 nt, Artificial Sequence
  Description of Artificial Sequence: Synthetic oligonucleotide
  Antisense Strand to SEQ ID NO: 377447
auauuucuugggcgcauau

SEQ ID NO: 377449 - RNA, 19 nt, Artificial Sequence
  Description of Artificial Sequence: Synthetic oligonucleotide
  Sense Strand Starting at position 747 of SEQ ID NO: 316159
uguacaucuuucuccuuga

SEQ ID NO: 377450 - RNA, 19 nt, Artificial Sequence
  Description of Artificial Sequence: Synthetic oligonucleotide
  Antisense Strand to SEQ ID NO: 377449
ucaaggagaaagauguaca

SEQ ID NO: 377451 - RNA, 19 nt, Artificial Sequence
  Description of Artificial Sequence: Synthetic oligonucleotide
  Sense Strand Starting at position 747 of SEQ ID NO: 316205
ugucuuucucucugcgagu

SEQ ID NO: 377452 - RNA, 19 nt, Artificial Sequence
  Description of Artificial Sequence: Synthetic oligonucleotide
  Antisense Strand to SEQ ID NO: 377451
acucgcagagagaaagaca

SEQ ID NO: 377453 - RNA, 19 nt, Artificial Sequence
  Description of Artificial Sequence: Synthetic oligonucleotide
  Sense Strand Starting at position 747 of SEQ ID NO: 316206
gucuuucucucugcgagua

SEQ ID NO: 377454 - RNA, 19 nt, Artificial Sequence
  Description of Artificial Sequence: Synthetic oligonucleotide
  Antisense Strand to SEQ ID NO: 377453
uacucgcagagagaaagac

SEQ ID NO: 377455 - RNA, 19 nt, Artificial Sequence
  Description of Artificial Sequence: Synthetic oligonucleotide
  Sense Strand Starting at position 747 of SEQ ID NO: 316207
ucuuucucucugcgaguaa

SEQ ID NO: 377456 - RNA, 19 nt, Artificial Sequence
  Description of Artificial Sequence: Synthetic oligonucleotide
  Antisense Strand to SEQ ID NO: 377455
uuacucgcagagagaaaga

SEQ ID NO: 377457 - RNA, 19 nt, Artificial Sequence
  Description of Artificial Sequence: Synthetic oligonucleotide
  Sense Strand Starting at position 747 of SEQ ID NO: 316306
gcauucucccucugucuuu

SEQ ID NO: 377458 - RNA, 19 nt, Artificial Sequence
  Description of Artificial Sequence: Synthetic oligonucleotide
  Antisense Strand to SEQ ID NO: 377457
aaagacagagggagaaugc

SEQ ID NO: 377459 - RNA, 19 nt, Artificial Sequence
  Description of Artificial Sequence: Synthetic oligonucleotide
  Sense Strand Starting at position 747 of SEQ ID NO: 316328
cucagaucuugucccguau

SEQ ID NO: 377460 - RNA, 19 nt, Artificial Sequence
  Description of Artificial Sequence: Synthetic oligonucleotide
  Antisense Strand to SEQ ID NO: 377459
auacgggacaagaucugag

SEQ ID NO: 377461 - RNA, 19 nt, Artificial Sequence
  Description of Artificial Sequence: Synthetic oligonucleotide
  Sense Strand Starting at position 747 of SEQ ID NO: 316919
cggaccucuuucucugaca

SEQ ID NO: 377462 - RNA, 19 nt, Artificial Sequence
  Description of Artificial Sequence: Synthetic oligonucleotide
  Antisense Strand to SEQ ID NO: 377461
ugucagagaaagagguccg

SEQ ID NO: 377463 - RNA, 19 nt, Artificial Sequence
  Description of Artificial Sequence: Synthetic oligonucleotide
  Sense Strand Starting at position 747 of SEQ ID NO: 317480
uugggcugcugggaagaau

SEQ ID NO: 377464 - RNA, 19 nt, Artificial Sequence
  Description of Artificial Sequence: Synthetic oligonucleotide
  Antisense Strand to SEQ ID NO: 377463
auucuucccagcagcccaa

SEQ ID NO: 377465 - RNA, 19 nt, Artificial Sequence
  Description of Artificial Sequence: Synthetic oligonucleotide
  Sense Strand Starting at position 747 of SEQ ID NO: 317549
gaaagagagugagacuuaa

SEQ ID NO: 377466 - RNA, 19 nt, Artificial Sequence
  Description of Artificial Sequence: Synthetic oligonucleotide
  Antisense Strand to SEQ ID NO: 377465
uuaagucucacucucuuuc

SEQ ID NO: 377467 - RNA, 19 nt, Artificial Sequence
  Description of Artificial Sequence: Synthetic oligonucleotide
  Sense Strand Starting at position 747 of SEQ ID NO: 317652
ggguggugugcuuggaaua

SEQ ID NO: 377468 - RNA, 19 nt, Artificial Sequence
  Description of Artificial Sequence: Synthetic oligonucleotide
  Antisense Strand to SEQ ID NO: 377467
uauuccaagcacaccaccc

SEQ ID NO: 377469 - RNA, 19 nt, Artificial Sequence
  Description of Artificial Sequence: Synthetic oligonucleotide
  Sense Strand Starting at position 747 of SEQ ID NO: 317653
gguggugugcuuggaauau

SEQ ID NO: 377470 - RNA, 19 nt, Artificial Sequence
  Description of Artificial Sequence: Synthetic oligonucleotide
  Antisense Strand to SEQ ID NO: 377469
auauuccaagcacaccacc

SEQ ID NO: 377471 - RNA, 19 nt, Artificial Sequence
  Description of Artificial Sequence: Synthetic oligonucleotide
  Sense Strand Starting at position 747 of SEQ ID NO: 317662
cuuggaauaucugcucagu

SEQ ID NO: 377472 - RNA, 19 nt, Artificial Sequence
  Description of Artificial Sequence: Synthetic oligonucleotide
  Antisense Strand to SEQ ID NO: 377471
acugagcagauauuccaag

SEQ ID NO: 377473 - RNA, 19 nt, Artificial Sequence
  Description of Artificial Sequence: Synthetic oligonucleotide
  Sense Strand Starting at position 747 of SEQ ID NO: 317665
ggaauaucugcucagugca

SEQ ID NO: 377474 - RNA, 19 nt, Artificial Sequence
  Description of Artificial Sequence: Synthetic oligonucleotide
  Antisense Strand to SEQ ID NO: 377473
ugcacugagcagauauucc

SEQ ID NO: 377475 - RNA, 19 nt, Artificial Sequence
  Description of Artificial Sequence: Synthetic oligonucleotide
  Sense Strand Starting at position 747 of SEQ ID NO: 317746
gcagaaccucagugcagau

SEQ ID NO: 377476 - RNA, 19 nt, Artificial Sequence
  Description of Artificial Sequence: Synthetic oligonucleotide
  Antisense Strand to SEQ ID NO: 377475
aucugcacugagguucugc

SEQ ID NO: 377477 - RNA, 19 nt, Artificial Sequence
  Description of Artificial Sequence: Synthetic oligonucleotide
  Sense Strand Starting at position 747 of SEQ ID NO: 318090
gacuguaaccugugaggag

SEQ ID NO: 377478 - RNA, 19 nt, Artificial Sequence
  Description of Artificial Sequence: Synthetic oligonucleotide
  Antisense Strand to SEQ ID NO: 377477
cuccucacagguuacaguc

SEQ ID NO: 377479 - RNA, 19 nt, Artificial Sequence
  Description of Artificial Sequence: Synthetic oligonucleotide
  Sense Strand Starting at position 747 of SEQ ID NO: 318199
caaguaggguuguaaagac

SEQ ID NO: 377480 - RNA, 19 nt, Artificial Sequence
  Description of Artificial Sequence: Synthetic oligonucleotide
  Antisense Strand to SEQ ID NO: 377479
gucuuuacaacccuacuug

SEQ ID NO: 377481 - RNA, 19 nt, Artificial Sequence
  Description of Artificial Sequence: Synthetic oligonucleotide
  Sense Strand Starting at position 747 of SEQ ID NO: 318230
ugguguagcucucugcaaa

SEQ ID NO: 377482 - RNA, 19 nt, Artificial Sequence
  Description of Artificial Sequence: Synthetic oligonucleotide
  Antisense Strand to SEQ ID NO: 377481
uuugcagagagcuacacca

SEQ ID NO: 377483 - RNA, 19 nt, Artificial Sequence
  Description of Artificial Sequence: Synthetic oligonucleotide
  Sense Strand Starting at position 747 of SEQ ID NO: 318231
gguguagcucucugcaaag

SEQ ID NO: 377484 - RNA, 19 nt, Artificial Sequence
  Description of Artificial Sequence: Synthetic oligonucleotide
  Antisense Strand to SEQ ID NO: 377483
cuuugcagagagcuacacc

SEQ ID NO: 377485 - RNA, 19 nt, Artificial Sequence
  Description of Artificial Sequence: Synthetic oligonucleotide
  Sense Strand Starting at position 747 of SEQ ID NO: 318233
uguagcucucugcaaagga

SEQ ID NO: 377486 - RNA, 19 nt, Artificial Sequence
  Description of Artificial Sequence: Synthetic oligonucleotide
  Antisense Strand to SEQ ID NO: 377485
uccuuugcagagagcuaca

SEQ ID NO: 377487 - RNA, 19 nt, Artificial Sequence
  Description of Artificial Sequence: Synthetic oligonucleotide
  Sense Strand Starting at position 747 of SEQ ID NO: 318286
gugugaaucucugcuucug

SEQ ID NO: 377488 - RNA, 19 nt, Artificial Sequence
  Description of Artificial Sequence: Synthetic oligonucleotide
  Antisense Strand to SEQ ID NO: 377487
cagaagcagagauucacac

SEQ ID NO: 377489 - RNA, 19 nt, Artificial Sequence
  Description of Artificial Sequence: Synthetic oligonucleotide
  Sense Strand Starting at position 747 of SEQ ID NO: 318288
gugaaucucugcuucugau

SEQ ID NO: 377490 - RNA, 19 nt, Artificial Sequence
  Description of Artificial Sequence: Synthetic oligonucleotide
  Antisense Strand to SEQ ID NO: 377489
aucagaagcagagauucac

SEQ ID NO: 377491 - RNA, 19 nt, Artificial Sequence
  Description of Artificial Sequence: Synthetic oligonucleotide
  Sense Strand Starting at position 747 of SEQ ID NO: 318297
ugcuucugauuccucaaga

SEQ ID NO: 377492 - RNA, 19 nt, Artificial Sequence
  Description of Artificial Sequence: Synthetic oligonucleotide
  Antisense Strand to SEQ ID NO: 377491
ucuugaggaaucagaagca

SEQ ID NO: 377493 - RNA, 19 nt, Artificial Sequence
  Description of Artificial Sequence: Synthetic oligonucleotide
  Sense Strand Starting at position 747 of SEQ ID NO: 318298
gcuucugauuccucaagac

SEQ ID NO: 377494 - RNA, 19 nt, Artificial Sequence
  Description of Artificial Sequence: Synthetic oligonucleotide
  Antisense Strand to SEQ ID NO: 377493
gucuugaggaaucagaagc

SEQ ID NO: 377495 - RNA, 19 nt, Artificial Sequence
  Description of Artificial Sequence: Synthetic oligonucleotide
  Sense Strand Starting at position 747 of SEQ ID NO: 318366
gaccuucgaugcucagaca

SEQ ID NO: 377496 - RNA, 19 nt, Artificial Sequence
  Description of Artificial Sequence: Synthetic oligonucleotide
  Antisense Strand to SEQ ID NO: 377495
ugucugagcaucgaagguc

SEQ ID NO: 377497 - RNA, 19 nt, Artificial Sequence
  Description of Artificial Sequence: Synthetic oligonucleotide
  Sense Strand Starting at position 747 of SEQ ID NO: 318404
gacucaggguuucugcauu

SEQ ID NO: 377498 - RNA, 19 nt, Artificial Sequence
  Description of Artificial Sequence: Synthetic oligonucleotide
  Antisense Strand to SEQ ID NO: 377497
aaugcagaaacccugaguc

SEQ ID NO: 377499 - RNA, 19 nt, Artificial Sequence
  Description of Artificial Sequence: Synthetic oligonucleotide
  Sense Strand Starting at position 747 of SEQ ID NO: 318502
gugaccacuugcuucuaga

SEQ ID NO: 377500 - RNA, 19 nt, Artificial Sequence
  Description of Artificial Sequence: Synthetic oligonucleotide
  Antisense Strand to SEQ ID NO: 377499
ucuagaagcaaguggucac

SEQ ID NO: 377501 - RNA, 19 nt, Artificial Sequence
  Description of Artificial Sequence: Synthetic oligonucleotide
  Sense Strand Starting at position 747 of SEQ ID NO: 318556
ugggccacgccauaauaau

SEQ ID NO: 377502 - RNA, 19 nt, Artificial Sequence
  Description of Artificial Sequence: Synthetic oligonucleotide
  Antisense Strand to SEQ ID NO: 377501
auuauuauggcguggccca

SEQ ID NO: 377503 - RNA, 19 nt, Artificial Sequence
  Description of Artificial Sequence: Synthetic oligonucleotide
  Sense Strand Starting at position 747 of SEQ ID NO: 318645
uucuuuccuggagguaaga

SEQ ID NO: 377504 - RNA, 19 nt, Artificial Sequence
  Description of Artificial Sequence: Synthetic oligonucleotide
  Antisense Strand to SEQ ID NO: 377503
ucuuaccuccaggaaagaa

SEQ ID NO: 377505 - RNA, 19 nt, Artificial Sequence
  Description of Artificial Sequence: Synthetic oligonucleotide
  Sense Strand Starting at position 747 of SEQ ID NO: 318674
gguaaagagucauguggag

SEQ ID NO: 377506 - RNA, 19 nt, Artificial Sequence
  Description of Artificial Sequence: Synthetic oligonucleotide
  Antisense Strand to SEQ ID NO: 377505
cuccacaugacucuuuacc

SEQ ID NO: 377507 - RNA, 19 nt, Artificial Sequence
  Description of Artificial Sequence: Synthetic oligonucleotide
  Sense Strand Starting at position 747 of SEQ ID NO: 318676
uaaagagucauguggagca

SEQ ID NO: 377508 - RNA, 19 nt, Artificial Sequence
  Description of Artificial Sequence: Synthetic oligonucleotide
  Antisense Strand to SEQ ID NO: 377507
ugcuccacaugacucuuua

SEQ ID NO: 377509 - RNA, 19 nt, Artificial Sequence
  Description of Artificial Sequence: Synthetic oligonucleotide
  Sense Strand Starting at position 747 of SEQ ID NO: 318726
ggaccuacugcagggaauu

SEQ ID NO: 377510 - RNA, 19 nt, Artificial Sequence
  Description of Artificial Sequence: Synthetic oligonucleotide
  Antisense Strand to SEQ ID NO: 377509
aauucccugcaguaggucc

SEQ ID NO: 377511 - RNA, 19 nt, Artificial Sequence
  Description of Artificial Sequence: Synthetic oligonucleotide
  Sense Strand Starting at position 747 of SEQ ID NO: 318760
ccagcuuggccuucgugau

SEQ ID NO: 377512 - RNA, 19 nt, Artificial Sequence
  Description of Artificial Sequence: Synthetic oligonucleotide
  Antisense Strand to SEQ ID NO: 377511
aucacgaaggccaagcugg

SEQ ID NO: 377513 - RNA, 19 nt, Artificial Sequence
  Description of Artificial Sequence: Synthetic oligonucleotide
  Sense Strand Starting at position 747 of SEQ ID NO: 318764
cuuggccuucgugaucauu

SEQ ID NO: 377514 - RNA, 19 nt, Artificial Sequence
  Description of Artificial Sequence: Synthetic oligonucleotide
  Antisense Strand to SEQ ID NO: 377513
aaugaucacgaaggccaag

SEQ ID NO: 377515 - RNA, 19 nt, Artificial Sequence
  Description of Artificial Sequence: Synthetic oligonucleotide
  Sense Strand Starting at position 748 of SEQ ID NO: 315728
gggcgcuucuucuugauag

SEQ ID NO: 377516 - RNA, 19 nt, Artificial Sequence
  Description of Artificial Sequence: Synthetic oligonucleotide
  Antisense Strand to SEQ ID NO: 377515
cuaucaagaagaagcgccc

SEQ ID NO: 377517 - RNA, 19 nt, Artificial Sequence
  Description of Artificial Sequence: Synthetic oligonucleotide
  Sense Strand Starting at position 748 of SEQ ID NO: 315794
accugaagccucgguagaa

SEQ ID NO: 377518 - RNA, 19 nt, Artificial Sequence
  Description of Artificial Sequence: Synthetic oligonucleotide
  Antisense Strand to SEQ ID NO: 377517
uucuaccgaggcuucaggu

SEQ ID NO: 377519 - RNA, 19 nt, Artificial Sequence
  Description of Artificial Sequence: Synthetic oligonucleotide
  Sense Strand Starting at position 748 of SEQ ID NO: 315795
ccugaagccucgguagaaa

SEQ ID NO: 377520 - RNA, 19 nt, Artificial Sequence
  Description of Artificial Sequence: Synthetic oligonucleotide
  Antisense Strand to SEQ ID NO: 377519
uuucuaccgaggcuucagg

SEQ ID NO: 377521 - RNA, 19 nt, Artificial Sequence
  Description of Artificial Sequence: Synthetic oligonucleotide
  Sense Strand Starting at position 748 of SEQ ID NO: 316099
ugggcaauacuagggaauu

SEQ ID NO: 377522 - RNA, 19 nt, Artificial Sequence
  Description of Artificial Sequence: Synthetic oligonucleotide
  Antisense Strand to SEQ ID NO: 377521
aauucccuaguauugccca

SEQ ID NO: 377523 - RNA, 19 nt, Artificial Sequence
  Description of Artificial Sequence: Synthetic oligonucleotide
  Sense Strand Starting at position 748 of SEQ ID NO: 316100
gggcaauacuagggaauuu

SEQ ID NO: 377524 - RNA, 19 nt, Artificial Sequence
  Description of Artificial Sequence: Synthetic oligonucleotide
  Antisense Strand to SEQ ID NO: 377523
aaauucccuaguauugccc

SEQ ID NO: 377525 - RNA, 19 nt, Artificial Sequence
  Description of Artificial Sequence: Synthetic oligonucleotide
  Sense Strand Starting at position 748 of SEQ ID NO: 316148
gcaagcgguuccucaagga

SEQ ID NO: 377526 - RNA, 19 nt, Artificial Sequence
  Description of Artificial Sequence: Synthetic oligonucleotide
  Antisense Strand to SEQ ID NO: 377525
uccuugaggaaccgcuugc

SEQ ID NO: 377527 - RNA, 19 nt, Artificial Sequence
  Description of Artificial Sequence: Synthetic oligonucleotide
  Sense Strand Starting at position 748 of SEQ ID NO: 316233
gccagaugcccacagaauu

SEQ ID NO: 377528 - RNA, 19 nt, Artificial Sequence
  Description of Artificial Sequence: Synthetic oligonucleotide
  Antisense Strand to SEQ ID NO: 377527
aauucugugggcaucuggc

SEQ ID NO: 377529 - RNA, 19 nt, Artificial Sequence
  Description of Artificial Sequence: Synthetic oligonucleotide
  Sense Strand Starting at position 748 of SEQ ID NO: 316420
gcagguauuuccucgcuca

SEQ ID NO: 377530 - RNA, 19 nt, Artificial Sequence
  Description of Artificial Sequence: Synthetic oligonucleotide
  Antisense Strand to SEQ ID NO: 377529
ugagcgaggaaauaccugc

SEQ ID NO: 377531 - RNA, 19 nt, Artificial Sequence
  Description of Artificial Sequence: Synthetic oligonucleotide
  Sense Strand Starting at position 748 of SEQ ID NO: 316421
cagguauuuccucgcucag

SEQ ID NO: 377532 - RNA, 19 nt, Artificial Sequence
  Description of Artificial Sequence: Synthetic oligonucleotide
  Antisense Strand to SEQ ID NO: 377531
cugagcgaggaaauaccug

SEQ ID NO: 377533 - RNA, 19 nt, Artificial Sequence
  Description of Artificial Sequence: Synthetic oligonucleotide
  Sense Strand Starting at position 748 of SEQ ID NO: 316640
gagcuauaucggcagcaca

SEQ ID NO: 377534 - RNA, 19 nt, Artificial Sequence
  Description of Artificial Sequence: Synthetic oligonucleotide
  Antisense Strand to SEQ ID NO: 377533
ugugcugccgauauagcuc

SEQ ID NO: 377535 - RNA, 19 nt, Artificial Sequence
  Description of Artificial Sequence: Synthetic oligonucleotide
  Sense Strand Starting at position 748 of SEQ ID NO: 316750
ccuaacaaaccguggaaua

SEQ ID NO: 377536 - RNA, 19 nt, Artificial Sequence
  Description of Artificial Sequence: Synthetic oligonucleotide
  Antisense Strand to SEQ ID NO: 377535
uauuccacgguuuguuagg

SEQ ID NO: 377537 - RNA, 19 nt, Artificial Sequence
  Description of Artificial Sequence: Synthetic oligonucleotide
  Sense Strand Starting at position 748 of SEQ ID NO: 316887
gccgaaaguguccaggacu

SEQ ID NO: 377538 - RNA, 19 nt, Artificial Sequence
  Description of Artificial Sequence: Synthetic oligonucleotide
  Antisense Strand to SEQ ID NO: 377537
aguccuggacacuuucggc

SEQ ID NO: 377539 - RNA, 19 nt, Artificial Sequence
  Description of Artificial Sequence: Synthetic oligonucleotide
  Sense Strand Starting at position 748 of SEQ ID NO: 317072
cuugcuugucccgcagagu

SEQ ID NO: 377540 - RNA, 19 nt, Artificial Sequence
  Description of Artificial Sequence: Synthetic oligonucleotide
  Antisense Strand to SEQ ID NO: 377539
acucugcgggacaagcaag

SEQ ID NO: 377541 - RNA, 19 nt, Artificial Sequence
  Description of Artificial Sequence: Synthetic oligonucleotide
  Sense Strand Starting at position 748 of SEQ ID NO: 317136
ggucgcuggcuucagaguu

SEQ ID NO: 377542 - RNA, 19 nt, Artificial Sequence
  Description of Artificial Sequence: Synthetic oligonucleotide
  Antisense Strand to SEQ ID NO: 377541
aacucugaagccagcgacc

SEQ ID NO: 377543 - RNA, 19 nt, Artificial Sequence
  Description of Artificial Sequence: Synthetic oligonucleotide
  Sense Strand Starting at position 748 of SEQ ID NO: 317148
cagaguuuauucucggaga

SEQ ID NO: 377544 - RNA, 19 nt, Artificial Sequence
  Description of Artificial Sequence: Synthetic oligonucleotide
  Antisense Strand to SEQ ID NO: 377543
ucuccgagaauaaacucug

SEQ ID NO: 377545 - RNA, 19 nt, Artificial Sequence
  Description of Artificial Sequence: Synthetic oligonucleotide
  Sense Strand Starting at position 748 of SEQ ID NO: 317150
gaguuuauucucggagaug

SEQ ID NO: 377546 - RNA, 19 nt, Artificial Sequence
  Description of Artificial Sequence: Synthetic oligonucleotide
  Antisense Strand to SEQ ID NO: 377545
caucuccgagaauaaacuc

SEQ ID NO: 377547 - RNA, 19 nt, Artificial Sequence
  Description of Artificial Sequence: Synthetic oligonucleotide
  Sense Strand Starting at position 748 of SEQ ID NO: 317197
ggcugcagcccugaugaaa

SEQ ID NO: 377548 - RNA, 19 nt, Artificial Sequence
  Description of Artificial Sequence: Synthetic oligonucleotide
  Antisense Strand to SEQ ID NO: 377547
uuucaucagggcugcagcc

SEQ ID NO: 377549 - RNA, 19 nt, Artificial Sequence
  Description of Artificial Sequence: Synthetic oligonucleotide
  Sense Strand Starting at position 748 of SEQ ID NO: 317288
cggacaugcuuuguguuua

SEQ ID NO: 377550 - RNA, 19 nt, Artificial Sequence
  Description of Artificial Sequence: Synthetic oligonucleotide
  Antisense Strand to SEQ ID NO: 377549
uaaacacaaagcauguccg

SEQ ID NO: 377551 - RNA, 19 nt, Artificial Sequence
  Description of Artificial Sequence: Synthetic oligonucleotide
  Sense Strand Starting at position 748 of SEQ ID NO: 317292
caugcuuuguguuuacgga

SEQ ID NO: 377552 - RNA, 19 nt, Artificial Sequence
  Description of Artificial Sequence: Synthetic oligonucleotide
  Antisense Strand to SEQ ID NO: 377551
uccguaaacacaaagcaug

SEQ ID NO: 377553 - RNA, 19 nt, Artificial Sequence
  Description of Artificial Sequence: Synthetic oligonucleotide
  Sense Strand Starting at position 748 of SEQ ID NO: 317293
augcuuuguguuuacggau

SEQ ID NO: 377554 - RNA, 19 nt, Artificial Sequence
  Description of Artificial Sequence: Synthetic oligonucleotide
  Antisense Strand to SEQ ID NO: 377553
auccguaaacacaaagcau

SEQ ID NO: 377555 - RNA, 19 nt, Artificial Sequence
  Description of Artificial Sequence: Synthetic oligonucleotide
  Sense Strand Starting at position 748 of SEQ ID NO: 317308
ggauuuggguccuggaaug

SEQ ID NO: 377556 - RNA, 19 nt, Artificial Sequence
  Description of Artificial Sequence: Synthetic oligonucleotide
  Antisense Strand to SEQ ID NO: 377555
cauuccaggacccaaaucc

SEQ ID NO: 377557 - RNA, 19 nt, Artificial Sequence
  Description of Artificial Sequence: Synthetic oligonucleotide
  Sense Strand Starting at position 748 of SEQ ID NO: 317335
ucugaauuguuccucugca

SEQ ID NO: 377558 - RNA, 19 nt, Artificial Sequence
  Description of Artificial Sequence: Synthetic oligonucleotide
  Antisense Strand to SEQ ID NO: 377557
ugcagaggaacaauucaga

SEQ ID NO: 377559 - RNA, 19 nt, Artificial Sequence
  Description of Artificial Sequence: Synthetic oligonucleotide
  Sense Strand Starting at position 748 of SEQ ID NO: 317336
cugaauuguuccucugcaa

SEQ ID NO: 377560 - RNA, 19 nt, Artificial Sequence
  Description of Artificial Sequence: Synthetic oligonucleotide
  Antisense Strand to SEQ ID NO: 377559
uugcagaggaacaauucag

SEQ ID NO: 377561 - RNA, 19 nt, Artificial Sequence
  Description of Artificial Sequence: Synthetic oligonucleotide
  Sense Strand Starting at position 748 of SEQ ID NO: 317419
guuggacugcuccaagcuu

SEQ ID NO: 377562 - RNA, 19 nt, Artificial Sequence
  Description of Artificial Sequence: Synthetic oligonucleotide
  Antisense Strand to SEQ ID NO: 377561
aagcuuggagcaguccaac

SEQ ID NO: 377563 - RNA, 19 nt, Artificial Sequence
  Description of Artificial Sequence: Synthetic oligonucleotide
  Sense Strand Starting at position 748 of SEQ ID NO: 317465
cuggauuccaguggacaga

SEQ ID NO: 377564 - RNA, 19 nt, Artificial Sequence
  Description of Artificial Sequence: Synthetic oligonucleotide
  Antisense Strand to SEQ ID NO: 377563
ucuguccacuggaauccag

SEQ ID NO: 377565 - RNA, 19 nt, Artificial Sequence
  Description of Artificial Sequence: Synthetic oligonucleotide
  Sense Strand Starting at position 748 of SEQ ID NO: 317522
gugucugcugcgucugauu

SEQ ID NO: 377566 - RNA, 19 nt, Artificial Sequence
  Description of Artificial Sequence: Synthetic oligonucleotide
  Antisense Strand to SEQ ID NO: 377565
aaucagacgcagcagacac

SEQ ID NO: 377567 - RNA, 19 nt, Artificial Sequence
  Description of Artificial Sequence: Synthetic oligonucleotide
  Sense Strand Starting at position 748 of SEQ ID NO: 317653
guccuuguccucuauccua

SEQ ID NO: 377568 - RNA, 19 nt, Artificial Sequence
  Description of Artificial Sequence: Synthetic oligonucleotide
  Antisense Strand to SEQ ID NO: 377567
uaggauagaggacaaggac

SEQ ID NO: 377569 - RNA, 19 nt, Artificial Sequence
  Description of Artificial Sequence: Synthetic oligonucleotide
  Sense Strand Starting at position 748 of SEQ ID NO: 317947
uuagcucuccuuugcuaga

SEQ ID NO: 377570 - RNA, 19 nt, Artificial Sequence
  Description of Artificial Sequence: Synthetic oligonucleotide
  Antisense Strand to SEQ ID NO: 377569
ucuagcaaaggagagcuaa

SEQ ID NO: 377571 - RNA, 19 nt, Artificial Sequence
  Description of Artificial Sequence: Synthetic oligonucleotide
  Sense Strand Starting at position 748 of SEQ ID NO: 318045
ggaauaggugugcauaggu

SEQ ID NO: 377572 - RNA, 19 nt, Artificial Sequence
  Description of Artificial Sequence: Synthetic oligonucleotide
  Antisense Strand to SEQ ID NO: 377571
accuaugcacaccuauucc

SEQ ID NO: 377573 - RNA, 19 nt, Artificial Sequence
  Description of Artificial Sequence: Synthetic oligonucleotide
  Sense Strand Starting at position 748 of SEQ ID NO: 318101
ucaguuuaugauggagauu

SEQ ID NO: 377574 - RNA, 19 nt, Artificial Sequence
  Description of Artificial Sequence: Synthetic oligonucleotide
  Antisense Strand to SEQ ID NO: 377573
aaucuccaucauaaacuga

SEQ ID NO: 377575 - RNA, 19 nt, Artificial Sequence
  Description of Artificial Sequence: Synthetic oligonucleotide
  Sense Strand Starting at position 748 of SEQ ID NO: 318270
ccaggcuugaucugagaca

SEQ ID NO: 377576 - RNA, 19 nt, Artificial Sequence
  Description of Artificial Sequence: Synthetic oligonucleotide
  Antisense Strand to SEQ ID NO: 377575
ugucucagaucaagccugg

SEQ ID NO: 377577 - RNA, 19 nt, Artificial Sequence
  Description of Artificial Sequence: Synthetic oligonucleotide
  Sense Strand Starting at position 748 of SEQ ID NO: 318271
caggcuugaucugagacaa

SEQ ID NO: 377578 - RNA, 19 nt, Artificial Sequence
  Description of Artificial Sequence: Synthetic oligonucleotide
  Antisense Strand to SEQ ID NO: 377577
uugucucagaucaagccug

SEQ ID NO: 377579 - RNA, 19 nt, Artificial Sequence
  Description of Artificial Sequence: Synthetic oligonucleotide
  Sense Strand Starting at position 748 of SEQ ID NO: 318464
gugggcuacucacugcuua

SEQ ID NO: 377580 - RNA, 19 nt, Artificial Sequence
  Description of Artificial Sequence: Synthetic oligonucleotide
  Antisense Strand to SEQ ID NO: 377579
uaagcagugaguagcccac

SEQ ID NO: 377581 - RNA, 19 nt, Artificial Sequence
  Description of Artificial Sequence: Synthetic oligonucleotide
  Sense Strand Starting at position 748 of SEQ ID NO: 318465
ugggcuacucacugcuuau

SEQ ID NO: 377582 - RNA, 19 nt, Artificial Sequence
  Description of Artificial Sequence: Synthetic oligonucleotide
  Antisense Strand to SEQ ID NO: 377581
auaagcagugaguagccca

SEQ ID NO: 377583 - RNA, 19 nt, Artificial Sequence
  Description of Artificial Sequence: Synthetic oligonucleotide
  Sense Strand Starting at position 748 of SEQ ID NO: 318527
cuuuaauucucacuagcga

SEQ ID NO: 377584 - RNA, 19 nt, Artificial Sequence
  Description of Artificial Sequence: Synthetic oligonucleotide
  Antisense Strand to SEQ ID NO: 377583
ucgcuagugagaauuaaag

SEQ ID NO: 377585 - RNA, 19 nt, Artificial Sequence
  Description of Artificial Sequence: Synthetic oligonucleotide
  Sense Strand Starting at position 748 of SEQ ID NO: 318528
uuuaauucucacuagcgaa

SEQ ID NO: 377586 - RNA, 19 nt, Artificial Sequence
  Description of Artificial Sequence: Synthetic oligonucleotide
  Antisense Strand to SEQ ID NO: 377585
uucgcuagugagaauuaaa

SEQ ID NO: 377587 - RNA, 19 nt, Artificial Sequence
  Description of Artificial Sequence: Synthetic oligonucleotide
  Sense Strand Starting at position 748 of SEQ ID NO: 318615
ccaugaggcuucguaaggu

SEQ ID NO: 377588 - RNA, 19 nt, Artificial Sequence
  Description of Artificial Sequence: Synthetic oligonucleotide
  Antisense Strand to SEQ ID NO: 377587
accuuacgaagccucaugg

SEQ ID NO: 377589 - RNA, 19 nt, Artificial Sequence
  Description of Artificial Sequence: Synthetic oligonucleotide
  Sense Strand Starting at position 748 of SEQ ID NO: 318624
uucguaagguuccuucuca

SEQ ID NO: 377590 - RNA, 19 nt, Artificial Sequence
  Description of Artificial Sequence: Synthetic oligonucleotide
  Antisense Strand to SEQ ID NO: 377589
ugagaaggaaccuuacgaa

SEQ ID NO: 377591 - RNA, 19 nt, Artificial Sequence
  Description of Artificial Sequence: Synthetic oligonucleotide
  Sense Strand Starting at position 748 of SEQ ID NO: 318922
aggucugacuucuaacaaa

SEQ ID NO: 377592 - RNA, 19 nt, Artificial Sequence
  Description of Artificial Sequence: Synthetic oligonucleotide
  Antisense Strand to SEQ ID NO: 377591
uuuguuagaagucagaccu

SEQ ID NO: 377593 - RNA, 19 nt, Artificial Sequence
  Description of Artificial Sequence: Synthetic oligonucleotide
  Sense Strand Starting at position 748 of SEQ ID NO: 319090
cagagagcucugcacucuu

SEQ ID NO: 377594 - RNA, 19 nt, Artificial Sequence
  Description of Artificial Sequence: Synthetic oligonucleotide
  Antisense Strand to SEQ ID NO: 377593
aagagugcagagcucucug

SEQ ID NO: 377595 - RNA, 19 nt, Artificial Sequence
  Description of Artificial Sequence: Synthetic oligonucleotide
  Sense Strand Starting at position 749 of SEQ ID NO: 315352
gucagagcuccaugggaag

SEQ ID NO: 377596 - RNA, 19 nt, Artificial Sequence
  Description of Artificial Sequence: Synthetic oligonucleotide
  Antisense Strand to SEQ ID NO: 377595
cuucccauggagcucugac

SEQ ID NO: 377597 - RNA, 19 nt, Artificial Sequence
  Description of Artificial Sequence: Synthetic oligonucleotide
  Sense Strand Starting at position 749 of SEQ ID NO: 315437
ugauacuccucagagaaag

SEQ ID NO: 377598 - RNA, 19 nt, Artificial Sequence
  Description of Artificial Sequence: Synthetic oligonucleotide
  Antisense Strand to SEQ ID NO: 377597
cuuucucugaggaguauca

SEQ ID NO: 377599 - RNA, 19 nt, Artificial Sequence
  Description of Artificial Sequence: Synthetic oligonucleotide
  Sense Strand Starting at position 749 of SEQ ID NO: 315456
ugcccuuuccaggagagga

SEQ ID NO: 377600 - RNA, 19 nt, Artificial Sequence
  Description of Artificial Sequence: Synthetic oligonucleotide
  Antisense Strand to SEQ ID NO: 377599
uccucuccuggaaagggca

SEQ ID NO: 377601 - RNA, 19 nt, Artificial Sequence
  Description of Artificial Sequence: Synthetic oligonucleotide
  Sense Strand Starting at position 749 of SEQ ID NO: 315492
ggcuaagcucuggauuaac

SEQ ID NO: 377602 - RNA, 19 nt, Artificial Sequence
  Description of Artificial Sequence: Synthetic oligonucleotide
  Antisense Strand to SEQ ID NO: 377601
guuaauccagagcuuagcc

SEQ ID NO: 377603 - RNA, 19 nt, Artificial Sequence
  Description of Artificial Sequence: Synthetic oligonucleotide
  Sense Strand Starting at position 749 of SEQ ID NO: 315501
cuggauuaaccacgagaca

SEQ ID NO: 377604 - RNA, 19 nt, Artificial Sequence
  Description of Artificial Sequence: Synthetic oligonucleotide
  Antisense Strand to SEQ ID NO: 377603
ugucucgugguuaauccag

SEQ ID NO: 377605 - RNA, 19 nt, Artificial Sequence
  Description of Artificial Sequence: Synthetic oligonucleotide
  Sense Strand Starting at position 749 of SEQ ID NO: 315531
augagcaucucacagcaau

SEQ ID NO: 377606 - RNA, 19 nt, Artificial Sequence
  Description of Artificial Sequence: Synthetic oligonucleotide
  Antisense Strand to SEQ ID NO: 377605
auugcugugagaugcucau

SEQ ID NO: 377607 - RNA, 19 nt, Artificial Sequence
  Description of Artificial Sequence: Synthetic oligonucleotide
  Sense Strand Starting at position 749 of SEQ ID NO: 315556
guaggacuauuaucuccau

SEQ ID NO: 377608 - RNA, 19 nt, Artificial Sequence
  Description of Artificial Sequence: Synthetic oligonucleotide
  Antisense Strand to SEQ ID NO: 377607
auggagauaauaguccuac

SEQ ID NO: 377609 - RNA, 19 nt, Artificial Sequence
  Description of Artificial Sequence: Synthetic oligonucleotide
  Sense Strand Starting at position 749 of SEQ ID NO: 315567
aucuccauuucuuagguga

SEQ ID NO: 377610 - RNA, 19 nt, Artificial Sequence
  Description of Artificial Sequence: Synthetic oligonucleotide
  Antisense Strand to SEQ ID NO: 377609
ucaccuaagaaauggagau

SEQ ID NO: 377611 - RNA, 19 nt, Artificial Sequence
  Description of Artificial Sequence: Synthetic oligonucleotide
  Sense Strand Starting at position 749 of SEQ ID NO: 315574
uuucuuaggugaggaaacu

SEQ ID NO: 377612 - RNA, 19 nt, Artificial Sequence
  Description of Artificial Sequence: Synthetic oligonucleotide
  Antisense Strand to SEQ ID NO: 377611
aguuuccucaccuaagaaa

SEQ ID NO: 377613 - RNA, 19 nt, Artificial Sequence
  Description of Artificial Sequence: Synthetic oligonucleotide
  Sense Strand Starting at position 749 of SEQ ID NO: 315687
gucccaugggaacaguauu

SEQ ID NO: 377614 - RNA, 19 nt, Artificial Sequence
  Description of Artificial Sequence: Synthetic oligonucleotide
  Antisense Strand to SEQ ID NO: 377613
aauacuguucccaugggac

SEQ ID NO: 377615 - RNA, 19 nt, Artificial Sequence
  Description of Artificial Sequence: Synthetic oligonucleotide
  Sense Strand Starting at position 749 of SEQ ID NO: 315885
gggagugccuaccucuuua

SEQ ID NO: 377616 - RNA, 19 nt, Artificial Sequence
  Description of Artificial Sequence: Synthetic oligonucleotide
  Antisense Strand to SEQ ID NO: 377615
uaaagagguaggcacuccc

SEQ ID NO: 377617 - RNA, 19 nt, Artificial Sequence
  Description of Artificial Sequence: Synthetic oligonucleotide
  Sense Strand Starting at position 749 of SEQ ID NO: 315989
gcucaacggcucugagaag

SEQ ID NO: 377618 - RNA, 19 nt, Artificial Sequence
  Description of Artificial Sequence: Synthetic oligonucleotide
  Antisense Strand to SEQ ID NO: 377617
cuucucagagccguugagc

SEQ ID NO: 377619 - RNA, 19 nt, Artificial Sequence
  Description of Artificial Sequence: Synthetic oligonucleotide
  Sense Strand Starting at position 749 of SEQ ID NO: 316031
gacccaaagggaugucagu

SEQ ID NO: 377620 - RNA, 19 nt, Artificial Sequence
  Description of Artificial Sequence: Synthetic oligonucleotide
  Antisense Strand to SEQ ID NO: 377619
acugacaucccuuuggguc

SEQ ID NO: 377621 - RNA, 19 nt, Artificial Sequence
  Description of Artificial Sequence: Synthetic oligonucleotide
  Sense Strand Starting at position 749 of SEQ ID NO: 316037
aagggaugucagugguguu

SEQ ID NO: 377622 - RNA, 19 nt, Artificial Sequence
  Description of Artificial Sequence: Synthetic oligonucleotide
  Antisense Strand to SEQ ID NO: 377621
aacaccacugacaucccuu

SEQ ID NO: 377623 - RNA, 19 nt, Artificial Sequence
  Description of Artificial Sequence: Synthetic oligonucleotide
  Sense Strand Starting at position 749 of SEQ ID NO: 316106
uagggauccuaagaauggu

SEQ ID NO: 377624 - RNA, 19 nt, Artificial Sequence
  Description of Artificial Sequence: Synthetic oligonucleotide
  Antisense Strand to SEQ ID NO: 377623
accauucuuaggaucccua

SEQ ID NO: 377625 - RNA, 19 nt, Artificial Sequence
  Description of Artificial Sequence: Synthetic oligonucleotide
  Sense Strand Starting at position 749 of SEQ ID NO: 316115
uaagaaugguaccaaggua

SEQ ID NO: 377626 - RNA, 19 nt, Artificial Sequence
  Description of Artificial Sequence: Synthetic oligonucleotide
  Antisense Strand to SEQ ID NO: 377625
uaccuugguaccauucuua

SEQ ID NO: 377627 - RNA, 19 nt, Artificial Sequence
  Description of Artificial Sequence: Synthetic oligonucleotide
  Sense Strand Starting at position 749 of SEQ ID NO: 316207
cugguuauggugcagugau

SEQ ID NO: 377628 - RNA, 19 nt, Artificial Sequence
  Description of Artificial Sequence: Synthetic oligonucleotide
  Antisense Strand to SEQ ID NO: 377627
aucacugcaccauaaccag

SEQ ID NO: 377629 - RNA, 19 nt, Artificial Sequence
  Description of Artificial Sequence: Synthetic oligonucleotide
  Sense Strand Starting at position 749 of SEQ ID NO: 316258
ggcuguauccaacgccuau

SEQ ID NO: 377630 - RNA, 19 nt, Artificial Sequence
  Description of Artificial Sequence: Synthetic oligonucleotide
  Antisense Strand to SEQ ID NO: 377629
auaggcguuggauacagcc

SEQ ID NO: 377631 - RNA, 19 nt, Artificial Sequence
  Description of Artificial Sequence: Synthetic oligonucleotide
  Sense Strand Starting at position 749 of SEQ ID NO: 316268
aacgccuaugcauguauau

SEQ ID NO: 377632 - RNA, 19 nt, Artificial Sequence
  Description of Artificial Sequence: Synthetic oligonucleotide
  Antisense Strand to SEQ ID NO: 377631
auauacaugcauaggcguu

SEQ ID NO: 377633 - RNA, 19 nt, Artificial Sequence
  Description of Artificial Sequence: Synthetic oligonucleotide
  Sense Strand Starting at position 749 of SEQ ID NO: 316283
auauuauguaagugccagu

SEQ ID NO: 377634 - RNA, 19 nt, Artificial Sequence
  Description of Artificial Sequence: Synthetic oligonucleotide
  Antisense Strand to SEQ ID NO: 377633
acuggcacuuacauaauau

SEQ ID NO: 377635 - RNA, 19 nt, Artificial Sequence
  Description of Artificial Sequence: Synthetic oligonucleotide
  Sense Strand Starting at position 749 of SEQ ID NO: 316332
acuugagguuucuaagaca

SEQ ID NO: 377636 - RNA, 19 nt, Artificial Sequence
  Description of Artificial Sequence: Synthetic oligonucleotide
  Antisense Strand to SEQ ID NO: 377635
ugucuuagaaaccucaagu

SEQ ID NO: 377637 - RNA, 19 nt, Artificial Sequence
  Description of Artificial Sequence: Synthetic oligonucleotide
  Sense Strand Starting at position 749 of SEQ ID NO: 316335
ugagguuucuaagacaguc

SEQ ID NO: 377638 - RNA, 19 nt, Artificial Sequence
  Description of Artificial Sequence: Synthetic oligonucleotide
  Antisense Strand to SEQ ID NO: 377637
gacugucuuagaaaccuca

SEQ ID NO: 377639 - RNA, 19 nt, Artificial Sequence
  Description of Artificial Sequence: Synthetic oligonucleotide
  Sense Strand Starting at position 749 of SEQ ID NO: 316441
ccugaaagccucugccuaa

SEQ ID NO: 377640 - RNA, 19 nt, Artificial Sequence
  Description of Artificial Sequence: Synthetic oligonucleotide
  Antisense Strand to SEQ ID NO: 377639
uuaggcagaggcuuucagg

SEQ ID NO: 377641 - RNA, 19 nt, Artificial Sequence
  Description of Artificial Sequence: Synthetic oligonucleotide
  Sense Strand Starting at position 749 of SEQ ID NO: 316520
accgguuauuaagaaggaa

SEQ ID NO: 377642 - RNA, 19 nt, Artificial Sequence
  Description of Artificial Sequence: Synthetic oligonucleotide
  Antisense Strand to SEQ ID NO: 377641
uuccuucuuaauaaccggu

SEQ ID NO: 377643 - RNA, 19 nt, Artificial Sequence
  Description of Artificial Sequence: Synthetic oligonucleotide
  Sense Strand Starting at position 749 of SEQ ID NO: 316597
ggucucuccaugggagaca

SEQ ID NO: 377644 - RNA, 19 nt, Artificial Sequence
  Description of Artificial Sequence: Synthetic oligonucleotide
  Antisense Strand to SEQ ID NO: 377643
ugucucccauggagagacc

SEQ ID NO: 377645 - RNA, 19 nt, Artificial Sequence
  Description of Artificial Sequence: Synthetic oligonucleotide
  Sense Strand Starting at position 749 of SEQ ID NO: 317377
acaguucuuccacggagga

SEQ ID NO: 377646 - RNA, 19 nt, Artificial Sequence
  Description of Artificial Sequence: Synthetic oligonucleotide
  Antisense Strand to SEQ ID NO: 377645
uccuccguggaagaacugu

SEQ ID NO: 377647 - RNA, 19 nt, Artificial Sequence
  Description of Artificial Sequence: Synthetic oligonucleotide
  Sense Strand Starting at position 749 of SEQ ID NO: 317378
caguucuuccacggaggaa

SEQ ID NO: 377648 - RNA, 19 nt, Artificial Sequence
  Description of Artificial Sequence: Synthetic oligonucleotide
  Antisense Strand to SEQ ID NO: 377647
uuccuccguggaagaacug

SEQ ID NO: 377649 - RNA, 19 nt, Artificial Sequence
  Description of Artificial Sequence: Synthetic oligonucleotide
  Sense Strand Starting at position 749 of SEQ ID NO: 317379
aguucuuccacggaggaau

SEQ ID NO: 377650 - RNA, 19 nt, Artificial Sequence
  Description of Artificial Sequence: Synthetic oligonucleotide
  Antisense Strand to SEQ ID NO: 377649
auuccuccguggaagaacu

SEQ ID NO: 377651 - RNA, 19 nt, Artificial Sequence
  Description of Artificial Sequence: Synthetic oligonucleotide
  Sense Strand Starting at position 749 of SEQ ID NO: 317652
uccuuuggugucuguggaa

SEQ ID NO: 377652 - RNA, 19 nt, Artificial Sequence
  Description of Artificial Sequence: Synthetic oligonucleotide
  Antisense Strand to SEQ ID NO: 377651
uuccacagacaccaaagga

SEQ ID NO: 377653 - RNA, 19 nt, Artificial Sequence
  Description of Artificial Sequence: Synthetic oligonucleotide
  Sense Strand Starting at position 749 of SEQ ID NO: 317797
auuuacucauucgacaagu

SEQ ID NO: 377654 - RNA, 19 nt, Artificial Sequence
  Description of Artificial Sequence: Synthetic oligonucleotide
  Antisense Strand to SEQ ID NO: 377653
acuugucgaaugaguaaau

SEQ ID NO: 377655 - RNA, 19 nt, Artificial Sequence
  Description of Artificial Sequence: Synthetic oligonucleotide
  Sense Strand Starting at position 749 of SEQ ID NO: 317799
uuacucauucgacaaguac

SEQ ID NO: 377656 - RNA, 19 nt, Artificial Sequence
  Description of Artificial Sequence: Synthetic oligonucleotide
  Antisense Strand to SEQ ID NO: 377655
guacuugucgaaugaguaa

SEQ ID NO: 377657 - RNA, 19 nt, Artificial Sequence
  Description of Artificial Sequence: Synthetic oligonucleotide
  Sense Strand Starting at position 749 of SEQ ID NO: 317813
aguacuuauugaucaucua

SEQ ID NO: 377658 - RNA, 19 nt, Artificial Sequence
  Description of Artificial Sequence: Synthetic oligonucleotide
  Antisense Strand to SEQ ID NO: 377657
uagaugaucaauaaguacu

SEQ ID NO: 377659 - RNA, 19 nt, Artificial Sequence
  Description of Artificial Sequence: Synthetic oligonucleotide
  Sense Strand Starting at position 749 of SEQ ID NO: 317814
guacuuauugaucaucuac

SEQ ID NO: 377660 - RNA, 19 nt, Artificial Sequence
  Description of Artificial Sequence: Synthetic oligonucleotide
  Antisense Strand to SEQ ID NO: 377659
guagaugaucaauaaguac

SEQ ID NO: 377661 - RNA, 19 nt, Artificial Sequence
  Description of Artificial Sequence: Synthetic oligonucleotide
  Sense Strand Starting at position 749 of SEQ ID NO: 317929
cauuccaauuggguguaaa

SEQ ID NO: 377662 - RNA, 19 nt, Artificial Sequence
  Description of Artificial Sequence: Synthetic oligonucleotide
  Antisense Strand to SEQ ID NO: 377661
uuuacacccaauuggaaug

SEQ ID NO: 377663 - RNA, 19 nt, Artificial Sequence
  Description of Artificial Sequence: Synthetic oligonucleotide
  Sense Strand Starting at position 749 of SEQ ID NO: 318046
uucccugucuucucgaaag

SEQ ID NO: 377664 - RNA, 19 nt, Artificial Sequence
  Description of Artificial Sequence: Synthetic oligonucleotide
  Antisense Strand to SEQ ID NO: 377663
cuuucgagaagacagggaa

SEQ ID NO: 377665 - RNA, 19 nt, Artificial Sequence
  Description of Artificial Sequence: Synthetic oligonucleotide
  Sense Strand Starting at position 749 of SEQ ID NO: 318048
cccugucuucucgaaagaa

SEQ ID NO: 377666 - RNA, 19 nt, Artificial Sequence
  Description of Artificial Sequence: Synthetic oligonucleotide
  Antisense Strand to SEQ ID NO: 377665
uucuuucgagaagacaggg

SEQ ID NO: 377667 - RNA, 19 nt, Artificial Sequence
  Description of Artificial Sequence: Synthetic oligonucleotide
  Sense Strand Starting at position 749 of SEQ ID NO: 318167
ggaaguggguagaggaauu

SEQ ID NO: 377668 - RNA, 19 nt, Artificial Sequence
  Description of Artificial Sequence: Synthetic oligonucleotide
  Antisense Strand to SEQ ID NO: 377667
aauuccucuacccacuucc

SEQ ID NO: 377669 - RNA, 19 nt, Artificial Sequence
  Description of Artificial Sequence: Synthetic oligonucleotide
  Sense Strand Starting at position 749 of SEQ ID NO: 319045
agcuucucucggcagucau

SEQ ID NO: 377670 - RNA, 19 nt, Artificial Sequence
  Description of Artificial Sequence: Synthetic oligonucleotide
  Antisense Strand to SEQ ID NO: 377669
augacugccgagagaagcu

SEQ ID NO: 377671 - RNA, 19 nt, Artificial Sequence
  Description of Artificial Sequence: Synthetic oligonucleotide
  Sense Strand Starting at position 749 of SEQ ID NO: 319070
gguucucaaggacgugaau

SEQ ID NO: 377672 - RNA, 19 nt, Artificial Sequence
  Description of Artificial Sequence: Synthetic oligonucleotide
  Antisense Strand to SEQ ID NO: 377671
auucacguccuugagaacc

SEQ ID NO: 377673 - RNA, 19 nt, Artificial Sequence
  Description of Artificial Sequence: Synthetic oligonucleotide
  Sense Strand Starting at position 749 of SEQ ID NO: 319113
aucugugucggugagcgaa

SEQ ID NO: 377674 - RNA, 19 nt, Artificial Sequence
  Description of Artificial Sequence: Synthetic oligonucleotide
  Antisense Strand to SEQ ID NO: 377673
uucgcucaccgacacagau

SEQ ID NO: 377675 - RNA, 19 nt, Artificial Sequence
  Description of Artificial Sequence: Synthetic oligonucleotide
  Sense Strand Starting at position 750 of SEQ ID NO: 315518
uugaccaugucucugaauu

SEQ ID NO: 377676 - RNA, 19 nt, Artificial Sequence
  Description of Artificial Sequence: Synthetic oligonucleotide
  Antisense Strand to SEQ ID NO: 377675
aauucagagacauggucaa

SEQ ID NO: 377677 - RNA, 19 nt, Artificial Sequence
  Description of Artificial Sequence: Synthetic oligonucleotide
  Sense Strand Starting at position 750 of SEQ ID NO: 315599
ucuuauggcuuaucaagga

SEQ ID NO: 377678 - RNA, 19 nt, Artificial Sequence
  Description of Artificial Sequence: Synthetic oligonucleotide
  Antisense Strand to SEQ ID NO: 377677
uccuugauaagccauaaga

SEQ ID NO: 377679 - RNA, 19 nt, Artificial Sequence
  Description of Artificial Sequence: Synthetic oligonucleotide
  Sense Strand Starting at position 750 of SEQ ID NO: 315604
uggcuuaucaaggagcuua

SEQ ID NO: 377680 - RNA, 19 nt, Artificial Sequence
  Description of Artificial Sequence: Synthetic oligonucleotide
  Antisense Strand to SEQ ID NO: 377679
uaagcuccuugauaagcca

SEQ ID NO: 377681 - RNA, 19 nt, Artificial Sequence
  Description of Artificial Sequence: Synthetic oligonucleotide
  Sense Strand Starting at position 750 of SEQ ID NO: 315616
gagcuuagagguuaagagu

SEQ ID NO: 377682 - RNA, 19 nt, Artificial Sequence
  Description of Artificial Sequence: Synthetic oligonucleotide
  Antisense Strand to SEQ ID NO: 377681
acucuuaaccucuaagcuc

SEQ ID NO: 377683 - RNA, 19 nt, Artificial Sequence
  Description of Artificial Sequence: Synthetic oligonucleotide
  Sense Strand Starting at position 750 of SEQ ID NO: 315688
cuaggugaugcugagcaau

SEQ ID NO: 377684 - RNA, 19 nt, Artificial Sequence
  Description of Artificial Sequence: Synthetic oligonucleotide
  Antisense Strand to SEQ ID NO: 377683
auugcucagcaucaccuag

SEQ ID NO: 377685 - RNA, 19 nt, Artificial Sequence
  Description of Artificial Sequence: Synthetic oligonucleotide
  Sense Strand Starting at position 750 of SEQ ID NO: 315878
ggacuucuugcauaauuau

SEQ ID NO: 377686 - RNA, 19 nt, Artificial Sequence
  Description of Artificial Sequence: Synthetic oligonucleotide
  Antisense Strand to SEQ ID NO: 377685
auaauuaugcaagaagucc

SEQ ID NO: 377687 - RNA, 19 nt, Artificial Sequence
  Description of Artificial Sequence: Synthetic oligonucleotide
  Sense Strand Starting at position 750 of SEQ ID NO: 315889
auaauuaucccuugguagg

SEQ ID NO: 377688 - RNA, 19 nt, Artificial Sequence
  Description of Artificial Sequence: Synthetic oligonucleotide
  Antisense Strand to SEQ ID NO: 377687
ccuaccaagggauaauuau

SEQ ID NO: 377689 - RNA, 19 nt, Artificial Sequence
  Description of Artificial Sequence: Synthetic oligonucleotide
  Sense Strand Starting at position 750 of SEQ ID NO: 315969
guauuaauccguuaaugag

SEQ ID NO: 377690 - RNA, 19 nt, Artificial Sequence
  Description of Artificial Sequence: Synthetic oligonucleotide
  Antisense Strand to SEQ ID NO: 377689
cucauuaacggauuaauac

SEQ ID NO: 377691 - RNA, 19 nt, Artificial Sequence
  Description of Artificial Sequence: Synthetic oligonucleotide
  Sense Strand Starting at position 750 of SEQ ID NO: 316212
gggcauauauaaguagaau

SEQ ID NO: 377692 - RNA, 19 nt, Artificial Sequence
  Description of Artificial Sequence: Synthetic oligonucleotide
  Antisense Strand to SEQ ID NO: 377691
auucuacuuauauaugccc

SEQ ID NO: 377693 - RNA, 19 nt, Artificial Sequence
  Description of Artificial Sequence: Synthetic oligonucleotide
  Sense Strand Starting at position 750 of SEQ ID NO: 316258
uggccauaucauuggaaga

SEQ ID NO: 377694 - RNA, 19 nt, Artificial Sequence
  Description of Artificial Sequence: Synthetic oligonucleotide
  Antisense Strand to SEQ ID NO: 377693
ucuuccaaugauauggcca

SEQ ID NO: 377695 - RNA, 19 nt, Artificial Sequence
  Description of Artificial Sequence: Synthetic oligonucleotide
  Sense Strand Starting at position 750 of SEQ ID NO: 316259
ggccauaucauuggaagac

SEQ ID NO: 377696 - RNA, 19 nt, Artificial Sequence
  Description of Artificial Sequence: Synthetic oligonucleotide
  Antisense Strand to SEQ ID NO: 377695
gucuuccaaugauauggcc

SEQ ID NO: 377697 - RNA, 19 nt, Artificial Sequence
  Description of Artificial Sequence: Synthetic oligonucleotide
  Sense Strand Starting at position 750 of SEQ ID NO: 316518
ugugcagaaagaugaucua

SEQ ID NO: 377698 - RNA, 19 nt, Artificial Sequence
  Description of Artificial Sequence: Synthetic oligonucleotide
  Antisense Strand to SEQ ID NO: 377697
uagaucaucuuucugcaca

SEQ ID NO: 377699 - RNA, 19 nt, Artificial Sequence
  Description of Artificial Sequence: Synthetic oligonucleotide
  Sense Strand Starting at position 750 of SEQ ID NO: 316877
gacccuuggugucugagaa

SEQ ID NO: 377700 - RNA, 19 nt, Artificial Sequence
  Description of Artificial Sequence: Synthetic oligonucleotide
  Antisense Strand to SEQ ID NO: 377699
uucucagacaccaaggguc

SEQ ID NO: 377701 - RNA, 19 nt, Artificial Sequence
  Description of Artificial Sequence: Synthetic oligonucleotide
  Sense Strand Starting at position 750 of SEQ ID NO: 316878
acccuuggugucugagaaa

SEQ ID NO: 377702 - RNA, 19 nt, Artificial Sequence
  Description of Artificial Sequence: Synthetic oligonucleotide
  Antisense Strand to SEQ ID NO: 377701
uuucucagacaccaagggu

SEQ ID NO: 377703 - RNA, 19 nt, Artificial Sequence
  Description of Artificial Sequence: Synthetic oligonucleotide
  Sense Strand Starting at position 750 of SEQ ID NO: 317286
uguugacagcaugggaaau

SEQ ID NO: 377704 - RNA, 19 nt, Artificial Sequence
  Description of Artificial Sequence: Synthetic oligonucleotide
  Antisense Strand to SEQ ID NO: 377703
auuucccaugcugucaaca

SEQ ID NO: 377705 - RNA, 19 nt, Artificial Sequence
  Description of Artificial Sequence: Synthetic oligonucleotide
  Sense Strand Starting at position 750 of SEQ ID NO: 317336
auauuuagucauugugcuu

SEQ ID NO: 377706 - RNA, 19 nt, Artificial Sequence
  Description of Artificial Sequence: Synthetic oligonucleotide
  Antisense Strand to SEQ ID NO: 377705
aagcacaaugacuaaauau

SEQ ID NO: 377707 - RNA, 19 nt, Artificial Sequence
  Description of Artificial Sequence: Synthetic oligonucleotide
  Sense Strand Starting at position 750 of SEQ ID NO: 317349
gugcuugggacagggaaau

SEQ ID NO: 377708 - RNA, 19 nt, Artificial Sequence
  Description of Artificial Sequence: Synthetic oligonucleotide
  Antisense Strand to SEQ ID NO: 377707
auuucccugucccaagcac

SEQ ID NO: 377709 - RNA, 19 nt, Artificial Sequence
  Description of Artificial Sequence: Synthetic oligonucleotide
  Sense Strand Starting at position 750 of SEQ ID NO: 317384
cugagagcacauuguggaa

SEQ ID NO: 377710 - RNA, 19 nt, Artificial Sequence
  Description of Artificial Sequence: Synthetic oligonucleotide
  Antisense Strand to SEQ ID NO: 377709
uuccacaaugugcucucag

SEQ ID NO: 377711 - RNA, 19 nt, Artificial Sequence
  Description of Artificial Sequence: Synthetic oligonucleotide
  Sense Strand Starting at position 750 of SEQ ID NO: 317498
aggucucuugacugagaca

SEQ ID NO: 377712 - RNA, 19 nt, Artificial Sequence
  Description of Artificial Sequence: Synthetic oligonucleotide
  Antisense Strand to SEQ ID NO: 377711
ugucucagucaagagaccu

SEQ ID NO: 377713 - RNA, 19 nt, Artificial Sequence
  Description of Artificial Sequence: Synthetic oligonucleotide
  Sense Strand Starting at position 750 of SEQ ID NO: 317693
cuugaagaguuuccaagac

SEQ ID NO: 377714 - RNA, 19 nt, Artificial Sequence
  Description of Artificial Sequence: Synthetic oligonucleotide
  Antisense Strand to SEQ ID NO: 377713
gucuuggaaacucuucaag

SEQ ID NO: 377715 - RNA, 19 nt, Artificial Sequence
  Description of Artificial Sequence: Synthetic oligonucleotide
  Sense Strand Starting at position 750 of SEQ ID NO: 317753
gaguuaaggagaugaagcu

SEQ ID NO: 377716 - RNA, 19 nt, Artificial Sequence
  Description of Artificial Sequence: Synthetic oligonucleotide
  Antisense Strand to SEQ ID NO: 377715
agcuucaucuccuuaacuc

SEQ ID NO: 377717 - RNA, 19 nt, Artificial Sequence
  Description of Artificial Sequence: Synthetic oligonucleotide
  Sense Strand Starting at position 750 of SEQ ID NO: 317785
ggcugagauggcuagaguu

SEQ ID NO: 377718 - RNA, 19 nt, Artificial Sequence
  Description of Artificial Sequence: Synthetic oligonucleotide
  Antisense Strand to SEQ ID NO: 377717
aacucuagccaucucagcc

SEQ ID NO: 377719 - RNA, 19 nt, Artificial Sequence
  Description of Artificial Sequence: Synthetic oligonucleotide
  Sense Strand Starting at position 750 of SEQ ID NO: 317787
cugagauggcuagaguuua

SEQ ID NO: 377720 - RNA, 19 nt, Artificial Sequence
  Description of Artificial Sequence: Synthetic oligonucleotide
  Antisense Strand to SEQ ID NO: 377719
uaaacucuagccaucucag

SEQ ID NO: 377721 - RNA, 19 nt, Artificial Sequence
  Description of Artificial Sequence: Synthetic oligonucleotide
  Sense Strand Starting at position 750 of SEQ ID NO: 317799
gaguuuauagagcagagua

SEQ ID NO: 377722 - RNA, 19 nt, Artificial Sequence
  Description of Artificial Sequence: Synthetic oligonucleotide
  Antisense Strand to SEQ ID NO: 377721
uacucugcucuauaaacuc

SEQ ID NO: 377723 - RNA, 19 nt, Artificial Sequence
  Description of Artificial Sequence: Synthetic oligonucleotide
  Sense Strand Starting at position 750 of SEQ ID NO: 317801
guuuauagagcagaguacu

SEQ ID NO: 377724 - RNA, 19 nt, Artificial Sequence
  Description of Artificial Sequence: Synthetic oligonucleotide
  Antisense Strand to SEQ ID NO: 377723
aguacucugcucuauaaac

SEQ ID NO: 377725 - RNA, 19 nt, Artificial Sequence
  Description of Artificial Sequence: Synthetic oligonucleotide
  Sense Strand Starting at position 750 of SEQ ID NO: 317858
ugcagaggauccuuaucaa

SEQ ID NO: 377726 - RNA, 19 nt, Artificial Sequence
  Description of Artificial Sequence: Synthetic oligonucleotide
  Antisense Strand to SEQ ID NO: 377725
uugauaaggauccucugca

SEQ ID NO: 377727 - RNA, 19 nt, Artificial Sequence
  Description of Artificial Sequence: Synthetic oligonucleotide
  Sense Strand Starting at position 750 of SEQ ID NO: 317861
agaggauccuuaucaaguc

SEQ ID NO: 377728 - RNA, 19 nt, Artificial Sequence
  Description of Artificial Sequence: Synthetic oligonucleotide
  Antisense Strand to SEQ ID NO: 377727
gacuugauaaggauccucu

SEQ ID NO: 377729 - RNA, 19 nt, Artificial Sequence
  Description of Artificial Sequence: Synthetic oligonucleotide
  Sense Strand Starting at position 750 of SEQ ID NO: 317948
cuuggagcccuuuagaaau

SEQ ID NO: 377730 - RNA, 19 nt, Artificial Sequence
  Description of Artificial Sequence: Synthetic oligonucleotide
  Antisense Strand to SEQ ID NO: 377729
auuucuaaagggcuccaag

SEQ ID NO: 377731 - RNA, 19 nt, Artificial Sequence
  Description of Artificial Sequence: Synthetic oligonucleotide
  Sense Strand Starting at position 750 of SEQ ID NO: 318054
ggagauuagccguaaacua

SEQ ID NO: 377732 - RNA, 19 nt, Artificial Sequence
  Description of Artificial Sequence: Synthetic oligonucleotide
  Antisense Strand to SEQ ID NO: 377731
uaguuuacggcuaaucucc

SEQ ID NO: 377733 - RNA, 19 nt, Artificial Sequence
  Description of Artificial Sequence: Synthetic oligonucleotide
  Sense Strand Starting at position 750 of SEQ ID NO: 318115
uggaaagaaucaguuucua

SEQ ID NO: 377734 - RNA, 19 nt, Artificial Sequence
  Description of Artificial Sequence: Synthetic oligonucleotide
  Antisense Strand to SEQ ID NO: 377733
uagaaacugauucuuucca

SEQ ID NO: 377735 - RNA, 19 nt, Artificial Sequence
  Description of Artificial Sequence: Synthetic oligonucleotide
  Sense Strand Starting at position 750 of SEQ ID NO: 318270
uugacaauuguaugacauu

SEQ ID NO: 377736 - RNA, 19 nt, Artificial Sequence
  Description of Artificial Sequence: Synthetic oligonucleotide
  Antisense Strand to SEQ ID NO: 377735
aaugucauacaauugucaa

SEQ ID NO: 377737 - RNA, 19 nt, Artificial Sequence
  Description of Artificial Sequence: Synthetic oligonucleotide
  Sense Strand Starting at position 750 of SEQ ID NO: 318408
ugacacuauaguggugaau

SEQ ID NO: 377738 - RNA, 19 nt, Artificial Sequence
  Description of Artificial Sequence: Synthetic oligonucleotide
  Antisense Strand to SEQ ID NO: 377737
auucaccacuauaguguca

SEQ ID NO: 377739 - RNA, 19 nt, Artificial Sequence
  Description of Artificial Sequence: Synthetic oligonucleotide
  Sense Strand Starting at position 750 of SEQ ID NO: 318835
auaaguagagcauggaaua

SEQ ID NO: 377740 - RNA, 19 nt, Artificial Sequence
  Description of Artificial Sequence: Synthetic oligonucleotide
  Antisense Strand to SEQ ID NO: 377739
uauuccaugcucuacuuau

SEQ ID NO: 377741 - RNA, 19 nt, Artificial Sequence
  Description of Artificial Sequence: Synthetic oligonucleotide
  Sense Strand Starting at position 750 of SEQ ID NO: 318854
gcuguucugguucaagaag

SEQ ID NO: 377742 - RNA, 19 nt, Artificial Sequence
  Description of Artificial Sequence: Synthetic oligonucleotide
  Antisense Strand to SEQ ID NO: 377741
cuucuugaaccagaacagc

SEQ ID NO: 377743 - RNA, 19 nt, Artificial Sequence
  Description of Artificial Sequence: Synthetic oligonucleotide
  Sense Strand Starting at position 750 of SEQ ID NO: 318882
caagaugagcgcuaucaug

SEQ ID NO: 377744 - RNA, 19 nt, Artificial Sequence
  Description of Artificial Sequence: Synthetic oligonucleotide
  Antisense Strand to SEQ ID NO: 377743
caugauagcgcucaucuug

SEQ ID NO: 377745 - RNA, 19 nt, Artificial Sequence
  Description of Artificial Sequence: Synthetic oligonucleotide
  Sense Strand Starting at position 750 of SEQ ID NO: 318912
agcacaauuugagaauuau

SEQ ID NO: 377746 - RNA, 19 nt, Artificial Sequence
  Description of Artificial Sequence: Synthetic oligonucleotide
  Antisense Strand to SEQ ID NO: 377745
auaauucucaaauugugcu

SEQ ID NO: 377747 - RNA, 19 nt, Artificial Sequence
  Description of Artificial Sequence: Synthetic oligonucleotide
  Sense Strand Starting at position 750 of SEQ ID NO: 318921
ugagaauuauugcuguaag

SEQ ID NO: 377748 - RNA, 19 nt, Artificial Sequence
  Description of Artificial Sequence: Synthetic oligonucleotide
  Antisense Strand to SEQ ID NO: 377747
cuuacagcaauaauucuca

SEQ ID NO: 377749 - RNA, 19 nt, Artificial Sequence
  Description of Artificial Sequence: Synthetic oligonucleotide
  Sense Strand Starting at position 750 of SEQ ID NO: 318924
gaauuauugcuguaaguua

SEQ ID NO: 377750 - RNA, 19 nt, Artificial Sequence
  Description of Artificial Sequence: Synthetic oligonucleotide
  Antisense Strand to SEQ ID NO: 377749
uaacuuacagcaauaauuc

SEQ ID NO: 377751 - RNA, 19 nt, Artificial Sequence
  Description of Artificial Sequence: Synthetic oligonucleotide
  Sense Strand Starting at position 750 of SEQ ID NO: 319070
gcaggugguaaccauaaua

SEQ ID NO: 377752 - RNA, 19 nt, Artificial Sequence
  Description of Artificial Sequence: Synthetic oligonucleotide
  Antisense Strand to SEQ ID NO: 377751
uauuaugguuaccaccugc

SEQ ID NO: 377753 - RNA, 19 nt, Artificial Sequence
  Description of Artificial Sequence: Synthetic oligonucleotide
  Sense Strand Starting at position 750 of SEQ ID NO: 319210
uucucuuuccuuugagaag

SEQ ID NO: 377754 - RNA, 19 nt, Artificial Sequence
  Description of Artificial Sequence: Synthetic oligonucleotide
  Antisense Strand to SEQ ID NO: 377753
cuucucaaaggaaagagaa

SEQ ID NO: 377755 - RNA, 19 nt, Artificial Sequence
  Description of Artificial Sequence: Synthetic oligonucleotide
  Sense Strand Starting at position 751 of SEQ ID NO: 315249
gugugagcaugugucuaca

SEQ ID NO: 377756 - RNA, 19 nt, Artificial Sequence
  Description of Artificial Sequence: Synthetic oligonucleotide
  Antisense Strand to SEQ ID NO: 377755
uguagacacaugcucacac

SEQ ID NO: 377757 - RNA, 19 nt, Artificial Sequence
  Description of Artificial Sequence: Synthetic oligonucleotide
  Sense Strand Starting at position 751 of SEQ ID NO: 315252
ugagcaugugucuacauac

SEQ ID NO: 377758 - RNA, 19 nt, Artificial Sequence
  Description of Artificial Sequence: Synthetic oligonucleotide
  Antisense Strand to SEQ ID NO: 377757
guauguagacacaugcuca

SEQ ID NO: 377759 - RNA, 19 nt, Artificial Sequence
  Description of Artificial Sequence: Synthetic oligonucleotide
  Sense Strand Starting at position 751 of SEQ ID NO: 315411
ugcugaguguuugcugaag

SEQ ID NO: 377760 - RNA, 19 nt, Artificial Sequence
  Description of Artificial Sequence: Synthetic oligonucleotide
  Antisense Strand to SEQ ID NO: 377759
cuucagcaaacacucagca

SEQ ID NO: 377761 - RNA, 19 nt, Artificial Sequence
  Description of Artificial Sequence: Synthetic oligonucleotide
  Sense Strand Starting at position 751 of SEQ ID NO: 315445
cuugauugacgucaaucaa

SEQ ID NO: 377762 - RNA, 19 nt, Artificial Sequence
  Description of Artificial Sequence: Synthetic oligonucleotide
  Antisense Strand to SEQ ID NO: 377761
uugauugacgucaaucaag

SEQ ID NO: 377763 - RNA, 19 nt, Artificial Sequence
  Description of Artificial Sequence: Synthetic oligonucleotide
  Sense Strand Starting at position 751 of SEQ ID NO: 315881
gaaggaagucugugccaac

SEQ ID NO: 377764 - RNA, 19 nt, Artificial Sequence
  Description of Artificial Sequence: Synthetic oligonucleotide
  Antisense Strand to SEQ ID NO: 377763
guuggcacagacuuccuuc

SEQ ID NO: 377765 - RNA, 19 nt, Artificial Sequence
  Description of Artificial Sequence: Synthetic oligonucleotide
  Sense Strand Starting at position 751 of SEQ ID NO: 315957
caccaugaggccugcagaa

SEQ ID NO: 377766 - RNA, 19 nt, Artificial Sequence
  Description of Artificial Sequence: Synthetic oligonucleotide
  Antisense Strand to SEQ ID NO: 377765
uucugcaggccucauggug

SEQ ID NO: 377767 - RNA, 19 nt, Artificial Sequence
  Description of Artificial Sequence: Synthetic oligonucleotide
  Sense Strand Starting at position 751 of SEQ ID NO: 316006
aggugcauauacucugaau

SEQ ID NO: 377768 - RNA, 19 nt, Artificial Sequence
  Description of Artificial Sequence: Synthetic oligonucleotide
  Antisense Strand to SEQ ID NO: 377767
auucagaguauaugcaccu

SEQ ID NO: 377769 - RNA, 19 nt, Artificial Sequence
  Description of Artificial Sequence: Synthetic oligonucleotide
  Sense Strand Starting at position 751 of SEQ ID NO: 316048
gggacuugcuguucuguuu

SEQ ID NO: 377770 - RNA, 19 nt, Artificial Sequence
  Description of Artificial Sequence: Synthetic oligonucleotide
  Antisense Strand to SEQ ID NO: 377769
aaacagaacagcaaguccc

SEQ ID NO: 377771 - RNA, 19 nt, Artificial Sequence
  Description of Artificial Sequence: Synthetic oligonucleotide
  Sense Strand Starting at position 751 of SEQ ID NO: 316097
cgaagaacuuggcaacuaa

SEQ ID NO: 377772 - RNA, 19 nt, Artificial Sequence
  Description of Artificial Sequence: Synthetic oligonucleotide
  Antisense Strand to SEQ ID NO: 377771
uuaguugccaaguucuucg

SEQ ID NO: 377773 - RNA, 19 nt, Artificial Sequence
  Description of Artificial Sequence: Synthetic oligonucleotide
  Sense Strand Starting at position 751 of SEQ ID NO: 316159
gguaggugucucugggaag

SEQ ID NO: 377774 - RNA, 19 nt, Artificial Sequence
  Description of Artificial Sequence: Synthetic oligonucleotide
  Antisense Strand to SEQ ID NO: 377773
cuucccagagacaccuacc

SEQ ID NO: 377775 - RNA, 19 nt, Artificial Sequence
  Description of Artificial Sequence: Synthetic oligonucleotide
  Sense Strand Starting at position 751 of SEQ ID NO: 316326
acgugcugcuaugcagaua

SEQ ID NO: 377776 - RNA, 19 nt, Artificial Sequence
  Description of Artificial Sequence: Synthetic oligonucleotide
  Antisense Strand to SEQ ID NO: 377775
uaucugcauagcagcacgu

SEQ ID NO: 377777 - RNA, 19 nt, Artificial Sequence
  Description of Artificial Sequence: Synthetic oligonucleotide
  Sense Strand Starting at position 751 of SEQ ID NO: 316373
aguuuagacucugagaaag

SEQ ID NO: 377778 - RNA, 19 nt, Artificial Sequence
  Description of Artificial Sequence: Synthetic oligonucleotide
  Antisense Strand to SEQ ID NO: 377777
cuuucucagagucuaaacu

SEQ ID NO: 377779 - RNA, 19 nt, Artificial Sequence
  Description of Artificial Sequence: Synthetic oligonucleotide
  Sense Strand Starting at position 751 of SEQ ID NO: 316384
ugagaaagacuuugcaguu

SEQ ID NO: 377780 - RNA, 19 nt, Artificial Sequence
  Description of Artificial Sequence: Synthetic oligonucleotide
  Antisense Strand to SEQ ID NO: 377779
aacugcaaagucuuucuca

SEQ ID NO: 377781 - RNA, 19 nt, Artificial Sequence
  Description of Artificial Sequence: Synthetic oligonucleotide
  Sense Strand Starting at position 751 of SEQ ID NO: 316531
agcucugggcucggugauu

SEQ ID NO: 377782 - RNA, 19 nt, Artificial Sequence
  Description of Artificial Sequence: Synthetic oligonucleotide
  Antisense Strand to SEQ ID NO: 377781
aaucaccgagcccagagcu

SEQ ID NO: 377783 - RNA, 19 nt, Artificial Sequence
  Description of Artificial Sequence: Synthetic oligonucleotide
  Sense Strand Starting at position 751 of SEQ ID NO: 316849
ccuucugaugccugaagca

SEQ ID NO: 377784 - RNA, 19 nt, Artificial Sequence
  Description of Artificial Sequence: Synthetic oligonucleotide
  Antisense Strand to SEQ ID NO: 377783
ugcuucaggcaucagaagg

SEQ ID NO: 377785 - RNA, 19 nt, Artificial Sequence
  Description of Artificial Sequence: Synthetic oligonucleotide
  Sense Strand Starting at position 751 of SEQ ID NO: 316865
gcagucagggcuugucuga

SEQ ID NO: 377786 - RNA, 19 nt, Artificial Sequence
  Description of Artificial Sequence: Synthetic oligonucleotide
  Antisense Strand to SEQ ID NO: 377785
ucagacaagcccugacugc

SEQ ID NO: 377787 - RNA, 19 nt, Artificial Sequence
  Description of Artificial Sequence: Synthetic oligonucleotide
  Sense Strand Starting at position 751 of SEQ ID NO: 316878
gucugaccucugcacagaa

SEQ ID NO: 377788 - RNA, 19 nt, Artificial Sequence
  Description of Artificial Sequence: Synthetic oligonucleotide
  Antisense Strand to SEQ ID NO: 377787
uucugugcagaggucagac

SEQ ID NO: 377789 - RNA, 19 nt, Artificial Sequence
  Description of Artificial Sequence: Synthetic oligonucleotide
  Sense Strand Starting at position 751 of SEQ ID NO: 317218
ccuuuauccugcccggaua

SEQ ID NO: 377790 - RNA, 19 nt, Artificial Sequence
  Description of Artificial Sequence: Synthetic oligonucleotide
  Antisense Strand to SEQ ID NO: 377789
uauccgggcaggauaaagg

SEQ ID NO: 377791 - RNA, 19 nt, Artificial Sequence
  Description of Artificial Sequence: Synthetic oligonucleotide
  Sense Strand Starting at position 751 of SEQ ID NO: 317288
aaaggauauggcuaggcuu

SEQ ID NO: 377792 - RNA, 19 nt, Artificial Sequence
  Description of Artificial Sequence: Synthetic oligonucleotide
  Antisense Strand to SEQ ID NO: 377791
aagccuagccauauccuuu

SEQ ID NO: 377793 - RNA, 19 nt, Artificial Sequence
  Description of Artificial Sequence: Synthetic oligonucleotide
  Sense Strand Starting at position 751 of SEQ ID NO: 317648
ugucuaugaccguguccau

SEQ ID NO: 377794 - RNA, 19 nt, Artificial Sequence
  Description of Artificial Sequence: Synthetic oligonucleotide
  Antisense Strand to SEQ ID NO: 377793
auggacacggucauagaca

SEQ ID NO: 377795 - RNA, 19 nt, Artificial Sequence
  Description of Artificial Sequence: Synthetic oligonucleotide
  Sense Strand Starting at position 751 of SEQ ID NO: 317777
uguguacaccuguguguau

SEQ ID NO: 377796 - RNA, 19 nt, Artificial Sequence
  Description of Artificial Sequence: Synthetic oligonucleotide
  Antisense Strand to SEQ ID NO: 377795
auacacacagguguacaca

SEQ ID NO: 377797 - RNA, 19 nt, Artificial Sequence
  Description of Artificial Sequence: Synthetic oligonucleotide
  Sense Strand Starting at position 751 of SEQ ID NO: 317778
guguacaccuguguguauu

SEQ ID NO: 377798 - RNA, 19 nt, Artificial Sequence
  Description of Artificial Sequence: Synthetic oligonucleotide
  Antisense Strand to SEQ ID NO: 377797
aauacacacagguguacac

SEQ ID NO: 377799 - RNA, 19 nt, Artificial Sequence
  Description of Artificial Sequence: Synthetic oligonucleotide
  Sense Strand Starting at position 751 of SEQ ID NO: 317831
ugccuaugugugcuccgua

SEQ ID NO: 377800 - RNA, 19 nt, Artificial Sequence
  Description of Artificial Sequence: Synthetic oligonucleotide
  Antisense Strand to SEQ ID NO: 377799
uacggagcacacauaggca

SEQ ID NO: 377801 - RNA, 19 nt, Artificial Sequence
  Description of Artificial Sequence: Synthetic oligonucleotide
  Sense Strand Starting at position 751 of SEQ ID NO: 317836
augugugcuccguaucugu

SEQ ID NO: 377802 - RNA, 19 nt, Artificial Sequence
  Description of Artificial Sequence: Synthetic oligonucleotide
  Antisense Strand to SEQ ID NO: 377801
acagauacggagcacacau

SEQ ID NO: 377803 - RNA, 19 nt, Artificial Sequence
  Description of Artificial Sequence: Synthetic oligonucleotide
  Sense Strand Starting at position 751 of SEQ ID NO: 317845
ccguaucugugucuaugua

SEQ ID NO: 377804 - RNA, 19 nt, Artificial Sequence
  Description of Artificial Sequence: Synthetic oligonucleotide
  Antisense Strand to SEQ ID NO: 377803
uacauagacacagauacgg

SEQ ID NO: 377805 - RNA, 19 nt, Artificial Sequence
  Description of Artificial Sequence: Synthetic oligonucleotide
  Sense Strand Starting at position 751 of SEQ ID NO: 317846
cguaucugugucuauguaa

SEQ ID NO: 377806 - RNA, 19 nt, Artificial Sequence
  Description of Artificial Sequence: Synthetic oligonucleotide
  Antisense Strand to SEQ ID NO: 377805
uuacauagacacagauacg

SEQ ID NO: 377807 - RNA, 19 nt, Artificial Sequence
  Description of Artificial Sequence: Synthetic oligonucleotide
  Sense Strand Starting at position 751 of SEQ ID NO: 317920
uggugugucuaugugucua

SEQ ID NO: 377808 - RNA, 19 nt, Artificial Sequence
  Description of Artificial Sequence: Synthetic oligonucleotide
  Antisense Strand to SEQ ID NO: 377807
uagacacauagacacacca

SEQ ID NO: 377809 - RNA, 19 nt, Artificial Sequence
  Description of Artificial Sequence: Synthetic oligonucleotide
  Sense Strand Starting at position 751 of SEQ ID NO: 317968
uguguuuaugucugggugu

SEQ ID NO: 377810 - RNA, 19 nt, Artificial Sequence
  Description of Artificial Sequence: Synthetic oligonucleotide
  Antisense Strand to SEQ ID NO: 377809
acacccagacauaaacaca

SEQ ID NO: 377811 - RNA, 19 nt, Artificial Sequence
  Description of Artificial Sequence: Synthetic oligonucleotide
  Sense Strand Starting at position 751 of SEQ ID NO: 317970
uguuuaugucuggguguuu

SEQ ID NO: 377812 - RNA, 19 nt, Artificial Sequence
  Description of Artificial Sequence: Synthetic oligonucleotide
  Antisense Strand to SEQ ID NO: 377811
aaacacccagacauaaaca

SEQ ID NO: 377813 - RNA, 19 nt, Artificial Sequence
  Description of Artificial Sequence: Synthetic oligonucleotide
  Sense Strand Starting at position 751 of SEQ ID NO: 317971
guuuaugucuggguguuua

SEQ ID NO: 377814 - RNA, 19 nt, Artificial Sequence
  Description of Artificial Sequence: Synthetic oligonucleotide
  Antisense Strand to SEQ ID NO: 377813
uaaacacccagacauaaac

SEQ ID NO: 377815 - RNA, 19 nt, Artificial Sequence
  Description of Artificial Sequence: Synthetic oligonucleotide
  Sense Strand Starting at position 751 of SEQ ID NO: 317982
gguguuuacaugugucugu

SEQ ID NO: 377816 - RNA, 19 nt, Artificial Sequence
  Description of Artificial Sequence: Synthetic oligonucleotide
  Antisense Strand to SEQ ID NO: 377815
acagacacauguaaacacc

SEQ ID NO: 377817 - RNA, 19 nt, Artificial Sequence
  Description of Artificial Sequence: Synthetic oligonucleotide
  Sense Strand Starting at position 751 of SEQ ID NO: 317983
guguuuacaugugucugua

SEQ ID NO: 377818 - RNA, 19 nt, Artificial Sequence
  Description of Artificial Sequence: Synthetic oligonucleotide
  Antisense Strand to SEQ ID NO: 377817
uacagacacauguaaacac

SEQ ID NO: 377819 - RNA, 19 nt, Artificial Sequence
  Description of Artificial Sequence: Synthetic oligonucleotide
  Sense Strand Starting at position 751 of SEQ ID NO: 317986
uuuacaugugucuguaugu

SEQ ID NO: 377820 - RNA, 19 nt, Artificial Sequence
  Description of Artificial Sequence: Synthetic oligonucleotide
  Antisense Strand to SEQ ID NO: 377819
acauacagacacauguaaa

SEQ ID NO: 377821 - RNA, 19 nt, Artificial Sequence
  Description of Artificial Sequence: Synthetic oligonucleotide
  Sense Strand Starting at position 751 of SEQ ID NO: 317999
guaugugagugucugguca

SEQ ID NO: 377822 - RNA, 19 nt, Artificial Sequence
  Description of Artificial Sequence: Synthetic oligonucleotide
  Antisense Strand to SEQ ID NO: 377821
ugaccagacacucacauac

SEQ ID NO: 377823 - RNA, 19 nt, Artificial Sequence
  Description of Artificial Sequence: Synthetic oligonucleotide
  Sense Strand Starting at position 751 of SEQ ID NO: 318322
ggcccucuuccagaaagcu

SEQ ID NO: 377824 - RNA, 19 nt, Artificial Sequence
  Description of Artificial Sequence: Synthetic oligonucleotide
  Antisense Strand to SEQ ID NO: 377823
agcuuucuggaagagggcc

SEQ ID NO: 377825 - RNA, 19 nt, Artificial Sequence
  Description of Artificial Sequence: Synthetic oligonucleotide
  Sense Strand Starting at position 751 of SEQ ID NO: 318555
agcagaugacagugacaga

SEQ ID NO: 377826 - RNA, 19 nt, Artificial Sequence
  Description of Artificial Sequence: Synthetic oligonucleotide
  Antisense Strand to SEQ ID NO: 377825
ucugucacugucaucugcu

SEQ ID NO: 377827 - RNA, 19 nt, Artificial Sequence
  Description of Artificial Sequence: Synthetic oligonucleotide
  Sense Strand Starting at position 751 of SEQ ID NO: 318722
ggaggugcuccugguuacu

SEQ ID NO: 377828 - RNA, 19 nt, Artificial Sequence
  Description of Artificial Sequence: Synthetic oligonucleotide
  Antisense Strand to SEQ ID NO: 377827
aguaaccaggagcaccucc

SEQ ID NO: 377829 - RNA, 19 nt, Artificial Sequence
  Description of Artificial Sequence: Synthetic oligonucleotide
  Sense Strand Starting at position 751 of SEQ ID NO: 318749
ccuggagccuuugauagaa

SEQ ID NO: 377830 - RNA, 19 nt, Artificial Sequence
  Description of Artificial Sequence: Synthetic oligonucleotide
  Antisense Strand to SEQ ID NO: 377829
uucuaucaaaggcuccagg

SEQ ID NO: 377831 - RNA, 19 nt, Artificial Sequence
  Description of Artificial Sequence: Synthetic oligonucleotide
  Sense Strand Starting at position 751 of SEQ ID NO: 318999
cuggaaaucugacaacauc

SEQ ID NO: 377832 - RNA, 19 nt, Artificial Sequence
  Description of Artificial Sequence: Synthetic oligonucleotide
  Antisense Strand to SEQ ID NO: 377831
gauguugucagauuuccag

SEQ ID NO: 377833 - RNA, 19 nt, Artificial Sequence
  Description of Artificial Sequence: Synthetic oligonucleotide
  Sense Strand Starting at position 751 of SEQ ID NO: 319057
aauguuuggcaacaguauu

SEQ ID NO: 377834 - RNA, 19 nt, Artificial Sequence
  Description of Artificial Sequence: Synthetic oligonucleotide
  Antisense Strand to SEQ ID NO: 377833
aauacuguugccaaacauu

SEQ ID NO: 377835 - RNA, 19 nt, Artificial Sequence
  Description of Artificial Sequence: Synthetic oligonucleotide
  Sense Strand Starting at position 752 of SEQ ID NO: 315415
gcuagccaguuauuacaca

SEQ ID NO: 377836 - RNA, 19 nt, Artificial Sequence
  Description of Artificial Sequence: Synthetic oligonucleotide
  Antisense Strand to SEQ ID NO: 377835
uguguaauaacuggcuagc

SEQ ID NO: 377837 - RNA, 19 nt, Artificial Sequence
  Description of Artificial Sequence: Synthetic oligonucleotide
  Sense Strand Starting at position 752 of SEQ ID NO: 315522
uccagcauccuuuguauca

SEQ ID NO: 377838 - RNA, 19 nt, Artificial Sequence
  Description of Artificial Sequence: Synthetic oligonucleotide
  Antisense Strand to SEQ ID NO: 377837
ugauacaaaggaugcugga

SEQ ID NO: 377839 - RNA, 19 nt, Artificial Sequence
  Description of Artificial Sequence: Synthetic oligonucleotide
  Sense Strand Starting at position 752 of SEQ ID NO: 315523
ccagcauccuuuguaucau

SEQ ID NO: 377840 - RNA, 19 nt, Artificial Sequence
  Description of Artificial Sequence: Synthetic oligonucleotide
  Antisense Strand to SEQ ID NO: 377839
augauacaaaggaugcugg

SEQ ID NO: 377841 - RNA, 19 nt, Artificial Sequence
  Description of Artificial Sequence: Synthetic oligonucleotide
  Sense Strand Starting at position 752 of SEQ ID NO: 315529
uccuuuguaucaucaguga

SEQ ID NO: 377842 - RNA, 19 nt, Artificial Sequence
  Description of Artificial Sequence: Synthetic oligonucleotide
  Antisense Strand to SEQ ID NO: 377841
ucacugaugauacaaagga

SEQ ID NO: 377843 - RNA, 19 nt, Artificial Sequence
  Description of Artificial Sequence: Synthetic oligonucleotide
  Sense Strand Starting at position 752 of SEQ ID NO: 315532
uuuguaucaucagugaaca

SEQ ID NO: 377844 - RNA, 19 nt, Artificial Sequence
  Description of Artificial Sequence: Synthetic oligonucleotide
  Antisense Strand to SEQ ID NO: 377843
uguucacugaugauacaaa

SEQ ID NO: 377845 - RNA, 19 nt, Artificial Sequence
  Description of Artificial Sequence: Synthetic oligonucleotide
  Sense Strand Starting at position 752 of SEQ ID NO: 315533
uuguaucaucagugaacaa

SEQ ID NO: 377846 - RNA, 19 nt, Artificial Sequence
  Description of Artificial Sequence: Synthetic oligonucleotide
  Antisense Strand to SEQ ID NO: 377845
uuguucacugaugauacaa

SEQ ID NO: 377847 - RNA, 19 nt, Artificial Sequence
  Description of Artificial Sequence: Synthetic oligonucleotide
  Sense Strand Starting at position 752 of SEQ ID NO: 315890
cccuaaaugccuuguagga

SEQ ID NO: 377848 - RNA, 19 nt, Artificial Sequence
  Description of Artificial Sequence: Synthetic oligonucleotide
  Antisense Strand to SEQ ID NO: 377847
uccuacaaggcauuuaggg

SEQ ID NO: 377849 - RNA, 19 nt, Artificial Sequence
  Description of Artificial Sequence: Synthetic oligonucleotide
  Sense Strand Starting at position 752 of SEQ ID NO: 315911
cuaguaaagucaccagaug

SEQ ID NO: 377850 - RNA, 19 nt, Artificial Sequence
  Description of Artificial Sequence: Synthetic oligonucleotide
  Antisense Strand to SEQ ID NO: 377849
caucuggugacuuuacuag

SEQ ID NO: 377851 - RNA, 19 nt, Artificial Sequence
  Description of Artificial Sequence: Synthetic oligonucleotide
  Sense Strand Starting at position 752 of SEQ ID NO: 315946
agagacuugcauuguugau

SEQ ID NO: 377852 - RNA, 19 nt, Artificial Sequence
  Description of Artificial Sequence: Synthetic oligonucleotide
  Antisense Strand to SEQ ID NO: 377851
aucaacaaugcaagucucu

SEQ ID NO: 377853 - RNA, 19 nt, Artificial Sequence
  Description of Artificial Sequence: Synthetic oligonucleotide
  Sense Strand Starting at position 752 of SEQ ID NO: 315952
uugcauuguugauuccuga

SEQ ID NO: 377854 - RNA, 19 nt, Artificial Sequence
  Description of Artificial Sequence: Synthetic oligonucleotide
  Antisense Strand to SEQ ID NO: 377853
ucaggaaucaacaaugcaa

SEQ ID NO: 377855 - RNA, 19 nt, Artificial Sequence
  Description of Artificial Sequence: Synthetic oligonucleotide
  Sense Strand Starting at position 752 of SEQ ID NO: 315959
guugauuccugauucuuug

SEQ ID NO: 377856 - RNA, 19 nt, Artificial Sequence
  Description of Artificial Sequence: Synthetic oligonucleotide
  Antisense Strand to SEQ ID NO: 377855
caaagaaucaggaaucaac

SEQ ID NO: 377857 - RNA, 19 nt, Artificial Sequence
  Description of Artificial Sequence: Synthetic oligonucleotide
  Sense Strand Starting at position 752 of SEQ ID NO: 315963
auuccugauucuuugaagu

SEQ ID NO: 377858 - RNA, 19 nt, Artificial Sequence
  Description of Artificial Sequence: Synthetic oligonucleotide
  Antisense Strand to SEQ ID NO: 377857
acuucaaagaaucaggaau

SEQ ID NO: 377859 - RNA, 19 nt, Artificial Sequence
  Description of Artificial Sequence: Synthetic oligonucleotide
  Sense Strand Starting at position 752 of SEQ ID NO: 315995
cccaaaugguccuccuaag

SEQ ID NO: 377860 - RNA, 19 nt, Artificial Sequence
  Description of Artificial Sequence: Synthetic oligonucleotide
  Antisense Strand to SEQ ID NO: 377859
cuuaggaggaccauuuggg

SEQ ID NO: 377861 - RNA, 19 nt, Artificial Sequence
  Description of Artificial Sequence: Synthetic oligonucleotide
  Sense Strand Starting at position 752 of SEQ ID NO: 316291
cccucuagacucuaguaga

SEQ ID NO: 377862 - RNA, 19 nt, Artificial Sequence
  Description of Artificial Sequence: Synthetic oligonucleotide
  Antisense Strand to SEQ ID NO: 377861
ucuacuagagucuagaggg

SEQ ID NO: 377863 - RNA, 19 nt, Artificial Sequence
  Description of Artificial Sequence: Synthetic oligonucleotide
  Sense Strand Starting at position 752 of SEQ ID NO: 316319
ucuccuucuggcuacgaaa

SEQ ID NO: 377864 - RNA, 19 nt, Artificial Sequence
  Description of Artificial Sequence: Synthetic oligonucleotide
  Antisense Strand to SEQ ID NO: 377863
uuucguagccagaaggaga

SEQ ID NO: 377865 - RNA, 19 nt, Artificial Sequence
  Description of Artificial Sequence: Synthetic oligonucleotide
  Sense Strand Starting at position 752 of SEQ ID NO: 316321
uccuucuggcuacgaaaua

SEQ ID NO: 377866 - RNA, 19 nt, Artificial Sequence
  Description of Artificial Sequence: Synthetic oligonucleotide
  Antisense Strand to SEQ ID NO: 377865
uauuucguagccagaagga

SEQ ID NO: 377867 - RNA, 19 nt, Artificial Sequence
  Description of Artificial Sequence: Synthetic oligonucleotide
  Sense Strand Starting at position 752 of SEQ ID NO: 316521
cucacaucuccugagaagu

SEQ ID NO: 377868 - RNA, 19 nt, Artificial Sequence
  Description of Artificial Sequence: Synthetic oligonucleotide
  Antisense Strand to SEQ ID NO: 377867
acuucucaggagaugugag

SEQ ID NO: 377869 - RNA, 19 nt, Artificial Sequence
  Description of Artificial Sequence: Synthetic oligonucleotide
  Sense Strand Starting at position 752 of SEQ ID NO: 316559
ugcaaucaucggcgaacaa

SEQ ID NO: 377870 - RNA, 19 nt, Artificial Sequence
  Description of Artificial Sequence: Synthetic oligonucleotide
  Antisense Strand to SEQ ID NO: 377869
uuguucgccgaugauugca

SEQ ID NO: 377871 - RNA, 19 nt, Artificial Sequence
  Description of Artificial Sequence: Synthetic oligonucleotide
  Sense Strand Starting at position 752 of SEQ ID NO: 316879
uucggaugauuccuagaaa

SEQ ID NO: 377872 - RNA, 19 nt, Artificial Sequence
  Description of Artificial Sequence: Synthetic oligonucleotide
  Antisense Strand to SEQ ID NO: 377871
uuucuaggaaucauccgaa

SEQ ID NO: 377873 - RNA, 19 nt, Artificial Sequence
  Description of Artificial Sequence: Synthetic oligonucleotide
  Sense Strand Starting at position 752 of SEQ ID NO: 317762
gaagaugucagcggaacca

SEQ ID NO: 377874 - RNA, 19 nt, Artificial Sequence
  Description of Artificial Sequence: Synthetic oligonucleotide
  Antisense Strand to SEQ ID NO: 377873
ugguuccgcugacaucuuc

SEQ ID NO: 377875 - RNA, 19 nt, Artificial Sequence
  Description of Artificial Sequence: Synthetic oligonucleotide
  Sense Strand Starting at position 752 of SEQ ID NO: 317800
cuggaagguugucuaugua

SEQ ID NO: 377876 - RNA, 19 nt, Artificial Sequence
  Description of Artificial Sequence: Synthetic oligonucleotide
  Antisense Strand to SEQ ID NO: 377875
uacauagacaaccuuccag

SEQ ID NO: 377877 - RNA, 19 nt, Artificial Sequence
  Description of Artificial Sequence: Synthetic oligonucleotide
  Sense Strand Starting at position 752 of SEQ ID NO: 317803
gaagguugucuauguaguu

SEQ ID NO: 377878 - RNA, 19 nt, Artificial Sequence
  Description of Artificial Sequence: Synthetic oligonucleotide
  Antisense Strand to SEQ ID NO: 377877
aacuacauagacaaccuuc

SEQ ID NO: 377879 - RNA, 19 nt, Artificial Sequence
  Description of Artificial Sequence: Synthetic oligonucleotide
  Sense Strand Starting at position 752 of SEQ ID NO: 317888
uguuaagaaucucucauug

SEQ ID NO: 377880 - RNA, 19 nt, Artificial Sequence
  Description of Artificial Sequence: Synthetic oligonucleotide
  Antisense Strand to SEQ ID NO: 377879
caaugagagauucuuaaca

SEQ ID NO: 377881 - RNA, 19 nt, Artificial Sequence
  Description of Artificial Sequence: Synthetic oligonucleotide
  Sense Strand Starting at position 752 of SEQ ID NO: 317898
cucucauugguuuggaaga

SEQ ID NO: 377882 - RNA, 19 nt, Artificial Sequence
  Description of Artificial Sequence: Synthetic oligonucleotide
  Antisense Strand to SEQ ID NO: 377881
ucuuccaaaccaaugagag

SEQ ID NO: 377883 - RNA, 19 nt, Artificial Sequence
  Description of Artificial Sequence: Synthetic oligonucleotide
  Sense Strand Starting at position 752 of SEQ ID NO: 318000
gcuuuauauuuaguuugca

SEQ ID NO: 377884 - RNA, 19 nt, Artificial Sequence
  Description of Artificial Sequence: Synthetic oligonucleotide
  Antisense Strand to SEQ ID NO: 377883
ugcaaacuaaauauaaagc

SEQ ID NO: 377885 - RNA, 19 nt, Artificial Sequence
  Description of Artificial Sequence: Synthetic oligonucleotide
  Sense Strand Starting at position 752 of SEQ ID NO: 318085
aacuguuuacugcagguua

SEQ ID NO: 377886 - RNA, 19 nt, Artificial Sequence
  Description of Artificial Sequence: Synthetic oligonucleotide
  Antisense Strand to SEQ ID NO: 377885
uaaccugcaguaaacaguu

SEQ ID NO: 377887 - RNA, 19 nt, Artificial Sequence
  Description of Artificial Sequence: Synthetic oligonucleotide
  Sense Strand Starting at position 752 of SEQ ID NO: 318204
agggaacauccuuguaauc

SEQ ID NO: 377888 - RNA, 19 nt, Artificial Sequence
  Description of Artificial Sequence: Synthetic oligonucleotide
  Antisense Strand to SEQ ID NO: 377887
gauuacaaggauguucccu

SEQ ID NO: 377889 - RNA, 19 nt, Artificial Sequence
  Description of Artificial Sequence: Synthetic oligonucleotide
  Sense Strand Starting at position 752 of SEQ ID NO: 318661
gaucaugaugucugguguu

SEQ ID NO: 377890 - RNA, 19 nt, Artificial Sequence
  Description of Artificial Sequence: Synthetic oligonucleotide
  Antisense Strand to SEQ ID NO: 377889
aacaccagacaucaugauc

SEQ ID NO: 377891 - RNA, 19 nt, Artificial Sequence
  Description of Artificial Sequence: Synthetic oligonucleotide
  Sense Strand Starting at position 752 of SEQ ID NO: 318801
aggagaugcuuccucucau

SEQ ID NO: 377892 - RNA, 19 nt, Artificial Sequence
  Description of Artificial Sequence: Synthetic oligonucleotide
  Antisense Strand to SEQ ID NO: 377891
augagaggaagcaucuccu

SEQ ID NO: 377893 - RNA, 19 nt, Artificial Sequence
  Description of Artificial Sequence: Synthetic oligonucleotide
  Sense Strand Starting at position 752 of SEQ ID NO: 318802
ggagaugcuuccucucauc

SEQ ID NO: 377894 - RNA, 19 nt, Artificial Sequence
  Description of Artificial Sequence: Synthetic oligonucleotide
  Antisense Strand to SEQ ID NO: 377893
gaugagaggaagcaucucc

SEQ ID NO: 377895 - RNA, 19 nt, Artificial Sequence
  Description of Artificial Sequence: Synthetic oligonucleotide
  Sense Strand Starting at position 752 of SEQ ID NO: 318828
ugauuacccugagauagga

SEQ ID NO: 377896 - RNA, 19 nt, Artificial Sequence
  Description of Artificial Sequence: Synthetic oligonucleotide
  Antisense Strand to SEQ ID NO: 377895
uccuaucucaggguaauca

SEQ ID NO: 377897 - RNA, 19 nt, Artificial Sequence
  Description of Artificial Sequence: Synthetic oligonucleotide
  Sense Strand Starting at position 752 of SEQ ID NO: 318901
aggaauugauucucuguca

SEQ ID NO: 377898 - RNA, 19 nt, Artificial Sequence
  Description of Artificial Sequence: Synthetic oligonucleotide
  Antisense Strand to SEQ ID NO: 377897
ugacagagaaucaauuccu

SEQ ID NO: 377899 - RNA, 19 nt, Artificial Sequence
  Description of Artificial Sequence: Synthetic oligonucleotide
  Sense Strand Starting at position 752 of SEQ ID NO: 318902
ggaauugauucucugucau

SEQ ID NO: 377900 - RNA, 19 nt, Artificial Sequence
  Description of Artificial Sequence: Synthetic oligonucleotide
  Antisense Strand to SEQ ID NO: 377899
augacagagaaucaauucc

SEQ ID NO: 377901 - RNA, 19 nt, Artificial Sequence
  Description of Artificial Sequence: Synthetic oligonucleotide
  Sense Strand Starting at position 752 of SEQ ID NO: 318912
cucugucauucuuagauuu

SEQ ID NO: 377902 - RNA, 19 nt, Artificial Sequence
  Description of Artificial Sequence: Synthetic oligonucleotide
  Antisense Strand to SEQ ID NO: 377901
aaaucuaagaaugacagag

SEQ ID NO: 377903 - RNA, 19 nt, Artificial Sequence
  Description of Artificial Sequence: Synthetic oligonucleotide
  Sense Strand Starting at position 752 of SEQ ID NO: 318914
cugucauucuuagauuucu

SEQ ID NO: 377904 - RNA, 19 nt, Artificial Sequence
  Description of Artificial Sequence: Synthetic oligonucleotide
  Antisense Strand to SEQ ID NO: 377903
agaaaucuaagaaugacag

SEQ ID NO: 377905 - RNA, 19 nt, Artificial Sequence
  Description of Artificial Sequence: Synthetic oligonucleotide
  Sense Strand Starting at position 752 of SEQ ID NO: 318967
uuugauagguuuccaucua

SEQ ID NO: 377906 - RNA, 19 nt, Artificial Sequence
  Description of Artificial Sequence: Synthetic oligonucleotide
  Antisense Strand to SEQ ID NO: 377905
uagauggaaaccuaucaaa

SEQ ID NO: 377907 - RNA, 19 nt, Artificial Sequence
  Description of Artificial Sequence: Synthetic oligonucleotide
  Sense Strand Starting at position 752 of SEQ ID NO: 318974
gguuuccaucuacgauauu

SEQ ID NO: 377908 - RNA, 19 nt, Artificial Sequence
  Description of Artificial Sequence: Synthetic oligonucleotide
  Antisense Strand to SEQ ID NO: 377907
aauaucguagauggaaacc

SEQ ID NO: 377909 - RNA, 19 nt, Artificial Sequence
  Description of Artificial Sequence: Synthetic oligonucleotide
  Sense Strand Starting at position 752 of SEQ ID NO: 319099
ucucacuagugugcaaaga

SEQ ID NO: 377910 - RNA, 19 nt, Artificial Sequence
  Description of Artificial Sequence: Synthetic oligonucleotide
  Antisense Strand to SEQ ID NO: 377909
ucuuugcacacuagugaga

SEQ ID NO: 377911 - RNA, 19 nt, Artificial Sequence
  Description of Artificial Sequence: Synthetic oligonucleotide
  Sense Strand Starting at position 752 of SEQ ID NO: 319129
ccuagaagucuuugauagc

SEQ ID NO: 377912 - RNA, 19 nt, Artificial Sequence
  Description of Artificial Sequence: Synthetic oligonucleotide
  Antisense Strand to SEQ ID NO: 377911
gcuaucaaagacuucuagg

SEQ ID NO: 377913 - RNA, 19 nt, Artificial Sequence
  Description of Artificial Sequence: Synthetic oligonucleotide
  Sense Strand Starting at position 752 of SEQ ID NO: 319177
ccaggcacaucuguacauu

SEQ ID NO: 377914 - RNA, 19 nt, Artificial Sequence
  Description of Artificial Sequence: Synthetic oligonucleotide
  Antisense Strand to SEQ ID NO: 377913
aauguacagaugugccugg

SEQ ID NO: 377915 - RNA, 19 nt, Artificial Sequence
  Description of Artificial Sequence: Synthetic oligonucleotide
  Sense Strand Starting at position 753 of SEQ ID NO: 315892
cuaugucugggucaucuga

SEQ ID NO: 377916 - RNA, 19 nt, Artificial Sequence
  Description of Artificial Sequence: Synthetic oligonucleotide
  Antisense Strand to SEQ ID NO: 377915
ucagaugacccagacauag

SEQ ID NO: 377917 - RNA, 19 nt, Artificial Sequence
  Description of Artificial Sequence: Synthetic oligonucleotide
  Sense Strand Starting at position 753 of SEQ ID NO: 316096
ggugucucuggccaaauga

SEQ ID NO: 377918 - RNA, 19 nt, Artificial Sequence
  Description of Artificial Sequence: Synthetic oligonucleotide
  Antisense Strand to SEQ ID NO: 377917
ucauuuggccagagacacc

SEQ ID NO: 377919 - RNA, 19 nt, Artificial Sequence
  Description of Artificial Sequence: Synthetic oligonucleotide
  Sense Strand Starting at position 753 of SEQ ID NO: 316192
cuaagauggugagcaagua

SEQ ID NO: 377920 - RNA, 19 nt, Artificial Sequence
  Description of Artificial Sequence: Synthetic oligonucleotide
  Antisense Strand to SEQ ID NO: 377919
uacuugcucaccaucuuag

SEQ ID NO: 377921 - RNA, 19 nt, Artificial Sequence
  Description of Artificial Sequence: Synthetic oligonucleotide
  Sense Strand Starting at position 753 of SEQ ID NO: 316207
aguaacugacccuauuagu

SEQ ID NO: 377922 - RNA, 19 nt, Artificial Sequence
  Description of Artificial Sequence: Synthetic oligonucleotide
  Antisense Strand to SEQ ID NO: 377921
acuaauagggucaguuacu

SEQ ID NO: 377923 - RNA, 19 nt, Artificial Sequence
  Description of Artificial Sequence: Synthetic oligonucleotide
  Sense Strand Starting at position 753 of SEQ ID NO: 316305
uggaccauaugaguuaauu

SEQ ID NO: 377924 - RNA, 19 nt, Artificial Sequence
  Description of Artificial Sequence: Synthetic oligonucleotide
  Antisense Strand to SEQ ID NO: 377923
aauuaacucauauggucca

SEQ ID NO: 377925 - RNA, 19 nt, Artificial Sequence
  Description of Artificial Sequence: Synthetic oligonucleotide
  Sense Strand Starting at position 753 of SEQ ID NO: 316555
aaugguuaagcuuaaaguu

SEQ ID NO: 377926 - RNA, 19 nt, Artificial Sequence
  Description of Artificial Sequence: Synthetic oligonucleotide
  Antisense Strand to SEQ ID NO: 377925
aacuuuaagcuuaaccauu

SEQ ID NO: 377927 - RNA, 19 nt, Artificial Sequence
  Description of Artificial Sequence: Synthetic oligonucleotide
  Sense Strand Starting at position 753 of SEQ ID NO: 316636
uuuauccuugcagggaaua

SEQ ID NO: 377928 - RNA, 19 nt, Artificial Sequence
  Description of Artificial Sequence: Synthetic oligonucleotide
  Antisense Strand to SEQ ID NO: 377927
uauucccugcaaggauaaa

SEQ ID NO: 377929 - RNA, 19 nt, Artificial Sequence
  Description of Artificial Sequence: Synthetic oligonucleotide
  Sense Strand Starting at position 753 of SEQ ID NO: 316637
uuauccuugcagggaauau

SEQ ID NO: 377930 - RNA, 19 nt, Artificial Sequence
  Description of Artificial Sequence: Synthetic oligonucleotide
  Antisense Strand to SEQ ID NO: 377929
auauucccugcaaggauaa

SEQ ID NO: 377931 - RNA, 19 nt, Artificial Sequence
  Description of Artificial Sequence: Synthetic oligonucleotide
  Sense Strand Starting at position 753 of SEQ ID NO: 316740
uggagaaacuccuccuuac

SEQ ID NO: 377932 - RNA, 19 nt, Artificial Sequence
  Description of Artificial Sequence: Synthetic oligonucleotide
  Antisense Strand to SEQ ID NO: 377931
guaaggaggaguuucucca

SEQ ID NO: 377933 - RNA, 19 nt, Artificial Sequence
  Description of Artificial Sequence: Synthetic oligonucleotide
  Sense Strand Starting at position 753 of SEQ ID NO: 316829
cccugagaucauugccaua

SEQ ID NO: 377934 - RNA, 19 nt, Artificial Sequence
  Description of Artificial Sequence: Synthetic oligonucleotide
  Antisense Strand to SEQ ID NO: 377933
uauggcaaugaucucaggg

SEQ ID NO: 377935 - RNA, 19 nt, Artificial Sequence
  Description of Artificial Sequence: Synthetic oligonucleotide
  Sense Strand Starting at position 753 of SEQ ID NO: 316831
cugagaucauugccauaga

SEQ ID NO: 377936 - RNA, 19 nt, Artificial Sequence
  Description of Artificial Sequence: Synthetic oligonucleotide
  Antisense Strand to SEQ ID NO: 377935
ucuauggcaaugaucucag

SEQ ID NO: 377937 - RNA, 19 nt, Artificial Sequence
  Description of Artificial Sequence: Synthetic oligonucleotide
  Sense Strand Starting at position 753 of SEQ ID NO: 316847
agaggacagucuuccaaug

SEQ ID NO: 377938 - RNA, 19 nt, Artificial Sequence
  Description of Artificial Sequence: Synthetic oligonucleotide
  Antisense Strand to SEQ ID NO: 377937
cauuggaagacuguccucu

SEQ ID NO: 377939 - RNA, 19 nt, Artificial Sequence
  Description of Artificial Sequence: Synthetic oligonucleotide
  Sense Strand Starting at position 753 of SEQ ID NO: 316987
agcuguucccuggaacaag

SEQ ID NO: 377940 - RNA, 19 nt, Artificial Sequence
  Description of Artificial Sequence: Synthetic oligonucleotide
  Antisense Strand to SEQ ID NO: 377939
cuuguuccagggaacagcu

SEQ ID NO: 377941 - RNA, 19 nt, Artificial Sequence
  Description of Artificial Sequence: Synthetic oligonucleotide
  Sense Strand Starting at position 753 of SEQ ID NO: 317075
gucagaagauguucagaga

SEQ ID NO: 377942 - RNA, 19 nt, Artificial Sequence
  Description of Artificial Sequence: Synthetic oligonucleotide
  Antisense Strand to SEQ ID NO: 377941
ucucugaacaucuucugac

SEQ ID NO: 377943 - RNA, 19 nt, Artificial Sequence
  Description of Artificial Sequence: Synthetic oligonucleotide
  Sense Strand Starting at position 753 of SEQ ID NO: 317117
gugugcguuaaugugacua

SEQ ID NO: 377944 - RNA, 19 nt, Artificial Sequence
  Description of Artificial Sequence: Synthetic oligonucleotide
  Antisense Strand to SEQ ID NO: 377943
uagucacauuaacgcacac

SEQ ID NO: 377945 - RNA, 19 nt, Artificial Sequence
  Description of Artificial Sequence: Synthetic oligonucleotide
  Sense Strand Starting at position 753 of SEQ ID NO: 317122
cguuaaugugacuaaacaa

SEQ ID NO: 377946 - RNA, 19 nt, Artificial Sequence
  Description of Artificial Sequence: Synthetic oligonucleotide
  Antisense Strand to SEQ ID NO: 377945
uuguuuagucacauuaacg

SEQ ID NO: 377947 - RNA, 19 nt, Artificial Sequence
  Description of Artificial Sequence: Synthetic oligonucleotide
  Sense Strand Starting at position 753 of SEQ ID NO: 317231
uccaaagacuuauugcuga

SEQ ID NO: 377948 - RNA, 19 nt, Artificial Sequence
  Description of Artificial Sequence: Synthetic oligonucleotide
  Antisense Strand to SEQ ID NO: 377947
ucagcaauaagucuuugga

SEQ ID NO: 377949 - RNA, 19 nt, Artificial Sequence
  Description of Artificial Sequence: Synthetic oligonucleotide
  Sense Strand Starting at position 753 of SEQ ID NO: 317277
aaacaaugccagugaugug

SEQ ID NO: 377950 - RNA, 19 nt, Artificial Sequence
  Description of Artificial Sequence: Synthetic oligonucleotide
  Antisense Strand to SEQ ID NO: 377949
cacaucacuggcauuguuu

SEQ ID NO: 377951 - RNA, 19 nt, Artificial Sequence
  Description of Artificial Sequence: Synthetic oligonucleotide
  Sense Strand Starting at position 753 of SEQ ID NO: 317286
cagugaugugauuauaauu

SEQ ID NO: 377952 - RNA, 19 nt, Artificial Sequence
  Description of Artificial Sequence: Synthetic oligonucleotide
  Antisense Strand to SEQ ID NO: 377951
aauuauaaucacaucacug

SEQ ID NO: 377953 - RNA, 19 nt, Artificial Sequence
  Description of Artificial Sequence: Synthetic oligonucleotide
  Sense Strand Starting at position 753 of SEQ ID NO: 317291
augugauuauaauuggcca

SEQ ID NO: 377954 - RNA, 19 nt, Artificial Sequence
  Description of Artificial Sequence: Synthetic oligonucleotide
  Antisense Strand to SEQ ID NO: 377953
uggccaauuauaaucacau

SEQ ID NO: 377955 - RNA, 19 nt, Artificial Sequence
  Description of Artificial Sequence: Synthetic oligonucleotide
  Sense Strand Starting at position 753 of SEQ ID NO: 317294
ugauuauaauuggccaaga

SEQ ID NO: 377956 - RNA, 19 nt, Artificial Sequence
  Description of Artificial Sequence: Synthetic oligonucleotide
  Antisense Strand to SEQ ID NO: 377955
ucuuggccaauuauaauca

SEQ ID NO: 377957 - RNA, 19 nt, Artificial Sequence
  Description of Artificial Sequence: Synthetic oligonucleotide
  Sense Strand Starting at position 753 of SEQ ID NO: 317295
gauuauaauuggccaagag

SEQ ID NO: 377958 - RNA, 19 nt, Artificial Sequence
  Description of Artificial Sequence: Synthetic oligonucleotide
  Antisense Strand to SEQ ID NO: 377957
cucuuggccaauuauaauc

SEQ ID NO: 377959 - RNA, 19 nt, Artificial Sequence
  Description of Artificial Sequence: Synthetic oligonucleotide
  Sense Strand Starting at position 753 of SEQ ID NO: 317330
cccacaaguccugaugcaa

SEQ ID NO: 377960 - RNA, 19 nt, Artificial Sequence
  Description of Artificial Sequence: Synthetic oligonucleotide
  Antisense Strand to SEQ ID NO: 377959
uugcaucaggacuuguggg

SEQ ID NO: 377961 - RNA, 19 nt, Artificial Sequence
  Description of Artificial Sequence: Synthetic oligonucleotide
  Sense Strand Starting at position 753 of SEQ ID NO: 317445
acaagaugaucuccaaggu

SEQ ID NO: 377962 - RNA, 19 nt, Artificial Sequence
  Description of Artificial Sequence: Synthetic oligonucleotide
  Antisense Strand to SEQ ID NO: 377961
accuuggagaucaucuugu

SEQ ID NO: 377963 - RNA, 19 nt, Artificial Sequence
  Description of Artificial Sequence: Synthetic oligonucleotide
  Sense Strand Starting at position 753 of SEQ ID NO: 317464
cccauuuagcucuguuuau

SEQ ID NO: 377964 - RNA, 19 nt, Artificial Sequence
  Description of Artificial Sequence: Synthetic oligonucleotide
  Antisense Strand to SEQ ID NO: 377963
auaaacagagcuaaauggg

SEQ ID NO: 377965 - RNA, 19 nt, Artificial Sequence
  Description of Artificial Sequence: Synthetic oligonucleotide
  Sense Strand Starting at position 753 of SEQ ID NO: 317465
ccauuuagcucuguuuaua

SEQ ID NO: 377966 - RNA, 19 nt, Artificial Sequence
  Description of Artificial Sequence: Synthetic oligonucleotide
  Antisense Strand to SEQ ID NO: 377965
uauaaacagagcuaaaugg

SEQ ID NO: 377967 - RNA, 19 nt, Artificial Sequence
  Description of Artificial Sequence: Synthetic oligonucleotide
  Sense Strand Starting at position 753 of SEQ ID NO: 317727
agcauaggaucccuaauaa

SEQ ID NO: 377968 - RNA, 19 nt, Artificial Sequence
  Description of Artificial Sequence: Synthetic oligonucleotide
  Antisense Strand to SEQ ID NO: 377967
uuauuagggauccuaugcu

SEQ ID NO: 377969 - RNA, 19 nt, Artificial Sequence
  Description of Artificial Sequence: Synthetic oligonucleotide
  Sense Strand Starting at position 753 of SEQ ID NO: 317811
aggaaugacuaagauaaga

SEQ ID NO: 377970 - RNA, 19 nt, Artificial Sequence
  Description of Artificial Sequence: Synthetic oligonucleotide
  Antisense Strand to SEQ ID NO: 377969
ucuuaucuuagucauuccu

SEQ ID NO: 377971 - RNA, 19 nt, Artificial Sequence
  Description of Artificial Sequence: Synthetic oligonucleotide
  Sense Strand Starting at position 753 of SEQ ID NO: 317933
acuuguccucccugagaga

SEQ ID NO: 377972 - RNA, 19 nt, Artificial Sequence
  Description of Artificial Sequence: Synthetic oligonucleotide
  Antisense Strand to SEQ ID NO: 377971
ucucucagggaggacaagu

SEQ ID NO: 377973 - RNA, 19 nt, Artificial Sequence
  Description of Artificial Sequence: Synthetic oligonucleotide
  Sense Strand Starting at position 753 of SEQ ID NO: 317980
uggcuuguacucguugcau

SEQ ID NO: 377974 - RNA, 19 nt, Artificial Sequence
  Description of Artificial Sequence: Synthetic oligonucleotide
  Antisense Strand to SEQ ID NO: 377973
augcaacgaguacaagcca

SEQ ID NO: 377975 - RNA, 19 nt, Artificial Sequence
  Description of Artificial Sequence: Synthetic oligonucleotide
  Sense Strand Starting at position 753 of SEQ ID NO: 318086
uuggaaagccaguaagcuu

SEQ ID NO: 377976 - RNA, 19 nt, Artificial Sequence
  Description of Artificial Sequence: Synthetic oligonucleotide
  Antisense Strand to SEQ ID NO: 377975
aagcuuacuggcuuuccaa

SEQ ID NO: 377977 - RNA, 19 nt, Artificial Sequence
  Description of Artificial Sequence: Synthetic oligonucleotide
  Sense Strand Starting at position 753 of SEQ ID NO: 318537
ucuucugggagauguuacu

SEQ ID NO: 377978 - RNA, 19 nt, Artificial Sequence
  Description of Artificial Sequence: Synthetic oligonucleotide
  Antisense Strand to SEQ ID NO: 377977
aguaacaucucccagaaga

SEQ ID NO: 377979 - RNA, 19 nt, Artificial Sequence
  Description of Artificial Sequence: Synthetic oligonucleotide
  Sense Strand Starting at position 753 of SEQ ID NO: 318567
uuuguugugcuagacaaag

SEQ ID NO: 377980 - RNA, 19 nt, Artificial Sequence
  Description of Artificial Sequence: Synthetic oligonucleotide
  Antisense Strand to SEQ ID NO: 377979
cuuugucuagcacaacaaa

SEQ ID NO: 377981 - RNA, 19 nt, Artificial Sequence
  Description of Artificial Sequence: Synthetic oligonucleotide
  Sense Strand Starting at position 753 of SEQ ID NO: 318823
gggacagguuaguucucua

SEQ ID NO: 377982 - RNA, 19 nt, Artificial Sequence
  Description of Artificial Sequence: Synthetic oligonucleotide
  Antisense Strand to SEQ ID NO: 377981
uagagaacuaaccuguccc

SEQ ID NO: 377983 - RNA, 19 nt, Artificial Sequence
  Description of Artificial Sequence: Synthetic oligonucleotide
  Sense Strand Starting at position 753 of SEQ ID NO: 318828
agguuaguucucuaacccu

SEQ ID NO: 377984 - RNA, 19 nt, Artificial Sequence
  Description of Artificial Sequence: Synthetic oligonucleotide
  Antisense Strand to SEQ ID NO: 377983
aggguuagagaacuaaccu

SEQ ID NO: 377985 - RNA, 19 nt, Artificial Sequence
  Description of Artificial Sequence: Synthetic oligonucleotide
  Sense Strand Starting at position 753 of SEQ ID NO: 318942
acagaacgacucugguuua

SEQ ID NO: 377986 - RNA, 19 nt, Artificial Sequence
  Description of Artificial Sequence: Synthetic oligonucleotide
  Antisense Strand to SEQ ID NO: 377985
uaaaccagagucguucugu

SEQ ID NO: 377987 - RNA, 19 nt, Artificial Sequence
  Description of Artificial Sequence: Synthetic oligonucleotide
  Sense Strand Starting at position 753 of SEQ ID NO: 318945
gaacgacucugguuuauau

SEQ ID NO: 377988 - RNA, 19 nt, Artificial Sequence
  Description of Artificial Sequence: Synthetic oligonucleotide
  Antisense Strand to SEQ ID NO: 377987
auauaaaccagagucguuc

SEQ ID NO: 377989 - RNA, 19 nt, Artificial Sequence
  Description of Artificial Sequence: Synthetic oligonucleotide
  Sense Strand Starting at position 753 of SEQ ID NO: 318955
gguuuauauccauaaaugu

SEQ ID NO: 377990 - RNA, 19 nt, Artificial Sequence
  Description of Artificial Sequence: Synthetic oligonucleotide
  Antisense Strand to SEQ ID NO: 377989
acauuuauggauauaaacc

SEQ ID NO: 377991 - RNA, 19 nt, Artificial Sequence
  Description of Artificial Sequence: Synthetic oligonucleotide
  Sense Strand Starting at position 753 of SEQ ID NO: 318962
auccauaaauguguagcaa

SEQ ID NO: 377992 - RNA, 19 nt, Artificial Sequence
  Description of Artificial Sequence: Synthetic oligonucleotide
  Antisense Strand to SEQ ID NO: 377991
uugcuacacauuuauggau

SEQ ID NO: 377993 - RNA, 19 nt, Artificial Sequence
  Description of Artificial Sequence: Synthetic oligonucleotide
  Sense Strand Starting at position 753 of SEQ ID NO: 319058
ugugguguggcgagacgau

SEQ ID NO: 377994 - RNA, 19 nt, Artificial Sequence
  Description of Artificial Sequence: Synthetic oligonucleotide
  Antisense Strand to SEQ ID NO: 377993
aucgucucgccacaccaca

SEQ ID NO: 377995 - RNA, 19 nt, Artificial Sequence
  Description of Artificial Sequence: Synthetic oligonucleotide
  Sense Strand Starting at position 754 of SEQ ID NO: 315490
agugaaaucacaggcuuug

SEQ ID NO: 377996 - RNA, 19 nt, Artificial Sequence
  Description of Artificial Sequence: Synthetic oligonucleotide
  Antisense Strand to SEQ ID NO: 377995
caaagccugugauuucacu

SEQ ID NO: 377997 - RNA, 19 nt, Artificial Sequence
  Description of Artificial Sequence: Synthetic oligonucleotide
  Sense Strand Starting at position 754 of SEQ ID NO: 315513
aguaaauaaacgugucaga

SEQ ID NO: 377998 - RNA, 19 nt, Artificial Sequence
  Description of Artificial Sequence: Synthetic oligonucleotide
  Antisense Strand to SEQ ID NO: 377997
ucugacacguuuauuuacu

SEQ ID NO: 377999 - RNA, 19 nt, Artificial Sequence
  Description of Artificial Sequence: Synthetic oligonucleotide
  Sense Strand Starting at position 754 of SEQ ID NO: 315542
uuuauuaucugugcuuaug

SEQ ID NO: 378000 - RNA, 19 nt, Artificial Sequence
  Description of Artificial Sequence: Synthetic oligonucleotide
  Antisense Strand to SEQ ID NO: 377999
cauaagcacagauaauaaa

SEQ ID NO: 378001 - RNA, 19 nt, Artificial Sequence
  Description of Artificial Sequence: Synthetic oligonucleotide
  Sense Strand Starting at position 754 of SEQ ID NO: 315545
auuaucugugcuuaugaaa

SEQ ID NO: 378002 - RNA, 19 nt, Artificial Sequence
  Description of Artificial Sequence: Synthetic oligonucleotide
  Antisense Strand to SEQ ID NO: 378001
uuucauaagcacagauaau

SEQ ID NO: 378003 - RNA, 19 nt, Artificial Sequence
  Description of Artificial Sequence: Synthetic oligonucleotide
  Sense Strand Starting at position 754 of SEQ ID NO: 315612
acaaacauugugugcauaa

SEQ ID NO: 378004 - RNA, 19 nt, Artificial Sequence
  Description of Artificial Sequence: Synthetic oligonucleotide
  Antisense Strand to SEQ ID NO: 378003
uuaugcacacaauguuugu

SEQ ID NO: 378005 - RNA, 19 nt, Artificial Sequence
  Description of Artificial Sequence: Synthetic oligonucleotide
  Sense Strand Starting at position 754 of SEQ ID NO: 315623
gugcauaaauaggugaaga

SEQ ID NO: 378006 - RNA, 19 nt, Artificial Sequence
  Description of Artificial Sequence: Synthetic oligonucleotide
  Antisense Strand to SEQ ID NO: 378005
ucuucaccuauuuaugcac

SEQ ID NO: 378007 - RNA, 19 nt, Artificial Sequence
  Description of Artificial Sequence: Synthetic oligonucleotide
  Sense Strand Starting at position 754 of SEQ ID NO: 315624
ugcauaaauaggugaagaa

SEQ ID NO: 378008 - RNA, 19 nt, Artificial Sequence
  Description of Artificial Sequence: Synthetic oligonucleotide
  Antisense Strand to SEQ ID NO: 378007
uucuucaccuauuuaugca

SEQ ID NO: 378009 - RNA, 19 nt, Artificial Sequence
  Description of Artificial Sequence: Synthetic oligonucleotide
  Sense Strand Starting at position 754 of SEQ ID NO: 315634
ggugaagaauuugaguuca

SEQ ID NO: 378010 - RNA, 19 nt, Artificial Sequence
  Description of Artificial Sequence: Synthetic oligonucleotide
  Antisense Strand to SEQ ID NO: 378009
ugaacucaaauucuucacc

SEQ ID NO: 378011 - RNA, 19 nt, Artificial Sequence
  Description of Artificial Sequence: Synthetic oligonucleotide
  Sense Strand Starting at position 754 of SEQ ID NO: 315728
uguguacuuuaccugucaa

SEQ ID NO: 378012 - RNA, 19 nt, Artificial Sequence
  Description of Artificial Sequence: Synthetic oligonucleotide
  Antisense Strand to SEQ ID NO: 378011
uugacagguaaaguacaca

SEQ ID NO: 378013 - RNA, 19 nt, Artificial Sequence
  Description of Artificial Sequence: Synthetic oligonucleotide
  Sense Strand Starting at position 754 of SEQ ID NO: 315729
guguacuuuaccugucaag

SEQ ID NO: 378014 - RNA, 19 nt, Artificial Sequence
  Description of Artificial Sequence: Synthetic oligonucleotide
  Antisense Strand to SEQ ID NO: 378013
cuugacagguaaaguacac

SEQ ID NO: 378015 - RNA, 19 nt, Artificial Sequence
  Description of Artificial Sequence: Synthetic oligonucleotide
  Sense Strand Starting at position 754 of SEQ ID NO: 316054
acaguaaaucaguaaccgu

SEQ ID NO: 378016 - RNA, 19 nt, Artificial Sequence
  Description of Artificial Sequence: Synthetic oligonucleotide
  Antisense Strand to SEQ ID NO: 378015
acgguuacugauuuacugu

SEQ ID NO: 378017 - RNA, 19 nt, Artificial Sequence
  Description of Artificial Sequence: Synthetic oligonucleotide
  Sense Strand Starting at position 754 of SEQ ID NO: 316071
guaaguucucaucaacguu

SEQ ID NO: 378018 - RNA, 19 nt, Artificial Sequence
  Description of Artificial Sequence: Synthetic oligonucleotide
  Antisense Strand to SEQ ID NO: 378017
aacguugaugagaacuuac

SEQ ID NO: 378019 - RNA, 19 nt, Artificial Sequence
  Description of Artificial Sequence: Synthetic oligonucleotide
  Sense Strand Starting at position 754 of SEQ ID NO: 316156
auacaugguuaagaaugaa

SEQ ID NO: 378020 - RNA, 19 nt, Artificial Sequence
  Description of Artificial Sequence: Synthetic oligonucleotide
  Antisense Strand to SEQ ID NO: 378019
uucauucuuaaccauguau

SEQ ID NO: 378021 - RNA, 19 nt, Artificial Sequence
  Description of Artificial Sequence: Synthetic oligonucleotide
  Sense Strand Starting at position 754 of SEQ ID NO: 316174
agggaugagugccuuucua

SEQ ID NO: 378022 - RNA, 19 nt, Artificial Sequence
  Description of Artificial Sequence: Synthetic oligonucleotide
  Antisense Strand to SEQ ID NO: 378021
uagaaaggcacucaucccu

SEQ ID NO: 378023 - RNA, 19 nt, Artificial Sequence
  Description of Artificial Sequence: Synthetic oligonucleotide
  Sense Strand Starting at position 754 of SEQ ID NO: 316178
augagugccuuucuaucuu

SEQ ID NO: 378024 - RNA, 19 nt, Artificial Sequence
  Description of Artificial Sequence: Synthetic oligonucleotide
  Antisense Strand to SEQ ID NO: 378023
aagauagaaaggcacucau

SEQ ID NO: 378025 - RNA, 19 nt, Artificial Sequence
  Description of Artificial Sequence: Synthetic oligonucleotide
  Sense Strand Starting at position 754 of SEQ ID NO: 316184
gccuuucuaucuuugguua

SEQ ID NO: 378026 - RNA, 19 nt, Artificial Sequence
  Description of Artificial Sequence: Synthetic oligonucleotide
  Antisense Strand to SEQ ID NO: 378025
uaaccaaagauagaaaggc

SEQ ID NO: 378027 - RNA, 19 nt, Artificial Sequence
  Description of Artificial Sequence: Synthetic oligonucleotide
  Sense Strand Starting at position 754 of SEQ ID NO: 316195
uuugguuaccuugaucaac

SEQ ID NO: 378028 - RNA, 19 nt, Artificial Sequence
  Description of Artificial Sequence: Synthetic oligonucleotide
  Antisense Strand to SEQ ID NO: 378027
guugaucaagguaaccaaa

SEQ ID NO: 378029 - RNA, 19 nt, Artificial Sequence
  Description of Artificial Sequence: Synthetic oligonucleotide
  Sense Strand Starting at position 754 of SEQ ID NO: 316197
ugguuaccuugaucaacua

SEQ ID NO: 378030 - RNA, 19 nt, Artificial Sequence
  Description of Artificial Sequence: Synthetic oligonucleotide
  Antisense Strand to SEQ ID NO: 378029
uaguugaucaagguaacca

SEQ ID NO: 378031 - RNA, 19 nt, Artificial Sequence
  Description of Artificial Sequence: Synthetic oligonucleotide
  Sense Strand Starting at position 754 of SEQ ID NO: 316380
augaucucuugggacagau

SEQ ID NO: 378032 - RNA, 19 nt, Artificial Sequence
  Description of Artificial Sequence: Synthetic oligonucleotide
  Antisense Strand to SEQ ID NO: 378031
aucugucccaagagaucau

SEQ ID NO: 378033 - RNA, 19 nt, Artificial Sequence
  Description of Artificial Sequence: Synthetic oligonucleotide
  Sense Strand Starting at position 754 of SEQ ID NO: 316402
ggcagaacaguacgaguuu

SEQ ID NO: 378034 - RNA, 19 nt, Artificial Sequence
  Description of Artificial Sequence: Synthetic oligonucleotide
  Antisense Strand to SEQ ID NO: 378033
aaacucguacuguucugcc

SEQ ID NO: 378035 - RNA, 19 nt, Artificial Sequence
  Description of Artificial Sequence: Synthetic oligonucleotide
  Sense Strand Starting at position 754 of SEQ ID NO: 316538
guucuaucacucgcgcuaa

SEQ ID NO: 378036 - RNA, 19 nt, Artificial Sequence
  Description of Artificial Sequence: Synthetic oligonucleotide
  Antisense Strand to SEQ ID NO: 378035
uuagcgcgagugauagaac

SEQ ID NO: 378037 - RNA, 19 nt, Artificial Sequence
  Description of Artificial Sequence: Synthetic oligonucleotide
  Sense Strand Starting at position 754 of SEQ ID NO: 316595
gcggcauccgagagugaca

SEQ ID NO: 378038 - RNA, 19 nt, Artificial Sequence
  Description of Artificial Sequence: Synthetic oligonucleotide
  Antisense Strand to SEQ ID NO: 378037
ugucacucucggaugccgc

SEQ ID NO: 378039 - RNA, 19 nt, Artificial Sequence
  Description of Artificial Sequence: Synthetic oligonucleotide
  Sense Strand Starting at position 754 of SEQ ID NO: 317474
gacagaagucugggaugca

SEQ ID NO: 378040 - RNA, 19 nt, Artificial Sequence
  Description of Artificial Sequence: Synthetic oligonucleotide
  Antisense Strand to SEQ ID NO: 378039
ugcaucccagacuucuguc

SEQ ID NO: 378041 - RNA, 19 nt, Artificial Sequence
  Description of Artificial Sequence: Synthetic oligonucleotide
  Sense Strand Starting at position 754 of SEQ ID NO: 317518
gggcaugcgcaacauuaga

SEQ ID NO: 378042 - RNA, 19 nt, Artificial Sequence
  Description of Artificial Sequence: Synthetic oligonucleotide
  Antisense Strand to SEQ ID NO: 378041
ucuaauguugcgcaugccc

SEQ ID NO: 378043 - RNA, 19 nt, Artificial Sequence
  Description of Artificial Sequence: Synthetic oligonucleotide
  Sense Strand Starting at position 754 of SEQ ID NO: 317534
agaggaaggugggcuuuau

SEQ ID NO: 378044 - RNA, 19 nt, Artificial Sequence
  Description of Artificial Sequence: Synthetic oligonucleotide
  Antisense Strand to SEQ ID NO: 378043
auaaagcccaccuuccucu

SEQ ID NO: 378045 - RNA, 19 nt, Artificial Sequence
  Description of Artificial Sequence: Synthetic oligonucleotide
  Sense Strand Starting at position 754 of SEQ ID NO: 317571
gcgucuggaccagaagauu

SEQ ID NO: 378046 - RNA, 19 nt, Artificial Sequence
  Description of Artificial Sequence: Synthetic oligonucleotide
  Antisense Strand to SEQ ID NO: 378045
aaucuucugguccagacgc

SEQ ID NO: 378047 - RNA, 19 nt, Artificial Sequence
  Description of Artificial Sequence: Synthetic oligonucleotide
  Sense Strand Starting at position 754 of SEQ ID NO: 317720
guguuagcuggugagucaa

SEQ ID NO: 378048 - RNA, 19 nt, Artificial Sequence
  Description of Artificial Sequence: Synthetic oligonucleotide
  Antisense Strand to SEQ ID NO: 378047
uugacucaccagcuaacac

SEQ ID NO: 378049 - RNA, 19 nt, Artificial Sequence
  Description of Artificial Sequence: Synthetic oligonucleotide
  Sense Strand Starting at position 754 of SEQ ID NO: 317722
guuagcuggugagucaaau

SEQ ID NO: 378050 - RNA, 19 nt, Artificial Sequence
  Description of Artificial Sequence: Synthetic oligonucleotide
  Antisense Strand to SEQ ID NO: 378049
auuugacucaccagcuaac

SEQ ID NO: 378051 - RNA, 19 nt, Artificial Sequence
  Description of Artificial Sequence: Synthetic oligonucleotide
  Sense Strand Starting at position 754 of SEQ ID NO: 317880
agcuaaggcuucccucaga

SEQ ID NO: 378052 - RNA, 19 nt, Artificial Sequence
  Description of Artificial Sequence: Synthetic oligonucleotide
  Antisense Strand to SEQ ID NO: 378051
ucugagggaagccuuagcu

SEQ ID NO: 378053 - RNA, 19 nt, Artificial Sequence
  Description of Artificial Sequence: Synthetic oligonucleotide
  Sense Strand Starting at position 754 of SEQ ID NO: 317933
gcgugaucucacgcuuucu

SEQ ID NO: 378054 - RNA, 19 nt, Artificial Sequence
  Description of Artificial Sequence: Synthetic oligonucleotide
  Antisense Strand to SEQ ID NO: 378053
agaaagcgugagaucacgc

SEQ ID NO: 378055 - RNA, 19 nt, Artificial Sequence
  Description of Artificial Sequence: Synthetic oligonucleotide
  Sense Strand Starting at position 754 of SEQ ID NO: 317934
cgugaucucacgcuuucuu

SEQ ID NO: 378056 - RNA, 19 nt, Artificial Sequence
  Description of Artificial Sequence: Synthetic oligonucleotide
  Antisense Strand to SEQ ID NO: 378055
aagaaagcgugagaucacg

SEQ ID NO: 378057 - RNA, 19 nt, Artificial Sequence
  Description of Artificial Sequence: Synthetic oligonucleotide
  Sense Strand Starting at position 754 of SEQ ID NO: 317996
guguguuuccgcccgguuu

SEQ ID NO: 378058 - RNA, 19 nt, Artificial Sequence
  Description of Artificial Sequence: Synthetic oligonucleotide
  Antisense Strand to SEQ ID NO: 378057
aaaccgggcggaaacacac

SEQ ID NO: 378059 - RNA, 19 nt, Artificial Sequence
  Description of Artificial Sequence: Synthetic oligonucleotide
  Sense Strand Starting at position 754 of SEQ ID NO: 318097
guccuugauauguaagugu

SEQ ID NO: 378060 - RNA, 19 nt, Artificial Sequence
  Description of Artificial Sequence: Synthetic oligonucleotide
  Antisense Strand to SEQ ID NO: 378059
acacuuacauaucaaggac

SEQ ID NO: 378061 - RNA, 19 nt, Artificial Sequence
  Description of Artificial Sequence: Synthetic oligonucleotide
  Sense Strand Starting at position 754 of SEQ ID NO: 318100
cuugauauguaagugucaa

SEQ ID NO: 378062 - RNA, 19 nt, Artificial Sequence
  Description of Artificial Sequence: Synthetic oligonucleotide
  Antisense Strand to SEQ ID NO: 378061
uugacacuuacauaucaag

SEQ ID NO: 378063 - RNA, 19 nt, Artificial Sequence
  Description of Artificial Sequence: Synthetic oligonucleotide
  Sense Strand Starting at position 754 of SEQ ID NO: 318140
uuaucaaauugagaggaau

SEQ ID NO: 378064 - RNA, 19 nt, Artificial Sequence
  Description of Artificial Sequence: Synthetic oligonucleotide
  Antisense Strand to SEQ ID NO: 378063
auuccucucaauuugauaa

SEQ ID NO: 378065 - RNA, 19 nt, Artificial Sequence
  Description of Artificial Sequence: Synthetic oligonucleotide
  Sense Strand Starting at position 754 of SEQ ID NO: 318418
uucguuauucagccgcgaa

SEQ ID NO: 378066 - RNA, 19 nt, Artificial Sequence
  Description of Artificial Sequence: Synthetic oligonucleotide
  Antisense Strand to SEQ ID NO: 378065
uucgcggcugaauaacgaa

SEQ ID NO: 378067 - RNA, 19 nt, Artificial Sequence
  Description of Artificial Sequence: Synthetic oligonucleotide
  Sense Strand Starting at position 754 of SEQ ID NO: 318551
ucuacagauguaugcagaa

SEQ ID NO: 378068 - RNA, 19 nt, Artificial Sequence
  Description of Artificial Sequence: Synthetic oligonucleotide
  Antisense Strand to SEQ ID NO: 378067
uucugcauacaucuguaga

SEQ ID NO: 378069 - RNA, 19 nt, Artificial Sequence
  Description of Artificial Sequence: Synthetic oligonucleotide
  Sense Strand Starting at position 754 of SEQ ID NO: 318574
acaccaagaugcguuuauu

SEQ ID NO: 378070 - RNA, 19 nt, Artificial Sequence
  Description of Artificial Sequence: Synthetic oligonucleotide
  Antisense Strand to SEQ ID NO: 378069
aauaaacgcaucuuggugu

SEQ ID NO: 378071 - RNA, 19 nt, Artificial Sequence
  Description of Artificial Sequence: Synthetic oligonucleotide
  Sense Strand Starting at position 754 of SEQ ID NO: 318577
ccaagaugcguuuauugac

SEQ ID NO: 378072 - RNA, 19 nt, Artificial Sequence
  Description of Artificial Sequence: Synthetic oligonucleotide
  Antisense Strand to SEQ ID NO: 378071
gucaauaaacgcaucuugg

SEQ ID NO: 378073 - RNA, 19 nt, Artificial Sequence
  Description of Artificial Sequence: Synthetic oligonucleotide
  Sense Strand Starting at position 754 of SEQ ID NO: 318585
cguuuauugacaugcaaug

SEQ ID NO: 378074 - RNA, 19 nt, Artificial Sequence
  Description of Artificial Sequence: Synthetic oligonucleotide
  Antisense Strand to SEQ ID NO: 378073
cauugcaugucaauaaacg

SEQ ID NO: 378075 - RNA, 19 nt, Artificial Sequence
  Description of Artificial Sequence: Synthetic oligonucleotide
  Sense Strand Starting at position 755 of SEQ ID NO: 315321
gguucuuugcaugaagucu

SEQ ID NO: 378076 - RNA, 19 nt, Artificial Sequence
  Description of Artificial Sequence: Synthetic oligonucleotide
  Antisense Strand to SEQ ID NO: 378075
agacuucaugcaaagaacc

SEQ ID NO: 378077 - RNA, 19 nt, Artificial Sequence
  Description of Artificial Sequence: Synthetic oligonucleotide
  Sense Strand Starting at position 755 of SEQ ID NO: 315349
gugcucuaccguguauuca

SEQ ID NO: 378078 - RNA, 19 nt, Artificial Sequence
  Description of Artificial Sequence: Synthetic oligonucleotide
  Antisense Strand to SEQ ID NO: 378077
ugaauacacgguagagcac

SEQ ID NO: 378079 - RNA, 19 nt, Artificial Sequence
  Description of Artificial Sequence: Synthetic oligonucleotide
  Sense Strand Starting at position 755 of SEQ ID NO: 315387
ugcauaguuaauugagaga

SEQ ID NO: 378080 - RNA, 19 nt, Artificial Sequence
  Description of Artificial Sequence: Synthetic oligonucleotide
  Antisense Strand to SEQ ID NO: 378079
ucucucaauuaacuaugca

SEQ ID NO: 378081 - RNA, 19 nt, Artificial Sequence
  Description of Artificial Sequence: Synthetic oligonucleotide
  Sense Strand Starting at position 755 of SEQ ID NO: 315390
auaguuaauugagagaaag

SEQ ID NO: 378082 - RNA, 19 nt, Artificial Sequence
  Description of Artificial Sequence: Synthetic oligonucleotide
  Antisense Strand to SEQ ID NO: 378081
cuuucucucaauuaacuau

SEQ ID NO: 378083 - RNA, 19 nt, Artificial Sequence
  Description of Artificial Sequence: Synthetic oligonucleotide
  Sense Strand Starting at position 755 of SEQ ID NO: 315580
caagaauguuuccucguca

SEQ ID NO: 378084 - RNA, 19 nt, Artificial Sequence
  Description of Artificial Sequence: Synthetic oligonucleotide
  Antisense Strand to SEQ ID NO: 378083
ugacgaggaaacauucuug

SEQ ID NO: 378085 - RNA, 19 nt, Artificial Sequence
  Description of Artificial Sequence: Synthetic oligonucleotide
  Sense Strand Starting at position 755 of SEQ ID NO: 315581
aagaauguuuccucgucaa

SEQ ID NO: 378086 - RNA, 19 nt, Artificial Sequence
  Description of Artificial Sequence: Synthetic oligonucleotide
  Antisense Strand to SEQ ID NO: 378085
uugacgaggaaacauucuu

SEQ ID NO: 378087 - RNA, 19 nt, Artificial Sequence
  Description of Artificial Sequence: Synthetic oligonucleotide
  Sense Strand Starting at position 755 of SEQ ID NO: 315609
ugagcacccugauucuaga

SEQ ID NO: 378088 - RNA, 19 nt, Artificial Sequence
  Description of Artificial Sequence: Synthetic oligonucleotide
  Antisense Strand to SEQ ID NO: 378087
ucuagaaucagggugcuca

SEQ ID NO: 378089 - RNA, 19 nt, Artificial Sequence
  Description of Artificial Sequence: Synthetic oligonucleotide
  Sense Strand Starting at position 755 of SEQ ID NO: 315700
ugcacaucucuacagagau

SEQ ID NO: 378090 - RNA, 19 nt, Artificial Sequence
  Description of Artificial Sequence: Synthetic oligonucleotide
  Antisense Strand to SEQ ID NO: 378089
aucucuguagagaugugca

SEQ ID NO: 378091 - RNA, 19 nt, Artificial Sequence
  Description of Artificial Sequence: Synthetic oligonucleotide
  Sense Strand Starting at position 755 of SEQ ID NO: 315816
cuccgagaaauguggaauu

SEQ ID NO: 378092 - RNA, 19 nt, Artificial Sequence
  Description of Artificial Sequence: Synthetic oligonucleotide
  Antisense Strand to SEQ ID NO: 378091
aauuccacauuucucggag

SEQ ID NO: 378093 - RNA, 19 nt, Artificial Sequence
  Description of Artificial Sequence: Synthetic oligonucleotide
  Sense Strand Starting at position 755 of SEQ ID NO: 315974
gagagauugcaucaugcuc

SEQ ID NO: 378094 - RNA, 19 nt, Artificial Sequence
  Description of Artificial Sequence: Synthetic oligonucleotide
  Antisense Strand to SEQ ID NO: 378093
gagcaugaugcaaucucuc

SEQ ID NO: 378095 - RNA, 19 nt, Artificial Sequence
  Description of Artificial Sequence: Synthetic oligonucleotide
  Sense Strand Starting at position 755 of SEQ ID NO: 316037
auaaucuuccugugucaga

SEQ ID NO: 378096 - RNA, 19 nt, Artificial Sequence
  Description of Artificial Sequence: Synthetic oligonucleotide
  Antisense Strand to SEQ ID NO: 378095
ucugacacaggaagauuau

SEQ ID NO: 378097 - RNA, 19 nt, Artificial Sequence
  Description of Artificial Sequence: Synthetic oligonucleotide
  Sense Strand Starting at position 755 of SEQ ID NO: 316159
cccuacaaucuguaaaugu

SEQ ID NO: 378098 - RNA, 19 nt, Artificial Sequence
  Description of Artificial Sequence: Synthetic oligonucleotide
  Antisense Strand to SEQ ID NO: 378097
acauuuacagauuguaggg

SEQ ID NO: 378099 - RNA, 19 nt, Artificial Sequence
  Description of Artificial Sequence: Synthetic oligonucleotide
  Sense Strand Starting at position 755 of SEQ ID NO: 316190
cuaauuauaugguucguua

SEQ ID NO: 378100 - RNA, 19 nt, Artificial Sequence
  Description of Artificial Sequence: Synthetic oligonucleotide
  Antisense Strand to SEQ ID NO: 378099
uaacgaaccauauaauuag

SEQ ID NO: 378101 - RNA, 19 nt, Artificial Sequence
  Description of Artificial Sequence: Synthetic oligonucleotide
  Sense Strand Starting at position 755 of SEQ ID NO: 316193
auuauaugguucguuauac

SEQ ID NO: 378102 - RNA, 19 nt, Artificial Sequence
  Description of Artificial Sequence: Synthetic oligonucleotide
  Antisense Strand to SEQ ID NO: 378101
guauaacgaaccauauaau

SEQ ID NO: 378103 - RNA, 19 nt, Artificial Sequence
  Description of Artificial Sequence: Synthetic oligonucleotide
  Sense Strand Starting at position 755 of SEQ ID NO: 316226
gugccuacauuaucagauu

SEQ ID NO: 378104 - RNA, 19 nt, Artificial Sequence
  Description of Artificial Sequence: Synthetic oligonucleotide
  Antisense Strand to SEQ ID NO: 378103
aaucugauaauguaggcac

SEQ ID NO: 378105 - RNA, 19 nt, Artificial Sequence
  Description of Artificial Sequence: Synthetic oligonucleotide
  Sense Strand Starting at position 755 of SEQ ID NO: 316270
cagugacaucaguaagcau

SEQ ID NO: 378106 - RNA, 19 nt, Artificial Sequence
  Description of Artificial Sequence: Synthetic oligonucleotide
  Antisense Strand to SEQ ID NO: 378105
augcuuacugaugucacug

SEQ ID NO: 378107 - RNA, 19 nt, Artificial Sequence
  Description of Artificial Sequence: Synthetic oligonucleotide
  Sense Strand Starting at position 755 of SEQ ID NO: 316329
uuaguacugguagguuaau

SEQ ID NO: 378108 - RNA, 19 nt, Artificial Sequence
  Description of Artificial Sequence: Synthetic oligonucleotide
  Antisense Strand to SEQ ID NO: 378107
auuaaccuaccaguacuaa

SEQ ID NO: 378109 - RNA, 19 nt, Artificial Sequence
  Description of Artificial Sequence: Synthetic oligonucleotide
  Sense Strand Starting at position 755 of SEQ ID NO: 316330
uaguacugguagguuaaua

SEQ ID NO: 378110 - RNA, 19 nt, Artificial Sequence
  Description of Artificial Sequence: Synthetic oligonucleotide
  Antisense Strand to SEQ ID NO: 378109
uauuaaccuaccaguacua

SEQ ID NO: 378111 - RNA, 19 nt, Artificial Sequence
  Description of Artificial Sequence: Synthetic oligonucleotide
  Sense Strand Starting at position 755 of SEQ ID NO: 316690
agugaaaucacaggcuuug

SEQ ID NO: 378112 - RNA, 19 nt, Artificial Sequence
  Description of Artificial Sequence: Synthetic oligonucleotide
  Antisense Strand to SEQ ID NO: 378111
caaagccugugauuucacu

SEQ ID NO: 378113 - RNA, 19 nt, Artificial Sequence
  Description of Artificial Sequence: Synthetic oligonucleotide
  Sense Strand Starting at position 755 of SEQ ID NO: 316713
aguaaauaaacgugucaga

SEQ ID NO: 378114 - RNA, 19 nt, Artificial Sequence
  Description of Artificial Sequence: Synthetic oligonucleotide
  Antisense Strand to SEQ ID NO: 378113
ucugacacguuuauuuacu

SEQ ID NO: 378115 - RNA, 19 nt, Artificial Sequence
  Description of Artificial Sequence: Synthetic oligonucleotide
  Sense Strand Starting at position 755 of SEQ ID NO: 316745
auuaucugugcuuaugaaa

SEQ ID NO: 378116 - RNA, 19 nt, Artificial Sequence
  Description of Artificial Sequence: Synthetic oligonucleotide
  Antisense Strand to SEQ ID NO: 378115
uuucauaagcacagauaau

SEQ ID NO: 378117 - RNA, 19 nt, Artificial Sequence
  Description of Artificial Sequence: Synthetic oligonucleotide
  Sense Strand Starting at position 755 of SEQ ID NO: 316812
acaaacauugugugcauaa

SEQ ID NO: 378118 - RNA, 19 nt, Artificial Sequence
  Description of Artificial Sequence: Synthetic oligonucleotide
  Antisense Strand to SEQ ID NO: 378117
uuaugcacacaauguuugu

SEQ ID NO: 378119 - RNA, 19 nt, Artificial Sequence
  Description of Artificial Sequence: Synthetic oligonucleotide
  Sense Strand Starting at position 755 of SEQ ID NO: 316823
gugcauaaauaggugaaga

SEQ ID NO: 378120 - RNA, 19 nt, Artificial Sequence
  Description of Artificial Sequence: Synthetic oligonucleotide
  Antisense Strand to SEQ ID NO: 378119
ucuucaccuauuuaugcac

SEQ ID NO: 378121 - RNA, 19 nt, Artificial Sequence
  Description of Artificial Sequence: Synthetic oligonucleotide
  Sense Strand Starting at position 755 of SEQ ID NO: 316824
ugcauaaauaggugaagaa

SEQ ID NO: 378122 - RNA, 19 nt, Artificial Sequence
  Description of Artificial Sequence: Synthetic oligonucleotide
  Antisense Strand to SEQ ID NO: 378121
uucuucaccuauuuaugca

SEQ ID NO: 378123 - RNA, 19 nt, Artificial Sequence
  Description of Artificial Sequence: Synthetic oligonucleotide
  Sense Strand Starting at position 755 of SEQ ID NO: 316834
ggugaagaauuugaguuca

SEQ ID NO: 378124 - RNA, 19 nt, Artificial Sequence
  Description of Artificial Sequence: Synthetic oligonucleotide
  Antisense Strand to SEQ ID NO: 378123
ugaacucaaauucuucacc

SEQ ID NO: 378125 - RNA, 19 nt, Artificial Sequence
  Description of Artificial Sequence: Synthetic oligonucleotide
  Sense Strand Starting at position 755 of SEQ ID NO: 317254
acaguaaaucaguaaccgu

SEQ ID NO: 378126 - RNA, 19 nt, Artificial Sequence
  Description of Artificial Sequence: Synthetic oligonucleotide
  Antisense Strand to SEQ ID NO: 378125
acgguuacugauuuacugu

SEQ ID NO: 378127 - RNA, 19 nt, Artificial Sequence
  Description of Artificial Sequence: Synthetic oligonucleotide
  Sense Strand Starting at position 755 of SEQ ID NO: 317271
guaaguucucaucaacguu

SEQ ID NO: 378128 - RNA, 19 nt, Artificial Sequence
  Description of Artificial Sequence: Synthetic oligonucleotide
  Antisense Strand to SEQ ID NO: 378127
aacguugaugagaacuuac

SEQ ID NO: 378129 - RNA, 19 nt, Artificial Sequence
  Description of Artificial Sequence: Synthetic oligonucleotide
  Sense Strand Starting at position 755 of SEQ ID NO: 317374
agggaugagugccuuucua

SEQ ID NO: 378130 - RNA, 19 nt, Artificial Sequence
  Description of Artificial Sequence: Synthetic oligonucleotide
  Antisense Strand to SEQ ID NO: 378129
uagaaaggcacucaucccu

SEQ ID NO: 378131 - RNA, 19 nt, Artificial Sequence
  Description of Artificial Sequence: Synthetic oligonucleotide
  Sense Strand Starting at position 755 of SEQ ID NO: 317395
uuugguuaccuugaucaac

SEQ ID NO: 378132 - RNA, 19 nt, Artificial Sequence
  Description of Artificial Sequence: Synthetic oligonucleotide
  Antisense Strand to SEQ ID NO: 378131
guugaucaagguaaccaaa

SEQ ID NO: 378133 - RNA, 19 nt, Artificial Sequence
  Description of Artificial Sequence: Synthetic oligonucleotide
  Sense Strand Starting at position 755 of SEQ ID NO: 317397
ugguuaccuugaucaacua

SEQ ID NO: 378134 - RNA, 19 nt, Artificial Sequence
  Description of Artificial Sequence: Synthetic oligonucleotide
  Antisense Strand to SEQ ID NO: 378133
uaguugaucaagguaacca

SEQ ID NO: 378135 - RNA, 19 nt, Artificial Sequence
  Description of Artificial Sequence: Synthetic oligonucleotide
  Sense Strand Starting at position 755 of SEQ ID NO: 317602
ggcagaacaguacgaguuu

SEQ ID NO: 378136 - RNA, 19 nt, Artificial Sequence
  Description of Artificial Sequence: Synthetic oligonucleotide
  Antisense Strand to SEQ ID NO: 378135
aaacucguacuguucugcc

SEQ ID NO: 378137 - RNA, 19 nt, Artificial Sequence
  Description of Artificial Sequence: Synthetic oligonucleotide
  Sense Strand Starting at position 755 of SEQ ID NO: 317738
guucuaucacucgcgcuaa

SEQ ID NO: 378138 - RNA, 19 nt, Artificial Sequence
  Description of Artificial Sequence: Synthetic oligonucleotide
  Antisense Strand to SEQ ID NO: 378137
uuagcgcgagugauagaac

SEQ ID NO: 378139 - RNA, 19 nt, Artificial Sequence
  Description of Artificial Sequence: Synthetic oligonucleotide
  Sense Strand Starting at position 755 of SEQ ID NO: 317795
gcggcauccgagagugaca

SEQ ID NO: 378140 - RNA, 19 nt, Artificial Sequence
  Description of Artificial Sequence: Synthetic oligonucleotide
  Antisense Strand to SEQ ID NO: 378139
ugucacucucggaugccgc

SEQ ID NO: 378141 - RNA, 19 nt, Artificial Sequence
  Description of Artificial Sequence: Synthetic oligonucleotide
  Sense Strand Starting at position 755 of SEQ ID NO: 318674
gacagaagucugggaugca

SEQ ID NO: 378142 - RNA, 19 nt, Artificial Sequence
  Description of Artificial Sequence: Synthetic oligonucleotide
  Antisense Strand to SEQ ID NO: 378141
ugcaucccagacuucuguc

SEQ ID NO: 378143 - RNA, 19 nt, Artificial Sequence
  Description of Artificial Sequence: Synthetic oligonucleotide
  Sense Strand Starting at position 755 of SEQ ID NO: 318718
gggcaugcgcaacauuaga

SEQ ID NO: 378144 - RNA, 19 nt, Artificial Sequence
  Description of Artificial Sequence: Synthetic oligonucleotide
  Antisense Strand to SEQ ID NO: 378143
ucuaauguugcgcaugccc

SEQ ID NO: 378145 - RNA, 19 nt, Artificial Sequence
  Description of Artificial Sequence: Synthetic oligonucleotide
  Sense Strand Starting at position 755 of SEQ ID NO: 318734
agaggaaggugggcuuuau

SEQ ID NO: 378146 - RNA, 19 nt, Artificial Sequence
  Description of Artificial Sequence: Synthetic oligonucleotide
  Antisense Strand to SEQ ID NO: 378145
auaaagcccaccuuccucu

SEQ ID NO: 378147 - RNA, 19 nt, Artificial Sequence
  Description of Artificial Sequence: Synthetic oligonucleotide
  Sense Strand Starting at position 755 of SEQ ID NO: 318771
gcgucuggaccagaagauu

SEQ ID NO: 378148 - RNA, 19 nt, Artificial Sequence
  Description of Artificial Sequence: Synthetic oligonucleotide
  Antisense Strand to SEQ ID NO: 378147
aaucuucugguccagacgc

SEQ ID NO: 378149 - RNA, 19 nt, Artificial Sequence
  Description of Artificial Sequence: Synthetic oligonucleotide
  Sense Strand Starting at position 755 of SEQ ID NO: 319080
agcuaaggcuucccucaga

SEQ ID NO: 378150 - RNA, 19 nt, Artificial Sequence
  Description of Artificial Sequence: Synthetic oligonucleotide
  Antisense Strand to SEQ ID NO: 378149
ucugagggaagccuuagcu

SEQ ID NO: 378151 - RNA, 19 nt, Artificial Sequence
  Description of Artificial Sequence: Synthetic oligonucleotide
  Sense Strand Starting at position 755 of SEQ ID NO: 319133
gcgugaucucacgcuuucu

SEQ ID NO: 378152 - RNA, 19 nt, Artificial Sequence
  Description of Artificial Sequence: Synthetic oligonucleotide
  Antisense Strand to SEQ ID NO: 378151
agaaagcgugagaucacgc

SEQ ID NO: 378153 - RNA, 19 nt, Artificial Sequence
  Description of Artificial Sequence: Synthetic oligonucleotide
  Sense Strand Starting at position 755 of SEQ ID NO: 319134
cgugaucucacgcuuucuu

SEQ ID NO: 378154 - RNA, 19 nt, Artificial Sequence
  Description of Artificial Sequence: Synthetic oligonucleotide
  Antisense Strand to SEQ ID NO: 378153
aagaaagcgugagaucacg

SEQ ID NO: 378155 - RNA, 19 nt, Artificial Sequence
  Description of Artificial Sequence: Synthetic oligonucleotide
  Sense Strand Starting at position 756 of SEQ ID NO: 315289
agcguacucgcuucucuua

SEQ ID NO: 378156 - RNA, 19 nt, Artificial Sequence
  Description of Artificial Sequence: Synthetic oligonucleotide
  Antisense Strand to SEQ ID NO: 378155
uaagagaagcgaguacgcu

SEQ ID NO: 378157 - RNA, 19 nt, Artificial Sequence
  Description of Artificial Sequence: Synthetic oligonucleotide
  Sense Strand Starting at position 756 of SEQ ID NO: 315324
aaaccagugugugcauuua

SEQ ID NO: 378158 - RNA, 19 nt, Artificial Sequence
  Description of Artificial Sequence: Synthetic oligonucleotide
  Antisense Strand to SEQ ID NO: 378157
uaaaugcacacacugguuu

SEQ ID NO: 378159 - RNA, 19 nt, Artificial Sequence
  Description of Artificial Sequence: Synthetic oligonucleotide
  Sense Strand Starting at position 756 of SEQ ID NO: 315351
gggauacguacuuauccuu

SEQ ID NO: 378160 - RNA, 19 nt, Artificial Sequence
  Description of Artificial Sequence: Synthetic oligonucleotide
  Antisense Strand to SEQ ID NO: 378159
aaggauaaguacguauccc

SEQ ID NO: 378161 - RNA, 19 nt, Artificial Sequence
  Description of Artificial Sequence: Synthetic oligonucleotide
  Sense Strand Starting at position 756 of SEQ ID NO: 315436
cugccaagacgucaguaaa

SEQ ID NO: 378162 - RNA, 19 nt, Artificial Sequence
  Description of Artificial Sequence: Synthetic oligonucleotide
  Antisense Strand to SEQ ID NO: 378161
uuuacugacgucuuggcag

SEQ ID NO: 378163 - RNA, 19 nt, Artificial Sequence
  Description of Artificial Sequence: Synthetic oligonucleotide
  Sense Strand Starting at position 756 of SEQ ID NO: 315439
ccaagacgucaguaaauua

SEQ ID NO: 378164 - RNA, 19 nt, Artificial Sequence
  Description of Artificial Sequence: Synthetic oligonucleotide
  Antisense Strand to SEQ ID NO: 378163
uaauuuacugacgucuugg

SEQ ID NO: 378165 - RNA, 19 nt, Artificial Sequence
  Description of Artificial Sequence: Synthetic oligonucleotide
  Sense Strand Starting at position 756 of SEQ ID NO: 315563
ccuccaaaucuauguagag

SEQ ID NO: 378166 - RNA, 19 nt, Artificial Sequence
  Description of Artificial Sequence: Synthetic oligonucleotide
  Antisense Strand to SEQ ID NO: 378165
cucuacauagauuuggagg

SEQ ID NO: 378167 - RNA, 19 nt, Artificial Sequence
  Description of Artificial Sequence: Synthetic oligonucleotide
  Sense Strand Starting at position 756 of SEQ ID NO: 315766
uugagagagucccugauua

SEQ ID NO: 378168 - RNA, 19 nt, Artificial Sequence
  Description of Artificial Sequence: Synthetic oligonucleotide
  Antisense Strand to SEQ ID NO: 378167
uaaucagggacucucucaa

SEQ ID NO: 378169 - RNA, 19 nt, Artificial Sequence
  Description of Artificial Sequence: Synthetic oligonucleotide
  Sense Strand Starting at position 756 of SEQ ID NO: 315798
gaauuaagaguuugaguca

SEQ ID NO: 378170 - RNA, 19 nt, Artificial Sequence
  Description of Artificial Sequence: Synthetic oligonucleotide
  Antisense Strand to SEQ ID NO: 378169
ugacucaaacucuuaauuc

SEQ ID NO: 378171 - RNA, 19 nt, Artificial Sequence
  Description of Artificial Sequence: Synthetic oligonucleotide
  Sense Strand Starting at position 756 of SEQ ID NO: 315801
uuaagaguuugagucaggu

SEQ ID NO: 378172 - RNA, 19 nt, Artificial Sequence
  Description of Artificial Sequence: Synthetic oligonucleotide
  Antisense Strand to SEQ ID NO: 378171
accugacucaaacucuuaa

SEQ ID NO: 378173 - RNA, 19 nt, Artificial Sequence
  Description of Artificial Sequence: Synthetic oligonucleotide
  Sense Strand Starting at position 756 of SEQ ID NO: 316014
gaugaucccugagcaaguu

SEQ ID NO: 378174 - RNA, 19 nt, Artificial Sequence
  Description of Artificial Sequence: Synthetic oligonucleotide
  Antisense Strand to SEQ ID NO: 378173
aacuugcucagggaucauc

SEQ ID NO: 378175 - RNA, 19 nt, Artificial Sequence
  Description of Artificial Sequence: Synthetic oligonucleotide
  Sense Strand Starting at position 756 of SEQ ID NO: 316967
aguaaugggucaccagaau

SEQ ID NO: 378176 - RNA, 19 nt, Artificial Sequence
  Description of Artificial Sequence: Synthetic oligonucleotide
  Antisense Strand to SEQ ID NO: 378175
auucuggugacccauuacu

SEQ ID NO: 378177 - RNA, 19 nt, Artificial Sequence
  Description of Artificial Sequence: Synthetic oligonucleotide
  Sense Strand Starting at position 756 of SEQ ID NO: 317049
cacagucccuggguaauua

SEQ ID NO: 378178 - RNA, 19 nt, Artificial Sequence
  Description of Artificial Sequence: Synthetic oligonucleotide
  Antisense Strand to SEQ ID NO: 378177
uaauuacccagggacugug

SEQ ID NO: 378179 - RNA, 19 nt, Artificial Sequence
  Description of Artificial Sequence: Synthetic oligonucleotide
  Sense Strand Starting at position 756 of SEQ ID NO: 317050
acagucccuggguaauuaa

SEQ ID NO: 378180 - RNA, 19 nt, Artificial Sequence
  Description of Artificial Sequence: Synthetic oligonucleotide
  Antisense Strand to SEQ ID NO: 378179
uuaauuacccagggacugu

SEQ ID NO: 378181 - RNA, 19 nt, Artificial Sequence
  Description of Artificial Sequence: Synthetic oligonucleotide
  Sense Strand Starting at position 756 of SEQ ID NO: 317086
cuaucuggauugcuuuaau

SEQ ID NO: 378182 - RNA, 19 nt, Artificial Sequence
  Description of Artificial Sequence: Synthetic oligonucleotide
  Antisense Strand to SEQ ID NO: 378181
auuaaagcaauccagauag

SEQ ID NO: 378183 - RNA, 19 nt, Artificial Sequence
  Description of Artificial Sequence: Synthetic oligonucleotide
  Sense Strand Starting at position 756 of SEQ ID NO: 317372
gugcguuugcauccauuaa

SEQ ID NO: 378184 - RNA, 19 nt, Artificial Sequence
  Description of Artificial Sequence: Synthetic oligonucleotide
  Antisense Strand to SEQ ID NO: 378183
uuaauggaugcaaacgcac

SEQ ID NO: 378185 - RNA, 19 nt, Artificial Sequence
  Description of Artificial Sequence: Synthetic oligonucleotide
  Sense Strand Starting at position 756 of SEQ ID NO: 317383
uccauuaagccagggaucu

SEQ ID NO: 378186 - RNA, 19 nt, Artificial Sequence
  Description of Artificial Sequence: Synthetic oligonucleotide
  Antisense Strand to SEQ ID NO: 378185
agaucccuggcuuaaugga

SEQ ID NO: 378187 - RNA, 19 nt, Artificial Sequence
  Description of Artificial Sequence: Synthetic oligonucleotide
  Sense Strand Starting at position 756 of SEQ ID NO: 317384
ccauuaagccagggaucuu

SEQ ID NO: 378188 - RNA, 19 nt, Artificial Sequence
  Description of Artificial Sequence: Synthetic oligonucleotide
  Antisense Strand to SEQ ID NO: 378187
aagaucccuggcuuaaugg

SEQ ID NO: 378189 - RNA, 19 nt, Artificial Sequence
  Description of Artificial Sequence: Synthetic oligonucleotide
  Sense Strand Starting at position 756 of SEQ ID NO: 317426
caacaacucggcugugaaa

SEQ ID NO: 378190 - RNA, 19 nt, Artificial Sequence
  Description of Artificial Sequence: Synthetic oligonucleotide
  Antisense Strand to SEQ ID NO: 378189
uuucacagccgaguuguug

SEQ ID NO: 378191 - RNA, 19 nt, Artificial Sequence
  Description of Artificial Sequence: Synthetic oligonucleotide
  Sense Strand Starting at position 756 of SEQ ID NO: 317576
aaaugugcgcaguagaaau

SEQ ID NO: 378192 - RNA, 19 nt, Artificial Sequence
  Description of Artificial Sequence: Synthetic oligonucleotide
  Antisense Strand to SEQ ID NO: 378191
auuucuacugcgcacauuu

SEQ ID NO: 378193 - RNA, 19 nt, Artificial Sequence
  Description of Artificial Sequence: Synthetic oligonucleotide
  Sense Strand Starting at position 756 of SEQ ID NO: 317589
agaaauaaauggcuuguuu

SEQ ID NO: 378194 - RNA, 19 nt, Artificial Sequence
  Description of Artificial Sequence: Synthetic oligonucleotide
  Antisense Strand to SEQ ID NO: 378193
aaacaagccauuuauuucu

SEQ ID NO: 378195 - RNA, 19 nt, Artificial Sequence
  Description of Artificial Sequence: Synthetic oligonucleotide
  Sense Strand Starting at position 756 of SEQ ID NO: 317700
ucgauucccuccuuuaaag

SEQ ID NO: 378196 - RNA, 19 nt, Artificial Sequence
  Description of Artificial Sequence: Synthetic oligonucleotide
  Antisense Strand to SEQ ID NO: 378195
cuuuaaaggagggaaucga

SEQ ID NO: 378197 - RNA, 19 nt, Artificial Sequence
  Description of Artificial Sequence: Synthetic oligonucleotide
  Sense Strand Starting at position 756 of SEQ ID NO: 317749
gaaggaaguuaguuuguuu

SEQ ID NO: 378198 - RNA, 19 nt, Artificial Sequence
  Description of Artificial Sequence: Synthetic oligonucleotide
  Antisense Strand to SEQ ID NO: 378197
aaacaaacuaacuuccuuc

SEQ ID NO: 378199 - RNA, 19 nt, Artificial Sequence
  Description of Artificial Sequence: Synthetic oligonucleotide
  Sense Strand Starting at position 756 of SEQ ID NO: 317794
uuuauuuagcugugcuuga

SEQ ID NO: 378200 - RNA, 19 nt, Artificial Sequence
  Description of Artificial Sequence: Synthetic oligonucleotide
  Antisense Strand to SEQ ID NO: 378199
ucaagcacagcuaaauaaa

SEQ ID NO: 378201 - RNA, 19 nt, Artificial Sequence
  Description of Artificial Sequence: Synthetic oligonucleotide
  Sense Strand Starting at position 756 of SEQ ID NO: 317795
uuauuuagcugugcuugau

SEQ ID NO: 378202 - RNA, 19 nt, Artificial Sequence
  Description of Artificial Sequence: Synthetic oligonucleotide
  Antisense Strand to SEQ ID NO: 378201
aucaagcacagcuaaauaa

SEQ ID NO: 378203 - RNA, 19 nt, Artificial Sequence
  Description of Artificial Sequence: Synthetic oligonucleotide
  Sense Strand Starting at position 756 of SEQ ID NO: 318035
agauauuaucguggaguca

SEQ ID NO: 378204 - RNA, 19 nt, Artificial Sequence
  Description of Artificial Sequence: Synthetic oligonucleotide
  Antisense Strand to SEQ ID NO: 378203
ugacuccacgauaauaucu

SEQ ID NO: 378205 - RNA, 19 nt, Artificial Sequence
  Description of Artificial Sequence: Synthetic oligonucleotide
  Sense Strand Starting at position 756 of SEQ ID NO: 318036
gauauuaucguggagucau

SEQ ID NO: 378206 - RNA, 19 nt, Artificial Sequence
  Description of Artificial Sequence: Synthetic oligonucleotide
  Antisense Strand to SEQ ID NO: 378205
augacuccacgauaauauc

SEQ ID NO: 378207 - RNA, 19 nt, Artificial Sequence
  Description of Artificial Sequence: Synthetic oligonucleotide
  Sense Strand Starting at position 756 of SEQ ID NO: 318047
ggagucauuccauaucauu

SEQ ID NO: 378208 - RNA, 19 nt, Artificial Sequence
  Description of Artificial Sequence: Synthetic oligonucleotide
  Antisense Strand to SEQ ID NO: 378207
aaugauauggaaugacucc

SEQ ID NO: 378209 - RNA, 19 nt, Artificial Sequence
  Description of Artificial Sequence: Synthetic oligonucleotide
  Sense Strand Starting at position 756 of SEQ ID NO: 318088
uuuacagcuguaugauauu

SEQ ID NO: 378210 - RNA, 19 nt, Artificial Sequence
  Description of Artificial Sequence: Synthetic oligonucleotide
  Antisense Strand to SEQ ID NO: 378209
aauaucauacagcuguaaa

SEQ ID NO: 378211 - RNA, 19 nt, Artificial Sequence
  Description of Artificial Sequence: Synthetic oligonucleotide
  Sense Strand Starting at position 756 of SEQ ID NO: 318204
auaacuuuguuccuaugua

SEQ ID NO: 378212 - RNA, 19 nt, Artificial Sequence
  Description of Artificial Sequence: Synthetic oligonucleotide
  Antisense Strand to SEQ ID NO: 378211
uacauaggaacaaaguuau

SEQ ID NO: 378213 - RNA, 19 nt, Artificial Sequence
  Description of Artificial Sequence: Synthetic oligonucleotide
  Sense Strand Starting at position 756 of SEQ ID NO: 318478
uaucaauuggccgauggga

SEQ ID NO: 378214 - RNA, 19 nt, Artificial Sequence
  Description of Artificial Sequence: Synthetic oligonucleotide
  Antisense Strand to SEQ ID NO: 378213
ucccaucggccaauugaua

SEQ ID NO: 378215 - RNA, 19 nt, Artificial Sequence
  Description of Artificial Sequence: Synthetic oligonucleotide
  Sense Strand Starting at position 756 of SEQ ID NO: 318495
gacucagcaguaggagaau

SEQ ID NO: 378216 - RNA, 19 nt, Artificial Sequence
  Description of Artificial Sequence: Synthetic oligonucleotide
  Antisense Strand to SEQ ID NO: 378215
auucuccuacugcugaguc

SEQ ID NO: 378217 - RNA, 19 nt, Artificial Sequence
  Description of Artificial Sequence: Synthetic oligonucleotide
  Sense Strand Starting at position 756 of SEQ ID NO: 318701
gagguaacaggauguccua

SEQ ID NO: 378218 - RNA, 19 nt, Artificial Sequence
  Description of Artificial Sequence: Synthetic oligonucleotide
  Antisense Strand to SEQ ID NO: 378217
uaggacauccuguuaccuc

SEQ ID NO: 378219 - RNA, 19 nt, Artificial Sequence
  Description of Artificial Sequence: Synthetic oligonucleotide
  Sense Strand Starting at position 756 of SEQ ID NO: 318783
gguaaccaacucuauguuu

SEQ ID NO: 378220 - RNA, 19 nt, Artificial Sequence
  Description of Artificial Sequence: Synthetic oligonucleotide
  Antisense Strand to SEQ ID NO: 378219
aaacauagaguugguuacc

SEQ ID NO: 378221 - RNA, 19 nt, Artificial Sequence
  Description of Artificial Sequence: Synthetic oligonucleotide
  Sense Strand Starting at position 756 of SEQ ID NO: 318845
cuaguuguaccugacugau

SEQ ID NO: 378222 - RNA, 19 nt, Artificial Sequence
  Description of Artificial Sequence: Synthetic oligonucleotide
  Antisense Strand to SEQ ID NO: 378221
aucagucagguacaacuag

SEQ ID NO: 378223 - RNA, 19 nt, Artificial Sequence
  Description of Artificial Sequence: Synthetic oligonucleotide
  Sense Strand Starting at position 756 of SEQ ID NO: 318847
aguuguaccugacugauac

SEQ ID NO: 378224 - RNA, 19 nt, Artificial Sequence
  Description of Artificial Sequence: Synthetic oligonucleotide
  Antisense Strand to SEQ ID NO: 378223
guaucagucagguacaacu

SEQ ID NO: 378225 - RNA, 19 nt, Artificial Sequence
  Description of Artificial Sequence: Synthetic oligonucleotide
  Sense Strand Starting at position 756 of SEQ ID NO: 318848
guuguaccugacugauacu

SEQ ID NO: 378226 - RNA, 19 nt, Artificial Sequence
  Description of Artificial Sequence: Synthetic oligonucleotide
  Antisense Strand to SEQ ID NO: 378225
aguaucagucagguacaac

SEQ ID NO: 378227 - RNA, 19 nt, Artificial Sequence
  Description of Artificial Sequence: Synthetic oligonucleotide
  Sense Strand Starting at position 756 of SEQ ID NO: 318991
uuugcauauguuuaugaga

SEQ ID NO: 378228 - RNA, 19 nt, Artificial Sequence
  Description of Artificial Sequence: Synthetic oligonucleotide
  Antisense Strand to SEQ ID NO: 378227
ucucauaaacauaugcaaa

SEQ ID NO: 378229 - RNA, 19 nt, Artificial Sequence
  Description of Artificial Sequence: Synthetic oligonucleotide
  Sense Strand Starting at position 756 of SEQ ID NO: 319080
auagauucuugauugugaa

SEQ ID NO: 378230 - RNA, 19 nt, Artificial Sequence
  Description of Artificial Sequence: Synthetic oligonucleotide
  Antisense Strand to SEQ ID NO: 378229
uucacaaucaagaaucuau

SEQ ID NO: 378231 - RNA, 19 nt, Artificial Sequence
  Description of Artificial Sequence: Synthetic oligonucleotide
  Sense Strand Starting at position 756 of SEQ ID NO: 319081
uagauucuugauugugaaa

SEQ ID NO: 378232 - RNA, 19 nt, Artificial Sequence
  Description of Artificial Sequence: Synthetic oligonucleotide
  Antisense Strand to SEQ ID NO: 378231
uuucacaaucaagaaucua

SEQ ID NO: 378233 - RNA, 19 nt, Artificial Sequence
  Description of Artificial Sequence: Synthetic oligonucleotide
  Sense Strand Starting at position 756 of SEQ ID NO: 319102
aaguccugccagugaaaca

SEQ ID NO: 378234 - RNA, 19 nt, Artificial Sequence
  Description of Artificial Sequence: Synthetic oligonucleotide
  Antisense Strand to SEQ ID NO: 378233
uguuucacuggcaggacuu

SEQ ID NO: 378235 - RNA, 19 nt, Artificial Sequence
  Description of Artificial Sequence: Synthetic oligonucleotide
  Sense Strand Starting at position 757 of SEQ ID NO: 315297
ggagguagugguggguaau

SEQ ID NO: 378236 - RNA, 19 nt, Artificial Sequence
  Description of Artificial Sequence: Synthetic oligonucleotide
  Antisense Strand to SEQ ID NO: 378235
auuacccaccacuaccucc

SEQ ID NO: 378237 - RNA, 19 nt, Artificial Sequence
  Description of Artificial Sequence: Synthetic oligonucleotide
  Sense Strand Starting at position 757 of SEQ ID NO: 315298
gagguagugguggguaauu

SEQ ID NO: 378238 - RNA, 19 nt, Artificial Sequence
  Description of Artificial Sequence: Synthetic oligonucleotide
  Antisense Strand to SEQ ID NO: 378237
aauuacccaccacuaccuc

SEQ ID NO: 378239 - RNA, 19 nt, Artificial Sequence
  Description of Artificial Sequence: Synthetic oligonucleotide
  Sense Strand Starting at position 757 of SEQ ID NO: 315489
cccagaugccuugaaccau

SEQ ID NO: 378240 - RNA, 19 nt, Artificial Sequence
  Description of Artificial Sequence: Synthetic oligonucleotide
  Antisense Strand to SEQ ID NO: 378239
augguucaaggcaucuggg

SEQ ID NO: 378241 - RNA, 19 nt, Artificial Sequence
  Description of Artificial Sequence: Synthetic oligonucleotide
  Sense Strand Starting at position 757 of SEQ ID NO: 315566
acuccaaguuccuugggaa

SEQ ID NO: 378242 - RNA, 19 nt, Artificial Sequence
  Description of Artificial Sequence: Synthetic oligonucleotide
  Antisense Strand to SEQ ID NO: 378241
uucccaaggaacuuggagu

SEQ ID NO: 378243 - RNA, 19 nt, Artificial Sequence
  Description of Artificial Sequence: Synthetic oligonucleotide
  Sense Strand Starting at position 757 of SEQ ID NO: 315567
cuccaaguuccuugggaag

SEQ ID NO: 378244 - RNA, 19 nt, Artificial Sequence
  Description of Artificial Sequence: Synthetic oligonucleotide
  Antisense Strand to SEQ ID NO: 378243
cuucccaaggaacuuggag

SEQ ID NO: 378245 - RNA, 19 nt, Artificial Sequence
  Description of Artificial Sequence: Synthetic oligonucleotide
  Sense Strand Starting at position 757 of SEQ ID NO: 315637
caaagaugcuggucaguca

SEQ ID NO: 378246 - RNA, 19 nt, Artificial Sequence
  Description of Artificial Sequence: Synthetic oligonucleotide
  Antisense Strand to SEQ ID NO: 378245
ugacugaccagcaucuuug

SEQ ID NO: 378247 - RNA, 19 nt, Artificial Sequence
  Description of Artificial Sequence: Synthetic oligonucleotide
  Sense Strand Starting at position 757 of SEQ ID NO: 315638
aaagaugcuggucagucau

SEQ ID NO: 378248 - RNA, 19 nt, Artificial Sequence
  Description of Artificial Sequence: Synthetic oligonucleotide
  Antisense Strand to SEQ ID NO: 378247
augacugaccagcaucuuu

SEQ ID NO: 378249 - RNA, 19 nt, Artificial Sequence
  Description of Artificial Sequence: Synthetic oligonucleotide
  Sense Strand Starting at position 757 of SEQ ID NO: 315644
gcuggucagucaucacaaa

SEQ ID NO: 378250 - RNA, 19 nt, Artificial Sequence
  Description of Artificial Sequence: Synthetic oligonucleotide
  Antisense Strand to SEQ ID NO: 378249
uuugugaugacugaccagc

SEQ ID NO: 378251 - RNA, 19 nt, Artificial Sequence
  Description of Artificial Sequence: Synthetic oligonucleotide
  Sense Strand Starting at position 757 of SEQ ID NO: 315709
ggcugaguugaagggacaa

SEQ ID NO: 378252 - RNA, 19 nt, Artificial Sequence
  Description of Artificial Sequence: Synthetic oligonucleotide
  Antisense Strand to SEQ ID NO: 378251
uugucccuucaacucagcc

SEQ ID NO: 378253 - RNA, 19 nt, Artificial Sequence
  Description of Artificial Sequence: Synthetic oligonucleotide
  Sense Strand Starting at position 757 of SEQ ID NO: 316035
agcguacucgcuucucuua

SEQ ID NO: 378254 - RNA, 19 nt, Artificial Sequence
  Description of Artificial Sequence: Synthetic oligonucleotide
  Antisense Strand to SEQ ID NO: 378253
uaagagaagcgaguacgcu

SEQ ID NO: 378255 - RNA, 19 nt, Artificial Sequence
  Description of Artificial Sequence: Synthetic oligonucleotide
  Sense Strand Starting at position 757 of SEQ ID NO: 316070
aaaccagugugugcauuua

SEQ ID NO: 378256 - RNA, 19 nt, Artificial Sequence
  Description of Artificial Sequence: Synthetic oligonucleotide
  Antisense Strand to SEQ ID NO: 378255
uaaaugcacacacugguuu

SEQ ID NO: 378257 - RNA, 19 nt, Artificial Sequence
  Description of Artificial Sequence: Synthetic oligonucleotide
  Sense Strand Starting at position 757 of SEQ ID NO: 316097
gggauacguacuuauccuu

SEQ ID NO: 378258 - RNA, 19 nt, Artificial Sequence
  Description of Artificial Sequence: Synthetic oligonucleotide
  Antisense Strand to SEQ ID NO: 378257
aaggauaaguacguauccc

SEQ ID NO: 378259 - RNA, 19 nt, Artificial Sequence
  Description of Artificial Sequence: Synthetic oligonucleotide
  Sense Strand Starting at position 757 of SEQ ID NO: 316182
cugccaagacgucaguaaa

SEQ ID NO: 378260 - RNA, 19 nt, Artificial Sequence
  Description of Artificial Sequence: Synthetic oligonucleotide
  Antisense Strand to SEQ ID NO: 378259
uuuacugacgucuuggcag

SEQ ID NO: 378261 - RNA, 19 nt, Artificial Sequence
  Description of Artificial Sequence: Synthetic oligonucleotide
  Sense Strand Starting at position 757 of SEQ ID NO: 316185
ccaagacgucaguaaauua

SEQ ID NO: 378262 - RNA, 19 nt, Artificial Sequence
  Description of Artificial Sequence: Synthetic oligonucleotide
  Antisense Strand to SEQ ID NO: 378261
uaauuuacugacgucuugg

SEQ ID NO: 378263 - RNA, 19 nt, Artificial Sequence
  Description of Artificial Sequence: Synthetic oligonucleotide
  Sense Strand Starting at position 757 of SEQ ID NO: 316309
ccuccaaaucuauguagag

SEQ ID NO: 378264 - RNA, 19 nt, Artificial Sequence
  Description of Artificial Sequence: Synthetic oligonucleotide
  Antisense Strand to SEQ ID NO: 378263
cucuacauagauuuggagg

SEQ ID NO: 378265 - RNA, 19 nt, Artificial Sequence
  Description of Artificial Sequence: Synthetic oligonucleotide
  Sense Strand Starting at position 757 of SEQ ID NO: 316512
uugagagagucccugauua

SEQ ID NO: 378266 - RNA, 19 nt, Artificial Sequence
  Description of Artificial Sequence: Synthetic oligonucleotide
  Antisense Strand to SEQ ID NO: 378265
uaaucagggacucucucaa

SEQ ID NO: 378267 - RNA, 19 nt, Artificial Sequence
  Description of Artificial Sequence: Synthetic oligonucleotide
  Sense Strand Starting at position 757 of SEQ ID NO: 316544
gaauuaagaguuugaguca

SEQ ID NO: 378268 - RNA, 19 nt, Artificial Sequence
  Description of Artificial Sequence: Synthetic oligonucleotide
  Antisense Strand to SEQ ID NO: 378267
ugacucaaacucuuaauuc

SEQ ID NO: 378269 - RNA, 19 nt, Artificial Sequence
  Description of Artificial Sequence: Synthetic oligonucleotide
  Sense Strand Starting at position 757 of SEQ ID NO: 316547
uuaagaguuugagucaggu

SEQ ID NO: 378270 - RNA, 19 nt, Artificial Sequence
  Description of Artificial Sequence: Synthetic oligonucleotide
  Antisense Strand to SEQ ID NO: 378269
accugacucaaacucuuaa

SEQ ID NO: 378271 - RNA, 19 nt, Artificial Sequence
  Description of Artificial Sequence: Synthetic oligonucleotide
  Sense Strand Starting at position 757 of SEQ ID NO: 316760
gaugaucccugagcaaguu

SEQ ID NO: 378272 - RNA, 19 nt, Artificial Sequence
  Description of Artificial Sequence: Synthetic oligonucleotide
  Antisense Strand to SEQ ID NO: 378271
aacuugcucagggaucauc

SEQ ID NO: 378273 - RNA, 19 nt, Artificial Sequence
  Description of Artificial Sequence: Synthetic oligonucleotide
  Sense Strand Starting at position 757 of SEQ ID NO: 317713
aguaaugggucaccagaau

SEQ ID NO: 378274 - RNA, 19 nt, Artificial Sequence
  Description of Artificial Sequence: Synthetic oligonucleotide
  Antisense Strand to SEQ ID NO: 378273
auucuggugacccauuacu

SEQ ID NO: 378275 - RNA, 19 nt, Artificial Sequence
  Description of Artificial Sequence: Synthetic oligonucleotide
  Sense Strand Starting at position 757 of SEQ ID NO: 317795
cacagucccuggguaauua

SEQ ID NO: 378276 - RNA, 19 nt, Artificial Sequence
  Description of Artificial Sequence: Synthetic oligonucleotide
  Antisense Strand to SEQ ID NO: 378275
uaauuacccagggacugug

SEQ ID NO: 378277 - RNA, 19 nt, Artificial Sequence
  Description of Artificial Sequence: Synthetic oligonucleotide
  Sense Strand Starting at position 757 of SEQ ID NO: 317796
acagucccuggguaauuaa

SEQ ID NO: 378278 - RNA, 19 nt, Artificial Sequence
  Description of Artificial Sequence: Synthetic oligonucleotide
  Antisense Strand to SEQ ID NO: 378277
uuaauuacccagggacugu

SEQ ID NO: 378279 - RNA, 19 nt, Artificial Sequence
  Description of Artificial Sequence: Synthetic oligonucleotide
  Sense Strand Starting at position 757 of SEQ ID NO: 317830
cccuaucuggauugcuuua

SEQ ID NO: 378280 - RNA, 19 nt, Artificial Sequence
  Description of Artificial Sequence: Synthetic oligonucleotide
  Antisense Strand to SEQ ID NO: 378279
uaaagcaauccagauaggg

SEQ ID NO: 378281 - RNA, 19 nt, Artificial Sequence
  Description of Artificial Sequence: Synthetic oligonucleotide
  Sense Strand Starting at position 757 of SEQ ID NO: 317832
cuaucuggauugcuuuaau

SEQ ID NO: 378282 - RNA, 19 nt, Artificial Sequence
  Description of Artificial Sequence: Synthetic oligonucleotide
  Antisense Strand to SEQ ID NO: 378281
auuaaagcaauccagauag

SEQ ID NO: 378283 - RNA, 19 nt, Artificial Sequence
  Description of Artificial Sequence: Synthetic oligonucleotide
  Sense Strand Starting at position 757 of SEQ ID NO: 318118
gugcguuugcauccauuaa

SEQ ID NO: 378284 - RNA, 19 nt, Artificial Sequence
  Description of Artificial Sequence: Synthetic oligonucleotide
  Antisense Strand to SEQ ID NO: 378283
uuaauggaugcaaacgcac

SEQ ID NO: 378285 - RNA, 19 nt, Artificial Sequence
  Description of Artificial Sequence: Synthetic oligonucleotide
  Sense Strand Starting at position 757 of SEQ ID NO: 318122
guuugcauccauuaagcca

SEQ ID NO: 378286 - RNA, 19 nt, Artificial Sequence
  Description of Artificial Sequence: Synthetic oligonucleotide
  Antisense Strand to SEQ ID NO: 378285
uggcuuaauggaugcaaac

SEQ ID NO: 378287 - RNA, 19 nt, Artificial Sequence
  Description of Artificial Sequence: Synthetic oligonucleotide
  Sense Strand Starting at position 757 of SEQ ID NO: 318129
uccauuaagccagggaucu

SEQ ID NO: 378288 - RNA, 19 nt, Artificial Sequence
  Description of Artificial Sequence: Synthetic oligonucleotide
  Antisense Strand to SEQ ID NO: 378287
agaucccuggcuuaaugga

SEQ ID NO: 378289 - RNA, 19 nt, Artificial Sequence
  Description of Artificial Sequence: Synthetic oligonucleotide
  Sense Strand Starting at position 757 of SEQ ID NO: 318130
ccauuaagccagggaucuu

SEQ ID NO: 378290 - RNA, 19 nt, Artificial Sequence
  Description of Artificial Sequence: Synthetic oligonucleotide
  Antisense Strand to SEQ ID NO: 378289
aagaucccuggcuuaaugg

SEQ ID NO: 378291 - RNA, 19 nt, Artificial Sequence
  Description of Artificial Sequence: Synthetic oligonucleotide
  Sense Strand Starting at position 757 of SEQ ID NO: 318172
caacaacucggcugugaaa

SEQ ID NO: 378292 - RNA, 19 nt, Artificial Sequence
  Description of Artificial Sequence: Synthetic oligonucleotide
  Antisense Strand to SEQ ID NO: 378291
uuucacagccgaguuguug

SEQ ID NO: 378293 - RNA, 19 nt, Artificial Sequence
  Description of Artificial Sequence: Synthetic oligonucleotide
  Sense Strand Starting at position 757 of SEQ ID NO: 318322
aaaugugcgcaguagaaau

SEQ ID NO: 378294 - RNA, 19 nt, Artificial Sequence
  Description of Artificial Sequence: Synthetic oligonucleotide
  Antisense Strand to SEQ ID NO: 378293
auuucuacugcgcacauuu

SEQ ID NO: 378295 - RNA, 19 nt, Artificial Sequence
  Description of Artificial Sequence: Synthetic oligonucleotide
  Sense Strand Starting at position 757 of SEQ ID NO: 318335
agaaauaaauggcuuguuu

SEQ ID NO: 378296 - RNA, 19 nt, Artificial Sequence
  Description of Artificial Sequence: Synthetic oligonucleotide
  Antisense Strand to SEQ ID NO: 378295
aaacaagccauuuauuucu

SEQ ID NO: 378297 - RNA, 19 nt, Artificial Sequence
  Description of Artificial Sequence: Synthetic oligonucleotide
  Sense Strand Starting at position 757 of SEQ ID NO: 318446
ucgauucccuccuuuaaag

SEQ ID NO: 378298 - RNA, 19 nt, Artificial Sequence
  Description of Artificial Sequence: Synthetic oligonucleotide
  Antisense Strand to SEQ ID NO: 378297
cuuuaaaggagggaaucga

SEQ ID NO: 378299 - RNA, 19 nt, Artificial Sequence
  Description of Artificial Sequence: Synthetic oligonucleotide
  Sense Strand Starting at position 757 of SEQ ID NO: 318495
gaaggaaguuaguuuguuu

SEQ ID NO: 378300 - RNA, 19 nt, Artificial Sequence
  Description of Artificial Sequence: Synthetic oligonucleotide
  Antisense Strand to SEQ ID NO: 378299
aaacaaacuaacuuccuuc

SEQ ID NO: 378301 - RNA, 19 nt, Artificial Sequence
  Description of Artificial Sequence: Synthetic oligonucleotide
  Sense Strand Starting at position 757 of SEQ ID NO: 318540
uuuauuuagcugugcuuga

SEQ ID NO: 378302 - RNA, 19 nt, Artificial Sequence
  Description of Artificial Sequence: Synthetic oligonucleotide
  Antisense Strand to SEQ ID NO: 378301
ucaagcacagcuaaauaaa

SEQ ID NO: 378303 - RNA, 19 nt, Artificial Sequence
  Description of Artificial Sequence: Synthetic oligonucleotide
  Sense Strand Starting at position 757 of SEQ ID NO: 318541
uuauuuagcugugcuugau

SEQ ID NO: 378304 - RNA, 19 nt, Artificial Sequence
  Description of Artificial Sequence: Synthetic oligonucleotide
  Antisense Strand to SEQ ID NO: 378303
aucaagcacagcuaaauaa

SEQ ID NO: 378305 - RNA, 19 nt, Artificial Sequence
  Description of Artificial Sequence: Synthetic oligonucleotide
  Sense Strand Starting at position 757 of SEQ ID NO: 318781
agauauuaucguggaguca

SEQ ID NO: 378306 - RNA, 19 nt, Artificial Sequence
  Description of Artificial Sequence: Synthetic oligonucleotide
  Antisense Strand to SEQ ID NO: 378305
ugacuccacgauaauaucu

SEQ ID NO: 378307 - RNA, 19 nt, Artificial Sequence
  Description of Artificial Sequence: Synthetic oligonucleotide
  Sense Strand Starting at position 757 of SEQ ID NO: 318782
gauauuaucguggagucau

SEQ ID NO: 378308 - RNA, 19 nt, Artificial Sequence
  Description of Artificial Sequence: Synthetic oligonucleotide
  Antisense Strand to SEQ ID NO: 378307
augacuccacgauaauauc

SEQ ID NO: 378309 - RNA, 19 nt, Artificial Sequence
  Description of Artificial Sequence: Synthetic oligonucleotide
  Sense Strand Starting at position 757 of SEQ ID NO: 318793
ggagucauuccauaucauu

SEQ ID NO: 378310 - RNA, 19 nt, Artificial Sequence
  Description of Artificial Sequence: Synthetic oligonucleotide
  Antisense Strand to SEQ ID NO: 378309
aaugauauggaaugacucc

SEQ ID NO: 378311 - RNA, 19 nt, Artificial Sequence
  Description of Artificial Sequence: Synthetic oligonucleotide
  Sense Strand Starting at position 757 of SEQ ID NO: 318834
uuuacagcuguaugauauu

SEQ ID NO: 378312 - RNA, 19 nt, Artificial Sequence
  Description of Artificial Sequence: Synthetic oligonucleotide
  Antisense Strand to SEQ ID NO: 378311
aauaucauacagcuguaaa

SEQ ID NO: 378313 - RNA, 19 nt, Artificial Sequence
  Description of Artificial Sequence: Synthetic oligonucleotide
  Sense Strand Starting at position 757 of SEQ ID NO: 318950
auaacuuuguuccuaugua

SEQ ID NO: 378314 - RNA, 19 nt, Artificial Sequence
  Description of Artificial Sequence: Synthetic oligonucleotide
  Antisense Strand to SEQ ID NO: 378313
uacauaggaacaaaguuau

SEQ ID NO: 378315 - RNA, 19 nt, Artificial Sequence
  Description of Artificial Sequence: Synthetic oligonucleotide
  Sense Strand Starting at position 758 of SEQ ID NO: 315394
ugggauucuugagcaaagu

SEQ ID NO: 378316 - RNA, 19 nt, Artificial Sequence
  Description of Artificial Sequence: Synthetic oligonucleotide
  Antisense Strand to SEQ ID NO: 378315
acuuugcucaagaauccca

SEQ ID NO: 378317 - RNA, 19 nt, Artificial Sequence
  Description of Artificial Sequence: Synthetic oligonucleotide
  Sense Strand Starting at position 758 of SEQ ID NO: 315395
gggauucuugagcaaaguu

SEQ ID NO: 378318 - RNA, 19 nt, Artificial Sequence
  Description of Artificial Sequence: Synthetic oligonucleotide
  Antisense Strand to SEQ ID NO: 378317
aacuuugcucaagaauccc

SEQ ID NO: 378319 - RNA, 19 nt, Artificial Sequence
  Description of Artificial Sequence: Synthetic oligonucleotide
  Sense Strand Starting at position 758 of SEQ ID NO: 315410
aguugcuaucguuaaagau

SEQ ID NO: 378320 - RNA, 19 nt, Artificial Sequence
  Description of Artificial Sequence: Synthetic oligonucleotide
  Antisense Strand to SEQ ID NO: 378319
aucuuuaacgauagcaacu

SEQ ID NO: 378321 - RNA, 19 nt, Artificial Sequence
  Description of Artificial Sequence: Synthetic oligonucleotide
  Sense Strand Starting at position 758 of SEQ ID NO: 315795
augaaaugguucucuaaga

SEQ ID NO: 378322 - RNA, 19 nt, Artificial Sequence
  Description of Artificial Sequence: Synthetic oligonucleotide
  Antisense Strand to SEQ ID NO: 378321
ucuuagagaaccauuucau

SEQ ID NO: 378323 - RNA, 19 nt, Artificial Sequence
  Description of Artificial Sequence: Synthetic oligonucleotide
  Sense Strand Starting at position 758 of SEQ ID NO: 315796
ugaaaugguucucuaagag

SEQ ID NO: 378324 - RNA, 19 nt, Artificial Sequence
  Description of Artificial Sequence: Synthetic oligonucleotide
  Antisense Strand to SEQ ID NO: 378323
cucuuagagaaccauuuca

SEQ ID NO: 378325 - RNA, 19 nt, Artificial Sequence
  Description of Artificial Sequence: Synthetic oligonucleotide
  Sense Strand Starting at position 758 of SEQ ID NO: 316032
cagauauacugggagaaug

SEQ ID NO: 378326 - RNA, 19 nt, Artificial Sequence
  Description of Artificial Sequence: Synthetic oligonucleotide
  Antisense Strand to SEQ ID NO: 378325
cauucucccaguauaucug

SEQ ID NO: 378327 - RNA, 19 nt, Artificial Sequence
  Description of Artificial Sequence: Synthetic oligonucleotide
  Sense Strand Starting at position 758 of SEQ ID NO: 316060
gggauauguauguguugag

SEQ ID NO: 378328 - RNA, 19 nt, Artificial Sequence
  Description of Artificial Sequence: Synthetic oligonucleotide
  Antisense Strand to SEQ ID NO: 378327
cucaacacauacauauccc

SEQ ID NO: 378329 - RNA, 19 nt, Artificial Sequence
  Description of Artificial Sequence: Synthetic oligonucleotide
  Sense Strand Starting at position 758 of SEQ ID NO: 316147
ggguaagcauauuauuuag

SEQ ID NO: 378330 - RNA, 19 nt, Artificial Sequence
  Description of Artificial Sequence: Synthetic oligonucleotide
  Antisense Strand to SEQ ID NO: 378329
cuaaauaauaugcuuaccc

SEQ ID NO: 378331 - RNA, 19 nt, Artificial Sequence
  Description of Artificial Sequence: Synthetic oligonucleotide
  Sense Strand Starting at position 758 of SEQ ID NO: 316210
guguguaaggagcacagau

SEQ ID NO: 378332 - RNA, 19 nt, Artificial Sequence
  Description of Artificial Sequence: Synthetic oligonucleotide
  Antisense Strand to SEQ ID NO: 378331
aucugugcuccuuacacac

SEQ ID NO: 378333 - RNA, 19 nt, Artificial Sequence
  Description of Artificial Sequence: Synthetic oligonucleotide
  Sense Strand Starting at position 758 of SEQ ID NO: 316426
ugcugugucaucuuuguca

SEQ ID NO: 378334 - RNA, 19 nt, Artificial Sequence
  Description of Artificial Sequence: Synthetic oligonucleotide
  Antisense Strand to SEQ ID NO: 378333
ugacaaagaugacacagca

SEQ ID NO: 378335 - RNA, 19 nt, Artificial Sequence
  Description of Artificial Sequence: Synthetic oligonucleotide
  Sense Strand Starting at position 758 of SEQ ID NO: 316532
guaagucaauguucuuaaa

SEQ ID NO: 378336 - RNA, 19 nt, Artificial Sequence
  Description of Artificial Sequence: Synthetic oligonucleotide
  Antisense Strand to SEQ ID NO: 378335
uuuaagaacauugacuuac

SEQ ID NO: 378337 - RNA, 19 nt, Artificial Sequence
  Description of Artificial Sequence: Synthetic oligonucleotide
  Sense Strand Starting at position 758 of SEQ ID NO: 316802
uucuuaauguuugcacaga

SEQ ID NO: 378338 - RNA, 19 nt, Artificial Sequence
  Description of Artificial Sequence: Synthetic oligonucleotide
  Antisense Strand to SEQ ID NO: 378337
ucugugcaaacauuaagaa

SEQ ID NO: 378339 - RNA, 19 nt, Artificial Sequence
  Description of Artificial Sequence: Synthetic oligonucleotide
  Sense Strand Starting at position 758 of SEQ ID NO: 316866
ugacauaguucuguugcaa

SEQ ID NO: 378340 - RNA, 19 nt, Artificial Sequence
  Description of Artificial Sequence: Synthetic oligonucleotide
  Antisense Strand to SEQ ID NO: 378339
uugcaacagaacuauguca

SEQ ID NO: 378341 - RNA, 19 nt, Artificial Sequence
  Description of Artificial Sequence: Synthetic oligonucleotide
  Sense Strand Starting at position 758 of SEQ ID NO: 316898
acaaucaggcaauguauaa

SEQ ID NO: 378342 - RNA, 19 nt, Artificial Sequence
  Description of Artificial Sequence: Synthetic oligonucleotide
  Antisense Strand to SEQ ID NO: 378341
uuauacauugccugauugu

SEQ ID NO: 378343 - RNA, 19 nt, Artificial Sequence
  Description of Artificial Sequence: Synthetic oligonucleotide
  Sense Strand Starting at position 758 of SEQ ID NO: 316968
agucaauguugcuuaauua

SEQ ID NO: 378344 - RNA, 19 nt, Artificial Sequence
  Description of Artificial Sequence: Synthetic oligonucleotide
  Antisense Strand to SEQ ID NO: 378343
uaauuaagcaacauugacu

SEQ ID NO: 378345 - RNA, 19 nt, Artificial Sequence
  Description of Artificial Sequence: Synthetic oligonucleotide
  Sense Strand Starting at position 758 of SEQ ID NO: 316969
gucaauguugcuuaauuau

SEQ ID NO: 378346 - RNA, 19 nt, Artificial Sequence
  Description of Artificial Sequence: Synthetic oligonucleotide
  Antisense Strand to SEQ ID NO: 378345
auaauuaagcaacauugac

SEQ ID NO: 378347 - RNA, 19 nt, Artificial Sequence
  Description of Artificial Sequence: Synthetic oligonucleotide
  Sense Strand Starting at position 758 of SEQ ID NO: 317219
gugcuacugcucguuucua

SEQ ID NO: 378348 - RNA, 19 nt, Artificial Sequence
  Description of Artificial Sequence: Synthetic oligonucleotide
  Antisense Strand to SEQ ID NO: 378347
uagaaacgagcaguagcac

SEQ ID NO: 378349 - RNA, 19 nt, Artificial Sequence
  Description of Artificial Sequence: Synthetic oligonucleotide
  Sense Strand Starting at position 758 of SEQ ID NO: 317221
gcuacugcucguuucuauu

SEQ ID NO: 378350 - RNA, 19 nt, Artificial Sequence
  Description of Artificial Sequence: Synthetic oligonucleotide
  Antisense Strand to SEQ ID NO: 378349
aauagaaacgagcaguagc

SEQ ID NO: 378351 - RNA, 19 nt, Artificial Sequence
  Description of Artificial Sequence: Synthetic oligonucleotide
  Sense Strand Starting at position 758 of SEQ ID NO: 317260
gacggagagcugugaaauc

SEQ ID NO: 378352 - RNA, 19 nt, Artificial Sequence
  Description of Artificial Sequence: Synthetic oligonucleotide
  Antisense Strand to SEQ ID NO: 378351
gauuucacagcucuccguc

SEQ ID NO: 378353 - RNA, 19 nt, Artificial Sequence
  Description of Artificial Sequence: Synthetic oligonucleotide
  Sense Strand Starting at position 758 of SEQ ID NO: 317414
ccacuuucuugguuuguaa

SEQ ID NO: 378354 - RNA, 19 nt, Artificial Sequence
  Description of Artificial Sequence: Synthetic oligonucleotide
  Antisense Strand to SEQ ID NO: 378353
uuacaaaccaagaaagugg

SEQ ID NO: 378355 - RNA, 19 nt, Artificial Sequence
  Description of Artificial Sequence: Synthetic oligonucleotide
  Sense Strand Starting at position 758 of SEQ ID NO: 317416
acuuucuugguuuguaaau

SEQ ID NO: 378356 - RNA, 19 nt, Artificial Sequence
  Description of Artificial Sequence: Synthetic oligonucleotide
  Antisense Strand to SEQ ID NO: 378355
auuuacaaaccaagaaagu

SEQ ID NO: 378357 - RNA, 19 nt, Artificial Sequence
  Description of Artificial Sequence: Synthetic oligonucleotide
  Sense Strand Starting at position 758 of SEQ ID NO: 317417
cuuucuugguuuguaaauu

SEQ ID NO: 378358 - RNA, 19 nt, Artificial Sequence
  Description of Artificial Sequence: Synthetic oligonucleotide
  Antisense Strand to SEQ ID NO: 378357
aauuuacaaaccaagaaag

SEQ ID NO: 378359 - RNA, 19 nt, Artificial Sequence
  Description of Artificial Sequence: Synthetic oligonucleotide
  Sense Strand Starting at position 758 of SEQ ID NO: 317492
gacuaugagguuugcuuua

SEQ ID NO: 378360 - RNA, 19 nt, Artificial Sequence
  Description of Artificial Sequence: Synthetic oligonucleotide
  Antisense Strand to SEQ ID NO: 378359
uaaagcaaaccucauaguc

SEQ ID NO: 378361 - RNA, 19 nt, Artificial Sequence
  Description of Artificial Sequence: Synthetic oligonucleotide
  Sense Strand Starting at position 758 of SEQ ID NO: 317497
ugagguuugcuuuagcuaa

SEQ ID NO: 378362 - RNA, 19 nt, Artificial Sequence
  Description of Artificial Sequence: Synthetic oligonucleotide
  Antisense Strand to SEQ ID NO: 378361
uuagcuaaagcaaaccuca

SEQ ID NO: 378363 - RNA, 19 nt, Artificial Sequence
  Description of Artificial Sequence: Synthetic oligonucleotide
  Sense Strand Starting at position 758 of SEQ ID NO: 317569
agggaauaauuggaagaga

SEQ ID NO: 378364 - RNA, 19 nt, Artificial Sequence
  Description of Artificial Sequence: Synthetic oligonucleotide
  Antisense Strand to SEQ ID NO: 378363
ucucuuccaauuauucccu

SEQ ID NO: 378365 - RNA, 19 nt, Artificial Sequence
  Description of Artificial Sequence: Synthetic oligonucleotide
  Sense Strand Starting at position 758 of SEQ ID NO: 317628
cucccugugguauaagaaa

SEQ ID NO: 378366 - RNA, 19 nt, Artificial Sequence
  Description of Artificial Sequence: Synthetic oligonucleotide
  Antisense Strand to SEQ ID NO: 378365
uuucuuauaccacagggag

SEQ ID NO: 378367 - RNA, 19 nt, Artificial Sequence
  Description of Artificial Sequence: Synthetic oligonucleotide
  Sense Strand Starting at position 758 of SEQ ID NO: 317712
auauacugugauggagagu

SEQ ID NO: 378368 - RNA, 19 nt, Artificial Sequence
  Description of Artificial Sequence: Synthetic oligonucleotide
  Antisense Strand to SEQ ID NO: 378367
acucuccaucacaguauau

SEQ ID NO: 378369 - RNA, 19 nt, Artificial Sequence
  Description of Artificial Sequence: Synthetic oligonucleotide
  Sense Strand Starting at position 758 of SEQ ID NO: 318001
aucuuagacuaagaagaaa

SEQ ID NO: 378370 - RNA, 19 nt, Artificial Sequence
  Description of Artificial Sequence: Synthetic oligonucleotide
  Antisense Strand to SEQ ID NO: 378369
uuucuucuuagucuaagau

SEQ ID NO: 378371 - RNA, 19 nt, Artificial Sequence
  Description of Artificial Sequence: Synthetic oligonucleotide
  Sense Strand Starting at position 758 of SEQ ID NO: 318157
ugguuaauuguccagugca

SEQ ID NO: 378372 - RNA, 19 nt, Artificial Sequence
  Description of Artificial Sequence: Synthetic oligonucleotide
  Antisense Strand to SEQ ID NO: 378371
ugcacuggacaauuaacca

SEQ ID NO: 378373 - RNA, 19 nt, Artificial Sequence
  Description of Artificial Sequence: Synthetic oligonucleotide
  Sense Strand Starting at position 758 of SEQ ID NO: 318248
cauucuggugcugaaugaa

SEQ ID NO: 378374 - RNA, 19 nt, Artificial Sequence
  Description of Artificial Sequence: Synthetic oligonucleotide
  Antisense Strand to SEQ ID NO: 378373
uucauucagcaccagaaug

SEQ ID NO: 378375 - RNA, 19 nt, Artificial Sequence
  Description of Artificial Sequence: Synthetic oligonucleotide
  Sense Strand Starting at position 758 of SEQ ID NO: 318251
ucuggugcugaaugaaaca

SEQ ID NO: 378376 - RNA, 19 nt, Artificial Sequence
  Description of Artificial Sequence: Synthetic oligonucleotide
  Antisense Strand to SEQ ID NO: 378375
uguuucauucagcaccaga

SEQ ID NO: 378377 - RNA, 19 nt, Artificial Sequence
  Description of Artificial Sequence: Synthetic oligonucleotide
  Sense Strand Starting at position 758 of SEQ ID NO: 318354
cuuaauauaugccuggaga

SEQ ID NO: 378378 - RNA, 19 nt, Artificial Sequence
  Description of Artificial Sequence: Synthetic oligonucleotide
  Antisense Strand to SEQ ID NO: 378377
ucuccaggcauauauuaag

SEQ ID NO: 378379 - RNA, 19 nt, Artificial Sequence
  Description of Artificial Sequence: Synthetic oligonucleotide
  Sense Strand Starting at position 758 of SEQ ID NO: 318355
uuaauauaugccuggagau

SEQ ID NO: 378380 - RNA, 19 nt, Artificial Sequence
  Description of Artificial Sequence: Synthetic oligonucleotide
  Antisense Strand to SEQ ID NO: 378379
aucuccaggcauauauuaa

SEQ ID NO: 378381 - RNA, 19 nt, Artificial Sequence
  Description of Artificial Sequence: Synthetic oligonucleotide
  Sense Strand Starting at position 758 of SEQ ID NO: 318662
gugaguaugcauggaugau

SEQ ID NO: 378382 - RNA, 19 nt, Artificial Sequence
  Description of Artificial Sequence: Synthetic oligonucleotide
  Antisense Strand to SEQ ID NO: 378381
aucauccaugcauacucac

SEQ ID NO: 378383 - RNA, 19 nt, Artificial Sequence
  Description of Artificial Sequence: Synthetic oligonucleotide
  Sense Strand Starting at position 758 of SEQ ID NO: 318663
ugaguaugcauggaugauu

SEQ ID NO: 378384 - RNA, 19 nt, Artificial Sequence
  Description of Artificial Sequence: Synthetic oligonucleotide
  Antisense Strand to SEQ ID NO: 378383
aaucauccaugcauacuca

SEQ ID NO: 378385 - RNA, 19 nt, Artificial Sequence
  Description of Artificial Sequence: Synthetic oligonucleotide
  Sense Strand Starting at position 758 of SEQ ID NO: 318726
acuguuuauguagaacuua

SEQ ID NO: 378386 - RNA, 19 nt, Artificial Sequence
  Description of Artificial Sequence: Synthetic oligonucleotide
  Antisense Strand to SEQ ID NO: 378385
uaaguucuacauaaacagu

SEQ ID NO: 378387 - RNA, 19 nt, Artificial Sequence
  Description of Artificial Sequence: Synthetic oligonucleotide
  Sense Strand Starting at position 758 of SEQ ID NO: 318759
ugcagauaaacagaguguu

SEQ ID NO: 378388 - RNA, 19 nt, Artificial Sequence
  Description of Artificial Sequence: Synthetic oligonucleotide
  Antisense Strand to SEQ ID NO: 378387
aacacucuguuuaucugca

SEQ ID NO: 378389 - RNA, 19 nt, Artificial Sequence
  Description of Artificial Sequence: Synthetic oligonucleotide
  Sense Strand Starting at position 758 of SEQ ID NO: 318925
accacauaugcaggcuaua

SEQ ID NO: 378390 - RNA, 19 nt, Artificial Sequence
  Description of Artificial Sequence: Synthetic oligonucleotide
  Antisense Strand to SEQ ID NO: 378389
uauagccugcauauguggu

SEQ ID NO: 378391 - RNA, 19 nt, Artificial Sequence
  Description of Artificial Sequence: Synthetic oligonucleotide
  Sense Strand Starting at position 758 of SEQ ID NO: 319091
guuguuguuugacuugaaa

SEQ ID NO: 378392 - RNA, 19 nt, Artificial Sequence
  Description of Artificial Sequence: Synthetic oligonucleotide
  Antisense Strand to SEQ ID NO: 378391
uuucaagucaaacaacaac

SEQ ID NO: 378393 - RNA, 19 nt, Artificial Sequence
  Description of Artificial Sequence: Synthetic oligonucleotide
  Sense Strand Starting at position 758 of SEQ ID NO: 319115
guugaaaucauggaguggu

SEQ ID NO: 378394 - RNA, 19 nt, Artificial Sequence
  Description of Artificial Sequence: Synthetic oligonucleotide
  Antisense Strand to SEQ ID NO: 378393
accacuccaugauuucaac

SEQ ID NO: 378395 - RNA, 19 nt, Artificial Sequence
  Description of Artificial Sequence: Synthetic oligonucleotide
  Sense Strand Starting at position 759 of SEQ ID NO: 315491
uccaaauauguuggauugu

SEQ ID NO: 378396 - RNA, 19 nt, Artificial Sequence
  Description of Artificial Sequence: Synthetic oligonucleotide
  Antisense Strand to SEQ ID NO: 378395
acaauccaacauauuugga

SEQ ID NO: 378397 - RNA, 19 nt, Artificial Sequence
  Description of Artificial Sequence: Synthetic oligonucleotide
  Sense Strand Starting at position 759 of SEQ ID NO: 315500
guuggauuguaucugaaau

SEQ ID NO: 378398 - RNA, 19 nt, Artificial Sequence
  Description of Artificial Sequence: Synthetic oligonucleotide
  Antisense Strand to SEQ ID NO: 378397
auuucagauacaauccaac

SEQ ID NO: 378399 - RNA, 19 nt, Artificial Sequence
  Description of Artificial Sequence: Synthetic oligonucleotide
  Sense Strand Starting at position 759 of SEQ ID NO: 315596
ucuuuacaacuugauguga

SEQ ID NO: 378400 - RNA, 19 nt, Artificial Sequence
  Description of Artificial Sequence: Synthetic oligonucleotide
  Antisense Strand to SEQ ID NO: 378399
ucacaucaaguuguaaaga

SEQ ID NO: 378401 - RNA, 19 nt, Artificial Sequence
  Description of Artificial Sequence: Synthetic oligonucleotide
  Sense Strand Starting at position 759 of SEQ ID NO: 315795
ccgauacacagagguaaua

SEQ ID NO: 378402 - RNA, 19 nt, Artificial Sequence
  Description of Artificial Sequence: Synthetic oligonucleotide
  Antisense Strand to SEQ ID NO: 378401
uauuaccucuguguaucgg

SEQ ID NO: 378403 - RNA, 19 nt, Artificial Sequence
  Description of Artificial Sequence: Synthetic oligonucleotide
  Sense Strand Starting at position 759 of SEQ ID NO: 315835
guaugagauuacguugaaa

SEQ ID NO: 378404 - RNA, 19 nt, Artificial Sequence
  Description of Artificial Sequence: Synthetic oligonucleotide
  Antisense Strand to SEQ ID NO: 378403
uuucaacguaaucucauac

SEQ ID NO: 378405 - RNA, 19 nt, Artificial Sequence
  Description of Artificial Sequence: Synthetic oligonucleotide
  Sense Strand Starting at position 759 of SEQ ID NO: 315837
augagauuacguugaaagu

SEQ ID NO: 378406 - RNA, 19 nt, Artificial Sequence
  Description of Artificial Sequence: Synthetic oligonucleotide
  Antisense Strand to SEQ ID NO: 378405
acuuucaacguaaucucau

SEQ ID NO: 378407 - RNA, 19 nt, Artificial Sequence
  Description of Artificial Sequence: Synthetic oligonucleotide
  Sense Strand Starting at position 759 of SEQ ID NO: 315838
ugagauuacguugaaagug

SEQ ID NO: 378408 - RNA, 19 nt, Artificial Sequence
  Description of Artificial Sequence: Synthetic oligonucleotide
  Antisense Strand to SEQ ID NO: 378407
cacuuucaacguaaucuca

SEQ ID NO: 378409 - RNA, 19 nt, Artificial Sequence
  Description of Artificial Sequence: Synthetic oligonucleotide
  Sense Strand Starting at position 759 of SEQ ID NO: 315880
gcuauugaauaguuggaau

SEQ ID NO: 378410 - RNA, 19 nt, Artificial Sequence
  Description of Artificial Sequence: Synthetic oligonucleotide
  Antisense Strand to SEQ ID NO: 378409
auuccaacuauucaauagc

SEQ ID NO: 378411 - RNA, 19 nt, Artificial Sequence
  Description of Artificial Sequence: Synthetic oligonucleotide
  Sense Strand Starting at position 759 of SEQ ID NO: 315892
uuggaaugacuucguuaac

SEQ ID NO: 378412 - RNA, 19 nt, Artificial Sequence
  Description of Artificial Sequence: Synthetic oligonucleotide
  Antisense Strand to SEQ ID NO: 378411
guuaacgaagucauuccaa

SEQ ID NO: 378413 - RNA, 19 nt, Artificial Sequence
  Description of Artificial Sequence: Synthetic oligonucleotide
  Sense Strand Starting at position 759 of SEQ ID NO: 315893
uggaaugacuucguuaacu

SEQ ID NO: 378414 - RNA, 19 nt, Artificial Sequence
  Description of Artificial Sequence: Synthetic oligonucleotide
  Antisense Strand to SEQ ID NO: 378413
aguuaacgaagucauucca

SEQ ID NO: 378415 - RNA, 19 nt, Artificial Sequence
  Description of Artificial Sequence: Synthetic oligonucleotide
  Sense Strand Starting at position 759 of SEQ ID NO: 315895
gaaugacuucguuaacuua

SEQ ID NO: 378416 - RNA, 19 nt, Artificial Sequence
  Description of Artificial Sequence: Synthetic oligonucleotide
  Antisense Strand to SEQ ID NO: 378415
uaaguuaacgaagucauuc

SEQ ID NO: 378417 - RNA, 19 nt, Artificial Sequence
  Description of Artificial Sequence: Synthetic oligonucleotide
  Sense Strand Starting at position 759 of SEQ ID NO: 315993
caucucuuugaggguaaag

SEQ ID NO: 378418 - RNA, 19 nt, Artificial Sequence
  Description of Artificial Sequence: Synthetic oligonucleotide
  Antisense Strand to SEQ ID NO: 378417
cuuuacccucaaagagaug

SEQ ID NO: 378419 - RNA, 19 nt, Artificial Sequence
  Description of Artificial Sequence: Synthetic oligonucleotide
  Sense Strand Starting at position 759 of SEQ ID NO: 316029
uugagacaaugcuucggaa

SEQ ID NO: 378420 - RNA, 19 nt, Artificial Sequence
  Description of Artificial Sequence: Synthetic oligonucleotide
  Antisense Strand to SEQ ID NO: 378419
uuccgaagcauugucucaa

SEQ ID NO: 378421 - RNA, 19 nt, Artificial Sequence
  Description of Artificial Sequence: Synthetic oligonucleotide
  Sense Strand Starting at position 759 of SEQ ID NO: 316160
cggugaaagaccgaacauu

SEQ ID NO: 378422 - RNA, 19 nt, Artificial Sequence
  Description of Artificial Sequence: Synthetic oligonucleotide
  Antisense Strand to SEQ ID NO: 378421
aauguucggucuuucaccg

SEQ ID NO: 378423 - RNA, 19 nt, Artificial Sequence
  Description of Artificial Sequence: Synthetic oligonucleotide
  Sense Strand Starting at position 759 of SEQ ID NO: 316369
acccaaaucuaguugaguc

SEQ ID NO: 378424 - RNA, 19 nt, Artificial Sequence
  Description of Artificial Sequence: Synthetic oligonucleotide
  Antisense Strand to SEQ ID NO: 378423
gacucaacuagauuugggu

SEQ ID NO: 378425 - RNA, 19 nt, Artificial Sequence
  Description of Artificial Sequence: Synthetic oligonucleotide
  Sense Strand Starting at position 759 of SEQ ID NO: 316430
cuucuuccuccagaagguu

SEQ ID NO: 378426 - RNA, 19 nt, Artificial Sequence
  Description of Artificial Sequence: Synthetic oligonucleotide
  Antisense Strand to SEQ ID NO: 378425
aaccuucuggaggaagaag

SEQ ID NO: 378427 - RNA, 19 nt, Artificial Sequence
  Description of Artificial Sequence: Synthetic oligonucleotide
  Sense Strand Starting at position 759 of SEQ ID NO: 316796
gcccgucuucgcccugaau

SEQ ID NO: 378428 - RNA, 19 nt, Artificial Sequence
  Description of Artificial Sequence: Synthetic oligonucleotide
  Antisense Strand to SEQ ID NO: 378427
auucagggcgaagacgggc

SEQ ID NO: 378429 - RNA, 19 nt, Artificial Sequence
  Description of Artificial Sequence: Synthetic oligonucleotide
  Sense Strand Starting at position 759 of SEQ ID NO: 317431
gucccauauccgcaagaua

SEQ ID NO: 378430 - RNA, 19 nt, Artificial Sequence
  Description of Artificial Sequence: Synthetic oligonucleotide
  Antisense Strand to SEQ ID NO: 378429
uaucuugcggauaugggac

SEQ ID NO: 378431 - RNA, 19 nt, Artificial Sequence
  Description of Artificial Sequence: Synthetic oligonucleotide
  Sense Strand Starting at position 759 of SEQ ID NO: 317434
ccauauccgcaagauaguu

SEQ ID NO: 378432 - RNA, 19 nt, Artificial Sequence
  Description of Artificial Sequence: Synthetic oligonucleotide
  Antisense Strand to SEQ ID NO: 378431
aacuaucuugcggauaugg

SEQ ID NO: 378433 - RNA, 19 nt, Artificial Sequence
  Description of Artificial Sequence: Synthetic oligonucleotide
  Sense Strand Starting at position 759 of SEQ ID NO: 317548
uguaaagaaaucuguggaa

SEQ ID NO: 378434 - RNA, 19 nt, Artificial Sequence
  Description of Artificial Sequence: Synthetic oligonucleotide
  Antisense Strand to SEQ ID NO: 378433
uuccacagauuucuuuaca

SEQ ID NO: 378435 - RNA, 19 nt, Artificial Sequence
  Description of Artificial Sequence: Synthetic oligonucleotide
  Sense Strand Starting at position 759 of SEQ ID NO: 317603
aguuaacaaucggccagau

SEQ ID NO: 378436 - RNA, 19 nt, Artificial Sequence
  Description of Artificial Sequence: Synthetic oligonucleotide
  Antisense Strand to SEQ ID NO: 378435
aucuggccgauuguuaacu

SEQ ID NO: 378437 - RNA, 19 nt, Artificial Sequence
  Description of Artificial Sequence: Synthetic oligonucleotide
  Sense Strand Starting at position 759 of SEQ ID NO: 317661
acgugauuggcccaaaccu

SEQ ID NO: 378438 - RNA, 19 nt, Artificial Sequence
  Description of Artificial Sequence: Synthetic oligonucleotide
  Antisense Strand to SEQ ID NO: 378437
agguuugggccaaucacgu

SEQ ID NO: 378439 - RNA, 19 nt, Artificial Sequence
  Description of Artificial Sequence: Synthetic oligonucleotide
  Sense Strand Starting at position 759 of SEQ ID NO: 318374
cagggucugcaguagacau

SEQ ID NO: 378440 - RNA, 19 nt, Artificial Sequence
  Description of Artificial Sequence: Synthetic oligonucleotide
  Antisense Strand to SEQ ID NO: 378439
augucuacugcagacccug

SEQ ID NO: 378441 - RNA, 19 nt, Artificial Sequence
  Description of Artificial Sequence: Synthetic oligonucleotide
  Sense Strand Starting at position 759 of SEQ ID NO: 318376
gggucugcaguagacauua

SEQ ID NO: 378442 - RNA, 19 nt, Artificial Sequence
  Description of Artificial Sequence: Synthetic oligonucleotide
  Antisense Strand to SEQ ID NO: 378441
uaaugucuacugcagaccc

SEQ ID NO: 378443 - RNA, 19 nt, Artificial Sequence
  Description of Artificial Sequence: Synthetic oligonucleotide
  Sense Strand Starting at position 759 of SEQ ID NO: 318522
gagggacugucacugauac

SEQ ID NO: 378444 - RNA, 19 nt, Artificial Sequence
  Description of Artificial Sequence: Synthetic oligonucleotide
  Antisense Strand to SEQ ID NO: 378443
guaucagugacagucccuc

SEQ ID NO: 378445 - RNA, 19 nt, Artificial Sequence
  Description of Artificial Sequence: Synthetic oligonucleotide
  Sense Strand Starting at position 759 of SEQ ID NO: 318548
acugcagagucacugugaa

SEQ ID NO: 378446 - RNA, 19 nt, Artificial Sequence
  Description of Artificial Sequence: Synthetic oligonucleotide
  Antisense Strand to SEQ ID NO: 378445
uucacagugacucugcagu

SEQ ID NO: 378447 - RNA, 19 nt, Artificial Sequence
  Description of Artificial Sequence: Synthetic oligonucleotide
  Sense Strand Starting at position 759 of SEQ ID NO: 318584
cuuucucagugauucuaag

SEQ ID NO: 378448 - RNA, 19 nt, Artificial Sequence
  Description of Artificial Sequence: Synthetic oligonucleotide
  Antisense Strand to SEQ ID NO: 378447
cuuagaaucacugagaaag

SEQ ID NO: 378449 - RNA, 19 nt, Artificial Sequence
  Description of Artificial Sequence: Synthetic oligonucleotide
  Sense Strand Starting at position 759 of SEQ ID NO: 318624
agggaagguuccguagaug

SEQ ID NO: 378450 - RNA, 19 nt, Artificial Sequence
  Description of Artificial Sequence: Synthetic oligonucleotide
  Antisense Strand to SEQ ID NO: 378449
caucuacggaaccuucccu

SEQ ID NO: 378451 - RNA, 19 nt, Artificial Sequence
  Description of Artificial Sequence: Synthetic oligonucleotide
  Sense Strand Starting at position 759 of SEQ ID NO: 318625
gggaagguuccguagaugu

SEQ ID NO: 378452 - RNA, 19 nt, Artificial Sequence
  Description of Artificial Sequence: Synthetic oligonucleotide
  Antisense Strand to SEQ ID NO: 378451
acaucuacggaaccuuccc

SEQ ID NO: 378453 - RNA, 19 nt, Artificial Sequence
  Description of Artificial Sequence: Synthetic oligonucleotide
  Sense Strand Starting at position 759 of SEQ ID NO: 318627
gaagguuccguagauguuc

SEQ ID NO: 378454 - RNA, 19 nt, Artificial Sequence
  Description of Artificial Sequence: Synthetic oligonucleotide
  Antisense Strand to SEQ ID NO: 378453
gaacaucuacggaaccuuc

SEQ ID NO: 378455 - RNA, 19 nt, Artificial Sequence
  Description of Artificial Sequence: Synthetic oligonucleotide
  Sense Strand Starting at position 759 of SEQ ID NO: 318757
gacagucucgauugaauga

SEQ ID NO: 378456 - RNA, 19 nt, Artificial Sequence
  Description of Artificial Sequence: Synthetic oligonucleotide
  Antisense Strand to SEQ ID NO: 378455
ucauucaaucgagacuguc

SEQ ID NO: 378457 - RNA, 19 nt, Artificial Sequence
  Description of Artificial Sequence: Synthetic oligonucleotide
  Sense Strand Starting at position 759 of SEQ ID NO: 318843
ugaguaggguucccugaaa

SEQ ID NO: 378458 - RNA, 19 nt, Artificial Sequence
  Description of Artificial Sequence: Synthetic oligonucleotide
  Antisense Strand to SEQ ID NO: 378457
uuucagggaacccuacuca

SEQ ID NO: 378459 - RNA, 19 nt, Artificial Sequence
  Description of Artificial Sequence: Synthetic oligonucleotide
  Sense Strand Starting at position 759 of SEQ ID NO: 318910
uggccauaugcuuaaaggu

SEQ ID NO: 378460 - RNA, 19 nt, Artificial Sequence
  Description of Artificial Sequence: Synthetic oligonucleotide
  Antisense Strand to SEQ ID NO: 378459
accuuuaagcauauggcca

SEQ ID NO: 378461 - RNA, 19 nt, Artificial Sequence
  Description of Artificial Sequence: Synthetic oligonucleotide
  Sense Strand Starting at position 759 of SEQ ID NO: 318927
guagaaucaagucgagaug

SEQ ID NO: 378462 - RNA, 19 nt, Artificial Sequence
  Description of Artificial Sequence: Synthetic oligonucleotide
  Antisense Strand to SEQ ID NO: 378461
caucucgacuugauucuac

SEQ ID NO: 378463 - RNA, 19 nt, Artificial Sequence
  Description of Artificial Sequence: Synthetic oligonucleotide
  Sense Strand Starting at position 759 of SEQ ID NO: 318930
gaaucaagucgagauguug

SEQ ID NO: 378464 - RNA, 19 nt, Artificial Sequence
  Description of Artificial Sequence: Synthetic oligonucleotide
  Antisense Strand to SEQ ID NO: 378463
caacaucucgacuugauuc

SEQ ID NO: 378465 - RNA, 19 nt, Artificial Sequence
  Description of Artificial Sequence: Synthetic oligonucleotide
  Sense Strand Starting at position 759 of SEQ ID NO: 318939
cgagauguugcugucugca

SEQ ID NO: 378466 - RNA, 19 nt, Artificial Sequence
  Description of Artificial Sequence: Synthetic oligonucleotide
  Antisense Strand to SEQ ID NO: 378465
ugcagacagcaacaucucg

SEQ ID NO: 378467 - RNA, 19 nt, Artificial Sequence
  Description of Artificial Sequence: Synthetic oligonucleotide
  Sense Strand Starting at position 759 of SEQ ID NO: 319070
gcauuuguaucccucuuua

SEQ ID NO: 378468 - RNA, 19 nt, Artificial Sequence
  Description of Artificial Sequence: Synthetic oligonucleotide
  Antisense Strand to SEQ ID NO: 378467
uaaagagggauacaaaugc

SEQ ID NO: 378469 - RNA, 19 nt, Artificial Sequence
  Description of Artificial Sequence: Synthetic oligonucleotide
  Sense Strand Starting at position 759 of SEQ ID NO: 319157
agaaauuguuguccaauug

SEQ ID NO: 378470 - RNA, 19 nt, Artificial Sequence
  Description of Artificial Sequence: Synthetic oligonucleotide
  Antisense Strand to SEQ ID NO: 378469
caauuggacaacaauuucu

SEQ ID NO: 378471 - RNA, 19 nt, Artificial Sequence
  Description of Artificial Sequence: Synthetic oligonucleotide
  Sense Strand Starting at position 759 of SEQ ID NO: 319158
gaaauuguuguccaauuga

SEQ ID NO: 378472 - RNA, 19 nt, Artificial Sequence
  Description of Artificial Sequence: Synthetic oligonucleotide
  Antisense Strand to SEQ ID NO: 378471
ucaauuggacaacaauuuc

SEQ ID NO: 378473 - RNA, 19 nt, Artificial Sequence
  Description of Artificial Sequence: Synthetic oligonucleotide
  Sense Strand Starting at position 759 of SEQ ID NO: 319207
ccauuccguccauaaugua

SEQ ID NO: 378474 - RNA, 19 nt, Artificial Sequence
  Description of Artificial Sequence: Synthetic oligonucleotide
  Antisense Strand to SEQ ID NO: 378473
uacauuauggacggaaugg

SEQ ID NO: 378475 - RNA, 19 nt, Artificial Sequence
  Description of Artificial Sequence: Synthetic oligonucleotide
  Sense Strand Starting at position 760 of SEQ ID NO: 315398
ugaauaagaucagaagaga

SEQ ID NO: 378476 - RNA, 19 nt, Artificial Sequence
  Description of Artificial Sequence: Synthetic oligonucleotide
  Antisense Strand to SEQ ID NO: 378475
ucucuucugaucuuauuca

SEQ ID NO: 378477 - RNA, 19 nt, Artificial Sequence
  Description of Artificial Sequence: Synthetic oligonucleotide
  Sense Strand Starting at position 760 of SEQ ID NO: 315654
agggaaggcuauccuuaca

SEQ ID NO: 378478 - RNA, 19 nt, Artificial Sequence
  Description of Artificial Sequence: Synthetic oligonucleotide
  Antisense Strand to SEQ ID NO: 378477
uguaaggauagccuucccu

SEQ ID NO: 378479 - RNA, 19 nt, Artificial Sequence
  Description of Artificial Sequence: Synthetic oligonucleotide
  Sense Strand Starting at position 760 of SEQ ID NO: 315837
guuacuccuuaguuuauuu

SEQ ID NO: 378480 - RNA, 19 nt, Artificial Sequence
  Description of Artificial Sequence: Synthetic oligonucleotide
  Antisense Strand to SEQ ID NO: 378479
aaauaaacuaaggaguaac

SEQ ID NO: 378481 - RNA, 19 nt, Artificial Sequence
  Description of Artificial Sequence: Synthetic oligonucleotide
  Sense Strand Starting at position 760 of SEQ ID NO: 315904
cuauuuaggugguugccaa

SEQ ID NO: 378482 - RNA, 19 nt, Artificial Sequence
  Description of Artificial Sequence: Synthetic oligonucleotide
  Antisense Strand to SEQ ID NO: 378481
uuggcaaccaccuaaauag

SEQ ID NO: 378483 - RNA, 19 nt, Artificial Sequence
  Description of Artificial Sequence: Synthetic oligonucleotide
  Sense Strand Starting at position 760 of SEQ ID NO: 315915
guugccaaacaguaauaaa

SEQ ID NO: 378484 - RNA, 19 nt, Artificial Sequence
  Description of Artificial Sequence: Synthetic oligonucleotide
  Antisense Strand to SEQ ID NO: 378483
uuuauuacuguuuggcaac

SEQ ID NO: 378485 - RNA, 19 nt, Artificial Sequence
  Description of Artificial Sequence: Synthetic oligonucleotide
  Sense Strand Starting at position 760 of SEQ ID NO: 315975
acuagaggcuucccauaua

SEQ ID NO: 378486 - RNA, 19 nt, Artificial Sequence
  Description of Artificial Sequence: Synthetic oligonucleotide
  Antisense Strand to SEQ ID NO: 378485
uauaugggaagccucuagu

SEQ ID NO: 378487 - RNA, 19 nt, Artificial Sequence
  Description of Artificial Sequence: Synthetic oligonucleotide
  Sense Strand Starting at position 760 of SEQ ID NO: 315978
agaggcuucccauauacuu

SEQ ID NO: 378488 - RNA, 19 nt, Artificial Sequence
  Description of Artificial Sequence: Synthetic oligonucleotide
  Antisense Strand to SEQ ID NO: 378487
aaguauaugggaagccucu

SEQ ID NO: 378489 - RNA, 19 nt, Artificial Sequence
  Description of Artificial Sequence: Synthetic oligonucleotide
  Sense Strand Starting at position 760 of SEQ ID NO: 316252
gggauucuuaagcaggcua

SEQ ID NO: 378490 - RNA, 19 nt, Artificial Sequence
  Description of Artificial Sequence: Synthetic oligonucleotide
  Antisense Strand to SEQ ID NO: 378489
uagccugcuuaagaauccc

SEQ ID NO: 378491 - RNA, 19 nt, Artificial Sequence
  Description of Artificial Sequence: Synthetic oligonucleotide
  Sense Strand Starting at position 760 of SEQ ID NO: 316348
agaucuaugugaucucaug

SEQ ID NO: 378492 - RNA, 19 nt, Artificial Sequence
  Description of Artificial Sequence: Synthetic oligonucleotide
  Antisense Strand to SEQ ID NO: 378491
caugagaucacauagaucu

SEQ ID NO: 378493 - RNA, 19 nt, Artificial Sequence
  Description of Artificial Sequence: Synthetic oligonucleotide
  Sense Strand Starting at position 760 of SEQ ID NO: 316359
aucucaugguauucuagaa

SEQ ID NO: 378494 - RNA, 19 nt, Artificial Sequence
  Description of Artificial Sequence: Synthetic oligonucleotide
  Antisense Strand to SEQ ID NO: 378493
uucuagaauaccaugagau

SEQ ID NO: 378495 - RNA, 19 nt, Artificial Sequence
  Description of Artificial Sequence: Synthetic oligonucleotide
  Sense Strand Starting at position 760 of SEQ ID NO: 316363
caugguauucuagaagucu

SEQ ID NO: 378496 - RNA, 19 nt, Artificial Sequence
  Description of Artificial Sequence: Synthetic oligonucleotide
  Antisense Strand to SEQ ID NO: 378495
agacuucuagaauaccaug

SEQ ID NO: 378497 - RNA, 19 nt, Artificial Sequence
  Description of Artificial Sequence: Synthetic oligonucleotide
  Sense Strand Starting at position 760 of SEQ ID NO: 316391
auugauuaggcccaauauc

SEQ ID NO: 378498 - RNA, 19 nt, Artificial Sequence
  Description of Artificial Sequence: Synthetic oligonucleotide
  Antisense Strand to SEQ ID NO: 378497
gauauugggccuaaucaau

SEQ ID NO: 378499 - RNA, 19 nt, Artificial Sequence
  Description of Artificial Sequence: Synthetic oligonucleotide
  Sense Strand Starting at position 760 of SEQ ID NO: 316457
ugaaaugugagcgaccuua

SEQ ID NO: 378500 - RNA, 19 nt, Artificial Sequence
  Description of Artificial Sequence: Synthetic oligonucleotide
  Antisense Strand to SEQ ID NO: 378499
uaaggucgcucacauuuca

SEQ ID NO: 378501 - RNA, 19 nt, Artificial Sequence
  Description of Artificial Sequence: Synthetic oligonucleotide
  Sense Strand Starting at position 760 of SEQ ID NO: 316502
accagagaugccuagucaa

SEQ ID NO: 378502 - RNA, 19 nt, Artificial Sequence
  Description of Artificial Sequence: Synthetic oligonucleotide
  Antisense Strand to SEQ ID NO: 378501
uugacuaggcaucucuggu

SEQ ID NO: 378503 - RNA, 19 nt, Artificial Sequence
  Description of Artificial Sequence: Synthetic oligonucleotide
  Sense Strand Starting at position 760 of SEQ ID NO: 316555
aaagguaucugauuaagca

SEQ ID NO: 378504 - RNA, 19 nt, Artificial Sequence
  Description of Artificial Sequence: Synthetic oligonucleotide
  Antisense Strand to SEQ ID NO: 378503
ugcuuaaucagauaccuuu

SEQ ID NO: 378505 - RNA, 19 nt, Artificial Sequence
  Description of Artificial Sequence: Synthetic oligonucleotide
  Sense Strand Starting at position 760 of SEQ ID NO: 316666
gggaaacugagcugguaaa

SEQ ID NO: 378506 - RNA, 19 nt, Artificial Sequence
  Description of Artificial Sequence: Synthetic oligonucleotide
  Antisense Strand to SEQ ID NO: 378505
uuuaccagcucaguuuccc

SEQ ID NO: 378507 - RNA, 19 nt, Artificial Sequence
  Description of Artificial Sequence: Synthetic oligonucleotide
  Sense Strand Starting at position 760 of SEQ ID NO: 316676
gcugguaaacuccagagau

SEQ ID NO: 378508 - RNA, 19 nt, Artificial Sequence
  Description of Artificial Sequence: Synthetic oligonucleotide
  Antisense Strand to SEQ ID NO: 378507
aucucuggaguuuaccagc

SEQ ID NO: 378509 - RNA, 19 nt, Artificial Sequence
  Description of Artificial Sequence: Synthetic oligonucleotide
  Sense Strand Starting at position 760 of SEQ ID NO: 316739
aaucaagguucuguuaaug

SEQ ID NO: 378510 - RNA, 19 nt, Artificial Sequence
  Description of Artificial Sequence: Synthetic oligonucleotide
  Antisense Strand to SEQ ID NO: 378509
cauuaacagaaccuugauu

SEQ ID NO: 378511 - RNA, 19 nt, Artificial Sequence
  Description of Artificial Sequence: Synthetic oligonucleotide
  Sense Strand Starting at position 760 of SEQ ID NO: 316831
ggauaaagcuuuccauacc

SEQ ID NO: 378512 - RNA, 19 nt, Artificial Sequence
  Description of Artificial Sequence: Synthetic oligonucleotide
  Antisense Strand to SEQ ID NO: 378511
gguauggaaagcuuuaucc

SEQ ID NO: 378513 - RNA, 19 nt, Artificial Sequence
  Description of Artificial Sequence: Synthetic oligonucleotide
  Sense Strand Starting at position 760 of SEQ ID NO: 317057
uaaguuucugauugugaaa

SEQ ID NO: 378514 - RNA, 19 nt, Artificial Sequence
  Description of Artificial Sequence: Synthetic oligonucleotide
  Antisense Strand to SEQ ID NO: 378513
uuucacaaucagaaacuua

SEQ ID NO: 378515 - RNA, 19 nt, Artificial Sequence
  Description of Artificial Sequence: Synthetic oligonucleotide
  Sense Strand Starting at position 760 of SEQ ID NO: 317752
auguaugaaguauguauga

SEQ ID NO: 378516 - RNA, 19 nt, Artificial Sequence
  Description of Artificial Sequence: Synthetic oligonucleotide
  Antisense Strand to SEQ ID NO: 378515
ucauacauacuucauacau

SEQ ID NO: 378517 - RNA, 19 nt, Artificial Sequence
  Description of Artificial Sequence: Synthetic oligonucleotide
  Sense Strand Starting at position 760 of SEQ ID NO: 317754
guaugaaguauguaugauu

SEQ ID NO: 378518 - RNA, 19 nt, Artificial Sequence
  Description of Artificial Sequence: Synthetic oligonucleotide
  Antisense Strand to SEQ ID NO: 378517
aaucauacauacuucauac

SEQ ID NO: 378519 - RNA, 19 nt, Artificial Sequence
  Description of Artificial Sequence: Synthetic oligonucleotide
  Sense Strand Starting at position 760 of SEQ ID NO: 317765
guaugauuaguacgaagau

SEQ ID NO: 378520 - RNA, 19 nt, Artificial Sequence
  Description of Artificial Sequence: Synthetic oligonucleotide
  Antisense Strand to SEQ ID NO: 378519
aucuucguacuaaucauac

SEQ ID NO: 378521 - RNA, 19 nt, Artificial Sequence
  Description of Artificial Sequence: Synthetic oligonucleotide
  Sense Strand Starting at position 760 of SEQ ID NO: 317806
ugcuaaacacugugaauaa

SEQ ID NO: 378522 - RNA, 19 nt, Artificial Sequence
  Description of Artificial Sequence: Synthetic oligonucleotide
  Antisense Strand to SEQ ID NO: 378521
uuauucacaguguuuagca

SEQ ID NO: 378523 - RNA, 19 nt, Artificial Sequence
  Description of Artificial Sequence: Synthetic oligonucleotide
  Sense Strand Starting at position 760 of SEQ ID NO: 317893
uguucuucugaugagugga

SEQ ID NO: 378524 - RNA, 19 nt, Artificial Sequence
  Description of Artificial Sequence: Synthetic oligonucleotide
  Antisense Strand to SEQ ID NO: 378523
uccacucaucagaagaaca

SEQ ID NO: 378525 - RNA, 19 nt, Artificial Sequence
  Description of Artificial Sequence: Synthetic oligonucleotide
  Sense Strand Starting at position 760 of SEQ ID NO: 317895
uucuucugaugaguggaau

SEQ ID NO: 378526 - RNA, 19 nt, Artificial Sequence
  Description of Artificial Sequence: Synthetic oligonucleotide
  Antisense Strand to SEQ ID NO: 378525
auuccacucaucagaagaa

SEQ ID NO: 378527 - RNA, 19 nt, Artificial Sequence
  Description of Artificial Sequence: Synthetic oligonucleotide
  Sense Strand Starting at position 760 of SEQ ID NO: 317947
auguacugacaucaguuau

SEQ ID NO: 378528 - RNA, 19 nt, Artificial Sequence
  Description of Artificial Sequence: Synthetic oligonucleotide
  Antisense Strand to SEQ ID NO: 378527
auaacugaugucaguacau

SEQ ID NO: 378529 - RNA, 19 nt, Artificial Sequence
  Description of Artificial Sequence: Synthetic oligonucleotide
  Sense Strand Starting at position 760 of SEQ ID NO: 318052
ugauauuugcauugccuuu

SEQ ID NO: 378530 - RNA, 19 nt, Artificial Sequence
  Description of Artificial Sequence: Synthetic oligonucleotide
  Antisense Strand to SEQ ID NO: 378529
aaaggcaaugcaaauauca

SEQ ID NO: 378531 - RNA, 19 nt, Artificial Sequence
  Description of Artificial Sequence: Synthetic oligonucleotide
  Sense Strand Starting at position 760 of SEQ ID NO: 318071
ugaauagaagcauggugaa

SEQ ID NO: 378532 - RNA, 19 nt, Artificial Sequence
  Description of Artificial Sequence: Synthetic oligonucleotide
  Antisense Strand to SEQ ID NO: 378531
uucaccaugcuucuauuca

SEQ ID NO: 378533 - RNA, 19 nt, Artificial Sequence
  Description of Artificial Sequence: Synthetic oligonucleotide
  Sense Strand Starting at position 760 of SEQ ID NO: 318084
ggugaauauuaacuuagau

SEQ ID NO: 378534 - RNA, 19 nt, Artificial Sequence
  Description of Artificial Sequence: Synthetic oligonucleotide
  Antisense Strand to SEQ ID NO: 378533
aucuaaguuaauauucacc

SEQ ID NO: 378535 - RNA, 19 nt, Artificial Sequence
  Description of Artificial Sequence: Synthetic oligonucleotide
  Sense Strand Starting at position 760 of SEQ ID NO: 318155
ggagacguaucuuuaaaua

SEQ ID NO: 378536 - RNA, 19 nt, Artificial Sequence
  Description of Artificial Sequence: Synthetic oligonucleotide
  Antisense Strand to SEQ ID NO: 378535
uauuuaaagauacgucucc

SEQ ID NO: 378537 - RNA, 19 nt, Artificial Sequence
  Description of Artificial Sequence: Synthetic oligonucleotide
  Sense Strand Starting at position 760 of SEQ ID NO: 318563
uuaugugugcuagcuuacu

SEQ ID NO: 378538 - RNA, 19 nt, Artificial Sequence
  Description of Artificial Sequence: Synthetic oligonucleotide
  Antisense Strand to SEQ ID NO: 378537
aguaagcuagcacacauaa

SEQ ID NO: 378539 - RNA, 19 nt, Artificial Sequence
  Description of Artificial Sequence: Synthetic oligonucleotide
  Sense Strand Starting at position 760 of SEQ ID NO: 318603
aguuguguaaaguacagaa

SEQ ID NO: 378540 - RNA, 19 nt, Artificial Sequence
  Description of Artificial Sequence: Synthetic oligonucleotide
  Antisense Strand to SEQ ID NO: 378539
uucuguacuuuacacaacu

SEQ ID NO: 378541 - RNA, 19 nt, Artificial Sequence
  Description of Artificial Sequence: Synthetic oligonucleotide
  Sense Strand Starting at position 760 of SEQ ID NO: 318605
uuguguaaaguacagaaau

SEQ ID NO: 378542 - RNA, 19 nt, Artificial Sequence
  Description of Artificial Sequence: Synthetic oligonucleotide
  Antisense Strand to SEQ ID NO: 378541
auuucuguacuuuacacaa

SEQ ID NO: 378543 - RNA, 19 nt, Artificial Sequence
  Description of Artificial Sequence: Synthetic oligonucleotide
  Sense Strand Starting at position 760 of SEQ ID NO: 318607
guguaaaguacagaaaugu

SEQ ID NO: 378544 - RNA, 19 nt, Artificial Sequence
  Description of Artificial Sequence: Synthetic oligonucleotide
  Antisense Strand to SEQ ID NO: 378543
acauuucuguacuuuacac

SEQ ID NO: 378545 - RNA, 19 nt, Artificial Sequence
  Description of Artificial Sequence: Synthetic oligonucleotide
  Sense Strand Starting at position 760 of SEQ ID NO: 318734
caguuucuucuaugaggga

SEQ ID NO: 378546 - RNA, 19 nt, Artificial Sequence
  Description of Artificial Sequence: Synthetic oligonucleotide
  Antisense Strand to SEQ ID NO: 378545
ucccucauagaagaaacug

SEQ ID NO: 378547 - RNA, 19 nt, Artificial Sequence
  Description of Artificial Sequence: Synthetic oligonucleotide
  Sense Strand Starting at position 760 of SEQ ID NO: 318819
ugguuugcuccagaauaga

SEQ ID NO: 378548 - RNA, 19 nt, Artificial Sequence
  Description of Artificial Sequence: Synthetic oligonucleotide
  Antisense Strand to SEQ ID NO: 378547
ucuauucuggagcaaacca

SEQ ID NO: 378549 - RNA, 19 nt, Artificial Sequence
  Description of Artificial Sequence: Synthetic oligonucleotide
  Sense Strand Starting at position 760 of SEQ ID NO: 318921
auugaauguuugccaauaa

SEQ ID NO: 378550 - RNA, 19 nt, Artificial Sequence
  Description of Artificial Sequence: Synthetic oligonucleotide
  Antisense Strand to SEQ ID NO: 378549
uuauuggcaaacauucaau

SEQ ID NO: 378551 - RNA, 19 nt, Artificial Sequence
  Description of Artificial Sequence: Synthetic oligonucleotide
  Sense Strand Starting at position 760 of SEQ ID NO: 319110
gguaaauuacgaugaaagu

SEQ ID NO: 378552 - RNA, 19 nt, Artificial Sequence
  Description of Artificial Sequence: Synthetic oligonucleotide
  Antisense Strand to SEQ ID NO: 378551
acuuucaucguaauuuacc

SEQ ID NO: 378553 - RNA, 19 nt, Artificial Sequence
  Description of Artificial Sequence: Synthetic oligonucleotide
  Sense Strand Starting at position 760 of SEQ ID NO: 319116
uuacgaugaaaguggaaua

SEQ ID NO: 378554 - RNA, 19 nt, Artificial Sequence
  Description of Artificial Sequence: Synthetic oligonucleotide
  Antisense Strand to SEQ ID NO: 378553
uauuccacuuucaucguaa

SEQ ID NO: 378555 - RNA, 19 nt, Artificial Sequence
  Description of Artificial Sequence: Synthetic oligonucleotide
  Sense Strand Starting at position 761 of SEQ ID NO: 315478
gcucuccuccuguagauaa

SEQ ID NO: 378556 - RNA, 19 nt, Artificial Sequence
  Description of Artificial Sequence: Synthetic oligonucleotide
  Antisense Strand to SEQ ID NO: 378555
uuaucuacaggaggagagc

SEQ ID NO: 378557 - RNA, 19 nt, Artificial Sequence
  Description of Artificial Sequence: Synthetic oligonucleotide
  Sense Strand Starting at position 761 of SEQ ID NO: 315608
gucccacacucaccugaua

SEQ ID NO: 378558 - RNA, 19 nt, Artificial Sequence
  Description of Artificial Sequence: Synthetic oligonucleotide
  Antisense Strand to SEQ ID NO: 378557
uaucaggugagugugggac

SEQ ID NO: 378559 - RNA, 19 nt, Artificial Sequence
  Description of Artificial Sequence: Synthetic oligonucleotide
  Sense Strand Starting at position 761 of SEQ ID NO: 315667
ggcagauagauccaggugu

SEQ ID NO: 378560 - RNA, 19 nt, Artificial Sequence
  Description of Artificial Sequence: Synthetic oligonucleotide
  Antisense Strand to SEQ ID NO: 378559
acaccuggaucuaucugcc

SEQ ID NO: 378561 - RNA, 19 nt, Artificial Sequence
  Description of Artificial Sequence: Synthetic oligonucleotide
  Sense Strand Starting at position 761 of SEQ ID NO: 315669
cagauagauccaggugucu

SEQ ID NO: 378562 - RNA, 19 nt, Artificial Sequence
  Description of Artificial Sequence: Synthetic oligonucleotide
  Antisense Strand to SEQ ID NO: 378561
agacaccuggaucuaucug

SEQ ID NO: 378563 - RNA, 19 nt, Artificial Sequence
  Description of Artificial Sequence: Synthetic oligonucleotide
  Sense Strand Starting at position 761 of SEQ ID NO: 315718
ggaugagcugcuuaaggcu

SEQ ID NO: 378564 - RNA, 19 nt, Artificial Sequence
  Description of Artificial Sequence: Synthetic oligonucleotide
  Antisense Strand to SEQ ID NO: 378563
agccuuaagcagcucaucc

SEQ ID NO: 378565 - RNA, 19 nt, Artificial Sequence
  Description of Artificial Sequence: Synthetic oligonucleotide
  Sense Strand Starting at position 761 of SEQ ID NO: 316202
ccaacugucuccucagaug

SEQ ID NO: 378566 - RNA, 19 nt, Artificial Sequence
  Description of Artificial Sequence: Synthetic oligonucleotide
  Antisense Strand to SEQ ID NO: 378565
caucugaggagacaguugg

SEQ ID NO: 378567 - RNA, 19 nt, Artificial Sequence
  Description of Artificial Sequence: Synthetic oligonucleotide
  Sense Strand Starting at position 761 of SEQ ID NO: 316546
ugagcuugaggccaauuaa

SEQ ID NO: 378568 - RNA, 19 nt, Artificial Sequence
  Description of Artificial Sequence: Synthetic oligonucleotide
  Antisense Strand to SEQ ID NO: 378567
uuaauuggccucaagcuca

SEQ ID NO: 378569 - RNA, 19 nt, Artificial Sequence
  Description of Artificial Sequence: Synthetic oligonucleotide
  Sense Strand Starting at position 761 of SEQ ID NO: 316560
auuaaacacuggucaguaa

SEQ ID NO: 378570 - RNA, 19 nt, Artificial Sequence
  Description of Artificial Sequence: Synthetic oligonucleotide
  Antisense Strand to SEQ ID NO: 378569
uuacugaccaguguuuaau

SEQ ID NO: 378571 - RNA, 19 nt, Artificial Sequence
  Description of Artificial Sequence: Synthetic oligonucleotide
  Sense Strand Starting at position 761 of SEQ ID NO: 316907
cggcauggucuggaaacga

SEQ ID NO: 378572 - RNA, 19 nt, Artificial Sequence
  Description of Artificial Sequence: Synthetic oligonucleotide
  Antisense Strand to SEQ ID NO: 378571
ucguuuccagaccaugccg

SEQ ID NO: 378573 - RNA, 19 nt, Artificial Sequence
  Description of Artificial Sequence: Synthetic oligonucleotide
  Sense Strand Starting at position 761 of SEQ ID NO: 317228
ccugguuugcgcgucacaa

SEQ ID NO: 378574 - RNA, 19 nt, Artificial Sequence
  Description of Artificial Sequence: Synthetic oligonucleotide
  Antisense Strand to SEQ ID NO: 378573
uugugacgcgcaaaccagg

SEQ ID NO: 378575 - RNA, 19 nt, Artificial Sequence
  Description of Artificial Sequence: Synthetic oligonucleotide
  Sense Strand Starting at position 761 of SEQ ID NO: 317229
cugguuugcgcgucacaac

SEQ ID NO: 378576 - RNA, 19 nt, Artificial Sequence
  Description of Artificial Sequence: Synthetic oligonucleotide
  Antisense Strand to SEQ ID NO: 378575
guugugacgcgcaaaccag

SEQ ID NO: 378577 - RNA, 19 nt, Artificial Sequence
  Description of Artificial Sequence: Synthetic oligonucleotide
  Sense Strand Starting at position 761 of SEQ ID NO: 317621
gucagaucuggugagagug

SEQ ID NO: 378578 - RNA, 19 nt, Artificial Sequence
  Description of Artificial Sequence: Synthetic oligonucleotide
  Antisense Strand to SEQ ID NO: 378577
cacucucaccagaucugac

SEQ ID NO: 378579 - RNA, 19 nt, Artificial Sequence
  Description of Artificial Sequence: Synthetic oligonucleotide
  Sense Strand Starting at position 761 of SEQ ID NO: 317705
aguaaaucaugacugcuuu

SEQ ID NO: 378580 - RNA, 19 nt, Artificial Sequence
  Description of Artificial Sequence: Synthetic oligonucleotide
  Antisense Strand to SEQ ID NO: 378579
aaagcagucaugauuuacu

SEQ ID NO: 378581 - RNA, 19 nt, Artificial Sequence
  Description of Artificial Sequence: Synthetic oligonucleotide
  Sense Strand Starting at position 761 of SEQ ID NO: 317706
guaaaucaugacugcuuua

SEQ ID NO: 378582 - RNA, 19 nt, Artificial Sequence
  Description of Artificial Sequence: Synthetic oligonucleotide
  Antisense Strand to SEQ ID NO: 378581
uaaagcagucaugauuuac

SEQ ID NO: 378583 - RNA, 19 nt, Artificial Sequence
  Description of Artificial Sequence: Synthetic oligonucleotide
  Sense Strand Starting at position 761 of SEQ ID NO: 317886
ucucaaugugagugacuca

SEQ ID NO: 378584 - RNA, 19 nt, Artificial Sequence
  Description of Artificial Sequence: Synthetic oligonucleotide
  Antisense Strand to SEQ ID NO: 378583
ugagucacucacauugaga

SEQ ID NO: 378585 - RNA, 19 nt, Artificial Sequence
  Description of Artificial Sequence: Synthetic oligonucleotide
  Sense Strand Starting at position 761 of SEQ ID NO: 317889
caaugugagugacucaguu

SEQ ID NO: 378586 - RNA, 19 nt, Artificial Sequence
  Description of Artificial Sequence: Synthetic oligonucleotide
  Antisense Strand to SEQ ID NO: 378585
aacugagucacucacauug

SEQ ID NO: 378587 - RNA, 19 nt, Artificial Sequence
  Description of Artificial Sequence: Synthetic oligonucleotide
  Sense Strand Starting at position 761 of SEQ ID NO: 317973
agaguaggcacucagugaa

SEQ ID NO: 378588 - RNA, 19 nt, Artificial Sequence
  Description of Artificial Sequence: Synthetic oligonucleotide
  Antisense Strand to SEQ ID NO: 378587
uucacugagugccuacucu

SEQ ID NO: 378589 - RNA, 19 nt, Artificial Sequence
  Description of Artificial Sequence: Synthetic oligonucleotide
  Sense Strand Starting at position 761 of SEQ ID NO: 318042
aggaauugucuaugaccuu

SEQ ID NO: 378590 - RNA, 19 nt, Artificial Sequence
  Description of Artificial Sequence: Synthetic oligonucleotide
  Antisense Strand to SEQ ID NO: 378589
aaggucauagacaauuccu

SEQ ID NO: 378591 - RNA, 19 nt, Artificial Sequence
  Description of Artificial Sequence: Synthetic oligonucleotide
  Sense Strand Starting at position 761 of SEQ ID NO: 318048
ugucuaugaccuugccaag

SEQ ID NO: 378592 - RNA, 19 nt, Artificial Sequence
  Description of Artificial Sequence: Synthetic oligonucleotide
  Antisense Strand to SEQ ID NO: 378591
cuuggcaaggucauagaca

SEQ ID NO: 378593 - RNA, 19 nt, Artificial Sequence
  Description of Artificial Sequence: Synthetic oligonucleotide
  Sense Strand Starting at position 761 of SEQ ID NO: 318065
aguagaugcauauggacau

SEQ ID NO: 378594 - RNA, 19 nt, Artificial Sequence
  Description of Artificial Sequence: Synthetic oligonucleotide
  Antisense Strand to SEQ ID NO: 378593
auguccauaugcaucuacu

SEQ ID NO: 378595 - RNA, 19 nt, Artificial Sequence
  Description of Artificial Sequence: Synthetic oligonucleotide
  Sense Strand Starting at position 761 of SEQ ID NO: 318094
gugucugcugugguucuaa

SEQ ID NO: 378596 - RNA, 19 nt, Artificial Sequence
  Description of Artificial Sequence: Synthetic oligonucleotide
  Antisense Strand to SEQ ID NO: 378595
uuagaaccacagcagacac

SEQ ID NO: 378597 - RNA, 19 nt, Artificial Sequence
  Description of Artificial Sequence: Synthetic oligonucleotide
  Sense Strand Starting at position 761 of SEQ ID NO: 318125
cuauuccagucuguaagua

SEQ ID NO: 378598 - RNA, 19 nt, Artificial Sequence
  Description of Artificial Sequence: Synthetic oligonucleotide
  Antisense Strand to SEQ ID NO: 378597
uacuuacagacuggaauag

SEQ ID NO: 378599 - RNA, 19 nt, Artificial Sequence
  Description of Artificial Sequence: Synthetic oligonucleotide
  Sense Strand Starting at position 761 of SEQ ID NO: 318130
ccagucuguaaguaugcau

SEQ ID NO: 378600 - RNA, 19 nt, Artificial Sequence
  Description of Artificial Sequence: Synthetic oligonucleotide
  Antisense Strand to SEQ ID NO: 378599
augcauacuuacagacugg

SEQ ID NO: 378601 - RNA, 19 nt, Artificial Sequence
  Description of Artificial Sequence: Synthetic oligonucleotide
  Sense Strand Starting at position 761 of SEQ ID NO: 318157
agggaauaugccugugaca

SEQ ID NO: 378602 - RNA, 19 nt, Artificial Sequence
  Description of Artificial Sequence: Synthetic oligonucleotide
  Antisense Strand to SEQ ID NO: 378601
ugucacaggcauauucccu

SEQ ID NO: 378603 - RNA, 19 nt, Artificial Sequence
  Description of Artificial Sequence: Synthetic oligonucleotide
  Sense Strand Starting at position 761 of SEQ ID NO: 318159
ggaauaugccugugacagu

SEQ ID NO: 378604 - RNA, 19 nt, Artificial Sequence
  Description of Artificial Sequence: Synthetic oligonucleotide
  Antisense Strand to SEQ ID NO: 378603
acugucacaggcauauucc

SEQ ID NO: 378605 - RNA, 19 nt, Artificial Sequence
  Description of Artificial Sequence: Synthetic oligonucleotide
  Sense Strand Starting at position 761 of SEQ ID NO: 318182
gaguguacucuuuacugug

SEQ ID NO: 378606 - RNA, 19 nt, Artificial Sequence
  Description of Artificial Sequence: Synthetic oligonucleotide
  Antisense Strand to SEQ ID NO: 378605
cacaguaaagaguacacuc

SEQ ID NO: 378607 - RNA, 19 nt, Artificial Sequence
  Description of Artificial Sequence: Synthetic oligonucleotide
  Sense Strand Starting at position 761 of SEQ ID NO: 318196
cugugaccaugacuuguau

SEQ ID NO: 378608 - RNA, 19 nt, Artificial Sequence
  Description of Artificial Sequence: Synthetic oligonucleotide
  Antisense Strand to SEQ ID NO: 378607
auacaagucauggucacag

SEQ ID NO: 378609 - RNA, 19 nt, Artificial Sequence
  Description of Artificial Sequence: Synthetic oligonucleotide
  Sense Strand Starting at position 761 of SEQ ID NO: 318198
gugaccaugacuuguauga

SEQ ID NO: 378610 - RNA, 19 nt, Artificial Sequence
  Description of Artificial Sequence: Synthetic oligonucleotide
  Antisense Strand to SEQ ID NO: 378609
ucauacaagucauggucac

SEQ ID NO: 378611 - RNA, 19 nt, Artificial Sequence
  Description of Artificial Sequence: Synthetic oligonucleotide
  Sense Strand Starting at position 761 of SEQ ID NO: 318202
ccaugacuuguaugacugu

SEQ ID NO: 378612 - RNA, 19 nt, Artificial Sequence
  Description of Artificial Sequence: Synthetic oligonucleotide
  Antisense Strand to SEQ ID NO: 378611
acagucauacaagucaugg

SEQ ID NO: 378613 - RNA, 19 nt, Artificial Sequence
  Description of Artificial Sequence: Synthetic oligonucleotide
  Sense Strand Starting at position 761 of SEQ ID NO: 318212
uaugacugugcauguauuu

SEQ ID NO: 378614 - RNA, 19 nt, Artificial Sequence
  Description of Artificial Sequence: Synthetic oligonucleotide
  Antisense Strand to SEQ ID NO: 378613
aaauacaugcacagucaua

SEQ ID NO: 378615 - RNA, 19 nt, Artificial Sequence
  Description of Artificial Sequence: Synthetic oligonucleotide
  Sense Strand Starting at position 761 of SEQ ID NO: 318256
ugcauuagguucucaauau

SEQ ID NO: 378616 - RNA, 19 nt, Artificial Sequence
  Description of Artificial Sequence: Synthetic oligonucleotide
  Antisense Strand to SEQ ID NO: 378615
auauugagaaccuaaugca

SEQ ID NO: 378617 - RNA, 19 nt, Artificial Sequence
  Description of Artificial Sequence: Synthetic oligonucleotide
  Sense Strand Starting at position 761 of SEQ ID NO: 318442
gagaaacuggcaggguuaa

SEQ ID NO: 378618 - RNA, 19 nt, Artificial Sequence
  Description of Artificial Sequence: Synthetic oligonucleotide
  Antisense Strand to SEQ ID NO: 378617
uuaacccugccaguuucuc

SEQ ID NO: 378619 - RNA, 19 nt, Artificial Sequence
  Description of Artificial Sequence: Synthetic oligonucleotide
  Sense Strand Starting at position 761 of SEQ ID NO: 318520
agggcuugacugcagagaa

SEQ ID NO: 378620 - RNA, 19 nt, Artificial Sequence
  Description of Artificial Sequence: Synthetic oligonucleotide
  Antisense Strand to SEQ ID NO: 378619
uucucugcagucaagcccu

SEQ ID NO: 378621 - RNA, 19 nt, Artificial Sequence
  Description of Artificial Sequence: Synthetic oligonucleotide
  Sense Strand Starting at position 761 of SEQ ID NO: 318573
caguguaguguccauauac

SEQ ID NO: 378622 - RNA, 19 nt, Artificial Sequence
  Description of Artificial Sequence: Synthetic oligonucleotide
  Antisense Strand to SEQ ID NO: 378621
guauauggacacuacacug

SEQ ID NO: 378623 - RNA, 19 nt, Artificial Sequence
  Description of Artificial Sequence: Synthetic oligonucleotide
  Sense Strand Starting at position 761 of SEQ ID NO: 318593
ccuugauggccugacauga

SEQ ID NO: 378624 - RNA, 19 nt, Artificial Sequence
  Description of Artificial Sequence: Synthetic oligonucleotide
  Antisense Strand to SEQ ID NO: 378623
ucaugucaggccaucaagg

SEQ ID NO: 378625 - RNA, 19 nt, Artificial Sequence
  Description of Artificial Sequence: Synthetic oligonucleotide
  Sense Strand Starting at position 761 of SEQ ID NO: 318606
acaugauuccuagguggga

SEQ ID NO: 378626 - RNA, 19 nt, Artificial Sequence
  Description of Artificial Sequence: Synthetic oligonucleotide
  Antisense Strand to SEQ ID NO: 378625
ucccaccuaggaaucaugu

SEQ ID NO: 378627 - RNA, 19 nt, Artificial Sequence
  Description of Artificial Sequence: Synthetic oligonucleotide
  Sense Strand Starting at position 761 of SEQ ID NO: 318607
caugauuccuaggugggaa

SEQ ID NO: 378628 - RNA, 19 nt, Artificial Sequence
  Description of Artificial Sequence: Synthetic oligonucleotide
  Antisense Strand to SEQ ID NO: 378627
uucccaccuaggaaucaug

SEQ ID NO: 378629 - RNA, 19 nt, Artificial Sequence
  Description of Artificial Sequence: Synthetic oligonucleotide
  Sense Strand Starting at position 761 of SEQ ID NO: 318702
caggacuuugcagguagaa

SEQ ID NO: 378630 - RNA, 19 nt, Artificial Sequence
  Description of Artificial Sequence: Synthetic oligonucleotide
  Antisense Strand to SEQ ID NO: 378629
uucuaccugcaaaguccug

SEQ ID NO: 378631 - RNA, 19 nt, Artificial Sequence
  Description of Artificial Sequence: Synthetic oligonucleotide
  Sense Strand Starting at position 761 of SEQ ID NO: 318955
accauuagaugggacaaau

SEQ ID NO: 378632 - RNA, 19 nt, Artificial Sequence
  Description of Artificial Sequence: Synthetic oligonucleotide
  Antisense Strand to SEQ ID NO: 378631
auuugucccaucuaauggu

SEQ ID NO: 378633 - RNA, 19 nt, Artificial Sequence
  Description of Artificial Sequence: Synthetic oligonucleotide
  Sense Strand Starting at position 761 of SEQ ID NO: 319041
cuaugaauuccaugcagac

SEQ ID NO: 378634 - RNA, 19 nt, Artificial Sequence
  Description of Artificial Sequence: Synthetic oligonucleotide
  Antisense Strand to SEQ ID NO: 378633
gucugcauggaauucauag

SEQ ID NO: 378635 - RNA, 19 nt, Artificial Sequence
  Description of Artificial Sequence: Synthetic oligonucleotide
  Sense Strand Starting at position 762 of SEQ ID NO: 315559
ggccacugaucauugauga

SEQ ID NO: 378636 - RNA, 19 nt, Artificial Sequence
  Description of Artificial Sequence: Synthetic oligonucleotide
  Antisense Strand to SEQ ID NO: 378635
ucaucaaugaucaguggcc

SEQ ID NO: 378637 - RNA, 19 nt, Artificial Sequence
  Description of Artificial Sequence: Synthetic oligonucleotide
  Sense Strand Starting at position 762 of SEQ ID NO: 315560
gccacugaucauugaugag

SEQ ID NO: 378638 - RNA, 19 nt, Artificial Sequence
  Description of Artificial Sequence: Synthetic oligonucleotide
  Antisense Strand to SEQ ID NO: 378637
cucaucaaugaucaguggc

SEQ ID NO: 378639 - RNA, 19 nt, Artificial Sequence
  Description of Artificial Sequence: Synthetic oligonucleotide
  Sense Strand Starting at position 762 of SEQ ID NO: 315569
cauugaugaggucagcaca

SEQ ID NO: 378640 - RNA, 19 nt, Artificial Sequence
  Description of Artificial Sequence: Synthetic oligonucleotide
  Antisense Strand to SEQ ID NO: 378639
ugugcugaccucaucaaug

SEQ ID NO: 378641 - RNA, 19 nt, Artificial Sequence
  Description of Artificial Sequence: Synthetic oligonucleotide
  Sense Strand Starting at position 762 of SEQ ID NO: 316010
gcucuccuccuguagauaa

SEQ ID NO: 378642 - RNA, 19 nt, Artificial Sequence
  Description of Artificial Sequence: Synthetic oligonucleotide
  Antisense Strand to SEQ ID NO: 378641
uuaucuacaggaggagagc

SEQ ID NO: 378643 - RNA, 19 nt, Artificial Sequence
  Description of Artificial Sequence: Synthetic oligonucleotide
  Sense Strand Starting at position 762 of SEQ ID NO: 316140
gucccacacucaccugaua

SEQ ID NO: 378644 - RNA, 19 nt, Artificial Sequence
  Description of Artificial Sequence: Synthetic oligonucleotide
  Antisense Strand to SEQ ID NO: 378643
uaucaggugagugugggac

SEQ ID NO: 378645 - RNA, 19 nt, Artificial Sequence
  Description of Artificial Sequence: Synthetic oligonucleotide
  Sense Strand Starting at position 762 of SEQ ID NO: 316199
ggcagauagauccaggugu

SEQ ID NO: 378646 - RNA, 19 nt, Artificial Sequence
  Description of Artificial Sequence: Synthetic oligonucleotide
  Antisense Strand to SEQ ID NO: 378645
acaccuggaucuaucugcc

SEQ ID NO: 378647 - RNA, 19 nt, Artificial Sequence
  Description of Artificial Sequence: Synthetic oligonucleotide
  Sense Strand Starting at position 762 of SEQ ID NO: 316201
cagauagauccaggugucu

SEQ ID NO: 378648 - RNA, 19 nt, Artificial Sequence
  Description of Artificial Sequence: Synthetic oligonucleotide
  Antisense Strand to SEQ ID NO: 378647
agacaccuggaucuaucug

SEQ ID NO: 378649 - RNA, 19 nt, Artificial Sequence
  Description of Artificial Sequence: Synthetic oligonucleotide
  Sense Strand Starting at position 762 of SEQ ID NO: 316250
ggaugagcugcuuaaggcu

SEQ ID NO: 378650 - RNA, 19 nt, Artificial Sequence
  Description of Artificial Sequence: Synthetic oligonucleotide
  Antisense Strand to SEQ ID NO: 378649
agccuuaagcagcucaucc

SEQ ID NO: 378651 - RNA, 19 nt, Artificial Sequence
  Description of Artificial Sequence: Synthetic oligonucleotide
  Sense Strand Starting at position 762 of SEQ ID NO: 316734
ccaacugucuccucagaug

SEQ ID NO: 378652 - RNA, 19 nt, Artificial Sequence
  Description of Artificial Sequence: Synthetic oligonucleotide
  Antisense Strand to SEQ ID NO: 378651
caucugaggagacaguugg

SEQ ID NO: 378653 - RNA, 19 nt, Artificial Sequence
  Description of Artificial Sequence: Synthetic oligonucleotide
  Sense Strand Starting at position 762 of SEQ ID NO: 317078
ugagcuugaggccaauuaa

SEQ ID NO: 378654 - RNA, 19 nt, Artificial Sequence
  Description of Artificial Sequence: Synthetic oligonucleotide
  Antisense Strand to SEQ ID NO: 378653
uuaauuggccucaagcuca

SEQ ID NO: 378655 - RNA, 19 nt, Artificial Sequence
  Description of Artificial Sequence: Synthetic oligonucleotide
  Sense Strand Starting at position 762 of SEQ ID NO: 317092
auuaaacacuggucaguaa

SEQ ID NO: 378656 - RNA, 19 nt, Artificial Sequence
  Description of Artificial Sequence: Synthetic oligonucleotide
  Antisense Strand to SEQ ID NO: 378655
uuacugaccaguguuuaau

SEQ ID NO: 378657 - RNA, 19 nt, Artificial Sequence
  Description of Artificial Sequence: Synthetic oligonucleotide
  Sense Strand Starting at position 762 of SEQ ID NO: 317439
cggcauggucuggaaacga

SEQ ID NO: 378658 - RNA, 19 nt, Artificial Sequence
  Description of Artificial Sequence: Synthetic oligonucleotide
  Antisense Strand to SEQ ID NO: 378657
ucguuuccagaccaugccg

SEQ ID NO: 378659 - RNA, 19 nt, Artificial Sequence
  Description of Artificial Sequence: Synthetic oligonucleotide
  Sense Strand Starting at position 762 of SEQ ID NO: 317760
ccugguuugcgcgucacaa

SEQ ID NO: 378660 - RNA, 19 nt, Artificial Sequence
  Description of Artificial Sequence: Synthetic oligonucleotide
  Antisense Strand to SEQ ID NO: 378659
uugugacgcgcaaaccagg

SEQ ID NO: 378661 - RNA, 19 nt, Artificial Sequence
  Description of Artificial Sequence: Synthetic oligonucleotide
  Sense Strand Starting at position 762 of SEQ ID NO: 317761
cugguuugcgcgucacaac

SEQ ID NO: 378662 - RNA, 19 nt, Artificial Sequence
  Description of Artificial Sequence: Synthetic oligonucleotide
  Antisense Strand to SEQ ID NO: 378661
guugugacgcgcaaaccag

SEQ ID NO: 378663 - RNA, 19 nt, Artificial Sequence
  Description of Artificial Sequence: Synthetic oligonucleotide
  Sense Strand Starting at position 762 of SEQ ID NO: 318153
gucagaucuggugagagug

SEQ ID NO: 378664 - RNA, 19 nt, Artificial Sequence
  Description of Artificial Sequence: Synthetic oligonucleotide
  Antisense Strand to SEQ ID NO: 378663
cacucucaccagaucugac

SEQ ID NO: 378665 - RNA, 19 nt, Artificial Sequence
  Description of Artificial Sequence: Synthetic oligonucleotide
  Sense Strand Starting at position 762 of SEQ ID NO: 318237
aguaaaucaugacugcuuu

SEQ ID NO: 378666 - RNA, 19 nt, Artificial Sequence
  Description of Artificial Sequence: Synthetic oligonucleotide
  Antisense Strand to SEQ ID NO: 378665
aaagcagucaugauuuacu

SEQ ID NO: 378667 - RNA, 19 nt, Artificial Sequence
  Description of Artificial Sequence: Synthetic oligonucleotide
  Sense Strand Starting at position 762 of SEQ ID NO: 318238
guaaaucaugacugcuuua

SEQ ID NO: 378668 - RNA, 19 nt, Artificial Sequence
  Description of Artificial Sequence: Synthetic oligonucleotide
  Antisense Strand to SEQ ID NO: 378667
uaaagcagucaugauuuac

SEQ ID NO: 378669 - RNA, 19 nt, Artificial Sequence
  Description of Artificial Sequence: Synthetic oligonucleotide
  Sense Strand Starting at position 762 of SEQ ID NO: 318418
ucucaaugugagugacuca

SEQ ID NO: 378670 - RNA, 19 nt, Artificial Sequence
  Description of Artificial Sequence: Synthetic oligonucleotide
  Antisense Strand to SEQ ID NO: 378669
ugagucacucacauugaga

SEQ ID NO: 378671 - RNA, 19 nt, Artificial Sequence
  Description of Artificial Sequence: Synthetic oligonucleotide
  Sense Strand Starting at position 762 of SEQ ID NO: 318421
caaugugagugacucaguu

SEQ ID NO: 378672 - RNA, 19 nt, Artificial Sequence
  Description of Artificial Sequence: Synthetic oligonucleotide
  Antisense Strand to SEQ ID NO: 378671
aacugagucacucacauug

SEQ ID NO: 378673 - RNA, 19 nt, Artificial Sequence
  Description of Artificial Sequence: Synthetic oligonucleotide
  Sense Strand Starting at position 762 of SEQ ID NO: 318505
agaguaggcacucagugaa

SEQ ID NO: 378674 - RNA, 19 nt, Artificial Sequence
  Description of Artificial Sequence: Synthetic oligonucleotide
  Antisense Strand to SEQ ID NO: 378673
uucacugagugccuacucu

SEQ ID NO: 378675 - RNA, 19 nt, Artificial Sequence
  Description of Artificial Sequence: Synthetic oligonucleotide
  Sense Strand Starting at position 762 of SEQ ID NO: 318574
aggaauugucuaugaccuu

SEQ ID NO: 378676 - RNA, 19 nt, Artificial Sequence
  Description of Artificial Sequence: Synthetic oligonucleotide
  Antisense Strand to SEQ ID NO: 378675
aaggucauagacaauuccu

SEQ ID NO: 378677 - RNA, 19 nt, Artificial Sequence
  Description of Artificial Sequence: Synthetic oligonucleotide
  Sense Strand Starting at position 762 of SEQ ID NO: 318580
ugucuaugaccuugccaag

SEQ ID NO: 378678 - RNA, 19 nt, Artificial Sequence
  Description of Artificial Sequence: Synthetic oligonucleotide
  Antisense Strand to SEQ ID NO: 378677
cuuggcaaggucauagaca

SEQ ID NO: 378679 - RNA, 19 nt, Artificial Sequence
  Description of Artificial Sequence: Synthetic oligonucleotide
  Sense Strand Starting at position 762 of SEQ ID NO: 318597
aguagaugcauauggacau

SEQ ID NO: 378680 - RNA, 19 nt, Artificial Sequence
  Description of Artificial Sequence: Synthetic oligonucleotide
  Antisense Strand to SEQ ID NO: 378679
auguccauaugcaucuacu

SEQ ID NO: 378681 - RNA, 19 nt, Artificial Sequence
  Description of Artificial Sequence: Synthetic oligonucleotide
  Sense Strand Starting at position 762 of SEQ ID NO: 318626
gugucugcugugguucuaa

SEQ ID NO: 378682 - RNA, 19 nt, Artificial Sequence
  Description of Artificial Sequence: Synthetic oligonucleotide
  Antisense Strand to SEQ ID NO: 378681
uuagaaccacagcagacac

SEQ ID NO: 378683 - RNA, 19 nt, Artificial Sequence
  Description of Artificial Sequence: Synthetic oligonucleotide
  Sense Strand Starting at position 762 of SEQ ID NO: 318657
cuauuccagucuguaagua

SEQ ID NO: 378684 - RNA, 19 nt, Artificial Sequence
  Description of Artificial Sequence: Synthetic oligonucleotide
  Antisense Strand to SEQ ID NO: 378683
uacuuacagacuggaauag

SEQ ID NO: 378685 - RNA, 19 nt, Artificial Sequence
  Description of Artificial Sequence: Synthetic oligonucleotide
  Sense Strand Starting at position 762 of SEQ ID NO: 318662
ccagucuguaaguaugcau

SEQ ID NO: 378686 - RNA, 19 nt, Artificial Sequence
  Description of Artificial Sequence: Synthetic oligonucleotide
  Antisense Strand to SEQ ID NO: 378685
augcauacuuacagacugg

SEQ ID NO: 378687 - RNA, 19 nt, Artificial Sequence
  Description of Artificial Sequence: Synthetic oligonucleotide
  Sense Strand Starting at position 762 of SEQ ID NO: 318689
agggaauaugccugugaca

SEQ ID NO: 378688 - RNA, 19 nt, Artificial Sequence
  Description of Artificial Sequence: Synthetic oligonucleotide
  Antisense Strand to SEQ ID NO: 378687
ugucacaggcauauucccu

SEQ ID NO: 378689 - RNA, 19 nt, Artificial Sequence
  Description of Artificial Sequence: Synthetic oligonucleotide
  Sense Strand Starting at position 762 of SEQ ID NO: 318691
ggaauaugccugugacagu

SEQ ID NO: 378690 - RNA, 19 nt, Artificial Sequence
  Description of Artificial Sequence: Synthetic oligonucleotide
  Antisense Strand to SEQ ID NO: 378689
acugucacaggcauauucc

SEQ ID NO: 378691 - RNA, 19 nt, Artificial Sequence
  Description of Artificial Sequence: Synthetic oligonucleotide
  Sense Strand Starting at position 762 of SEQ ID NO: 318714
gaguguacucuuuacugug

SEQ ID NO: 378692 - RNA, 19 nt, Artificial Sequence
  Description of Artificial Sequence: Synthetic oligonucleotide
  Antisense Strand to SEQ ID NO: 378691
cacaguaaagaguacacuc

SEQ ID NO: 378693 - RNA, 19 nt, Artificial Sequence
  Description of Artificial Sequence: Synthetic oligonucleotide
  Sense Strand Starting at position 762 of SEQ ID NO: 318728
cugugaccaugacuuguau

SEQ ID NO: 378694 - RNA, 19 nt, Artificial Sequence
  Description of Artificial Sequence: Synthetic oligonucleotide
  Antisense Strand to SEQ ID NO: 378693
auacaagucauggucacag

SEQ ID NO: 378695 - RNA, 19 nt, Artificial Sequence
  Description of Artificial Sequence: Synthetic oligonucleotide
  Sense Strand Starting at position 762 of SEQ ID NO: 318730
gugaccaugacuuguauga

SEQ ID NO: 378696 - RNA, 19 nt, Artificial Sequence
  Description of Artificial Sequence: Synthetic oligonucleotide
  Antisense Strand to SEQ ID NO: 378695
ucauacaagucauggucac

SEQ ID NO: 378697 - RNA, 19 nt, Artificial Sequence
  Description of Artificial Sequence: Synthetic oligonucleotide
  Sense Strand Starting at position 762 of SEQ ID NO: 318734
ccaugacuuguaugacugu

SEQ ID NO: 378698 - RNA, 19 nt, Artificial Sequence
  Description of Artificial Sequence: Synthetic oligonucleotide
  Antisense Strand to SEQ ID NO: 378697
acagucauacaagucaugg

SEQ ID NO: 378699 - RNA, 19 nt, Artificial Sequence
  Description of Artificial Sequence: Synthetic oligonucleotide
  Sense Strand Starting at position 762 of SEQ ID NO: 318744
uaugacugugcauguauuu

SEQ ID NO: 378700 - RNA, 19 nt, Artificial Sequence
  Description of Artificial Sequence: Synthetic oligonucleotide
  Antisense Strand to SEQ ID NO: 378699
aaauacaugcacagucaua

SEQ ID NO: 378701 - RNA, 19 nt, Artificial Sequence
  Description of Artificial Sequence: Synthetic oligonucleotide
  Sense Strand Starting at position 762 of SEQ ID NO: 318788
ugcauuagguucucaauau

SEQ ID NO: 378702 - RNA, 19 nt, Artificial Sequence
  Description of Artificial Sequence: Synthetic oligonucleotide
  Antisense Strand to SEQ ID NO: 378701
auauugagaaccuaaugca

SEQ ID NO: 378703 - RNA, 19 nt, Artificial Sequence
  Description of Artificial Sequence: Synthetic oligonucleotide
  Sense Strand Starting at position 762 of SEQ ID NO: 318974
gagaaacuggcaggguuaa

SEQ ID NO: 378704 - RNA, 19 nt, Artificial Sequence
  Description of Artificial Sequence: Synthetic oligonucleotide
  Antisense Strand to SEQ ID NO: 378703
uuaacccugccaguuucuc

SEQ ID NO: 378705 - RNA, 19 nt, Artificial Sequence
  Description of Artificial Sequence: Synthetic oligonucleotide
  Sense Strand Starting at position 762 of SEQ ID NO: 319052
agggcuugacugcagagaa

SEQ ID NO: 378706 - RNA, 19 nt, Artificial Sequence
  Description of Artificial Sequence: Synthetic oligonucleotide
  Antisense Strand to SEQ ID NO: 378705
uucucugcagucaagcccu

SEQ ID NO: 378707 - RNA, 19 nt, Artificial Sequence
  Description of Artificial Sequence: Synthetic oligonucleotide
  Sense Strand Starting at position 762 of SEQ ID NO: 319105
caguguaguguccauauac

SEQ ID NO: 378708 - RNA, 19 nt, Artificial Sequence
  Description of Artificial Sequence: Synthetic oligonucleotide
  Antisense Strand to SEQ ID NO: 378707
guauauggacacuacacug

SEQ ID NO: 378709 - RNA, 19 nt, Artificial Sequence
  Description of Artificial Sequence: Synthetic oligonucleotide
  Sense Strand Starting at position 762 of SEQ ID NO: 319125
ccuugauggccugacauga

SEQ ID NO: 378710 - RNA, 19 nt, Artificial Sequence
  Description of Artificial Sequence: Synthetic oligonucleotide
  Antisense Strand to SEQ ID NO: 378709
ucaugucaggccaucaagg

SEQ ID NO: 378711 - RNA, 19 nt, Artificial Sequence
  Description of Artificial Sequence: Synthetic oligonucleotide
  Sense Strand Starting at position 762 of SEQ ID NO: 319138
acaugauuccuagguggga

SEQ ID NO: 378712 - RNA, 19 nt, Artificial Sequence
  Description of Artificial Sequence: Synthetic oligonucleotide
  Antisense Strand to SEQ ID NO: 378711
ucccaccuaggaaucaugu

SEQ ID NO: 378713 - RNA, 19 nt, Artificial Sequence
  Description of Artificial Sequence: Synthetic oligonucleotide
  Sense Strand Starting at position 762 of SEQ ID NO: 319139
caugauuccuaggugggaa

SEQ ID NO: 378714 - RNA, 19 nt, Artificial Sequence
  Description of Artificial Sequence: Synthetic oligonucleotide
  Antisense Strand to SEQ ID NO: 378713
uucccaccuaggaaucaug

SEQ ID NO: 378715 - RNA, 19 nt, Artificial Sequence
  Description of Artificial Sequence: Synthetic oligonucleotide
  Sense Strand Starting at position 763 of SEQ ID NO: 315796
gaagucgaguucgaucuga

SEQ ID NO: 378716 - RNA, 19 nt, Artificial Sequence
  Description of Artificial Sequence: Synthetic oligonucleotide
  Antisense Strand to SEQ ID NO: 378715
ucagaucgaacucgacuuc

SEQ ID NO: 378717 - RNA, 19 nt, Artificial Sequence
  Description of Artificial Sequence: Synthetic oligonucleotide
  Sense Strand Starting at position 763 of SEQ ID NO: 315800
ucgaguucgaucugaguua

SEQ ID NO: 378718 - RNA, 19 nt, Artificial Sequence
  Description of Artificial Sequence: Synthetic oligonucleotide
  Antisense Strand to SEQ ID NO: 378717
uaacucagaucgaacucga

SEQ ID NO: 378719 - RNA, 19 nt, Artificial Sequence
  Description of Artificial Sequence: Synthetic oligonucleotide
  Sense Strand Starting at position 763 of SEQ ID NO: 315801
cgaguucgaucugaguuau

SEQ ID NO: 378720 - RNA, 19 nt, Artificial Sequence
  Description of Artificial Sequence: Synthetic oligonucleotide
  Antisense Strand to SEQ ID NO: 378719
auaacucagaucgaacucg

SEQ ID NO: 378721 - RNA, 19 nt, Artificial Sequence
  Description of Artificial Sequence: Synthetic oligonucleotide
  Sense Strand Starting at position 763 of SEQ ID NO: 315807
cgaucugaguuauaccaaa

SEQ ID NO: 378722 - RNA, 19 nt, Artificial Sequence
  Description of Artificial Sequence: Synthetic oligonucleotide
  Antisense Strand to SEQ ID NO: 378721
uuugguauaacucagaucg

SEQ ID NO: 378723 - RNA, 19 nt, Artificial Sequence
  Description of Artificial Sequence: Synthetic oligonucleotide
  Sense Strand Starting at position 763 of SEQ ID NO: 315963
cagcgugucugagcaugaa

SEQ ID NO: 378724 - RNA, 19 nt, Artificial Sequence
  Description of Artificial Sequence: Synthetic oligonucleotide
  Antisense Strand to SEQ ID NO: 378723
uucaugcucagacacgcug

SEQ ID NO: 378725 - RNA, 19 nt, Artificial Sequence
  Description of Artificial Sequence: Synthetic oligonucleotide
  Sense Strand Starting at position 763 of SEQ ID NO: 315966
cgugucugagcaugaauuc

SEQ ID NO: 378726 - RNA, 19 nt, Artificial Sequence
  Description of Artificial Sequence: Synthetic oligonucleotide
  Antisense Strand to SEQ ID NO: 378725
gaauucaugcucagacacg

SEQ ID NO: 378727 - RNA, 19 nt, Artificial Sequence
  Description of Artificial Sequence: Synthetic oligonucleotide
  Sense Strand Starting at position 763 of SEQ ID NO: 316233
cugacuccaccugaaguau

SEQ ID NO: 378728 - RNA, 19 nt, Artificial Sequence
  Description of Artificial Sequence: Synthetic oligonucleotide
  Antisense Strand to SEQ ID NO: 378727
auacuucagguggagucag

SEQ ID NO: 378729 - RNA, 19 nt, Artificial Sequence
  Description of Artificial Sequence: Synthetic oligonucleotide
  Sense Strand Starting at position 763 of SEQ ID NO: 316376
uagagagguccugggucua

SEQ ID NO: 378730 - RNA, 19 nt, Artificial Sequence
  Description of Artificial Sequence: Synthetic oligonucleotide
  Antisense Strand to SEQ ID NO: 378729
uagacccaggaccucucua

SEQ ID NO: 378731 - RNA, 19 nt, Artificial Sequence
  Description of Artificial Sequence: Synthetic oligonucleotide
  Sense Strand Starting at position 763 of SEQ ID NO: 317549
uggcgaggguccuucaaca

SEQ ID NO: 378732 - RNA, 19 nt, Artificial Sequence
  Description of Artificial Sequence: Synthetic oligonucleotide
  Antisense Strand to SEQ ID NO: 378731
uguugaaggacccucgcca

SEQ ID NO: 378733 - RNA, 19 nt, Artificial Sequence
  Description of Artificial Sequence: Synthetic oligonucleotide
  Sense Strand Starting at position 763 of SEQ ID NO: 317595
ccuuguagcgcuuaucaaa

SEQ ID NO: 378734 - RNA, 19 nt, Artificial Sequence
  Description of Artificial Sequence: Synthetic oligonucleotide
  Antisense Strand to SEQ ID NO: 378733
uuugauaagcgcuacaagg

SEQ ID NO: 378735 - RNA, 19 nt, Artificial Sequence
  Description of Artificial Sequence: Synthetic oligonucleotide
  Sense Strand Starting at position 763 of SEQ ID NO: 317607
uaucaaaugccaggugcua

SEQ ID NO: 378736 - RNA, 19 nt, Artificial Sequence
  Description of Artificial Sequence: Synthetic oligonucleotide
  Antisense Strand to SEQ ID NO: 378735
uagcaccuggcauuugaua

SEQ ID NO: 378737 - RNA, 19 nt, Artificial Sequence
  Description of Artificial Sequence: Synthetic oligonucleotide
  Sense Strand Starting at position 763 of SEQ ID NO: 317620
gugcuacucugucgcuuua

SEQ ID NO: 378738 - RNA, 19 nt, Artificial Sequence
  Description of Artificial Sequence: Synthetic oligonucleotide
  Antisense Strand to SEQ ID NO: 378737
uaaagcgacagaguagcac

SEQ ID NO: 378739 - RNA, 19 nt, Artificial Sequence
  Description of Artificial Sequence: Synthetic oligonucleotide
  Sense Strand Starting at position 763 of SEQ ID NO: 317670
agcuguuuguggaguguga

SEQ ID NO: 378740 - RNA, 19 nt, Artificial Sequence
  Description of Artificial Sequence: Synthetic oligonucleotide
  Antisense Strand to SEQ ID NO: 378739
ucacacuccacaaacagcu

SEQ ID NO: 378741 - RNA, 19 nt, Artificial Sequence
  Description of Artificial Sequence: Synthetic oligonucleotide
  Sense Strand Starting at position 763 of SEQ ID NO: 317681
gagugugauggcgggaagu

SEQ ID NO: 378742 - RNA, 19 nt, Artificial Sequence
  Description of Artificial Sequence: Synthetic oligonucleotide
  Antisense Strand to SEQ ID NO: 378741
acuucccgccaucacacuc

SEQ ID NO: 378743 - RNA, 19 nt, Artificial Sequence
  Description of Artificial Sequence: Synthetic oligonucleotide
  Sense Strand Starting at position 763 of SEQ ID NO: 317682
agugugauggcgggaaguu

SEQ ID NO: 378744 - RNA, 19 nt, Artificial Sequence
  Description of Artificial Sequence: Synthetic oligonucleotide
  Antisense Strand to SEQ ID NO: 378743
aacuucccgccaucacacu

SEQ ID NO: 378745 - RNA, 19 nt, Artificial Sequence
  Description of Artificial Sequence: Synthetic oligonucleotide
  Sense Strand Starting at position 763 of SEQ ID NO: 317683
gugugauggcgggaaguua

SEQ ID NO: 378746 - RNA, 19 nt, Artificial Sequence
  Description of Artificial Sequence: Synthetic oligonucleotide
  Antisense Strand to SEQ ID NO: 378745
uaacuucccgccaucacac

SEQ ID NO: 378747 - RNA, 19 nt, Artificial Sequence
  Description of Artificial Sequence: Synthetic oligonucleotide
  Sense Strand Starting at position 763 of SEQ ID NO: 317709
gcaggacuagccugaaaua

SEQ ID NO: 378748 - RNA, 19 nt, Artificial Sequence
  Description of Artificial Sequence: Synthetic oligonucleotide
  Antisense Strand to SEQ ID NO: 378747
uauuucaggcuaguccugc

SEQ ID NO: 378749 - RNA, 19 nt, Artificial Sequence
  Description of Artificial Sequence: Synthetic oligonucleotide
  Sense Strand Starting at position 763 of SEQ ID NO: 317871
ucacauauguuguuucuuu

SEQ ID NO: 378750 - RNA, 19 nt, Artificial Sequence
  Description of Artificial Sequence: Synthetic oligonucleotide
  Antisense Strand to SEQ ID NO: 378749
aaagaaacaacauauguga

SEQ ID NO: 378751 - RNA, 19 nt, Artificial Sequence
  Description of Artificial Sequence: Synthetic oligonucleotide
  Sense Strand Starting at position 763 of SEQ ID NO: 318614
caucauagcucugagcuga

SEQ ID NO: 378752 - RNA, 19 nt, Artificial Sequence
  Description of Artificial Sequence: Synthetic oligonucleotide
  Antisense Strand to SEQ ID NO: 378751
ucagcucagagcuaugaug

SEQ ID NO: 378753 - RNA, 19 nt, Artificial Sequence
  Description of Artificial Sequence: Synthetic oligonucleotide
  Sense Strand Starting at position 763 of SEQ ID NO: 318910
gucuccuauucccaaguga

SEQ ID NO: 378754 - RNA, 19 nt, Artificial Sequence
  Description of Artificial Sequence: Synthetic oligonucleotide
  Antisense Strand to SEQ ID NO: 378753
ucacuugggaauaggagac

SEQ ID NO: 378755 - RNA, 19 nt, Artificial Sequence
  Description of Artificial Sequence: Synthetic oligonucleotide
  Sense Strand Starting at position 763 of SEQ ID NO: 318984
cuaaguggucucgcgguua

SEQ ID NO: 378756 - RNA, 19 nt, Artificial Sequence
  Description of Artificial Sequence: Synthetic oligonucleotide
  Antisense Strand to SEQ ID NO: 378755
uaaccgcgagaccacuuag

SEQ ID NO: 378757 - RNA, 19 nt, Artificial Sequence
  Description of Artificial Sequence: Synthetic oligonucleotide
  Sense Strand Starting at position 763 of SEQ ID NO: 318987
aguggucucgcgguuauca

SEQ ID NO: 378758 - RNA, 19 nt, Artificial Sequence
  Description of Artificial Sequence: Synthetic oligonucleotide
  Antisense Strand to SEQ ID NO: 378757
ugauaaccgcgagaccacu

SEQ ID NO: 378759 - RNA, 19 nt, Artificial Sequence
  Description of Artificial Sequence: Synthetic oligonucleotide
  Sense Strand Starting at position 763 of SEQ ID NO: 318997
cgguuaucaggacacucua

SEQ ID NO: 378760 - RNA, 19 nt, Artificial Sequence
  Description of Artificial Sequence: Synthetic oligonucleotide
  Antisense Strand to SEQ ID NO: 378759
uagaguguccugauaaccg

SEQ ID NO: 378761 - RNA, 19 nt, Artificial Sequence
  Description of Artificial Sequence: Synthetic oligonucleotide
  Sense Strand Starting at position 763 of SEQ ID NO: 319050
cuggguagccaugaaucuu

SEQ ID NO: 378762 - RNA, 19 nt, Artificial Sequence
  Description of Artificial Sequence: Synthetic oligonucleotide
  Antisense Strand to SEQ ID NO: 378761
aagauucauggcuacccag

SEQ ID NO: 378763 - RNA, 19 nt, Artificial Sequence
  Description of Artificial Sequence: Synthetic oligonucleotide
  Sense Strand Starting at position 763 of SEQ ID NO: 319058
ccaugaaucuuguggcgac

SEQ ID NO: 378764 - RNA, 19 nt, Artificial Sequence
  Description of Artificial Sequence: Synthetic oligonucleotide
  Antisense Strand to SEQ ID NO: 378763
gucgccacaagauucaugg

SEQ ID NO: 378765 - RNA, 19 nt, Artificial Sequence
  Description of Artificial Sequence: Synthetic oligonucleotide
  Sense Strand Starting at position 763 of SEQ ID NO: 319059
caugaaucuuguggcgacu

SEQ ID NO: 378766 - RNA, 19 nt, Artificial Sequence
  Description of Artificial Sequence: Synthetic oligonucleotide
  Antisense Strand to SEQ ID NO: 378765
agucgccacaagauucaug

SEQ ID NO: 378767 - RNA, 19 nt, Artificial Sequence
  Description of Artificial Sequence: Synthetic oligonucleotide
  Sense Strand Starting at position 763 of SEQ ID NO: 319191
ggacuuugcugcuccagga

SEQ ID NO: 378768 - RNA, 19 nt, Artificial Sequence
  Description of Artificial Sequence: Synthetic oligonucleotide
  Antisense Strand to SEQ ID NO: 378767
uccuggagcagcaaagucc

SEQ ID NO: 378769 - RNA, 19 nt, Artificial Sequence
  Description of Artificial Sequence: Synthetic oligonucleotide
  Sense Strand Starting at position 764 of SEQ ID NO: 315318
gguuuagacugaggagaug

SEQ ID NO: 378770 - RNA, 19 nt, Artificial Sequence
  Description of Artificial Sequence: Synthetic oligonucleotide
  Antisense Strand to SEQ ID NO: 378769
caucuccucagucuaaacc

SEQ ID NO: 378771 - RNA, 19 nt, Artificial Sequence
  Description of Artificial Sequence: Synthetic oligonucleotide
  Sense Strand Starting at position 764 of SEQ ID NO: 315330
ggagaugaauaauagacaa

SEQ ID NO: 378772 - RNA, 19 nt, Artificial Sequence
  Description of Artificial Sequence: Synthetic oligonucleotide
  Antisense Strand to SEQ ID NO: 378771
uugucuauuauucaucucc

SEQ ID NO: 378773 - RNA, 19 nt, Artificial Sequence
  Description of Artificial Sequence: Synthetic oligonucleotide
  Sense Strand Starting at position 764 of SEQ ID NO: 315342
uagacaaagucagaagguu

SEQ ID NO: 378774 - RNA, 19 nt, Artificial Sequence
  Description of Artificial Sequence: Synthetic oligonucleotide
  Antisense Strand to SEQ ID NO: 378773
aaccuucugacuuugucua

SEQ ID NO: 378775 - RNA, 19 nt, Artificial Sequence
  Description of Artificial Sequence: Synthetic oligonucleotide
  Sense Strand Starting at position 764 of SEQ ID NO: 315406
uguggaacugucuaaagua

SEQ ID NO: 378776 - RNA, 19 nt, Artificial Sequence
  Description of Artificial Sequence: Synthetic oligonucleotide
  Antisense Strand to SEQ ID NO: 378775
uacuuuagacaguuccaca

SEQ ID NO: 378777 - RNA, 19 nt, Artificial Sequence
  Description of Artificial Sequence: Synthetic oligonucleotide
  Sense Strand Starting at position 764 of SEQ ID NO: 315414
ugucuaaaguaguaacuaa

SEQ ID NO: 378778 - RNA, 19 nt, Artificial Sequence
  Description of Artificial Sequence: Synthetic oligonucleotide
  Antisense Strand to SEQ ID NO: 378777
uuaguuacuacuuuagaca

SEQ ID NO: 378779 - RNA, 19 nt, Artificial Sequence
  Description of Artificial Sequence: Synthetic oligonucleotide
  Sense Strand Starting at position 764 of SEQ ID NO: 315446
gcaaaucaugccuggcacu

SEQ ID NO: 378780 - RNA, 19 nt, Artificial Sequence
  Description of Artificial Sequence: Synthetic oligonucleotide
  Antisense Strand to SEQ ID NO: 378779
agugccaggcaugauuugc

SEQ ID NO: 378781 - RNA, 19 nt, Artificial Sequence
  Description of Artificial Sequence: Synthetic oligonucleotide
  Sense Strand Starting at position 764 of SEQ ID NO: 315760
gaaggaauaucgcucuguu

SEQ ID NO: 378782 - RNA, 19 nt, Artificial Sequence
  Description of Artificial Sequence: Synthetic oligonucleotide
  Antisense Strand to SEQ ID NO: 378781
aacagagcgauauuccuuc

SEQ ID NO: 378783 - RNA, 19 nt, Artificial Sequence
  Description of Artificial Sequence: Synthetic oligonucleotide
  Sense Strand Starting at position 764 of SEQ ID NO: 316022
guucccagccuugacuaaa

SEQ ID NO: 378784 - RNA, 19 nt, Artificial Sequence
  Description of Artificial Sequence: Synthetic oligonucleotide
  Antisense Strand to SEQ ID NO: 378783
uuuagucaaggcugggaac

SEQ ID NO: 378785 - RNA, 19 nt, Artificial Sequence
  Description of Artificial Sequence: Synthetic oligonucleotide
  Sense Strand Starting at position 764 of SEQ ID NO: 316055
ucccuaauuuagcgucaaa

SEQ ID NO: 378786 - RNA, 19 nt, Artificial Sequence
  Description of Artificial Sequence: Synthetic oligonucleotide
  Antisense Strand to SEQ ID NO: 378785
uuugacgcuaaauuaggga

SEQ ID NO: 378787 - RNA, 19 nt, Artificial Sequence
  Description of Artificial Sequence: Synthetic oligonucleotide
  Sense Strand Starting at position 764 of SEQ ID NO: 316201
ggauuaugagcucgcagag

SEQ ID NO: 378788 - RNA, 19 nt, Artificial Sequence
  Description of Artificial Sequence: Synthetic oligonucleotide
  Antisense Strand to SEQ ID NO: 378787
cucugcgagcucauaaucc

SEQ ID NO: 378789 - RNA, 19 nt, Artificial Sequence
  Description of Artificial Sequence: Synthetic oligonucleotide
  Sense Strand Starting at position 764 of SEQ ID NO: 316267
ggcgacagcacucgauaaa

SEQ ID NO: 378790 - RNA, 19 nt, Artificial Sequence
  Description of Artificial Sequence: Synthetic oligonucleotide
  Antisense Strand to SEQ ID NO: 378789
uuuaucgagugcugucgcc

SEQ ID NO: 378791 - RNA, 19 nt, Artificial Sequence
  Description of Artificial Sequence: Synthetic oligonucleotide
  Sense Strand Starting at position 764 of SEQ ID NO: 316270
gacagcacucgauaaacgu

SEQ ID NO: 378792 - RNA, 19 nt, Artificial Sequence
  Description of Artificial Sequence: Synthetic oligonucleotide
  Antisense Strand to SEQ ID NO: 378791
acguuuaucgagugcuguc

SEQ ID NO: 378793 - RNA, 19 nt, Artificial Sequence
  Description of Artificial Sequence: Synthetic oligonucleotide
  Sense Strand Starting at position 764 of SEQ ID NO: 316278
ucgauaaacguuuacuaaa

SEQ ID NO: 378794 - RNA, 19 nt, Artificial Sequence
  Description of Artificial Sequence: Synthetic oligonucleotide
  Antisense Strand to SEQ ID NO: 378793
uuuaguaaacguuuaucga

SEQ ID NO: 378795 - RNA, 19 nt, Artificial Sequence
  Description of Artificial Sequence: Synthetic oligonucleotide
  Sense Strand Starting at position 764 of SEQ ID NO: 316292
cuaaauaauuggguuaaug

SEQ ID NO: 378796 - RNA, 19 nt, Artificial Sequence
  Description of Artificial Sequence: Synthetic oligonucleotide
  Antisense Strand to SEQ ID NO: 378795
cauuaacccaauuauuuag

SEQ ID NO: 378797 - RNA, 19 nt, Artificial Sequence
  Description of Artificial Sequence: Synthetic oligonucleotide
  Sense Strand Starting at position 764 of SEQ ID NO: 316415
ugugauauaguccggacua

SEQ ID NO: 378798 - RNA, 19 nt, Artificial Sequence
  Description of Artificial Sequence: Synthetic oligonucleotide
  Antisense Strand to SEQ ID NO: 378797
uaguccggacuauaucaca

SEQ ID NO: 378799 - RNA, 19 nt, Artificial Sequence
  Description of Artificial Sequence: Synthetic oligonucleotide
  Sense Strand Starting at position 764 of SEQ ID NO: 316416
gugauauaguccggacuaa

SEQ ID NO: 378800 - RNA, 19 nt, Artificial Sequence
  Description of Artificial Sequence: Synthetic oligonucleotide
  Antisense Strand to SEQ ID NO: 378799
uuaguccggacuauaucac

SEQ ID NO: 378801 - RNA, 19 nt, Artificial Sequence
  Description of Artificial Sequence: Synthetic oligonucleotide
  Sense Strand Starting at position 764 of SEQ ID NO: 316455
ccagcaauucuccgaucuu

SEQ ID NO: 378802 - RNA, 19 nt, Artificial Sequence
  Description of Artificial Sequence: Synthetic oligonucleotide
  Antisense Strand to SEQ ID NO: 378801
aagaucggagaauugcugg

SEQ ID NO: 378803 - RNA, 19 nt, Artificial Sequence
  Description of Artificial Sequence: Synthetic oligonucleotide
  Sense Strand Starting at position 764 of SEQ ID NO: 316545
gagugaggacuccacuugu

SEQ ID NO: 378804 - RNA, 19 nt, Artificial Sequence
  Description of Artificial Sequence: Synthetic oligonucleotide
  Antisense Strand to SEQ ID NO: 378803
acaaguggaguccucacuc

SEQ ID NO: 378805 - RNA, 19 nt, Artificial Sequence
  Description of Artificial Sequence: Synthetic oligonucleotide
  Sense Strand Starting at position 764 of SEQ ID NO: 316578
gcguacagcuuccguaaca

SEQ ID NO: 378806 - RNA, 19 nt, Artificial Sequence
  Description of Artificial Sequence: Synthetic oligonucleotide
  Antisense Strand to SEQ ID NO: 378805
uguuacggaagcuguacgc

SEQ ID NO: 378807 - RNA, 19 nt, Artificial Sequence
  Description of Artificial Sequence: Synthetic oligonucleotide
  Sense Strand Starting at position 764 of SEQ ID NO: 316634
cacugcuucgccgauuuaa

SEQ ID NO: 378808 - RNA, 19 nt, Artificial Sequence
  Description of Artificial Sequence: Synthetic oligonucleotide
  Antisense Strand to SEQ ID NO: 378807
uuaaaucggcgaagcagug

SEQ ID NO: 378809 - RNA, 19 nt, Artificial Sequence
  Description of Artificial Sequence: Synthetic oligonucleotide
  Sense Strand Starting at position 764 of SEQ ID NO: 316696
cugccuacucugggagaga

SEQ ID NO: 378810 - RNA, 19 nt, Artificial Sequence
  Description of Artificial Sequence: Synthetic oligonucleotide
  Antisense Strand to SEQ ID NO: 378809
ucucucccagaguaggcag

SEQ ID NO: 378811 - RNA, 19 nt, Artificial Sequence
  Description of Artificial Sequence: Synthetic oligonucleotide
  Sense Strand Starting at position 764 of SEQ ID NO: 317254
ggcggcgugucgucaucaa

SEQ ID NO: 378812 - RNA, 19 nt, Artificial Sequence
  Description of Artificial Sequence: Synthetic oligonucleotide
  Antisense Strand to SEQ ID NO: 378811
uugaugacgacacgccgcc

SEQ ID NO: 378813 - RNA, 19 nt, Artificial Sequence
  Description of Artificial Sequence: Synthetic oligonucleotide
  Sense Strand Starting at position 764 of SEQ ID NO: 319180
cgccucuuugccguugaaa

SEQ ID NO: 378814 - RNA, 19 nt, Artificial Sequence
  Description of Artificial Sequence: Synthetic oligonucleotide
  Antisense Strand to SEQ ID NO: 378813
uuucaacggcaaagaggcg

SEQ ID NO: 378815 - RNA, 19 nt, Artificial Sequence
  Description of Artificial Sequence: Synthetic oligonucleotide
  Sense Strand Starting at position 764 of SEQ ID NO: 319181
gccucuuugccguugaaac

SEQ ID NO: 378816 - RNA, 19 nt, Artificial Sequence
  Description of Artificial Sequence: Synthetic oligonucleotide
  Antisense Strand to SEQ ID NO: 378815
guuucaacggcaaagaggc

SEQ ID NO: 378817 - RNA, 19 nt, Artificial Sequence
  Description of Artificial Sequence: Synthetic oligonucleotide
  Sense Strand Starting at position 764 of SEQ ID NO: 319182
ccucuuugccguugaaaca

SEQ ID NO: 378818 - RNA, 19 nt, Artificial Sequence
  Description of Artificial Sequence: Synthetic oligonucleotide
  Antisense Strand to SEQ ID NO: 378817
uguuucaacggcaaagagg

SEQ ID NO: 378819 - RNA, 19 nt, Artificial Sequence
  Description of Artificial Sequence: Synthetic oligonucleotide
  Sense Strand Starting at position 764 of SEQ ID NO: 319183
cucuuugccguugaaacaa

SEQ ID NO: 378820 - RNA, 19 nt, Artificial Sequence
  Description of Artificial Sequence: Synthetic oligonucleotide
  Antisense Strand to SEQ ID NO: 378819
uuguuucaacggcaaagag

SEQ ID NO: 378821 - RNA, 19 nt, Artificial Sequence
  Description of Artificial Sequence: Synthetic oligonucleotide
  Sense Strand Starting at position 765 of SEQ ID NO: 315245
ggagaagacuucuuuggug

SEQ ID NO: 378822 - RNA, 19 nt, Artificial Sequence
  Description of Artificial Sequence: Synthetic oligonucleotide
  Antisense Strand to SEQ ID NO: 378821
caccaaagaagucuucucc

SEQ ID NO: 378823 - RNA, 19 nt, Artificial Sequence
  Description of Artificial Sequence: Synthetic oligonucleotide
  Sense Strand Starting at position 765 of SEQ ID NO: 315247
agaagacuucuuuggugac

SEQ ID NO: 378824 - RNA, 19 nt, Artificial Sequence
  Description of Artificial Sequence: Synthetic oligonucleotide
  Antisense Strand to SEQ ID NO: 378823
gucaccaaagaagucuucu

SEQ ID NO: 378825 - RNA, 19 nt, Artificial Sequence
  Description of Artificial Sequence: Synthetic oligonucleotide
  Sense Strand Starting at position 765 of SEQ ID NO: 315251
gacuucuuuggugaccuga

SEQ ID NO: 378826 - RNA, 19 nt, Artificial Sequence
  Description of Artificial Sequence: Synthetic oligonucleotide
  Antisense Strand to SEQ ID NO: 378825
ucaggucaccaaagaaguc

SEQ ID NO: 378827 - RNA, 19 nt, Artificial Sequence
  Description of Artificial Sequence: Synthetic oligonucleotide
  Sense Strand Starting at position 765 of SEQ ID NO: 315253
cuucuuuggugaccugaaa

SEQ ID NO: 378828 - RNA, 19 nt, Artificial Sequence
  Description of Artificial Sequence: Synthetic oligonucleotide
  Antisense Strand to SEQ ID NO: 378827
uuucaggucaccaaagaag

SEQ ID NO: 378829 - RNA, 19 nt, Artificial Sequence
  Description of Artificial Sequence: Synthetic oligonucleotide
  Sense Strand Starting at position 765 of SEQ ID NO: 315276
agaauaaucucugcagcca

SEQ ID NO: 378830 - RNA, 19 nt, Artificial Sequence
  Description of Artificial Sequence: Synthetic oligonucleotide
  Antisense Strand to SEQ ID NO: 378829
uggcugcagagauuauucu

SEQ ID NO: 378831 - RNA, 19 nt, Artificial Sequence
  Description of Artificial Sequence: Synthetic oligonucleotide
  Sense Strand Starting at position 765 of SEQ ID NO: 315335
guuauuguaguagaccauu

SEQ ID NO: 378832 - RNA, 19 nt, Artificial Sequence
  Description of Artificial Sequence: Synthetic oligonucleotide
  Antisense Strand to SEQ ID NO: 378831
aauggucuacuacaauaac

SEQ ID NO: 378833 - RNA, 19 nt, Artificial Sequence
  Description of Artificial Sequence: Synthetic oligonucleotide
  Sense Strand Starting at position 765 of SEQ ID NO: 315341
guaguagaccauuaaccca

SEQ ID NO: 378834 - RNA, 19 nt, Artificial Sequence
  Description of Artificial Sequence: Synthetic oligonucleotide
  Antisense Strand to SEQ ID NO: 378833
uggguuaauggucuacuac

SEQ ID NO: 378835 - RNA, 19 nt, Artificial Sequence
  Description of Artificial Sequence: Synthetic oligonucleotide
  Sense Strand Starting at position 765 of SEQ ID NO: 315382
ucaaucuuugaaggguauu

SEQ ID NO: 378836 - RNA, 19 nt, Artificial Sequence
  Description of Artificial Sequence: Synthetic oligonucleotide
  Antisense Strand to SEQ ID NO: 378835
aauacccuucaaagauuga

SEQ ID NO: 378837 - RNA, 19 nt, Artificial Sequence
  Description of Artificial Sequence: Synthetic oligonucleotide
  Sense Strand Starting at position 765 of SEQ ID NO: 315469
ucuugacaccagugcuaaa

SEQ ID NO: 378838 - RNA, 19 nt, Artificial Sequence
  Description of Artificial Sequence: Synthetic oligonucleotide
  Antisense Strand to SEQ ID NO: 378837
uuuagcacuggugucaaga

SEQ ID NO: 378839 - RNA, 19 nt, Artificial Sequence
  Description of Artificial Sequence: Synthetic oligonucleotide
  Sense Strand Starting at position 765 of SEQ ID NO: 315591
gggcuuuggaggugagaau

SEQ ID NO: 378840 - RNA, 19 nt, Artificial Sequence
  Description of Artificial Sequence: Synthetic oligonucleotide
  Antisense Strand to SEQ ID NO: 378839
auucucaccuccaaagccc

SEQ ID NO: 378841 - RNA, 19 nt, Artificial Sequence
  Description of Artificial Sequence: Synthetic oligonucleotide
  Sense Strand Starting at position 765 of SEQ ID NO: 315602
gugagaauguggcugaauu

SEQ ID NO: 378842 - RNA, 19 nt, Artificial Sequence
  Description of Artificial Sequence: Synthetic oligonucleotide
  Antisense Strand to SEQ ID NO: 378841
aauucagccacauucucac

SEQ ID NO: 378843 - RNA, 19 nt, Artificial Sequence
  Description of Artificial Sequence: Synthetic oligonucleotide
  Sense Strand Starting at position 765 of SEQ ID NO: 315629
gcaaauccacgcuaggaau

SEQ ID NO: 378844 - RNA, 19 nt, Artificial Sequence
  Description of Artificial Sequence: Synthetic oligonucleotide
  Antisense Strand to SEQ ID NO: 378843
auuccuagcguggauuugc

SEQ ID NO: 378845 - RNA, 19 nt, Artificial Sequence
  Description of Artificial Sequence: Synthetic oligonucleotide
  Sense Strand Starting at position 765 of SEQ ID NO: 315642
aggaaugugcugcaauauc

SEQ ID NO: 378846 - RNA, 19 nt, Artificial Sequence
  Description of Artificial Sequence: Synthetic oligonucleotide
  Antisense Strand to SEQ ID NO: 378845
gauauugcagcacauuccu

SEQ ID NO: 378847 - RNA, 19 nt, Artificial Sequence
  Description of Artificial Sequence: Synthetic oligonucleotide
  Sense Strand Starting at position 765 of SEQ ID NO: 315901
ggagaagguuagaguuuag

SEQ ID NO: 378848 - RNA, 19 nt, Artificial Sequence
  Description of Artificial Sequence: Synthetic oligonucleotide
  Antisense Strand to SEQ ID NO: 378847
cuaaacucuaaccuucucc

SEQ ID NO: 378849 - RNA, 19 nt, Artificial Sequence
  Description of Artificial Sequence: Synthetic oligonucleotide
  Sense Strand Starting at position 765 of SEQ ID NO: 315922
agagcaggcugcucagaaa

SEQ ID NO: 378850 - RNA, 19 nt, Artificial Sequence
  Description of Artificial Sequence: Synthetic oligonucleotide
  Antisense Strand to SEQ ID NO: 378849
uuucugagcagccugcucu

SEQ ID NO: 378851 - RNA, 19 nt, Artificial Sequence
  Description of Artificial Sequence: Synthetic oligonucleotide
  Sense Strand Starting at position 765 of SEQ ID NO: 316016
ugccucuuaccauggaaua

SEQ ID NO: 378852 - RNA, 19 nt, Artificial Sequence
  Description of Artificial Sequence: Synthetic oligonucleotide
  Antisense Strand to SEQ ID NO: 378851
uauuccaugguaagaggca

SEQ ID NO: 378853 - RNA, 19 nt, Artificial Sequence
  Description of Artificial Sequence: Synthetic oligonucleotide
  Sense Strand Starting at position 765 of SEQ ID NO: 316017
gccucuuaccauggaauaa

SEQ ID NO: 378854 - RNA, 19 nt, Artificial Sequence
  Description of Artificial Sequence: Synthetic oligonucleotide
  Antisense Strand to SEQ ID NO: 378853
uuauuccaugguaagaggc

SEQ ID NO: 378855 - RNA, 19 nt, Artificial Sequence
  Description of Artificial Sequence: Synthetic oligonucleotide
  Sense Strand Starting at position 765 of SEQ ID NO: 316057
cuguguauggaaggaauga

SEQ ID NO: 378856 - RNA, 19 nt, Artificial Sequence
  Description of Artificial Sequence: Synthetic oligonucleotide
  Antisense Strand to SEQ ID NO: 378855
ucauuccuuccauacacag

SEQ ID NO: 378857 - RNA, 19 nt, Artificial Sequence
  Description of Artificial Sequence: Synthetic oligonucleotide
  Sense Strand Starting at position 765 of SEQ ID NO: 316128
gguaaccucgcucaggaaa

SEQ ID NO: 378858 - RNA, 19 nt, Artificial Sequence
  Description of Artificial Sequence: Synthetic oligonucleotide
  Antisense Strand to SEQ ID NO: 378857
uuuccugagcgagguuacc

SEQ ID NO: 378859 - RNA, 19 nt, Artificial Sequence
  Description of Artificial Sequence: Synthetic oligonucleotide
  Sense Strand Starting at position 765 of SEQ ID NO: 316303
acgagagaucccuaugguu

SEQ ID NO: 378860 - RNA, 19 nt, Artificial Sequence
  Description of Artificial Sequence: Synthetic oligonucleotide
  Antisense Strand to SEQ ID NO: 378859
aaccauagggaucucucgu

SEQ ID NO: 378861 - RNA, 19 nt, Artificial Sequence
  Description of Artificial Sequence: Synthetic oligonucleotide
  Sense Strand Starting at position 765 of SEQ ID NO: 316305
gagagaucccuaugguucc

SEQ ID NO: 378862 - RNA, 19 nt, Artificial Sequence
  Description of Artificial Sequence: Synthetic oligonucleotide
  Antisense Strand to SEQ ID NO: 378861
ggaaccauagggaucucuc

SEQ ID NO: 378863 - RNA, 19 nt, Artificial Sequence
  Description of Artificial Sequence: Synthetic oligonucleotide
  Sense Strand Starting at position 765 of SEQ ID NO: 316515
ugugaagaagggugguuua

SEQ ID NO: 378864 - RNA, 19 nt, Artificial Sequence
  Description of Artificial Sequence: Synthetic oligonucleotide
  Antisense Strand to SEQ ID NO: 378863
uaaaccacccuucuucaca

SEQ ID NO: 378865 - RNA, 19 nt, Artificial Sequence
  Description of Artificial Sequence: Synthetic oligonucleotide
  Sense Strand Starting at position 765 of SEQ ID NO: 316530
uuuauaaacugcuuaagga

SEQ ID NO: 378866 - RNA, 19 nt, Artificial Sequence
  Description of Artificial Sequence: Synthetic oligonucleotide
  Antisense Strand to SEQ ID NO: 378865
uccuuaagcaguuuauaaa

SEQ ID NO: 378867 - RNA, 19 nt, Artificial Sequence
  Description of Artificial Sequence: Synthetic oligonucleotide
  Sense Strand Starting at position 765 of SEQ ID NO: 316747
gccucaaugcauuaggaaa

SEQ ID NO: 378868 - RNA, 19 nt, Artificial Sequence
  Description of Artificial Sequence: Synthetic oligonucleotide
  Antisense Strand to SEQ ID NO: 378867
uuuccuaaugcauugaggc

SEQ ID NO: 378869 - RNA, 19 nt, Artificial Sequence
  Description of Artificial Sequence: Synthetic oligonucleotide
  Sense Strand Starting at position 765 of SEQ ID NO: 316811
ucaaauauugcguaagagg

SEQ ID NO: 378870 - RNA, 19 nt, Artificial Sequence
  Description of Artificial Sequence: Synthetic oligonucleotide
  Antisense Strand to SEQ ID NO: 378869
ccucuuacgcaauauuuga

SEQ ID NO: 378871 - RNA, 19 nt, Artificial Sequence
  Description of Artificial Sequence: Synthetic oligonucleotide
  Sense Strand Starting at position 765 of SEQ ID NO: 317058
ggagaccuccggcaacuuu

SEQ ID NO: 378872 - RNA, 19 nt, Artificial Sequence
  Description of Artificial Sequence: Synthetic oligonucleotide
  Antisense Strand to SEQ ID NO: 378871
aaaguugccggaggucucc

SEQ ID NO: 378873 - RNA, 19 nt, Artificial Sequence
  Description of Artificial Sequence: Synthetic oligonucleotide
  Sense Strand Starting at position 765 of SEQ ID NO: 317200
ucacuacagguuugaggaa

SEQ ID NO: 378874 - RNA, 19 nt, Artificial Sequence
  Description of Artificial Sequence: Synthetic oligonucleotide
  Antisense Strand to SEQ ID NO: 378873
uuccucaaaccuguaguga

SEQ ID NO: 378875 - RNA, 19 nt, Artificial Sequence
  Description of Artificial Sequence: Synthetic oligonucleotide
  Sense Strand Starting at position 765 of SEQ ID NO: 317473
auucuucuggcucaagcaa

SEQ ID NO: 378876 - RNA, 19 nt, Artificial Sequence
  Description of Artificial Sequence: Synthetic oligonucleotide
  Antisense Strand to SEQ ID NO: 378875
uugcuugagccagaagaau

SEQ ID NO: 378877 - RNA, 19 nt, Artificial Sequence
  Description of Artificial Sequence: Synthetic oligonucleotide
  Sense Strand Starting at position 765 of SEQ ID NO: 317981
auuggagaaacguguggau

SEQ ID NO: 378878 - RNA, 19 nt, Artificial Sequence
  Description of Artificial Sequence: Synthetic oligonucleotide
  Antisense Strand to SEQ ID NO: 378877
auccacacguuucuccaau

SEQ ID NO: 378879 - RNA, 19 nt, Artificial Sequence
  Description of Artificial Sequence: Synthetic oligonucleotide
  Sense Strand Starting at position 765 of SEQ ID NO: 317983
uggagaaacguguggauau

SEQ ID NO: 378880 - RNA, 19 nt, Artificial Sequence
  Description of Artificial Sequence: Synthetic oligonucleotide
  Antisense Strand to SEQ ID NO: 378879
auauccacacguuucucca

SEQ ID NO: 378881 - RNA, 19 nt, Artificial Sequence
  Description of Artificial Sequence: Synthetic oligonucleotide
  Sense Strand Starting at position 765 of SEQ ID NO: 318092
gugaguacugaaugggaga

SEQ ID NO: 378882 - RNA, 19 nt, Artificial Sequence
  Description of Artificial Sequence: Synthetic oligonucleotide
  Antisense Strand to SEQ ID NO: 378881
ucucccauucaguacucac

SEQ ID NO: 378883 - RNA, 19 nt, Artificial Sequence
  Description of Artificial Sequence: Synthetic oligonucleotide
  Sense Strand Starting at position 765 of SEQ ID NO: 318205
cuuauugaugaaggucuua

SEQ ID NO: 378884 - RNA, 19 nt, Artificial Sequence
  Description of Artificial Sequence: Synthetic oligonucleotide
  Antisense Strand to SEQ ID NO: 378883
uaagaccuucaucaauaag

SEQ ID NO: 378885 - RNA, 19 nt, Artificial Sequence
  Description of Artificial Sequence: Synthetic oligonucleotide
  Sense Strand Starting at position 765 of SEQ ID NO: 318247
gcaucuuaagaugguaauu

SEQ ID NO: 378886 - RNA, 19 nt, Artificial Sequence
  Description of Artificial Sequence: Synthetic oligonucleotide
  Antisense Strand to SEQ ID NO: 378885
aauuaccaucuuaagaugc

SEQ ID NO: 378887 - RNA, 19 nt, Artificial Sequence
  Description of Artificial Sequence: Synthetic oligonucleotide
  Sense Strand Starting at position 765 of SEQ ID NO: 318800
uuaaguuacugguuaaacu

SEQ ID NO: 378888 - RNA, 19 nt, Artificial Sequence
  Description of Artificial Sequence: Synthetic oligonucleotide
  Antisense Strand to SEQ ID NO: 378887
aguuuaaccaguaacuuaa

SEQ ID NO: 378889 - RNA, 19 nt, Artificial Sequence
  Description of Artificial Sequence: Synthetic oligonucleotide
  Sense Strand Starting at position 765 of SEQ ID NO: 318862
gugaguauauguguagaaa

SEQ ID NO: 378890 - RNA, 19 nt, Artificial Sequence
  Description of Artificial Sequence: Synthetic oligonucleotide
  Antisense Strand to SEQ ID NO: 378889
uuucuacacauauacucac

SEQ ID NO: 378891 - RNA, 19 nt, Artificial Sequence
  Description of Artificial Sequence: Synthetic oligonucleotide
  Sense Strand Starting at position 765 of SEQ ID NO: 319182
gccagaagcuaaucuuuau

SEQ ID NO: 378892 - RNA, 19 nt, Artificial Sequence
  Description of Artificial Sequence: Synthetic oligonucleotide
  Antisense Strand to SEQ ID NO: 378891
auaaagauuagcuucuggc

SEQ ID NO: 378893 - RNA, 19 nt, Artificial Sequence
  Description of Artificial Sequence: Synthetic oligonucleotide
  Sense Strand Starting at position 765 of SEQ ID NO: 319186
gaagcuaaucuuuaugggu

SEQ ID NO: 378894 - RNA, 19 nt, Artificial Sequence
  Description of Artificial Sequence: Synthetic oligonucleotide
  Antisense Strand to SEQ ID NO: 378893
acccauaaagauuagcuuc

SEQ ID NO: 378895 - RNA, 19 nt, Artificial Sequence
  Description of Artificial Sequence: Synthetic oligonucleotide
  Sense Strand Starting at position 765 of SEQ ID NO: 319191
uaaucuuuaugggugauua

SEQ ID NO: 378896 - RNA, 19 nt, Artificial Sequence
  Description of Artificial Sequence: Synthetic oligonucleotide
  Antisense Strand to SEQ ID NO: 378895
uaaucacccauaaagauua

SEQ ID NO: 378897 - RNA, 19 nt, Artificial Sequence
  Description of Artificial Sequence: Synthetic oligonucleotide
  Sense Strand Starting at position 765 of SEQ ID NO: 319192
aaucuuuaugggugauuag

SEQ ID NO: 378898 - RNA, 19 nt, Artificial Sequence
  Description of Artificial Sequence: Synthetic oligonucleotide
  Antisense Strand to SEQ ID NO: 378897
cuaaucacccauaaagauu

SEQ ID NO: 378899 - RNA, 19 nt, Artificial Sequence
  Description of Artificial Sequence: Synthetic oligonucleotide
  Sense Strand Starting at position 765 of SEQ ID NO: 319195
cuuuaugggugauuaggaa

SEQ ID NO: 378900 - RNA, 19 nt, Artificial Sequence
  Description of Artificial Sequence: Synthetic oligonucleotide
  Antisense Strand to SEQ ID NO: 378899
uuccuaaucacccauaaag

SEQ ID NO: 378901 - RNA, 19 nt, Artificial Sequence
  Description of Artificial Sequence: Synthetic oligonucleotide
  Sense Strand Starting at position 766 of SEQ ID NO: 315346
agaugaauagccugucucu

SEQ ID NO: 378902 - RNA, 19 nt, Artificial Sequence
  Description of Artificial Sequence: Synthetic oligonucleotide
  Antisense Strand to SEQ ID NO: 378901
agagacaggcuauucaucu

SEQ ID NO: 378903 - RNA, 19 nt, Artificial Sequence
  Description of Artificial Sequence: Synthetic oligonucleotide
  Sense Strand Starting at position 766 of SEQ ID NO: 315349
ugaauagccugucucuacu

SEQ ID NO: 378904 - RNA, 19 nt, Artificial Sequence
  Description of Artificial Sequence: Synthetic oligonucleotide
  Antisense Strand to SEQ ID NO: 378903
aguagagacaggcuauuca

SEQ ID NO: 378905 - RNA, 19 nt, Artificial Sequence
  Description of Artificial Sequence: Synthetic oligonucleotide
  Sense Strand Starting at position 766 of SEQ ID NO: 315355
gccugucucuacucugaca

SEQ ID NO: 378906 - RNA, 19 nt, Artificial Sequence
  Description of Artificial Sequence: Synthetic oligonucleotide
  Antisense Strand to SEQ ID NO: 378905
ugucagaguagagacaggc

SEQ ID NO: 378907 - RNA, 19 nt, Artificial Sequence
  Description of Artificial Sequence: Synthetic oligonucleotide
  Sense Strand Starting at position 766 of SEQ ID NO: 315891
ugucauuucugguugcuuu

SEQ ID NO: 378908 - RNA, 19 nt, Artificial Sequence
  Description of Artificial Sequence: Synthetic oligonucleotide
  Antisense Strand to SEQ ID NO: 378907
aaagcaaccagaaaugaca

SEQ ID NO: 378909 - RNA, 19 nt, Artificial Sequence
  Description of Artificial Sequence: Synthetic oligonucleotide
  Sense Strand Starting at position 766 of SEQ ID NO: 315892
gucauuucugguugcuuua

SEQ ID NO: 378910 - RNA, 19 nt, Artificial Sequence
  Description of Artificial Sequence: Synthetic oligonucleotide
  Antisense Strand to SEQ ID NO: 378909
uaaagcaaccagaaaugac

SEQ ID NO: 378911 - RNA, 19 nt, Artificial Sequence
  Description of Artificial Sequence: Synthetic oligonucleotide
  Sense Strand Starting at position 766 of SEQ ID NO: 315903
uugcuuuauggucaacauc

SEQ ID NO: 378912 - RNA, 19 nt, Artificial Sequence
  Description of Artificial Sequence: Synthetic oligonucleotide
  Antisense Strand to SEQ ID NO: 378911
gauguugaccauaaagcaa

SEQ ID NO: 378913 - RNA, 19 nt, Artificial Sequence
  Description of Artificial Sequence: Synthetic oligonucleotide
  Sense Strand Starting at position 766 of SEQ ID NO: 315911
uggucaacaucacuuauga

SEQ ID NO: 378914 - RNA, 19 nt, Artificial Sequence
  Description of Artificial Sequence: Synthetic oligonucleotide
  Antisense Strand to SEQ ID NO: 378913
ucauaagugauguugacca

SEQ ID NO: 378915 - RNA, 19 nt, Artificial Sequence
  Description of Artificial Sequence: Synthetic oligonucleotide
  Sense Strand Starting at position 766 of SEQ ID NO: 316053
guaggcucucaauaagaau

SEQ ID NO: 378916 - RNA, 19 nt, Artificial Sequence
  Description of Artificial Sequence: Synthetic oligonucleotide
  Antisense Strand to SEQ ID NO: 378915
auucuuauugagagccuac

SEQ ID NO: 378917 - RNA, 19 nt, Artificial Sequence
  Description of Artificial Sequence: Synthetic oligonucleotide
  Sense Strand Starting at position 766 of SEQ ID NO: 316062
caauaagaauguguugaua

SEQ ID NO: 378918 - RNA, 19 nt, Artificial Sequence
  Description of Artificial Sequence: Synthetic oligonucleotide
  Antisense Strand to SEQ ID NO: 378917
uaucaacacauucuuauug

SEQ ID NO: 378919 - RNA, 19 nt, Artificial Sequence
  Description of Artificial Sequence: Synthetic oligonucleotide
  Sense Strand Starting at position 766 of SEQ ID NO: 316299
uggaaucucuugucagguu

SEQ ID NO: 378920 - RNA, 19 nt, Artificial Sequence
  Description of Artificial Sequence: Synthetic oligonucleotide
  Antisense Strand to SEQ ID NO: 378919
aaccugacaagagauucca

SEQ ID NO: 378921 - RNA, 19 nt, Artificial Sequence
  Description of Artificial Sequence: Synthetic oligonucleotide
  Sense Strand Starting at position 766 of SEQ ID NO: 316333
aggcuuguugugcauaaga

SEQ ID NO: 378922 - RNA, 19 nt, Artificial Sequence
  Description of Artificial Sequence: Synthetic oligonucleotide
  Antisense Strand to SEQ ID NO: 378921
ucuuaugcacaacaagccu

SEQ ID NO: 378923 - RNA, 19 nt, Artificial Sequence
  Description of Artificial Sequence: Synthetic oligonucleotide
  Sense Strand Starting at position 766 of SEQ ID NO: 316335
gcuuguugugcauaagaga

SEQ ID NO: 378924 - RNA, 19 nt, Artificial Sequence
  Description of Artificial Sequence: Synthetic oligonucleotide
  Antisense Strand to SEQ ID NO: 378923
ucucuuaugcacaacaagc

SEQ ID NO: 378925 - RNA, 19 nt, Artificial Sequence
  Description of Artificial Sequence: Synthetic oligonucleotide
  Sense Strand Starting at position 766 of SEQ ID NO: 316426
acuauaagaucauaaggag

SEQ ID NO: 378926 - RNA, 19 nt, Artificial Sequence
  Description of Artificial Sequence: Synthetic oligonucleotide
  Antisense Strand to SEQ ID NO: 378925
cuccuuaugaucuuauagu

SEQ ID NO: 378927 - RNA, 19 nt, Artificial Sequence
  Description of Artificial Sequence: Synthetic oligonucleotide
  Sense Strand Starting at position 766 of SEQ ID NO: 316449
cuagcagaaucagcagaau

SEQ ID NO: 378928 - RNA, 19 nt, Artificial Sequence
  Description of Artificial Sequence: Synthetic oligonucleotide
  Antisense Strand to SEQ ID NO: 378927
auucugcugauucugcuag

SEQ ID NO: 378929 - RNA, 19 nt, Artificial Sequence
  Description of Artificial Sequence: Synthetic oligonucleotide
  Sense Strand Starting at position 766 of SEQ ID NO: 317221
ucuguucugcaacacugaa

SEQ ID NO: 378930 - RNA, 19 nt, Artificial Sequence
  Description of Artificial Sequence: Synthetic oligonucleotide
  Antisense Strand to SEQ ID NO: 378929
uucaguguugcagaacaga

SEQ ID NO: 378931 - RNA, 19 nt, Artificial Sequence
  Description of Artificial Sequence: Synthetic oligonucleotide
  Sense Strand Starting at position 766 of SEQ ID NO: 317297
ugaggcuucucuuuccaaa

SEQ ID NO: 378932 - RNA, 19 nt, Artificial Sequence
  Description of Artificial Sequence: Synthetic oligonucleotide
  Antisense Strand to SEQ ID NO: 378931
uuuggaaagagaagccuca

SEQ ID NO: 378933 - RNA, 19 nt, Artificial Sequence
  Description of Artificial Sequence: Synthetic oligonucleotide
  Sense Strand Starting at position 766 of SEQ ID NO: 317357
guaaauaaucauggccaaa

SEQ ID NO: 378934 - RNA, 19 nt, Artificial Sequence
  Description of Artificial Sequence: Synthetic oligonucleotide
  Antisense Strand to SEQ ID NO: 378933
uuuggccaugauuauuuac

SEQ ID NO: 378935 - RNA, 19 nt, Artificial Sequence
  Description of Artificial Sequence: Synthetic oligonucleotide
  Sense Strand Starting at position 766 of SEQ ID NO: 317402
uuuggaagaugcuuuaaag

SEQ ID NO: 378936 - RNA, 19 nt, Artificial Sequence
  Description of Artificial Sequence: Synthetic oligonucleotide
  Antisense Strand to SEQ ID NO: 378935
cuuuaaagcaucuuccaaa

SEQ ID NO: 378937 - RNA, 19 nt, Artificial Sequence
  Description of Artificial Sequence: Synthetic oligonucleotide
  Sense Strand Starting at position 766 of SEQ ID NO: 317622
cuuauaucucuuuacaggu

SEQ ID NO: 378938 - RNA, 19 nt, Artificial Sequence
  Description of Artificial Sequence: Synthetic oligonucleotide
  Antisense Strand to SEQ ID NO: 378937
accuguaaagagauauaag

SEQ ID NO: 378939 - RNA, 19 nt, Artificial Sequence
  Description of Artificial Sequence: Synthetic oligonucleotide
  Sense Strand Starting at position 766 of SEQ ID NO: 317802
gaaugcauccuggaguauu

SEQ ID NO: 378940 - RNA, 19 nt, Artificial Sequence
  Description of Artificial Sequence: Synthetic oligonucleotide
  Antisense Strand to SEQ ID NO: 378939
aauacuccaggaugcauuc

SEQ ID NO: 378941 - RNA, 19 nt, Artificial Sequence
  Description of Artificial Sequence: Synthetic oligonucleotide
  Sense Strand Starting at position 766 of SEQ ID NO: 317964
auaccaguguccucuuaaa

SEQ ID NO: 378942 - RNA, 19 nt, Artificial Sequence
  Description of Artificial Sequence: Synthetic oligonucleotide
  Antisense Strand to SEQ ID NO: 378941
uuuaagaggacacugguau

SEQ ID NO: 378943 - RNA, 19 nt, Artificial Sequence
  Description of Artificial Sequence: Synthetic oligonucleotide
  Sense Strand Starting at position 766 of SEQ ID NO: 318026
cacguaucacuaugaggca

SEQ ID NO: 378944 - RNA, 19 nt, Artificial Sequence
  Description of Artificial Sequence: Synthetic oligonucleotide
  Antisense Strand to SEQ ID NO: 378943
ugccucauagugauacgug

SEQ ID NO: 378945 - RNA, 19 nt, Artificial Sequence
  Description of Artificial Sequence: Synthetic oligonucleotide
  Sense Strand Starting at position 766 of SEQ ID NO: 318039
gaggcauacuuucuugaca

SEQ ID NO: 378946 - RNA, 19 nt, Artificial Sequence
  Description of Artificial Sequence: Synthetic oligonucleotide
  Antisense Strand to SEQ ID NO: 378945
ugucaagaaaguaugccuc

SEQ ID NO: 378947 - RNA, 19 nt, Artificial Sequence
  Description of Artificial Sequence: Synthetic oligonucleotide
  Sense Strand Starting at position 766 of SEQ ID NO: 318042
gcauacuuucuugacagaa

SEQ ID NO: 378948 - RNA, 19 nt, Artificial Sequence
  Description of Artificial Sequence: Synthetic oligonucleotide
  Antisense Strand to SEQ ID NO: 378947
uucugucaagaaaguaugc

SEQ ID NO: 378949 - RNA, 19 nt, Artificial Sequence
  Description of Artificial Sequence: Synthetic oligonucleotide
  Sense Strand Starting at position 766 of SEQ ID NO: 318125
accaguauugcugauucua

SEQ ID NO: 378950 - RNA, 19 nt, Artificial Sequence
  Description of Artificial Sequence: Synthetic oligonucleotide
  Antisense Strand to SEQ ID NO: 378949
uagaaucagcaauacuggu

SEQ ID NO: 378951 - RNA, 19 nt, Artificial Sequence
  Description of Artificial Sequence: Synthetic oligonucleotide
  Sense Strand Starting at position 766 of SEQ ID NO: 318182
ugauuugucuuccauugaa

SEQ ID NO: 378952 - RNA, 19 nt, Artificial Sequence
  Description of Artificial Sequence: Synthetic oligonucleotide
  Antisense Strand to SEQ ID NO: 378951
uucaauggaagacaaauca

SEQ ID NO: 378953 - RNA, 19 nt, Artificial Sequence
  Description of Artificial Sequence: Synthetic oligonucleotide
  Sense Strand Starting at position 766 of SEQ ID NO: 318431
agaagaacauucuagaaua

SEQ ID NO: 378954 - RNA, 19 nt, Artificial Sequence
  Description of Artificial Sequence: Synthetic oligonucleotide
  Antisense Strand to SEQ ID NO: 378953
uauucuagaauguucuucu

SEQ ID NO: 378955 - RNA, 19 nt, Artificial Sequence
  Description of Artificial Sequence: Synthetic oligonucleotide
  Sense Strand Starting at position 766 of SEQ ID NO: 318557
ucaaguuuggccuggacaa

SEQ ID NO: 378956 - RNA, 19 nt, Artificial Sequence
  Description of Artificial Sequence: Synthetic oligonucleotide
  Antisense Strand to SEQ ID NO: 378955
uuguccaggccaaacuuga

SEQ ID NO: 378957 - RNA, 19 nt, Artificial Sequence
  Description of Artificial Sequence: Synthetic oligonucleotide
  Sense Strand Starting at position 766 of SEQ ID NO: 318558
caaguuuggccuggacaac

SEQ ID NO: 378958 - RNA, 19 nt, Artificial Sequence
  Description of Artificial Sequence: Synthetic oligonucleotide
  Antisense Strand to SEQ ID NO: 378957
guuguccaggccaaacuug

SEQ ID NO: 378959 - RNA, 19 nt, Artificial Sequence
  Description of Artificial Sequence: Synthetic oligonucleotide
  Sense Strand Starting at position 766 of SEQ ID NO: 318559
aaguuuggccuggacaaca

SEQ ID NO: 378960 - RNA, 19 nt, Artificial Sequence
  Description of Artificial Sequence: Synthetic oligonucleotide
  Antisense Strand to SEQ ID NO: 378959
uguuguccaggccaaacuu

SEQ ID NO: 378961 - RNA, 19 nt, Artificial Sequence
  Description of Artificial Sequence: Synthetic oligonucleotide
  Sense Strand Starting at position 766 of SEQ ID NO: 318629
auguaaaguagugagucaa

SEQ ID NO: 378962 - RNA, 19 nt, Artificial Sequence
  Description of Artificial Sequence: Synthetic oligonucleotide
  Antisense Strand to SEQ ID NO: 378961
uugacucacuacuuuacau

SEQ ID NO: 378963 - RNA, 19 nt, Artificial Sequence
  Description of Artificial Sequence: Synthetic oligonucleotide
  Sense Strand Starting at position 766 of SEQ ID NO: 318751
uagcauguuugccugaaca

SEQ ID NO: 378964 - RNA, 19 nt, Artificial Sequence
  Description of Artificial Sequence: Synthetic oligonucleotide
  Antisense Strand to SEQ ID NO: 378963
uguucaggcaaacaugcua

SEQ ID NO: 378965 - RNA, 19 nt, Artificial Sequence
  Description of Artificial Sequence: Synthetic oligonucleotide
  Sense Strand Starting at position 766 of SEQ ID NO: 318753
gcauguuugccugaacacc

SEQ ID NO: 378966 - RNA, 19 nt, Artificial Sequence
  Description of Artificial Sequence: Synthetic oligonucleotide
  Antisense Strand to SEQ ID NO: 378965
gguguucaggcaaacaugc

SEQ ID NO: 378967 - RNA, 19 nt, Artificial Sequence
  Description of Artificial Sequence: Synthetic oligonucleotide
  Sense Strand Starting at position 766 of SEQ ID NO: 318898
agccaaguccagugugaag

SEQ ID NO: 378968 - RNA, 19 nt, Artificial Sequence
  Description of Artificial Sequence: Synthetic oligonucleotide
  Antisense Strand to SEQ ID NO: 378967
cuucacacuggacuuggcu

SEQ ID NO: 378969 - RNA, 19 nt, Artificial Sequence
  Description of Artificial Sequence: Synthetic oligonucleotide
  Sense Strand Starting at position 766 of SEQ ID NO: 319023
ggugcuaauguacaguaau

SEQ ID NO: 378970 - RNA, 19 nt, Artificial Sequence
  Description of Artificial Sequence: Synthetic oligonucleotide
  Antisense Strand to SEQ ID NO: 378969
auuacuguacauuagcacc

SEQ ID NO: 378971 - RNA, 19 nt, Artificial Sequence
  Description of Artificial Sequence: Synthetic oligonucleotide
  Sense Strand Starting at position 766 of SEQ ID NO: 319026
gcuaauguacaguaaugau

SEQ ID NO: 378972 - RNA, 19 nt, Artificial Sequence
  Description of Artificial Sequence: Synthetic oligonucleotide
  Antisense Strand to SEQ ID NO: 378971
aucauuacuguacauuagc

SEQ ID NO: 378973 - RNA, 19 nt, Artificial Sequence
  Description of Artificial Sequence: Synthetic oligonucleotide
  Sense Strand Starting at position 766 of SEQ ID NO: 319036
aguaaugauccacaguucu

SEQ ID NO: 378974 - RNA, 19 nt, Artificial Sequence
  Description of Artificial Sequence: Synthetic oligonucleotide
  Antisense Strand to SEQ ID NO: 378973
agaacuguggaucauuacu

SEQ ID NO: 378975 - RNA, 19 nt, Artificial Sequence
  Description of Artificial Sequence: Synthetic oligonucleotide
  Sense Strand Starting at position 766 of SEQ ID NO: 319165
agaggcaauucugccuaua

SEQ ID NO: 378976 - RNA, 19 nt, Artificial Sequence
  Description of Artificial Sequence: Synthetic oligonucleotide
  Antisense Strand to SEQ ID NO: 378975
uauaggcagaauugccucu

SEQ ID NO: 378977 - RNA, 19 nt, Artificial Sequence
  Description of Artificial Sequence: Synthetic oligonucleotide
  Sense Strand Starting at position 766 of SEQ ID NO: 319167
aggcaauucugccuauaag

SEQ ID NO: 378978 - RNA, 19 nt, Artificial Sequence
  Description of Artificial Sequence: Synthetic oligonucleotide
  Antisense Strand to SEQ ID NO: 378977
cuuauaggcagaauugccu

SEQ ID NO: 378979 - RNA, 19 nt, Artificial Sequence
  Description of Artificial Sequence: Synthetic oligonucleotide
  Sense Strand Starting at position 766 of SEQ ID NO: 319168
ggcaauucugccuauaagu

SEQ ID NO: 378980 - RNA, 19 nt, Artificial Sequence
  Description of Artificial Sequence: Synthetic oligonucleotide
  Antisense Strand to SEQ ID NO: 378979
acuuauaggcagaauugcc

SEQ ID NO: 378981 - RNA, 19 nt, Artificial Sequence
  Description of Artificial Sequence: Synthetic oligonucleotide
  Sense Strand Starting at position 767 of SEQ ID NO: 315518
gguuucaccgugucugcua

SEQ ID NO: 378982 - RNA, 19 nt, Artificial Sequence
  Description of Artificial Sequence: Synthetic oligonucleotide
  Antisense Strand to SEQ ID NO: 378981
uagcagacacggugaaacc

SEQ ID NO: 378983 - RNA, 19 nt, Artificial Sequence
  Description of Artificial Sequence: Synthetic oligonucleotide
  Sense Strand Starting at position 767 of SEQ ID NO: 315621
ggacucccucaguaucgaa

SEQ ID NO: 378984 - RNA, 19 nt, Artificial Sequence
  Description of Artificial Sequence: Synthetic oligonucleotide
  Antisense Strand to SEQ ID NO: 378983
uucgauacugagggagucc

SEQ ID NO: 378985 - RNA, 19 nt, Artificial Sequence
  Description of Artificial Sequence: Synthetic oligonucleotide
  Sense Strand Starting at position 767 of SEQ ID NO: 315679
accugaaagcacugucaaa

SEQ ID NO: 378986 - RNA, 19 nt, Artificial Sequence
  Description of Artificial Sequence: Synthetic oligonucleotide
  Antisense Strand to SEQ ID NO: 378985
uuugacagugcuuucaggu

SEQ ID NO: 378987 - RNA, 19 nt, Artificial Sequence
  Description of Artificial Sequence: Synthetic oligonucleotide
  Sense Strand Starting at position 767 of SEQ ID NO: 315773
augugaacacucugcaaac

SEQ ID NO: 378988 - RNA, 19 nt, Artificial Sequence
  Description of Artificial Sequence: Synthetic oligonucleotide
  Antisense Strand to SEQ ID NO: 378987
guuugcagaguguucacau

SEQ ID NO: 378989 - RNA, 19 nt, Artificial Sequence
  Description of Artificial Sequence: Synthetic oligonucleotide
  Sense Strand Starting at position 767 of SEQ ID NO: 315774
ugugaacacucugcaaacu

SEQ ID NO: 378990 - RNA, 19 nt, Artificial Sequence
  Description of Artificial Sequence: Synthetic oligonucleotide
  Antisense Strand to SEQ ID NO: 378989
aguuugcagaguguucaca

SEQ ID NO: 378991 - RNA, 19 nt, Artificial Sequence
  Description of Artificial Sequence: Synthetic oligonucleotide
  Sense Strand Starting at position 767 of SEQ ID NO: 315775
gugaacacucugcaaacua

SEQ ID NO: 378992 - RNA, 19 nt, Artificial Sequence
  Description of Artificial Sequence: Synthetic oligonucleotide
  Antisense Strand to SEQ ID NO: 378991
uaguuugcagaguguucac

SEQ ID NO: 378993 - RNA, 19 nt, Artificial Sequence
  Description of Artificial Sequence: Synthetic oligonucleotide
  Sense Strand Starting at position 767 of SEQ ID NO: 315786
gcaaacuauguuuauggau

SEQ ID NO: 378994 - RNA, 19 nt, Artificial Sequence
  Description of Artificial Sequence: Synthetic oligonucleotide
  Antisense Strand to SEQ ID NO: 378993
auccauaaacauaguuugc

SEQ ID NO: 378995 - RNA, 19 nt, Artificial Sequence
  Description of Artificial Sequence: Synthetic oligonucleotide
  Sense Strand Starting at position 767 of SEQ ID NO: 315849
cagaguuuguggucaagau

SEQ ID NO: 378996 - RNA, 19 nt, Artificial Sequence
  Description of Artificial Sequence: Synthetic oligonucleotide
  Antisense Strand to SEQ ID NO: 378995
aucuugaccacaaacucug

SEQ ID NO: 378997 - RNA, 19 nt, Artificial Sequence
  Description of Artificial Sequence: Synthetic oligonucleotide
  Sense Strand Starting at position 767 of SEQ ID NO: 315850
agaguuuguggucaagaug

SEQ ID NO: 378998 - RNA, 19 nt, Artificial Sequence
  Description of Artificial Sequence: Synthetic oligonucleotide
  Antisense Strand to SEQ ID NO: 378997
caucuugaccacaaacucu

SEQ ID NO: 378999 - RNA, 19 nt, Artificial Sequence
  Description of Artificial Sequence: Synthetic oligonucleotide
  Sense Strand Starting at position 767 of SEQ ID NO: 315853
guuuguggucaagaugaaa

SEQ ID NO: 379000 - RNA, 19 nt, Artificial Sequence
  Description of Artificial Sequence: Synthetic oligonucleotide
  Antisense Strand to SEQ ID NO: 378999
uuucaucuugaccacaaac

SEQ ID NO: 379001 - RNA, 19 nt, Artificial Sequence
  Description of Artificial Sequence: Synthetic oligonucleotide
  Sense Strand Starting at position 767 of SEQ ID NO: 315912
uugugaaugggaugccuau

SEQ ID NO: 379002 - RNA, 19 nt, Artificial Sequence
  Description of Artificial Sequence: Synthetic oligonucleotide
  Antisense Strand to SEQ ID NO: 379001
auaggcaucccauucacaa

SEQ ID NO: 379003 - RNA, 19 nt, Artificial Sequence
  Description of Artificial Sequence: Synthetic oligonucleotide
  Sense Strand Starting at position 767 of SEQ ID NO: 316028
uuagguuauuucuccguuu

SEQ ID NO: 379004 - RNA, 19 nt, Artificial Sequence
  Description of Artificial Sequence: Synthetic oligonucleotide
  Antisense Strand to SEQ ID NO: 379003
aaacggagaaauaaccuaa

SEQ ID NO: 379005 - RNA, 19 nt, Artificial Sequence
  Description of Artificial Sequence: Synthetic oligonucleotide
  Sense Strand Starting at position 767 of SEQ ID NO: 316029
uagguuauuucuccguuua

SEQ ID NO: 379006 - RNA, 19 nt, Artificial Sequence
  Description of Artificial Sequence: Synthetic oligonucleotide
  Antisense Strand to SEQ ID NO: 379005
uaaacggagaaauaaccua

SEQ ID NO: 379007 - RNA, 19 nt, Artificial Sequence
  Description of Artificial Sequence: Synthetic oligonucleotide
  Sense Strand Starting at position 767 of SEQ ID NO: 316030
agguuauuucuccguuuac

SEQ ID NO: 379008 - RNA, 19 nt, Artificial Sequence
  Description of Artificial Sequence: Synthetic oligonucleotide
  Antisense Strand to SEQ ID NO: 379007
guaaacggagaaauaaccu

SEQ ID NO: 379009 - RNA, 19 nt, Artificial Sequence
  Description of Artificial Sequence: Synthetic oligonucleotide
  Sense Strand Starting at position 767 of SEQ ID NO: 316031
gguuauuucuccguuuacu

SEQ ID NO: 379010 - RNA, 19 nt, Artificial Sequence
  Description of Artificial Sequence: Synthetic oligonucleotide
  Antisense Strand to SEQ ID NO: 379009
aguaaacggagaaauaacc

SEQ ID NO: 379011 - RNA, 19 nt, Artificial Sequence
  Description of Artificial Sequence: Synthetic oligonucleotide
  Sense Strand Starting at position 767 of SEQ ID NO: 316089
uuuccaggugcugaagaaa

SEQ ID NO: 379012 - RNA, 19 nt, Artificial Sequence
  Description of Artificial Sequence: Synthetic oligonucleotide
  Antisense Strand to SEQ ID NO: 379011
uuucuucagcaccuggaaa

SEQ ID NO: 379013 - RNA, 19 nt, Artificial Sequence
  Description of Artificial Sequence: Synthetic oligonucleotide
  Sense Strand Starting at position 767 of SEQ ID NO: 316097
ugcugaagaaaucguuaua

SEQ ID NO: 379014 - RNA, 19 nt, Artificial Sequence
  Description of Artificial Sequence: Synthetic oligonucleotide
  Antisense Strand to SEQ ID NO: 379013
uauaacgauuucuucagca

SEQ ID NO: 379015 - RNA, 19 nt, Artificial Sequence
  Description of Artificial Sequence: Synthetic oligonucleotide
  Sense Strand Starting at position 767 of SEQ ID NO: 316100
ugaagaaaucguuauaguu

SEQ ID NO: 379016 - RNA, 19 nt, Artificial Sequence
  Description of Artificial Sequence: Synthetic oligonucleotide
  Antisense Strand to SEQ ID NO: 379015
aacuauaacgauuucuuca

SEQ ID NO: 379017 - RNA, 19 nt, Artificial Sequence
  Description of Artificial Sequence: Synthetic oligonucleotide
  Sense Strand Starting at position 767 of SEQ ID NO: 316122
uugucauacgucuaucaaa

SEQ ID NO: 379018 - RNA, 19 nt, Artificial Sequence
  Description of Artificial Sequence: Synthetic oligonucleotide
  Antisense Strand to SEQ ID NO: 379017
uuugauagacguaugacaa

SEQ ID NO: 379019 - RNA, 19 nt, Artificial Sequence
  Description of Artificial Sequence: Synthetic oligonucleotide
  Sense Strand Starting at position 767 of SEQ ID NO: 316278
aucuaacgugcauaauuau

SEQ ID NO: 379020 - RNA, 19 nt, Artificial Sequence
  Description of Artificial Sequence: Synthetic oligonucleotide
  Antisense Strand to SEQ ID NO: 379019
auaauuaugcacguuagau

SEQ ID NO: 379021 - RNA, 19 nt, Artificial Sequence
  Description of Artificial Sequence: Synthetic oligonucleotide
  Sense Strand Starting at position 767 of SEQ ID NO: 316383
agcuucuaacggcgaauuu

SEQ ID NO: 379022 - RNA, 19 nt, Artificial Sequence
  Description of Artificial Sequence: Synthetic oligonucleotide
  Antisense Strand to SEQ ID NO: 379021
aaauucgccguuagaagcu

SEQ ID NO: 379023 - RNA, 19 nt, Artificial Sequence
  Description of Artificial Sequence: Synthetic oligonucleotide
  Sense Strand Starting at position 767 of SEQ ID NO: 316384
gcuucuaacggcgaauuua

SEQ ID NO: 379024 - RNA, 19 nt, Artificial Sequence
  Description of Artificial Sequence: Synthetic oligonucleotide
  Antisense Strand to SEQ ID NO: 379023
uaaauucgccguuagaagc

SEQ ID NO: 379025 - RNA, 19 nt, Artificial Sequence
  Description of Artificial Sequence: Synthetic oligonucleotide
  Sense Strand Starting at position 767 of SEQ ID NO: 316392
cggcgaauuuaacuuguau

SEQ ID NO: 379026 - RNA, 19 nt, Artificial Sequence
  Description of Artificial Sequence: Synthetic oligonucleotide
  Antisense Strand to SEQ ID NO: 379025
auacaaguuaaauucgccg

SEQ ID NO: 379027 - RNA, 19 nt, Artificial Sequence
  Description of Artificial Sequence: Synthetic oligonucleotide
  Sense Strand Starting at position 767 of SEQ ID NO: 316394
gcgaauuuaacuuguaugu

SEQ ID NO: 379028 - RNA, 19 nt, Artificial Sequence
  Description of Artificial Sequence: Synthetic oligonucleotide
  Antisense Strand to SEQ ID NO: 379027
acauacaaguuaaauucgc

SEQ ID NO: 379029 - RNA, 19 nt, Artificial Sequence
  Description of Artificial Sequence: Synthetic oligonucleotide
  Sense Strand Starting at position 767 of SEQ ID NO: 316524
gcagguccagaccauuaaa

SEQ ID NO: 379030 - RNA, 19 nt, Artificial Sequence
  Description of Artificial Sequence: Synthetic oligonucleotide
  Antisense Strand to SEQ ID NO: 379029
uuuaauggucuggaccugc

SEQ ID NO: 379031 - RNA, 19 nt, Artificial Sequence
  Description of Artificial Sequence: Synthetic oligonucleotide
  Sense Strand Starting at position 767 of SEQ ID NO: 316890
cgcggaaucccggugcaga

SEQ ID NO: 379032 - RNA, 19 nt, Artificial Sequence
  Description of Artificial Sequence: Synthetic oligonucleotide
  Antisense Strand to SEQ ID NO: 379031
ucugcaccgggauuccgcg

SEQ ID NO: 379033 - RNA, 19 nt, Artificial Sequence
  Description of Artificial Sequence: Synthetic oligonucleotide
  Sense Strand Starting at position 767 of SEQ ID NO: 316981
cuaacucagcgcgagaaga

SEQ ID NO: 379034 - RNA, 19 nt, Artificial Sequence
  Description of Artificial Sequence: Synthetic oligonucleotide
  Antisense Strand to SEQ ID NO: 379033
ucuucucgcgcugaguuag

SEQ ID NO: 379035 - RNA, 19 nt, Artificial Sequence
  Description of Artificial Sequence: Synthetic oligonucleotide
  Sense Strand Starting at position 767 of SEQ ID NO: 317060
gugugucugccugccaaca

SEQ ID NO: 379036 - RNA, 19 nt, Artificial Sequence
  Description of Artificial Sequence: Synthetic oligonucleotide
  Antisense Strand to SEQ ID NO: 379035
uguuggcaggcagacacac

SEQ ID NO: 379037 - RNA, 19 nt, Artificial Sequence
  Description of Artificial Sequence: Synthetic oligonucleotide
  Sense Strand Starting at position 767 of SEQ ID NO: 317591
gguuucugcaccugaagaa

SEQ ID NO: 379038 - RNA, 19 nt, Artificial Sequence
  Description of Artificial Sequence: Synthetic oligonucleotide
  Antisense Strand to SEQ ID NO: 379037
uucuucaggugcagaaacc

SEQ ID NO: 379039 - RNA, 19 nt, Artificial Sequence
  Description of Artificial Sequence: Synthetic oligonucleotide
  Sense Strand Starting at position 767 of SEQ ID NO: 317592
guuucugcaccugaagaau

SEQ ID NO: 379040 - RNA, 19 nt, Artificial Sequence
  Description of Artificial Sequence: Synthetic oligonucleotide
  Antisense Strand to SEQ ID NO: 379039
auucuucaggugcagaaac

SEQ ID NO: 379041 - RNA, 19 nt, Artificial Sequence
  Description of Artificial Sequence: Synthetic oligonucleotide
  Sense Strand Starting at position 767 of SEQ ID NO: 318427
uaggguagauggucaguaa

SEQ ID NO: 379042 - RNA, 19 nt, Artificial Sequence
  Description of Artificial Sequence: Synthetic oligonucleotide
  Antisense Strand to SEQ ID NO: 379041
uuacugaccaucuacccua

SEQ ID NO: 379043 - RNA, 19 nt, Artificial Sequence
  Description of Artificial Sequence: Synthetic oligonucleotide
  Sense Strand Starting at position 767 of SEQ ID NO: 318430
gguagauggucaguaaaua

SEQ ID NO: 379044 - RNA, 19 nt, Artificial Sequence
  Description of Artificial Sequence: Synthetic oligonucleotide
  Antisense Strand to SEQ ID NO: 379043
uauuuacugaccaucuacc

SEQ ID NO: 379045 - RNA, 19 nt, Artificial Sequence
  Description of Artificial Sequence: Synthetic oligonucleotide
  Sense Strand Starting at position 767 of SEQ ID NO: 318442
guaaauacuguuuaaggca

SEQ ID NO: 379046 - RNA, 19 nt, Artificial Sequence
  Description of Artificial Sequence: Synthetic oligonucleotide
  Antisense Strand to SEQ ID NO: 379045
ugccuuaaacaguauuuac

SEQ ID NO: 379047 - RNA, 19 nt, Artificial Sequence
  Description of Artificial Sequence: Synthetic oligonucleotide
  Sense Strand Starting at position 767 of SEQ ID NO: 318450
uguuuaaggcauuaauacu

SEQ ID NO: 379048 - RNA, 19 nt, Artificial Sequence
  Description of Artificial Sequence: Synthetic oligonucleotide
  Antisense Strand to SEQ ID NO: 379047
aguauuaaugccuuaaaca

SEQ ID NO: 379049 - RNA, 19 nt, Artificial Sequence
  Description of Artificial Sequence: Synthetic oligonucleotide
  Sense Strand Starting at position 767 of SEQ ID NO: 318570
uggccugugcuguaauuua

SEQ ID NO: 379050 - RNA, 19 nt, Artificial Sequence
  Description of Artificial Sequence: Synthetic oligonucleotide
  Antisense Strand to SEQ ID NO: 379049
uaaauuacagcacaggcca

SEQ ID NO: 379051 - RNA, 19 nt, Artificial Sequence
  Description of Artificial Sequence: Synthetic oligonucleotide
  Sense Strand Starting at position 767 of SEQ ID NO: 318579
cuguaauuuagauguuugu

SEQ ID NO: 379052 - RNA, 19 nt, Artificial Sequence
  Description of Artificial Sequence: Synthetic oligonucleotide
  Antisense Strand to SEQ ID NO: 379051
acaaacaucuaaauuacag

SEQ ID NO: 379053 - RNA, 19 nt, Artificial Sequence
  Description of Artificial Sequence: Synthetic oligonucleotide
  Sense Strand Starting at position 767 of SEQ ID NO: 318669
ggaggugguuccuucagga

SEQ ID NO: 379054 - RNA, 19 nt, Artificial Sequence
  Description of Artificial Sequence: Synthetic oligonucleotide
  Antisense Strand to SEQ ID NO: 379053
uccugaaggaaccaccucc

SEQ ID NO: 379055 - RNA, 19 nt, Artificial Sequence
  Description of Artificial Sequence: Synthetic oligonucleotide
  Sense Strand Starting at position 767 of SEQ ID NO: 318712
gaggguaaaugaguucucu

SEQ ID NO: 379056 - RNA, 19 nt, Artificial Sequence
  Description of Artificial Sequence: Synthetic oligonucleotide
  Antisense Strand to SEQ ID NO: 379055
agagaacucauuuacccuc

SEQ ID NO: 379057 - RNA, 19 nt, Artificial Sequence
  Description of Artificial Sequence: Synthetic oligonucleotide
  Sense Strand Starting at position 767 of SEQ ID NO: 318716
guaaaugaguucucuuuau

SEQ ID NO: 379058 - RNA, 19 nt, Artificial Sequence
  Description of Artificial Sequence: Synthetic oligonucleotide
  Antisense Strand to SEQ ID NO: 379057
auaaagagaacucauuuac

SEQ ID NO: 379059 - RNA, 19 nt, Artificial Sequence
  Description of Artificial Sequence: Synthetic oligonucleotide
  Sense Strand Starting at position 767 of SEQ ID NO: 319165
ggguuuaaauaacugcaua

SEQ ID NO: 379060 - RNA, 19 nt, Artificial Sequence
  Description of Artificial Sequence: Synthetic oligonucleotide
  Antisense Strand to SEQ ID NO: 379059
uaugcaguuauuuaaaccc

SEQ ID NO: 379061 - RNA, 19 nt, Artificial Sequence
  Description of Artificial Sequence: Synthetic oligonucleotide
  Sense Strand Starting at position 768 of SEQ ID NO: 315503
cgcagcaauccagacagaa

SEQ ID NO: 379062 - RNA, 19 nt, Artificial Sequence
  Description of Artificial Sequence: Synthetic oligonucleotide
  Antisense Strand to SEQ ID NO: 379061
uucugucuggauugcugcg

SEQ ID NO: 379063 - RNA, 19 nt, Artificial Sequence
  Description of Artificial Sequence: Synthetic oligonucleotide
  Sense Strand Starting at position 768 of SEQ ID NO: 315702
aaagguugggucugacaca

SEQ ID NO: 379064 - RNA, 19 nt, Artificial Sequence
  Description of Artificial Sequence: Synthetic oligonucleotide
  Antisense Strand to SEQ ID NO: 379063
ugugucagacccaaccuuu

SEQ ID NO: 379065 - RNA, 19 nt, Artificial Sequence
  Description of Artificial Sequence: Synthetic oligonucleotide
  Sense Strand Starting at position 768 of SEQ ID NO: 315815
ggcccauccuuccugguaa

SEQ ID NO: 379066 - RNA, 19 nt, Artificial Sequence
  Description of Artificial Sequence: Synthetic oligonucleotide
  Antisense Strand to SEQ ID NO: 379065
uuaccaggaaggaugggcc

SEQ ID NO: 379067 - RNA, 19 nt, Artificial Sequence
  Description of Artificial Sequence: Synthetic oligonucleotide
  Sense Strand Starting at position 768 of SEQ ID NO: 315817
cccauccuuccugguaaga

SEQ ID NO: 379068 - RNA, 19 nt, Artificial Sequence
  Description of Artificial Sequence: Synthetic oligonucleotide
  Antisense Strand to SEQ ID NO: 379067
ucuuaccaggaaggauggg

SEQ ID NO: 379069 - RNA, 19 nt, Artificial Sequence
  Description of Artificial Sequence: Synthetic oligonucleotide
  Sense Strand Starting at position 768 of SEQ ID NO: 315859
cccguuauuucuguccuga

SEQ ID NO: 379070 - RNA, 19 nt, Artificial Sequence
  Description of Artificial Sequence: Synthetic oligonucleotide
  Antisense Strand to SEQ ID NO: 379069
ucaggacagaaauaacggg

SEQ ID NO: 379071 - RNA, 19 nt, Artificial Sequence
  Description of Artificial Sequence: Synthetic oligonucleotide
  Sense Strand Starting at position 768 of SEQ ID NO: 315861
cguuauuucuguccugaac

SEQ ID NO: 379072 - RNA, 19 nt, Artificial Sequence
  Description of Artificial Sequence: Synthetic oligonucleotide
  Antisense Strand to SEQ ID NO: 379071
guucaggacagaaauaacg

SEQ ID NO: 379073 - RNA, 19 nt, Artificial Sequence
  Description of Artificial Sequence: Synthetic oligonucleotide
  Sense Strand Starting at position 768 of SEQ ID NO: 315863
uuauuucuguccugaacug

SEQ ID NO: 379074 - RNA, 19 nt, Artificial Sequence
  Description of Artificial Sequence: Synthetic oligonucleotide
  Antisense Strand to SEQ ID NO: 379073
caguucaggacagaaauaa

SEQ ID NO: 379075 - RNA, 19 nt, Artificial Sequence
  Description of Artificial Sequence: Synthetic oligonucleotide
  Sense Strand Starting at position 768 of SEQ ID NO: 315886
gggacaggauguuuccuaa

SEQ ID NO: 379076 - RNA, 19 nt, Artificial Sequence
  Description of Artificial Sequence: Synthetic oligonucleotide
  Antisense Strand to SEQ ID NO: 379075
uuaggaaacauccuguccc

SEQ ID NO: 379077 - RNA, 19 nt, Artificial Sequence
  Description of Artificial Sequence: Synthetic oligonucleotide
  Sense Strand Starting at position 768 of SEQ ID NO: 316020
cagggcuacucuuagggaa

SEQ ID NO: 379078 - RNA, 19 nt, Artificial Sequence
  Description of Artificial Sequence: Synthetic oligonucleotide
  Antisense Strand to SEQ ID NO: 379077
uucccuaagaguagcccug

SEQ ID NO: 379079 - RNA, 19 nt, Artificial Sequence
  Description of Artificial Sequence: Synthetic oligonucleotide
  Sense Strand Starting at position 768 of SEQ ID NO: 316183
aagaaaguuugagaaguca

SEQ ID NO: 379080 - RNA, 19 nt, Artificial Sequence
  Description of Artificial Sequence: Synthetic oligonucleotide
  Antisense Strand to SEQ ID NO: 379079
ugacuucucaaacuuucuu

SEQ ID NO: 379081 - RNA, 19 nt, Artificial Sequence
  Description of Artificial Sequence: Synthetic oligonucleotide
  Sense Strand Starting at position 768 of SEQ ID NO: 316400
gagaauggcuagggaaaca

SEQ ID NO: 379082 - RNA, 19 nt, Artificial Sequence
  Description of Artificial Sequence: Synthetic oligonucleotide
  Antisense Strand to SEQ ID NO: 379081
uguuucccuagccauucuc

SEQ ID NO: 379083 - RNA, 19 nt, Artificial Sequence
  Description of Artificial Sequence: Synthetic oligonucleotide
  Sense Strand Starting at position 768 of SEQ ID NO: 316595
uugaauaauuggccaggau

SEQ ID NO: 379084 - RNA, 19 nt, Artificial Sequence
  Description of Artificial Sequence: Synthetic oligonucleotide
  Antisense Strand to SEQ ID NO: 379083
auccuggccaauuauucaa

SEQ ID NO: 379085 - RNA, 19 nt, Artificial Sequence
  Description of Artificial Sequence: Synthetic oligonucleotide
  Sense Strand Starting at position 768 of SEQ ID NO: 316680
gucucagucccagaguuag

SEQ ID NO: 379086 - RNA, 19 nt, Artificial Sequence
  Description of Artificial Sequence: Synthetic oligonucleotide
  Antisense Strand to SEQ ID NO: 379085
cuaacucugggacugagac

SEQ ID NO: 379087 - RNA, 19 nt, Artificial Sequence
  Description of Artificial Sequence: Synthetic oligonucleotide
  Sense Strand Starting at position 768 of SEQ ID NO: 316712
cgggaguuggucugucaag

SEQ ID NO: 379088 - RNA, 19 nt, Artificial Sequence
  Description of Artificial Sequence: Synthetic oligonucleotide
  Antisense Strand to SEQ ID NO: 379087
cuugacagaccaacucccg

SEQ ID NO: 379089 - RNA, 19 nt, Artificial Sequence
  Description of Artificial Sequence: Synthetic oligonucleotide
  Sense Strand Starting at position 768 of SEQ ID NO: 317257
ggcuguaucguuccacgca

SEQ ID NO: 379090 - RNA, 19 nt, Artificial Sequence
  Description of Artificial Sequence: Synthetic oligonucleotide
  Antisense Strand to SEQ ID NO: 379089
ugcguggaacgauacagcc

SEQ ID NO: 379091 - RNA, 19 nt, Artificial Sequence
  Description of Artificial Sequence: Synthetic oligonucleotide
  Sense Strand Starting at position 768 of SEQ ID NO: 317471
guccuaccucccggugaaa

SEQ ID NO: 379092 - RNA, 19 nt, Artificial Sequence
  Description of Artificial Sequence: Synthetic oligonucleotide
  Antisense Strand to SEQ ID NO: 379091
uuucaccgggagguaggac

SEQ ID NO: 379093 - RNA, 19 nt, Artificial Sequence
  Description of Artificial Sequence: Synthetic oligonucleotide
  Sense Strand Starting at position 768 of SEQ ID NO: 317576
gaugaucuugcugauccga

SEQ ID NO: 379094 - RNA, 19 nt, Artificial Sequence
  Description of Artificial Sequence: Synthetic oligonucleotide
  Antisense Strand to SEQ ID NO: 379093
ucggaucagcaagaucauc

SEQ ID NO: 379095 - RNA, 19 nt, Artificial Sequence
  Description of Artificial Sequence: Synthetic oligonucleotide
  Sense Strand Starting at position 768 of SEQ ID NO: 317578
ugaucuugcugauccgaca

SEQ ID NO: 379096 - RNA, 19 nt, Artificial Sequence
  Description of Artificial Sequence: Synthetic oligonucleotide
  Antisense Strand to SEQ ID NO: 379095
ugucggaucagcaagauca

SEQ ID NO: 379097 - RNA, 19 nt, Artificial Sequence
  Description of Artificial Sequence: Synthetic oligonucleotide
  Sense Strand Starting at position 768 of SEQ ID NO: 317833
ucccucuaccugggacaau

SEQ ID NO: 379098 - RNA, 19 nt, Artificial Sequence
  Description of Artificial Sequence: Synthetic oligonucleotide
  Antisense Strand to SEQ ID NO: 379097
auugucccagguagaggga

SEQ ID NO: 379099 - RNA, 19 nt, Artificial Sequence
  Description of Artificial Sequence: Synthetic oligonucleotide
  Sense Strand Starting at position 768 of SEQ ID NO: 317834
cccucuaccugggacaauu

SEQ ID NO: 379100 - RNA, 19 nt, Artificial Sequence
  Description of Artificial Sequence: Synthetic oligonucleotide
  Antisense Strand to SEQ ID NO: 379099
aauugucccagguagaggg

SEQ ID NO: 379101 - RNA, 19 nt, Artificial Sequence
  Description of Artificial Sequence: Synthetic oligonucleotide
  Sense Strand Starting at position 768 of SEQ ID NO: 317868
uauaguauuuguccgucaa

SEQ ID NO: 379102 - RNA, 19 nt, Artificial Sequence
  Description of Artificial Sequence: Synthetic oligonucleotide
  Antisense Strand to SEQ ID NO: 379101
uugacggacaaauacuaua

SEQ ID NO: 379103 - RNA, 19 nt, Artificial Sequence
  Description of Artificial Sequence: Synthetic oligonucleotide
  Sense Strand Starting at position 768 of SEQ ID NO: 317869
auaguauuuguccgucaag

SEQ ID NO: 379104 - RNA, 19 nt, Artificial Sequence
  Description of Artificial Sequence: Synthetic oligonucleotide
  Antisense Strand to SEQ ID NO: 379103
cuugacggacaaauacuau

SEQ ID NO: 379105 - RNA, 19 nt, Artificial Sequence
  Description of Artificial Sequence: Synthetic oligonucleotide
  Sense Strand Starting at position 768 of SEQ ID NO: 317870
uaguauuuguccgucaagc

SEQ ID NO: 379106 - RNA, 19 nt, Artificial Sequence
  Description of Artificial Sequence: Synthetic oligonucleotide
  Antisense Strand to SEQ ID NO: 379105
gcuugacggacaaauacua

SEQ ID NO: 379107 - RNA, 19 nt, Artificial Sequence
  Description of Artificial Sequence: Synthetic oligonucleotide
  Sense Strand Starting at position 768 of SEQ ID NO: 317872
guauuuguccgucaagcuc

SEQ ID NO: 379108 - RNA, 19 nt, Artificial Sequence
  Description of Artificial Sequence: Synthetic oligonucleotide
  Antisense Strand to SEQ ID NO: 379107
gagcuugacggacaaauac

SEQ ID NO: 379109 - RNA, 19 nt, Artificial Sequence
  Description of Artificial Sequence: Synthetic oligonucleotide
  Sense Strand Starting at position 768 of SEQ ID NO: 317906
gcuaucaucuugcuguguu

SEQ ID NO: 379110 - RNA, 19 nt, Artificial Sequence
  Description of Artificial Sequence: Synthetic oligonucleotide
  Antisense Strand to SEQ ID NO: 379109
aacacagcaagaugauagc

SEQ ID NO: 379111 - RNA, 19 nt, Artificial Sequence
  Description of Artificial Sequence: Synthetic oligonucleotide
  Sense Strand Starting at position 768 of SEQ ID NO: 317928
uugucuuuauaggacuuaa

SEQ ID NO: 379112 - RNA, 19 nt, Artificial Sequence
  Description of Artificial Sequence: Synthetic oligonucleotide
  Antisense Strand to SEQ ID NO: 379111
uuaaguccuauaaagacaa

SEQ ID NO: 379113 - RNA, 19 nt, Artificial Sequence
  Description of Artificial Sequence: Synthetic oligonucleotide
  Sense Strand Starting at position 768 of SEQ ID NO: 318050
agcccagaucuccagauau

SEQ ID NO: 379114 - RNA, 19 nt, Artificial Sequence
  Description of Artificial Sequence: Synthetic oligonucleotide
  Antisense Strand to SEQ ID NO: 379113
auaucuggagaucugggcu

SEQ ID NO: 379115 - RNA, 19 nt, Artificial Sequence
  Description of Artificial Sequence: Synthetic oligonucleotide
  Sense Strand Starting at position 768 of SEQ ID NO: 318067
auaugaaauccguguaaua

SEQ ID NO: 379116 - RNA, 19 nt, Artificial Sequence
  Description of Artificial Sequence: Synthetic oligonucleotide
  Antisense Strand to SEQ ID NO: 379115
uauuacacggauuucauau

SEQ ID NO: 379117 - RNA, 19 nt, Artificial Sequence
  Description of Artificial Sequence: Synthetic oligonucleotide
  Sense Strand Starting at position 768 of SEQ ID NO: 318069
augaaauccguguaauaag

SEQ ID NO: 379118 - RNA, 19 nt, Artificial Sequence
  Description of Artificial Sequence: Synthetic oligonucleotide
  Antisense Strand to SEQ ID NO: 379117
cuuauuacacggauuucau

SEQ ID NO: 379119 - RNA, 19 nt, Artificial Sequence
  Description of Artificial Sequence: Synthetic oligonucleotide
  Sense Strand Starting at position 768 of SEQ ID NO: 318129
agagacuguggcugagaau

SEQ ID NO: 379120 - RNA, 19 nt, Artificial Sequence
  Description of Artificial Sequence: Synthetic oligonucleotide
  Antisense Strand to SEQ ID NO: 379119
auucucagccacagucucu

SEQ ID NO: 379121 - RNA, 19 nt, Artificial Sequence
  Description of Artificial Sequence: Synthetic oligonucleotide
  Sense Strand Starting at position 768 of SEQ ID NO: 318140
cugagaaugguccagcuac

SEQ ID NO: 379122 - RNA, 19 nt, Artificial Sequence
  Description of Artificial Sequence: Synthetic oligonucleotide
  Antisense Strand to SEQ ID NO: 379121
guagcuggaccauucucag

SEQ ID NO: 379123 - RNA, 19 nt, Artificial Sequence
  Description of Artificial Sequence: Synthetic oligonucleotide
  Sense Strand Starting at position 768 of SEQ ID NO: 318476
ugggauuaugggugucugu

SEQ ID NO: 379124 - RNA, 19 nt, Artificial Sequence
  Description of Artificial Sequence: Synthetic oligonucleotide
  Antisense Strand to SEQ ID NO: 379123
acagacacccauaauccca

SEQ ID NO: 379125 - RNA, 19 nt, Artificial Sequence
  Description of Artificial Sequence: Synthetic oligonucleotide
  Sense Strand Starting at position 768 of SEQ ID NO: 318710
gaauaagacuggugaaauu

SEQ ID NO: 379126 - RNA, 19 nt, Artificial Sequence
  Description of Artificial Sequence: Synthetic oligonucleotide
  Antisense Strand to SEQ ID NO: 379125
aauuucaccagucuuauuc

SEQ ID NO: 379127 - RNA, 19 nt, Artificial Sequence
  Description of Artificial Sequence: Synthetic oligonucleotide
  Sense Strand Starting at position 768 of SEQ ID NO: 318943
guggcauaggagggauuaa

SEQ ID NO: 379128 - RNA, 19 nt, Artificial Sequence
  Description of Artificial Sequence: Synthetic oligonucleotide
  Antisense Strand to SEQ ID NO: 379127
uuaaucccuccuaugccac

SEQ ID NO: 379129 - RNA, 19 nt, Artificial Sequence
  Description of Artificial Sequence: Synthetic oligonucleotide
  Sense Strand Starting at position 768 of SEQ ID NO: 318979
uggaucaccugcuaucuaa

SEQ ID NO: 379130 - RNA, 19 nt, Artificial Sequence
  Description of Artificial Sequence: Synthetic oligonucleotide
  Antisense Strand to SEQ ID NO: 379129
uuagauagcaggugaucca

SEQ ID NO: 379131 - RNA, 19 nt, Artificial Sequence
  Description of Artificial Sequence: Synthetic oligonucleotide
  Sense Strand Starting at position 768 of SEQ ID NO: 319022
ugagaagaccugugucaag

SEQ ID NO: 379132 - RNA, 19 nt, Artificial Sequence
  Description of Artificial Sequence: Synthetic oligonucleotide
  Antisense Strand to SEQ ID NO: 379131
cuugacacaggucuucuca

SEQ ID NO: 379133 - RNA, 19 nt, Artificial Sequence
  Description of Artificial Sequence: Synthetic oligonucleotide
  Sense Strand Starting at position 768 of SEQ ID NO: 319088
gacgccagaagguauguaa

SEQ ID NO: 379134 - RNA, 19 nt, Artificial Sequence
  Description of Artificial Sequence: Synthetic oligonucleotide
  Antisense Strand to SEQ ID NO: 379133
uuacauaccuucuggcguc

SEQ ID NO: 379135 - RNA, 19 nt, Artificial Sequence
  Description of Artificial Sequence: Synthetic oligonucleotide
  Sense Strand Starting at position 768 of SEQ ID NO: 319091
gccagaagguauguaacuu

SEQ ID NO: 379136 - RNA, 19 nt, Artificial Sequence
  Description of Artificial Sequence: Synthetic oligonucleotide
  Antisense Strand to SEQ ID NO: 379135
aaguuacauaccuucuggc

SEQ ID NO: 379137 - RNA, 19 nt, Artificial Sequence
  Description of Artificial Sequence: Synthetic oligonucleotide
  Sense Strand Starting at position 768 of SEQ ID NO: 319113
gauccuuucuggguaaccu

SEQ ID NO: 379138 - RNA, 19 nt, Artificial Sequence
  Description of Artificial Sequence: Synthetic oligonucleotide
  Antisense Strand to SEQ ID NO: 379137
agguuacccagaaaggauc

SEQ ID NO: 379139 - RNA, 19 nt, Artificial Sequence
  Description of Artificial Sequence: Synthetic oligonucleotide
  Sense Strand Starting at position 768 of SEQ ID NO: 319167
agagguugugcugacuuua

SEQ ID NO: 379140 - RNA, 19 nt, Artificial Sequence
  Description of Artificial Sequence: Synthetic oligonucleotide
  Antisense Strand to SEQ ID NO: 379139
uaaagucagcacaaccucu

SEQ ID NO: 379141 - RNA, 19 nt, Artificial Sequence
  Description of Artificial Sequence: Synthetic oligonucleotide
  Sense Strand Starting at position 769 of SEQ ID NO: 315813
ggcauugggcugcaaagaa

SEQ ID NO: 379142 - RNA, 19 nt, Artificial Sequence
  Description of Artificial Sequence: Synthetic oligonucleotide
  Antisense Strand to SEQ ID NO: 379141
uucuuugcagcccaaugcc

SEQ ID NO: 379143 - RNA, 19 nt, Artificial Sequence
  Description of Artificial Sequence: Synthetic oligonucleotide
  Sense Strand Starting at position 769 of SEQ ID NO: 316025
gucuacaguucuguugaga

SEQ ID NO: 379144 - RNA, 19 nt, Artificial Sequence
  Description of Artificial Sequence: Synthetic oligonucleotide
  Antisense Strand to SEQ ID NO: 379143
ucucaacagaacuguagac

SEQ ID NO: 379145 - RNA, 19 nt, Artificial Sequence
  Description of Artificial Sequence: Synthetic oligonucleotide
  Sense Strand Starting at position 769 of SEQ ID NO: 316262
ccaaguuugcagggaccaa

SEQ ID NO: 379146 - RNA, 19 nt, Artificial Sequence
  Description of Artificial Sequence: Synthetic oligonucleotide
  Antisense Strand to SEQ ID NO: 379145
uuggucccugcaaacuugg

SEQ ID NO: 379147 - RNA, 19 nt, Artificial Sequence
  Description of Artificial Sequence: Synthetic oligonucleotide
  Sense Strand Starting at position 769 of SEQ ID NO: 317328
ccaggugguuucuccuuaa

SEQ ID NO: 379148 - RNA, 19 nt, Artificial Sequence
  Description of Artificial Sequence: Synthetic oligonucleotide
  Antisense Strand to SEQ ID NO: 379147
uuaaggagaaaccaccugg

SEQ ID NO: 379149 - RNA, 19 nt, Artificial Sequence
  Description of Artificial Sequence: Synthetic oligonucleotide
  Sense Strand Starting at position 769 of SEQ ID NO: 317383
aagggcaagcugugauagu

SEQ ID NO: 379150 - RNA, 19 nt, Artificial Sequence
  Description of Artificial Sequence: Synthetic oligonucleotide
  Antisense Strand to SEQ ID NO: 379149
acuaucacagcuugcccuu

SEQ ID NO: 379151 - RNA, 19 nt, Artificial Sequence
  Description of Artificial Sequence: Synthetic oligonucleotide
  Sense Strand Starting at position 769 of SEQ ID NO: 317922
ccaggcuucgugggaccaa

SEQ ID NO: 379152 - RNA, 19 nt, Artificial Sequence
  Description of Artificial Sequence: Synthetic oligonucleotide
  Antisense Strand to SEQ ID NO: 379151
uuggucccacgaagccugg

SEQ ID NO: 379153 - RNA, 19 nt, Artificial Sequence
  Description of Artificial Sequence: Synthetic oligonucleotide
  Sense Strand Starting at position 769 of SEQ ID NO: 318036
gcgucuuguucccucuaga

SEQ ID NO: 379154 - RNA, 19 nt, Artificial Sequence
  Description of Artificial Sequence: Synthetic oligonucleotide
  Antisense Strand to SEQ ID NO: 379153
ucuagagggaacaagacgc

SEQ ID NO: 379155 - RNA, 19 nt, Artificial Sequence
  Description of Artificial Sequence: Synthetic oligonucleotide
  Sense Strand Starting at position 769 of SEQ ID NO: 318077
gggucuuccuccugggacu

SEQ ID NO: 379156 - RNA, 19 nt, Artificial Sequence
  Description of Artificial Sequence: Synthetic oligonucleotide
  Antisense Strand to SEQ ID NO: 379155
agucccaggaggaagaccc

SEQ ID NO: 379157 - RNA, 19 nt, Artificial Sequence
  Description of Artificial Sequence: Synthetic oligonucleotide
  Sense Strand Starting at position 769 of SEQ ID NO: 318201
agcuguugucuccagagca

SEQ ID NO: 379158 - RNA, 19 nt, Artificial Sequence
  Description of Artificial Sequence: Synthetic oligonucleotide
  Antisense Strand to SEQ ID NO: 379157
ugcucuggagacaacagcu

SEQ ID NO: 379159 - RNA, 19 nt, Artificial Sequence
  Description of Artificial Sequence: Synthetic oligonucleotide
  Sense Strand Starting at position 769 of SEQ ID NO: 318493
gcccgcaucucgcuaaaga

SEQ ID NO: 379160 - RNA, 19 nt, Artificial Sequence
  Description of Artificial Sequence: Synthetic oligonucleotide
  Antisense Strand to SEQ ID NO: 379159
ucuuuagcgagaugcgggc

SEQ ID NO: 379161 - RNA, 19 nt, Artificial Sequence
  Description of Artificial Sequence: Synthetic oligonucleotide
  Sense Strand Starting at position 769 of SEQ ID NO: 318494
cccgcaucucgcuaaagau

SEQ ID NO: 379162 - RNA, 19 nt, Artificial Sequence
  Description of Artificial Sequence: Synthetic oligonucleotide
  Antisense Strand to SEQ ID NO: 379161
aucuuuagcgagaugcggg

SEQ ID NO: 379163 - RNA, 19 nt, Artificial Sequence
  Description of Artificial Sequence: Synthetic oligonucleotide
  Sense Strand Starting at position 769 of SEQ ID NO: 318546
accgucuucguggaugaga

SEQ ID NO: 379164 - RNA, 19 nt, Artificial Sequence
  Description of Artificial Sequence: Synthetic oligonucleotide
  Antisense Strand to SEQ ID NO: 379163
ucucauccacgaagacggu

SEQ ID NO: 379165 - RNA, 19 nt, Artificial Sequence
  Description of Artificial Sequence: Synthetic oligonucleotide
  Sense Strand Starting at position 769 of SEQ ID NO: 318548
cgucuucguggaugagagu

SEQ ID NO: 379166 - RNA, 19 nt, Artificial Sequence
  Description of Artificial Sequence: Synthetic oligonucleotide
  Antisense Strand to SEQ ID NO: 379165
acucucauccacgaagacg

SEQ ID NO: 379167 - RNA, 19 nt, Artificial Sequence
  Description of Artificial Sequence: Synthetic oligonucleotide
  Sense Strand Starting at position 769 of SEQ ID NO: 318549
gucuucguggaugagagua

SEQ ID NO: 379168 - RNA, 19 nt, Artificial Sequence
  Description of Artificial Sequence: Synthetic oligonucleotide
  Antisense Strand to SEQ ID NO: 379167
uacucucauccacgaagac

SEQ ID NO: 379169 - RNA, 19 nt, Artificial Sequence
  Description of Artificial Sequence: Synthetic oligonucleotide
  Sense Strand Starting at position 769 of SEQ ID NO: 318554
cguggaugagaguaucuga

SEQ ID NO: 379170 - RNA, 19 nt, Artificial Sequence
  Description of Artificial Sequence: Synthetic oligonucleotide
  Antisense Strand to SEQ ID NO: 379169
ucagauacucucauccacg

SEQ ID NO: 379171 - RNA, 19 nt, Artificial Sequence
  Description of Artificial Sequence: Synthetic oligonucleotide
  Sense Strand Starting at position 769 of SEQ ID NO: 318557
ggaugagaguaucugaagu

SEQ ID NO: 379172 - RNA, 19 nt, Artificial Sequence
  Description of Artificial Sequence: Synthetic oligonucleotide
  Antisense Strand to SEQ ID NO: 379171
acuucagauacucucaucc

SEQ ID NO: 379173 - RNA, 19 nt, Artificial Sequence
  Description of Artificial Sequence: Synthetic oligonucleotide
  Sense Strand Starting at position 769 of SEQ ID NO: 318577
cucaguuugacugaggguu

SEQ ID NO: 379174 - RNA, 19 nt, Artificial Sequence
  Description of Artificial Sequence: Synthetic oligonucleotide
  Antisense Strand to SEQ ID NO: 379173
aacccucagucaaacugag

SEQ ID NO: 379175 - RNA, 19 nt, Artificial Sequence
  Description of Artificial Sequence: Synthetic oligonucleotide
  Sense Strand Starting at position 769 of SEQ ID NO: 318609
agcaguugucuccagguca

SEQ ID NO: 379176 - RNA, 19 nt, Artificial Sequence
  Description of Artificial Sequence: Synthetic oligonucleotide
  Antisense Strand to SEQ ID NO: 379175
ugaccuggagacaacugcu

SEQ ID NO: 379177 - RNA, 19 nt, Artificial Sequence
  Description of Artificial Sequence: Synthetic oligonucleotide
  Sense Strand Starting at position 769 of SEQ ID NO: 318641
uggaaagcgcuuuggaaug

SEQ ID NO: 379178 - RNA, 19 nt, Artificial Sequence
  Description of Artificial Sequence: Synthetic oligonucleotide
  Antisense Strand to SEQ ID NO: 379177
cauuccaaagcgcuuucca

SEQ ID NO: 379179 - RNA, 19 nt, Artificial Sequence
  Description of Artificial Sequence: Synthetic oligonucleotide
  Sense Strand Starting at position 769 of SEQ ID NO: 318687
ccgagaagccaucgggaau

SEQ ID NO: 379180 - RNA, 19 nt, Artificial Sequence
  Description of Artificial Sequence: Synthetic oligonucleotide
  Antisense Strand to SEQ ID NO: 379179
auucccgauggcuucucgg

SEQ ID NO: 379181 - RNA, 19 nt, Artificial Sequence
  Description of Artificial Sequence: Synthetic oligonucleotide
  Sense Strand Starting at position 769 of SEQ ID NO: 318833
ugaguuagcuucucuauua

SEQ ID NO: 379182 - RNA, 19 nt, Artificial Sequence
  Description of Artificial Sequence: Synthetic oligonucleotide
  Antisense Strand to SEQ ID NO: 379181
uaauagagaagcuaacuca

SEQ ID NO: 379183 - RNA, 19 nt, Artificial Sequence
  Description of Artificial Sequence: Synthetic oligonucleotide
  Sense Strand Starting at position 769 of SEQ ID NO: 318876
gugaguaaguuacagugaa

SEQ ID NO: 379184 - RNA, 19 nt, Artificial Sequence
  Description of Artificial Sequence: Synthetic oligonucleotide
  Antisense Strand to SEQ ID NO: 379183
uucacuguaacuuacucac

SEQ ID NO: 379185 - RNA, 19 nt, Artificial Sequence
  Description of Artificial Sequence: Synthetic oligonucleotide
  Sense Strand Starting at position 769 of SEQ ID NO: 318909
gaaccuuugugggagaaag

SEQ ID NO: 379186 - RNA, 19 nt, Artificial Sequence
  Description of Artificial Sequence: Synthetic oligonucleotide
  Antisense Strand to SEQ ID NO: 379185
cuuucucccacaaagguuc

SEQ ID NO: 379187 - RNA, 19 nt, Artificial Sequence
  Description of Artificial Sequence: Synthetic oligonucleotide
  Sense Strand Starting at position 769 of SEQ ID NO: 318933
gaccuuuccuauugguaga

SEQ ID NO: 379188 - RNA, 19 nt, Artificial Sequence
  Description of Artificial Sequence: Synthetic oligonucleotide
  Antisense Strand to SEQ ID NO: 379187
ucuaccaauaggaaagguc

SEQ ID NO: 379189 - RNA, 19 nt, Artificial Sequence
  Description of Artificial Sequence: Synthetic oligonucleotide
  Sense Strand Starting at position 769 of SEQ ID NO: 318936
cuuuccuauugguagagga

SEQ ID NO: 379190 - RNA, 19 nt, Artificial Sequence
  Description of Artificial Sequence: Synthetic oligonucleotide
  Antisense Strand to SEQ ID NO: 379189
uccucuaccaauaggaaag

SEQ ID NO: 379191 - RNA, 19 nt, Artificial Sequence
  Description of Artificial Sequence: Synthetic oligonucleotide
  Sense Strand Starting at position 769 of SEQ ID NO: 318980
uuucuauuauggucgcauu

SEQ ID NO: 379192 - RNA, 19 nt, Artificial Sequence
  Description of Artificial Sequence: Synthetic oligonucleotide
  Antisense Strand to SEQ ID NO: 379191
aaugcgaccauaauagaaa

SEQ ID NO: 379193 - RNA, 19 nt, Artificial Sequence
  Description of Artificial Sequence: Synthetic oligonucleotide
  Sense Strand Starting at position 769 of SEQ ID NO: 318981
uucuauuauggucgcauua

SEQ ID NO: 379194 - RNA, 19 nt, Artificial Sequence
  Description of Artificial Sequence: Synthetic oligonucleotide
  Antisense Strand to SEQ ID NO: 379193
uaaugcgaccauaauagaa

SEQ ID NO: 379195 - RNA, 19 nt, Artificial Sequence
  Description of Artificial Sequence: Synthetic oligonucleotide
  Sense Strand Starting at position 769 of SEQ ID NO: 318983
cuauuauggucgcauuauu

SEQ ID NO: 379196 - RNA, 19 nt, Artificial Sequence
  Description of Artificial Sequence: Synthetic oligonucleotide
  Antisense Strand to SEQ ID NO: 379195
aauaaugcgaccauaauag

SEQ ID NO: 379197 - RNA, 19 nt, Artificial Sequence
  Description of Artificial Sequence: Synthetic oligonucleotide
  Sense Strand Starting at position 769 of SEQ ID NO: 319011
cguaaauggcuguugccua

SEQ ID NO: 379198 - RNA, 19 nt, Artificial Sequence
  Description of Artificial Sequence: Synthetic oligonucleotide
  Antisense Strand to SEQ ID NO: 379197
uaggcaacagccauuuacg

SEQ ID NO: 379199 - RNA, 19 nt, Artificial Sequence
  Description of Artificial Sequence: Synthetic oligonucleotide
  Sense Strand Starting at position 769 of SEQ ID NO: 319012
guaaauggcuguugccuaa

SEQ ID NO: 379200 - RNA, 19 nt, Artificial Sequence
  Description of Artificial Sequence: Synthetic oligonucleotide
  Antisense Strand to SEQ ID NO: 379199
uuaggcaacagccauuuac

SEQ ID NO: 379201 - RNA, 19 nt, Artificial Sequence
  Description of Artificial Sequence: Synthetic oligonucleotide
  Sense Strand Starting at position 769 of SEQ ID NO: 319035
ggaagcuuuaaggaucguu

SEQ ID NO: 379202 - RNA, 19 nt, Artificial Sequence
  Description of Artificial Sequence: Synthetic oligonucleotide
  Antisense Strand to SEQ ID NO: 379201
aacgauccuuaaagcuucc

SEQ ID NO: 379203 - RNA, 19 nt, Artificial Sequence
  Description of Artificial Sequence: Synthetic oligonucleotide
  Sense Strand Starting at position 769 of SEQ ID NO: 319038
agcuuuaaggaucguuguu

SEQ ID NO: 379204 - RNA, 19 nt, Artificial Sequence
  Description of Artificial Sequence: Synthetic oligonucleotide
  Antisense Strand to SEQ ID NO: 379203
aacaacgauccuuaaagcu

SEQ ID NO: 379205 - RNA, 19 nt, Artificial Sequence
  Description of Artificial Sequence: Synthetic oligonucleotide
  Sense Strand Starting at position 769 of SEQ ID NO: 319040
cuuuaaggaucguuguuaa

SEQ ID NO: 379206 - RNA, 19 nt, Artificial Sequence
  Description of Artificial Sequence: Synthetic oligonucleotide
  Antisense Strand to SEQ ID NO: 379205
uuaacaacgauccuuaaag

SEQ ID NO: 379207 - RNA, 19 nt, Artificial Sequence
  Description of Artificial Sequence: Synthetic oligonucleotide
  Sense Strand Starting at position 769 of SEQ ID NO: 319043
uaaggaucguuguuaaagc

SEQ ID NO: 379208 - RNA, 19 nt, Artificial Sequence
  Description of Artificial Sequence: Synthetic oligonucleotide
  Antisense Strand to SEQ ID NO: 379207
gcuuuaacaacgauccuua

SEQ ID NO: 379209 - RNA, 19 nt, Artificial Sequence
  Description of Artificial Sequence: Synthetic oligonucleotide
  Sense Strand Starting at position 769 of SEQ ID NO: 319044
aaggaucguuguuaaagca

SEQ ID NO: 379210 - RNA, 19 nt, Artificial Sequence
  Description of Artificial Sequence: Synthetic oligonucleotide
  Antisense Strand to SEQ ID NO: 379209
ugcuuuaacaacgauccuu

SEQ ID NO: 379211 - RNA, 19 nt, Artificial Sequence
  Description of Artificial Sequence: Synthetic oligonucleotide
  Sense Strand Starting at position 769 of SEQ ID NO: 319177
gaguucgaggcuugacaaa

SEQ ID NO: 379212 - RNA, 19 nt, Artificial Sequence
  Description of Artificial Sequence: Synthetic oligonucleotide
  Antisense Strand to SEQ ID NO: 379211
uuugucaagccucgaacuc

SEQ ID NO: 379213 - RNA, 19 nt, Artificial Sequence
  Description of Artificial Sequence: Synthetic oligonucleotide
  Sense Strand Starting at position 770 of SEQ ID NO: 315357
ggcauugggcugcaaagaa

SEQ ID NO: 379214 - RNA, 19 nt, Artificial Sequence
  Description of Artificial Sequence: Synthetic oligonucleotide
  Antisense Strand to SEQ ID NO: 379213
uucuuugcagcccaaugcc

SEQ ID NO: 379215 - RNA, 19 nt, Artificial Sequence
  Description of Artificial Sequence: Synthetic oligonucleotide
  Sense Strand Starting at position 770 of SEQ ID NO: 315569
gucuacaguucuguugaga

SEQ ID NO: 379216 - RNA, 19 nt, Artificial Sequence
  Description of Artificial Sequence: Synthetic oligonucleotide
  Antisense Strand to SEQ ID NO: 379215
ucucaacagaacuguagac

SEQ ID NO: 379217 - RNA, 19 nt, Artificial Sequence
  Description of Artificial Sequence: Synthetic oligonucleotide
  Sense Strand Starting at position 770 of SEQ ID NO: 315806
ccaaguuugcagggaccaa

SEQ ID NO: 379218 - RNA, 19 nt, Artificial Sequence
  Description of Artificial Sequence: Synthetic oligonucleotide
  Antisense Strand to SEQ ID NO: 379217
uuggucccugcaaacuugg

SEQ ID NO: 379219 - RNA, 19 nt, Artificial Sequence
  Description of Artificial Sequence: Synthetic oligonucleotide
  Sense Strand Starting at position 770 of SEQ ID NO: 316872
ccaggugguuucuccuuaa

SEQ ID NO: 379220 - RNA, 19 nt, Artificial Sequence
  Description of Artificial Sequence: Synthetic oligonucleotide
  Antisense Strand to SEQ ID NO: 379219
uuaaggagaaaccaccugg

SEQ ID NO: 379221 - RNA, 19 nt, Artificial Sequence
  Description of Artificial Sequence: Synthetic oligonucleotide
  Sense Strand Starting at position 770 of SEQ ID NO: 316927
aagggcaagcugugauagu

SEQ ID NO: 379222 - RNA, 19 nt, Artificial Sequence
  Description of Artificial Sequence: Synthetic oligonucleotide
  Antisense Strand to SEQ ID NO: 379221
acuaucacagcuugcccuu

SEQ ID NO: 379223 - RNA, 19 nt, Artificial Sequence
  Description of Artificial Sequence: Synthetic oligonucleotide
  Sense Strand Starting at position 770 of SEQ ID NO: 317466
ccaggcuucgugggaccaa

SEQ ID NO: 379224 - RNA, 19 nt, Artificial Sequence
  Description of Artificial Sequence: Synthetic oligonucleotide
  Antisense Strand to SEQ ID NO: 379223
uuggucccacgaagccugg

SEQ ID NO: 379225 - RNA, 19 nt, Artificial Sequence
  Description of Artificial Sequence: Synthetic oligonucleotide
  Sense Strand Starting at position 770 of SEQ ID NO: 317580
gcgucuuguucccucuaga

SEQ ID NO: 379226 - RNA, 19 nt, Artificial Sequence
  Description of Artificial Sequence: Synthetic oligonucleotide
  Antisense Strand to SEQ ID NO: 379225
ucuagagggaacaagacgc

SEQ ID NO: 379227 - RNA, 19 nt, Artificial Sequence
  Description of Artificial Sequence: Synthetic oligonucleotide
  Sense Strand Starting at position 770 of SEQ ID NO: 317745
agcuguugucuccagagca

SEQ ID NO: 379228 - RNA, 19 nt, Artificial Sequence
  Description of Artificial Sequence: Synthetic oligonucleotide
  Antisense Strand to SEQ ID NO: 379227
ugcucuggagacaacagcu

SEQ ID NO: 379229 - RNA, 19 nt, Artificial Sequence
  Description of Artificial Sequence: Synthetic oligonucleotide
  Sense Strand Starting at position 770 of SEQ ID NO: 318037
gcccgcaucucgcuaaaga

SEQ ID NO: 379230 - RNA, 19 nt, Artificial Sequence
  Description of Artificial Sequence: Synthetic oligonucleotide
  Antisense Strand to SEQ ID NO: 379229
ucuuuagcgagaugcgggc

SEQ ID NO: 379231 - RNA, 19 nt, Artificial Sequence
  Description of Artificial Sequence: Synthetic oligonucleotide
  Sense Strand Starting at position 770 of SEQ ID NO: 318038
cccgcaucucgcuaaagau

SEQ ID NO: 379232 - RNA, 19 nt, Artificial Sequence
  Description of Artificial Sequence: Synthetic oligonucleotide
  Antisense Strand to SEQ ID NO: 379231
aucuuuagcgagaugcggg

SEQ ID NO: 379233 - RNA, 19 nt, Artificial Sequence
  Description of Artificial Sequence: Synthetic oligonucleotide
  Sense Strand Starting at position 770 of SEQ ID NO: 318090
accgucuucguggaugaga

SEQ ID NO: 379234 - RNA, 19 nt, Artificial Sequence
  Description of Artificial Sequence: Synthetic oligonucleotide
  Antisense Strand to SEQ ID NO: 379233
ucucauccacgaagacggu

SEQ ID NO: 379235 - RNA, 19 nt, Artificial Sequence
  Description of Artificial Sequence: Synthetic oligonucleotide
  Sense Strand Starting at position 770 of SEQ ID NO: 318092
cgucuucguggaugagagu

SEQ ID NO: 379236 - RNA, 19 nt, Artificial Sequence
  Description of Artificial Sequence: Synthetic oligonucleotide
  Antisense Strand to SEQ ID NO: 379235
acucucauccacgaagacg

SEQ ID NO: 379237 - RNA, 19 nt, Artificial Sequence
  Description of Artificial Sequence: Synthetic oligonucleotide
  Sense Strand Starting at position 770 of SEQ ID NO: 318093
gucuucguggaugagagua

SEQ ID NO: 379238 - RNA, 19 nt, Artificial Sequence
  Description of Artificial Sequence: Synthetic oligonucleotide
  Antisense Strand to SEQ ID NO: 379237
uacucucauccacgaagac

SEQ ID NO: 379239 - RNA, 19 nt, Artificial Sequence
  Description of Artificial Sequence: Synthetic oligonucleotide
  Sense Strand Starting at position 770 of SEQ ID NO: 318098
cguggaugagaguaucuga

SEQ ID NO: 379240 - RNA, 19 nt, Artificial Sequence
  Description of Artificial Sequence: Synthetic oligonucleotide
  Antisense Strand to SEQ ID NO: 379239
ucagauacucucauccacg

SEQ ID NO: 379241 - RNA, 19 nt, Artificial Sequence
  Description of Artificial Sequence: Synthetic oligonucleotide
  Sense Strand Starting at position 770 of SEQ ID NO: 318101
ggaugagaguaucugaagu

SEQ ID NO: 379242 - RNA, 19 nt, Artificial Sequence
  Description of Artificial Sequence: Synthetic oligonucleotide
  Antisense Strand to SEQ ID NO: 379241
acuucagauacucucaucc

SEQ ID NO: 379243 - RNA, 19 nt, Artificial Sequence
  Description of Artificial Sequence: Synthetic oligonucleotide
  Sense Strand Starting at position 770 of SEQ ID NO: 318121
cucaguuugacugaggguu

SEQ ID NO: 379244 - RNA, 19 nt, Artificial Sequence
  Description of Artificial Sequence: Synthetic oligonucleotide
  Antisense Strand to SEQ ID NO: 379243
aacccucagucaaacugag

SEQ ID NO: 379245 - RNA, 19 nt, Artificial Sequence
  Description of Artificial Sequence: Synthetic oligonucleotide
  Sense Strand Starting at position 770 of SEQ ID NO: 318153
agcaguugucuccagguca

SEQ ID NO: 379246 - RNA, 19 nt, Artificial Sequence
  Description of Artificial Sequence: Synthetic oligonucleotide
  Antisense Strand to SEQ ID NO: 379245
ugaccuggagacaacugcu

SEQ ID NO: 379247 - RNA, 19 nt, Artificial Sequence
  Description of Artificial Sequence: Synthetic oligonucleotide
  Sense Strand Starting at position 770 of SEQ ID NO: 318185
uggaaagcgcuuuggaaug

SEQ ID NO: 379248 - RNA, 19 nt, Artificial Sequence
  Description of Artificial Sequence: Synthetic oligonucleotide
  Antisense Strand to SEQ ID NO: 379247
cauuccaaagcgcuuucca

SEQ ID NO: 379249 - RNA, 19 nt, Artificial Sequence
  Description of Artificial Sequence: Synthetic oligonucleotide
  Sense Strand Starting at position 770 of SEQ ID NO: 318231
ccgagaagccaucgggaau

SEQ ID NO: 379250 - RNA, 19 nt, Artificial Sequence
  Description of Artificial Sequence: Synthetic oligonucleotide
  Antisense Strand to SEQ ID NO: 379249
auucccgauggcuucucgg

SEQ ID NO: 379251 - RNA, 19 nt, Artificial Sequence
  Description of Artificial Sequence: Synthetic oligonucleotide
  Sense Strand Starting at position 770 of SEQ ID NO: 318377
ugaguuagcuucucuauua

SEQ ID NO: 379252 - RNA, 19 nt, Artificial Sequence
  Description of Artificial Sequence: Synthetic oligonucleotide
  Antisense Strand to SEQ ID NO: 379251
uaauagagaagcuaacuca

SEQ ID NO: 379253 - RNA, 19 nt, Artificial Sequence
  Description of Artificial Sequence: Synthetic oligonucleotide
  Sense Strand Starting at position 770 of SEQ ID NO: 318453
gaaccuuugugggagaaag

SEQ ID NO: 379254 - RNA, 19 nt, Artificial Sequence
  Description of Artificial Sequence: Synthetic oligonucleotide
  Antisense Strand to SEQ ID NO: 379253
cuuucucccacaaagguuc

SEQ ID NO: 379255 - RNA, 19 nt, Artificial Sequence
  Description of Artificial Sequence: Synthetic oligonucleotide
  Sense Strand Starting at position 770 of SEQ ID NO: 318480
cuuuccuauugguagagga

SEQ ID NO: 379256 - RNA, 19 nt, Artificial Sequence
  Description of Artificial Sequence: Synthetic oligonucleotide
  Antisense Strand to SEQ ID NO: 379255
uccucuaccaauaggaaag

SEQ ID NO: 379257 - RNA, 19 nt, Artificial Sequence
  Description of Artificial Sequence: Synthetic oligonucleotide
  Sense Strand Starting at position 770 of SEQ ID NO: 318524
uuucuauuauggucgcauu

SEQ ID NO: 379258 - RNA, 19 nt, Artificial Sequence
  Description of Artificial Sequence: Synthetic oligonucleotide
  Antisense Strand to SEQ ID NO: 379257
aaugcgaccauaauagaaa

SEQ ID NO: 379259 - RNA, 19 nt, Artificial Sequence
  Description of Artificial Sequence: Synthetic oligonucleotide
  Sense Strand Starting at position 770 of SEQ ID NO: 318525
uucuauuauggucgcauua

SEQ ID NO: 379260 - RNA, 19 nt, Artificial Sequence
  Description of Artificial Sequence: Synthetic oligonucleotide
  Antisense Strand to SEQ ID NO: 379259
uaaugcgaccauaauagaa

SEQ ID NO: 379261 - RNA, 19 nt, Artificial Sequence
  Description of Artificial Sequence: Synthetic oligonucleotide
  Sense Strand Starting at position 770 of SEQ ID NO: 318555
cguaaauggcuguugccua

SEQ ID NO: 379262 - RNA, 19 nt, Artificial Sequence
  Description of Artificial Sequence: Synthetic oligonucleotide
  Antisense Strand to SEQ ID NO: 379261
uaggcaacagccauuuacg

SEQ ID NO: 379263 - RNA, 19 nt, Artificial Sequence
  Description of Artificial Sequence: Synthetic oligonucleotide
  Sense Strand Starting at position 770 of SEQ ID NO: 318579
ggaagcuuuaaggaucguu

SEQ ID NO: 379264 - RNA, 19 nt, Artificial Sequence
  Description of Artificial Sequence: Synthetic oligonucleotide
  Antisense Strand to SEQ ID NO: 379263
aacgauccuuaaagcuucc

SEQ ID NO: 379265 - RNA, 19 nt, Artificial Sequence
  Description of Artificial Sequence: Synthetic oligonucleotide
  Sense Strand Starting at position 770 of SEQ ID NO: 318582
agcuuuaaggaucguuguu

SEQ ID NO: 379266 - RNA, 19 nt, Artificial Sequence
  Description of Artificial Sequence: Synthetic oligonucleotide
  Antisense Strand to SEQ ID NO: 379265
aacaacgauccuuaaagcu

SEQ ID NO: 379267 - RNA, 19 nt, Artificial Sequence
  Description of Artificial Sequence: Synthetic oligonucleotide
  Sense Strand Starting at position 770 of SEQ ID NO: 318584
cuuuaaggaucguuguuaa

SEQ ID NO: 379268 - RNA, 19 nt, Artificial Sequence
  Description of Artificial Sequence: Synthetic oligonucleotide
  Antisense Strand to SEQ ID NO: 379267
uuaacaacgauccuuaaag

SEQ ID NO: 379269 - RNA, 19 nt, Artificial Sequence
  Description of Artificial Sequence: Synthetic oligonucleotide
  Sense Strand Starting at position 770 of SEQ ID NO: 318587
uaaggaucguuguuaaagc

SEQ ID NO: 379270 - RNA, 19 nt, Artificial Sequence
  Description of Artificial Sequence: Synthetic oligonucleotide
  Antisense Strand to SEQ ID NO: 379269
gcuuuaacaacgauccuua

SEQ ID NO: 379271 - RNA, 19 nt, Artificial Sequence
  Description of Artificial Sequence: Synthetic oligonucleotide
  Sense Strand Starting at position 770 of SEQ ID NO: 318721
gaguucgaggcuugacaaa

SEQ ID NO: 379272 - RNA, 19 nt, Artificial Sequence
  Description of Artificial Sequence: Synthetic oligonucleotide
  Antisense Strand to SEQ ID NO: 379271
uuugucaagccucgaacuc

SEQ ID NO: 379273 - RNA, 19 nt, Artificial Sequence
  Description of Artificial Sequence: Synthetic oligonucleotide
  Sense Strand Starting at position 770 of SEQ ID NO: 318944
cugguaauucuggaagcca

SEQ ID NO: 379274 - RNA, 19 nt, Artificial Sequence
  Description of Artificial Sequence: Synthetic oligonucleotide
  Antisense Strand to SEQ ID NO: 379273
uggcuuccagaauuaccag

SEQ ID NO: 379275 - RNA, 19 nt, Artificial Sequence
  Description of Artificial Sequence: Synthetic oligonucleotide
  Sense Strand Starting at position 770 of SEQ ID NO: 318960
ccaucaugaugguugugau

SEQ ID NO: 379276 - RNA, 19 nt, Artificial Sequence
  Description of Artificial Sequence: Synthetic oligonucleotide
  Antisense Strand to SEQ ID NO: 379275
aucacaaccaucaugaugg

SEQ ID NO: 379277 - RNA, 19 nt, Artificial Sequence
  Description of Artificial Sequence: Synthetic oligonucleotide
  Sense Strand Starting at position 770 of SEQ ID NO: 318961
caucaugaugguugugauu

SEQ ID NO: 379278 - RNA, 19 nt, Artificial Sequence
  Description of Artificial Sequence: Synthetic oligonucleotide
  Antisense Strand to SEQ ID NO: 379277
aaucacaaccaucaugaug

SEQ ID NO: 379279 - RNA, 19 nt, Artificial Sequence
  Description of Artificial Sequence: Synthetic oligonucleotide
  Sense Strand Starting at position 770 of SEQ ID NO: 318963
ucaugaugguugugauuuc

SEQ ID NO: 379280 - RNA, 19 nt, Artificial Sequence
  Description of Artificial Sequence: Synthetic oligonucleotide
  Antisense Strand to SEQ ID NO: 379279
gaaaucacaaccaucauga

SEQ ID NO: 379281 - RNA, 19 nt, Artificial Sequence
  Description of Artificial Sequence: Synthetic oligonucleotide
  Sense Strand Starting at position 770 of SEQ ID NO: 318970
gguugugauuucucaggua

SEQ ID NO: 379282 - RNA, 19 nt, Artificial Sequence
  Description of Artificial Sequence: Synthetic oligonucleotide
  Antisense Strand to SEQ ID NO: 379281
uaccugagaaaucacaacc

SEQ ID NO: 379283 - RNA, 19 nt, Artificial Sequence
  Description of Artificial Sequence: Synthetic oligonucleotide
  Sense Strand Starting at position 770 of SEQ ID NO: 318973
ugugauuucucagguauca

SEQ ID NO: 379284 - RNA, 19 nt, Artificial Sequence
  Description of Artificial Sequence: Synthetic oligonucleotide
  Antisense Strand to SEQ ID NO: 379283
ugauaccugagaaaucaca

SEQ ID NO: 379285 - RNA, 19 nt, Artificial Sequence
  Description of Artificial Sequence: Synthetic oligonucleotide
  Sense Strand Starting at position 770 of SEQ ID NO: 318978
uuucucagguaucaagaga

SEQ ID NO: 379286 - RNA, 19 nt, Artificial Sequence
  Description of Artificial Sequence: Synthetic oligonucleotide
  Antisense Strand to SEQ ID NO: 379285
ucucuugauaccugagaaa

SEQ ID NO: 379287 - RNA, 19 nt, Artificial Sequence
  Description of Artificial Sequence: Synthetic oligonucleotide
  Sense Strand Starting at position 770 of SEQ ID NO: 319009
acuguaucagagugcuuau

SEQ ID NO: 379288 - RNA, 19 nt, Artificial Sequence
  Description of Artificial Sequence: Synthetic oligonucleotide
  Antisense Strand to SEQ ID NO: 379287
auaagcacucugauacagu

SEQ ID NO: 379289 - RNA, 19 nt, Artificial Sequence
  Description of Artificial Sequence: Synthetic oligonucleotide
  Sense Strand Starting at position 770 of SEQ ID NO: 319012
guaucagagugcuuauuua

SEQ ID NO: 379290 - RNA, 19 nt, Artificial Sequence
  Description of Artificial Sequence: Synthetic oligonucleotide
  Antisense Strand to SEQ ID NO: 379289
uaaauaagcacucugauac

SEQ ID NO: 379291 - RNA, 19 nt, Artificial Sequence
  Description of Artificial Sequence: Synthetic oligonucleotide
  Sense Strand Starting at position 770 of SEQ ID NO: 319022
gcuuauuuauugggcauaa

SEQ ID NO: 379292 - RNA, 19 nt, Artificial Sequence
  Description of Artificial Sequence: Synthetic oligonucleotide
  Antisense Strand to SEQ ID NO: 379291
uuaugcccaauaaauaagc

SEQ ID NO: 379293 - RNA, 19 nt, Artificial Sequence
  Description of Artificial Sequence: Synthetic oligonucleotide
  Sense Strand Starting at position 771 of SEQ ID NO: 316162
ccaggugguuucuccuuaa

SEQ ID NO: 379294 - RNA, 19 nt, Artificial Sequence
  Description of Artificial Sequence: Synthetic oligonucleotide
  Antisense Strand to SEQ ID NO: 379293
uuaaggagaaaccaccugg

SEQ ID NO: 379295 - RNA, 19 nt, Artificial Sequence
  Description of Artificial Sequence: Synthetic oligonucleotide
  Sense Strand Starting at position 771 of SEQ ID NO: 316217
aagggcaagcugugauagu

SEQ ID NO: 379296 - RNA, 19 nt, Artificial Sequence
  Description of Artificial Sequence: Synthetic oligonucleotide
  Antisense Strand to SEQ ID NO: 379295
acuaucacagcuugcccuu

SEQ ID NO: 379297 - RNA, 19 nt, Artificial Sequence
  Description of Artificial Sequence: Synthetic oligonucleotide
  Sense Strand Starting at position 771 of SEQ ID NO: 316756
ccaggcuucgugggaccaa

SEQ ID NO: 379298 - RNA, 19 nt, Artificial Sequence
  Description of Artificial Sequence: Synthetic oligonucleotide
  Antisense Strand to SEQ ID NO: 379297
uuggucccacgaagccugg

SEQ ID NO: 379299 - RNA, 19 nt, Artificial Sequence
  Description of Artificial Sequence: Synthetic oligonucleotide
  Sense Strand Starting at position 771 of SEQ ID NO: 317035
agcuguugucuccagagca

SEQ ID NO: 379300 - RNA, 19 nt, Artificial Sequence
  Description of Artificial Sequence: Synthetic oligonucleotide
  Antisense Strand to SEQ ID NO: 379299
ugcucuggagacaacagcu

SEQ ID NO: 379301 - RNA, 19 nt, Artificial Sequence
  Description of Artificial Sequence: Synthetic oligonucleotide
  Sense Strand Starting at position 771 of SEQ ID NO: 317328
cccgcaucucgcuaaagau

SEQ ID NO: 379302 - RNA, 19 nt, Artificial Sequence
  Description of Artificial Sequence: Synthetic oligonucleotide
  Antisense Strand to SEQ ID NO: 379301
aucuuuagcgagaugcggg

SEQ ID NO: 379303 - RNA, 19 nt, Artificial Sequence
  Description of Artificial Sequence: Synthetic oligonucleotide
  Sense Strand Starting at position 771 of SEQ ID NO: 317380
accgucuucguggaugaga

SEQ ID NO: 379304 - RNA, 19 nt, Artificial Sequence
  Description of Artificial Sequence: Synthetic oligonucleotide
  Antisense Strand to SEQ ID NO: 379303
ucucauccacgaagacggu

SEQ ID NO: 379305 - RNA, 19 nt, Artificial Sequence
  Description of Artificial Sequence: Synthetic oligonucleotide
  Sense Strand Starting at position 771 of SEQ ID NO: 317382
cgucuucguggaugagagu

SEQ ID NO: 379306 - RNA, 19 nt, Artificial Sequence
  Description of Artificial Sequence: Synthetic oligonucleotide
  Antisense Strand to SEQ ID NO: 379305
acucucauccacgaagacg

SEQ ID NO: 379307 - RNA, 19 nt, Artificial Sequence
  Description of Artificial Sequence: Synthetic oligonucleotide
  Sense Strand Starting at position 771 of SEQ ID NO: 317383
gucuucguggaugagagua

SEQ ID NO: 379308 - RNA, 19 nt, Artificial Sequence
  Description of Artificial Sequence: Synthetic oligonucleotide
  Antisense Strand to SEQ ID NO: 379307
uacucucauccacgaagac

SEQ ID NO: 379309 - RNA, 19 nt, Artificial Sequence
  Description of Artificial Sequence: Synthetic oligonucleotide
  Sense Strand Starting at position 771 of SEQ ID NO: 317388
cguggaugagaguaucuga

SEQ ID NO: 379310 - RNA, 19 nt, Artificial Sequence
  Description of Artificial Sequence: Synthetic oligonucleotide
  Antisense Strand to SEQ ID NO: 379309
ucagauacucucauccacg

SEQ ID NO: 379311 - RNA, 19 nt, Artificial Sequence
  Description of Artificial Sequence: Synthetic oligonucleotide
  Sense Strand Starting at position 771 of SEQ ID NO: 317391
ggaugagaguaucugaagu

SEQ ID NO: 379312 - RNA, 19 nt, Artificial Sequence
  Description of Artificial Sequence: Synthetic oligonucleotide
  Antisense Strand to SEQ ID NO: 379311
acuucagauacucucaucc

SEQ ID NO: 379313 - RNA, 19 nt, Artificial Sequence
  Description of Artificial Sequence: Synthetic oligonucleotide
  Sense Strand Starting at position 771 of SEQ ID NO: 317411
cucaguuugacugaggguu

SEQ ID NO: 379314 - RNA, 19 nt, Artificial Sequence
  Description of Artificial Sequence: Synthetic oligonucleotide
  Antisense Strand to SEQ ID NO: 379313
aacccucagucaaacugag

SEQ ID NO: 379315 - RNA, 19 nt, Artificial Sequence
  Description of Artificial Sequence: Synthetic oligonucleotide
  Sense Strand Starting at position 771 of SEQ ID NO: 317443
agcaguugucuccagguca

SEQ ID NO: 379316 - RNA, 19 nt, Artificial Sequence
  Description of Artificial Sequence: Synthetic oligonucleotide
  Antisense Strand to SEQ ID NO: 379315
ugaccuggagacaacugcu

SEQ ID NO: 379317 - RNA, 19 nt, Artificial Sequence
  Description of Artificial Sequence: Synthetic oligonucleotide
  Sense Strand Starting at position 771 of SEQ ID NO: 317475
uggaaagcgcuuuggaaug

SEQ ID NO: 379318 - RNA, 19 nt, Artificial Sequence
  Description of Artificial Sequence: Synthetic oligonucleotide
  Antisense Strand to SEQ ID NO: 379317
cauuccaaagcgcuuucca

SEQ ID NO: 379319 - RNA, 19 nt, Artificial Sequence
  Description of Artificial Sequence: Synthetic oligonucleotide
  Sense Strand Starting at position 771 of SEQ ID NO: 317521
ccgagaagccaucgggaau

SEQ ID NO: 379320 - RNA, 19 nt, Artificial Sequence
  Description of Artificial Sequence: Synthetic oligonucleotide
  Antisense Strand to SEQ ID NO: 379319
auucccgauggcuucucgg

SEQ ID NO: 379321 - RNA, 19 nt, Artificial Sequence
  Description of Artificial Sequence: Synthetic oligonucleotide
  Sense Strand Starting at position 771 of SEQ ID NO: 317667
ugaguuagcuucucuauua

SEQ ID NO: 379322 - RNA, 19 nt, Artificial Sequence
  Description of Artificial Sequence: Synthetic oligonucleotide
  Antisense Strand to SEQ ID NO: 379321
uaauagagaagcuaacuca

SEQ ID NO: 379323 - RNA, 19 nt, Artificial Sequence
  Description of Artificial Sequence: Synthetic oligonucleotide
  Sense Strand Starting at position 771 of SEQ ID NO: 317743
gaaccuuugugggagaaag

SEQ ID NO: 379324 - RNA, 19 nt, Artificial Sequence
  Description of Artificial Sequence: Synthetic oligonucleotide
  Antisense Strand to SEQ ID NO: 379323
cuuucucccacaaagguuc

SEQ ID NO: 379325 - RNA, 19 nt, Artificial Sequence
  Description of Artificial Sequence: Synthetic oligonucleotide
  Sense Strand Starting at position 771 of SEQ ID NO: 317814
uuucuauuauggucgcauu

SEQ ID NO: 379326 - RNA, 19 nt, Artificial Sequence
  Description of Artificial Sequence: Synthetic oligonucleotide
  Antisense Strand to SEQ ID NO: 379325
aaugcgaccauaauagaaa

SEQ ID NO: 379327 - RNA, 19 nt, Artificial Sequence
  Description of Artificial Sequence: Synthetic oligonucleotide
  Sense Strand Starting at position 771 of SEQ ID NO: 317815
uucuauuauggucgcauua

SEQ ID NO: 379328 - RNA, 19 nt, Artificial Sequence
  Description of Artificial Sequence: Synthetic oligonucleotide
  Antisense Strand to SEQ ID NO: 379327
uaaugcgaccauaauagaa

SEQ ID NO: 379329 - RNA, 19 nt, Artificial Sequence
  Description of Artificial Sequence: Synthetic oligonucleotide
  Sense Strand Starting at position 771 of SEQ ID NO: 317845
cguaaauggcuguugccua

SEQ ID NO: 379330 - RNA, 19 nt, Artificial Sequence
  Description of Artificial Sequence: Synthetic oligonucleotide
  Antisense Strand to SEQ ID NO: 379329
uaggcaacagccauuuacg

SEQ ID NO: 379331 - RNA, 19 nt, Artificial Sequence
  Description of Artificial Sequence: Synthetic oligonucleotide
  Sense Strand Starting at position 771 of SEQ ID NO: 317869
ggaagcuuuaaggaucguu

SEQ ID NO: 379332 - RNA, 19 nt, Artificial Sequence
  Description of Artificial Sequence: Synthetic oligonucleotide
  Antisense Strand to SEQ ID NO: 379331
aacgauccuuaaagcuucc

SEQ ID NO: 379333 - RNA, 19 nt, Artificial Sequence
  Description of Artificial Sequence: Synthetic oligonucleotide
  Sense Strand Starting at position 771 of SEQ ID NO: 317872
agcuuuaaggaucguuguu

SEQ ID NO: 379334 - RNA, 19 nt, Artificial Sequence
  Description of Artificial Sequence: Synthetic oligonucleotide
  Antisense Strand to SEQ ID NO: 379333
aacaacgauccuuaaagcu

SEQ ID NO: 379335 - RNA, 19 nt, Artificial Sequence
  Description of Artificial Sequence: Synthetic oligonucleotide
  Sense Strand Starting at position 771 of SEQ ID NO: 317874
cuuuaaggaucguuguuaa

SEQ ID NO: 379336 - RNA, 19 nt, Artificial Sequence
  Description of Artificial Sequence: Synthetic oligonucleotide
  Antisense Strand to SEQ ID NO: 379335
uuaacaacgauccuuaaag

SEQ ID NO: 379337 - RNA, 19 nt, Artificial Sequence
  Description of Artificial Sequence: Synthetic oligonucleotide
  Sense Strand Starting at position 771 of SEQ ID NO: 317877
uaaggaucguuguuaaagc

SEQ ID NO: 379338 - RNA, 19 nt, Artificial Sequence
  Description of Artificial Sequence: Synthetic oligonucleotide
  Antisense Strand to SEQ ID NO: 379337
gcuuuaacaacgauccuua

SEQ ID NO: 379339 - RNA, 19 nt, Artificial Sequence
  Description of Artificial Sequence: Synthetic oligonucleotide
  Sense Strand Starting at position 771 of SEQ ID NO: 318011
gaguucgaggcuugacaaa

SEQ ID NO: 379340 - RNA, 19 nt, Artificial Sequence
  Description of Artificial Sequence: Synthetic oligonucleotide
  Antisense Strand to SEQ ID NO: 379339
uuugucaagccucgaacuc

SEQ ID NO: 379341 - RNA, 19 nt, Artificial Sequence
  Description of Artificial Sequence: Synthetic oligonucleotide
  Sense Strand Starting at position 771 of SEQ ID NO: 318234
cugguaauucuggaagcca

SEQ ID NO: 379342 - RNA, 19 nt, Artificial Sequence
  Description of Artificial Sequence: Synthetic oligonucleotide
  Antisense Strand to SEQ ID NO: 379341
uggcuuccagaauuaccag

SEQ ID NO: 379343 - RNA, 19 nt, Artificial Sequence
  Description of Artificial Sequence: Synthetic oligonucleotide
  Sense Strand Starting at position 771 of SEQ ID NO: 318250
ccaucaugaugguugugau

SEQ ID NO: 379344 - RNA, 19 nt, Artificial Sequence
  Description of Artificial Sequence: Synthetic oligonucleotide
  Antisense Strand to SEQ ID NO: 379343
aucacaaccaucaugaugg

SEQ ID NO: 379345 - RNA, 19 nt, Artificial Sequence
  Description of Artificial Sequence: Synthetic oligonucleotide
  Sense Strand Starting at position 771 of SEQ ID NO: 318251
caucaugaugguugugauu

SEQ ID NO: 379346 - RNA, 19 nt, Artificial Sequence
  Description of Artificial Sequence: Synthetic oligonucleotide
  Antisense Strand to SEQ ID NO: 379345
aaucacaaccaucaugaug

SEQ ID NO: 379347 - RNA, 19 nt, Artificial Sequence
  Description of Artificial Sequence: Synthetic oligonucleotide
  Sense Strand Starting at position 771 of SEQ ID NO: 318260
gguugugauuucucaggua

SEQ ID NO: 379348 - RNA, 19 nt, Artificial Sequence
  Description of Artificial Sequence: Synthetic oligonucleotide
  Antisense Strand to SEQ ID NO: 379347
uaccugagaaaucacaacc

SEQ ID NO: 379349 - RNA, 19 nt, Artificial Sequence
  Description of Artificial Sequence: Synthetic oligonucleotide
  Sense Strand Starting at position 771 of SEQ ID NO: 318268
uuucucagguaucaagaga

SEQ ID NO: 379350 - RNA, 19 nt, Artificial Sequence
  Description of Artificial Sequence: Synthetic oligonucleotide
  Antisense Strand to SEQ ID NO: 379349
ucucuugauaccugagaaa

SEQ ID NO: 379351 - RNA, 19 nt, Artificial Sequence
  Description of Artificial Sequence: Synthetic oligonucleotide
  Sense Strand Starting at position 771 of SEQ ID NO: 318299
acuguaucagagugcuuau

SEQ ID NO: 379352 - RNA, 19 nt, Artificial Sequence
  Description of Artificial Sequence: Synthetic oligonucleotide
  Antisense Strand to SEQ ID NO: 379351
auaagcacucugauacagu

SEQ ID NO: 379353 - RNA, 19 nt, Artificial Sequence
  Description of Artificial Sequence: Synthetic oligonucleotide
  Sense Strand Starting at position 771 of SEQ ID NO: 318302
guaucagagugcuuauuua

SEQ ID NO: 379354 - RNA, 19 nt, Artificial Sequence
  Description of Artificial Sequence: Synthetic oligonucleotide
  Antisense Strand to SEQ ID NO: 379353
uaaauaagcacucugauac

SEQ ID NO: 379355 - RNA, 19 nt, Artificial Sequence
  Description of Artificial Sequence: Synthetic oligonucleotide
  Sense Strand Starting at position 771 of SEQ ID NO: 318526
aggagaauccugugaaucc

SEQ ID NO: 379356 - RNA, 19 nt, Artificial Sequence
  Description of Artificial Sequence: Synthetic oligonucleotide
  Antisense Strand to SEQ ID NO: 379355
ggauucacaggauucuccu

SEQ ID NO: 379357 - RNA, 19 nt, Artificial Sequence
  Description of Artificial Sequence: Synthetic oligonucleotide
  Sense Strand Starting at position 771 of SEQ ID NO: 318660
gcuugcaaauaaccugaaa

SEQ ID NO: 379358 - RNA, 19 nt, Artificial Sequence
  Description of Artificial Sequence: Synthetic oligonucleotide
  Antisense Strand to SEQ ID NO: 379357
uuucagguuauuugcaagc

SEQ ID NO: 379359 - RNA, 19 nt, Artificial Sequence
  Description of Artificial Sequence: Synthetic oligonucleotide
  Sense Strand Starting at position 771 of SEQ ID NO: 318722
ucgugaaaguggccuuaau

SEQ ID NO: 379360 - RNA, 19 nt, Artificial Sequence
  Description of Artificial Sequence: Synthetic oligonucleotide
  Antisense Strand to SEQ ID NO: 379359
auuaaggccacuuucacga

SEQ ID NO: 379361 - RNA, 19 nt, Artificial Sequence
  Description of Artificial Sequence: Synthetic oligonucleotide
  Sense Strand Starting at position 771 of SEQ ID NO: 318741
guuauacugccuuauucca

SEQ ID NO: 379362 - RNA, 19 nt, Artificial Sequence
  Description of Artificial Sequence: Synthetic oligonucleotide
  Antisense Strand to SEQ ID NO: 379361
uggaauaaggcaguauaac

SEQ ID NO: 379363 - RNA, 19 nt, Artificial Sequence
  Description of Artificial Sequence: Synthetic oligonucleotide
  Sense Strand Starting at position 771 of SEQ ID NO: 318749
gccuuauuccagugacgaa

SEQ ID NO: 379364 - RNA, 19 nt, Artificial Sequence
  Description of Artificial Sequence: Synthetic oligonucleotide
  Antisense Strand to SEQ ID NO: 379363
uucgucacuggaauaaggc

SEQ ID NO: 379365 - RNA, 19 nt, Artificial Sequence
  Description of Artificial Sequence: Synthetic oligonucleotide
  Sense Strand Starting at position 771 of SEQ ID NO: 318753
uauuccagugacgaauauu

SEQ ID NO: 379366 - RNA, 19 nt, Artificial Sequence
  Description of Artificial Sequence: Synthetic oligonucleotide
  Antisense Strand to SEQ ID NO: 379365
aauauucgucacuggaaua

SEQ ID NO: 379367 - RNA, 19 nt, Artificial Sequence
  Description of Artificial Sequence: Synthetic oligonucleotide
  Sense Strand Starting at position 771 of SEQ ID NO: 318818
gugagacuucgaugagaag

SEQ ID NO: 379368 - RNA, 19 nt, Artificial Sequence
  Description of Artificial Sequence: Synthetic oligonucleotide
  Antisense Strand to SEQ ID NO: 379367
cuucucaucgaagucucac

SEQ ID NO: 379369 - RNA, 19 nt, Artificial Sequence
  Description of Artificial Sequence: Synthetic oligonucleotide
  Sense Strand Starting at position 771 of SEQ ID NO: 318821
agacuucgaugagaagaga

SEQ ID NO: 379370 - RNA, 19 nt, Artificial Sequence
  Description of Artificial Sequence: Synthetic oligonucleotide
  Antisense Strand to SEQ ID NO: 379369
ucucuucucaucgaagucu

SEQ ID NO: 379371 - RNA, 19 nt, Artificial Sequence
  Description of Artificial Sequence: Synthetic oligonucleotide
  Sense Strand Starting at position 771 of SEQ ID NO: 318895
cugggucacagcgaaagaa

SEQ ID NO: 379372 - RNA, 19 nt, Artificial Sequence
  Description of Artificial Sequence: Synthetic oligonucleotide
  Antisense Strand to SEQ ID NO: 379371
uucuuucgcugugacccag

SEQ ID NO: 379373 - RNA, 19 nt, Artificial Sequence
  Description of Artificial Sequence: Synthetic oligonucleotide
  Sense Strand Starting at position 772 of SEQ ID NO: 315432
guaagauccugucucaagg

SEQ ID NO: 379374 - RNA, 19 nt, Artificial Sequence
  Description of Artificial Sequence: Synthetic oligonucleotide
  Antisense Strand to SEQ ID NO: 379373
ccuugagacaggaucuuac

SEQ ID NO: 379375 - RNA, 19 nt, Artificial Sequence
  Description of Artificial Sequence: Synthetic oligonucleotide
  Sense Strand Starting at position 772 of SEQ ID NO: 315534
accaaagagacugguagua

SEQ ID NO: 379376 - RNA, 19 nt, Artificial Sequence
  Description of Artificial Sequence: Synthetic oligonucleotide
  Antisense Strand to SEQ ID NO: 379375
uacuaccagucucuuuggu

SEQ ID NO: 379377 - RNA, 19 nt, Artificial Sequence
  Description of Artificial Sequence: Synthetic oligonucleotide
  Sense Strand Starting at position 772 of SEQ ID NO: 315690
ucaugugaguuuguaauaa

SEQ ID NO: 379378 - RNA, 19 nt, Artificial Sequence
  Description of Artificial Sequence: Synthetic oligonucleotide
  Antisense Strand to SEQ ID NO: 379377
uuauuacaaacucacauga

SEQ ID NO: 379379 - RNA, 19 nt, Artificial Sequence
  Description of Artificial Sequence: Synthetic oligonucleotide
  Sense Strand Starting at position 772 of SEQ ID NO: 315784
gaugcuguggguuacacaa

SEQ ID NO: 379380 - RNA, 19 nt, Artificial Sequence
  Description of Artificial Sequence: Synthetic oligonucleotide
  Antisense Strand to SEQ ID NO: 379379
uuguguaacccacagcauc

SEQ ID NO: 379381 - RNA, 19 nt, Artificial Sequence
  Description of Artificial Sequence: Synthetic oligonucleotide
  Sense Strand Starting at position 772 of SEQ ID NO: 315837
agagguaucucuguaugac

SEQ ID NO: 379382 - RNA, 19 nt, Artificial Sequence
  Description of Artificial Sequence: Synthetic oligonucleotide
  Antisense Strand to SEQ ID NO: 379381
gucauacagagauaccucu

SEQ ID NO: 379383 - RNA, 19 nt, Artificial Sequence
  Description of Artificial Sequence: Synthetic oligonucleotide
  Sense Strand Starting at position 772 of SEQ ID NO: 315838
gagguaucucuguaugacc

SEQ ID NO: 379384 - RNA, 19 nt, Artificial Sequence
  Description of Artificial Sequence: Synthetic oligonucleotide
  Antisense Strand to SEQ ID NO: 379383
ggucauacagagauaccuc

SEQ ID NO: 379385 - RNA, 19 nt, Artificial Sequence
  Description of Artificial Sequence: Synthetic oligonucleotide
  Sense Strand Starting at position 772 of SEQ ID NO: 315901
aguaguagagcuuaaucau

SEQ ID NO: 379386 - RNA, 19 nt, Artificial Sequence
  Description of Artificial Sequence: Synthetic oligonucleotide
  Antisense Strand to SEQ ID NO: 379385
augauuaagcucuacuacu

SEQ ID NO: 379387 - RNA, 19 nt, Artificial Sequence
  Description of Artificial Sequence: Synthetic oligonucleotide
  Sense Strand Starting at position 772 of SEQ ID NO: 315904
aguagagcuuaaucaucca

SEQ ID NO: 379388 - RNA, 19 nt, Artificial Sequence
  Description of Artificial Sequence: Synthetic oligonucleotide
  Antisense Strand to SEQ ID NO: 379387
uggaugauuaagcucuacu

SEQ ID NO: 379389 - RNA, 19 nt, Artificial Sequence
  Description of Artificial Sequence: Synthetic oligonucleotide
  Sense Strand Starting at position 772 of SEQ ID NO: 315926
aguugugauauguaaauag

SEQ ID NO: 379390 - RNA, 19 nt, Artificial Sequence
  Description of Artificial Sequence: Synthetic oligonucleotide
  Antisense Strand to SEQ ID NO: 379389
cuauuuacauaucacaacu

SEQ ID NO: 379391 - RNA, 19 nt, Artificial Sequence
  Description of Artificial Sequence: Synthetic oligonucleotide
  Sense Strand Starting at position 772 of SEQ ID NO: 315930
gugauauguaaauaguacu

SEQ ID NO: 379392 - RNA, 19 nt, Artificial Sequence
  Description of Artificial Sequence: Synthetic oligonucleotide
  Antisense Strand to SEQ ID NO: 379391
aguacuauuuacauaucac

SEQ ID NO: 379393 - RNA, 19 nt, Artificial Sequence
  Description of Artificial Sequence: Synthetic oligonucleotide
  Sense Strand Starting at position 772 of SEQ ID NO: 316132
ccaguuuacugggcauaua

SEQ ID NO: 379394 - RNA, 19 nt, Artificial Sequence
  Description of Artificial Sequence: Synthetic oligonucleotide
  Antisense Strand to SEQ ID NO: 379393
uauaugcccaguaaacugg

SEQ ID NO: 379395 - RNA, 19 nt, Artificial Sequence
  Description of Artificial Sequence: Synthetic oligonucleotide
  Sense Strand Starting at position 772 of SEQ ID NO: 316133
caguuuacugggcauauau

SEQ ID NO: 379396 - RNA, 19 nt, Artificial Sequence
  Description of Artificial Sequence: Synthetic oligonucleotide
  Antisense Strand to SEQ ID NO: 379395
auauaugcccaguaaacug

SEQ ID NO: 379397 - RNA, 19 nt, Artificial Sequence
  Description of Artificial Sequence: Synthetic oligonucleotide
  Sense Strand Starting at position 772 of SEQ ID NO: 316135
guuuacugggcauauauua

SEQ ID NO: 379398 - RNA, 19 nt, Artificial Sequence
  Description of Artificial Sequence: Synthetic oligonucleotide
  Antisense Strand to SEQ ID NO: 379397
uaauauaugcccaguaaac

SEQ ID NO: 379399 - RNA, 19 nt, Artificial Sequence
  Description of Artificial Sequence: Synthetic oligonucleotide
  Sense Strand Starting at position 772 of SEQ ID NO: 316242
guugaaguugcccaaggua

SEQ ID NO: 379400 - RNA, 19 nt, Artificial Sequence
  Description of Artificial Sequence: Synthetic oligonucleotide
  Antisense Strand to SEQ ID NO: 379399
uaccuugggcaacuucaac

SEQ ID NO: 379401 - RNA, 19 nt, Artificial Sequence
  Description of Artificial Sequence: Synthetic oligonucleotide
  Sense Strand Starting at position 772 of SEQ ID NO: 316263
agaguuagccaaugaguag

SEQ ID NO: 379402 - RNA, 19 nt, Artificial Sequence
  Description of Artificial Sequence: Synthetic oligonucleotide
  Antisense Strand to SEQ ID NO: 379401
cuacucauuggcuaacucu

SEQ ID NO: 379403 - RNA, 19 nt, Artificial Sequence
  Description of Artificial Sequence: Synthetic oligonucleotide
  Sense Strand Starting at position 772 of SEQ ID NO: 316264
gaguuagccaaugaguagu

SEQ ID NO: 379404 - RNA, 19 nt, Artificial Sequence
  Description of Artificial Sequence: Synthetic oligonucleotide
  Antisense Strand to SEQ ID NO: 379403
acuacucauuggcuaacuc

SEQ ID NO: 379405 - RNA, 19 nt, Artificial Sequence
  Description of Artificial Sequence: Synthetic oligonucleotide
  Sense Strand Starting at position 772 of SEQ ID NO: 316377
agagcaguaucccuaugag

SEQ ID NO: 379406 - RNA, 19 nt, Artificial Sequence
  Description of Artificial Sequence: Synthetic oligonucleotide
  Antisense Strand to SEQ ID NO: 379405
cucauagggauacugcucu

SEQ ID NO: 379407 - RNA, 19 nt, Artificial Sequence
  Description of Artificial Sequence: Synthetic oligonucleotide
  Sense Strand Starting at position 772 of SEQ ID NO: 316724
ugaauaacguucuuaaggu

SEQ ID NO: 379408 - RNA, 19 nt, Artificial Sequence
  Description of Artificial Sequence: Synthetic oligonucleotide
  Antisense Strand to SEQ ID NO: 379407
accuuaagaacguuauuca

SEQ ID NO: 379409 - RNA, 19 nt, Artificial Sequence
  Description of Artificial Sequence: Synthetic oligonucleotide
  Sense Strand Starting at position 772 of SEQ ID NO: 316750
gcaggaagugaucaagcca

SEQ ID NO: 379410 - RNA, 19 nt, Artificial Sequence
  Description of Artificial Sequence: Synthetic oligonucleotide
  Antisense Strand to SEQ ID NO: 379409
uggcuugaucacuuccugc

SEQ ID NO: 379411 - RNA, 19 nt, Artificial Sequence
  Description of Artificial Sequence: Synthetic oligonucleotide
  Sense Strand Starting at position 772 of SEQ ID NO: 316871
cugcgucugagauacugau

SEQ ID NO: 379412 - RNA, 19 nt, Artificial Sequence
  Description of Artificial Sequence: Synthetic oligonucleotide
  Antisense Strand to SEQ ID NO: 379411
aucaguaucucagacgcag

SEQ ID NO: 379413 - RNA, 19 nt, Artificial Sequence
  Description of Artificial Sequence: Synthetic oligonucleotide
  Sense Strand Starting at position 772 of SEQ ID NO: 317434
cugacauaaccagggcuua

SEQ ID NO: 379414 - RNA, 19 nt, Artificial Sequence
  Description of Artificial Sequence: Synthetic oligonucleotide
  Antisense Strand to SEQ ID NO: 379413
uaagcccugguuaugucag

SEQ ID NO: 379415 - RNA, 19 nt, Artificial Sequence
  Description of Artificial Sequence: Synthetic oligonucleotide
  Sense Strand Starting at position 772 of SEQ ID NO: 317435
ugacauaaccagggcuuau

SEQ ID NO: 379416 - RNA, 19 nt, Artificial Sequence
  Description of Artificial Sequence: Synthetic oligonucleotide
  Antisense Strand to SEQ ID NO: 379415
auaagcccugguuauguca

SEQ ID NO: 379417 - RNA, 19 nt, Artificial Sequence
  Description of Artificial Sequence: Synthetic oligonucleotide
  Sense Strand Starting at position 772 of SEQ ID NO: 317445
agggcuuauuauguaaagu

SEQ ID NO: 379418 - RNA, 19 nt, Artificial Sequence
  Description of Artificial Sequence: Synthetic oligonucleotide
  Antisense Strand to SEQ ID NO: 379417
acuuuacauaauaagcccu

SEQ ID NO: 379419 - RNA, 19 nt, Artificial Sequence
  Description of Artificial Sequence: Synthetic oligonucleotide
  Sense Strand Starting at position 772 of SEQ ID NO: 317446
gggcuuauuauguaaaguu

SEQ ID NO: 379420 - RNA, 19 nt, Artificial Sequence
  Description of Artificial Sequence: Synthetic oligonucleotide
  Antisense Strand to SEQ ID NO: 379419
aacuuuacauaauaagccc

SEQ ID NO: 379421 - RNA, 19 nt, Artificial Sequence
  Description of Artificial Sequence: Synthetic oligonucleotide
  Sense Strand Starting at position 772 of SEQ ID NO: 317526
cugugucaccuuggauaag

SEQ ID NO: 379422 - RNA, 19 nt, Artificial Sequence
  Description of Artificial Sequence: Synthetic oligonucleotide
  Antisense Strand to SEQ ID NO: 379421
cuuauccaaggugacacag

SEQ ID NO: 379423 - RNA, 19 nt, Artificial Sequence
  Description of Artificial Sequence: Synthetic oligonucleotide
  Sense Strand Starting at position 772 of SEQ ID NO: 317547
acuuaaagucucugaguuu

SEQ ID NO: 379424 - RNA, 19 nt, Artificial Sequence
  Description of Artificial Sequence: Synthetic oligonucleotide
  Antisense Strand to SEQ ID NO: 379423
aaacucagagacuuuaagu

SEQ ID NO: 379425 - RNA, 19 nt, Artificial Sequence
  Description of Artificial Sequence: Synthetic oligonucleotide
  Sense Strand Starting at position 772 of SEQ ID NO: 317569
uuuccuuauccuggagaua

SEQ ID NO: 379426 - RNA, 19 nt, Artificial Sequence
  Description of Artificial Sequence: Synthetic oligonucleotide
  Antisense Strand to SEQ ID NO: 379425
uaucuccaggauaaggaaa

SEQ ID NO: 379427 - RNA, 19 nt, Artificial Sequence
  Description of Artificial Sequence: Synthetic oligonucleotide
  Sense Strand Starting at position 772 of SEQ ID NO: 317795
agagaaauguugccugacu

SEQ ID NO: 379428 - RNA, 19 nt, Artificial Sequence
  Description of Artificial Sequence: Synthetic oligonucleotide
  Antisense Strand to SEQ ID NO: 379427
agucaggcaacauuucucu

SEQ ID NO: 379429 - RNA, 19 nt, Artificial Sequence
  Description of Artificial Sequence: Synthetic oligonucleotide
  Sense Strand Starting at position 772 of SEQ ID NO: 317796
gagaaauguugccugacug

SEQ ID NO: 379430 - RNA, 19 nt, Artificial Sequence
  Description of Artificial Sequence: Synthetic oligonucleotide
  Antisense Strand to SEQ ID NO: 379429
cagucaggcaacauuucuc

SEQ ID NO: 379431 - RNA, 19 nt, Artificial Sequence
  Description of Artificial Sequence: Synthetic oligonucleotide
  Sense Strand Starting at position 772 of SEQ ID NO: 317797
agaaauguugccugacuga

SEQ ID NO: 379432 - RNA, 19 nt, Artificial Sequence
  Description of Artificial Sequence: Synthetic oligonucleotide
  Antisense Strand to SEQ ID NO: 379431
ucagucaggcaacauuucu

SEQ ID NO: 379433 - RNA, 19 nt, Artificial Sequence
  Description of Artificial Sequence: Synthetic oligonucleotide
  Sense Strand Starting at position 772 of SEQ ID NO: 317800
aauguugccugacugacua

SEQ ID NO: 379434 - RNA, 19 nt, Artificial Sequence
  Description of Artificial Sequence: Synthetic oligonucleotide
  Antisense Strand to SEQ ID NO: 379433
uagucagucaggcaacauu

SEQ ID NO: 379435 - RNA, 19 nt, Artificial Sequence
  Description of Artificial Sequence: Synthetic oligonucleotide
  Sense Strand Starting at position 772 of SEQ ID NO: 317804
uugccugacugacuauaga

SEQ ID NO: 379436 - RNA, 19 nt, Artificial Sequence
  Description of Artificial Sequence: Synthetic oligonucleotide
  Antisense Strand to SEQ ID NO: 379435
ucuauagucagucaggcaa

SEQ ID NO: 379437 - RNA, 19 nt, Artificial Sequence
  Description of Artificial Sequence: Synthetic oligonucleotide
  Sense Strand Starting at position 772 of SEQ ID NO: 318145
uuuccauaacucgggcaaa

SEQ ID NO: 379438 - RNA, 19 nt, Artificial Sequence
  Description of Artificial Sequence: Synthetic oligonucleotide
  Antisense Strand to SEQ ID NO: 379437
uuugcccgaguuauggaaa

SEQ ID NO: 379439 - RNA, 19 nt, Artificial Sequence
  Description of Artificial Sequence: Synthetic oligonucleotide
  Sense Strand Starting at position 772 of SEQ ID NO: 318224
uugggaaaugguugcuaga

SEQ ID NO: 379440 - RNA, 19 nt, Artificial Sequence
  Description of Artificial Sequence: Synthetic oligonucleotide
  Antisense Strand to SEQ ID NO: 379439
ucuagcaaccauuucccaa

SEQ ID NO: 379441 - RNA, 19 nt, Artificial Sequence
  Description of Artificial Sequence: Synthetic oligonucleotide
  Sense Strand Starting at position 772 of SEQ ID NO: 318226
gggaaaugguugcuagaaa

SEQ ID NO: 379442 - RNA, 19 nt, Artificial Sequence
  Description of Artificial Sequence: Synthetic oligonucleotide
  Antisense Strand to SEQ ID NO: 379441
uuucuagcaaccauuuccc

SEQ ID NO: 379443 - RNA, 19 nt, Artificial Sequence
  Description of Artificial Sequence: Synthetic oligonucleotide
  Sense Strand Starting at position 772 of SEQ ID NO: 318475
auaggcagaaaugguaaua

SEQ ID NO: 379444 - RNA, 19 nt, Artificial Sequence
  Description of Artificial Sequence: Synthetic oligonucleotide
  Antisense Strand to SEQ ID NO: 379443
uauuaccauuucugccuau

SEQ ID NO: 379445 - RNA, 19 nt, Artificial Sequence
  Description of Artificial Sequence: Synthetic oligonucleotide
  Sense Strand Starting at position 772 of SEQ ID NO: 318502
uagucuaauguccagauga

SEQ ID NO: 379446 - RNA, 19 nt, Artificial Sequence
  Description of Artificial Sequence: Synthetic oligonucleotide
  Antisense Strand to SEQ ID NO: 379445
ucaucuggacauuagacua

SEQ ID NO: 379447 - RNA, 19 nt, Artificial Sequence
  Description of Artificial Sequence: Synthetic oligonucleotide
  Sense Strand Starting at position 772 of SEQ ID NO: 318504
gucuaauguccagaugaau

SEQ ID NO: 379448 - RNA, 19 nt, Artificial Sequence
  Description of Artificial Sequence: Synthetic oligonucleotide
  Antisense Strand to SEQ ID NO: 379447
auucaucuggacauuagac

SEQ ID NO: 379449 - RNA, 19 nt, Artificial Sequence
  Description of Artificial Sequence: Synthetic oligonucleotide
  Sense Strand Starting at position 772 of SEQ ID NO: 318582
agacgaguuacucagacuc

SEQ ID NO: 379450 - RNA, 19 nt, Artificial Sequence
  Description of Artificial Sequence: Synthetic oligonucleotide
  Antisense Strand to SEQ ID NO: 379449
gagucugaguaacucgucu

SEQ ID NO: 379451 - RNA, 19 nt, Artificial Sequence
  Description of Artificial Sequence: Synthetic oligonucleotide
  Sense Strand Starting at position 772 of SEQ ID NO: 318622
aggaaauucugacuuguuc

SEQ ID NO: 379452 - RNA, 19 nt, Artificial Sequence
  Description of Artificial Sequence: Synthetic oligonucleotide
  Antisense Strand to SEQ ID NO: 379451
gaacaagucagaauuuccu

SEQ ID NO: 379453 - RNA, 19 nt, Artificial Sequence
  Description of Artificial Sequence: Synthetic oligonucleotide
  Sense Strand Starting at position 773 of SEQ ID NO: 315250
ggagacaacuuucugacuu

SEQ ID NO: 379454 - RNA, 19 nt, Artificial Sequence
  Description of Artificial Sequence: Synthetic oligonucleotide
  Antisense Strand to SEQ ID NO: 379453
aagucagaaaguugucucc

SEQ ID NO: 379455 - RNA, 19 nt, Artificial Sequence
  Description of Artificial Sequence: Synthetic oligonucleotide
  Sense Strand Starting at position 773 of SEQ ID NO: 315308
gggcaaauagcuuacagua

SEQ ID NO: 379456 - RNA, 19 nt, Artificial Sequence
  Description of Artificial Sequence: Synthetic oligonucleotide
  Antisense Strand to SEQ ID NO: 379455
uacuguaagcuauuugccc

SEQ ID NO: 379457 - RNA, 19 nt, Artificial Sequence
  Description of Artificial Sequence: Synthetic oligonucleotide
  Sense Strand Starting at position 773 of SEQ ID NO: 315688
ggaugcuugacacguaaca

SEQ ID NO: 379458 - RNA, 19 nt, Artificial Sequence
  Description of Artificial Sequence: Synthetic oligonucleotide
  Antisense Strand to SEQ ID NO: 379457
uguuacgugucaagcaucc

SEQ ID NO: 379459 - RNA, 19 nt, Artificial Sequence
  Description of Artificial Sequence: Synthetic oligonucleotide
  Sense Strand Starting at position 773 of SEQ ID NO: 315701
guaacaggugcucaguaaa

SEQ ID NO: 379460 - RNA, 19 nt, Artificial Sequence
  Description of Artificial Sequence: Synthetic oligonucleotide
  Antisense Strand to SEQ ID NO: 379459
uuuacugagcaccuguuac

SEQ ID NO: 379461 - RNA, 19 nt, Artificial Sequence
  Description of Artificial Sequence: Synthetic oligonucleotide
  Sense Strand Starting at position 773 of SEQ ID NO: 315721
guuggcuauuauuuaguga

SEQ ID NO: 379462 - RNA, 19 nt, Artificial Sequence
  Description of Artificial Sequence: Synthetic oligonucleotide
  Antisense Strand to SEQ ID NO: 379461
ucacuaaauaauagccaac

SEQ ID NO: 379463 - RNA, 19 nt, Artificial Sequence
  Description of Artificial Sequence: Synthetic oligonucleotide
  Sense Strand Starting at position 773 of SEQ ID NO: 315793
uguaauuucuuugcagagu

SEQ ID NO: 379464 - RNA, 19 nt, Artificial Sequence
  Description of Artificial Sequence: Synthetic oligonucleotide
  Antisense Strand to SEQ ID NO: 379463
acucugcaaagaaauuaca

SEQ ID NO: 379465 - RNA, 19 nt, Artificial Sequence
  Description of Artificial Sequence: Synthetic oligonucleotide
  Sense Strand Starting at position 773 of SEQ ID NO: 315802
uuugcagagucucugagau

SEQ ID NO: 379466 - RNA, 19 nt, Artificial Sequence
  Description of Artificial Sequence: Synthetic oligonucleotide
  Antisense Strand to SEQ ID NO: 379465
aucucagagacucugcaaa

SEQ ID NO: 379467 - RNA, 19 nt, Artificial Sequence
  Description of Artificial Sequence: Synthetic oligonucleotide
  Sense Strand Starting at position 773 of SEQ ID NO: 315842
agcauuugaucuuugcuau

SEQ ID NO: 379468 - RNA, 19 nt, Artificial Sequence
  Description of Artificial Sequence: Synthetic oligonucleotide
  Antisense Strand to SEQ ID NO: 379467
auagcaaagaucaaaugcu

SEQ ID NO: 379469 - RNA, 19 nt, Artificial Sequence
  Description of Artificial Sequence: Synthetic oligonucleotide
  Sense Strand Starting at position 773 of SEQ ID NO: 315843
gcauuugaucuuugcuaug

SEQ ID NO: 379470 - RNA, 19 nt, Artificial Sequence
  Description of Artificial Sequence: Synthetic oligonucleotide
  Antisense Strand to SEQ ID NO: 379469
cauagcaaagaucaaaugc

SEQ ID NO: 379471 - RNA, 19 nt, Artificial Sequence
  Description of Artificial Sequence: Synthetic oligonucleotide
  Sense Strand Starting at position 773 of SEQ ID NO: 315848
ugaucuuugcuaugauuau

SEQ ID NO: 379472 - RNA, 19 nt, Artificial Sequence
  Description of Artificial Sequence: Synthetic oligonucleotide
  Antisense Strand to SEQ ID NO: 379471
auaaucauagcaaagauca

SEQ ID NO: 379473 - RNA, 19 nt, Artificial Sequence
  Description of Artificial Sequence: Synthetic oligonucleotide
  Sense Strand Starting at position 773 of SEQ ID NO: 315916
cuauuaagacuguauuggu

SEQ ID NO: 379474 - RNA, 19 nt, Artificial Sequence
  Description of Artificial Sequence: Synthetic oligonucleotide
  Antisense Strand to SEQ ID NO: 379473
accaauacagucuuaauag

SEQ ID NO: 379475 - RNA, 19 nt, Artificial Sequence
  Description of Artificial Sequence: Synthetic oligonucleotide
  Sense Strand Starting at position 773 of SEQ ID NO: 316435
uggguucaggcaggagaau

SEQ ID NO: 379476 - RNA, 19 nt, Artificial Sequence
  Description of Artificial Sequence: Synthetic oligonucleotide
  Antisense Strand to SEQ ID NO: 379475
auucuccugccugaaccca

SEQ ID NO: 379477 - RNA, 19 nt, Artificial Sequence
  Description of Artificial Sequence: Synthetic oligonucleotide
  Sense Strand Starting at position 773 of SEQ ID NO: 316624
acuuacugugccuaaagaa

SEQ ID NO: 379478 - RNA, 19 nt, Artificial Sequence
  Description of Artificial Sequence: Synthetic oligonucleotide
  Antisense Strand to SEQ ID NO: 379477
uucuuuaggcacaguaagu

SEQ ID NO: 379479 - RNA, 19 nt, Artificial Sequence
  Description of Artificial Sequence: Synthetic oligonucleotide
  Sense Strand Starting at position 773 of SEQ ID NO: 316707
ugggcuucucggcaagaug

SEQ ID NO: 379480 - RNA, 19 nt, Artificial Sequence
  Description of Artificial Sequence: Synthetic oligonucleotide
  Antisense Strand to SEQ ID NO: 379479
caucuugccgagaagccca

SEQ ID NO: 379481 - RNA, 19 nt, Artificial Sequence
  Description of Artificial Sequence: Synthetic oligonucleotide
  Sense Strand Starting at position 773 of SEQ ID NO: 316780
aagcuugugcccuagagau

SEQ ID NO: 379482 - RNA, 19 nt, Artificial Sequence
  Description of Artificial Sequence: Synthetic oligonucleotide
  Antisense Strand to SEQ ID NO: 379481
aucucuagggcacaagcuu

SEQ ID NO: 379483 - RNA, 19 nt, Artificial Sequence
  Description of Artificial Sequence: Synthetic oligonucleotide
  Sense Strand Starting at position 773 of SEQ ID NO: 316782
gcuugugcccuagagauac

SEQ ID NO: 379484 - RNA, 19 nt, Artificial Sequence
  Description of Artificial Sequence: Synthetic oligonucleotide
  Antisense Strand to SEQ ID NO: 379483
guaucucuagggcacaagc

SEQ ID NO: 379485 - RNA, 19 nt, Artificial Sequence
  Description of Artificial Sequence: Synthetic oligonucleotide
  Sense Strand Starting at position 773 of SEQ ID NO: 316786
gugcccuagagauacagau

SEQ ID NO: 379486 - RNA, 19 nt, Artificial Sequence
  Description of Artificial Sequence: Synthetic oligonucleotide
  Antisense Strand to SEQ ID NO: 379485
aucuguaucucuagggcac

SEQ ID NO: 379487 - RNA, 19 nt, Artificial Sequence
  Description of Artificial Sequence: Synthetic oligonucleotide
  Sense Strand Starting at position 773 of SEQ ID NO: 317283
gcaggauguggccaucuua

SEQ ID NO: 379488 - RNA, 19 nt, Artificial Sequence
  Description of Artificial Sequence: Synthetic oligonucleotide
  Antisense Strand to SEQ ID NO: 379487
uaagauggccacauccugc

SEQ ID NO: 379489 - RNA, 19 nt, Artificial Sequence
  Description of Artificial Sequence: Synthetic oligonucleotide
  Sense Strand Starting at position 773 of SEQ ID NO: 317418
cccuucuuuguaggagagu

SEQ ID NO: 379490 - RNA, 19 nt, Artificial Sequence
  Description of Artificial Sequence: Synthetic oligonucleotide
  Antisense Strand to SEQ ID NO: 379489
acucuccuacaaagaaggg

SEQ ID NO: 379491 - RNA, 19 nt, Artificial Sequence
  Description of Artificial Sequence: Synthetic oligonucleotide
  Sense Strand Starting at position 773 of SEQ ID NO: 317464
guuaauaacuccucagguc

SEQ ID NO: 379492 - RNA, 19 nt, Artificial Sequence
  Description of Artificial Sequence: Synthetic oligonucleotide
  Antisense Strand to SEQ ID NO: 379491
gaccugaggaguuauuaac

SEQ ID NO: 379493 - RNA, 19 nt, Artificial Sequence
  Description of Artificial Sequence: Synthetic oligonucleotide
  Sense Strand Starting at position 773 of SEQ ID NO: 317497
guaagugauguauaaagua

SEQ ID NO: 379494 - RNA, 19 nt, Artificial Sequence
  Description of Artificial Sequence: Synthetic oligonucleotide
  Antisense Strand to SEQ ID NO: 379493
uacuuuauacaucacuuac

SEQ ID NO: 379495 - RNA, 19 nt, Artificial Sequence
  Description of Artificial Sequence: Synthetic oligonucleotide
  Sense Strand Starting at position 773 of SEQ ID NO: 317502
ugauguauaaaguagguuu

SEQ ID NO: 379496 - RNA, 19 nt, Artificial Sequence
  Description of Artificial Sequence: Synthetic oligonucleotide
  Antisense Strand to SEQ ID NO: 379495
aaaccuacuuuauacauca

SEQ ID NO: 379497 - RNA, 19 nt, Artificial Sequence
  Description of Artificial Sequence: Synthetic oligonucleotide
  Sense Strand Starting at position 773 of SEQ ID NO: 317727
uuuguagauguccagcauu

SEQ ID NO: 379498 - RNA, 19 nt, Artificial Sequence
  Description of Artificial Sequence: Synthetic oligonucleotide
  Antisense Strand to SEQ ID NO: 379497
aaugcuggacaucuacaaa

SEQ ID NO: 379499 - RNA, 19 nt, Artificial Sequence
  Description of Artificial Sequence: Synthetic oligonucleotide
  Sense Strand Starting at position 773 of SEQ ID NO: 317730
guagauguccagcauuugu

SEQ ID NO: 379500 - RNA, 19 nt, Artificial Sequence
  Description of Artificial Sequence: Synthetic oligonucleotide
  Antisense Strand to SEQ ID NO: 379499
acaaaugcuggacaucuac

SEQ ID NO: 379501 - RNA, 19 nt, Artificial Sequence
  Description of Artificial Sequence: Synthetic oligonucleotide
  Sense Strand Starting at position 773 of SEQ ID NO: 317807
aacuuuaccgaagauguuu

SEQ ID NO: 379502 - RNA, 19 nt, Artificial Sequence
  Description of Artificial Sequence: Synthetic oligonucleotide
  Antisense Strand to SEQ ID NO: 379501
aaacaucuucgguaaaguu

SEQ ID NO: 379503 - RNA, 19 nt, Artificial Sequence
  Description of Artificial Sequence: Synthetic oligonucleotide
  Sense Strand Starting at position 773 of SEQ ID NO: 317827
uguugugauacucaagucu

SEQ ID NO: 379504 - RNA, 19 nt, Artificial Sequence
  Description of Artificial Sequence: Synthetic oligonucleotide
  Antisense Strand to SEQ ID NO: 379503
agacuugaguaucacaaca

SEQ ID NO: 379505 - RNA, 19 nt, Artificial Sequence
  Description of Artificial Sequence: Synthetic oligonucleotide
  Sense Strand Starting at position 773 of SEQ ID NO: 317887
uuuacaggauguguuacaa

SEQ ID NO: 379506 - RNA, 19 nt, Artificial Sequence
  Description of Artificial Sequence: Synthetic oligonucleotide
  Antisense Strand to SEQ ID NO: 379505
uuguaacacauccuguaaa

SEQ ID NO: 379507 - RNA, 19 nt, Artificial Sequence
  Description of Artificial Sequence: Synthetic oligonucleotide
  Sense Strand Starting at position 773 of SEQ ID NO: 317914
acugguaacuuaguaacuu

SEQ ID NO: 379508 - RNA, 19 nt, Artificial Sequence
  Description of Artificial Sequence: Synthetic oligonucleotide
  Antisense Strand to SEQ ID NO: 379507
aaguuacuaaguuaccagu

SEQ ID NO: 379509 - RNA, 19 nt, Artificial Sequence
  Description of Artificial Sequence: Synthetic oligonucleotide
  Sense Strand Starting at position 773 of SEQ ID NO: 317958
ccuggauccagugaaguau

SEQ ID NO: 379510 - RNA, 19 nt, Artificial Sequence
  Description of Artificial Sequence: Synthetic oligonucleotide
  Antisense Strand to SEQ ID NO: 379509
auacuucacuggauccagg

SEQ ID NO: 379511 - RNA, 19 nt, Artificial Sequence
  Description of Artificial Sequence: Synthetic oligonucleotide
  Sense Strand Starting at position 773 of SEQ ID NO: 318008
agucucuauccggaacaau

SEQ ID NO: 379512 - RNA, 19 nt, Artificial Sequence
  Description of Artificial Sequence: Synthetic oligonucleotide
  Antisense Strand to SEQ ID NO: 379511
auuguuccggauagagacu

SEQ ID NO: 379513 - RNA, 19 nt, Artificial Sequence
  Description of Artificial Sequence: Synthetic oligonucleotide
  Sense Strand Starting at position 773 of SEQ ID NO: 318195
aucucaggucguuaacuau

SEQ ID NO: 379514 - RNA, 19 nt, Artificial Sequence
  Description of Artificial Sequence: Synthetic oligonucleotide
  Antisense Strand to SEQ ID NO: 379513
auaguuaacgaccugagau

SEQ ID NO: 379515 - RNA, 19 nt, Artificial Sequence
  Description of Artificial Sequence: Synthetic oligonucleotide
  Sense Strand Starting at position 773 of SEQ ID NO: 318282
ccauucuuagcugcguauu

SEQ ID NO: 379516 - RNA, 19 nt, Artificial Sequence
  Description of Artificial Sequence: Synthetic oligonucleotide
  Antisense Strand to SEQ ID NO: 379515
aauacgcagcuaagaaugg

SEQ ID NO: 379517 - RNA, 19 nt, Artificial Sequence
  Description of Artificial Sequence: Synthetic oligonucleotide
  Sense Strand Starting at position 773 of SEQ ID NO: 318284
auucuuagcugcguauuua

SEQ ID NO: 379518 - RNA, 19 nt, Artificial Sequence
  Description of Artificial Sequence: Synthetic oligonucleotide
  Antisense Strand to SEQ ID NO: 379517
uaaauacgcagcuaagaau

SEQ ID NO: 379519 - RNA, 19 nt, Artificial Sequence
  Description of Artificial Sequence: Synthetic oligonucleotide
  Sense Strand Starting at position 773 of SEQ ID NO: 318288
uuagcugcguauuuacaua

SEQ ID NO: 379520 - RNA, 19 nt, Artificial Sequence
  Description of Artificial Sequence: Synthetic oligonucleotide
  Antisense Strand to SEQ ID NO: 379519
uauguaaauacgcagcuaa

SEQ ID NO: 379521 - RNA, 19 nt, Artificial Sequence
  Description of Artificial Sequence: Synthetic oligonucleotide
  Sense Strand Starting at position 773 of SEQ ID NO: 318810
acccauuagcaauguaaga

SEQ ID NO: 379522 - RNA, 19 nt, Artificial Sequence
  Description of Artificial Sequence: Synthetic oligonucleotide
  Antisense Strand to SEQ ID NO: 379521
ucuuacauugcuaaugggu

SEQ ID NO: 379523 - RNA, 19 nt, Artificial Sequence
  Description of Artificial Sequence: Synthetic oligonucleotide
  Sense Strand Starting at position 773 of SEQ ID NO: 318863
guaacuauguuaccucuga

SEQ ID NO: 379524 - RNA, 19 nt, Artificial Sequence
  Description of Artificial Sequence: Synthetic oligonucleotide
  Antisense Strand to SEQ ID NO: 379523
ucagagguaacauaguuac

SEQ ID NO: 379525 - RNA, 19 nt, Artificial Sequence
  Description of Artificial Sequence: Synthetic oligonucleotide
  Sense Strand Starting at position 773 of SEQ ID NO: 318942
aauuuauuguggccaagca

SEQ ID NO: 379526 - RNA, 19 nt, Artificial Sequence
  Description of Artificial Sequence: Synthetic oligonucleotide
  Antisense Strand to SEQ ID NO: 379525
ugcuuggccacaauaaauu

SEQ ID NO: 379527 - RNA, 19 nt, Artificial Sequence
  Description of Artificial Sequence: Synthetic oligonucleotide
  Sense Strand Starting at position 773 of SEQ ID NO: 319084
auuaauucuugugcagaaa

SEQ ID NO: 379528 - RNA, 19 nt, Artificial Sequence
  Description of Artificial Sequence: Synthetic oligonucleotide
  Antisense Strand to SEQ ID NO: 379527
uuucugcacaagaauuaau

SEQ ID NO: 379529 - RNA, 19 nt, Artificial Sequence
  Description of Artificial Sequence: Synthetic oligonucleotide
  Sense Strand Starting at position 773 of SEQ ID NO: 319085
uuaauucuugugcagaaac

SEQ ID NO: 379530 - RNA, 19 nt, Artificial Sequence
  Description of Artificial Sequence: Synthetic oligonucleotide
  Antisense Strand to SEQ ID NO: 379529
guuucugcacaagaauuaa

SEQ ID NO: 379531 - RNA, 19 nt, Artificial Sequence
  Description of Artificial Sequence: Synthetic oligonucleotide
  Sense Strand Starting at position 773 of SEQ ID NO: 319120
aaauguuaucgaugacaaa

SEQ ID NO: 379532 - RNA, 19 nt, Artificial Sequence
  Description of Artificial Sequence: Synthetic oligonucleotide
  Antisense Strand to SEQ ID NO: 379531
uuugucaucgauaacauuu

SEQ ID NO: 379533 - RNA, 19 nt, Artificial Sequence
  Description of Artificial Sequence: Synthetic oligonucleotide
  Sense Strand Starting at position 774 of SEQ ID NO: 315252
ugugaauugaaguaguuuc

SEQ ID NO: 379534 - RNA, 19 nt, Artificial Sequence
  Description of Artificial Sequence: Synthetic oligonucleotide
  Antisense Strand to SEQ ID NO: 379533
gaaacuacuucaauucaca

SEQ ID NO: 379535 - RNA, 19 nt, Artificial Sequence
  Description of Artificial Sequence: Synthetic oligonucleotide
  Sense Strand Starting at position 774 of SEQ ID NO: 315478
gggcuaaaugcuggauaua

SEQ ID NO: 379536 - RNA, 19 nt, Artificial Sequence
  Description of Artificial Sequence: Synthetic oligonucleotide
  Antisense Strand to SEQ ID NO: 379535
uauauccagcauuuagccc

SEQ ID NO: 379537 - RNA, 19 nt, Artificial Sequence
  Description of Artificial Sequence: Synthetic oligonucleotide
  Sense Strand Starting at position 774 of SEQ ID NO: 315479
ggcuaaaugcuggauauau

SEQ ID NO: 379538 - RNA, 19 nt, Artificial Sequence
  Description of Artificial Sequence: Synthetic oligonucleotide
  Antisense Strand to SEQ ID NO: 379537
auauauccagcauuuagcc

SEQ ID NO: 379539 - RNA, 19 nt, Artificial Sequence
  Description of Artificial Sequence: Synthetic oligonucleotide
  Sense Strand Starting at position 774 of SEQ ID NO: 315646
gugagcaacaggugagaua

SEQ ID NO: 379540 - RNA, 19 nt, Artificial Sequence
  Description of Artificial Sequence: Synthetic oligonucleotide
  Antisense Strand to SEQ ID NO: 379539
uaucucaccuguugcucac

SEQ ID NO: 379541 - RNA, 19 nt, Artificial Sequence
  Description of Artificial Sequence: Synthetic oligonucleotide
  Sense Strand Starting at position 774 of SEQ ID NO: 315758
ggaaucauugcaggacuuu

SEQ ID NO: 379542 - RNA, 19 nt, Artificial Sequence
  Description of Artificial Sequence: Synthetic oligonucleotide
  Antisense Strand to SEQ ID NO: 379541
aaaguccugcaaugauucc

SEQ ID NO: 379543 - RNA, 19 nt, Artificial Sequence
  Description of Artificial Sequence: Synthetic oligonucleotide
  Sense Strand Starting at position 774 of SEQ ID NO: 316224
aagccagauggguguugaa

SEQ ID NO: 379544 - RNA, 19 nt, Artificial Sequence
  Description of Artificial Sequence: Synthetic oligonucleotide
  Antisense Strand to SEQ ID NO: 379543
uucaacacccaucuggcuu

SEQ ID NO: 379545 - RNA, 19 nt, Artificial Sequence
  Description of Artificial Sequence: Synthetic oligonucleotide
  Sense Strand Starting at position 774 of SEQ ID NO: 316373
auggaugucgucuagagug

SEQ ID NO: 379546 - RNA, 19 nt, Artificial Sequence
  Description of Artificial Sequence: Synthetic oligonucleotide
  Antisense Strand to SEQ ID NO: 379545
cacucuagacgacauccau

SEQ ID NO: 379547 - RNA, 19 nt, Artificial Sequence
  Description of Artificial Sequence: Synthetic oligonucleotide
  Sense Strand Starting at position 774 of SEQ ID NO: 316515
gggucugacaguuaguaga

SEQ ID NO: 379548 - RNA, 19 nt, Artificial Sequence
  Description of Artificial Sequence: Synthetic oligonucleotide
  Antisense Strand to SEQ ID NO: 379547
ucuacuaacugucagaccc

SEQ ID NO: 379549 - RNA, 19 nt, Artificial Sequence
  Description of Artificial Sequence: Synthetic oligonucleotide
  Sense Strand Starting at position 774 of SEQ ID NO: 316549
guuggagacuuucuaauca

SEQ ID NO: 379550 - RNA, 19 nt, Artificial Sequence
  Description of Artificial Sequence: Synthetic oligonucleotide
  Antisense Strand to SEQ ID NO: 379549
ugauuagaaagucuccaac

SEQ ID NO: 379551 - RNA, 19 nt, Artificial Sequence
  Description of Artificial Sequence: Synthetic oligonucleotide
  Sense Strand Starting at position 774 of SEQ ID NO: 316553
gagacuuucuaaucaucgu

SEQ ID NO: 379552 - RNA, 19 nt, Artificial Sequence
  Description of Artificial Sequence: Synthetic oligonucleotide
  Antisense Strand to SEQ ID NO: 379551
acgaugauuagaaagucuc

SEQ ID NO: 379553 - RNA, 19 nt, Artificial Sequence
  Description of Artificial Sequence: Synthetic oligonucleotide
  Sense Strand Starting at position 774 of SEQ ID NO: 316557
cuuucuaaucaucgucaga

SEQ ID NO: 379554 - RNA, 19 nt, Artificial Sequence
  Description of Artificial Sequence: Synthetic oligonucleotide
  Antisense Strand to SEQ ID NO: 379553
ucugacgaugauuagaaag

SEQ ID NO: 379555 - RNA, 19 nt, Artificial Sequence
  Description of Artificial Sequence: Synthetic oligonucleotide
  Sense Strand Starting at position 774 of SEQ ID NO: 316559
uucuaaucaucgucagaua

SEQ ID NO: 379556 - RNA, 19 nt, Artificial Sequence
  Description of Artificial Sequence: Synthetic oligonucleotide
  Antisense Strand to SEQ ID NO: 379555
uaucugacgaugauuagaa

SEQ ID NO: 379557 - RNA, 19 nt, Artificial Sequence
  Description of Artificial Sequence: Synthetic oligonucleotide
  Sense Strand Starting at position 774 of SEQ ID NO: 316560
ucuaaucaucgucagauag

SEQ ID NO: 379558 - RNA, 19 nt, Artificial Sequence
  Description of Artificial Sequence: Synthetic oligonucleotide
  Antisense Strand to SEQ ID NO: 379557
cuaucugacgaugauuaga

SEQ ID NO: 379559 - RNA, 19 nt, Artificial Sequence
  Description of Artificial Sequence: Synthetic oligonucleotide
  Sense Strand Starting at position 774 of SEQ ID NO: 316682
cgcucauagagaugaagaa

SEQ ID NO: 379560 - RNA, 19 nt, Artificial Sequence
  Description of Artificial Sequence: Synthetic oligonucleotide
  Antisense Strand to SEQ ID NO: 379559
uucuucaucucuaugagcg

SEQ ID NO: 379561 - RNA, 19 nt, Artificial Sequence
  Description of Artificial Sequence: Synthetic oligonucleotide
  Sense Strand Starting at position 774 of SEQ ID NO: 317490
ucuccuacacguugaagau

SEQ ID NO: 379562 - RNA, 19 nt, Artificial Sequence
  Description of Artificial Sequence: Synthetic oligonucleotide
  Antisense Strand to SEQ ID NO: 379561
aucuucaacguguaggaga

SEQ ID NO: 379563 - RNA, 19 nt, Artificial Sequence
  Description of Artificial Sequence: Synthetic oligonucleotide
  Sense Strand Starting at position 774 of SEQ ID NO: 317491
cuccuacacguugaagauu

SEQ ID NO: 379564 - RNA, 19 nt, Artificial Sequence
  Description of Artificial Sequence: Synthetic oligonucleotide
  Antisense Strand to SEQ ID NO: 379563
aaucuucaacguguaggag

SEQ ID NO: 379565 - RNA, 19 nt, Artificial Sequence
  Description of Artificial Sequence: Synthetic oligonucleotide
  Sense Strand Starting at position 774 of SEQ ID NO: 317575
caagaauugcuaugggcua

SEQ ID NO: 379566 - RNA, 19 nt, Artificial Sequence
  Description of Artificial Sequence: Synthetic oligonucleotide
  Antisense Strand to SEQ ID NO: 379565
uagcccauagcaauucuug

SEQ ID NO: 379567 - RNA, 19 nt, Artificial Sequence
  Description of Artificial Sequence: Synthetic oligonucleotide
  Sense Strand Starting at position 774 of SEQ ID NO: 317766
accuguauaguauaacuau

SEQ ID NO: 379568 - RNA, 19 nt, Artificial Sequence
  Description of Artificial Sequence: Synthetic oligonucleotide
  Antisense Strand to SEQ ID NO: 379567
auaguuauacuauacaggu

SEQ ID NO: 379569 - RNA, 19 nt, Artificial Sequence
  Description of Artificial Sequence: Synthetic oligonucleotide
  Sense Strand Starting at position 774 of SEQ ID NO: 317778
uaacuaucgccaguucguu

SEQ ID NO: 379570 - RNA, 19 nt, Artificial Sequence
  Description of Artificial Sequence: Synthetic oligonucleotide
  Antisense Strand to SEQ ID NO: 379569
aacgaacuggcgauaguua

SEQ ID NO: 379571 - RNA, 19 nt, Artificial Sequence
  Description of Artificial Sequence: Synthetic oligonucleotide
  Sense Strand Starting at position 774 of SEQ ID NO: 318004
acaagaaguuuccuaagua

SEQ ID NO: 379572 - RNA, 19 nt, Artificial Sequence
  Description of Artificial Sequence: Synthetic oligonucleotide
  Antisense Strand to SEQ ID NO: 379571
uacuuaggaaacuucuugu

SEQ ID NO: 379573 - RNA, 19 nt, Artificial Sequence
  Description of Artificial Sequence: Synthetic oligonucleotide
  Sense Strand Starting at position 774 of SEQ ID NO: 318017
uaaguaguccaguauggca

SEQ ID NO: 379574 - RNA, 19 nt, Artificial Sequence
  Description of Artificial Sequence: Synthetic oligonucleotide
  Antisense Strand to SEQ ID NO: 379573
ugccauacuggacuacuua

SEQ ID NO: 379575 - RNA, 19 nt, Artificial Sequence
  Description of Artificial Sequence: Synthetic oligonucleotide
  Sense Strand Starting at position 774 of SEQ ID NO: 318040
uagugauggagucagggua

SEQ ID NO: 379576 - RNA, 19 nt, Artificial Sequence
  Description of Artificial Sequence: Synthetic oligonucleotide
  Antisense Strand to SEQ ID NO: 379575
uacccugacuccaucacua

SEQ ID NO: 379577 - RNA, 19 nt, Artificial Sequence
  Description of Artificial Sequence: Synthetic oligonucleotide
  Sense Strand Starting at position 774 of SEQ ID NO: 318075
uggucuuaaccacgaugau

SEQ ID NO: 379578 - RNA, 19 nt, Artificial Sequence
  Description of Artificial Sequence: Synthetic oligonucleotide
  Antisense Strand to SEQ ID NO: 379577
aucaucgugguuaagacca

SEQ ID NO: 379579 - RNA, 19 nt, Artificial Sequence
  Description of Artificial Sequence: Synthetic oligonucleotide
  Sense Strand Starting at position 774 of SEQ ID NO: 318076
ggucuuaaccacgaugaug

SEQ ID NO: 379580 - RNA, 19 nt, Artificial Sequence
  Description of Artificial Sequence: Synthetic oligonucleotide
  Antisense Strand to SEQ ID NO: 379579
caucaucgugguuaagacc

SEQ ID NO: 379581 - RNA, 19 nt, Artificial Sequence
  Description of Artificial Sequence: Synthetic oligonucleotide
  Sense Strand Starting at position 774 of SEQ ID NO: 318101
cgacgauuucuucgaguac

SEQ ID NO: 379582 - RNA, 19 nt, Artificial Sequence
  Description of Artificial Sequence: Synthetic oligonucleotide
  Antisense Strand to SEQ ID NO: 379581
guacucgaagaaaucgucg

SEQ ID NO: 379583 - RNA, 19 nt, Artificial Sequence
  Description of Artificial Sequence: Synthetic oligonucleotide
  Sense Strand Starting at position 774 of SEQ ID NO: 318173
gugguuacaucuucccaaa

SEQ ID NO: 379584 - RNA, 19 nt, Artificial Sequence
  Description of Artificial Sequence: Synthetic oligonucleotide
  Antisense Strand to SEQ ID NO: 379583
uuugggaagauguaaccac

SEQ ID NO: 379585 - RNA, 19 nt, Artificial Sequence
  Description of Artificial Sequence: Synthetic oligonucleotide
  Sense Strand Starting at position 774 of SEQ ID NO: 318208
uacagugaacccuaacguu

SEQ ID NO: 379586 - RNA, 19 nt, Artificial Sequence
  Description of Artificial Sequence: Synthetic oligonucleotide
  Antisense Strand to SEQ ID NO: 379585
aacguuaggguucacugua

SEQ ID NO: 379587 - RNA, 19 nt, Artificial Sequence
  Description of Artificial Sequence: Synthetic oligonucleotide
  Sense Strand Starting at position 774 of SEQ ID NO: 318266
auacuuaagcuuggguaau

SEQ ID NO: 379588 - RNA, 19 nt, Artificial Sequence
  Description of Artificial Sequence: Synthetic oligonucleotide
  Antisense Strand to SEQ ID NO: 379587
auuacccaagcuuaaguau

SEQ ID NO: 379589 - RNA, 19 nt, Artificial Sequence
  Description of Artificial Sequence: Synthetic oligonucleotide
  Sense Strand Starting at position 774 of SEQ ID NO: 318347
ccaaacucuggugaguaua

SEQ ID NO: 379590 - RNA, 19 nt, Artificial Sequence
  Description of Artificial Sequence: Synthetic oligonucleotide
  Antisense Strand to SEQ ID NO: 379589
uauacucaccagaguuugg

SEQ ID NO: 379591 - RNA, 19 nt, Artificial Sequence
  Description of Artificial Sequence: Synthetic oligonucleotide
  Sense Strand Starting at position 774 of SEQ ID NO: 318357
gugaguauagcagaacuaa

SEQ ID NO: 379592 - RNA, 19 nt, Artificial Sequence
  Description of Artificial Sequence: Synthetic oligonucleotide
  Antisense Strand to SEQ ID NO: 379591
uuaguucugcuauacucac

SEQ ID NO: 379593 - RNA, 19 nt, Artificial Sequence
  Description of Artificial Sequence: Synthetic oligonucleotide
  Sense Strand Starting at position 774 of SEQ ID NO: 318448
gaccgaugcugaguagaaa

SEQ ID NO: 379594 - RNA, 19 nt, Artificial Sequence
  Description of Artificial Sequence: Synthetic oligonucleotide
  Antisense Strand to SEQ ID NO: 379593
uuucuacucagcaucgguc

SEQ ID NO: 379595 - RNA, 19 nt, Artificial Sequence
  Description of Artificial Sequence: Synthetic oligonucleotide
  Sense Strand Starting at position 774 of SEQ ID NO: 318790
aacauuaagcagugagaca

SEQ ID NO: 379596 - RNA, 19 nt, Artificial Sequence
  Description of Artificial Sequence: Synthetic oligonucleotide
  Antisense Strand to SEQ ID NO: 379595
ugucucacugcuuaauguu

SEQ ID NO: 379597 - RNA, 19 nt, Artificial Sequence
  Description of Artificial Sequence: Synthetic oligonucleotide
  Sense Strand Starting at position 774 of SEQ ID NO: 318806
acaugacugcacugaacuu

SEQ ID NO: 379598 - RNA, 19 nt, Artificial Sequence
  Description of Artificial Sequence: Synthetic oligonucleotide
  Antisense Strand to SEQ ID NO: 379597
aaguucagugcagucaugu

SEQ ID NO: 379599 - RNA, 19 nt, Artificial Sequence
  Description of Artificial Sequence: Synthetic oligonucleotide
  Sense Strand Starting at position 774 of SEQ ID NO: 318901
uuggccaucccagaauauu

SEQ ID NO: 379600 - RNA, 19 nt, Artificial Sequence
  Description of Artificial Sequence: Synthetic oligonucleotide
  Antisense Strand to SEQ ID NO: 379599
aauauucugggauggccaa

SEQ ID NO: 379601 - RNA, 19 nt, Artificial Sequence
  Description of Artificial Sequence: Synthetic oligonucleotide
  Sense Strand Starting at position 774 of SEQ ID NO: 318921
cugaacuucccugaaagcu

SEQ ID NO: 379602 - RNA, 19 nt, Artificial Sequence
  Description of Artificial Sequence: Synthetic oligonucleotide
  Antisense Strand to SEQ ID NO: 379601
agcuuucagggaaguucag

SEQ ID NO: 379603 - RNA, 19 nt, Artificial Sequence
  Description of Artificial Sequence: Synthetic oligonucleotide
  Sense Strand Starting at position 774 of SEQ ID NO: 318941
cagcgauuaagaggcaaga

SEQ ID NO: 379604 - RNA, 19 nt, Artificial Sequence
  Description of Artificial Sequence: Synthetic oligonucleotide
  Antisense Strand to SEQ ID NO: 379603
ucuugccucuuaaucgcug

SEQ ID NO: 379605 - RNA, 19 nt, Artificial Sequence
  Description of Artificial Sequence: Synthetic oligonucleotide
  Sense Strand Starting at position 774 of SEQ ID NO: 318943
gcgauuaagaggcaagaau

SEQ ID NO: 379606 - RNA, 19 nt, Artificial Sequence
  Description of Artificial Sequence: Synthetic oligonucleotide
  Antisense Strand to SEQ ID NO: 379605
auucuugccucuuaaucgc

SEQ ID NO: 379607 - RNA, 19 nt, Artificial Sequence
  Description of Artificial Sequence: Synthetic oligonucleotide
  Sense Strand Starting at position 774 of SEQ ID NO: 319193
gguaacaaaucugcaugua

SEQ ID NO: 379608 - RNA, 19 nt, Artificial Sequence
  Description of Artificial Sequence: Synthetic oligonucleotide
  Antisense Strand to SEQ ID NO: 379607
uacaugcagauuuguuacc

SEQ ID NO: 379609 - RNA, 19 nt, Artificial Sequence
  Description of Artificial Sequence: Synthetic oligonucleotide
  Sense Strand Starting at position 774 of SEQ ID NO: 319194
guaacaaaucugcauguaa

SEQ ID NO: 379610 - RNA, 19 nt, Artificial Sequence
  Description of Artificial Sequence: Synthetic oligonucleotide
  Antisense Strand to SEQ ID NO: 379609
uuacaugcagauuuguuac

SEQ ID NO: 379611 - RNA, 19 nt, Artificial Sequence
  Description of Artificial Sequence: Synthetic oligonucleotide
  Sense Strand Starting at position 774 of SEQ ID NO: 319201
aucugcauguaaguagaua

SEQ ID NO: 379612 - RNA, 19 nt, Artificial Sequence
  Description of Artificial Sequence: Synthetic oligonucleotide
  Antisense Strand to SEQ ID NO: 379611
uaucuacuuacaugcagau

SEQ ID NO: 379613 - RNA, 19 nt, Artificial Sequence
  Description of Artificial Sequence: Synthetic oligonucleotide
  Sense Strand Starting at position 775 of SEQ ID NO: 315439
ggagcuugcagugagaucu

SEQ ID NO: 379614 - RNA, 19 nt, Artificial Sequence
  Description of Artificial Sequence: Synthetic oligonucleotide
  Antisense Strand to SEQ ID NO: 379613
agaucucacugcaagcucc

SEQ ID NO: 379615 - RNA, 19 nt, Artificial Sequence
  Description of Artificial Sequence: Synthetic oligonucleotide
  Sense Strand Starting at position 775 of SEQ ID NO: 315553
ucauaugaguagguacaaa

SEQ ID NO: 379616 - RNA, 19 nt, Artificial Sequence
  Description of Artificial Sequence: Synthetic oligonucleotide
  Antisense Strand to SEQ ID NO: 379615
uuuguaccuacucauauga

SEQ ID NO: 379617 - RNA, 19 nt, Artificial Sequence
  Description of Artificial Sequence: Synthetic oligonucleotide
  Sense Strand Starting at position 775 of SEQ ID NO: 315714
auuccaaagcuaugagaca

SEQ ID NO: 379618 - RNA, 19 nt, Artificial Sequence
  Description of Artificial Sequence: Synthetic oligonucleotide
  Antisense Strand to SEQ ID NO: 379617
ugucucauagcuuuggaau

SEQ ID NO: 379619 - RNA, 19 nt, Artificial Sequence
  Description of Artificial Sequence: Synthetic oligonucleotide
  Sense Strand Starting at position 775 of SEQ ID NO: 315873
auguaugaaucaguuaagu

SEQ ID NO: 379620 - RNA, 19 nt, Artificial Sequence
  Description of Artificial Sequence: Synthetic oligonucleotide
  Antisense Strand to SEQ ID NO: 379619
acuuaacugauucauacau

SEQ ID NO: 379621 - RNA, 19 nt, Artificial Sequence
  Description of Artificial Sequence: Synthetic oligonucleotide
  Sense Strand Starting at position 775 of SEQ ID NO: 315875
guaugaaucaguuaaguug

SEQ ID NO: 379622 - RNA, 19 nt, Artificial Sequence
  Description of Artificial Sequence: Synthetic oligonucleotide
  Antisense Strand to SEQ ID NO: 379621
caacuuaacugauucauac

SEQ ID NO: 379623 - RNA, 19 nt, Artificial Sequence
  Description of Artificial Sequence: Synthetic oligonucleotide
  Sense Strand Starting at position 775 of SEQ ID NO: 315895
accuaauaccagugagauu

SEQ ID NO: 379624 - RNA, 19 nt, Artificial Sequence
  Description of Artificial Sequence: Synthetic oligonucleotide
  Antisense Strand to SEQ ID NO: 379623
aaucucacugguauuaggu

SEQ ID NO: 379625 - RNA, 19 nt, Artificial Sequence
  Description of Artificial Sequence: Synthetic oligonucleotide
  Sense Strand Starting at position 775 of SEQ ID NO: 315979
agagcaggccucuaaauau

SEQ ID NO: 379626 - RNA, 19 nt, Artificial Sequence
  Description of Artificial Sequence: Synthetic oligonucleotide
  Antisense Strand to SEQ ID NO: 379625
auauuuagaggccugcucu

SEQ ID NO: 379627 - RNA, 19 nt, Artificial Sequence
  Description of Artificial Sequence: Synthetic oligonucleotide
  Sense Strand Starting at position 775 of SEQ ID NO: 316458
cgagguuugagugaacuug

SEQ ID NO: 379628 - RNA, 19 nt, Artificial Sequence
  Description of Artificial Sequence: Synthetic oligonucleotide
  Antisense Strand to SEQ ID NO: 379627
caaguucacucaaaccucg

SEQ ID NO: 379629 - RNA, 19 nt, Artificial Sequence
  Description of Artificial Sequence: Synthetic oligonucleotide
  Sense Strand Starting at position 775 of SEQ ID NO: 316568
caaguaaguguccagcaga

SEQ ID NO: 379630 - RNA, 19 nt, Artificial Sequence
  Description of Artificial Sequence: Synthetic oligonucleotide
  Antisense Strand to SEQ ID NO: 379629
ucugcuggacacuuacuug

SEQ ID NO: 379631 - RNA, 19 nt, Artificial Sequence
  Description of Artificial Sequence: Synthetic oligonucleotide
  Sense Strand Starting at position 775 of SEQ ID NO: 316643
uggagaaaguuacuaccuu

SEQ ID NO: 379632 - RNA, 19 nt, Artificial Sequence
  Description of Artificial Sequence: Synthetic oligonucleotide
  Antisense Strand to SEQ ID NO: 379631
aagguaguaacuuucucca

SEQ ID NO: 379633 - RNA, 19 nt, Artificial Sequence
  Description of Artificial Sequence: Synthetic oligonucleotide
  Sense Strand Starting at position 775 of SEQ ID NO: 316718
aggaguauuuaucacaagu

SEQ ID NO: 379634 - RNA, 19 nt, Artificial Sequence
  Description of Artificial Sequence: Synthetic oligonucleotide
  Antisense Strand to SEQ ID NO: 379633
acuugugauaaauacuccu

SEQ ID NO: 379635 - RNA, 19 nt, Artificial Sequence
  Description of Artificial Sequence: Synthetic oligonucleotide
  Sense Strand Starting at position 775 of SEQ ID NO: 316775
ggcaauuugucaccaguuu

SEQ ID NO: 379636 - RNA, 19 nt, Artificial Sequence
  Description of Artificial Sequence: Synthetic oligonucleotide
  Antisense Strand to SEQ ID NO: 379635
aaacuggugacaaauugcc

SEQ ID NO: 379637 - RNA, 19 nt, Artificial Sequence
  Description of Artificial Sequence: Synthetic oligonucleotide
  Sense Strand Starting at position 775 of SEQ ID NO: 316928
ggaguacauccggagguaa

SEQ ID NO: 379638 - RNA, 19 nt, Artificial Sequence
  Description of Artificial Sequence: Synthetic oligonucleotide
  Antisense Strand to SEQ ID NO: 379637
uuaccuccggauguacucc

SEQ ID NO: 379639 - RNA, 19 nt, Artificial Sequence
  Description of Artificial Sequence: Synthetic oligonucleotide
  Sense Strand Starting at position 775 of SEQ ID NO: 316930
aguacauccggagguaaga

SEQ ID NO: 379640 - RNA, 19 nt, Artificial Sequence
  Description of Artificial Sequence: Synthetic oligonucleotide
  Antisense Strand to SEQ ID NO: 379639
ucuuaccuccggauguacu

SEQ ID NO: 379641 - RNA, 19 nt, Artificial Sequence
  Description of Artificial Sequence: Synthetic oligonucleotide
  Sense Strand Starting at position 775 of SEQ ID NO: 316943
guaagauguccaggaaagc

SEQ ID NO: 379642 - RNA, 19 nt, Artificial Sequence
  Description of Artificial Sequence: Synthetic oligonucleotide
  Antisense Strand to SEQ ID NO: 379641
gcuuuccuggacaucuuac

SEQ ID NO: 379643 - RNA, 19 nt, Artificial Sequence
  Description of Artificial Sequence: Synthetic oligonucleotide
  Sense Strand Starting at position 775 of SEQ ID NO: 318057
aaguuagccaggugaggaa

SEQ ID NO: 379644 - RNA, 19 nt, Artificial Sequence
  Description of Artificial Sequence: Synthetic oligonucleotide
  Antisense Strand to SEQ ID NO: 379643
uuccucaccuggcuaacuu

SEQ ID NO: 379645 - RNA, 19 nt, Artificial Sequence
  Description of Artificial Sequence: Synthetic oligonucleotide
  Sense Strand Starting at position 775 of SEQ ID NO: 318225
gaaagaaguuccgugacug

SEQ ID NO: 379646 - RNA, 19 nt, Artificial Sequence
  Description of Artificial Sequence: Synthetic oligonucleotide
  Antisense Strand to SEQ ID NO: 379645
cagucacggaacuucuuuc

SEQ ID NO: 379647 - RNA, 19 nt, Artificial Sequence
  Description of Artificial Sequence: Synthetic oligonucleotide
  Sense Strand Starting at position 775 of SEQ ID NO: 318226
aaagaaguuccgugacuga

SEQ ID NO: 379648 - RNA, 19 nt, Artificial Sequence
  Description of Artificial Sequence: Synthetic oligonucleotide
  Antisense Strand to SEQ ID NO: 379647
ucagucacggaacuucuuu

SEQ ID NO: 379649 - RNA, 19 nt, Artificial Sequence
  Description of Artificial Sequence: Synthetic oligonucleotide
  Sense Strand Starting at position 775 of SEQ ID NO: 318264
acuugauccuuaucauagg

SEQ ID NO: 379650 - RNA, 19 nt, Artificial Sequence
  Description of Artificial Sequence: Synthetic oligonucleotide
  Antisense Strand to SEQ ID NO: 379649
ccuaugauaaggaucaagu

SEQ ID NO: 379651 - RNA, 19 nt, Artificial Sequence
  Description of Artificial Sequence: Synthetic oligonucleotide
  Sense Strand Starting at position 775 of SEQ ID NO: 318312
aaugcuuugugauuaugag

SEQ ID NO: 379652 - RNA, 19 nt, Artificial Sequence
  Description of Artificial Sequence: Synthetic oligonucleotide
  Antisense Strand to SEQ ID NO: 379651
cucauaaucacaaagcauu

SEQ ID NO: 379653 - RNA, 19 nt, Artificial Sequence
  Description of Artificial Sequence: Synthetic oligonucleotide
  Sense Strand Starting at position 775 of SEQ ID NO: 318313
augcuuugugauuaugaga

SEQ ID NO: 379654 - RNA, 19 nt, Artificial Sequence
  Description of Artificial Sequence: Synthetic oligonucleotide
  Antisense Strand to SEQ ID NO: 379653
ucucauaaucacaaagcau

SEQ ID NO: 379655 - RNA, 19 nt, Artificial Sequence
  Description of Artificial Sequence: Synthetic oligonucleotide
  Sense Strand Starting at position 775 of SEQ ID NO: 318398
cuguaagauguugacuauu

SEQ ID NO: 379656 - RNA, 19 nt, Artificial Sequence
  Description of Artificial Sequence: Synthetic oligonucleotide
  Antisense Strand to SEQ ID NO: 379655
aauagucaacaucuuacag

SEQ ID NO: 379657 - RNA, 19 nt, Artificial Sequence
  Description of Artificial Sequence: Synthetic oligonucleotide
  Sense Strand Starting at position 775 of SEQ ID NO: 318400
guaagauguugacuauuac

SEQ ID NO: 379658 - RNA, 19 nt, Artificial Sequence
  Description of Artificial Sequence: Synthetic oligonucleotide
  Antisense Strand to SEQ ID NO: 379657
guaauagucaacaucuuac

SEQ ID NO: 379659 - RNA, 19 nt, Artificial Sequence
  Description of Artificial Sequence: Synthetic oligonucleotide
  Sense Strand Starting at position 775 of SEQ ID NO: 318406
uguugacuauuaccacuua

SEQ ID NO: 379660 - RNA, 19 nt, Artificial Sequence
  Description of Artificial Sequence: Synthetic oligonucleotide
  Antisense Strand to SEQ ID NO: 379659
uaagugguaauagucaaca

SEQ ID NO: 379661 - RNA, 19 nt, Artificial Sequence
  Description of Artificial Sequence: Synthetic oligonucleotide
  Sense Strand Starting at position 775 of SEQ ID NO: 318544
gaauuugugccuuguauca

SEQ ID NO: 379662 - RNA, 19 nt, Artificial Sequence
  Description of Artificial Sequence: Synthetic oligonucleotide
  Antisense Strand to SEQ ID NO: 379661
ugauacaaggcacaaauuc

SEQ ID NO: 379663 - RNA, 19 nt, Artificial Sequence
  Description of Artificial Sequence: Synthetic oligonucleotide
  Sense Strand Starting at position 775 of SEQ ID NO: 318589
agcuaacauugcuugagga

SEQ ID NO: 379664 - RNA, 19 nt, Artificial Sequence
  Description of Artificial Sequence: Synthetic oligonucleotide
  Antisense Strand to SEQ ID NO: 379663
uccucaagcaauguuagcu

SEQ ID NO: 379665 - RNA, 19 nt, Artificial Sequence
  Description of Artificial Sequence: Synthetic oligonucleotide
  Sense Strand Starting at position 775 of SEQ ID NO: 318591
cuaacauugcuugaggauc

SEQ ID NO: 379666 - RNA, 19 nt, Artificial Sequence
  Description of Artificial Sequence: Synthetic oligonucleotide
  Antisense Strand to SEQ ID NO: 379665
gauccucaagcaauguuag

SEQ ID NO: 379667 - RNA, 19 nt, Artificial Sequence
  Description of Artificial Sequence: Synthetic oligonucleotide
  Sense Strand Starting at position 775 of SEQ ID NO: 318605
ggaucuagguaagaauuua

SEQ ID NO: 379668 - RNA, 19 nt, Artificial Sequence
  Description of Artificial Sequence: Synthetic oligonucleotide
  Antisense Strand to SEQ ID NO: 379667
uaaauucuuaccuagaucc

SEQ ID NO: 379669 - RNA, 19 nt, Artificial Sequence
  Description of Artificial Sequence: Synthetic oligonucleotide
  Sense Strand Starting at position 775 of SEQ ID NO: 318630
ugauaucuauguucuaucu

SEQ ID NO: 379670 - RNA, 19 nt, Artificial Sequence
  Description of Artificial Sequence: Synthetic oligonucleotide
  Antisense Strand to SEQ ID NO: 379669
agauagaacauagauauca

SEQ ID NO: 379671 - RNA, 19 nt, Artificial Sequence
  Description of Artificial Sequence: Synthetic oligonucleotide
  Sense Strand Starting at position 775 of SEQ ID NO: 318756
cgauuaauucuuuagacug

SEQ ID NO: 379672 - RNA, 19 nt, Artificial Sequence
  Description of Artificial Sequence: Synthetic oligonucleotide
  Antisense Strand to SEQ ID NO: 379671
cagucuaaagaauuaaucg

SEQ ID NO: 379673 - RNA, 19 nt, Artificial Sequence
  Description of Artificial Sequence: Synthetic oligonucleotide
  Sense Strand Starting at position 775 of SEQ ID NO: 318773
ugucaucauggguauccga

SEQ ID NO: 379674 - RNA, 19 nt, Artificial Sequence
  Description of Artificial Sequence: Synthetic oligonucleotide
  Antisense Strand to SEQ ID NO: 379673
ucggauacccaugaugaca

SEQ ID NO: 379675 - RNA, 19 nt, Artificial Sequence
  Description of Artificial Sequence: Synthetic oligonucleotide
  Sense Strand Starting at position 775 of SEQ ID NO: 318780
auggguauccgaggacuaa

SEQ ID NO: 379676 - RNA, 19 nt, Artificial Sequence
  Description of Artificial Sequence: Synthetic oligonucleotide
  Antisense Strand to SEQ ID NO: 379675
uuaguccucggauacccau

SEQ ID NO: 379677 - RNA, 19 nt, Artificial Sequence
  Description of Artificial Sequence: Synthetic oligonucleotide
  Sense Strand Starting at position 775 of SEQ ID NO: 318781
uggguauccgaggacuaau

SEQ ID NO: 379678 - RNA, 19 nt, Artificial Sequence
  Description of Artificial Sequence: Synthetic oligonucleotide
  Antisense Strand to SEQ ID NO: 379677
auuaguccucggauaccca

SEQ ID NO: 379679 - RNA, 19 nt, Artificial Sequence
  Description of Artificial Sequence: Synthetic oligonucleotide
  Sense Strand Starting at position 775 of SEQ ID NO: 318988
guaauauaugcccauaugu

SEQ ID NO: 379680 - RNA, 19 nt, Artificial Sequence
  Description of Artificial Sequence: Synthetic oligonucleotide
  Antisense Strand to SEQ ID NO: 379679
acauaugggcauauauuac

SEQ ID NO: 379681 - RNA, 19 nt, Artificial Sequence
  Description of Artificial Sequence: Synthetic oligonucleotide
  Sense Strand Starting at position 775 of SEQ ID NO: 319004
uguuguauuagauggagga

SEQ ID NO: 379682 - RNA, 19 nt, Artificial Sequence
  Description of Artificial Sequence: Synthetic oligonucleotide
  Antisense Strand to SEQ ID NO: 379681
uccuccaucuaauacaaca

SEQ ID NO: 379683 - RNA, 19 nt, Artificial Sequence
  Description of Artificial Sequence: Synthetic oligonucleotide
  Sense Strand Starting at position 775 of SEQ ID NO: 319005
guuguauuagauggaggau

SEQ ID NO: 379684 - RNA, 19 nt, Artificial Sequence
  Description of Artificial Sequence: Synthetic oligonucleotide
  Antisense Strand to SEQ ID NO: 379683
auccuccaucuaauacaac

SEQ ID NO: 379685 - RNA, 19 nt, Artificial Sequence
  Description of Artificial Sequence: Synthetic oligonucleotide
  Sense Strand Starting at position 775 of SEQ ID NO: 319014
gauggaggaugugacauuu

SEQ ID NO: 379686 - RNA, 19 nt, Artificial Sequence
  Description of Artificial Sequence: Synthetic oligonucleotide
  Antisense Strand to SEQ ID NO: 379685
aaaugucacauccuccauc

SEQ ID NO: 379687 - RNA, 19 nt, Artificial Sequence
  Description of Artificial Sequence: Synthetic oligonucleotide
  Sense Strand Starting at position 775 of SEQ ID NO: 319125
cccuuacucauccgggaag

SEQ ID NO: 379688 - RNA, 19 nt, Artificial Sequence
  Description of Artificial Sequence: Synthetic oligonucleotide
  Antisense Strand to SEQ ID NO: 379687
cuucccggaugaguaaggg

SEQ ID NO: 379689 - RNA, 19 nt, Artificial Sequence
  Description of Artificial Sequence: Synthetic oligonucleotide
  Sense Strand Starting at position 775 of SEQ ID NO: 319127
cuuacucauccgggaagua

SEQ ID NO: 379690 - RNA, 19 nt, Artificial Sequence
  Description of Artificial Sequence: Synthetic oligonucleotide
  Antisense Strand to SEQ ID NO: 379689
uacuucccggaugaguaag

SEQ ID NO: 379691 - RNA, 19 nt, Artificial Sequence
  Description of Artificial Sequence: Synthetic oligonucleotide
  Sense Strand Starting at position 775 of SEQ ID NO: 319128
uuacucauccgggaaguau

SEQ ID NO: 379692 - RNA, 19 nt, Artificial Sequence
  Description of Artificial Sequence: Synthetic oligonucleotide
  Antisense Strand to SEQ ID NO: 379691
auacuucccggaugaguaa

SEQ ID NO: 379693 - RNA, 19 nt, Artificial Sequence
  Description of Artificial Sequence: Synthetic oligonucleotide
  Sense Strand Starting at position 776 of SEQ ID NO: 315597
gacagaauagucuguggau

SEQ ID NO: 379694 - RNA, 19 nt, Artificial Sequence
  Description of Artificial Sequence: Synthetic oligonucleotide
  Antisense Strand to SEQ ID NO: 379693
auccacagacuauucuguc

SEQ ID NO: 379695 - RNA, 19 nt, Artificial Sequence
  Description of Artificial Sequence: Synthetic oligonucleotide
  Sense Strand Starting at position 776 of SEQ ID NO: 315598
acagaauagucuguggauu

SEQ ID NO: 379696 - RNA, 19 nt, Artificial Sequence
  Description of Artificial Sequence: Synthetic oligonucleotide
  Antisense Strand to SEQ ID NO: 379695
aauccacagacuauucugu

SEQ ID NO: 379697 - RNA, 19 nt, Artificial Sequence
  Description of Artificial Sequence: Synthetic oligonucleotide
  Sense Strand Starting at position 776 of SEQ ID NO: 315599
cagaauagucuguggauua

SEQ ID NO: 379698 - RNA, 19 nt, Artificial Sequence
  Description of Artificial Sequence: Synthetic oligonucleotide
  Antisense Strand to SEQ ID NO: 379697
uaauccacagacuauucug

SEQ ID NO: 379699 - RNA, 19 nt, Artificial Sequence
  Description of Artificial Sequence: Synthetic oligonucleotide
  Sense Strand Starting at position 776 of SEQ ID NO: 315609
uguggauuacguuagauac

SEQ ID NO: 379700 - RNA, 19 nt, Artificial Sequence
  Description of Artificial Sequence: Synthetic oligonucleotide
  Antisense Strand to SEQ ID NO: 379699
guaucuaacguaauccaca

SEQ ID NO: 379701 - RNA, 19 nt, Artificial Sequence
  Description of Artificial Sequence: Synthetic oligonucleotide
  Sense Strand Starting at position 776 of SEQ ID NO: 315652
guuuaauagucacugaucu

SEQ ID NO: 379702 - RNA, 19 nt, Artificial Sequence
  Description of Artificial Sequence: Synthetic oligonucleotide
  Antisense Strand to SEQ ID NO: 379701
agaucagugacuauuaaac

SEQ ID NO: 379703 - RNA, 19 nt, Artificial Sequence
  Description of Artificial Sequence: Synthetic oligonucleotide
  Sense Strand Starting at position 776 of SEQ ID NO: 315826
uugcuaguucccuaucauc

SEQ ID NO: 379704 - RNA, 19 nt, Artificial Sequence
  Description of Artificial Sequence: Synthetic oligonucleotide
  Antisense Strand to SEQ ID NO: 379703
gaugauagggaacuagcaa

SEQ ID NO: 379705 - RNA, 19 nt, Artificial Sequence
  Description of Artificial Sequence: Synthetic oligonucleotide
  Sense Strand Starting at position 776 of SEQ ID NO: 315886
auuucuuaugcaugagcuu

SEQ ID NO: 379706 - RNA, 19 nt, Artificial Sequence
  Description of Artificial Sequence: Synthetic oligonucleotide
  Antisense Strand to SEQ ID NO: 379705
aagcucaugcauaagaaau

SEQ ID NO: 379707 - RNA, 19 nt, Artificial Sequence
  Description of Artificial Sequence: Synthetic oligonucleotide
  Sense Strand Starting at position 776 of SEQ ID NO: 316007
acuguccugguguaacuau

SEQ ID NO: 379708 - RNA, 19 nt, Artificial Sequence
  Description of Artificial Sequence: Synthetic oligonucleotide
  Antisense Strand to SEQ ID NO: 379707
auaguuacaccaggacagu

SEQ ID NO: 379709 - RNA, 19 nt, Artificial Sequence
  Description of Artificial Sequence: Synthetic oligonucleotide
  Sense Strand Starting at position 776 of SEQ ID NO: 316153
gugacaacaucagauuuaa

SEQ ID NO: 379710 - RNA, 19 nt, Artificial Sequence
  Description of Artificial Sequence: Synthetic oligonucleotide
  Antisense Strand to SEQ ID NO: 379709
uuaaaucugauguugucac

SEQ ID NO: 379711 - RNA, 19 nt, Artificial Sequence
  Description of Artificial Sequence: Synthetic oligonucleotide
  Sense Strand Starting at position 776 of SEQ ID NO: 316194
ugcagugaaagugauggau

SEQ ID NO: 379712 - RNA, 19 nt, Artificial Sequence
  Description of Artificial Sequence: Synthetic oligonucleotide
  Antisense Strand to SEQ ID NO: 379711
auccaucacuuucacugca

SEQ ID NO: 379713 - RNA, 19 nt, Artificial Sequence
  Description of Artificial Sequence: Synthetic oligonucleotide
  Sense Strand Starting at position 776 of SEQ ID NO: 316245
uugggaaaccguggccaua

SEQ ID NO: 379714 - RNA, 19 nt, Artificial Sequence
  Description of Artificial Sequence: Synthetic oligonucleotide
  Antisense Strand to SEQ ID NO: 379713
uauggccacgguuucccaa

SEQ ID NO: 379715 - RNA, 19 nt, Artificial Sequence
  Description of Artificial Sequence: Synthetic oligonucleotide
  Sense Strand Starting at position 776 of SEQ ID NO: 316261
auagcuuugcuagagacaa

SEQ ID NO: 379716 - RNA, 19 nt, Artificial Sequence
  Description of Artificial Sequence: Synthetic oligonucleotide
  Antisense Strand to SEQ ID NO: 379715
uugucucuagcaaagcuau

SEQ ID NO: 379717 - RNA, 19 nt, Artificial Sequence
  Description of Artificial Sequence: Synthetic oligonucleotide
  Sense Strand Starting at position 776 of SEQ ID NO: 316325
ccuauugucuuagugauag

SEQ ID NO: 379718 - RNA, 19 nt, Artificial Sequence
  Description of Artificial Sequence: Synthetic oligonucleotide
  Antisense Strand to SEQ ID NO: 379717
cuaucacuaagacaauagg

SEQ ID NO: 379719 - RNA, 19 nt, Artificial Sequence
  Description of Artificial Sequence: Synthetic oligonucleotide
  Sense Strand Starting at position 776 of SEQ ID NO: 316342
agaugaauauaaucagugu

SEQ ID NO: 379720 - RNA, 19 nt, Artificial Sequence
  Description of Artificial Sequence: Synthetic oligonucleotide
  Antisense Strand to SEQ ID NO: 379719
acacugauuauauucaucu

SEQ ID NO: 379721 - RNA, 19 nt, Artificial Sequence
  Description of Artificial Sequence: Synthetic oligonucleotide
  Sense Strand Starting at position 776 of SEQ ID NO: 316455
agaagguuuggcgggaaga

SEQ ID NO: 379722 - RNA, 19 nt, Artificial Sequence
  Description of Artificial Sequence: Synthetic oligonucleotide
  Antisense Strand to SEQ ID NO: 379721
ucuucccgccaaaccuucu

SEQ ID NO: 379723 - RNA, 19 nt, Artificial Sequence
  Description of Artificial Sequence: Synthetic oligonucleotide
  Sense Strand Starting at position 776 of SEQ ID NO: 316456
gaagguuuggcgggaagaa

SEQ ID NO: 379724 - RNA, 19 nt, Artificial Sequence
  Description of Artificial Sequence: Synthetic oligonucleotide
  Antisense Strand to SEQ ID NO: 379723
uucuucccgccaaaccuuc

SEQ ID NO: 379725 - RNA, 19 nt, Artificial Sequence
  Description of Artificial Sequence: Synthetic oligonucleotide
  Sense Strand Starting at position 776 of SEQ ID NO: 316490
aagugaauccagcagucua

SEQ ID NO: 379726 - RNA, 19 nt, Artificial Sequence
  Description of Artificial Sequence: Synthetic oligonucleotide
  Antisense Strand to SEQ ID NO: 379725
uagacugcuggauucacuu

SEQ ID NO: 379727 - RNA, 19 nt, Artificial Sequence
  Description of Artificial Sequence: Synthetic oligonucleotide
  Sense Strand Starting at position 776 of SEQ ID NO: 316549
uugcuaggcgcuguauuaa

SEQ ID NO: 379728 - RNA, 19 nt, Artificial Sequence
  Description of Artificial Sequence: Synthetic oligonucleotide
  Antisense Strand to SEQ ID NO: 379727
uuaauacagcgccuagcaa

SEQ ID NO: 379729 - RNA, 19 nt, Artificial Sequence
  Description of Artificial Sequence: Synthetic oligonucleotide
  Sense Strand Starting at position 776 of SEQ ID NO: 316561
guauuaaguccugggaaug

SEQ ID NO: 379730 - RNA, 19 nt, Artificial Sequence
  Description of Artificial Sequence: Synthetic oligonucleotide
  Antisense Strand to SEQ ID NO: 379729
cauucccaggacuuaauac

SEQ ID NO: 379731 - RNA, 19 nt, Artificial Sequence
  Description of Artificial Sequence: Synthetic oligonucleotide
  Sense Strand Starting at position 776 of SEQ ID NO: 316586
accggcucucaugagagua

SEQ ID NO: 379732 - RNA, 19 nt, Artificial Sequence
  Description of Artificial Sequence: Synthetic oligonucleotide
  Antisense Strand to SEQ ID NO: 379731
uacucucaugagagccggu

SEQ ID NO: 379733 - RNA, 19 nt, Artificial Sequence
  Description of Artificial Sequence: Synthetic oligonucleotide
  Sense Strand Starting at position 776 of SEQ ID NO: 316613
gggagaaagguguguagau

SEQ ID NO: 379734 - RNA, 19 nt, Artificial Sequence
  Description of Artificial Sequence: Synthetic oligonucleotide
  Antisense Strand to SEQ ID NO: 379733
aucuacacaccuuucuccc

SEQ ID NO: 379735 - RNA, 19 nt, Artificial Sequence
  Description of Artificial Sequence: Synthetic oligonucleotide
  Sense Strand Starting at position 776 of SEQ ID NO: 316614
ggagaaagguguguagauc

SEQ ID NO: 379736 - RNA, 19 nt, Artificial Sequence
  Description of Artificial Sequence: Synthetic oligonucleotide
  Antisense Strand to SEQ ID NO: 379735
gaucuacacaccuuucucc

SEQ ID NO: 379737 - RNA, 19 nt, Artificial Sequence
  Description of Artificial Sequence: Synthetic oligonucleotide
  Sense Strand Starting at position 776 of SEQ ID NO: 316762
guaguucugggcgcauauu

SEQ ID NO: 379738 - RNA, 19 nt, Artificial Sequence
  Description of Artificial Sequence: Synthetic oligonucleotide
  Antisense Strand to SEQ ID NO: 379737
aauaugcgcccagaacuac

SEQ ID NO: 379739 - RNA, 19 nt, Artificial Sequence
  Description of Artificial Sequence: Synthetic oligonucleotide
  Sense Strand Starting at position 776 of SEQ ID NO: 317541
uguucuaaugacuggguga

SEQ ID NO: 379740 - RNA, 19 nt, Artificial Sequence
  Description of Artificial Sequence: Synthetic oligonucleotide
  Antisense Strand to SEQ ID NO: 379739
ucacccagucauuagaaca

SEQ ID NO: 379741 - RNA, 19 nt, Artificial Sequence
  Description of Artificial Sequence: Synthetic oligonucleotide
  Sense Strand Starting at position 776 of SEQ ID NO: 317571
ccaguaacauuugcuguau

SEQ ID NO: 379742 - RNA, 19 nt, Artificial Sequence
  Description of Artificial Sequence: Synthetic oligonucleotide
  Antisense Strand to SEQ ID NO: 379741
auacagcaaauguuacugg

SEQ ID NO: 379743 - RNA, 19 nt, Artificial Sequence
  Description of Artificial Sequence: Synthetic oligonucleotide
  Sense Strand Starting at position 776 of SEQ ID NO: 317582
ugcuguauccgcuuuauca

SEQ ID NO: 379744 - RNA, 19 nt, Artificial Sequence
  Description of Artificial Sequence: Synthetic oligonucleotide
  Antisense Strand to SEQ ID NO: 379743
ugauaaagcggauacagca

SEQ ID NO: 379745 - RNA, 19 nt, Artificial Sequence
  Description of Artificial Sequence: Synthetic oligonucleotide
  Sense Strand Starting at position 776 of SEQ ID NO: 317583
gcuguauccgcuuuaucac

SEQ ID NO: 379746 - RNA, 19 nt, Artificial Sequence
  Description of Artificial Sequence: Synthetic oligonucleotide
  Antisense Strand to SEQ ID NO: 379745
gugauaaagcggauacagc

SEQ ID NO: 379747 - RNA, 19 nt, Artificial Sequence
  Description of Artificial Sequence: Synthetic oligonucleotide
  Sense Strand Starting at position 776 of SEQ ID NO: 317650
aguaaauuaucaguaccuu

SEQ ID NO: 379748 - RNA, 19 nt, Artificial Sequence
  Description of Artificial Sequence: Synthetic oligonucleotide
  Antisense Strand to SEQ ID NO: 379747
aagguacugauaauuuacu

SEQ ID NO: 379749 - RNA, 19 nt, Artificial Sequence
  Description of Artificial Sequence: Synthetic oligonucleotide
  Sense Strand Starting at position 776 of SEQ ID NO: 317651
guaaauuaucaguaccuuu

SEQ ID NO: 379750 - RNA, 19 nt, Artificial Sequence
  Description of Artificial Sequence: Synthetic oligonucleotide
  Antisense Strand to SEQ ID NO: 379749
aaagguacugauaauuuac

SEQ ID NO: 379751 - RNA, 19 nt, Artificial Sequence
  Description of Artificial Sequence: Synthetic oligonucleotide
  Sense Strand Starting at position 776 of SEQ ID NO: 318315
gugaauaauucggcuauga

SEQ ID NO: 379752 - RNA, 19 nt, Artificial Sequence
  Description of Artificial Sequence: Synthetic oligonucleotide
  Antisense Strand to SEQ ID NO: 379751
ucauagccgaauuauucac

SEQ ID NO: 379753 - RNA, 19 nt, Artificial Sequence
  Description of Artificial Sequence: Synthetic oligonucleotide
  Sense Strand Starting at position 776 of SEQ ID NO: 318317
gaauaauucggcuaugaac

SEQ ID NO: 379754 - RNA, 19 nt, Artificial Sequence
  Description of Artificial Sequence: Synthetic oligonucleotide
  Antisense Strand to SEQ ID NO: 379753
guucauagccgaauuauuc

SEQ ID NO: 379755 - RNA, 19 nt, Artificial Sequence
  Description of Artificial Sequence: Synthetic oligonucleotide
  Sense Strand Starting at position 776 of SEQ ID NO: 318319
auaauucggcuaugaacau

SEQ ID NO: 379756 - RNA, 19 nt, Artificial Sequence
  Description of Artificial Sequence: Synthetic oligonucleotide
  Antisense Strand to SEQ ID NO: 379755
auguucauagccgaauuau

SEQ ID NO: 379757 - RNA, 19 nt, Artificial Sequence
  Description of Artificial Sequence: Synthetic oligonucleotide
  Sense Strand Starting at position 776 of SEQ ID NO: 318342
guacgaauaucuguuugag

SEQ ID NO: 379758 - RNA, 19 nt, Artificial Sequence
  Description of Artificial Sequence: Synthetic oligonucleotide
  Antisense Strand to SEQ ID NO: 379757
cucaaacagauauucguac

SEQ ID NO: 379759 - RNA, 19 nt, Artificial Sequence
  Description of Artificial Sequence: Synthetic oligonucleotide
  Sense Strand Starting at position 776 of SEQ ID NO: 318421
ugcuaauucuaguuuaaug

SEQ ID NO: 379760 - RNA, 19 nt, Artificial Sequence
  Description of Artificial Sequence: Synthetic oligonucleotide
  Antisense Strand to SEQ ID NO: 379759
cauuaaacuagaauuagca

SEQ ID NO: 379761 - RNA, 19 nt, Artificial Sequence
  Description of Artificial Sequence: Synthetic oligonucleotide
  Sense Strand Starting at position 776 of SEQ ID NO: 318539
auaucuugauaggagauuu

SEQ ID NO: 379762 - RNA, 19 nt, Artificial Sequence
  Description of Artificial Sequence: Synthetic oligonucleotide
  Antisense Strand to SEQ ID NO: 379761
aaaucuccuaucaagauau

SEQ ID NO: 379763 - RNA, 19 nt, Artificial Sequence
  Description of Artificial Sequence: Synthetic oligonucleotide
  Sense Strand Starting at position 776 of SEQ ID NO: 318895
cguaaaugugauuaggcca

SEQ ID NO: 379764 - RNA, 19 nt, Artificial Sequence
  Description of Artificial Sequence: Synthetic oligonucleotide
  Antisense Strand to SEQ ID NO: 379763
uggccuaaucacauuuacg

SEQ ID NO: 379765 - RNA, 19 nt, Artificial Sequence
  Description of Artificial Sequence: Synthetic oligonucleotide
  Sense Strand Starting at position 776 of SEQ ID NO: 318898
aaaugugauuaggccaacu

SEQ ID NO: 379766 - RNA, 19 nt, Artificial Sequence
  Description of Artificial Sequence: Synthetic oligonucleotide
  Antisense Strand to SEQ ID NO: 379765
aguuggccuaaucacauuu

SEQ ID NO: 379767 - RNA, 19 nt, Artificial Sequence
  Description of Artificial Sequence: Synthetic oligonucleotide
  Sense Strand Starting at position 776 of SEQ ID NO: 318961
cacauagacugggagacau

SEQ ID NO: 379768 - RNA, 19 nt, Artificial Sequence
  Description of Artificial Sequence: Synthetic oligonucleotide
  Antisense Strand to SEQ ID NO: 379767
augucucccagucuaugug

SEQ ID NO: 379769 - RNA, 19 nt, Artificial Sequence
  Description of Artificial Sequence: Synthetic oligonucleotide
  Sense Strand Starting at position 776 of SEQ ID NO: 318974
agacaugagcccuaccuuu

SEQ ID NO: 379770 - RNA, 19 nt, Artificial Sequence
  Description of Artificial Sequence: Synthetic oligonucleotide
  Antisense Strand to SEQ ID NO: 379769
aaagguagggcucaugucu

SEQ ID NO: 379771 - RNA, 19 nt, Artificial Sequence
  Description of Artificial Sequence: Synthetic oligonucleotide
  Sense Strand Starting at position 776 of SEQ ID NO: 319114
uaaaguuagugcucuagag

SEQ ID NO: 379772 - RNA, 19 nt, Artificial Sequence
  Description of Artificial Sequence: Synthetic oligonucleotide
  Antisense Strand to SEQ ID NO: 379771
cucuagagcacuaacuuua

SEQ ID NO: 379773 - RNA, 19 nt, Artificial Sequence
  Description of Artificial Sequence: Synthetic oligonucleotide
  Sense Strand Starting at position 777 of SEQ ID NO: 315473
ugacaucagccagaagcua

SEQ ID NO: 379774 - RNA, 19 nt, Artificial Sequence
  Description of Artificial Sequence: Synthetic oligonucleotide
  Antisense Strand to SEQ ID NO: 379773
uagcuucuggcugauguca

SEQ ID NO: 379775 - RNA, 19 nt, Artificial Sequence
  Description of Artificial Sequence: Synthetic oligonucleotide
  Sense Strand Starting at position 777 of SEQ ID NO: 315499
ccuggaugcuacuuguuua

SEQ ID NO: 379776 - RNA, 19 nt, Artificial Sequence
  Description of Artificial Sequence: Synthetic oligonucleotide
  Antisense Strand to SEQ ID NO: 379775
uaaacaaguagcauccagg

SEQ ID NO: 379777 - RNA, 19 nt, Artificial Sequence
  Description of Artificial Sequence: Synthetic oligonucleotide
  Sense Strand Starting at position 777 of SEQ ID NO: 315502
ggaugcuacuuguuuagaa

SEQ ID NO: 379778 - RNA, 19 nt, Artificial Sequence
  Description of Artificial Sequence: Synthetic oligonucleotide
  Antisense Strand to SEQ ID NO: 379777
uucuaaacaaguagcaucc

SEQ ID NO: 379779 - RNA, 19 nt, Artificial Sequence
  Description of Artificial Sequence: Synthetic oligonucleotide
  Sense Strand Starting at position 777 of SEQ ID NO: 315503
gaugcuacuuguuuagaaa

SEQ ID NO: 379780 - RNA, 19 nt, Artificial Sequence
  Description of Artificial Sequence: Synthetic oligonucleotide
  Antisense Strand to SEQ ID NO: 379779
uuucuaaacaaguagcauc

SEQ ID NO: 379781 - RNA, 19 nt, Artificial Sequence
  Description of Artificial Sequence: Synthetic oligonucleotide
  Sense Strand Starting at position 777 of SEQ ID NO: 315504
augcuacuuguuuagaaau

SEQ ID NO: 379782 - RNA, 19 nt, Artificial Sequence
  Description of Artificial Sequence: Synthetic oligonucleotide
  Antisense Strand to SEQ ID NO: 379781
auuucuaaacaaguagcau

SEQ ID NO: 379783 - RNA, 19 nt, Artificial Sequence
  Description of Artificial Sequence: Synthetic oligonucleotide
  Sense Strand Starting at position 777 of SEQ ID NO: 315530
cuucucacccucgagaguu

SEQ ID NO: 379784 - RNA, 19 nt, Artificial Sequence
  Description of Artificial Sequence: Synthetic oligonucleotide
  Antisense Strand to SEQ ID NO: 379783
aacucucgagggugagaag

SEQ ID NO: 379785 - RNA, 19 nt, Artificial Sequence
  Description of Artificial Sequence: Synthetic oligonucleotide
  Sense Strand Starting at position 777 of SEQ ID NO: 315604
uccuguuaaccugggagaa

SEQ ID NO: 379786 - RNA, 19 nt, Artificial Sequence
  Description of Artificial Sequence: Synthetic oligonucleotide
  Antisense Strand to SEQ ID NO: 379785
uucucccagguuaacagga

SEQ ID NO: 379787 - RNA, 19 nt, Artificial Sequence
  Description of Artificial Sequence: Synthetic oligonucleotide
  Sense Strand Starting at position 777 of SEQ ID NO: 315605
ccuguuaaccugggagaaa

SEQ ID NO: 379788 - RNA, 19 nt, Artificial Sequence
  Description of Artificial Sequence: Synthetic oligonucleotide
  Antisense Strand to SEQ ID NO: 379787
uuucucccagguuaacagg

SEQ ID NO: 379789 - RNA, 19 nt, Artificial Sequence
  Description of Artificial Sequence: Synthetic oligonucleotide
  Sense Strand Starting at position 777 of SEQ ID NO: 315641
agaucagugucagcuauga

SEQ ID NO: 379790 - RNA, 19 nt, Artificial Sequence
  Description of Artificial Sequence: Synthetic oligonucleotide
  Antisense Strand to SEQ ID NO: 379789
ucauagcugacacugaucu

SEQ ID NO: 379791 - RNA, 19 nt, Artificial Sequence
  Description of Artificial Sequence: Synthetic oligonucleotide
  Sense Strand Starting at position 777 of SEQ ID NO: 315781
cugagagcuuucuugucuu

SEQ ID NO: 379792 - RNA, 19 nt, Artificial Sequence
  Description of Artificial Sequence: Synthetic oligonucleotide
  Antisense Strand to SEQ ID NO: 379791
aagacaagaaagcucucag

SEQ ID NO: 379793 - RNA, 19 nt, Artificial Sequence
  Description of Artificial Sequence: Synthetic oligonucleotide
  Sense Strand Starting at position 777 of SEQ ID NO: 315834
uccucuuccucagugagga

SEQ ID NO: 379794 - RNA, 19 nt, Artificial Sequence
  Description of Artificial Sequence: Synthetic oligonucleotide
  Antisense Strand to SEQ ID NO: 379793
uccucacugaggaagagga

SEQ ID NO: 379795 - RNA, 19 nt, Artificial Sequence
  Description of Artificial Sequence: Synthetic oligonucleotide
  Sense Strand Starting at position 777 of SEQ ID NO: 315835
ccucuuccucagugaggaa

SEQ ID NO: 379796 - RNA, 19 nt, Artificial Sequence
  Description of Artificial Sequence: Synthetic oligonucleotide
  Antisense Strand to SEQ ID NO: 379795
uuccucacugaggaagagg

SEQ ID NO: 379797 - RNA, 19 nt, Artificial Sequence
  Description of Artificial Sequence: Synthetic oligonucleotide
  Sense Strand Starting at position 777 of SEQ ID NO: 315862
aucugaacagcuggauuau

SEQ ID NO: 379798 - RNA, 19 nt, Artificial Sequence
  Description of Artificial Sequence: Synthetic oligonucleotide
  Antisense Strand to SEQ ID NO: 379797
auaauccagcuguucagau

SEQ ID NO: 379799 - RNA, 19 nt, Artificial Sequence
  Description of Artificial Sequence: Synthetic oligonucleotide
  Sense Strand Starting at position 777 of SEQ ID NO: 315921
ccaaauguuuccgucaucu

SEQ ID NO: 379800 - RNA, 19 nt, Artificial Sequence
  Description of Artificial Sequence: Synthetic oligonucleotide
  Antisense Strand to SEQ ID NO: 379799
agaugacggaaacauuugg

SEQ ID NO: 379801 - RNA, 19 nt, Artificial Sequence
  Description of Artificial Sequence: Synthetic oligonucleotide
  Sense Strand Starting at position 777 of SEQ ID NO: 315959
ugugcuaacuccucucaga

SEQ ID NO: 379802 - RNA, 19 nt, Artificial Sequence
  Description of Artificial Sequence: Synthetic oligonucleotide
  Antisense Strand to SEQ ID NO: 379801
ucugagaggaguuagcaca

SEQ ID NO: 379803 - RNA, 19 nt, Artificial Sequence
  Description of Artificial Sequence: Synthetic oligonucleotide
  Sense Strand Starting at position 777 of SEQ ID NO: 316087
guauucugaggccaaauaa

SEQ ID NO: 379804 - RNA, 19 nt, Artificial Sequence
  Description of Artificial Sequence: Synthetic oligonucleotide
  Antisense Strand to SEQ ID NO: 379803
uuauuuggccucagaauac

SEQ ID NO: 379805 - RNA, 19 nt, Artificial Sequence
  Description of Artificial Sequence: Synthetic oligonucleotide
  Sense Strand Starting at position 777 of SEQ ID NO: 316116
aggguuaucugccuguuua

SEQ ID NO: 379806 - RNA, 19 nt, Artificial Sequence
  Description of Artificial Sequence: Synthetic oligonucleotide
  Antisense Strand to SEQ ID NO: 379805
uaaacaggcagauaacccu

SEQ ID NO: 379807 - RNA, 19 nt, Artificial Sequence
  Description of Artificial Sequence: Synthetic oligonucleotide
  Sense Strand Starting at position 777 of SEQ ID NO: 316117
ggguuaucugccuguuuag

SEQ ID NO: 379808 - RNA, 19 nt, Artificial Sequence
  Description of Artificial Sequence: Synthetic oligonucleotide
  Antisense Strand to SEQ ID NO: 379807
cuaaacaggcagauaaccc

SEQ ID NO: 379809 - RNA, 19 nt, Artificial Sequence
  Description of Artificial Sequence: Synthetic oligonucleotide
  Sense Strand Starting at position 777 of SEQ ID NO: 316120
uuaucugccuguuuagaug

SEQ ID NO: 379810 - RNA, 19 nt, Artificial Sequence
  Description of Artificial Sequence: Synthetic oligonucleotide
  Antisense Strand to SEQ ID NO: 379809
caucuaaacaggcagauaa

SEQ ID NO: 379811 - RNA, 19 nt, Artificial Sequence
  Description of Artificial Sequence: Synthetic oligonucleotide
  Sense Strand Starting at position 777 of SEQ ID NO: 316126
gccuguuuagaugaucugu

SEQ ID NO: 379812 - RNA, 19 nt, Artificial Sequence
  Description of Artificial Sequence: Synthetic oligonucleotide
  Antisense Strand to SEQ ID NO: 379811
acagaucaucuaaacaggc

SEQ ID NO: 379813 - RNA, 19 nt, Artificial Sequence
  Description of Artificial Sequence: Synthetic oligonucleotide
  Sense Strand Starting at position 777 of SEQ ID NO: 316128
cuguuuagaugaucugugu

SEQ ID NO: 379814 - RNA, 19 nt, Artificial Sequence
  Description of Artificial Sequence: Synthetic oligonucleotide
  Antisense Strand to SEQ ID NO: 379813
acacagaucaucuaaacag

SEQ ID NO: 379815 - RNA, 19 nt, Artificial Sequence
  Description of Artificial Sequence: Synthetic oligonucleotide
  Sense Strand Starting at position 777 of SEQ ID NO: 316132
uuagaugaucuguguggcu

SEQ ID NO: 379816 - RNA, 19 nt, Artificial Sequence
  Description of Artificial Sequence: Synthetic oligonucleotide
  Antisense Strand to SEQ ID NO: 379815
agccacacagaucaucuaa

SEQ ID NO: 379817 - RNA, 19 nt, Artificial Sequence
  Description of Artificial Sequence: Synthetic oligonucleotide
  Sense Strand Starting at position 777 of SEQ ID NO: 316134
agaugaucuguguggcuga

SEQ ID NO: 379818 - RNA, 19 nt, Artificial Sequence
  Description of Artificial Sequence: Synthetic oligonucleotide
  Antisense Strand to SEQ ID NO: 379817
ucagccacacagaucaucu

SEQ ID NO: 379819 - RNA, 19 nt, Artificial Sequence
  Description of Artificial Sequence: Synthetic oligonucleotide
  Sense Strand Starting at position 777 of SEQ ID NO: 316157
cugcuccaucagggauuau

SEQ ID NO: 379820 - RNA, 19 nt, Artificial Sequence
  Description of Artificial Sequence: Synthetic oligonucleotide
  Antisense Strand to SEQ ID NO: 379819
auaaucccugauggagcag

SEQ ID NO: 379821 - RNA, 19 nt, Artificial Sequence
  Description of Artificial Sequence: Synthetic oligonucleotide
  Sense Strand Starting at position 777 of SEQ ID NO: 316186
gaaugagacuaggauaaac

SEQ ID NO: 379822 - RNA, 19 nt, Artificial Sequence
  Description of Artificial Sequence: Synthetic oligonucleotide
  Antisense Strand to SEQ ID NO: 379821
guuuauccuagucucauuc

SEQ ID NO: 379823 - RNA, 19 nt, Artificial Sequence
  Description of Artificial Sequence: Synthetic oligonucleotide
  Sense Strand Starting at position 777 of SEQ ID NO: 316278
uucuuuagaugucagauuu

SEQ ID NO: 379824 - RNA, 19 nt, Artificial Sequence
  Description of Artificial Sequence: Synthetic oligonucleotide
  Antisense Strand to SEQ ID NO: 379823
aaaucugacaucuaaagaa

SEQ ID NO: 379825 - RNA, 19 nt, Artificial Sequence
  Description of Artificial Sequence: Synthetic oligonucleotide
  Sense Strand Starting at position 777 of SEQ ID NO: 316335
acguaacugucauccucuu

SEQ ID NO: 379826 - RNA, 19 nt, Artificial Sequence
  Description of Artificial Sequence: Synthetic oligonucleotide
  Antisense Strand to SEQ ID NO: 379825
aagaggaugacaguuacgu

SEQ ID NO: 379827 - RNA, 19 nt, Artificial Sequence
  Description of Artificial Sequence: Synthetic oligonucleotide
  Sense Strand Starting at position 777 of SEQ ID NO: 316342
ugucauccucuuugggaca

SEQ ID NO: 379828 - RNA, 19 nt, Artificial Sequence
  Description of Artificial Sequence: Synthetic oligonucleotide
  Antisense Strand to SEQ ID NO: 379827
ugucccaaagaggaugaca

SEQ ID NO: 379829 - RNA, 19 nt, Artificial Sequence
  Description of Artificial Sequence: Synthetic oligonucleotide
  Sense Strand Starting at position 777 of SEQ ID NO: 316573
gagggcaugcuauaaagua

SEQ ID NO: 379830 - RNA, 19 nt, Artificial Sequence
  Description of Artificial Sequence: Synthetic oligonucleotide
  Antisense Strand to SEQ ID NO: 379829
uacuuuauagcaugcccuc

SEQ ID NO: 379831 - RNA, 19 nt, Artificial Sequence
  Description of Artificial Sequence: Synthetic oligonucleotide
  Sense Strand Starting at position 777 of SEQ ID NO: 316642
gugggaaaguacuccucua

SEQ ID NO: 379832 - RNA, 19 nt, Artificial Sequence
  Description of Artificial Sequence: Synthetic oligonucleotide
  Antisense Strand to SEQ ID NO: 379831
uagaggaguacuuucccac

SEQ ID NO: 379833 - RNA, 19 nt, Artificial Sequence
  Description of Artificial Sequence: Synthetic oligonucleotide
  Sense Strand Starting at position 777 of SEQ ID NO: 316671
ucaaaucuccugggagacu

SEQ ID NO: 379834 - RNA, 19 nt, Artificial Sequence
  Description of Artificial Sequence: Synthetic oligonucleotide
  Antisense Strand to SEQ ID NO: 379833
agucucccaggagauuuga

SEQ ID NO: 379835 - RNA, 19 nt, Artificial Sequence
  Description of Artificial Sequence: Synthetic oligonucleotide
  Sense Strand Starting at position 777 of SEQ ID NO: 316683
ggagacuucugccucggga

SEQ ID NO: 379836 - RNA, 19 nt, Artificial Sequence
  Description of Artificial Sequence: Synthetic oligonucleotide
  Antisense Strand to SEQ ID NO: 379835
ucccgaggcagaagucucc

SEQ ID NO: 379837 - RNA, 19 nt, Artificial Sequence
  Description of Artificial Sequence: Synthetic oligonucleotide
  Sense Strand Starting at position 777 of SEQ ID NO: 316685
agacuucugccucgggaua

SEQ ID NO: 379838 - RNA, 19 nt, Artificial Sequence
  Description of Artificial Sequence: Synthetic oligonucleotide
  Antisense Strand to SEQ ID NO: 379837
uaucccgaggcagaagucu

SEQ ID NO: 379839 - RNA, 19 nt, Artificial Sequence
  Description of Artificial Sequence: Synthetic oligonucleotide
  Sense Strand Starting at position 777 of SEQ ID NO: 316686
gacuucugccucgggauau

SEQ ID NO: 379840 - RNA, 19 nt, Artificial Sequence
  Description of Artificial Sequence: Synthetic oligonucleotide
  Antisense Strand to SEQ ID NO: 379839
auaucccgaggcagaaguc

SEQ ID NO: 379841 - RNA, 19 nt, Artificial Sequence
  Description of Artificial Sequence: Synthetic oligonucleotide
  Sense Strand Starting at position 777 of SEQ ID NO: 316690
ucugccucgggauaucaua

SEQ ID NO: 379842 - RNA, 19 nt, Artificial Sequence
  Description of Artificial Sequence: Synthetic oligonucleotide
  Antisense Strand to SEQ ID NO: 379841
uaugauaucccgaggcaga

SEQ ID NO: 379843 - RNA, 19 nt, Artificial Sequence
  Description of Artificial Sequence: Synthetic oligonucleotide
  Sense Strand Starting at position 777 of SEQ ID NO: 316698
gggauaucauaguucuagg

SEQ ID NO: 379844 - RNA, 19 nt, Artificial Sequence
  Description of Artificial Sequence: Synthetic oligonucleotide
  Antisense Strand to SEQ ID NO: 379843
ccuagaacuaugauauccc

SEQ ID NO: 379845 - RNA, 19 nt, Artificial Sequence
  Description of Artificial Sequence: Synthetic oligonucleotide
  Sense Strand Starting at position 777 of SEQ ID NO: 316703
aucauaguucuaggucacu

SEQ ID NO: 379846 - RNA, 19 nt, Artificial Sequence
  Description of Artificial Sequence: Synthetic oligonucleotide
  Antisense Strand to SEQ ID NO: 379845
agugaccuagaacuaugau

SEQ ID NO: 379847 - RNA, 19 nt, Artificial Sequence
  Description of Artificial Sequence: Synthetic oligonucleotide
  Sense Strand Starting at position 777 of SEQ ID NO: 316709
guucuaggucacugacaga

SEQ ID NO: 379848 - RNA, 19 nt, Artificial Sequence
  Description of Artificial Sequence: Synthetic oligonucleotide
  Antisense Strand to SEQ ID NO: 379847
ucugucagugaccuagaac

SEQ ID NO: 379849 - RNA, 19 nt, Artificial Sequence
  Description of Artificial Sequence: Synthetic oligonucleotide
  Sense Strand Starting at position 777 of SEQ ID NO: 316712
cuaggucacugacagaaga

SEQ ID NO: 379850 - RNA, 19 nt, Artificial Sequence
  Description of Artificial Sequence: Synthetic oligonucleotide
  Antisense Strand to SEQ ID NO: 379849
ucuucugucagugaccuag

SEQ ID NO: 379851 - RNA, 19 nt, Artificial Sequence
  Description of Artificial Sequence: Synthetic oligonucleotide
  Sense Strand Starting at position 777 of SEQ ID NO: 316771
aucgaucuccuccauuagu

SEQ ID NO: 379852 - RNA, 19 nt, Artificial Sequence
  Description of Artificial Sequence: Synthetic oligonucleotide
  Antisense Strand to SEQ ID NO: 379851
acuaauggaggagaucgau

SEQ ID NO: 379853 - RNA, 19 nt, Artificial Sequence
  Description of Artificial Sequence: Synthetic oligonucleotide
  Sense Strand Starting at position 778 of SEQ ID NO: 315239
uuaacaacgucuuagauuu

SEQ ID NO: 379854 - RNA, 19 nt, Artificial Sequence
  Description of Artificial Sequence: Synthetic oligonucleotide
  Antisense Strand to SEQ ID NO: 379853
aaaucuaagacguuguuaa

SEQ ID NO: 379855 - RNA, 19 nt, Artificial Sequence
  Description of Artificial Sequence: Synthetic oligonucleotide
  Sense Strand Starting at position 778 of SEQ ID NO: 315377
uuacacaggucuucuaagu

SEQ ID NO: 379856 - RNA, 19 nt, Artificial Sequence
  Description of Artificial Sequence: Synthetic oligonucleotide
  Antisense Strand to SEQ ID NO: 379855
acuuagaagaccuguguaa

SEQ ID NO: 379857 - RNA, 19 nt, Artificial Sequence
  Description of Artificial Sequence: Synthetic oligonucleotide
  Sense Strand Starting at position 778 of SEQ ID NO: 315399
aaggaaauaugcuuguuuc

SEQ ID NO: 379858 - RNA, 19 nt, Artificial Sequence
  Description of Artificial Sequence: Synthetic oligonucleotide
  Antisense Strand to SEQ ID NO: 379857
gaaacaagcauauuuccuu

SEQ ID NO: 379859 - RNA, 19 nt, Artificial Sequence
  Description of Artificial Sequence: Synthetic oligonucleotide
  Sense Strand Starting at position 778 of SEQ ID NO: 315448
uugguauacaaguacagua

SEQ ID NO: 379860 - RNA, 19 nt, Artificial Sequence
  Description of Artificial Sequence: Synthetic oligonucleotide
  Antisense Strand to SEQ ID NO: 379859
uacuguacuuguauaccaa

SEQ ID NO: 379861 - RNA, 19 nt, Artificial Sequence
  Description of Artificial Sequence: Synthetic oligonucleotide
  Sense Strand Starting at position 778 of SEQ ID NO: 315499
cuuaguauguguguugaac

SEQ ID NO: 379862 - RNA, 19 nt, Artificial Sequence
  Description of Artificial Sequence: Synthetic oligonucleotide
  Antisense Strand to SEQ ID NO: 379861
guucaacacacauacuaag

SEQ ID NO: 379863 - RNA, 19 nt, Artificial Sequence
  Description of Artificial Sequence: Synthetic oligonucleotide
  Sense Strand Starting at position 778 of SEQ ID NO: 315505
auguguguugaacacaaau

SEQ ID NO: 379864 - RNA, 19 nt, Artificial Sequence
  Description of Artificial Sequence: Synthetic oligonucleotide
  Antisense Strand to SEQ ID NO: 379863
auuuguguucaacacacau

SEQ ID NO: 379865 - RNA, 19 nt, Artificial Sequence
  Description of Artificial Sequence: Synthetic oligonucleotide
  Sense Strand Starting at position 778 of SEQ ID NO: 315653
ggguaagugaaacauuagu

SEQ ID NO: 379866 - RNA, 19 nt, Artificial Sequence
  Description of Artificial Sequence: Synthetic oligonucleotide
  Antisense Strand to SEQ ID NO: 379865
acuaauguuucacuuaccc

SEQ ID NO: 379867 - RNA, 19 nt, Artificial Sequence
  Description of Artificial Sequence: Synthetic oligonucleotide
  Sense Strand Starting at position 778 of SEQ ID NO: 315659
gugaaacauuaguuggcuu

SEQ ID NO: 379868 - RNA, 19 nt, Artificial Sequence
  Description of Artificial Sequence: Synthetic oligonucleotide
  Antisense Strand to SEQ ID NO: 379867
aagccaacuaauguuucac

SEQ ID NO: 379869 - RNA, 19 nt, Artificial Sequence
  Description of Artificial Sequence: Synthetic oligonucleotide
  Sense Strand Starting at position 778 of SEQ ID NO: 315661
gaaacauuaguuggcuuua

SEQ ID NO: 379870 - RNA, 19 nt, Artificial Sequence
  Description of Artificial Sequence: Synthetic oligonucleotide
  Antisense Strand to SEQ ID NO: 379869
uaaagccaacuaauguuuc

SEQ ID NO: 379871 - RNA, 19 nt, Artificial Sequence
  Description of Artificial Sequence: Synthetic oligonucleotide
  Sense Strand Starting at position 778 of SEQ ID NO: 315705
auaccagaauugccagaau

SEQ ID NO: 379872 - RNA, 19 nt, Artificial Sequence
  Description of Artificial Sequence: Synthetic oligonucleotide
  Antisense Strand to SEQ ID NO: 379871
auucuggcaauucugguau

SEQ ID NO: 379873 - RNA, 19 nt, Artificial Sequence
  Description of Artificial Sequence: Synthetic oligonucleotide
  Sense Strand Starting at position 778 of SEQ ID NO: 316158
uucgcagcccaugaaagau

SEQ ID NO: 379874 - RNA, 19 nt, Artificial Sequence
  Description of Artificial Sequence: Synthetic oligonucleotide
  Antisense Strand to SEQ ID NO: 379873
aucuuucaugggcugcgaa

SEQ ID NO: 379875 - RNA, 19 nt, Artificial Sequence
  Description of Artificial Sequence: Synthetic oligonucleotide
  Sense Strand Starting at position 778 of SEQ ID NO: 316196
cuagauauggcuuauccau

SEQ ID NO: 379876 - RNA, 19 nt, Artificial Sequence
  Description of Artificial Sequence: Synthetic oligonucleotide
  Antisense Strand to SEQ ID NO: 379875
auggauaagccauaucuag

SEQ ID NO: 379877 - RNA, 19 nt, Artificial Sequence
  Description of Artificial Sequence: Synthetic oligonucleotide
  Sense Strand Starting at position 778 of SEQ ID NO: 316268
uccgaaacucgccaaacua

SEQ ID NO: 379878 - RNA, 19 nt, Artificial Sequence
  Description of Artificial Sequence: Synthetic oligonucleotide
  Antisense Strand to SEQ ID NO: 379877
uaguuuggcgaguuucgga

SEQ ID NO: 379879 - RNA, 19 nt, Artificial Sequence
  Description of Artificial Sequence: Synthetic oligonucleotide
  Sense Strand Starting at position 778 of SEQ ID NO: 316289
ggcauaacuugaguugguu

SEQ ID NO: 379880 - RNA, 19 nt, Artificial Sequence
  Description of Artificial Sequence: Synthetic oligonucleotide
  Antisense Strand to SEQ ID NO: 379879
aaccaacucaaguuaugcc

SEQ ID NO: 379881 - RNA, 19 nt, Artificial Sequence
  Description of Artificial Sequence: Synthetic oligonucleotide
  Sense Strand Starting at position 778 of SEQ ID NO: 316696
gugguaauugauggcuaag

SEQ ID NO: 379882 - RNA, 19 nt, Artificial Sequence
  Description of Artificial Sequence: Synthetic oligonucleotide
  Antisense Strand to SEQ ID NO: 379881
cuuagccaucaauuaccac

SEQ ID NO: 379883 - RNA, 19 nt, Artificial Sequence
  Description of Artificial Sequence: Synthetic oligonucleotide
  Sense Strand Starting at position 778 of SEQ ID NO: 316698
gguaauugauggcuaaggu

SEQ ID NO: 379884 - RNA, 19 nt, Artificial Sequence
  Description of Artificial Sequence: Synthetic oligonucleotide
  Antisense Strand to SEQ ID NO: 379883
accuuagccaucaauuacc

SEQ ID NO: 379885 - RNA, 19 nt, Artificial Sequence
  Description of Artificial Sequence: Synthetic oligonucleotide
  Sense Strand Starting at position 778 of SEQ ID NO: 316717
gcguacguccuagcucuaa

SEQ ID NO: 379886 - RNA, 19 nt, Artificial Sequence
  Description of Artificial Sequence: Synthetic oligonucleotide
  Antisense Strand to SEQ ID NO: 379885
uuagagcuaggacguacgc

SEQ ID NO: 379887 - RNA, 19 nt, Artificial Sequence
  Description of Artificial Sequence: Synthetic oligonucleotide
  Sense Strand Starting at position 778 of SEQ ID NO: 317736
cgagcuguuagcccaguua

SEQ ID NO: 379888 - RNA, 19 nt, Artificial Sequence
  Description of Artificial Sequence: Synthetic oligonucleotide
  Antisense Strand to SEQ ID NO: 379887
uaacugggcuaacagcucg

SEQ ID NO: 379889 - RNA, 19 nt, Artificial Sequence
  Description of Artificial Sequence: Synthetic oligonucleotide
  Sense Strand Starting at position 778 of SEQ ID NO: 317754
aaggcaucucuggaagguu

SEQ ID NO: 379890 - RNA, 19 nt, Artificial Sequence
  Description of Artificial Sequence: Synthetic oligonucleotide
  Antisense Strand to SEQ ID NO: 379889
aaccuuccagagaugccuu

SEQ ID NO: 379891 - RNA, 19 nt, Artificial Sequence
  Description of Artificial Sequence: Synthetic oligonucleotide
  Sense Strand Starting at position 778 of SEQ ID NO: 317824
uagcguuugucgacgguuu

SEQ ID NO: 379892 - RNA, 19 nt, Artificial Sequence
  Description of Artificial Sequence: Synthetic oligonucleotide
  Antisense Strand to SEQ ID NO: 379891
aaaccgucgacaaacgcua

SEQ ID NO: 379893 - RNA, 19 nt, Artificial Sequence
  Description of Artificial Sequence: Synthetic oligonucleotide
  Sense Strand Starting at position 778 of SEQ ID NO: 317861
gaaagagauguuggagcau

SEQ ID NO: 379894 - RNA, 19 nt, Artificial Sequence
  Description of Artificial Sequence: Synthetic oligonucleotide
  Antisense Strand to SEQ ID NO: 379893
augcuccaacaucucuuuc

SEQ ID NO: 379895 - RNA, 19 nt, Artificial Sequence
  Description of Artificial Sequence: Synthetic oligonucleotide
  Sense Strand Starting at position 778 of SEQ ID NO: 317889
cucaaauuaucugcuggga

SEQ ID NO: 379896 - RNA, 19 nt, Artificial Sequence
  Description of Artificial Sequence: Synthetic oligonucleotide
  Antisense Strand to SEQ ID NO: 379895
ucccagcagauaauuugag

SEQ ID NO: 379897 - RNA, 19 nt, Artificial Sequence
  Description of Artificial Sequence: Synthetic oligonucleotide
  Sense Strand Starting at position 778 of SEQ ID NO: 317923
aggugcagccaugaauaaa

SEQ ID NO: 379898 - RNA, 19 nt, Artificial Sequence
  Description of Artificial Sequence: Synthetic oligonucleotide
  Antisense Strand to SEQ ID NO: 379897
uuuauucauggcugcaccu

SEQ ID NO: 379899 - RNA, 19 nt, Artificial Sequence
  Description of Artificial Sequence: Synthetic oligonucleotide
  Sense Strand Starting at position 778 of SEQ ID NO: 317949
gccacacuucuguauccuu

SEQ ID NO: 379900 - RNA, 19 nt, Artificial Sequence
  Description of Artificial Sequence: Synthetic oligonucleotide
  Antisense Strand to SEQ ID NO: 379899
aaggauacagaaguguggc

SEQ ID NO: 379901 - RNA, 19 nt, Artificial Sequence
  Description of Artificial Sequence: Synthetic oligonucleotide
  Sense Strand Starting at position 778 of SEQ ID NO: 318017
ugcuguaguauauguagau

SEQ ID NO: 379902 - RNA, 19 nt, Artificial Sequence
  Description of Artificial Sequence: Synthetic oligonucleotide
  Antisense Strand to SEQ ID NO: 379901
aucuacauauacuacagca

SEQ ID NO: 379903 - RNA, 19 nt, Artificial Sequence
  Description of Artificial Sequence: Synthetic oligonucleotide
  Sense Strand Starting at position 778 of SEQ ID NO: 318018
gcuguaguauauguagaua

SEQ ID NO: 379904 - RNA, 19 nt, Artificial Sequence
  Description of Artificial Sequence: Synthetic oligonucleotide
  Antisense Strand to SEQ ID NO: 379903
uaucuacauauacuacagc

SEQ ID NO: 379905 - RNA, 19 nt, Artificial Sequence
  Description of Artificial Sequence: Synthetic oligonucleotide
  Sense Strand Starting at position 778 of SEQ ID NO: 318094
ggccuuuccuaucuugaau

SEQ ID NO: 379906 - RNA, 19 nt, Artificial Sequence
  Description of Artificial Sequence: Synthetic oligonucleotide
  Antisense Strand to SEQ ID NO: 379905
auucaagauaggaaaggcc

SEQ ID NO: 379907 - RNA, 19 nt, Artificial Sequence
  Description of Artificial Sequence: Synthetic oligonucleotide
  Sense Strand Starting at position 778 of SEQ ID NO: 318326
gguggcauuuaagauaggu

SEQ ID NO: 379908 - RNA, 19 nt, Artificial Sequence
  Description of Artificial Sequence: Synthetic oligonucleotide
  Antisense Strand to SEQ ID NO: 379907
accuaucuuaaaugccacc

SEQ ID NO: 379909 - RNA, 19 nt, Artificial Sequence
  Description of Artificial Sequence: Synthetic oligonucleotide
  Sense Strand Starting at position 778 of SEQ ID NO: 318335
uaagauagguccuaaagga

SEQ ID NO: 379910 - RNA, 19 nt, Artificial Sequence
  Description of Artificial Sequence: Synthetic oligonucleotide
  Antisense Strand to SEQ ID NO: 379909
uccuuuaggaccuaucuua

SEQ ID NO: 379911 - RNA, 19 nt, Artificial Sequence
  Description of Artificial Sequence: Synthetic oligonucleotide
  Sense Strand Starting at position 778 of SEQ ID NO: 318456
aggagaagauggcauuaaa

SEQ ID NO: 379912 - RNA, 19 nt, Artificial Sequence
  Description of Artificial Sequence: Synthetic oligonucleotide
  Antisense Strand to SEQ ID NO: 379911
uuuaaugccaucuucuccu

SEQ ID NO: 379913 - RNA, 19 nt, Artificial Sequence
  Description of Artificial Sequence: Synthetic oligonucleotide
  Sense Strand Starting at position 778 of SEQ ID NO: 318897
augaguuuggauuguuacu

SEQ ID NO: 379914 - RNA, 19 nt, Artificial Sequence
  Description of Artificial Sequence: Synthetic oligonucleotide
  Antisense Strand to SEQ ID NO: 379913
aguaacaauccaaacucau

SEQ ID NO: 379915 - RNA, 19 nt, Artificial Sequence
  Description of Artificial Sequence: Synthetic oligonucleotide
  Sense Strand Starting at position 778 of SEQ ID NO: 318902
uuuggauuguuacucagua

SEQ ID NO: 379916 - RNA, 19 nt, Artificial Sequence
  Description of Artificial Sequence: Synthetic oligonucleotide
  Antisense Strand to SEQ ID NO: 379915
uacugaguaacaauccaaa

SEQ ID NO: 379917 - RNA, 19 nt, Artificial Sequence
  Description of Artificial Sequence: Synthetic oligonucleotide
  Sense Strand Starting at position 778 of SEQ ID NO: 318903
uuggauuguuacucaguau

SEQ ID NO: 379918 - RNA, 19 nt, Artificial Sequence
  Description of Artificial Sequence: Synthetic oligonucleotide
  Antisense Strand to SEQ ID NO: 379917
auacugaguaacaauccaa

SEQ ID NO: 379919 - RNA, 19 nt, Artificial Sequence
  Description of Artificial Sequence: Synthetic oligonucleotide
  Sense Strand Starting at position 778 of SEQ ID NO: 318906
gauuguuacucaguauuag

SEQ ID NO: 379920 - RNA, 19 nt, Artificial Sequence
  Description of Artificial Sequence: Synthetic oligonucleotide
  Antisense Strand to SEQ ID NO: 379919
cuaauacugaguaacaauc

SEQ ID NO: 379921 - RNA, 19 nt, Artificial Sequence
  Description of Artificial Sequence: Synthetic oligonucleotide
  Sense Strand Starting at position 778 of SEQ ID NO: 318907
auuguuacucaguauuagu

SEQ ID NO: 379922 - RNA, 19 nt, Artificial Sequence
  Description of Artificial Sequence: Synthetic oligonucleotide
  Antisense Strand to SEQ ID NO: 379921
acuaauacugaguaacaau

SEQ ID NO: 379923 - RNA, 19 nt, Artificial Sequence
  Description of Artificial Sequence: Synthetic oligonucleotide
  Sense Strand Starting at position 778 of SEQ ID NO: 318917
aguauuaguagguggcaua

SEQ ID NO: 379924 - RNA, 19 nt, Artificial Sequence
  Description of Artificial Sequence: Synthetic oligonucleotide
  Antisense Strand to SEQ ID NO: 379923
uaugccaccuacuaauacu

SEQ ID NO: 379925 - RNA, 19 nt, Artificial Sequence
  Description of Artificial Sequence: Synthetic oligonucleotide
  Sense Strand Starting at position 778 of SEQ ID NO: 318918
guauuaguagguggcauaa

SEQ ID NO: 379926 - RNA, 19 nt, Artificial Sequence
  Description of Artificial Sequence: Synthetic oligonucleotide
  Antisense Strand to SEQ ID NO: 379925
uuaugccaccuacuaauac

SEQ ID NO: 379927 - RNA, 19 nt, Artificial Sequence
  Description of Artificial Sequence: Synthetic oligonucleotide
  Sense Strand Starting at position 778 of SEQ ID NO: 319014
guacaauggugguccugua

SEQ ID NO: 379928 - RNA, 19 nt, Artificial Sequence
  Description of Artificial Sequence: Synthetic oligonucleotide
  Antisense Strand to SEQ ID NO: 379927
uacaggaccaccauuguac

SEQ ID NO: 379929 - RNA, 19 nt, Artificial Sequence
  Description of Artificial Sequence: Synthetic oligonucleotide
  Sense Strand Starting at position 778 of SEQ ID NO: 319071
uuuccauauguuuagauag

SEQ ID NO: 379930 - RNA, 19 nt, Artificial Sequence
  Description of Artificial Sequence: Synthetic oligonucleotide
  Antisense Strand to SEQ ID NO: 379929
cuaucuaaacauauggaaa

SEQ ID NO: 379931 - RNA, 19 nt, Artificial Sequence
  Description of Artificial Sequence: Synthetic oligonucleotide
  Sense Strand Starting at position 778 of SEQ ID NO: 319148
guuuauagaccaggagcaa

SEQ ID NO: 379932 - RNA, 19 nt, Artificial Sequence
  Description of Artificial Sequence: Synthetic oligonucleotide
  Antisense Strand to SEQ ID NO: 379931
uugcuccuggucuauaaac

SEQ ID NO: 379933 - RNA, 19 nt, Artificial Sequence
  Description of Artificial Sequence: Synthetic oligonucleotide
  Sense Strand Starting at position 779 of SEQ ID NO: 315656
gcuaaugggcucuggagaa

SEQ ID NO: 379934 - RNA, 19 nt, Artificial Sequence
  Description of Artificial Sequence: Synthetic oligonucleotide
  Antisense Strand to SEQ ID NO: 379933
uucuccagagcccauuagc

SEQ ID NO: 379935 - RNA, 19 nt, Artificial Sequence
  Description of Artificial Sequence: Synthetic oligonucleotide
  Sense Strand Starting at position 779 of SEQ ID NO: 315710
auccuuguacugugaagag

SEQ ID NO: 379936 - RNA, 19 nt, Artificial Sequence
  Description of Artificial Sequence: Synthetic oligonucleotide
  Antisense Strand to SEQ ID NO: 379935
cucuucacaguacaaggau

SEQ ID NO: 379937 - RNA, 19 nt, Artificial Sequence
  Description of Artificial Sequence: Synthetic oligonucleotide
  Sense Strand Starting at position 779 of SEQ ID NO: 315728
gcuguaaggccucaaagag

SEQ ID NO: 379938 - RNA, 19 nt, Artificial Sequence
  Description of Artificial Sequence: Synthetic oligonucleotide
  Antisense Strand to SEQ ID NO: 379937
cucuuugaggccuuacagc

SEQ ID NO: 379939 - RNA, 19 nt, Artificial Sequence
  Description of Artificial Sequence: Synthetic oligonucleotide
  Sense Strand Starting at position 779 of SEQ ID NO: 315804
acaauuauguagcugugaa

SEQ ID NO: 379940 - RNA, 19 nt, Artificial Sequence
  Description of Artificial Sequence: Synthetic oligonucleotide
  Antisense Strand to SEQ ID NO: 379939
uucacagcuacauaauugu

SEQ ID NO: 379941 - RNA, 19 nt, Artificial Sequence
  Description of Artificial Sequence: Synthetic oligonucleotide
  Sense Strand Starting at position 779 of SEQ ID NO: 315982
acgugaaaccuauaaccuu

SEQ ID NO: 379942 - RNA, 19 nt, Artificial Sequence
  Description of Artificial Sequence: Synthetic oligonucleotide
  Antisense Strand to SEQ ID NO: 379941
aagguuauagguuucacgu

SEQ ID NO: 379943 - RNA, 19 nt, Artificial Sequence
  Description of Artificial Sequence: Synthetic oligonucleotide
  Sense Strand Starting at position 779 of SEQ ID NO: 315997
ccuugaaacugagaauuuc

SEQ ID NO: 379944 - RNA, 19 nt, Artificial Sequence
  Description of Artificial Sequence: Synthetic oligonucleotide
  Antisense Strand to SEQ ID NO: 379943
gaaauucucaguuucaagg

SEQ ID NO: 379945 - RNA, 19 nt, Artificial Sequence
  Description of Artificial Sequence: Synthetic oligonucleotide
  Sense Strand Starting at position 779 of SEQ ID NO: 316085
uaaucacggugaccugaua

SEQ ID NO: 379946 - RNA, 19 nt, Artificial Sequence
  Description of Artificial Sequence: Synthetic oligonucleotide
  Antisense Strand to SEQ ID NO: 379945
uaucaggucaccgugauua

SEQ ID NO: 379947 - RNA, 19 nt, Artificial Sequence
  Description of Artificial Sequence: Synthetic oligonucleotide
  Sense Strand Starting at position 779 of SEQ ID NO: 316186
aucauuugaucugaagagu

SEQ ID NO: 379948 - RNA, 19 nt, Artificial Sequence
  Description of Artificial Sequence: Synthetic oligonucleotide
  Antisense Strand to SEQ ID NO: 379947
acucuucagaucaaaugau

SEQ ID NO: 379949 - RNA, 19 nt, Artificial Sequence
  Description of Artificial Sequence: Synthetic oligonucleotide
  Sense Strand Starting at position 779 of SEQ ID NO: 316202
aguugagguggguacuuau

SEQ ID NO: 379950 - RNA, 19 nt, Artificial Sequence
  Description of Artificial Sequence: Synthetic oligonucleotide
  Antisense Strand to SEQ ID NO: 379949
auaaguacccaccucaacu

SEQ ID NO: 379951 - RNA, 19 nt, Artificial Sequence
  Description of Artificial Sequence: Synthetic oligonucleotide
  Sense Strand Starting at position 779 of SEQ ID NO: 316205
ugagguggguacuuauuca

SEQ ID NO: 379952 - RNA, 19 nt, Artificial Sequence
  Description of Artificial Sequence: Synthetic oligonucleotide
  Antisense Strand to SEQ ID NO: 379951
ugaauaaguacccaccuca

SEQ ID NO: 379953 - RNA, 19 nt, Artificial Sequence
  Description of Artificial Sequence: Synthetic oligonucleotide
  Sense Strand Starting at position 779 of SEQ ID NO: 316270
cccuuagaccucuagaagu

SEQ ID NO: 379954 - RNA, 19 nt, Artificial Sequence
  Description of Artificial Sequence: Synthetic oligonucleotide
  Antisense Strand to SEQ ID NO: 379953
acuucuagaggucuaaggg

SEQ ID NO: 379955 - RNA, 19 nt, Artificial Sequence
  Description of Artificial Sequence: Synthetic oligonucleotide
  Sense Strand Starting at position 779 of SEQ ID NO: 316333
ggcgauuaccuccacgaau

SEQ ID NO: 379956 - RNA, 19 nt, Artificial Sequence
  Description of Artificial Sequence: Synthetic oligonucleotide
  Antisense Strand to SEQ ID NO: 379955
auucguggagguaaucgcc

SEQ ID NO: 379957 - RNA, 19 nt, Artificial Sequence
  Description of Artificial Sequence: Synthetic oligonucleotide
  Sense Strand Starting at position 779 of SEQ ID NO: 316347
cgaauucuuaaaggguuau

SEQ ID NO: 379958 - RNA, 19 nt, Artificial Sequence
  Description of Artificial Sequence: Synthetic oligonucleotide
  Antisense Strand to SEQ ID NO: 379957
auaacccuuuaagaauucg

SEQ ID NO: 379959 - RNA, 19 nt, Artificial Sequence
  Description of Artificial Sequence: Synthetic oligonucleotide
  Sense Strand Starting at position 779 of SEQ ID NO: 316351
uucuuaaaggguuauguua

SEQ ID NO: 379960 - RNA, 19 nt, Artificial Sequence
  Description of Artificial Sequence: Synthetic oligonucleotide
  Antisense Strand to SEQ ID NO: 379959
uaacauaacccuuuaagaa

SEQ ID NO: 379961 - RNA, 19 nt, Artificial Sequence
  Description of Artificial Sequence: Synthetic oligonucleotide
  Sense Strand Starting at position 779 of SEQ ID NO: 316360
gguuauguuacauaguaga

SEQ ID NO: 379962 - RNA, 19 nt, Artificial Sequence
  Description of Artificial Sequence: Synthetic oligonucleotide
  Antisense Strand to SEQ ID NO: 379961
ucuacuauguaacauaacc

SEQ ID NO: 379963 - RNA, 19 nt, Artificial Sequence
  Description of Artificial Sequence: Synthetic oligonucleotide
  Sense Strand Starting at position 779 of SEQ ID NO: 316553
cugauaaguauguggaaau

SEQ ID NO: 379964 - RNA, 19 nt, Artificial Sequence
  Description of Artificial Sequence: Synthetic oligonucleotide
  Antisense Strand to SEQ ID NO: 379963
auuuccacauacuuaucag

SEQ ID NO: 379965 - RNA, 19 nt, Artificial Sequence
  Description of Artificial Sequence: Synthetic oligonucleotide
  Sense Strand Starting at position 779 of SEQ ID NO: 316627
uaccguugugucccgauau

SEQ ID NO: 379966 - RNA, 19 nt, Artificial Sequence
  Description of Artificial Sequence: Synthetic oligonucleotide
  Antisense Strand to SEQ ID NO: 379965
auaucgggacacaacggua

SEQ ID NO: 379967 - RNA, 19 nt, Artificial Sequence
  Description of Artificial Sequence: Synthetic oligonucleotide
  Sense Strand Starting at position 779 of SEQ ID NO: 316652
ccguuaaacgacgagaaga

SEQ ID NO: 379968 - RNA, 19 nt, Artificial Sequence
  Description of Artificial Sequence: Synthetic oligonucleotide
  Antisense Strand to SEQ ID NO: 379967
ucuucucgucguuuaacgg

SEQ ID NO: 379969 - RNA, 19 nt, Artificial Sequence
  Description of Artificial Sequence: Synthetic oligonucleotide
  Sense Strand Starting at position 779 of SEQ ID NO: 317001
ggauguugucagcauaggu

SEQ ID NO: 379970 - RNA, 19 nt, Artificial Sequence
  Description of Artificial Sequence: Synthetic oligonucleotide
  Antisense Strand to SEQ ID NO: 379969
accuaugcugacaacaucc

SEQ ID NO: 379971 - RNA, 19 nt, Artificial Sequence
  Description of Artificial Sequence: Synthetic oligonucleotide
  Sense Strand Starting at position 779 of SEQ ID NO: 317471
cgaggugcuucgacccaga

SEQ ID NO: 379972 - RNA, 19 nt, Artificial Sequence
  Description of Artificial Sequence: Synthetic oligonucleotide
  Antisense Strand to SEQ ID NO: 379971
ucugggucgaagcaccucg

SEQ ID NO: 379973 - RNA, 19 nt, Artificial Sequence
  Description of Artificial Sequence: Synthetic oligonucleotide
  Sense Strand Starting at position 779 of SEQ ID NO: 317629
ggcuuuggucuagagguau

SEQ ID NO: 379974 - RNA, 19 nt, Artificial Sequence
  Description of Artificial Sequence: Synthetic oligonucleotide
  Antisense Strand to SEQ ID NO: 379973
auaccucuagaccaaagcc

SEQ ID NO: 379975 - RNA, 19 nt, Artificial Sequence
  Description of Artificial Sequence: Synthetic oligonucleotide
  Sense Strand Starting at position 779 of SEQ ID NO: 317722
agcuauuaagguggagaaa

SEQ ID NO: 379976 - RNA, 19 nt, Artificial Sequence
  Description of Artificial Sequence: Synthetic oligonucleotide
  Antisense Strand to SEQ ID NO: 379975
uuucuccaccuuaauagcu

SEQ ID NO: 379977 - RNA, 19 nt, Artificial Sequence
  Description of Artificial Sequence: Synthetic oligonucleotide
  Sense Strand Starting at position 779 of SEQ ID NO: 317806
caggacguucuacauagau

SEQ ID NO: 379978 - RNA, 19 nt, Artificial Sequence
  Description of Artificial Sequence: Synthetic oligonucleotide
  Antisense Strand to SEQ ID NO: 379977
aucuauguagaacguccug

SEQ ID NO: 379979 - RNA, 19 nt, Artificial Sequence
  Description of Artificial Sequence: Synthetic oligonucleotide
  Sense Strand Starting at position 779 of SEQ ID NO: 317808
ggacguucuacauagaugu

SEQ ID NO: 379980 - RNA, 19 nt, Artificial Sequence
  Description of Artificial Sequence: Synthetic oligonucleotide
  Antisense Strand to SEQ ID NO: 379979
acaucuauguagaacgucc

SEQ ID NO: 379981 - RNA, 19 nt, Artificial Sequence
  Description of Artificial Sequence: Synthetic oligonucleotide
  Sense Strand Starting at position 779 of SEQ ID NO: 317812
guucuacauagauguggau

SEQ ID NO: 379982 - RNA, 19 nt, Artificial Sequence
  Description of Artificial Sequence: Synthetic oligonucleotide
  Antisense Strand to SEQ ID NO: 379981
auccacaucuauguagaac

SEQ ID NO: 379983 - RNA, 19 nt, Artificial Sequence
  Description of Artificial Sequence: Synthetic oligonucleotide
  Sense Strand Starting at position 779 of SEQ ID NO: 317894
ggguuuguuauauggauuc

SEQ ID NO: 379984 - RNA, 19 nt, Artificial Sequence
  Description of Artificial Sequence: Synthetic oligonucleotide
  Antisense Strand to SEQ ID NO: 379983
gaauccauauaacaaaccc

SEQ ID NO: 379985 - RNA, 19 nt, Artificial Sequence
  Description of Artificial Sequence: Synthetic oligonucleotide
  Sense Strand Starting at position 779 of SEQ ID NO: 317952
gcucaacuaguauaugauu

SEQ ID NO: 379986 - RNA, 19 nt, Artificial Sequence
  Description of Artificial Sequence: Synthetic oligonucleotide
  Antisense Strand to SEQ ID NO: 379985
aaucauauacuaguugagc

SEQ ID NO: 379987 - RNA, 19 nt, Artificial Sequence
  Description of Artificial Sequence: Synthetic oligonucleotide
  Sense Strand Starting at position 779 of SEQ ID NO: 317960
aguauaugauuccucugua

SEQ ID NO: 379988 - RNA, 19 nt, Artificial Sequence
  Description of Artificial Sequence: Synthetic oligonucleotide
  Antisense Strand to SEQ ID NO: 379987
uacagaggaaucauauacu

SEQ ID NO: 379989 - RNA, 19 nt, Artificial Sequence
  Description of Artificial Sequence: Synthetic oligonucleotide
  Sense Strand Starting at position 779 of SEQ ID NO: 317961
guauaugauuccucuguaa

SEQ ID NO: 379990 - RNA, 19 nt, Artificial Sequence
  Description of Artificial Sequence: Synthetic oligonucleotide
  Antisense Strand to SEQ ID NO: 379989
uuacagaggaaucauauac

SEQ ID NO: 379991 - RNA, 19 nt, Artificial Sequence
  Description of Artificial Sequence: Synthetic oligonucleotide
  Sense Strand Starting at position 779 of SEQ ID NO: 317963
auaugauuccucuguaagg

SEQ ID NO: 379992 - RNA, 19 nt, Artificial Sequence
  Description of Artificial Sequence: Synthetic oligonucleotide
  Antisense Strand to SEQ ID NO: 379991
ccuuacagaggaaucauau

SEQ ID NO: 379993 - RNA, 19 nt, Artificial Sequence
  Description of Artificial Sequence: Synthetic oligonucleotide
  Sense Strand Starting at position 779 of SEQ ID NO: 317964
uaugauuccucuguaagga

SEQ ID NO: 379994 - RNA, 19 nt, Artificial Sequence
  Description of Artificial Sequence: Synthetic oligonucleotide
  Antisense Strand to SEQ ID NO: 379993
uccuuacagaggaaucaua

SEQ ID NO: 379995 - RNA, 19 nt, Artificial Sequence
  Description of Artificial Sequence: Synthetic oligonucleotide
  Sense Strand Starting at position 779 of SEQ ID NO: 318040
gcguggugaccagcguaaa

SEQ ID NO: 379996 - RNA, 19 nt, Artificial Sequence
  Description of Artificial Sequence: Synthetic oligonucleotide
  Antisense Strand to SEQ ID NO: 379995
uuuacgcuggucaccacgc

SEQ ID NO: 379997 - RNA, 19 nt, Artificial Sequence
  Description of Artificial Sequence: Synthetic oligonucleotide
  Sense Strand Starting at position 779 of SEQ ID NO: 318131
caguaaggguaaguaauau

SEQ ID NO: 379998 - RNA, 19 nt, Artificial Sequence
  Description of Artificial Sequence: Synthetic oligonucleotide
  Antisense Strand to SEQ ID NO: 379997
auauuacuuacccuuacug

SEQ ID NO: 379999 - RNA, 19 nt, Artificial Sequence
  Description of Artificial Sequence: Synthetic oligonucleotide
  Sense Strand Starting at position 779 of SEQ ID NO: 318170
uagaucaugugaucaaggu

SEQ ID NO: 380000 - RNA, 19 nt, Artificial Sequence
  Description of Artificial Sequence: Synthetic oligonucleotide
  Antisense Strand to SEQ ID NO: 379999
accuugaucacaugaucua

SEQ ID NO: 380001 - RNA, 19 nt, Artificial Sequence
  Description of Artificial Sequence: Synthetic oligonucleotide
  Sense Strand Starting at position 779 of SEQ ID NO: 318243
caccauguucuugaaagug

SEQ ID NO: 380002 - RNA, 19 nt, Artificial Sequence
  Description of Artificial Sequence: Synthetic oligonucleotide
  Antisense Strand to SEQ ID NO: 380001
cacuuucaagaacauggug

SEQ ID NO: 380003 - RNA, 19 nt, Artificial Sequence
  Description of Artificial Sequence: Synthetic oligonucleotide
  Sense Strand Starting at position 779 of SEQ ID NO: 318253
uugaaaguguacuuuacca

SEQ ID NO: 380004 - RNA, 19 nt, Artificial Sequence
  Description of Artificial Sequence: Synthetic oligonucleotide
  Antisense Strand to SEQ ID NO: 380003
ugguaaaguacacuuucaa

SEQ ID NO: 380005 - RNA, 19 nt, Artificial Sequence
  Description of Artificial Sequence: Synthetic oligonucleotide
  Sense Strand Starting at position 779 of SEQ ID NO: 318255
gaaaguguacuuuaccagu

SEQ ID NO: 380006 - RNA, 19 nt, Artificial Sequence
  Description of Artificial Sequence: Synthetic oligonucleotide
  Antisense Strand to SEQ ID NO: 380005
acugguaaaguacacuuuc

SEQ ID NO: 380007 - RNA, 19 nt, Artificial Sequence
  Description of Artificial Sequence: Synthetic oligonucleotide
  Sense Strand Starting at position 779 of SEQ ID NO: 318533
ugguguguucaacagauag

SEQ ID NO: 380008 - RNA, 19 nt, Artificial Sequence
  Description of Artificial Sequence: Synthetic oligonucleotide
  Antisense Strand to SEQ ID NO: 380007
cuaucuguugaacacacca

SEQ ID NO: 380009 - RNA, 19 nt, Artificial Sequence
  Description of Artificial Sequence: Synthetic oligonucleotide
  Sense Strand Starting at position 779 of SEQ ID NO: 318782
gcuguugcuccacagacaa

SEQ ID NO: 380010 - RNA, 19 nt, Artificial Sequence
  Description of Artificial Sequence: Synthetic oligonucleotide
  Antisense Strand to SEQ ID NO: 380009
uugucuguggagcaacagc

SEQ ID NO: 380011 - RNA, 19 nt, Artificial Sequence
  Description of Artificial Sequence: Synthetic oligonucleotide
  Sense Strand Starting at position 779 of SEQ ID NO: 318809
aauaaaugggcaugguuau

SEQ ID NO: 380012 - RNA, 19 nt, Artificial Sequence
  Description of Artificial Sequence: Synthetic oligonucleotide
  Antisense Strand to SEQ ID NO: 380011
auaaccaugcccauuuauu

SEQ ID NO: 380013 - RNA, 19 nt, Artificial Sequence
  Description of Artificial Sequence: Synthetic oligonucleotide
  Sense Strand Starting at position 780 of SEQ ID NO: 315282
ggugucucccuuuacuaga

SEQ ID NO: 380014 - RNA, 19 nt, Artificial Sequence
  Description of Artificial Sequence: Synthetic oligonucleotide
  Antisense Strand to SEQ ID NO: 380013
ucuaguaaagggagacacc

SEQ ID NO: 380015 - RNA, 19 nt, Artificial Sequence
  Description of Artificial Sequence: Synthetic oligonucleotide
  Sense Strand Starting at position 780 of SEQ ID NO: 315358
aagcauugauaggaagaaa

SEQ ID NO: 380016 - RNA, 19 nt, Artificial Sequence
  Description of Artificial Sequence: Synthetic oligonucleotide
  Antisense Strand to SEQ ID NO: 380015
uuucuuccuaucaaugcuu

SEQ ID NO: 380017 - RNA, 19 nt, Artificial Sequence
  Description of Artificial Sequence: Synthetic oligonucleotide
  Sense Strand Starting at position 780 of SEQ ID NO: 315466
guggcaagcucauuuaaua

SEQ ID NO: 380018 - RNA, 19 nt, Artificial Sequence
  Description of Artificial Sequence: Synthetic oligonucleotide
  Antisense Strand to SEQ ID NO: 380017
uauuaaaugagcuugccac

SEQ ID NO: 380019 - RNA, 19 nt, Artificial Sequence
  Description of Artificial Sequence: Synthetic oligonucleotide
  Sense Strand Starting at position 780 of SEQ ID NO: 315517
ugaaucagauuacaaagaa

SEQ ID NO: 380020 - RNA, 19 nt, Artificial Sequence
  Description of Artificial Sequence: Synthetic oligonucleotide
  Antisense Strand to SEQ ID NO: 380019
uucuuuguaaucugauuca

SEQ ID NO: 380021 - RNA, 19 nt, Artificial Sequence
  Description of Artificial Sequence: Synthetic oligonucleotide
  Sense Strand Starting at position 780 of SEQ ID NO: 315618
ggaauuguagcaggaaaua

SEQ ID NO: 380022 - RNA, 19 nt, Artificial Sequence
  Description of Artificial Sequence: Synthetic oligonucleotide
  Antisense Strand to SEQ ID NO: 380021
uauuuccugcuacaauucc

SEQ ID NO: 380023 - RNA, 19 nt, Artificial Sequence
  Description of Artificial Sequence: Synthetic oligonucleotide
  Sense Strand Starting at position 780 of SEQ ID NO: 315628
caggaaauaugguaccaaa

SEQ ID NO: 380024 - RNA, 19 nt, Artificial Sequence
  Description of Artificial Sequence: Synthetic oligonucleotide
  Antisense Strand to SEQ ID NO: 380023
uuugguaccauauuuccug

SEQ ID NO: 380025 - RNA, 19 nt, Artificial Sequence
  Description of Artificial Sequence: Synthetic oligonucleotide
  Sense Strand Starting at position 780 of SEQ ID NO: 315762
ccucuuagccaagacgauu

SEQ ID NO: 380026 - RNA, 19 nt, Artificial Sequence
  Description of Artificial Sequence: Synthetic oligonucleotide
  Antisense Strand to SEQ ID NO: 380025
aaucgucuuggcuaagagg

SEQ ID NO: 380027 - RNA, 19 nt, Artificial Sequence
  Description of Artificial Sequence: Synthetic oligonucleotide
  Sense Strand Starting at position 780 of SEQ ID NO: 315813
acuguauguuucuuaugag

SEQ ID NO: 380028 - RNA, 19 nt, Artificial Sequence
  Description of Artificial Sequence: Synthetic oligonucleotide
  Antisense Strand to SEQ ID NO: 380027
cucauaagaaacauacagu

SEQ ID NO: 380029 - RNA, 19 nt, Artificial Sequence
  Description of Artificial Sequence: Synthetic oligonucleotide
  Sense Strand Starting at position 780 of SEQ ID NO: 315897
gaucaaguuuagguacuua

SEQ ID NO: 380030 - RNA, 19 nt, Artificial Sequence
  Description of Artificial Sequence: Synthetic oligonucleotide
  Antisense Strand to SEQ ID NO: 380029
uaaguaccuaaacuugauc

SEQ ID NO: 380031 - RNA, 19 nt, Artificial Sequence
  Description of Artificial Sequence: Synthetic oligonucleotide
  Sense Strand Starting at position 780 of SEQ ID NO: 315908
gguacuuacucaucaagug

SEQ ID NO: 380032 - RNA, 19 nt, Artificial Sequence
  Description of Artificial Sequence: Synthetic oligonucleotide
  Antisense Strand to SEQ ID NO: 380031
cacuugaugaguaaguacc

SEQ ID NO: 380033 - RNA, 19 nt, Artificial Sequence
  Description of Artificial Sequence: Synthetic oligonucleotide
  Sense Strand Starting at position 780 of SEQ ID NO: 315909
guacuuacucaucaagugu

SEQ ID NO: 380034 - RNA, 19 nt, Artificial Sequence
  Description of Artificial Sequence: Synthetic oligonucleotide
  Antisense Strand to SEQ ID NO: 380033
acacuugaugaguaaguac

SEQ ID NO: 380035 - RNA, 19 nt, Artificial Sequence
  Description of Artificial Sequence: Synthetic oligonucleotide
  Sense Strand Starting at position 780 of SEQ ID NO: 315970
ucuacuuugucacugaaug

SEQ ID NO: 380036 - RNA, 19 nt, Artificial Sequence
  Description of Artificial Sequence: Synthetic oligonucleotide
  Antisense Strand to SEQ ID NO: 380035
cauucagugacaaaguaga

SEQ ID NO: 380037 - RNA, 19 nt, Artificial Sequence
  Description of Artificial Sequence: Synthetic oligonucleotide
  Sense Strand Starting at position 780 of SEQ ID NO: 315971
cuacuuugucacugaauga

SEQ ID NO: 380038 - RNA, 19 nt, Artificial Sequence
  Description of Artificial Sequence: Synthetic oligonucleotide
  Antisense Strand to SEQ ID NO: 380037
ucauucagugacaaaguag

SEQ ID NO: 380039 - RNA, 19 nt, Artificial Sequence
  Description of Artificial Sequence: Synthetic oligonucleotide
  Sense Strand Starting at position 780 of SEQ ID NO: 316034
cugagcuuugcugaauuau

SEQ ID NO: 380040 - RNA, 19 nt, Artificial Sequence
  Description of Artificial Sequence: Synthetic oligonucleotide
  Antisense Strand to SEQ ID NO: 380039
auaauucagcaaagcucag

SEQ ID NO: 380041 - RNA, 19 nt, Artificial Sequence
  Description of Artificial Sequence: Synthetic oligonucleotide
  Sense Strand Starting at position 780 of SEQ ID NO: 316104
agcuaagcuugacucacau

SEQ ID NO: 380042 - RNA, 19 nt, Artificial Sequence
  Description of Artificial Sequence: Synthetic oligonucleotide
  Antisense Strand to SEQ ID NO: 380041
augugagucaagcuuagcu

SEQ ID NO: 380043 - RNA, 19 nt, Artificial Sequence
  Description of Artificial Sequence: Synthetic oligonucleotide
  Sense Strand Starting at position 780 of SEQ ID NO: 316113
ugacucacauucuucugua

SEQ ID NO: 380044 - RNA, 19 nt, Artificial Sequence
  Description of Artificial Sequence: Synthetic oligonucleotide
  Antisense Strand to SEQ ID NO: 380043
uacagaagaaugugaguca

SEQ ID NO: 380045 - RNA, 19 nt, Artificial Sequence
  Description of Artificial Sequence: Synthetic oligonucleotide
  Sense Strand Starting at position 780 of SEQ ID NO: 316149
agagcacucuacuuggaaa

SEQ ID NO: 380046 - RNA, 19 nt, Artificial Sequence
  Description of Artificial Sequence: Synthetic oligonucleotide
  Antisense Strand to SEQ ID NO: 380045
uuuccaaguagagugcucu

SEQ ID NO: 380047 - RNA, 19 nt, Artificial Sequence
  Description of Artificial Sequence: Synthetic oligonucleotide
  Sense Strand Starting at position 780 of SEQ ID NO: 316151
agcacucuacuuggaaaca

SEQ ID NO: 380048 - RNA, 19 nt, Artificial Sequence
  Description of Artificial Sequence: Synthetic oligonucleotide
  Antisense Strand to SEQ ID NO: 380047
uguuuccaaguagagugcu

SEQ ID NO: 380049 - RNA, 19 nt, Artificial Sequence
  Description of Artificial Sequence: Synthetic oligonucleotide
  Sense Strand Starting at position 780 of SEQ ID NO: 316226
ugaagauucuaugcucaac

SEQ ID NO: 380050 - RNA, 19 nt, Artificial Sequence
  Description of Artificial Sequence: Synthetic oligonucleotide
  Antisense Strand to SEQ ID NO: 380049
guugagcauagaaucuuca

SEQ ID NO: 380051 - RNA, 19 nt, Artificial Sequence
  Description of Artificial Sequence: Synthetic oligonucleotide
  Sense Strand Starting at position 780 of SEQ ID NO: 316300
acagauguucgaugaauac

SEQ ID NO: 380052 - RNA, 19 nt, Artificial Sequence
  Description of Artificial Sequence: Synthetic oligonucleotide
  Antisense Strand to SEQ ID NO: 380051
guauucaucgaacaucugu

SEQ ID NO: 380053 - RNA, 19 nt, Artificial Sequence
  Description of Artificial Sequence: Synthetic oligonucleotide
  Sense Strand Starting at position 780 of SEQ ID NO: 316364
cccuuuaucgguuugcagu

SEQ ID NO: 380054 - RNA, 19 nt, Artificial Sequence
  Description of Artificial Sequence: Synthetic oligonucleotide
  Antisense Strand to SEQ ID NO: 380053
acugcaaaccgauaaaggg

SEQ ID NO: 380055 - RNA, 19 nt, Artificial Sequence
  Description of Artificial Sequence: Synthetic oligonucleotide
  Sense Strand Starting at position 780 of SEQ ID NO: 316377
ugcagucagcucuaagcaa

SEQ ID NO: 380056 - RNA, 19 nt, Artificial Sequence
  Description of Artificial Sequence: Synthetic oligonucleotide
  Antisense Strand to SEQ ID NO: 380055
uugcuuagagcugacugca

SEQ ID NO: 380057 - RNA, 19 nt, Artificial Sequence
  Description of Artificial Sequence: Synthetic oligonucleotide
  Sense Strand Starting at position 780 of SEQ ID NO: 316728
uuguaacuaugucuccuaa

SEQ ID NO: 380058 - RNA, 19 nt, Artificial Sequence
  Description of Artificial Sequence: Synthetic oligonucleotide
  Antisense Strand to SEQ ID NO: 380057
uuaggagacauaguuacaa

SEQ ID NO: 380059 - RNA, 19 nt, Artificial Sequence
  Description of Artificial Sequence: Synthetic oligonucleotide
  Sense Strand Starting at position 780 of SEQ ID NO: 316730
guaacuaugucuccuaaca

SEQ ID NO: 380060 - RNA, 19 nt, Artificial Sequence
  Description of Artificial Sequence: Synthetic oligonucleotide
  Antisense Strand to SEQ ID NO: 380059
uguuaggagacauaguuac

SEQ ID NO: 380061 - RNA, 19 nt, Artificial Sequence
  Description of Artificial Sequence: Synthetic oligonucleotide
  Sense Strand Starting at position 780 of SEQ ID NO: 316994
agggaauauuugggcauua

SEQ ID NO: 380062 - RNA, 19 nt, Artificial Sequence
  Description of Artificial Sequence: Synthetic oligonucleotide
  Antisense Strand to SEQ ID NO: 380061
uaaugcccaaauauucccu

SEQ ID NO: 380063 - RNA, 19 nt, Artificial Sequence
  Description of Artificial Sequence: Synthetic oligonucleotide
  Sense Strand Starting at position 780 of SEQ ID NO: 317004
ugggcauuaucacugccaa

SEQ ID NO: 380064 - RNA, 19 nt, Artificial Sequence
  Description of Artificial Sequence: Synthetic oligonucleotide
  Antisense Strand to SEQ ID NO: 380063
uuggcagugauaaugccca

SEQ ID NO: 380065 - RNA, 19 nt, Artificial Sequence
  Description of Artificial Sequence: Synthetic oligonucleotide
  Sense Strand Starting at position 780 of SEQ ID NO: 317005
gggcauuaucacugccaaa

SEQ ID NO: 380066 - RNA, 19 nt, Artificial Sequence
  Description of Artificial Sequence: Synthetic oligonucleotide
  Antisense Strand to SEQ ID NO: 380065
uuuggcagugauaaugccc

SEQ ID NO: 380067 - RNA, 19 nt, Artificial Sequence
  Description of Artificial Sequence: Synthetic oligonucleotide
  Sense Strand Starting at position 780 of SEQ ID NO: 317068
auuggcagguccucgauua

SEQ ID NO: 380068 - RNA, 19 nt, Artificial Sequence
  Description of Artificial Sequence: Synthetic oligonucleotide
  Antisense Strand to SEQ ID NO: 380067
uaaucgaggaccugccaau

SEQ ID NO: 380069 - RNA, 19 nt, Artificial Sequence
  Description of Artificial Sequence: Synthetic oligonucleotide
  Sense Strand Starting at position 780 of SEQ ID NO: 317081
cgauuaucggcgagucacu

SEQ ID NO: 380070 - RNA, 19 nt, Artificial Sequence
  Description of Artificial Sequence: Synthetic oligonucleotide
  Antisense Strand to SEQ ID NO: 380069
agugacucgccgauaaucg

SEQ ID NO: 380071 - RNA, 19 nt, Artificial Sequence
  Description of Artificial Sequence: Synthetic oligonucleotide
  Sense Strand Starting at position 780 of SEQ ID NO: 317465
ugcuucuucgggcugugua

SEQ ID NO: 380072 - RNA, 19 nt, Artificial Sequence
  Description of Artificial Sequence: Synthetic oligonucleotide
  Antisense Strand to SEQ ID NO: 380071
uacacagcccgaagaagca

SEQ ID NO: 380073 - RNA, 19 nt, Artificial Sequence
  Description of Artificial Sequence: Synthetic oligonucleotide
  Sense Strand Starting at position 780 of SEQ ID NO: 317552
cguaguacccuugaaguga

SEQ ID NO: 380074 - RNA, 19 nt, Artificial Sequence
  Description of Artificial Sequence: Synthetic oligonucleotide
  Antisense Strand to SEQ ID NO: 380073
ucacuucaaggguacuacg

SEQ ID NO: 380075 - RNA, 19 nt, Artificial Sequence
  Description of Artificial Sequence: Synthetic oligonucleotide
  Sense Strand Starting at position 780 of SEQ ID NO: 317737
aaaggcugguuauccuuaa

SEQ ID NO: 380076 - RNA, 19 nt, Artificial Sequence
  Description of Artificial Sequence: Synthetic oligonucleotide
  Antisense Strand to SEQ ID NO: 380075
uuaaggauaaccagccuuu

SEQ ID NO: 380077 - RNA, 19 nt, Artificial Sequence
  Description of Artificial Sequence: Synthetic oligonucleotide
  Sense Strand Starting at position 780 of SEQ ID NO: 317741
gcugguuauccuuaaguac

SEQ ID NO: 380078 - RNA, 19 nt, Artificial Sequence
  Description of Artificial Sequence: Synthetic oligonucleotide
  Antisense Strand to SEQ ID NO: 380077
guacuuaaggauaaccagc

SEQ ID NO: 380079 - RNA, 19 nt, Artificial Sequence
  Description of Artificial Sequence: Synthetic oligonucleotide
  Sense Strand Starting at position 780 of SEQ ID NO: 317744
gguuauccuuaaguacuga

SEQ ID NO: 380080 - RNA, 19 nt, Artificial Sequence
  Description of Artificial Sequence: Synthetic oligonucleotide
  Antisense Strand to SEQ ID NO: 380079
ucaguacuuaaggauaacc

SEQ ID NO: 380081 - RNA, 19 nt, Artificial Sequence
  Description of Artificial Sequence: Synthetic oligonucleotide
  Sense Strand Starting at position 780 of SEQ ID NO: 317793
agaauaugcccugaaaugu

SEQ ID NO: 380082 - RNA, 19 nt, Artificial Sequence
  Description of Artificial Sequence: Synthetic oligonucleotide
  Antisense Strand to SEQ ID NO: 380081
acauuucagggcauauucu

SEQ ID NO: 380083 - RNA, 19 nt, Artificial Sequence
  Description of Artificial Sequence: Synthetic oligonucleotide
  Sense Strand Starting at position 780 of SEQ ID NO: 317849
agaaguuaucaguaauccu

SEQ ID NO: 380084 - RNA, 19 nt, Artificial Sequence
  Description of Artificial Sequence: Synthetic oligonucleotide
  Antisense Strand to SEQ ID NO: 380083
aggauuacugauaacuucu

SEQ ID NO: 380085 - RNA, 19 nt, Artificial Sequence
  Description of Artificial Sequence: Synthetic oligonucleotide
  Sense Strand Starting at position 780 of SEQ ID NO: 317938
uggugacucgaaugaauca

SEQ ID NO: 380086 - RNA, 19 nt, Artificial Sequence
  Description of Artificial Sequence: Synthetic oligonucleotide
  Antisense Strand to SEQ ID NO: 380085
ugauucauucgagucacca

SEQ ID NO: 380087 - RNA, 19 nt, Artificial Sequence
  Description of Artificial Sequence: Synthetic oligonucleotide
  Sense Strand Starting at position 780 of SEQ ID NO: 317945
ucgaaugaaucaucaauuc

SEQ ID NO: 380088 - RNA, 19 nt, Artificial Sequence
  Description of Artificial Sequence: Synthetic oligonucleotide
  Antisense Strand to SEQ ID NO: 380087
gaauugaugauucauucga

SEQ ID NO: 380089 - RNA, 19 nt, Artificial Sequence
  Description of Artificial Sequence: Synthetic oligonucleotide
  Sense Strand Starting at position 780 of SEQ ID NO: 319183
ggugccuuaagguaaagau

SEQ ID NO: 380090 - RNA, 19 nt, Artificial Sequence
  Description of Artificial Sequence: Synthetic oligonucleotide
  Antisense Strand to SEQ ID NO: 380089
aucuuuaccuuaaggcacc

SEQ ID NO: 380091 - RNA, 19 nt, Artificial Sequence
  Description of Artificial Sequence: Synthetic oligonucleotide
  Sense Strand Starting at position 780 of SEQ ID NO: 319190
uaagguaaagauggguuau

SEQ ID NO: 380092 - RNA, 19 nt, Artificial Sequence
  Description of Artificial Sequence: Synthetic oligonucleotide
  Antisense Strand to SEQ ID NO: 380091
auaacccaucuuuaccuua

SEQ ID NO: 380093 - RNA, 19 nt, Artificial Sequence
  Description of Artificial Sequence: Synthetic oligonucleotide
  Sense Strand Starting at position 781 of SEQ ID NO: 315278
uggcuuacaucugucugua

SEQ ID NO: 380094 - RNA, 19 nt, Artificial Sequence
  Description of Artificial Sequence: Synthetic oligonucleotide
  Antisense Strand to SEQ ID NO: 380093
uacagacagauguaagcca

SEQ ID NO: 380095 - RNA, 19 nt, Artificial Sequence
  Description of Artificial Sequence: Synthetic oligonucleotide
  Sense Strand Starting at position 781 of SEQ ID NO: 315280
gcuuacaucugucuguaau

SEQ ID NO: 380096 - RNA, 19 nt, Artificial Sequence
  Description of Artificial Sequence: Synthetic oligonucleotide
  Antisense Strand to SEQ ID NO: 380095
auuacagacagauguaagc

SEQ ID NO: 380097 - RNA, 19 nt, Artificial Sequence
  Description of Artificial Sequence: Synthetic oligonucleotide
  Sense Strand Starting at position 781 of SEQ ID NO: 315321
gcggguggaucauuuaagu

SEQ ID NO: 380098 - RNA, 19 nt, Artificial Sequence
  Description of Artificial Sequence: Synthetic oligonucleotide
  Antisense Strand to SEQ ID NO: 380097
acuuaaaugauccacccgc

SEQ ID NO: 380099 - RNA, 19 nt, Artificial Sequence
  Description of Artificial Sequence: Synthetic oligonucleotide
  Sense Strand Starting at position 781 of SEQ ID NO: 315673
ugcaguggaucuugucauu

SEQ ID NO: 380100 - RNA, 19 nt, Artificial Sequence
  Description of Artificial Sequence: Synthetic oligonucleotide
  Antisense Strand to SEQ ID NO: 380099
aaugacaagauccacugca

SEQ ID NO: 380101 - RNA, 19 nt, Artificial Sequence
  Description of Artificial Sequence: Synthetic oligonucleotide
  Sense Strand Starting at position 781 of SEQ ID NO: 315676
aguggaucuugucauugga

SEQ ID NO: 380102 - RNA, 19 nt, Artificial Sequence
  Description of Artificial Sequence: Synthetic oligonucleotide
  Antisense Strand to SEQ ID NO: 380101
uccaaugacaagauccacu

SEQ ID NO: 380103 - RNA, 19 nt, Artificial Sequence
  Description of Artificial Sequence: Synthetic oligonucleotide
  Sense Strand Starting at position 781 of SEQ ID NO: 315678
uggaucuugucauuggaua

SEQ ID NO: 380104 - RNA, 19 nt, Artificial Sequence
  Description of Artificial Sequence: Synthetic oligonucleotide
  Antisense Strand to SEQ ID NO: 380103
uauccaaugacaagaucca

SEQ ID NO: 380105 - RNA, 19 nt, Artificial Sequence
  Description of Artificial Sequence: Synthetic oligonucleotide
  Sense Strand Starting at position 781 of SEQ ID NO: 315679
ggaucuugucauuggauac

SEQ ID NO: 380106 - RNA, 19 nt, Artificial Sequence
  Description of Artificial Sequence: Synthetic oligonucleotide
  Antisense Strand to SEQ ID NO: 380105
guauccaaugacaagaucc

SEQ ID NO: 380107 - RNA, 19 nt, Artificial Sequence
  Description of Artificial Sequence: Synthetic oligonucleotide
  Sense Strand Starting at position 781 of SEQ ID NO: 315683
cuugucauuggauacucau

SEQ ID NO: 380108 - RNA, 19 nt, Artificial Sequence
  Description of Artificial Sequence: Synthetic oligonucleotide
  Antisense Strand to SEQ ID NO: 380107
augaguauccaaugacaag

SEQ ID NO: 380109 - RNA, 19 nt, Artificial Sequence
  Description of Artificial Sequence: Synthetic oligonucleotide
  Sense Strand Starting at position 781 of SEQ ID NO: 315692
ggauacucaucagaauuac

SEQ ID NO: 380110 - RNA, 19 nt, Artificial Sequence
  Description of Artificial Sequence: Synthetic oligonucleotide
  Antisense Strand to SEQ ID NO: 380109
guaauucugaugaguaucc

SEQ ID NO: 380111 - RNA, 19 nt, Artificial Sequence
  Description of Artificial Sequence: Synthetic oligonucleotide
  Sense Strand Starting at position 781 of SEQ ID NO: 315749
accuuagucuacuaaguca

SEQ ID NO: 380112 - RNA, 19 nt, Artificial Sequence
  Description of Artificial Sequence: Synthetic oligonucleotide
  Antisense Strand to SEQ ID NO: 380111
ugacuuaguagacuaaggu

SEQ ID NO: 380113 - RNA, 19 nt, Artificial Sequence
  Description of Artificial Sequence: Synthetic oligonucleotide
  Sense Strand Starting at position 781 of SEQ ID NO: 315781
ugggcucuuuaauuaaguu

SEQ ID NO: 380114 - RNA, 19 nt, Artificial Sequence
  Description of Artificial Sequence: Synthetic oligonucleotide
  Antisense Strand to SEQ ID NO: 380113
aacuuaauuaaagagccca

SEQ ID NO: 380115 - RNA, 19 nt, Artificial Sequence
  Description of Artificial Sequence: Synthetic oligonucleotide
  Sense Strand Starting at position 781 of SEQ ID NO: 315801
cccauuugaugguaaggaa

SEQ ID NO: 380116 - RNA, 19 nt, Artificial Sequence
  Description of Artificial Sequence: Synthetic oligonucleotide
  Antisense Strand to SEQ ID NO: 380115
uuccuuaccaucaaauggg

SEQ ID NO: 380117 - RNA, 19 nt, Artificial Sequence
  Description of Artificial Sequence: Synthetic oligonucleotide
  Sense Strand Starting at position 781 of SEQ ID NO: 315847
gcacaaagcuccugagaca

SEQ ID NO: 380118 - RNA, 19 nt, Artificial Sequence
  Description of Artificial Sequence: Synthetic oligonucleotide
  Antisense Strand to SEQ ID NO: 380117
ugucucaggagcuuugugc

SEQ ID NO: 380119 - RNA, 19 nt, Artificial Sequence
  Description of Artificial Sequence: Synthetic oligonucleotide
  Sense Strand Starting at position 781 of SEQ ID NO: 316208
ugcccucuuuguugaguca

SEQ ID NO: 380120 - RNA, 19 nt, Artificial Sequence
  Description of Artificial Sequence: Synthetic oligonucleotide
  Antisense Strand to SEQ ID NO: 380119
ugacucaacaaagagggca

SEQ ID NO: 380121 - RNA, 19 nt, Artificial Sequence
  Description of Artificial Sequence: Synthetic oligonucleotide
  Sense Strand Starting at position 781 of SEQ ID NO: 316209
gcccucuuuguugagucau

SEQ ID NO: 380122 - RNA, 19 nt, Artificial Sequence
  Description of Artificial Sequence: Synthetic oligonucleotide
  Antisense Strand to SEQ ID NO: 380121
augacucaacaaagagggc

SEQ ID NO: 380123 - RNA, 19 nt, Artificial Sequence
  Description of Artificial Sequence: Synthetic oligonucleotide
  Sense Strand Starting at position 781 of SEQ ID NO: 316211
ccucuuuguugagucauac

SEQ ID NO: 380124 - RNA, 19 nt, Artificial Sequence
  Description of Artificial Sequence: Synthetic oligonucleotide
  Antisense Strand to SEQ ID NO: 380123
guaugacucaacaaagagg

SEQ ID NO: 380125 - RNA, 19 nt, Artificial Sequence
  Description of Artificial Sequence: Synthetic oligonucleotide
  Sense Strand Starting at position 781 of SEQ ID NO: 316215
uuuguugagucauacagug

SEQ ID NO: 380126 - RNA, 19 nt, Artificial Sequence
  Description of Artificial Sequence: Synthetic oligonucleotide
  Antisense Strand to SEQ ID NO: 380125
cacuguaugacucaacaaa

SEQ ID NO: 380127 - RNA, 19 nt, Artificial Sequence
  Description of Artificial Sequence: Synthetic oligonucleotide
  Sense Strand Starting at position 781 of SEQ ID NO: 316243
ucuaucaacugauguggaa

SEQ ID NO: 380128 - RNA, 19 nt, Artificial Sequence
  Description of Artificial Sequence: Synthetic oligonucleotide
  Antisense Strand to SEQ ID NO: 380127
uuccacaucaguugauaga

SEQ ID NO: 380129 - RNA, 19 nt, Artificial Sequence
  Description of Artificial Sequence: Synthetic oligonucleotide
  Sense Strand Starting at position 781 of SEQ ID NO: 316258
ggaagugcaacuggagauu

SEQ ID NO: 380130 - RNA, 19 nt, Artificial Sequence
  Description of Artificial Sequence: Synthetic oligonucleotide
  Antisense Strand to SEQ ID NO: 380129
aaucuccaguugcacuucc

SEQ ID NO: 380131 - RNA, 19 nt, Artificial Sequence
  Description of Artificial Sequence: Synthetic oligonucleotide
  Sense Strand Starting at position 781 of SEQ ID NO: 316295
ggguauggugaugagguaa

SEQ ID NO: 380132 - RNA, 19 nt, Artificial Sequence
  Description of Artificial Sequence: Synthetic oligonucleotide
  Antisense Strand to SEQ ID NO: 380131
uuaccucaucaccauaccc

SEQ ID NO: 380133 - RNA, 19 nt, Artificial Sequence
  Description of Artificial Sequence: Synthetic oligonucleotide
  Sense Strand Starting at position 781 of SEQ ID NO: 316670
guaaaucauugcuuagcga

SEQ ID NO: 380134 - RNA, 19 nt, Artificial Sequence
  Description of Artificial Sequence: Synthetic oligonucleotide
  Antisense Strand to SEQ ID NO: 380133
ucgcuaagcaaugauuuac

SEQ ID NO: 380135 - RNA, 19 nt, Artificial Sequence
  Description of Artificial Sequence: Synthetic oligonucleotide
  Sense Strand Starting at position 781 of SEQ ID NO: 316859
guguuaacugaaggacuaa

SEQ ID NO: 380136 - RNA, 19 nt, Artificial Sequence
  Description of Artificial Sequence: Synthetic oligonucleotide
  Antisense Strand to SEQ ID NO: 380135
uuaguccuucaguuaacac

SEQ ID NO: 380137 - RNA, 19 nt, Artificial Sequence
  Description of Artificial Sequence: Synthetic oligonucleotide
  Sense Strand Starting at position 781 of SEQ ID NO: 316918
ggcagaggcuuucccauaa

SEQ ID NO: 380138 - RNA, 19 nt, Artificial Sequence
  Description of Artificial Sequence: Synthetic oligonucleotide
  Antisense Strand to SEQ ID NO: 380137
uuaugggaaagccucugcc

SEQ ID NO: 380139 - RNA, 19 nt, Artificial Sequence
  Description of Artificial Sequence: Synthetic oligonucleotide
  Sense Strand Starting at position 781 of SEQ ID NO: 316939
gauuaaaugccugggaaac

SEQ ID NO: 380140 - RNA, 19 nt, Artificial Sequence
  Description of Artificial Sequence: Synthetic oligonucleotide
  Antisense Strand to SEQ ID NO: 380139
guuucccaggcauuuaauc

SEQ ID NO: 380141 - RNA, 19 nt, Artificial Sequence
  Description of Artificial Sequence: Synthetic oligonucleotide
  Sense Strand Starting at position 781 of SEQ ID NO: 316949
cugggaaacgaccgagauu

SEQ ID NO: 380142 - RNA, 19 nt, Artificial Sequence
  Description of Artificial Sequence: Synthetic oligonucleotide
  Antisense Strand to SEQ ID NO: 380141
aaucucggucguuucccag

SEQ ID NO: 380143 - RNA, 19 nt, Artificial Sequence
  Description of Artificial Sequence: Synthetic oligonucleotide
  Sense Strand Starting at position 781 of SEQ ID NO: 317006
caggcuugcucaccucgaa

SEQ ID NO: 380144 - RNA, 19 nt, Artificial Sequence
  Description of Artificial Sequence: Synthetic oligonucleotide
  Antisense Strand to SEQ ID NO: 380143
uucgaggugagcaagccug

SEQ ID NO: 380145 - RNA, 19 nt, Artificial Sequence
  Description of Artificial Sequence: Synthetic oligonucleotide
  Sense Strand Starting at position 781 of SEQ ID NO: 317707
ccagccuuucuguaugcaa

SEQ ID NO: 380146 - RNA, 19 nt, Artificial Sequence
  Description of Artificial Sequence: Synthetic oligonucleotide
  Antisense Strand to SEQ ID NO: 380145
uugcauacagaaaggcugg

SEQ ID NO: 380147 - RNA, 19 nt, Artificial Sequence
  Description of Artificial Sequence: Synthetic oligonucleotide
  Sense Strand Starting at position 781 of SEQ ID NO: 317762
gggcgguagucuguuaaag

SEQ ID NO: 380148 - RNA, 19 nt, Artificial Sequence
  Description of Artificial Sequence: Synthetic oligonucleotide
  Antisense Strand to SEQ ID NO: 380147
cuuuaacagacuaccgccc

SEQ ID NO: 380149 - RNA, 19 nt, Artificial Sequence
  Description of Artificial Sequence: Synthetic oligonucleotide
  Sense Strand Starting at position 781 of SEQ ID NO: 317772
cuguuaaaggcauauaaau

SEQ ID NO: 380150 - RNA, 19 nt, Artificial Sequence
  Description of Artificial Sequence: Synthetic oligonucleotide
  Antisense Strand to SEQ ID NO: 380149
auuuauaugccuuuaacag

SEQ ID NO: 380151 - RNA, 19 nt, Artificial Sequence
  Description of Artificial Sequence: Synthetic oligonucleotide
  Sense Strand Starting at position 781 of SEQ ID NO: 317799
acaaaucagcagugauuag

SEQ ID NO: 380152 - RNA, 19 nt, Artificial Sequence
  Description of Artificial Sequence: Synthetic oligonucleotide
  Antisense Strand to SEQ ID NO: 380151
cuaaucacugcugauuugu

SEQ ID NO: 380153 - RNA, 19 nt, Artificial Sequence
  Description of Artificial Sequence: Synthetic oligonucleotide
  Sense Strand Starting at position 781 of SEQ ID NO: 317806
agcagugauuagccuagau

SEQ ID NO: 380154 - RNA, 19 nt, Artificial Sequence
  Description of Artificial Sequence: Synthetic oligonucleotide
  Antisense Strand to SEQ ID NO: 380153
aucuaggcuaaucacugcu

SEQ ID NO: 380155 - RNA, 19 nt, Artificial Sequence
  Description of Artificial Sequence: Synthetic oligonucleotide
  Sense Strand Starting at position 781 of SEQ ID NO: 317808
cagugauuagccuagauua

SEQ ID NO: 380156 - RNA, 19 nt, Artificial Sequence
  Description of Artificial Sequence: Synthetic oligonucleotide
  Antisense Strand to SEQ ID NO: 380155
uaaucuaggcuaaucacug

SEQ ID NO: 380157 - RNA, 19 nt, Artificial Sequence
  Description of Artificial Sequence: Synthetic oligonucleotide
  Sense Strand Starting at position 781 of SEQ ID NO: 317810
gugauuagccuagauuaac

SEQ ID NO: 380158 - RNA, 19 nt, Artificial Sequence
  Description of Artificial Sequence: Synthetic oligonucleotide
  Antisense Strand to SEQ ID NO: 380157
guuaaucuaggcuaaucac

SEQ ID NO: 380159 - RNA, 19 nt, Artificial Sequence
  Description of Artificial Sequence: Synthetic oligonucleotide
  Sense Strand Starting at position 781 of SEQ ID NO: 317836
auacguauuagccguugga

SEQ ID NO: 380160 - RNA, 19 nt, Artificial Sequence
  Description of Artificial Sequence: Synthetic oligonucleotide
  Antisense Strand to SEQ ID NO: 380159
uccaacggcuaauacguau

SEQ ID NO: 380161 - RNA, 19 nt, Artificial Sequence
  Description of Artificial Sequence: Synthetic oligonucleotide
  Sense Strand Starting at position 781 of SEQ ID NO: 317956
uccacacagucauuagaca

SEQ ID NO: 380162 - RNA, 19 nt, Artificial Sequence
  Description of Artificial Sequence: Synthetic oligonucleotide
  Antisense Strand to SEQ ID NO: 380161
ugucuaaugacugugugga

SEQ ID NO: 380163 - RNA, 19 nt, Artificial Sequence
  Description of Artificial Sequence: Synthetic oligonucleotide
  Sense Strand Starting at position 781 of SEQ ID NO: 317982
auuaaagacugacaaagau

SEQ ID NO: 380164 - RNA, 19 nt, Artificial Sequence
  Description of Artificial Sequence: Synthetic oligonucleotide
  Antisense Strand to SEQ ID NO: 380163
aucuuugucagucuuuaau

SEQ ID NO: 380165 - RNA, 19 nt, Artificial Sequence
  Description of Artificial Sequence: Synthetic oligonucleotide
  Sense Strand Starting at position 781 of SEQ ID NO: 318193
cacugcguccugcuagauu

SEQ ID NO: 380166 - RNA, 19 nt, Artificial Sequence
  Description of Artificial Sequence: Synthetic oligonucleotide
  Antisense Strand to SEQ ID NO: 380165
aaucuagcaggacgcagug

SEQ ID NO: 380167 - RNA, 19 nt, Artificial Sequence
  Description of Artificial Sequence: Synthetic oligonucleotide
  Sense Strand Starting at position 781 of SEQ ID NO: 318201
ccugcuagauuugucuauu

SEQ ID NO: 380168 - RNA, 19 nt, Artificial Sequence
  Description of Artificial Sequence: Synthetic oligonucleotide
  Antisense Strand to SEQ ID NO: 380167
aauagacaaaucuagcagg

SEQ ID NO: 380169 - RNA, 19 nt, Artificial Sequence
  Description of Artificial Sequence: Synthetic oligonucleotide
  Sense Strand Starting at position 781 of SEQ ID NO: 318768
uggucuugaacucagguaa

SEQ ID NO: 380170 - RNA, 19 nt, Artificial Sequence
  Description of Artificial Sequence: Synthetic oligonucleotide
  Antisense Strand to SEQ ID NO: 380169
uuaccugaguucaagacca

SEQ ID NO: 380171 - RNA, 19 nt, Artificial Sequence
  Description of Artificial Sequence: Synthetic oligonucleotide
  Sense Strand Starting at position 781 of SEQ ID NO: 319199
acuccugggucccaauaau

SEQ ID NO: 380172 - RNA, 19 nt, Artificial Sequence
  Description of Artificial Sequence: Synthetic oligonucleotide
  Antisense Strand to SEQ ID NO: 380171
auuauugggacccaggagu

SEQ ID NO: 380173 - RNA, 19 nt, Artificial Sequence
  Description of Artificial Sequence: Synthetic oligonucleotide
  Sense Strand Starting at position 782 of SEQ ID NO: 315393
acugguucauggcugugau

SEQ ID NO: 380174 - RNA, 19 nt, Artificial Sequence
  Description of Artificial Sequence: Synthetic oligonucleotide
  Antisense Strand to SEQ ID NO: 380173
aucacagccaugaaccagu

SEQ ID NO: 380175 - RNA, 19 nt, Artificial Sequence
  Description of Artificial Sequence: Synthetic oligonucleotide
  Sense Strand Starting at position 782 of SEQ ID NO: 315396
gguucauggcugugauuuc

SEQ ID NO: 380176 - RNA, 19 nt, Artificial Sequence
  Description of Artificial Sequence: Synthetic oligonucleotide
  Antisense Strand to SEQ ID NO: 380175
gaaaucacagccaugaacc

SEQ ID NO: 380177 - RNA, 19 nt, Artificial Sequence
  Description of Artificial Sequence: Synthetic oligonucleotide
  Sense Strand Starting at position 782 of SEQ ID NO: 315477
gcucuaucaggaggcaaua

SEQ ID NO: 380178 - RNA, 19 nt, Artificial Sequence
  Description of Artificial Sequence: Synthetic oligonucleotide
  Antisense Strand to SEQ ID NO: 380177
uauugccuccugauagagc

SEQ ID NO: 380179 - RNA, 19 nt, Artificial Sequence
  Description of Artificial Sequence: Synthetic oligonucleotide
  Sense Strand Starting at position 782 of SEQ ID NO: 315489
ggcaauauggccuagaggu

SEQ ID NO: 380180 - RNA, 19 nt, Artificial Sequence
  Description of Artificial Sequence: Synthetic oligonucleotide
  Antisense Strand to SEQ ID NO: 380179
accucuaggccauauugcc

SEQ ID NO: 380181 - RNA, 19 nt, Artificial Sequence
  Description of Artificial Sequence: Synthetic oligonucleotide
  Sense Strand Starting at position 782 of SEQ ID NO: 315491
caauauggccuagagguua

SEQ ID NO: 380182 - RNA, 19 nt, Artificial Sequence
  Description of Artificial Sequence: Synthetic oligonucleotide
  Antisense Strand to SEQ ID NO: 380181
uaaccucuaggccauauug

SEQ ID NO: 380183 - RNA, 19 nt, Artificial Sequence
  Description of Artificial Sequence: Synthetic oligonucleotide
  Sense Strand Starting at position 782 of SEQ ID NO: 315508
uaaggaaggccuggguuaa

SEQ ID NO: 380184 - RNA, 19 nt, Artificial Sequence
  Description of Artificial Sequence: Synthetic oligonucleotide
  Antisense Strand to SEQ ID NO: 380183
uuaacccaggccuuccuua

SEQ ID NO: 380185 - RNA, 19 nt, Artificial Sequence
  Description of Artificial Sequence: Synthetic oligonucleotide
  Sense Strand Starting at position 782 of SEQ ID NO: 315509
aaggaaggccuggguuaaa

SEQ ID NO: 380186 - RNA, 19 nt, Artificial Sequence
  Description of Artificial Sequence: Synthetic oligonucleotide
  Antisense Strand to SEQ ID NO: 380185
uuuaacccaggccuuccuu

SEQ ID NO: 380187 - RNA, 19 nt, Artificial Sequence
  Description of Artificial Sequence: Synthetic oligonucleotide
  Sense Strand Starting at position 782 of SEQ ID NO: 315585
gagccuaaguucucucuga

SEQ ID NO: 380188 - RNA, 19 nt, Artificial Sequence
  Description of Artificial Sequence: Synthetic oligonucleotide
  Antisense Strand to SEQ ID NO: 380187
ucagagagaacuuaggcuc

SEQ ID NO: 380189 - RNA, 19 nt, Artificial Sequence
  Description of Artificial Sequence: Synthetic oligonucleotide
  Sense Strand Starting at position 782 of SEQ ID NO: 315589
cuaaguucucucugagccu

SEQ ID NO: 380190 - RNA, 19 nt, Artificial Sequence
  Description of Artificial Sequence: Synthetic oligonucleotide
  Antisense Strand to SEQ ID NO: 380189
aggcucagagagaacuuag

SEQ ID NO: 380191 - RNA, 19 nt, Artificial Sequence
  Description of Artificial Sequence: Synthetic oligonucleotide
  Sense Strand Starting at position 782 of SEQ ID NO: 315695
aaagguagguguguuaaua

SEQ ID NO: 380192 - RNA, 19 nt, Artificial Sequence
  Description of Artificial Sequence: Synthetic oligonucleotide
  Antisense Strand to SEQ ID NO: 380191
uauuaacacaccuaccuuu

SEQ ID NO: 380193 - RNA, 19 nt, Artificial Sequence
  Description of Artificial Sequence: Synthetic oligonucleotide
  Sense Strand Starting at position 782 of SEQ ID NO: 315806
ccagaauagggugagcuuu

SEQ ID NO: 380194 - RNA, 19 nt, Artificial Sequence
  Description of Artificial Sequence: Synthetic oligonucleotide
  Antisense Strand to SEQ ID NO: 380193
aaagcucacccuauucugg

SEQ ID NO: 380195 - RNA, 19 nt, Artificial Sequence
  Description of Artificial Sequence: Synthetic oligonucleotide
  Sense Strand Starting at position 782 of SEQ ID NO: 316352
gcccaaagucacgaagauu

SEQ ID NO: 380196 - RNA, 19 nt, Artificial Sequence
  Description of Artificial Sequence: Synthetic oligonucleotide
  Antisense Strand to SEQ ID NO: 380195
aaucuucgugacuuugggc

SEQ ID NO: 380197 - RNA, 19 nt, Artificial Sequence
  Description of Artificial Sequence: Synthetic oligonucleotide
  Sense Strand Starting at position 782 of SEQ ID NO: 316391
cgcuuuagcacugagacca

SEQ ID NO: 380198 - RNA, 19 nt, Artificial Sequence
  Description of Artificial Sequence: Synthetic oligonucleotide
  Antisense Strand to SEQ ID NO: 380197
uggucucagugcuaaagcg

SEQ ID NO: 380199 - RNA, 19 nt, Artificial Sequence
  Description of Artificial Sequence: Synthetic oligonucleotide
  Sense Strand Starting at position 782 of SEQ ID NO: 317299
cgaggugcucgcuugcgua

SEQ ID NO: 380200 - RNA, 19 nt, Artificial Sequence
  Description of Artificial Sequence: Synthetic oligonucleotide
  Antisense Strand to SEQ ID NO: 380199
uacgcaagcgagcaccucg

SEQ ID NO: 380201 - RNA, 19 nt, Artificial Sequence
  Description of Artificial Sequence: Synthetic oligonucleotide
  Sense Strand Starting at position 782 of SEQ ID NO: 317301
aggugcucgcuugcguaau

SEQ ID NO: 380202 - RNA, 19 nt, Artificial Sequence
  Description of Artificial Sequence: Synthetic oligonucleotide
  Antisense Strand to SEQ ID NO: 380201
auuacgcaagcgagcaccu

SEQ ID NO: 380203 - RNA, 19 nt, Artificial Sequence
  Description of Artificial Sequence: Synthetic oligonucleotide
  Sense Strand Starting at position 782 of SEQ ID NO: 317481
ucaguuuacuccuccugau

SEQ ID NO: 380204 - RNA, 19 nt, Artificial Sequence
  Description of Artificial Sequence: Synthetic oligonucleotide
  Antisense Strand to SEQ ID NO: 380203
aucaggaggaguaaacuga

SEQ ID NO: 380205 - RNA, 19 nt, Artificial Sequence
  Description of Artificial Sequence: Synthetic oligonucleotide
  Sense Strand Starting at position 782 of SEQ ID NO: 317607
gagugauucugggccaguu

SEQ ID NO: 380206 - RNA, 19 nt, Artificial Sequence
  Description of Artificial Sequence: Synthetic oligonucleotide
  Antisense Strand to SEQ ID NO: 380205
aacuggcccagaaucacuc

SEQ ID NO: 380207 - RNA, 19 nt, Artificial Sequence
  Description of Artificial Sequence: Synthetic oligonucleotide
  Sense Strand Starting at position 782 of SEQ ID NO: 317624
uucugaaccucucugagau

SEQ ID NO: 380208 - RNA, 19 nt, Artificial Sequence
  Description of Artificial Sequence: Synthetic oligonucleotide
  Antisense Strand to SEQ ID NO: 380207
aucucagagagguucagaa

SEQ ID NO: 380209 - RNA, 19 nt, Artificial Sequence
  Description of Artificial Sequence: Synthetic oligonucleotide
  Sense Strand Starting at position 782 of SEQ ID NO: 317625
ucugaaccucucugagauu

SEQ ID NO: 380210 - RNA, 19 nt, Artificial Sequence
  Description of Artificial Sequence: Synthetic oligonucleotide
  Antisense Strand to SEQ ID NO: 380209
aaucucagagagguucaga

SEQ ID NO: 380211 - RNA, 19 nt, Artificial Sequence
  Description of Artificial Sequence: Synthetic oligonucleotide
  Sense Strand Starting at position 782 of SEQ ID NO: 317632
cucucugagauucggagau

SEQ ID NO: 380212 - RNA, 19 nt, Artificial Sequence
  Description of Artificial Sequence: Synthetic oligonucleotide
  Antisense Strand to SEQ ID NO: 380211
aucuccgaaucucagagag

SEQ ID NO: 380213 - RNA, 19 nt, Artificial Sequence
  Description of Artificial Sequence: Synthetic oligonucleotide
  Sense Strand Starting at position 782 of SEQ ID NO: 317673
acaacugaguggguugauu

SEQ ID NO: 380214 - RNA, 19 nt, Artificial Sequence
  Description of Artificial Sequence: Synthetic oligonucleotide
  Antisense Strand to SEQ ID NO: 380213
aaucaacccacucaguugu

SEQ ID NO: 380215 - RNA, 19 nt, Artificial Sequence
  Description of Artificial Sequence: Synthetic oligonucleotide
  Sense Strand Starting at position 782 of SEQ ID NO: 317675
aacugaguggguugauuga

SEQ ID NO: 380216 - RNA, 19 nt, Artificial Sequence
  Description of Artificial Sequence: Synthetic oligonucleotide
  Antisense Strand to SEQ ID NO: 380215
ucaaucaacccacucaguu

SEQ ID NO: 380217 - RNA, 19 nt, Artificial Sequence
  Description of Artificial Sequence: Synthetic oligonucleotide
  Sense Strand Starting at position 782 of SEQ ID NO: 317725
cagggagcguguuuaucaa

SEQ ID NO: 380218 - RNA, 19 nt, Artificial Sequence
  Description of Artificial Sequence: Synthetic oligonucleotide
  Antisense Strand to SEQ ID NO: 380217
uugauaaacacgcucccug

SEQ ID NO: 380219 - RNA, 19 nt, Artificial Sequence
  Description of Artificial Sequence: Synthetic oligonucleotide
  Sense Strand Starting at position 782 of SEQ ID NO: 317732
cguguuuaucaagagggau

SEQ ID NO: 380220 - RNA, 19 nt, Artificial Sequence
  Description of Artificial Sequence: Synthetic oligonucleotide
  Antisense Strand to SEQ ID NO: 380219
aucccucuugauaaacacg

SEQ ID NO: 380221 - RNA, 19 nt, Artificial Sequence
  Description of Artificial Sequence: Synthetic oligonucleotide
  Sense Strand Starting at position 782 of SEQ ID NO: 317997
ggugcuguugaauaacuga

SEQ ID NO: 380222 - RNA, 19 nt, Artificial Sequence
  Description of Artificial Sequence: Synthetic oligonucleotide
  Antisense Strand to SEQ ID NO: 380221
ucaguuauucaacagcacc

SEQ ID NO: 380223 - RNA, 19 nt, Artificial Sequence
  Description of Artificial Sequence: Synthetic oligonucleotide
  Sense Strand Starting at position 782 of SEQ ID NO: 318012
cugagagcagcugacuuaa

SEQ ID NO: 380224 - RNA, 19 nt, Artificial Sequence
  Description of Artificial Sequence: Synthetic oligonucleotide
  Antisense Strand to SEQ ID NO: 380223
uuaagucagcugcucucag

SEQ ID NO: 380225 - RNA, 19 nt, Artificial Sequence
  Description of Artificial Sequence: Synthetic oligonucleotide
  Sense Strand Starting at position 782 of SEQ ID NO: 318042
guacuucucccugggcaga

SEQ ID NO: 380226 - RNA, 19 nt, Artificial Sequence
  Description of Artificial Sequence: Synthetic oligonucleotide
  Antisense Strand to SEQ ID NO: 380225
ucugcccagggagaaguac

SEQ ID NO: 380227 - RNA, 19 nt, Artificial Sequence
  Description of Artificial Sequence: Synthetic oligonucleotide
  Sense Strand Starting at position 782 of SEQ ID NO: 318152
agcaucuuacuaugagcuu

SEQ ID NO: 380228 - RNA, 19 nt, Artificial Sequence
  Description of Artificial Sequence: Synthetic oligonucleotide
  Antisense Strand to SEQ ID NO: 380227
aagcucauaguaagaugcu

SEQ ID NO: 380229 - RNA, 19 nt, Artificial Sequence
  Description of Artificial Sequence: Synthetic oligonucleotide
  Sense Strand Starting at position 782 of SEQ ID NO: 318158
uuacuaugagcuuggcauu

SEQ ID NO: 380230 - RNA, 19 nt, Artificial Sequence
  Description of Artificial Sequence: Synthetic oligonucleotide
  Antisense Strand to SEQ ID NO: 380229
aaugccaagcucauaguaa

SEQ ID NO: 380231 - RNA, 19 nt, Artificial Sequence
  Description of Artificial Sequence: Synthetic oligonucleotide
  Sense Strand Starting at position 782 of SEQ ID NO: 318239
cagagagguuuaguuaaag

SEQ ID NO: 380232 - RNA, 19 nt, Artificial Sequence
  Description of Artificial Sequence: Synthetic oligonucleotide
  Antisense Strand to SEQ ID NO: 380231
cuuuaacuaaaccucucug

SEQ ID NO: 380233 - RNA, 19 nt, Artificial Sequence
  Description of Artificial Sequence: Synthetic oligonucleotide
  Sense Strand Starting at position 782 of SEQ ID NO: 318264
guuaccaagucagucagau

SEQ ID NO: 380234 - RNA, 19 nt, Artificial Sequence
  Description of Artificial Sequence: Synthetic oligonucleotide
  Antisense Strand to SEQ ID NO: 380233
aucugacugacuugguaac

SEQ ID NO: 380235 - RNA, 19 nt, Artificial Sequence
  Description of Artificial Sequence: Synthetic oligonucleotide
  Sense Strand Starting at position 782 of SEQ ID NO: 318276
gucagaucuugggcaaguc

SEQ ID NO: 380236 - RNA, 19 nt, Artificial Sequence
  Description of Artificial Sequence: Synthetic oligonucleotide
  Antisense Strand to SEQ ID NO: 380235
gacuugcccaagaucugac

SEQ ID NO: 380237 - RNA, 19 nt, Artificial Sequence
  Description of Artificial Sequence: Synthetic oligonucleotide
  Sense Strand Starting at position 782 of SEQ ID NO: 318277
ucagaucuugggcaaguca

SEQ ID NO: 380238 - RNA, 19 nt, Artificial Sequence
  Description of Artificial Sequence: Synthetic oligonucleotide
  Antisense Strand to SEQ ID NO: 380237
ugacuugcccaagaucuga

SEQ ID NO: 380239 - RNA, 19 nt, Artificial Sequence
  Description of Artificial Sequence: Synthetic oligonucleotide
  Sense Strand Starting at position 782 of SEQ ID NO: 318504
aaagaaaccugguccuugu

SEQ ID NO: 380240 - RNA, 19 nt, Artificial Sequence
  Description of Artificial Sequence: Synthetic oligonucleotide
  Antisense Strand to SEQ ID NO: 380239
acaaggaccagguuucuuu

SEQ ID NO: 380241 - RNA, 19 nt, Artificial Sequence
  Description of Artificial Sequence: Synthetic oligonucleotide
  Sense Strand Starting at position 782 of SEQ ID NO: 318799
ggcucacucagcugagagu

SEQ ID NO: 380242 - RNA, 19 nt, Artificial Sequence
  Description of Artificial Sequence: Synthetic oligonucleotide
  Antisense Strand to SEQ ID NO: 380241
acucucagcugagugagcc

SEQ ID NO: 380243 - RNA, 19 nt, Artificial Sequence
  Description of Artificial Sequence: Synthetic oligonucleotide
  Sense Strand Starting at position 782 of SEQ ID NO: 318899
ugauucugguguuugagga

SEQ ID NO: 380244 - RNA, 19 nt, Artificial Sequence
  Description of Artificial Sequence: Synthetic oligonucleotide
  Antisense Strand to SEQ ID NO: 380243
uccucaaacaccagaauca

SEQ ID NO: 380245 - RNA, 19 nt, Artificial Sequence
  Description of Artificial Sequence: Synthetic oligonucleotide
  Sense Strand Starting at position 782 of SEQ ID NO: 318900
gauucugguguuugaggau

SEQ ID NO: 380246 - RNA, 19 nt, Artificial Sequence
  Description of Artificial Sequence: Synthetic oligonucleotide
  Antisense Strand to SEQ ID NO: 380245
auccucaaacaccagaauc

SEQ ID NO: 380247 - RNA, 19 nt, Artificial Sequence
  Description of Artificial Sequence: Synthetic oligonucleotide
  Sense Strand Starting at position 782 of SEQ ID NO: 318906
gguguuugaggaugcagaa

SEQ ID NO: 380248 - RNA, 19 nt, Artificial Sequence
  Description of Artificial Sequence: Synthetic oligonucleotide
  Antisense Strand to SEQ ID NO: 380247
uucugcauccucaaacacc

SEQ ID NO: 380249 - RNA, 19 nt, Artificial Sequence
  Description of Artificial Sequence: Synthetic oligonucleotide
  Sense Strand Starting at position 782 of SEQ ID NO: 319032
gccacaugucucugcauuu

SEQ ID NO: 380250 - RNA, 19 nt, Artificial Sequence
  Description of Artificial Sequence: Synthetic oligonucleotide
  Antisense Strand to SEQ ID NO: 380249
aaaugcagagacauguggc

SEQ ID NO: 380251 - RNA, 19 nt, Artificial Sequence
  Description of Artificial Sequence: Synthetic oligonucleotide
  Sense Strand Starting at position 782 of SEQ ID NO: 319044
ugcauuugucucuggacgu

SEQ ID NO: 380252 - RNA, 19 nt, Artificial Sequence
  Description of Artificial Sequence: Synthetic oligonucleotide
  Antisense Strand to SEQ ID NO: 380251
acguccagagacaaaugca

SEQ ID NO: 380253 - RNA, 19 nt, Artificial Sequence
  Description of Artificial Sequence: Synthetic oligonucleotide
  Sense Strand Starting at position 783 of SEQ ID NO: 315711
ggguguuuccuguaacaac

SEQ ID NO: 380254 - RNA, 19 nt, Artificial Sequence
  Description of Artificial Sequence: Synthetic oligonucleotide
  Antisense Strand to SEQ ID NO: 380253
guuguuacaggaaacaccc

SEQ ID NO: 380255 - RNA, 19 nt, Artificial Sequence
  Description of Artificial Sequence: Synthetic oligonucleotide
  Sense Strand Starting at position 783 of SEQ ID NO: 315728
acgcaaaugucuccagaaa

SEQ ID NO: 380256 - RNA, 19 nt, Artificial Sequence
  Description of Artificial Sequence: Synthetic oligonucleotide
  Antisense Strand to SEQ ID NO: 380255
uuucuggagacauuugcgu

SEQ ID NO: 380257 - RNA, 19 nt, Artificial Sequence
  Description of Artificial Sequence: Synthetic oligonucleotide
  Sense Strand Starting at position 783 of SEQ ID NO: 315787
uuggcucaggguuaacuaa

SEQ ID NO: 380258 - RNA, 19 nt, Artificial Sequence
  Description of Artificial Sequence: Synthetic oligonucleotide
  Antisense Strand to SEQ ID NO: 380257
uuaguuaacccugagccaa

SEQ ID NO: 380259 - RNA, 19 nt, Artificial Sequence
  Description of Artificial Sequence: Synthetic oligonucleotide
  Sense Strand Starting at position 783 of SEQ ID NO: 315820
ugucccauuccuugaucua

SEQ ID NO: 380260 - RNA, 19 nt, Artificial Sequence
  Description of Artificial Sequence: Synthetic oligonucleotide
  Antisense Strand to SEQ ID NO: 380259
uagaucaaggaaugggaca

SEQ ID NO: 380261 - RNA, 19 nt, Artificial Sequence
  Description of Artificial Sequence: Synthetic oligonucleotide
  Sense Strand Starting at position 783 of SEQ ID NO: 315821
gucccauuccuugaucuau

SEQ ID NO: 380262 - RNA, 19 nt, Artificial Sequence
  Description of Artificial Sequence: Synthetic oligonucleotide
  Antisense Strand to SEQ ID NO: 380261
auagaucaaggaaugggac

SEQ ID NO: 380263 - RNA, 19 nt, Artificial Sequence
  Description of Artificial Sequence: Synthetic oligonucleotide
  Sense Strand Starting at position 783 of SEQ ID NO: 315882
ccugcuaaauaguuauaga

SEQ ID NO: 380264 - RNA, 19 nt, Artificial Sequence
  Description of Artificial Sequence: Synthetic oligonucleotide
  Antisense Strand to SEQ ID NO: 380263
ucuauaacuauuuagcagg

SEQ ID NO: 380265 - RNA, 19 nt, Artificial Sequence
  Description of Artificial Sequence: Synthetic oligonucleotide
  Sense Strand Starting at position 783 of SEQ ID NO: 315967
cuguuaucagaacagcaga

SEQ ID NO: 380266 - RNA, 19 nt, Artificial Sequence
  Description of Artificial Sequence: Synthetic oligonucleotide
  Antisense Strand to SEQ ID NO: 380265
ucugcuguucugauaacag

SEQ ID NO: 380267 - RNA, 19 nt, Artificial Sequence
  Description of Artificial Sequence: Synthetic oligonucleotide
  Sense Strand Starting at position 783 of SEQ ID NO: 316008
uccauuucccagcguuaag

SEQ ID NO: 380268 - RNA, 19 nt, Artificial Sequence
  Description of Artificial Sequence: Synthetic oligonucleotide
  Antisense Strand to SEQ ID NO: 380267
cuuaacgcugggaaaugga

SEQ ID NO: 380269 - RNA, 19 nt, Artificial Sequence
  Description of Artificial Sequence: Synthetic oligonucleotide
  Sense Strand Starting at position 783 of SEQ ID NO: 316442
uccaucucaucuguaaagu

SEQ ID NO: 380270 - RNA, 19 nt, Artificial Sequence
  Description of Artificial Sequence: Synthetic oligonucleotide
  Antisense Strand to SEQ ID NO: 380269
acuuuacagaugagaugga

SEQ ID NO: 380271 - RNA, 19 nt, Artificial Sequence
  Description of Artificial Sequence: Synthetic oligonucleotide
  Sense Strand Starting at position 783 of SEQ ID NO: 316443
ccaucucaucuguaaagug

SEQ ID NO: 380272 - RNA, 19 nt, Artificial Sequence
  Description of Artificial Sequence: Synthetic oligonucleotide
  Antisense Strand to SEQ ID NO: 380271
cacuuuacagaugagaugg

SEQ ID NO: 380273 - RNA, 19 nt, Artificial Sequence
  Description of Artificial Sequence: Synthetic oligonucleotide
  Sense Strand Starting at position 783 of SEQ ID NO: 316607
aacaucauugugugaggua

SEQ ID NO: 380274 - RNA, 19 nt, Artificial Sequence
  Description of Artificial Sequence: Synthetic oligonucleotide
  Antisense Strand to SEQ ID NO: 380273
uaccucacacaaugauguu

SEQ ID NO: 380275 - RNA, 19 nt, Artificial Sequence
  Description of Artificial Sequence: Synthetic oligonucleotide
  Sense Strand Starting at position 783 of SEQ ID NO: 316679
gcacaaagucacugaacaa

SEQ ID NO: 380276 - RNA, 19 nt, Artificial Sequence
  Description of Artificial Sequence: Synthetic oligonucleotide
  Antisense Strand to SEQ ID NO: 380275
uuguucagugacuuugugc

SEQ ID NO: 380277 - RNA, 19 nt, Artificial Sequence
  Description of Artificial Sequence: Synthetic oligonucleotide
  Sense Strand Starting at position 783 of SEQ ID NO: 316849
gcccacaccguggagaaau

SEQ ID NO: 380278 - RNA, 19 nt, Artificial Sequence
  Description of Artificial Sequence: Synthetic oligonucleotide
  Antisense Strand to SEQ ID NO: 380277
auuucuccacggugugggc

SEQ ID NO: 380279 - RNA, 19 nt, Artificial Sequence
  Description of Artificial Sequence: Synthetic oligonucleotide
  Sense Strand Starting at position 783 of SEQ ID NO: 317517
ugaacuucuagcugguuga

SEQ ID NO: 380280 - RNA, 19 nt, Artificial Sequence
  Description of Artificial Sequence: Synthetic oligonucleotide
  Antisense Strand to SEQ ID NO: 380279
ucaaccagcuagaaguuca

SEQ ID NO: 380281 - RNA, 19 nt, Artificial Sequence
  Description of Artificial Sequence: Synthetic oligonucleotide
  Sense Strand Starting at position 783 of SEQ ID NO: 317518
gaacuucuagcugguugaa

SEQ ID NO: 380282 - RNA, 19 nt, Artificial Sequence
  Description of Artificial Sequence: Synthetic oligonucleotide
  Antisense Strand to SEQ ID NO: 380281
uucaaccagcuagaaguuc

SEQ ID NO: 380283 - RNA, 19 nt, Artificial Sequence
  Description of Artificial Sequence: Synthetic oligonucleotide
  Sense Strand Starting at position 783 of SEQ ID NO: 317611
gaaugacccugguugguuu

SEQ ID NO: 380284 - RNA, 19 nt, Artificial Sequence
  Description of Artificial Sequence: Synthetic oligonucleotide
  Antisense Strand to SEQ ID NO: 380283
aaaccaaccagggucauuc

SEQ ID NO: 380285 - RNA, 19 nt, Artificial Sequence
  Description of Artificial Sequence: Synthetic oligonucleotide
  Sense Strand Starting at position 783 of SEQ ID NO: 317632
gcacgcgagacgucuguaa

SEQ ID NO: 380286 - RNA, 19 nt, Artificial Sequence
  Description of Artificial Sequence: Synthetic oligonucleotide
  Antisense Strand to SEQ ID NO: 380285
uuacagacgucucgcgugc

SEQ ID NO: 380287 - RNA, 19 nt, Artificial Sequence
  Description of Artificial Sequence: Synthetic oligonucleotide
  Sense Strand Starting at position 783 of SEQ ID NO: 317714
acaagucaguccucgaaua

SEQ ID NO: 380288 - RNA, 19 nt, Artificial Sequence
  Description of Artificial Sequence: Synthetic oligonucleotide
  Antisense Strand to SEQ ID NO: 380287
uauucgaggacugacuugu

SEQ ID NO: 380289 - RNA, 19 nt, Artificial Sequence
  Description of Artificial Sequence: Synthetic oligonucleotide
  Sense Strand Starting at position 783 of SEQ ID NO: 317716
aagucaguccucgaauaca

SEQ ID NO: 380290 - RNA, 19 nt, Artificial Sequence
  Description of Artificial Sequence: Synthetic oligonucleotide
  Antisense Strand to SEQ ID NO: 380289
uguauucgaggacugacuu

SEQ ID NO: 380291 - RNA, 19 nt, Artificial Sequence
  Description of Artificial Sequence: Synthetic oligonucleotide
  Sense Strand Starting at position 783 of SEQ ID NO: 317724
ccucgaauacauugucauc

SEQ ID NO: 380292 - RNA, 19 nt, Artificial Sequence
  Description of Artificial Sequence: Synthetic oligonucleotide
  Antisense Strand to SEQ ID NO: 380291
gaugacaauguauucgagg

SEQ ID NO: 380293 - RNA, 19 nt, Artificial Sequence
  Description of Artificial Sequence: Synthetic oligonucleotide
  Sense Strand Starting at position 783 of SEQ ID NO: 318176
ccuugucagacuuguggaa

SEQ ID NO: 380294 - RNA, 19 nt, Artificial Sequence
  Description of Artificial Sequence: Synthetic oligonucleotide
  Antisense Strand to SEQ ID NO: 380293
uuccacaagucugacaagg

SEQ ID NO: 380295 - RNA, 19 nt, Artificial Sequence
  Description of Artificial Sequence: Synthetic oligonucleotide
  Sense Strand Starting at position 783 of SEQ ID NO: 318247
gaaacagaucuugguuugu

SEQ ID NO: 380296 - RNA, 19 nt, Artificial Sequence
  Description of Artificial Sequence: Synthetic oligonucleotide
  Antisense Strand to SEQ ID NO: 380295
acaaaccaagaucuguuuc

SEQ ID NO: 380297 - RNA, 19 nt, Artificial Sequence
  Description of Artificial Sequence: Synthetic oligonucleotide
  Sense Strand Starting at position 783 of SEQ ID NO: 318249
aacagaucuugguuuguaa

SEQ ID NO: 380298 - RNA, 19 nt, Artificial Sequence
  Description of Artificial Sequence: Synthetic oligonucleotide
  Antisense Strand to SEQ ID NO: 380297
uuacaaaccaagaucuguu

SEQ ID NO: 380299 - RNA, 19 nt, Artificial Sequence
  Description of Artificial Sequence: Synthetic oligonucleotide
  Sense Strand Starting at position 783 of SEQ ID NO: 318414
gaaccaucagaauguuuga

SEQ ID NO: 380300 - RNA, 19 nt, Artificial Sequence
  Description of Artificial Sequence: Synthetic oligonucleotide
  Antisense Strand to SEQ ID NO: 380299
ucaaacauucugaugguuc

SEQ ID NO: 380301 - RNA, 19 nt, Artificial Sequence
  Description of Artificial Sequence: Synthetic oligonucleotide
  Sense Strand Starting at position 783 of SEQ ID NO: 318417
ccaucagaauguuugacuu

SEQ ID NO: 380302 - RNA, 19 nt, Artificial Sequence
  Description of Artificial Sequence: Synthetic oligonucleotide
  Antisense Strand to SEQ ID NO: 380301
aagucaaacauucugaugg

SEQ ID NO: 380303 - RNA, 19 nt, Artificial Sequence
  Description of Artificial Sequence: Synthetic oligonucleotide
  Sense Strand Starting at position 783 of SEQ ID NO: 318611
cuuucugcagcuuaagaga

SEQ ID NO: 380304 - RNA, 19 nt, Artificial Sequence
  Description of Artificial Sequence: Synthetic oligonucleotide
  Antisense Strand to SEQ ID NO: 380303
ucucuuaagcugcagaaag

SEQ ID NO: 380305 - RNA, 19 nt, Artificial Sequence
  Description of Artificial Sequence: Synthetic oligonucleotide
  Sense Strand Starting at position 783 of SEQ ID NO: 318642
ggcuuuguagcaggaagau

SEQ ID NO: 380306 - RNA, 19 nt, Artificial Sequence
  Description of Artificial Sequence: Synthetic oligonucleotide
  Antisense Strand to SEQ ID NO: 380305
aucuuccugcuacaaagcc

SEQ ID NO: 380307 - RNA, 19 nt, Artificial Sequence
  Description of Artificial Sequence: Synthetic oligonucleotide
  Sense Strand Starting at position 783 of SEQ ID NO: 318689
cuuauuaaccuaugagguu

SEQ ID NO: 380308 - RNA, 19 nt, Artificial Sequence
  Description of Artificial Sequence: Synthetic oligonucleotide
  Antisense Strand to SEQ ID NO: 380307
aaccucauagguuaauaag

SEQ ID NO: 380309 - RNA, 19 nt, Artificial Sequence
  Description of Artificial Sequence: Synthetic oligonucleotide
  Sense Strand Starting at position 783 of SEQ ID NO: 318770
uuggacuaacauuguaacu

SEQ ID NO: 380310 - RNA, 19 nt, Artificial Sequence
  Description of Artificial Sequence: Synthetic oligonucleotide
  Antisense Strand to SEQ ID NO: 380309
aguuacaauguuaguccaa

SEQ ID NO: 380311 - RNA, 19 nt, Artificial Sequence
  Description of Artificial Sequence: Synthetic oligonucleotide
  Sense Strand Starting at position 783 of SEQ ID NO: 318797
uccuaaaccuggcuggaaa

SEQ ID NO: 380312 - RNA, 19 nt, Artificial Sequence
  Description of Artificial Sequence: Synthetic oligonucleotide
  Antisense Strand to SEQ ID NO: 380311
uuuccagccagguuuagga

SEQ ID NO: 380313 - RNA, 19 nt, Artificial Sequence
  Description of Artificial Sequence: Synthetic oligonucleotide
  Sense Strand Starting at position 783 of SEQ ID NO: 318798
ccuaaaccuggcuggaaau

SEQ ID NO: 380314 - RNA, 19 nt, Artificial Sequence
  Description of Artificial Sequence: Synthetic oligonucleotide
  Antisense Strand to SEQ ID NO: 380313
auuuccagccagguuuagg

SEQ ID NO: 380315 - RNA, 19 nt, Artificial Sequence
  Description of Artificial Sequence: Synthetic oligonucleotide
  Sense Strand Starting at position 783 of SEQ ID NO: 318804
ccuggcuggaaauguuauu

SEQ ID NO: 380316 - RNA, 19 nt, Artificial Sequence
  Description of Artificial Sequence: Synthetic oligonucleotide
  Antisense Strand to SEQ ID NO: 380315
aauaacauuuccagccagg

SEQ ID NO: 380317 - RNA, 19 nt, Artificial Sequence
  Description of Artificial Sequence: Synthetic oligonucleotide
  Sense Strand Starting at position 783 of SEQ ID NO: 318816
uguuauuugaagugcuugu

SEQ ID NO: 380318 - RNA, 19 nt, Artificial Sequence
  Description of Artificial Sequence: Synthetic oligonucleotide
  Antisense Strand to SEQ ID NO: 380317
acaagcacuucaaauaaca

SEQ ID NO: 380319 - RNA, 19 nt, Artificial Sequence
  Description of Artificial Sequence: Synthetic oligonucleotide
  Sense Strand Starting at position 783 of SEQ ID NO: 318862
agaaguggauucuuacagu

SEQ ID NO: 380320 - RNA, 19 nt, Artificial Sequence
  Description of Artificial Sequence: Synthetic oligonucleotide
  Antisense Strand to SEQ ID NO: 380319
acuguaagaauccacuucu

SEQ ID NO: 380321 - RNA, 19 nt, Artificial Sequence
  Description of Artificial Sequence: Synthetic oligonucleotide
  Sense Strand Starting at position 783 of SEQ ID NO: 318966
auggcauccagguggagau

SEQ ID NO: 380322 - RNA, 19 nt, Artificial Sequence
  Description of Artificial Sequence: Synthetic oligonucleotide
  Antisense Strand to SEQ ID NO: 380321
aucuccaccuggaugccau

SEQ ID NO: 380323 - RNA, 19 nt, Artificial Sequence
  Description of Artificial Sequence: Synthetic oligonucleotide
  Sense Strand Starting at position 783 of SEQ ID NO: 319020
gaagaugucugggcuggaa

SEQ ID NO: 380324 - RNA, 19 nt, Artificial Sequence
  Description of Artificial Sequence: Synthetic oligonucleotide
  Antisense Strand to SEQ ID NO: 380323
uuccagcccagacaucuuc

SEQ ID NO: 380325 - RNA, 19 nt, Artificial Sequence
  Description of Artificial Sequence: Synthetic oligonucleotide
  Sense Strand Starting at position 783 of SEQ ID NO: 319023
gaugucugggcuggaaauu

SEQ ID NO: 380326 - RNA, 19 nt, Artificial Sequence
  Description of Artificial Sequence: Synthetic oligonucleotide
  Antisense Strand to SEQ ID NO: 380325
aauuuccagcccagacauc

SEQ ID NO: 380327 - RNA, 19 nt, Artificial Sequence
  Description of Artificial Sequence: Synthetic oligonucleotide
  Sense Strand Starting at position 783 of SEQ ID NO: 319032
gcuggaaauugacuuggga

SEQ ID NO: 380328 - RNA, 19 nt, Artificial Sequence
  Description of Artificial Sequence: Synthetic oligonucleotide
  Antisense Strand to SEQ ID NO: 380327
ucccaagucaauuuccagc

SEQ ID NO: 380329 - RNA, 19 nt, Artificial Sequence
  Description of Artificial Sequence: Synthetic oligonucleotide
  Sense Strand Starting at position 783 of SEQ ID NO: 319034
uggaaauugacuugggagu

SEQ ID NO: 380330 - RNA, 19 nt, Artificial Sequence
  Description of Artificial Sequence: Synthetic oligonucleotide
  Antisense Strand to SEQ ID NO: 380329
acucccaagucaauuucca

SEQ ID NO: 380331 - RNA, 19 nt, Artificial Sequence
  Description of Artificial Sequence: Synthetic oligonucleotide
  Sense Strand Starting at position 783 of SEQ ID NO: 319071
agaggaagcucugaauuug

SEQ ID NO: 380332 - RNA, 19 nt, Artificial Sequence
  Description of Artificial Sequence: Synthetic oligonucleotide
  Antisense Strand to SEQ ID NO: 380331
caaauucagagcuuccucu

SEQ ID NO: 380333 - RNA, 19 nt, Artificial Sequence
  Description of Artificial Sequence: Synthetic oligonucleotide
  Sense Strand Starting at position 784 of SEQ ID NO: 315245
cugugaauauguuuacuuu

SEQ ID NO: 380334 - RNA, 19 nt, Artificial Sequence
  Description of Artificial Sequence: Synthetic oligonucleotide
  Antisense Strand to SEQ ID NO: 380333
aaaguaaacauauucacag

SEQ ID NO: 380335 - RNA, 19 nt, Artificial Sequence
  Description of Artificial Sequence: Synthetic oligonucleotide
  Sense Strand Starting at position 784 of SEQ ID NO: 315315
cgaagauauuauccugaau

SEQ ID NO: 380336 - RNA, 19 nt, Artificial Sequence
  Description of Artificial Sequence: Synthetic oligonucleotide
  Antisense Strand to SEQ ID NO: 380335
auucaggauaauaucuucg

SEQ ID NO: 380337 - RNA, 19 nt, Artificial Sequence
  Description of Artificial Sequence: Synthetic oligonucleotide
  Sense Strand Starting at position 784 of SEQ ID NO: 315395
gaggacagaagguguaauu

SEQ ID NO: 380338 - RNA, 19 nt, Artificial Sequence
  Description of Artificial Sequence: Synthetic oligonucleotide
  Antisense Strand to SEQ ID NO: 380337
aauuacaccuucuguccuc

SEQ ID NO: 380339 - RNA, 19 nt, Artificial Sequence
  Description of Artificial Sequence: Synthetic oligonucleotide
  Sense Strand Starting at position 784 of SEQ ID NO: 315402
gaagguguaauuggaagau

SEQ ID NO: 380340 - RNA, 19 nt, Artificial Sequence
  Description of Artificial Sequence: Synthetic oligonucleotide
  Antisense Strand to SEQ ID NO: 380339
aucuuccaauuacaccuuc

SEQ ID NO: 380341 - RNA, 19 nt, Artificial Sequence
  Description of Artificial Sequence: Synthetic oligonucleotide
  Sense Strand Starting at position 784 of SEQ ID NO: 315588
acagaccuagucugaugua

SEQ ID NO: 380342 - RNA, 19 nt, Artificial Sequence
  Description of Artificial Sequence: Synthetic oligonucleotide
  Antisense Strand to SEQ ID NO: 380341
uacaucagacuaggucugu

SEQ ID NO: 380343 - RNA, 19 nt, Artificial Sequence
  Description of Artificial Sequence: Synthetic oligonucleotide
  Sense Strand Starting at position 784 of SEQ ID NO: 315639
ccaacaaaguugcugaaau

SEQ ID NO: 380344 - RNA, 19 nt, Artificial Sequence
  Description of Artificial Sequence: Synthetic oligonucleotide
  Antisense Strand to SEQ ID NO: 380343
auuucagcaacuuuguugg

SEQ ID NO: 380345 - RNA, 19 nt, Artificial Sequence
  Description of Artificial Sequence: Synthetic oligonucleotide
  Sense Strand Starting at position 784 of SEQ ID NO: 315650
gcugaaauuuguuacagga

SEQ ID NO: 380346 - RNA, 19 nt, Artificial Sequence
  Description of Artificial Sequence: Synthetic oligonucleotide
  Antisense Strand to SEQ ID NO: 380345
uccuguaacaaauuucagc

SEQ ID NO: 380347 - RNA, 19 nt, Artificial Sequence
  Description of Artificial Sequence: Synthetic oligonucleotide
  Sense Strand Starting at position 784 of SEQ ID NO: 315672
auggaagacuaacacaauu

SEQ ID NO: 380348 - RNA, 19 nt, Artificial Sequence
  Description of Artificial Sequence: Synthetic oligonucleotide
  Antisense Strand to SEQ ID NO: 380347
aauuguguuagucuuccau

SEQ ID NO: 380349 - RNA, 19 nt, Artificial Sequence
  Description of Artificial Sequence: Synthetic oligonucleotide
  Sense Strand Starting at position 784 of SEQ ID NO: 315765
aaauguacgccauaugaag

SEQ ID NO: 380350 - RNA, 19 nt, Artificial Sequence
  Description of Artificial Sequence: Synthetic oligonucleotide
  Antisense Strand to SEQ ID NO: 380349
cuucauauggcguacauuu

SEQ ID NO: 380351 - RNA, 19 nt, Artificial Sequence
  Description of Artificial Sequence: Synthetic oligonucleotide
  Sense Strand Starting at position 784 of SEQ ID NO: 315814
auccaaaguccaugugaga

SEQ ID NO: 380352 - RNA, 19 nt, Artificial Sequence
  Description of Artificial Sequence: Synthetic oligonucleotide
  Antisense Strand to SEQ ID NO: 380351
ucucacauggacuuuggau

SEQ ID NO: 380353 - RNA, 19 nt, Artificial Sequence
  Description of Artificial Sequence: Synthetic oligonucleotide
  Sense Strand Starting at position 784 of SEQ ID NO: 315978
agacuccuauccuugaagu

SEQ ID NO: 380354 - RNA, 19 nt, Artificial Sequence
  Description of Artificial Sequence: Synthetic oligonucleotide
  Antisense Strand to SEQ ID NO: 380353
acuucaaggauaggagucu

SEQ ID NO: 380355 - RNA, 19 nt, Artificial Sequence
  Description of Artificial Sequence: Synthetic oligonucleotide
  Sense Strand Starting at position 784 of SEQ ID NO: 315991
ugaaguccuuucuuaaaug

SEQ ID NO: 380356 - RNA, 19 nt, Artificial Sequence
  Description of Artificial Sequence: Synthetic oligonucleotide
  Antisense Strand to SEQ ID NO: 380355
cauuuaagaaaggacuuca

SEQ ID NO: 380357 - RNA, 19 nt, Artificial Sequence
  Description of Artificial Sequence: Synthetic oligonucleotide
  Sense Strand Starting at position 784 of SEQ ID NO: 316285
aacguaaagcugugauuua

SEQ ID NO: 380358 - RNA, 19 nt, Artificial Sequence
  Description of Artificial Sequence: Synthetic oligonucleotide
  Antisense Strand to SEQ ID NO: 380357
uaaaucacagcuuuacguu

SEQ ID NO: 380359 - RNA, 19 nt, Artificial Sequence
  Description of Artificial Sequence: Synthetic oligonucleotide
  Sense Strand Starting at position 784 of SEQ ID NO: 316348
aaccgcuacgauuaagaga

SEQ ID NO: 380360 - RNA, 19 nt, Artificial Sequence
  Description of Artificial Sequence: Synthetic oligonucleotide
  Antisense Strand to SEQ ID NO: 380359
ucucuuaaucguagcgguu

SEQ ID NO: 380361 - RNA, 19 nt, Artificial Sequence
  Description of Artificial Sequence: Synthetic oligonucleotide
  Sense Strand Starting at position 784 of SEQ ID NO: 316535
cucggcauuucuucucuaa

SEQ ID NO: 380362 - RNA, 19 nt, Artificial Sequence
  Description of Artificial Sequence: Synthetic oligonucleotide
  Antisense Strand to SEQ ID NO: 380361
uuagagaagaaaugccgag

SEQ ID NO: 380363 - RNA, 19 nt, Artificial Sequence
  Description of Artificial Sequence: Synthetic oligonucleotide
  Sense Strand Starting at position 784 of SEQ ID NO: 316569
caaacaggucuuggcaaau

SEQ ID NO: 380364 - RNA, 19 nt, Artificial Sequence
  Description of Artificial Sequence: Synthetic oligonucleotide
  Antisense Strand to SEQ ID NO: 380363
auuugccaagaccuguuug

SEQ ID NO: 380365 - RNA, 19 nt, Artificial Sequence
  Description of Artificial Sequence: Synthetic oligonucleotide
  Sense Strand Starting at position 784 of SEQ ID NO: 316626
uagcaaauuugggacgaaa

SEQ ID NO: 380366 - RNA, 19 nt, Artificial Sequence
  Description of Artificial Sequence: Synthetic oligonucleotide
  Antisense Strand to SEQ ID NO: 380365
uuucgucccaaauuugcua

SEQ ID NO: 380367 - RNA, 19 nt, Artificial Sequence
  Description of Artificial Sequence: Synthetic oligonucleotide
  Sense Strand Starting at position 784 of SEQ ID NO: 316637
ggacgaaauccguaugcag

SEQ ID NO: 380368 - RNA, 19 nt, Artificial Sequence
  Description of Artificial Sequence: Synthetic oligonucleotide
  Antisense Strand to SEQ ID NO: 380367
cugcauacggauuucgucc

SEQ ID NO: 380369 - RNA, 19 nt, Artificial Sequence
  Description of Artificial Sequence: Synthetic oligonucleotide
  Sense Strand Starting at position 784 of SEQ ID NO: 316639
acgaaauccguaugcagaa

SEQ ID NO: 380370 - RNA, 19 nt, Artificial Sequence
  Description of Artificial Sequence: Synthetic oligonucleotide
  Antisense Strand to SEQ ID NO: 380369
uucugcauacggauuucgu

SEQ ID NO: 380371 - RNA, 19 nt, Artificial Sequence
  Description of Artificial Sequence: Synthetic oligonucleotide
  Sense Strand Starting at position 784 of SEQ ID NO: 316640
cgaaauccguaugcagaaa

SEQ ID NO: 380372 - RNA, 19 nt, Artificial Sequence
  Description of Artificial Sequence: Synthetic oligonucleotide
  Antisense Strand to SEQ ID NO: 380371
uuucugcauacggauuucg

SEQ ID NO: 380373 - RNA, 19 nt, Artificial Sequence
  Description of Artificial Sequence: Synthetic oligonucleotide
  Sense Strand Starting at position 784 of SEQ ID NO: 317474
gccagaguuuggucaggau

SEQ ID NO: 380374 - RNA, 19 nt, Artificial Sequence
  Description of Artificial Sequence: Synthetic oligonucleotide
  Antisense Strand to SEQ ID NO: 380373
auccugaccaaacucuggc

SEQ ID NO: 380375 - RNA, 19 nt, Artificial Sequence
  Description of Artificial Sequence: Synthetic oligonucleotide
  Sense Strand Starting at position 784 of SEQ ID NO: 317529
gcggguugagcgaagaugu

SEQ ID NO: 380376 - RNA, 19 nt, Artificial Sequence
  Description of Artificial Sequence: Synthetic oligonucleotide
  Antisense Strand to SEQ ID NO: 380375
acaucuucgcucaacccgc

SEQ ID NO: 380377 - RNA, 19 nt, Artificial Sequence
  Description of Artificial Sequence: Synthetic oligonucleotide
  Sense Strand Starting at position 784 of SEQ ID NO: 317531
ggguugagcgaagauguga

SEQ ID NO: 380378 - RNA, 19 nt, Artificial Sequence
  Description of Artificial Sequence: Synthetic oligonucleotide
  Antisense Strand to SEQ ID NO: 380377
ucacaucuucgcucaaccc

SEQ ID NO: 380379 - RNA, 19 nt, Artificial Sequence
  Description of Artificial Sequence: Synthetic oligonucleotide
  Sense Strand Starting at position 784 of SEQ ID NO: 318344
uagcaacacuggucaguua

SEQ ID NO: 380380 - RNA, 19 nt, Artificial Sequence
  Description of Artificial Sequence: Synthetic oligonucleotide
  Antisense Strand to SEQ ID NO: 380379
uaacugaccaguguugcua

SEQ ID NO: 380381 - RNA, 19 nt, Artificial Sequence
  Description of Artificial Sequence: Synthetic oligonucleotide
  Sense Strand Starting at position 784 of SEQ ID NO: 318392
ugugucaaagguuacaaau

SEQ ID NO: 380382 - RNA, 19 nt, Artificial Sequence
  Description of Artificial Sequence: Synthetic oligonucleotide
  Antisense Strand to SEQ ID NO: 380381
auuuguaaccuuugacaca

SEQ ID NO: 380383 - RNA, 19 nt, Artificial Sequence
  Description of Artificial Sequence: Synthetic oligonucleotide
  Sense Strand Starting at position 784 of SEQ ID NO: 318517
agcauuaacuuacuguuga

SEQ ID NO: 380384 - RNA, 19 nt, Artificial Sequence
  Description of Artificial Sequence: Synthetic oligonucleotide
  Antisense Strand to SEQ ID NO: 380383
ucaacaguaaguuaaugcu

SEQ ID NO: 380385 - RNA, 19 nt, Artificial Sequence
  Description of Artificial Sequence: Synthetic oligonucleotide
  Sense Strand Starting at position 784 of SEQ ID NO: 318545
gguggaguauuagugacaa

SEQ ID NO: 380386 - RNA, 19 nt, Artificial Sequence
  Description of Artificial Sequence: Synthetic oligonucleotide
  Antisense Strand to SEQ ID NO: 380385
uugucacuaauacuccacc

SEQ ID NO: 380387 - RNA, 19 nt, Artificial Sequence
  Description of Artificial Sequence: Synthetic oligonucleotide
  Sense Strand Starting at position 784 of SEQ ID NO: 318776
uugaguagcaguuauauug

SEQ ID NO: 380388 - RNA, 19 nt, Artificial Sequence
  Description of Artificial Sequence: Synthetic oligonucleotide
  Antisense Strand to SEQ ID NO: 380387
caauauaacugcuacucaa

SEQ ID NO: 380389 - RNA, 19 nt, Artificial Sequence
  Description of Artificial Sequence: Synthetic oligonucleotide
  Sense Strand Starting at position 784 of SEQ ID NO: 318838
ucugauuguacuuagguga

SEQ ID NO: 380390 - RNA, 19 nt, Artificial Sequence
  Description of Artificial Sequence: Synthetic oligonucleotide
  Antisense Strand to SEQ ID NO: 380389
ucaccuaaguacaaucaga

SEQ ID NO: 380391 - RNA, 19 nt, Artificial Sequence
  Description of Artificial Sequence: Synthetic oligonucleotide
  Sense Strand Starting at position 784 of SEQ ID NO: 318889
uuuacuaaucuuggugaag

SEQ ID NO: 380392 - RNA, 19 nt, Artificial Sequence
  Description of Artificial Sequence: Synthetic oligonucleotide
  Antisense Strand to SEQ ID NO: 380391
cuucaccaagauuaguaaa

SEQ ID NO: 380393 - RNA, 19 nt, Artificial Sequence
  Description of Artificial Sequence: Synthetic oligonucleotide
  Sense Strand Starting at position 784 of SEQ ID NO: 318890
uuacuaaucuuggugaaga

SEQ ID NO: 380394 - RNA, 19 nt, Artificial Sequence
  Description of Artificial Sequence: Synthetic oligonucleotide
  Antisense Strand to SEQ ID NO: 380393
ucuucaccaagauuaguaa

SEQ ID NO: 380395 - RNA, 19 nt, Artificial Sequence
  Description of Artificial Sequence: Synthetic oligonucleotide
  Sense Strand Starting at position 784 of SEQ ID NO: 318905
aagaguaauugcuugaaag

SEQ ID NO: 380396 - RNA, 19 nt, Artificial Sequence
  Description of Artificial Sequence: Synthetic oligonucleotide
  Antisense Strand to SEQ ID NO: 380395
cuuucaagcaauuacucuu

SEQ ID NO: 380397 - RNA, 19 nt, Artificial Sequence
  Description of Artificial Sequence: Synthetic oligonucleotide
  Sense Strand Starting at position 784 of SEQ ID NO: 318906
agaguaauugcuugaaaga

SEQ ID NO: 380398 - RNA, 19 nt, Artificial Sequence
  Description of Artificial Sequence: Synthetic oligonucleotide
  Antisense Strand to SEQ ID NO: 380397
ucuuucaagcaauuacucu

SEQ ID NO: 380399 - RNA, 19 nt, Artificial Sequence
  Description of Artificial Sequence: Synthetic oligonucleotide
  Sense Strand Starting at position 784 of SEQ ID NO: 318917
uugaaagacuugucuuugu

SEQ ID NO: 380400 - RNA, 19 nt, Artificial Sequence
  Description of Artificial Sequence: Synthetic oligonucleotide
  Antisense Strand to SEQ ID NO: 380399
acaaagacaagucuuucaa

SEQ ID NO: 380401 - RNA, 19 nt, Artificial Sequence
  Description of Artificial Sequence: Synthetic oligonucleotide
  Sense Strand Starting at position 784 of SEQ ID NO: 318922
agacuugucuuuguuacaa

SEQ ID NO: 380402 - RNA, 19 nt, Artificial Sequence
  Description of Artificial Sequence: Synthetic oligonucleotide
  Antisense Strand to SEQ ID NO: 380401
uuguaacaaagacaagucu

SEQ ID NO: 380403 - RNA, 19 nt, Artificial Sequence
  Description of Artificial Sequence: Synthetic oligonucleotide
  Sense Strand Starting at position 784 of SEQ ID NO: 318946
uguguauauacuggaagua

SEQ ID NO: 380404 - RNA, 19 nt, Artificial Sequence
  Description of Artificial Sequence: Synthetic oligonucleotide
  Antisense Strand to SEQ ID NO: 380403
uacuuccaguauauacaca

SEQ ID NO: 380405 - RNA, 19 nt, Artificial Sequence
  Description of Artificial Sequence: Synthetic oligonucleotide
  Sense Strand Starting at position 784 of SEQ ID NO: 318955
acuggaaguacuuguggaa

SEQ ID NO: 380406 - RNA, 19 nt, Artificial Sequence
  Description of Artificial Sequence: Synthetic oligonucleotide
  Antisense Strand to SEQ ID NO: 380405
uuccacaaguacuuccagu

SEQ ID NO: 380407 - RNA, 19 nt, Artificial Sequence
  Description of Artificial Sequence: Synthetic oligonucleotide
  Sense Strand Starting at position 784 of SEQ ID NO: 318967
uguggaaccuaagcuuuaa

SEQ ID NO: 380408 - RNA, 19 nt, Artificial Sequence
  Description of Artificial Sequence: Synthetic oligonucleotide
  Antisense Strand to SEQ ID NO: 380407
uuaaagcuuagguuccaca

SEQ ID NO: 380409 - RNA, 19 nt, Artificial Sequence
  Description of Artificial Sequence: Synthetic oligonucleotide
  Sense Strand Starting at position 784 of SEQ ID NO: 318979
gcuuuaaagcggcaagaau

SEQ ID NO: 380410 - RNA, 19 nt, Artificial Sequence
  Description of Artificial Sequence: Synthetic oligonucleotide
  Antisense Strand to SEQ ID NO: 380409
auucuugccgcuuuaaagc

SEQ ID NO: 380411 - RNA, 19 nt, Artificial Sequence
  Description of Artificial Sequence: Synthetic oligonucleotide
  Sense Strand Starting at position 784 of SEQ ID NO: 319146
ccuagucaggaauggagua

SEQ ID NO: 380412 - RNA, 19 nt, Artificial Sequence
  Description of Artificial Sequence: Synthetic oligonucleotide
  Antisense Strand to SEQ ID NO: 380411
uacuccauuccugacuagg

SEQ ID NO: 380413 - RNA, 19 nt, Artificial Sequence
  Description of Artificial Sequence: Synthetic oligonucleotide
  Sense Strand Starting at position 785 of SEQ ID NO: 315454
aguacaguccuccauuguu

SEQ ID NO: 380414 - RNA, 19 nt, Artificial Sequence
  Description of Artificial Sequence: Synthetic oligonucleotide
  Antisense Strand to SEQ ID NO: 380413
aacaauggaggacuguacu

SEQ ID NO: 380415 - RNA, 19 nt, Artificial Sequence
  Description of Artificial Sequence: Synthetic oligonucleotide
  Sense Strand Starting at position 785 of SEQ ID NO: 315457
acaguccuccauuguuuaa

SEQ ID NO: 380416 - RNA, 19 nt, Artificial Sequence
  Description of Artificial Sequence: Synthetic oligonucleotide
  Antisense Strand to SEQ ID NO: 380415
uuaaacaauggaggacugu

SEQ ID NO: 380417 - RNA, 19 nt, Artificial Sequence
  Description of Artificial Sequence: Synthetic oligonucleotide
  Sense Strand Starting at position 785 of SEQ ID NO: 315459
aguccuccauuguuuaaua

SEQ ID NO: 380418 - RNA, 19 nt, Artificial Sequence
  Description of Artificial Sequence: Synthetic oligonucleotide
  Antisense Strand to SEQ ID NO: 380417
uauuaaacaauggaggacu

SEQ ID NO: 380419 - RNA, 19 nt, Artificial Sequence
  Description of Artificial Sequence: Synthetic oligonucleotide
  Sense Strand Starting at position 785 of SEQ ID NO: 315460
guccuccauuguuuaauaa

SEQ ID NO: 380420 - RNA, 19 nt, Artificial Sequence
  Description of Artificial Sequence: Synthetic oligonucleotide
  Antisense Strand to SEQ ID NO: 380419
uuauuaaacaauggaggac

SEQ ID NO: 380421 - RNA, 19 nt, Artificial Sequence
  Description of Artificial Sequence: Synthetic oligonucleotide
  Sense Strand Starting at position 785 of SEQ ID NO: 315470
guuuaauaaccaggacgga

SEQ ID NO: 380422 - RNA, 19 nt, Artificial Sequence
  Description of Artificial Sequence: Synthetic oligonucleotide
  Antisense Strand to SEQ ID NO: 380421
uccguccugguuauuaaac

SEQ ID NO: 380423 - RNA, 19 nt, Artificial Sequence
  Description of Artificial Sequence: Synthetic oligonucleotide
  Sense Strand Starting at position 785 of SEQ ID NO: 315888
ggccuugucugaccaacuu

SEQ ID NO: 380424 - RNA, 19 nt, Artificial Sequence
  Description of Artificial Sequence: Synthetic oligonucleotide
  Antisense Strand to SEQ ID NO: 380423
aaguuggucagacaaggcc

SEQ ID NO: 380425 - RNA, 19 nt, Artificial Sequence
  Description of Artificial Sequence: Synthetic oligonucleotide
  Sense Strand Starting at position 785 of SEQ ID NO: 315924
acuacaagucacuguuauu

SEQ ID NO: 380426 - RNA, 19 nt, Artificial Sequence
  Description of Artificial Sequence: Synthetic oligonucleotide
  Antisense Strand to SEQ ID NO: 380425
aauaacagugacuuguagu

SEQ ID NO: 380427 - RNA, 19 nt, Artificial Sequence
  Description of Artificial Sequence: Synthetic oligonucleotide
  Sense Strand Starting at position 785 of SEQ ID NO: 316168
cgcucugcuacuuagaaug

SEQ ID NO: 380428 - RNA, 19 nt, Artificial Sequence
  Description of Artificial Sequence: Synthetic oligonucleotide
  Antisense Strand to SEQ ID NO: 380427
cauucuaaguagcagagcg

SEQ ID NO: 380429 - RNA, 19 nt, Artificial Sequence
  Description of Artificial Sequence: Synthetic oligonucleotide
  Sense Strand Starting at position 785 of SEQ ID NO: 316173
ugcuacuuagaaugaaaua

SEQ ID NO: 380430 - RNA, 19 nt, Artificial Sequence
  Description of Artificial Sequence: Synthetic oligonucleotide
  Antisense Strand to SEQ ID NO: 380429
uauuucauucuaaguagca

SEQ ID NO: 380431 - RNA, 19 nt, Artificial Sequence
  Description of Artificial Sequence: Synthetic oligonucleotide
  Sense Strand Starting at position 785 of SEQ ID NO: 316185
ugaaauaacuaugcuuuag

SEQ ID NO: 380432 - RNA, 19 nt, Artificial Sequence
  Description of Artificial Sequence: Synthetic oligonucleotide
  Antisense Strand to SEQ ID NO: 380431
cuaaagcauaguuauuuca

SEQ ID NO: 380433 - RNA, 19 nt, Artificial Sequence
  Description of Artificial Sequence: Synthetic oligonucleotide
  Sense Strand Starting at position 785 of SEQ ID NO: 316194
uaugcuuuagaaggaaaug

SEQ ID NO: 380434 - RNA, 19 nt, Artificial Sequence
  Description of Artificial Sequence: Synthetic oligonucleotide
  Antisense Strand to SEQ ID NO: 380433
cauuuccuucuaaagcaua

SEQ ID NO: 380435 - RNA, 19 nt, Artificial Sequence
  Description of Artificial Sequence: Synthetic oligonucleotide
  Sense Strand Starting at position 785 of SEQ ID NO: 316232
acuaacaaaugucuggauu

SEQ ID NO: 380436 - RNA, 19 nt, Artificial Sequence
  Description of Artificial Sequence: Synthetic oligonucleotide
  Antisense Strand to SEQ ID NO: 380435
aauccagacauuuguuagu

SEQ ID NO: 380437 - RNA, 19 nt, Artificial Sequence
  Description of Artificial Sequence: Synthetic oligonucleotide
  Sense Strand Starting at position 785 of SEQ ID NO: 316233
cuaacaaaugucuggauuc

SEQ ID NO: 380438 - RNA, 19 nt, Artificial Sequence
  Description of Artificial Sequence: Synthetic oligonucleotide
  Antisense Strand to SEQ ID NO: 380437
gaauccagacauuuguuag

SEQ ID NO: 380439 - RNA, 19 nt, Artificial Sequence
  Description of Artificial Sequence: Synthetic oligonucleotide
  Sense Strand Starting at position 785 of SEQ ID NO: 316309
ugcucugguuuaucacaaa

SEQ ID NO: 380440 - RNA, 19 nt, Artificial Sequence
  Description of Artificial Sequence: Synthetic oligonucleotide
  Antisense Strand to SEQ ID NO: 380439
uuugugauaaaccagagca

SEQ ID NO: 380441 - RNA, 19 nt, Artificial Sequence
  Description of Artificial Sequence: Synthetic oligonucleotide
  Sense Strand Starting at position 785 of SEQ ID NO: 316359
acgaaauucuagcuaaaga

SEQ ID NO: 380442 - RNA, 19 nt, Artificial Sequence
  Description of Artificial Sequence: Synthetic oligonucleotide
  Antisense Strand to SEQ ID NO: 380441
ucuuuagcuagaauuucgu

SEQ ID NO: 380443 - RNA, 19 nt, Artificial Sequence
  Description of Artificial Sequence: Synthetic oligonucleotide
  Sense Strand Starting at position 785 of SEQ ID NO: 316408
auauuagugauauaucgug

SEQ ID NO: 380444 - RNA, 19 nt, Artificial Sequence
  Description of Artificial Sequence: Synthetic oligonucleotide
  Antisense Strand to SEQ ID NO: 380443
cacgauauaucacuaauau

SEQ ID NO: 380445 - RNA, 19 nt, Artificial Sequence
  Description of Artificial Sequence: Synthetic oligonucleotide
  Sense Strand Starting at position 785 of SEQ ID NO: 316414
gugauauaucgugauuagg

SEQ ID NO: 380446 - RNA, 19 nt, Artificial Sequence
  Description of Artificial Sequence: Synthetic oligonucleotide
  Antisense Strand to SEQ ID NO: 380445
ccuaaucacgauauaucac

SEQ ID NO: 380447 - RNA, 19 nt, Artificial Sequence
  Description of Artificial Sequence: Synthetic oligonucleotide
  Sense Strand Starting at position 785 of SEQ ID NO: 316416
gauauaucgugauuaggaa

SEQ ID NO: 380448 - RNA, 19 nt, Artificial Sequence
  Description of Artificial Sequence: Synthetic oligonucleotide
  Antisense Strand to SEQ ID NO: 380447
uuccuaaucacgauauauc

SEQ ID NO: 380449 - RNA, 19 nt, Artificial Sequence
  Description of Artificial Sequence: Synthetic oligonucleotide
  Sense Strand Starting at position 785 of SEQ ID NO: 317246
cgcgagagucgggacaaau

SEQ ID NO: 380450 - RNA, 19 nt, Artificial Sequence
  Description of Artificial Sequence: Synthetic oligonucleotide
  Antisense Strand to SEQ ID NO: 380449
auuugucccgacucucgcg

SEQ ID NO: 380451 - RNA, 19 nt, Artificial Sequence
  Description of Artificial Sequence: Synthetic oligonucleotide
  Sense Strand Starting at position 785 of SEQ ID NO: 317257
ggacaaauaccgcgagagu

SEQ ID NO: 380452 - RNA, 19 nt, Artificial Sequence
  Description of Artificial Sequence: Synthetic oligonucleotide
  Antisense Strand to SEQ ID NO: 380451
acucucgcgguauuugucc

SEQ ID NO: 380453 - RNA, 19 nt, Artificial Sequence
  Description of Artificial Sequence: Synthetic oligonucleotide
  Sense Strand Starting at position 785 of SEQ ID NO: 317258
gacaaauaccgcgagagua

SEQ ID NO: 380454 - RNA, 19 nt, Artificial Sequence
  Description of Artificial Sequence: Synthetic oligonucleotide
  Antisense Strand to SEQ ID NO: 380453
uacucucgcgguauuuguc

SEQ ID NO: 380455 - RNA, 19 nt, Artificial Sequence
  Description of Artificial Sequence: Synthetic oligonucleotide
  Sense Strand Starting at position 785 of SEQ ID NO: 317505
uuccgauaccgcgagacuu

SEQ ID NO: 380456 - RNA, 19 nt, Artificial Sequence
  Description of Artificial Sequence: Synthetic oligonucleotide
  Antisense Strand to SEQ ID NO: 380455
aagucucgcgguaucggaa

SEQ ID NO: 380457 - RNA, 19 nt, Artificial Sequence
  Description of Artificial Sequence: Synthetic oligonucleotide
  Sense Strand Starting at position 785 of SEQ ID NO: 317824
agauauauguaugcucuga

SEQ ID NO: 380458 - RNA, 19 nt, Artificial Sequence
  Description of Artificial Sequence: Synthetic oligonucleotide
  Antisense Strand to SEQ ID NO: 380457
ucagagcauacauauaucu

SEQ ID NO: 380459 - RNA, 19 nt, Artificial Sequence
  Description of Artificial Sequence: Synthetic oligonucleotide
  Sense Strand Starting at position 785 of SEQ ID NO: 317826
auauauguaugcucugaau

SEQ ID NO: 380460 - RNA, 19 nt, Artificial Sequence
  Description of Artificial Sequence: Synthetic oligonucleotide
  Antisense Strand to SEQ ID NO: 380459
auucagagcauacauauau

SEQ ID NO: 380461 - RNA, 19 nt, Artificial Sequence
  Description of Artificial Sequence: Synthetic oligonucleotide
  Sense Strand Starting at position 785 of SEQ ID NO: 317828
auauguaugcucugaauga

SEQ ID NO: 380462 - RNA, 19 nt, Artificial Sequence
  Description of Artificial Sequence: Synthetic oligonucleotide
  Antisense Strand to SEQ ID NO: 380461
ucauucagagcauacauau

SEQ ID NO: 380463 - RNA, 19 nt, Artificial Sequence
  Description of Artificial Sequence: Synthetic oligonucleotide
  Sense Strand Starting at position 785 of SEQ ID NO: 317858
uacauaaaugauugcgaag

SEQ ID NO: 380464 - RNA, 19 nt, Artificial Sequence
  Description of Artificial Sequence: Synthetic oligonucleotide
  Antisense Strand to SEQ ID NO: 380463
cuucgcaaucauuuaugua

SEQ ID NO: 380465 - RNA, 19 nt, Artificial Sequence
  Description of Artificial Sequence: Synthetic oligonucleotide
  Sense Strand Starting at position 785 of SEQ ID NO: 317947
uaagucaauuggucaguuu

SEQ ID NO: 380466 - RNA, 19 nt, Artificial Sequence
  Description of Artificial Sequence: Synthetic oligonucleotide
  Antisense Strand to SEQ ID NO: 380465
aaacugaccaauugacuua

SEQ ID NO: 380467 - RNA, 19 nt, Artificial Sequence
  Description of Artificial Sequence: Synthetic oligonucleotide
  Sense Strand Starting at position 785 of SEQ ID NO: 317987
uuuccugugcuaggaaauc

SEQ ID NO: 380468 - RNA, 19 nt, Artificial Sequence
  Description of Artificial Sequence: Synthetic oligonucleotide
  Antisense Strand to SEQ ID NO: 380467
gauuuccuagcacaggaaa

SEQ ID NO: 380469 - RNA, 19 nt, Artificial Sequence
  Description of Artificial Sequence: Synthetic oligonucleotide
  Sense Strand Starting at position 785 of SEQ ID NO: 317996
cuaggaaaucucugccuac

SEQ ID NO: 380470 - RNA, 19 nt, Artificial Sequence
  Description of Artificial Sequence: Synthetic oligonucleotide
  Antisense Strand to SEQ ID NO: 380469
guaggcagagauuuccuag

SEQ ID NO: 380471 - RNA, 19 nt, Artificial Sequence
  Description of Artificial Sequence: Synthetic oligonucleotide
  Sense Strand Starting at position 785 of SEQ ID NO: 318022
ucuugaagauauucugugu

SEQ ID NO: 380472 - RNA, 19 nt, Artificial Sequence
  Description of Artificial Sequence: Synthetic oligonucleotide
  Antisense Strand to SEQ ID NO: 380471
acacagaauaucuucaaga

SEQ ID NO: 380473 - RNA, 19 nt, Artificial Sequence
  Description of Artificial Sequence: Synthetic oligonucleotide
  Sense Strand Starting at position 785 of SEQ ID NO: 318053
uuuacauagucuuuaacgu

SEQ ID NO: 380474 - RNA, 19 nt, Artificial Sequence
  Description of Artificial Sequence: Synthetic oligonucleotide
  Antisense Strand to SEQ ID NO: 380473
acguuaaagacuauguaaa

SEQ ID NO: 380475 - RNA, 19 nt, Artificial Sequence
  Description of Artificial Sequence: Synthetic oligonucleotide
  Sense Strand Starting at position 785 of SEQ ID NO: 318145
gggauauacagucguucca

SEQ ID NO: 380476 - RNA, 19 nt, Artificial Sequence
  Description of Artificial Sequence: Synthetic oligonucleotide
  Antisense Strand to SEQ ID NO: 380475
uggaacgacuguauauccc

SEQ ID NO: 380477 - RNA, 19 nt, Artificial Sequence
  Description of Artificial Sequence: Synthetic oligonucleotide
  Sense Strand Starting at position 785 of SEQ ID NO: 318147
gauauacagucguuccauu

SEQ ID NO: 380478 - RNA, 19 nt, Artificial Sequence
  Description of Artificial Sequence: Synthetic oligonucleotide
  Antisense Strand to SEQ ID NO: 380477
aauggaacgacuguauauc

SEQ ID NO: 380479 - RNA, 19 nt, Artificial Sequence
  Description of Artificial Sequence: Synthetic oligonucleotide
  Sense Strand Starting at position 785 of SEQ ID NO: 318161
ccauuaccguuuguugaaa

SEQ ID NO: 380480 - RNA, 19 nt, Artificial Sequence
  Description of Artificial Sequence: Synthetic oligonucleotide
  Antisense Strand to SEQ ID NO: 380479
uuucaacaaacgguaaugg

SEQ ID NO: 380481 - RNA, 19 nt, Artificial Sequence
  Description of Artificial Sequence: Synthetic oligonucleotide
  Sense Strand Starting at position 785 of SEQ ID NO: 318510
ucgccuugugaccauauau

SEQ ID NO: 380482 - RNA, 19 nt, Artificial Sequence
  Description of Artificial Sequence: Synthetic oligonucleotide
  Antisense Strand to SEQ ID NO: 380481
auauauggucacaaggcga

SEQ ID NO: 380483 - RNA, 19 nt, Artificial Sequence
  Description of Artificial Sequence: Synthetic oligonucleotide
  Sense Strand Starting at position 785 of SEQ ID NO: 318555
uccaaugaucugugucuga

SEQ ID NO: 380484 - RNA, 19 nt, Artificial Sequence
  Description of Artificial Sequence: Synthetic oligonucleotide
  Antisense Strand to SEQ ID NO: 380483
ucagacacagaucauugga

SEQ ID NO: 380485 - RNA, 19 nt, Artificial Sequence
  Description of Artificial Sequence: Synthetic oligonucleotide
  Sense Strand Starting at position 785 of SEQ ID NO: 318558
aaugaucugugucugagua

SEQ ID NO: 380486 - RNA, 19 nt, Artificial Sequence
  Description of Artificial Sequence: Synthetic oligonucleotide
  Antisense Strand to SEQ ID NO: 380485
uacucagacacagaucauu

SEQ ID NO: 380487 - RNA, 19 nt, Artificial Sequence
  Description of Artificial Sequence: Synthetic oligonucleotide
  Sense Strand Starting at position 785 of SEQ ID NO: 318568
gucugaguaccacacuauu

SEQ ID NO: 380488 - RNA, 19 nt, Artificial Sequence
  Description of Artificial Sequence: Synthetic oligonucleotide
  Antisense Strand to SEQ ID NO: 380487
aauagugugguacucagac

SEQ ID NO: 380489 - RNA, 19 nt, Artificial Sequence
  Description of Artificial Sequence: Synthetic oligonucleotide
  Sense Strand Starting at position 785 of SEQ ID NO: 319042
uguauuucacacgguugua

SEQ ID NO: 380490 - RNA, 19 nt, Artificial Sequence
  Description of Artificial Sequence: Synthetic oligonucleotide
  Antisense Strand to SEQ ID NO: 380489
uacaaccgugugaaauaca

SEQ ID NO: 380491 - RNA, 19 nt, Artificial Sequence
  Description of Artificial Sequence: Synthetic oligonucleotide
  Sense Strand Starting at position 785 of SEQ ID NO: 319218
ugucuacucauaugugagu

SEQ ID NO: 380492 - RNA, 19 nt, Artificial Sequence
  Description of Artificial Sequence: Synthetic oligonucleotide
  Antisense Strand to SEQ ID NO: 380491
acucacauaugaguagaca

SEQ ID NO: 380493 - RNA, 19 nt, Artificial Sequence
  Description of Artificial Sequence: Synthetic oligonucleotide
  Sense Strand Starting at position 786 of SEQ ID NO: 315290
ucuacauaaggagguuuaa

SEQ ID NO: 380494 - RNA, 19 nt, Artificial Sequence
  Description of Artificial Sequence: Synthetic oligonucleotide
  Antisense Strand to SEQ ID NO: 380493
uuaaaccuccuuauguaga

SEQ ID NO: 380495 - RNA, 19 nt, Artificial Sequence
  Description of Artificial Sequence: Synthetic oligonucleotide
  Sense Strand Starting at position 786 of SEQ ID NO: 315347
uggacuuuggcauguaaua

SEQ ID NO: 380496 - RNA, 19 nt, Artificial Sequence
  Description of Artificial Sequence: Synthetic oligonucleotide
  Antisense Strand to SEQ ID NO: 380495
uauuacaugccaaagucca

SEQ ID NO: 380497 - RNA, 19 nt, Artificial Sequence
  Description of Artificial Sequence: Synthetic oligonucleotide
  Sense Strand Starting at position 786 of SEQ ID NO: 315573
guggcaaagguauauguua

SEQ ID NO: 380498 - RNA, 19 nt, Artificial Sequence
  Description of Artificial Sequence: Synthetic oligonucleotide
  Antisense Strand to SEQ ID NO: 380497
uaacauauaccuuugccac

SEQ ID NO: 380499 - RNA, 19 nt, Artificial Sequence
  Description of Artificial Sequence: Synthetic oligonucleotide
  Sense Strand Starting at position 786 of SEQ ID NO: 315575
ggcaaagguauauguuaca

SEQ ID NO: 380500 - RNA, 19 nt, Artificial Sequence
  Description of Artificial Sequence: Synthetic oligonucleotide
  Antisense Strand to SEQ ID NO: 380499
uguaacauauaccuuugcc

SEQ ID NO: 380501 - RNA, 19 nt, Artificial Sequence
  Description of Artificial Sequence: Synthetic oligonucleotide
  Sense Strand Starting at position 786 of SEQ ID NO: 315677
ugaaauaacuccuuugugu

SEQ ID NO: 380502 - RNA, 19 nt, Artificial Sequence
  Description of Artificial Sequence: Synthetic oligonucleotide
  Antisense Strand to SEQ ID NO: 380501
acacaaaggaguuauuuca

SEQ ID NO: 380503 - RNA, 19 nt, Artificial Sequence
  Description of Artificial Sequence: Synthetic oligonucleotide
  Sense Strand Starting at position 786 of SEQ ID NO: 315766
agagauacgucacucaaag

SEQ ID NO: 380504 - RNA, 19 nt, Artificial Sequence
  Description of Artificial Sequence: Synthetic oligonucleotide
  Antisense Strand to SEQ ID NO: 380503
cuuugagugacguaucucu

SEQ ID NO: 380505 - RNA, 19 nt, Artificial Sequence
  Description of Artificial Sequence: Synthetic oligonucleotide
  Sense Strand Starting at position 786 of SEQ ID NO: 315793
guauuaauauugucucaca

SEQ ID NO: 380506 - RNA, 19 nt, Artificial Sequence
  Description of Artificial Sequence: Synthetic oligonucleotide
  Antisense Strand to SEQ ID NO: 380505
ugugagacaauauuaauac

SEQ ID NO: 380507 - RNA, 19 nt, Artificial Sequence
  Description of Artificial Sequence: Synthetic oligonucleotide
  Sense Strand Starting at position 786 of SEQ ID NO: 315963
agaucuuggcacuggauaa

SEQ ID NO: 380508 - RNA, 19 nt, Artificial Sequence
  Description of Artificial Sequence: Synthetic oligonucleotide
  Antisense Strand to SEQ ID NO: 380507
uuauccagugccaagaucu

SEQ ID NO: 380509 - RNA, 19 nt, Artificial Sequence
  Description of Artificial Sequence: Synthetic oligonucleotide
  Sense Strand Starting at position 786 of SEQ ID NO: 316019
auuucagaguuggaagaga

SEQ ID NO: 380510 - RNA, 19 nt, Artificial Sequence
  Description of Artificial Sequence: Synthetic oligonucleotide
  Antisense Strand to SEQ ID NO: 380509
ucucuuccaacucugaaau

SEQ ID NO: 380511 - RNA, 19 nt, Artificial Sequence
  Description of Artificial Sequence: Synthetic oligonucleotide
  Sense Strand Starting at position 786 of SEQ ID NO: 316036
gacuuuggagagugaucca

SEQ ID NO: 380512 - RNA, 19 nt, Artificial Sequence
  Description of Artificial Sequence: Synthetic oligonucleotide
  Antisense Strand to SEQ ID NO: 380511
uggaucacucuccaaaguc

SEQ ID NO: 380513 - RNA, 19 nt, Artificial Sequence
  Description of Artificial Sequence: Synthetic oligonucleotide
  Sense Strand Starting at position 786 of SEQ ID NO: 316353
cuaguagaaucugcugaaa

SEQ ID NO: 380514 - RNA, 19 nt, Artificial Sequence
  Description of Artificial Sequence: Synthetic oligonucleotide
  Antisense Strand to SEQ ID NO: 380513
uuucagcagauucuacuag

SEQ ID NO: 380515 - RNA, 19 nt, Artificial Sequence
  Description of Artificial Sequence: Synthetic oligonucleotide
  Sense Strand Starting at position 786 of SEQ ID NO: 316655
ccuuguguucugcuagguu

SEQ ID NO: 380516 - RNA, 19 nt, Artificial Sequence
  Description of Artificial Sequence: Synthetic oligonucleotide
  Antisense Strand to SEQ ID NO: 380515
aaccuagcagaacacaagg

SEQ ID NO: 380517 - RNA, 19 nt, Artificial Sequence
  Description of Artificial Sequence: Synthetic oligonucleotide
  Sense Strand Starting at position 786 of SEQ ID NO: 316670
gguuacaauggcugauaga

SEQ ID NO: 380518 - RNA, 19 nt, Artificial Sequence
  Description of Artificial Sequence: Synthetic oligonucleotide
  Antisense Strand to SEQ ID NO: 380517
ucuaucagccauuguaacc

SEQ ID NO: 380519 - RNA, 19 nt, Artificial Sequence
  Description of Artificial Sequence: Synthetic oligonucleotide
  Sense Strand Starting at position 786 of SEQ ID NO: 316736
acccuuucucagugacauu

SEQ ID NO: 380520 - RNA, 19 nt, Artificial Sequence
  Description of Artificial Sequence: Synthetic oligonucleotide
  Antisense Strand to SEQ ID NO: 380519
aaugucacugagaaagggu

SEQ ID NO: 380521 - RNA, 19 nt, Artificial Sequence
  Description of Artificial Sequence: Synthetic oligonucleotide
  Sense Strand Starting at position 786 of SEQ ID NO: 316805
gcauuaagacccuguaauu

SEQ ID NO: 380522 - RNA, 19 nt, Artificial Sequence
  Description of Artificial Sequence: Synthetic oligonucleotide
  Antisense Strand to SEQ ID NO: 380521
aauuacagggucuuaaugc

SEQ ID NO: 380523 - RNA, 19 nt, Artificial Sequence
  Description of Artificial Sequence: Synthetic oligonucleotide
  Sense Strand Starting at position 786 of SEQ ID NO: 316870
accggaguuugaguauaaa

SEQ ID NO: 380524 - RNA, 19 nt, Artificial Sequence
  Description of Artificial Sequence: Synthetic oligonucleotide
  Antisense Strand to SEQ ID NO: 380523
uuuauacucaaacuccggu

SEQ ID NO: 380525 - RNA, 19 nt, Artificial Sequence
  Description of Artificial Sequence: Synthetic oligonucleotide
  Sense Strand Starting at position 786 of SEQ ID NO: 316931
guaacagauacuggguuaa

SEQ ID NO: 380526 - RNA, 19 nt, Artificial Sequence
  Description of Artificial Sequence: Synthetic oligonucleotide
  Antisense Strand to SEQ ID NO: 380525
uuaacccaguaucuguuac

SEQ ID NO: 380527 - RNA, 19 nt, Artificial Sequence
  Description of Artificial Sequence: Synthetic oligonucleotide
  Sense Strand Starting at position 786 of SEQ ID NO: 316933
aacagauacuggguuaacu

SEQ ID NO: 380528 - RNA, 19 nt, Artificial Sequence
  Description of Artificial Sequence: Synthetic oligonucleotide
  Antisense Strand to SEQ ID NO: 380527
aguuaacccaguaucuguu

SEQ ID NO: 380529 - RNA, 19 nt, Artificial Sequence
  Description of Artificial Sequence: Synthetic oligonucleotide
  Sense Strand Starting at position 786 of SEQ ID NO: 316941
cuggguuaacuauacgaau

SEQ ID NO: 380530 - RNA, 19 nt, Artificial Sequence
  Description of Artificial Sequence: Synthetic oligonucleotide
  Antisense Strand to SEQ ID NO: 380529
auucguauaguuaacccag

SEQ ID NO: 380531 - RNA, 19 nt, Artificial Sequence
  Description of Artificial Sequence: Synthetic oligonucleotide
  Sense Strand Starting at position 786 of SEQ ID NO: 316943
ggguuaacuauacgaauuc

SEQ ID NO: 380532 - RNA, 19 nt, Artificial Sequence
  Description of Artificial Sequence: Synthetic oligonucleotide
  Antisense Strand to SEQ ID NO: 380531
gaauucguauaguuaaccc

SEQ ID NO: 380533 - RNA, 19 nt, Artificial Sequence
  Description of Artificial Sequence: Synthetic oligonucleotide
  Sense Strand Starting at position 786 of SEQ ID NO: 316985
ucacuauggcccuggaaau

SEQ ID NO: 380534 - RNA, 19 nt, Artificial Sequence
  Description of Artificial Sequence: Synthetic oligonucleotide
  Antisense Strand to SEQ ID NO: 380533
auuuccagggccauaguga

SEQ ID NO: 380535 - RNA, 19 nt, Artificial Sequence
  Description of Artificial Sequence: Synthetic oligonucleotide
  Sense Strand Starting at position 786 of SEQ ID NO: 317228
uggagaacgguuuaaaugu

SEQ ID NO: 380536 - RNA, 19 nt, Artificial Sequence
  Description of Artificial Sequence: Synthetic oligonucleotide
  Antisense Strand to SEQ ID NO: 380535
acauuuaaaccguucucca

SEQ ID NO: 380537 - RNA, 19 nt, Artificial Sequence
  Description of Artificial Sequence: Synthetic oligonucleotide
  Sense Strand Starting at position 786 of SEQ ID NO: 317236
gguuuaaauguuuggaaua

SEQ ID NO: 380538 - RNA, 19 nt, Artificial Sequence
  Description of Artificial Sequence: Synthetic oligonucleotide
  Antisense Strand to SEQ ID NO: 380537
uauuccaaacauuuaaacc

SEQ ID NO: 380539 - RNA, 19 nt, Artificial Sequence
  Description of Artificial Sequence: Synthetic oligonucleotide
  Sense Strand Starting at position 786 of SEQ ID NO: 317256
cuucucuucccaggagagu

SEQ ID NO: 380540 - RNA, 19 nt, Artificial Sequence
  Description of Artificial Sequence: Synthetic oligonucleotide
  Antisense Strand to SEQ ID NO: 380539
acucuccugggaagagaag

SEQ ID NO: 380541 - RNA, 19 nt, Artificial Sequence
  Description of Artificial Sequence: Synthetic oligonucleotide
  Sense Strand Starting at position 786 of SEQ ID NO: 317257
uucucuucccaggagaguu

SEQ ID NO: 380542 - RNA, 19 nt, Artificial Sequence
  Description of Artificial Sequence: Synthetic oligonucleotide
  Antisense Strand to SEQ ID NO: 380541
aacucuccugggaagagaa

SEQ ID NO: 380543 - RNA, 19 nt, Artificial Sequence
  Description of Artificial Sequence: Synthetic oligonucleotide
  Sense Strand Starting at position 786 of SEQ ID NO: 317269
gagaguuuauugcccaaua

SEQ ID NO: 380544 - RNA, 19 nt, Artificial Sequence
  Description of Artificial Sequence: Synthetic oligonucleotide
  Antisense Strand to SEQ ID NO: 380543
uauugggcaauaaacucuc

SEQ ID NO: 380545 - RNA, 19 nt, Artificial Sequence
  Description of Artificial Sequence: Synthetic oligonucleotide
  Sense Strand Starting at position 786 of SEQ ID NO: 317270
agaguuuauugcccaauaa

SEQ ID NO: 380546 - RNA, 19 nt, Artificial Sequence
  Description of Artificial Sequence: Synthetic oligonucleotide
  Antisense Strand to SEQ ID NO: 380545
uuauugggcaauaaacucu

SEQ ID NO: 380547 - RNA, 19 nt, Artificial Sequence
  Description of Artificial Sequence: Synthetic oligonucleotide
  Sense Strand Starting at position 786 of SEQ ID NO: 317329
gugacaucuugacuggaaa

SEQ ID NO: 380548 - RNA, 19 nt, Artificial Sequence
  Description of Artificial Sequence: Synthetic oligonucleotide
  Antisense Strand to SEQ ID NO: 380547
uuuccagucaagaugucac

SEQ ID NO: 380549 - RNA, 19 nt, Artificial Sequence
  Description of Artificial Sequence: Synthetic oligonucleotide
  Sense Strand Starting at position 786 of SEQ ID NO: 317558
cuccguauuucgccaggaa

SEQ ID NO: 380550 - RNA, 19 nt, Artificial Sequence
  Description of Artificial Sequence: Synthetic oligonucleotide
  Antisense Strand to SEQ ID NO: 380549
uuccuggcgaaauacggag

SEQ ID NO: 380551 - RNA, 19 nt, Artificial Sequence
  Description of Artificial Sequence: Synthetic oligonucleotide
  Sense Strand Starting at position 786 of SEQ ID NO: 317593
cguaaucuguuccuuauuu

SEQ ID NO: 380552 - RNA, 19 nt, Artificial Sequence
  Description of Artificial Sequence: Synthetic oligonucleotide
  Antisense Strand to SEQ ID NO: 380551
aaauaaggaacagauuacg

SEQ ID NO: 380553 - RNA, 19 nt, Artificial Sequence
  Description of Artificial Sequence: Synthetic oligonucleotide
  Sense Strand Starting at position 786 of SEQ ID NO: 317594
guaaucuguuccuuauuuc

SEQ ID NO: 380554 - RNA, 19 nt, Artificial Sequence
  Description of Artificial Sequence: Synthetic oligonucleotide
  Antisense Strand to SEQ ID NO: 380553
gaaauaaggaacagauuac

SEQ ID NO: 380555 - RNA, 19 nt, Artificial Sequence
  Description of Artificial Sequence: Synthetic oligonucleotide
  Sense Strand Starting at position 786 of SEQ ID NO: 317626
agccgauuuccaugcucuu

SEQ ID NO: 380556 - RNA, 19 nt, Artificial Sequence
  Description of Artificial Sequence: Synthetic oligonucleotide
  Antisense Strand to SEQ ID NO: 380555
aagagcauggaaaucggcu

SEQ ID NO: 380557 - RNA, 19 nt, Artificial Sequence
  Description of Artificial Sequence: Synthetic oligonucleotide
  Sense Strand Starting at position 786 of SEQ ID NO: 317968
cuccgaauugaagggucaa

SEQ ID NO: 380558 - RNA, 19 nt, Artificial Sequence
  Description of Artificial Sequence: Synthetic oligonucleotide
  Antisense Strand to SEQ ID NO: 380557
uugacccuucaauucggag

SEQ ID NO: 380559 - RNA, 19 nt, Artificial Sequence
  Description of Artificial Sequence: Synthetic oligonucleotide
  Sense Strand Starting at position 786 of SEQ ID NO: 318236
agagguuagcggcacagaa

SEQ ID NO: 380560 - RNA, 19 nt, Artificial Sequence
  Description of Artificial Sequence: Synthetic oligonucleotide
  Antisense Strand to SEQ ID NO: 380559
uucugugccgcuaaccucu

SEQ ID NO: 380561 - RNA, 19 nt, Artificial Sequence
  Description of Artificial Sequence: Synthetic oligonucleotide
  Sense Strand Starting at position 786 of SEQ ID NO: 318311
ucccuugaacgggaguuaa

SEQ ID NO: 380562 - RNA, 19 nt, Artificial Sequence
  Description of Artificial Sequence: Synthetic oligonucleotide
  Antisense Strand to SEQ ID NO: 380561
uuaacucccguucaaggga

SEQ ID NO: 380563 - RNA, 19 nt, Artificial Sequence
  Description of Artificial Sequence: Synthetic oligonucleotide
  Sense Strand Starting at position 786 of SEQ ID NO: 318376
agugucauguacuuauuua

SEQ ID NO: 380564 - RNA, 19 nt, Artificial Sequence
  Description of Artificial Sequence: Synthetic oligonucleotide
  Antisense Strand to SEQ ID NO: 380563
uaaauaaguacaugacacu

SEQ ID NO: 380565 - RNA, 19 nt, Artificial Sequence
  Description of Artificial Sequence: Synthetic oligonucleotide
  Sense Strand Starting at position 786 of SEQ ID NO: 318507
guuuguuugcugguuaucu

SEQ ID NO: 380566 - RNA, 19 nt, Artificial Sequence
  Description of Artificial Sequence: Synthetic oligonucleotide
  Antisense Strand to SEQ ID NO: 380565
agauaaccagcaaacaaac

SEQ ID NO: 380567 - RNA, 19 nt, Artificial Sequence
  Description of Artificial Sequence: Synthetic oligonucleotide
  Sense Strand Starting at position 786 of SEQ ID NO: 318750
cagcuacuagccugggaaa

SEQ ID NO: 380568 - RNA, 19 nt, Artificial Sequence
  Description of Artificial Sequence: Synthetic oligonucleotide
  Antisense Strand to SEQ ID NO: 380567
uuucccaggcuaguagcug

SEQ ID NO: 380569 - RNA, 19 nt, Artificial Sequence
  Description of Artificial Sequence: Synthetic oligonucleotide
  Sense Strand Starting at position 786 of SEQ ID NO: 318752
gcuacuagccugggaaaga

SEQ ID NO: 380570 - RNA, 19 nt, Artificial Sequence
  Description of Artificial Sequence: Synthetic oligonucleotide
  Antisense Strand to SEQ ID NO: 380569
ucuuucccaggcuaguagc

SEQ ID NO: 380571 - RNA, 19 nt, Artificial Sequence
  Description of Artificial Sequence: Synthetic oligonucleotide
  Sense Strand Starting at position 786 of SEQ ID NO: 319010
gcaccugaucugcaaccau

SEQ ID NO: 380572 - RNA, 19 nt, Artificial Sequence
  Description of Artificial Sequence: Synthetic oligonucleotide
  Antisense Strand to SEQ ID NO: 380571
augguugcagaucaggugc

SEQ ID NO: 380573 - RNA, 19 nt, Artificial Sequence
  Description of Artificial Sequence: Synthetic oligonucleotide
  Sense Strand Starting at position 787 of SEQ ID NO: 315449
gcugguuguccggagggaa

SEQ ID NO: 380574 - RNA, 19 nt, Artificial Sequence
  Description of Artificial Sequence: Synthetic oligonucleotide
  Antisense Strand to SEQ ID NO: 380573
uucccuccggacaaccagc

SEQ ID NO: 380575 - RNA, 19 nt, Artificial Sequence
  Description of Artificial Sequence: Synthetic oligonucleotide
  Sense Strand Starting at position 787 of SEQ ID NO: 315524
uuagacaagugucuguuaa

SEQ ID NO: 380576 - RNA, 19 nt, Artificial Sequence
  Description of Artificial Sequence: Synthetic oligonucleotide
  Antisense Strand to SEQ ID NO: 380575
uuaacagacacuugucuaa

SEQ ID NO: 380577 - RNA, 19 nt, Artificial Sequence
  Description of Artificial Sequence: Synthetic oligonucleotide
  Sense Strand Starting at position 787 of SEQ ID NO: 315525
uagacaagugucuguuaaa

SEQ ID NO: 380578 - RNA, 19 nt, Artificial Sequence
  Description of Artificial Sequence: Synthetic oligonucleotide
  Antisense Strand to SEQ ID NO: 380577
uuuaacagacacuugucua

SEQ ID NO: 380579 - RNA, 19 nt, Artificial Sequence
  Description of Artificial Sequence: Synthetic oligonucleotide
  Sense Strand Starting at position 787 of SEQ ID NO: 315666
gggccaaauuuccugcuuu

SEQ ID NO: 380580 - RNA, 19 nt, Artificial Sequence
  Description of Artificial Sequence: Synthetic oligonucleotide
  Antisense Strand to SEQ ID NO: 380579
aaagcaggaaauuuggccc

SEQ ID NO: 380581 - RNA, 19 nt, Artificial Sequence
  Description of Artificial Sequence: Synthetic oligonucleotide
  Sense Strand Starting at position 787 of SEQ ID NO: 315738
cuaguuucuccauaguuac

SEQ ID NO: 380582 - RNA, 19 nt, Artificial Sequence
  Description of Artificial Sequence: Synthetic oligonucleotide
  Antisense Strand to SEQ ID NO: 380581
guaacuauggagaaacuag

SEQ ID NO: 380583 - RNA, 19 nt, Artificial Sequence
  Description of Artificial Sequence: Synthetic oligonucleotide
  Sense Strand Starting at position 787 of SEQ ID NO: 315769
agauuagggucauucuaga

SEQ ID NO: 380584 - RNA, 19 nt, Artificial Sequence
  Description of Artificial Sequence: Synthetic oligonucleotide
  Antisense Strand to SEQ ID NO: 380583
ucuagaaugacccuaaucu

SEQ ID NO: 380585 - RNA, 19 nt, Artificial Sequence
  Description of Artificial Sequence: Synthetic oligonucleotide
  Sense Strand Starting at position 787 of SEQ ID NO: 315870
auuccaggauuaucguuua

SEQ ID NO: 380586 - RNA, 19 nt, Artificial Sequence
  Description of Artificial Sequence: Synthetic oligonucleotide
  Antisense Strand to SEQ ID NO: 380585
uaaacgauaauccuggaau

SEQ ID NO: 380587 - RNA, 19 nt, Artificial Sequence
  Description of Artificial Sequence: Synthetic oligonucleotide
  Sense Strand Starting at position 787 of SEQ ID NO: 315898
guaguaaucucuuugaaga

SEQ ID NO: 380588 - RNA, 19 nt, Artificial Sequence
  Description of Artificial Sequence: Synthetic oligonucleotide
  Antisense Strand to SEQ ID NO: 380587
ucuucaaagagauuacuac

SEQ ID NO: 380589 - RNA, 19 nt, Artificial Sequence
  Description of Artificial Sequence: Synthetic oligonucleotide
  Sense Strand Starting at position 787 of SEQ ID NO: 315909
uuugaagagcacuguauca

SEQ ID NO: 380590 - RNA, 19 nt, Artificial Sequence
  Description of Artificial Sequence: Synthetic oligonucleotide
  Antisense Strand to SEQ ID NO: 380589
ugauacagugcucuucaaa

SEQ ID NO: 380591 - RNA, 19 nt, Artificial Sequence
  Description of Artificial Sequence: Synthetic oligonucleotide
  Sense Strand Starting at position 787 of SEQ ID NO: 315911
ugaagagcacuguaucauu

SEQ ID NO: 380592 - RNA, 19 nt, Artificial Sequence
  Description of Artificial Sequence: Synthetic oligonucleotide
  Antisense Strand to SEQ ID NO: 380591
aaugauacagugcucuuca

SEQ ID NO: 380593 - RNA, 19 nt, Artificial Sequence
  Description of Artificial Sequence: Synthetic oligonucleotide
  Sense Strand Starting at position 787 of SEQ ID NO: 316325
accagaaacuaauucgauu

SEQ ID NO: 380594 - RNA, 19 nt, Artificial Sequence
  Description of Artificial Sequence: Synthetic oligonucleotide
  Antisense Strand to SEQ ID NO: 380593
aaucgaauuaguuucuggu

SEQ ID NO: 380595 - RNA, 19 nt, Artificial Sequence
  Description of Artificial Sequence: Synthetic oligonucleotide
  Sense Strand Starting at position 787 of SEQ ID NO: 316413
gcguucuccauagugaguu

SEQ ID NO: 380596 - RNA, 19 nt, Artificial Sequence
  Description of Artificial Sequence: Synthetic oligonucleotide
  Antisense Strand to SEQ ID NO: 380595
aacucacuauggagaacgc

SEQ ID NO: 380597 - RNA, 19 nt, Artificial Sequence
  Description of Artificial Sequence: Synthetic oligonucleotide
  Sense Strand Starting at position 787 of SEQ ID NO: 316587
aagagaauguugggauuua

SEQ ID NO: 380598 - RNA, 19 nt, Artificial Sequence
  Description of Artificial Sequence: Synthetic oligonucleotide
  Antisense Strand to SEQ ID NO: 380597
uaaaucccaacauucucuu

SEQ ID NO: 380599 - RNA, 19 nt, Artificial Sequence
  Description of Artificial Sequence: Synthetic oligonucleotide
  Sense Strand Starting at position 787 of SEQ ID NO: 316588
agagaauguugggauuuaa

SEQ ID NO: 380600 - RNA, 19 nt, Artificial Sequence
  Description of Artificial Sequence: Synthetic oligonucleotide
  Antisense Strand to SEQ ID NO: 380599
uuaaaucccaacauucucu

SEQ ID NO: 380601 - RNA, 19 nt, Artificial Sequence
  Description of Artificial Sequence: Synthetic oligonucleotide
  Sense Strand Starting at position 787 of SEQ ID NO: 317362
ggaaagcucgcggagagaa

SEQ ID NO: 380602 - RNA, 19 nt, Artificial Sequence
  Description of Artificial Sequence: Synthetic oligonucleotide
  Antisense Strand to SEQ ID NO: 380601
uucucuccgcgagcuuucc

SEQ ID NO: 380603 - RNA, 19 nt, Artificial Sequence
  Description of Artificial Sequence: Synthetic oligonucleotide
  Sense Strand Starting at position 787 of SEQ ID NO: 317507
cuugcuucuugauuaaaug

SEQ ID NO: 380604 - RNA, 19 nt, Artificial Sequence
  Description of Artificial Sequence: Synthetic oligonucleotide
  Antisense Strand to SEQ ID NO: 380603
cauuuaaucaagaagcaag

SEQ ID NO: 380605 - RNA, 19 nt, Artificial Sequence
  Description of Artificial Sequence: Synthetic oligonucleotide
  Sense Strand Starting at position 787 of SEQ ID NO: 317508
uugcuucuugauuaaauga

SEQ ID NO: 380606 - RNA, 19 nt, Artificial Sequence
  Description of Artificial Sequence: Synthetic oligonucleotide
  Antisense Strand to SEQ ID NO: 380605
ucauuuaaucaagaagcaa

SEQ ID NO: 380607 - RNA, 19 nt, Artificial Sequence
  Description of Artificial Sequence: Synthetic oligonucleotide
  Sense Strand Starting at position 787 of SEQ ID NO: 317545
aucuguaaacgguaccuua

SEQ ID NO: 380608 - RNA, 19 nt, Artificial Sequence
  Description of Artificial Sequence: Synthetic oligonucleotide
  Antisense Strand to SEQ ID NO: 380607
uaagguaccguuuacagau

SEQ ID NO: 380609 - RNA, 19 nt, Artificial Sequence
  Description of Artificial Sequence: Synthetic oligonucleotide
  Sense Strand Starting at position 787 of SEQ ID NO: 317554
cgguaccuuaugcaaagaa

SEQ ID NO: 380610 - RNA, 19 nt, Artificial Sequence
  Description of Artificial Sequence: Synthetic oligonucleotide
  Antisense Strand to SEQ ID NO: 380609
uucuuugcauaagguaccg

SEQ ID NO: 380611 - RNA, 19 nt, Artificial Sequence
  Description of Artificial Sequence: Synthetic oligonucleotide
  Sense Strand Starting at position 787 of SEQ ID NO: 317640
augcuaacugcucaaauga

SEQ ID NO: 380612 - RNA, 19 nt, Artificial Sequence
  Description of Artificial Sequence: Synthetic oligonucleotide
  Antisense Strand to SEQ ID NO: 380611
ucauuugagcaguuagcau

SEQ ID NO: 380613 - RNA, 19 nt, Artificial Sequence
  Description of Artificial Sequence: Synthetic oligonucleotide
  Sense Strand Starting at position 787 of SEQ ID NO: 317686
gcauaauuaucugugaaga

SEQ ID NO: 380614 - RNA, 19 nt, Artificial Sequence
  Description of Artificial Sequence: Synthetic oligonucleotide
  Antisense Strand to SEQ ID NO: 380613
ucuucacagauaauuaugc

SEQ ID NO: 380615 - RNA, 19 nt, Artificial Sequence
  Description of Artificial Sequence: Synthetic oligonucleotide
  Sense Strand Starting at position 787 of SEQ ID NO: 317697
ugugaagaagucuaugcga

SEQ ID NO: 380616 - RNA, 19 nt, Artificial Sequence
  Description of Artificial Sequence: Synthetic oligonucleotide
  Antisense Strand to SEQ ID NO: 380615
ucgcauagacuucuucaca

SEQ ID NO: 380617 - RNA, 19 nt, Artificial Sequence
  Description of Artificial Sequence: Synthetic oligonucleotide
  Sense Strand Starting at position 787 of SEQ ID NO: 317915
uguagagggugaucagaga

SEQ ID NO: 380618 - RNA, 19 nt, Artificial Sequence
  Description of Artificial Sequence: Synthetic oligonucleotide
  Antisense Strand to SEQ ID NO: 380617
ucucugaucacccucuaca

SEQ ID NO: 380619 - RNA, 19 nt, Artificial Sequence
  Description of Artificial Sequence: Synthetic oligonucleotide
  Sense Strand Starting at position 787 of SEQ ID NO: 317952
ugcccagaauacuuaagua

SEQ ID NO: 380620 - RNA, 19 nt, Artificial Sequence
  Description of Artificial Sequence: Synthetic oligonucleotide
  Antisense Strand to SEQ ID NO: 380619
uacuuaaguauucugggca

SEQ ID NO: 380621 - RNA, 19 nt, Artificial Sequence
  Description of Artificial Sequence: Synthetic oligonucleotide
  Sense Strand Starting at position 787 of SEQ ID NO: 318081
ucagcauuauuuccaguuu

SEQ ID NO: 380622 - RNA, 19 nt, Artificial Sequence
  Description of Artificial Sequence: Synthetic oligonucleotide
  Antisense Strand to SEQ ID NO: 380621
aaacuggaaauaaugcuga

SEQ ID NO: 380623 - RNA, 19 nt, Artificial Sequence
  Description of Artificial Sequence: Synthetic oligonucleotide
  Sense Strand Starting at position 787 of SEQ ID NO: 318331
cuuccaguucuggaagcua

SEQ ID NO: 380624 - RNA, 19 nt, Artificial Sequence
  Description of Artificial Sequence: Synthetic oligonucleotide
  Antisense Strand to SEQ ID NO: 380623
uagcuuccagaacuggaag

SEQ ID NO: 380625 - RNA, 19 nt, Artificial Sequence
  Description of Artificial Sequence: Synthetic oligonucleotide
  Sense Strand Starting at position 787 of SEQ ID NO: 318595
uguaaaguucguuugccau

SEQ ID NO: 380626 - RNA, 19 nt, Artificial Sequence
  Description of Artificial Sequence: Synthetic oligonucleotide
  Antisense Strand to SEQ ID NO: 380625
auggcaaacgaacuuuaca

SEQ ID NO: 380627 - RNA, 19 nt, Artificial Sequence
  Description of Artificial Sequence: Synthetic oligonucleotide
  Sense Strand Starting at position 787 of SEQ ID NO: 318603
ucguuugccauguuaggua

SEQ ID NO: 380628 - RNA, 19 nt, Artificial Sequence
  Description of Artificial Sequence: Synthetic oligonucleotide
  Antisense Strand to SEQ ID NO: 380627
uaccuaacauggcaaacga

SEQ ID NO: 380629 - RNA, 19 nt, Artificial Sequence
  Description of Artificial Sequence: Synthetic oligonucleotide
  Sense Strand Starting at position 787 of SEQ ID NO: 318732
augcuccuucuguauauau

SEQ ID NO: 380630 - RNA, 19 nt, Artificial Sequence
  Description of Artificial Sequence: Synthetic oligonucleotide
  Antisense Strand to SEQ ID NO: 380629
auauauacagaaggagcau

SEQ ID NO: 380631 - RNA, 19 nt, Artificial Sequence
  Description of Artificial Sequence: Synthetic oligonucleotide
  Sense Strand Starting at position 787 of SEQ ID NO: 318765
accuuuauacgagguauau

SEQ ID NO: 380632 - RNA, 19 nt, Artificial Sequence
  Description of Artificial Sequence: Synthetic oligonucleotide
  Antisense Strand to SEQ ID NO: 380631
auauaccucguauaaaggu

SEQ ID NO: 380633 - RNA, 19 nt, Artificial Sequence
  Description of Artificial Sequence: Synthetic oligonucleotide
  Sense Strand Starting at position 787 of SEQ ID NO: 318777
gguauaugccucuauaaua

SEQ ID NO: 380634 - RNA, 19 nt, Artificial Sequence
  Description of Artificial Sequence: Synthetic oligonucleotide
  Antisense Strand to SEQ ID NO: 380633
uauuauagaggcauauacc

SEQ ID NO: 380635 - RNA, 19 nt, Artificial Sequence
  Description of Artificial Sequence: Synthetic oligonucleotide
  Sense Strand Starting at position 787 of SEQ ID NO: 318788
cuauaauagugcuuugaau

SEQ ID NO: 380636 - RNA, 19 nt, Artificial Sequence
  Description of Artificial Sequence: Synthetic oligonucleotide
  Antisense Strand to SEQ ID NO: 380635
auucaaagcacuauuauag

SEQ ID NO: 380637 - RNA, 19 nt, Artificial Sequence
  Description of Artificial Sequence: Synthetic oligonucleotide
  Sense Strand Starting at position 787 of SEQ ID NO: 318790
auaauagugcuuugaauug

SEQ ID NO: 380638 - RNA, 19 nt, Artificial Sequence
  Description of Artificial Sequence: Synthetic oligonucleotide
  Antisense Strand to SEQ ID NO: 380637
caauucaaagcacuauuau

SEQ ID NO: 380639 - RNA, 19 nt, Artificial Sequence
  Description of Artificial Sequence: Synthetic oligonucleotide
  Sense Strand Starting at position 787 of SEQ ID NO: 318795
agugcuuugaauuggauca

SEQ ID NO: 380640 - RNA, 19 nt, Artificial Sequence
  Description of Artificial Sequence: Synthetic oligonucleotide
  Antisense Strand to SEQ ID NO: 380639
ugauccaauucaaagcacu

SEQ ID NO: 380641 - RNA, 19 nt, Artificial Sequence
  Description of Artificial Sequence: Synthetic oligonucleotide
  Sense Strand Starting at position 787 of SEQ ID NO: 319037
ggaacacagcuguaguuaa

SEQ ID NO: 380642 - RNA, 19 nt, Artificial Sequence
  Description of Artificial Sequence: Synthetic oligonucleotide
  Antisense Strand to SEQ ID NO: 380641
uuaacuacagcuguguucc

SEQ ID NO: 380643 - RNA, 19 nt, Artificial Sequence
  Description of Artificial Sequence: Synthetic oligonucleotide
  Sense Strand Starting at position 787 of SEQ ID NO: 319055
agcagcuucugucuauuua

SEQ ID NO: 380644 - RNA, 19 nt, Artificial Sequence
  Description of Artificial Sequence: Synthetic oligonucleotide
  Antisense Strand to SEQ ID NO: 380643
uaaauagacagaagcugcu

SEQ ID NO: 380645 - RNA, 19 nt, Artificial Sequence
  Description of Artificial Sequence: Synthetic oligonucleotide
  Sense Strand Starting at position 787 of SEQ ID NO: 319056
gcagcuucugucuauuuau

SEQ ID NO: 380646 - RNA, 19 nt, Artificial Sequence
  Description of Artificial Sequence: Synthetic oligonucleotide
  Antisense Strand to SEQ ID NO: 380645
auaaauagacagaagcugc

SEQ ID NO: 380647 - RNA, 19 nt, Artificial Sequence
  Description of Artificial Sequence: Synthetic oligonucleotide
  Sense Strand Starting at position 787 of SEQ ID NO: 319059
gcuucugucuauuuauuac

SEQ ID NO: 380648 - RNA, 19 nt, Artificial Sequence
  Description of Artificial Sequence: Synthetic oligonucleotide
  Antisense Strand to SEQ ID NO: 380647
guaauaaauagacagaagc

SEQ ID NO: 380649 - RNA, 19 nt, Artificial Sequence
  Description of Artificial Sequence: Synthetic oligonucleotide
  Sense Strand Starting at position 787 of SEQ ID NO: 319105
auggauacccuuuggguau

SEQ ID NO: 380650 - RNA, 19 nt, Artificial Sequence
  Description of Artificial Sequence: Synthetic oligonucleotide
  Antisense Strand to SEQ ID NO: 380649
auacccaaaggguauccau

SEQ ID NO: 380651 - RNA, 19 nt, Artificial Sequence
  Description of Artificial Sequence: Synthetic oligonucleotide
  Sense Strand Starting at position 787 of SEQ ID NO: 319128
guaagaggguguuuagaac

SEQ ID NO: 380652 - RNA, 19 nt, Artificial Sequence
  Description of Artificial Sequence: Synthetic oligonucleotide
  Antisense Strand to SEQ ID NO: 380651
guucuaaacacccucuuac

SEQ ID NO: 380653 - RNA, 19 nt, Artificial Sequence
  Description of Artificial Sequence: Synthetic oligonucleotide
  Sense Strand Starting at position 788 of SEQ ID NO: 315254
ugaaauccgaguuauacgu

SEQ ID NO: 380654 - RNA, 19 nt, Artificial Sequence
  Description of Artificial Sequence: Synthetic oligonucleotide
  Antisense Strand to SEQ ID NO: 380653
acguauaacucggauuuca

SEQ ID NO: 380655 - RNA, 19 nt, Artificial Sequence
  Description of Artificial Sequence: Synthetic oligonucleotide
  Sense Strand Starting at position 788 of SEQ ID NO: 315260
ccgaguuauacgugagaaa

SEQ ID NO: 380656 - RNA, 19 nt, Artificial Sequence
  Description of Artificial Sequence: Synthetic oligonucleotide
  Antisense Strand to SEQ ID NO: 380655
uuucucacguauaacucgg

SEQ ID NO: 380657 - RNA, 19 nt, Artificial Sequence
  Description of Artificial Sequence: Synthetic oligonucleotide
  Sense Strand Starting at position 788 of SEQ ID NO: 315261
cgaguuauacgugagaaau

SEQ ID NO: 380658 - RNA, 19 nt, Artificial Sequence
  Description of Artificial Sequence: Synthetic oligonucleotide
  Antisense Strand to SEQ ID NO: 380657
auuucucacguauaacucg

SEQ ID NO: 380659 - RNA, 19 nt, Artificial Sequence
  Description of Artificial Sequence: Synthetic oligonucleotide
  Sense Strand Starting at position 788 of SEQ ID NO: 315283
ucaccucugcaggaguaaa

SEQ ID NO: 380660 - RNA, 19 nt, Artificial Sequence
  Description of Artificial Sequence: Synthetic oligonucleotide
  Antisense Strand to SEQ ID NO: 380659
uuuacuccugcagagguga

SEQ ID NO: 380661 - RNA, 19 nt, Artificial Sequence
  Description of Artificial Sequence: Synthetic oligonucleotide
  Sense Strand Starting at position 788 of SEQ ID NO: 315365
cuguaauaucaguacuuga

SEQ ID NO: 380662 - RNA, 19 nt, Artificial Sequence
  Description of Artificial Sequence: Synthetic oligonucleotide
  Antisense Strand to SEQ ID NO: 380661
ucaaguacugauauuacag

SEQ ID NO: 380663 - RNA, 19 nt, Artificial Sequence
  Description of Artificial Sequence: Synthetic oligonucleotide
  Sense Strand Starting at position 788 of SEQ ID NO: 315388
aggaguuugaccugggcaa

SEQ ID NO: 380664 - RNA, 19 nt, Artificial Sequence
  Description of Artificial Sequence: Synthetic oligonucleotide
  Antisense Strand to SEQ ID NO: 380663
uugcccaggucaaacuccu

SEQ ID NO: 380665 - RNA, 19 nt, Artificial Sequence
  Description of Artificial Sequence: Synthetic oligonucleotide
  Sense Strand Starting at position 788 of SEQ ID NO: 315390
gaguuugaccugggcaaca

SEQ ID NO: 380666 - RNA, 19 nt, Artificial Sequence
  Description of Artificial Sequence: Synthetic oligonucleotide
  Antisense Strand to SEQ ID NO: 380665
uguugcccaggucaaacuc

SEQ ID NO: 380667 - RNA, 19 nt, Artificial Sequence
  Description of Artificial Sequence: Synthetic oligonucleotide
  Sense Strand Starting at position 788 of SEQ ID NO: 315589
cauguuaaaggugguauua

SEQ ID NO: 380668 - RNA, 19 nt, Artificial Sequence
  Description of Artificial Sequence: Synthetic oligonucleotide
  Antisense Strand to SEQ ID NO: 380667
uaauaccaccuuuaacaug

SEQ ID NO: 380669 - RNA, 19 nt, Artificial Sequence
  Description of Artificial Sequence: Synthetic oligonucleotide
  Sense Strand Starting at position 788 of SEQ ID NO: 315601
gguauuagaaucuggccca

SEQ ID NO: 380670 - RNA, 19 nt, Artificial Sequence
  Description of Artificial Sequence: Synthetic oligonucleotide
  Antisense Strand to SEQ ID NO: 380669
ugggccagauucuaauacc

SEQ ID NO: 380671 - RNA, 19 nt, Artificial Sequence
  Description of Artificial Sequence: Synthetic oligonucleotide
  Sense Strand Starting at position 788 of SEQ ID NO: 316155
ucucuagccucaucuggaa

SEQ ID NO: 380672 - RNA, 19 nt, Artificial Sequence
  Description of Artificial Sequence: Synthetic oligonucleotide
  Antisense Strand to SEQ ID NO: 380671
uuccagaugaggcuagaga

SEQ ID NO: 380673 - RNA, 19 nt, Artificial Sequence
  Description of Artificial Sequence: Synthetic oligonucleotide
  Sense Strand Starting at position 788 of SEQ ID NO: 316417
ggcucuuaacaguaucuga

SEQ ID NO: 380674 - RNA, 19 nt, Artificial Sequence
  Description of Artificial Sequence: Synthetic oligonucleotide
  Antisense Strand to SEQ ID NO: 380673
ucagauacuguuaagagcc

SEQ ID NO: 380675 - RNA, 19 nt, Artificial Sequence
  Description of Artificial Sequence: Synthetic oligonucleotide
  Sense Strand Starting at position 788 of SEQ ID NO: 316520
aggacaugguuccuuuacu

SEQ ID NO: 380676 - RNA, 19 nt, Artificial Sequence
  Description of Artificial Sequence: Synthetic oligonucleotide
  Antisense Strand to SEQ ID NO: 380675
aguaaaggaaccauguccu

SEQ ID NO: 380677 - RNA, 19 nt, Artificial Sequence
  Description of Artificial Sequence: Synthetic oligonucleotide
  Sense Strand Starting at position 788 of SEQ ID NO: 316521
ggacaugguuccuuuacua

SEQ ID NO: 380678 - RNA, 19 nt, Artificial Sequence
  Description of Artificial Sequence: Synthetic oligonucleotide
  Antisense Strand to SEQ ID NO: 380677
uaguaaaggaaccaugucc

SEQ ID NO: 380679 - RNA, 19 nt, Artificial Sequence
  Description of Artificial Sequence: Synthetic oligonucleotide
  Sense Strand Starting at position 788 of SEQ ID NO: 316560
ucuugacucuugguuuaca

SEQ ID NO: 380680 - RNA, 19 nt, Artificial Sequence
  Description of Artificial Sequence: Synthetic oligonucleotide
  Antisense Strand to SEQ ID NO: 380679
uguaaaccaagagucaaga

SEQ ID NO: 380681 - RNA, 19 nt, Artificial Sequence
  Description of Artificial Sequence: Synthetic oligonucleotide
  Sense Strand Starting at position 788 of SEQ ID NO: 316561
cuugacucuugguuuacaa

SEQ ID NO: 380682 - RNA, 19 nt, Artificial Sequence
  Description of Artificial Sequence: Synthetic oligonucleotide
  Antisense Strand to SEQ ID NO: 380681
uuguaaaccaagagucaag

SEQ ID NO: 380683 - RNA, 19 nt, Artificial Sequence
  Description of Artificial Sequence: Synthetic oligonucleotide
  Sense Strand Starting at position 788 of SEQ ID NO: 316563
ugacucuugguuuacaaca

SEQ ID NO: 380684 - RNA, 19 nt, Artificial Sequence
  Description of Artificial Sequence: Synthetic oligonucleotide
  Antisense Strand to SEQ ID NO: 380683
uguuguaaaccaagaguca

SEQ ID NO: 380685 - RNA, 19 nt, Artificial Sequence
  Description of Artificial Sequence: Synthetic oligonucleotide
  Sense Strand Starting at position 788 of SEQ ID NO: 316603
guuagacuuaaaggugacu

SEQ ID NO: 380686 - RNA, 19 nt, Artificial Sequence
  Description of Artificial Sequence: Synthetic oligonucleotide
  Antisense Strand to SEQ ID NO: 380685
agucaccuuuaagucuaac

SEQ ID NO: 380687 - RNA, 19 nt, Artificial Sequence
  Description of Artificial Sequence: Synthetic oligonucleotide
  Sense Strand Starting at position 788 of SEQ ID NO: 316832
ggagcauuacuugaacucu

SEQ ID NO: 380688 - RNA, 19 nt, Artificial Sequence
  Description of Artificial Sequence: Synthetic oligonucleotide
  Antisense Strand to SEQ ID NO: 380687
agaguucaaguaaugcucc

SEQ ID NO: 380689 - RNA, 19 nt, Artificial Sequence
  Description of Artificial Sequence: Synthetic oligonucleotide
  Sense Strand Starting at position 788 of SEQ ID NO: 317173
cccagauucugggucauuc

SEQ ID NO: 380690 - RNA, 19 nt, Artificial Sequence
  Description of Artificial Sequence: Synthetic oligonucleotide
  Antisense Strand to SEQ ID NO: 380689
gaaugacccagaaucuggg

SEQ ID NO: 380691 - RNA, 19 nt, Artificial Sequence
  Description of Artificial Sequence: Synthetic oligonucleotide
  Sense Strand Starting at position 788 of SEQ ID NO: 317647
uggaaaccuugcccaguua

SEQ ID NO: 380692 - RNA, 19 nt, Artificial Sequence
  Description of Artificial Sequence: Synthetic oligonucleotide
  Antisense Strand to SEQ ID NO: 380691
uaacugggcaagguuucca

SEQ ID NO: 380693 - RNA, 19 nt, Artificial Sequence
  Description of Artificial Sequence: Synthetic oligonucleotide
  Sense Strand Starting at position 788 of SEQ ID NO: 317648
ggaaaccuugcccaguuau

SEQ ID NO: 380694 - RNA, 19 nt, Artificial Sequence
  Description of Artificial Sequence: Synthetic oligonucleotide
  Antisense Strand to SEQ ID NO: 380693
auaacugggcaagguuucc

SEQ ID NO: 380695 - RNA, 19 nt, Artificial Sequence
  Description of Artificial Sequence: Synthetic oligonucleotide
  Sense Strand Starting at position 788 of SEQ ID NO: 317678
aggguaguuccuggaacau

SEQ ID NO: 380696 - RNA, 19 nt, Artificial Sequence
  Description of Artificial Sequence: Synthetic oligonucleotide
  Antisense Strand to SEQ ID NO: 380695
auguuccaggaacuacccu

SEQ ID NO: 380697 - RNA, 19 nt, Artificial Sequence
  Description of Artificial Sequence: Synthetic oligonucleotide
  Sense Strand Starting at position 788 of SEQ ID NO: 317695
augguugaugcccaguauu

SEQ ID NO: 380698 - RNA, 19 nt, Artificial Sequence
  Description of Artificial Sequence: Synthetic oligonucleotide
  Antisense Strand to SEQ ID NO: 380697
aauacugggcaucaaccau

SEQ ID NO: 380699 - RNA, 19 nt, Artificial Sequence
  Description of Artificial Sequence: Synthetic oligonucleotide
  Sense Strand Starting at position 788 of SEQ ID NO: 317698
guugaugcccaguauuugu

SEQ ID NO: 380700 - RNA, 19 nt, Artificial Sequence
  Description of Artificial Sequence: Synthetic oligonucleotide
  Antisense Strand to SEQ ID NO: 380699
acaaauacugggcaucaac

SEQ ID NO: 380701 - RNA, 19 nt, Artificial Sequence
  Description of Artificial Sequence: Synthetic oligonucleotide
  Sense Strand Starting at position 788 of SEQ ID NO: 317784
ugagcucugagcgauacau

SEQ ID NO: 380702 - RNA, 19 nt, Artificial Sequence
  Description of Artificial Sequence: Synthetic oligonucleotide
  Antisense Strand to SEQ ID NO: 380701
auguaucgcucagagcuca

SEQ ID NO: 380703 - RNA, 19 nt, Artificial Sequence
  Description of Artificial Sequence: Synthetic oligonucleotide
  Sense Strand Starting at position 788 of SEQ ID NO: 317786
agcucugagcgauacauua

SEQ ID NO: 380704 - RNA, 19 nt, Artificial Sequence
  Description of Artificial Sequence: Synthetic oligonucleotide
  Antisense Strand to SEQ ID NO: 380703
uaauguaucgcucagagcu

SEQ ID NO: 380705 - RNA, 19 nt, Artificial Sequence
  Description of Artificial Sequence: Synthetic oligonucleotide
  Sense Strand Starting at position 788 of SEQ ID NO: 317793
agcgauacauuagcaugaa

SEQ ID NO: 380706 - RNA, 19 nt, Artificial Sequence
  Description of Artificial Sequence: Synthetic oligonucleotide
  Antisense Strand to SEQ ID NO: 380705
uucaugcuaauguaucgcu

SEQ ID NO: 380707 - RNA, 19 nt, Artificial Sequence
  Description of Artificial Sequence: Synthetic oligonucleotide
  Sense Strand Starting at position 788 of SEQ ID NO: 317809
gaaggaucguagcuaauau

SEQ ID NO: 380708 - RNA, 19 nt, Artificial Sequence
  Description of Artificial Sequence: Synthetic oligonucleotide
  Antisense Strand to SEQ ID NO: 380707
auauuagcuacgauccuuc

SEQ ID NO: 380709 - RNA, 19 nt, Artificial Sequence
  Description of Artificial Sequence: Synthetic oligonucleotide
  Sense Strand Starting at position 788 of SEQ ID NO: 317943
uggguuacucuggagucua

SEQ ID NO: 380710 - RNA, 19 nt, Artificial Sequence
  Description of Artificial Sequence: Synthetic oligonucleotide
  Antisense Strand to SEQ ID NO: 380709
uagacuccagaguaaccca

SEQ ID NO: 380711 - RNA, 19 nt, Artificial Sequence
  Description of Artificial Sequence: Synthetic oligonucleotide
  Sense Strand Starting at position 788 of SEQ ID NO: 318094
guugaauaaagaugguuaa

SEQ ID NO: 380712 - RNA, 19 nt, Artificial Sequence
  Description of Artificial Sequence: Synthetic oligonucleotide
  Antisense Strand to SEQ ID NO: 380711
uuaaccaucuuuauucaac

SEQ ID NO: 380713 - RNA, 19 nt, Artificial Sequence
  Description of Artificial Sequence: Synthetic oligonucleotide
  Sense Strand Starting at position 788 of SEQ ID NO: 318162
ggaaaucacugagaaugag

SEQ ID NO: 380714 - RNA, 19 nt, Artificial Sequence
  Description of Artificial Sequence: Synthetic oligonucleotide
  Antisense Strand to SEQ ID NO: 380713
cucauucucagugauuucc

SEQ ID NO: 380715 - RNA, 19 nt, Artificial Sequence
  Description of Artificial Sequence: Synthetic oligonucleotide
  Sense Strand Starting at position 788 of SEQ ID NO: 318196
cgauaacugucaucaaugu

SEQ ID NO: 380716 - RNA, 19 nt, Artificial Sequence
  Description of Artificial Sequence: Synthetic oligonucleotide
  Antisense Strand to SEQ ID NO: 380715
acauugaugacaguuaucg

SEQ ID NO: 380717 - RNA, 19 nt, Artificial Sequence
  Description of Artificial Sequence: Synthetic oligonucleotide
  Sense Strand Starting at position 788 of SEQ ID NO: 318361
gggaacuuacgaggaaagu

SEQ ID NO: 380718 - RNA, 19 nt, Artificial Sequence
  Description of Artificial Sequence: Synthetic oligonucleotide
  Antisense Strand to SEQ ID NO: 380717
acuuuccucguaaguuccc

SEQ ID NO: 380719 - RNA, 19 nt, Artificial Sequence
  Description of Artificial Sequence: Synthetic oligonucleotide
  Sense Strand Starting at position 788 of SEQ ID NO: 318743
ugaguuagccagcaaacua

SEQ ID NO: 380720 - RNA, 19 nt, Artificial Sequence
  Description of Artificial Sequence: Synthetic oligonucleotide
  Antisense Strand to SEQ ID NO: 380719
uaguuugcuggcuaacuca

SEQ ID NO: 380721 - RNA, 19 nt, Artificial Sequence
  Description of Artificial Sequence: Synthetic oligonucleotide
  Sense Strand Starting at position 788 of SEQ ID NO: 318829
agucccagucauuaugaca

SEQ ID NO: 380722 - RNA, 19 nt, Artificial Sequence
  Description of Artificial Sequence: Synthetic oligonucleotide
  Antisense Strand to SEQ ID NO: 380721
ugucauaaugacugggacu

SEQ ID NO: 380723 - RNA, 19 nt, Artificial Sequence
  Description of Artificial Sequence: Synthetic oligonucleotide
  Sense Strand Starting at position 788 of SEQ ID NO: 318871
ggcuuaaaucagcaaguca

SEQ ID NO: 380724 - RNA, 19 nt, Artificial Sequence
  Description of Artificial Sequence: Synthetic oligonucleotide
  Antisense Strand to SEQ ID NO: 380723
ugacuugcugauuuaagcc

SEQ ID NO: 380725 - RNA, 19 nt, Artificial Sequence
  Description of Artificial Sequence: Synthetic oligonucleotide
  Sense Strand Starting at position 788 of SEQ ID NO: 318907
agagaacaguccuuguaag

SEQ ID NO: 380726 - RNA, 19 nt, Artificial Sequence
  Description of Artificial Sequence: Synthetic oligonucleotide
  Antisense Strand to SEQ ID NO: 380725
cuuacaaggacuguucucu

SEQ ID NO: 380727 - RNA, 19 nt, Artificial Sequence
  Description of Artificial Sequence: Synthetic oligonucleotide
  Sense Strand Starting at position 788 of SEQ ID NO: 318908
gagaacaguccuuguaagu

SEQ ID NO: 380728 - RNA, 19 nt, Artificial Sequence
  Description of Artificial Sequence: Synthetic oligonucleotide
  Antisense Strand to SEQ ID NO: 380727
acuuacaaggacuguucuc

SEQ ID NO: 380729 - RNA, 19 nt, Artificial Sequence
  Description of Artificial Sequence: Synthetic oligonucleotide
  Sense Strand Starting at position 788 of SEQ ID NO: 319054
cugccuucccaguaugauc

SEQ ID NO: 380730 - RNA, 19 nt, Artificial Sequence
  Description of Artificial Sequence: Synthetic oligonucleotide
  Antisense Strand to SEQ ID NO: 380729
gaucauacugggaaggcag

SEQ ID NO: 380731 - RNA, 19 nt, Artificial Sequence
  Description of Artificial Sequence: Synthetic oligonucleotide
  Sense Strand Starting at position 788 of SEQ ID NO: 319062
ccaguaugaucaucaggac

SEQ ID NO: 380732 - RNA, 19 nt, Artificial Sequence
  Description of Artificial Sequence: Synthetic oligonucleotide
  Antisense Strand to SEQ ID NO: 380731
guccugaugaucauacugg

SEQ ID NO: 380733 - RNA, 19 nt, Artificial Sequence
  Description of Artificial Sequence: Synthetic oligonucleotide
  Sense Strand Starting at position 789 of SEQ ID NO: 315444
accaguugaucagaauuua

SEQ ID NO: 380734 - RNA, 19 nt, Artificial Sequence
  Description of Artificial Sequence: Synthetic oligonucleotide
  Antisense Strand to SEQ ID NO: 380733
uaaauucugaucaacuggu

SEQ ID NO: 380735 - RNA, 19 nt, Artificial Sequence
  Description of Artificial Sequence: Synthetic oligonucleotide
  Sense Strand Starting at position 789 of SEQ ID NO: 315488
aguggcuucugacucuaga

SEQ ID NO: 380736 - RNA, 19 nt, Artificial Sequence
  Description of Artificial Sequence: Synthetic oligonucleotide
  Antisense Strand to SEQ ID NO: 380735
ucuagagucagaagccacu

SEQ ID NO: 380737 - RNA, 19 nt, Artificial Sequence
  Description of Artificial Sequence: Synthetic oligonucleotide
  Sense Strand Starting at position 789 of SEQ ID NO: 315491
ggcuucugacucuagaauc

SEQ ID NO: 380738 - RNA, 19 nt, Artificial Sequence
  Description of Artificial Sequence: Synthetic oligonucleotide
  Antisense Strand to SEQ ID NO: 380737
gauucuagagucagaagcc

SEQ ID NO: 380739 - RNA, 19 nt, Artificial Sequence
  Description of Artificial Sequence: Synthetic oligonucleotide
  Sense Strand Starting at position 789 of SEQ ID NO: 315510
cuagaauaucaaggcugga

SEQ ID NO: 380740 - RNA, 19 nt, Artificial Sequence
  Description of Artificial Sequence: Synthetic oligonucleotide
  Antisense Strand to SEQ ID NO: 380739
uccagccuugauauucuag

SEQ ID NO: 380741 - RNA, 19 nt, Artificial Sequence
  Description of Artificial Sequence: Synthetic oligonucleotide
  Sense Strand Starting at position 789 of SEQ ID NO: 315596
gguuaugugauguagucaa

SEQ ID NO: 380742 - RNA, 19 nt, Artificial Sequence
  Description of Artificial Sequence: Synthetic oligonucleotide
  Antisense Strand to SEQ ID NO: 380741
uugacuacaucacauaacc

SEQ ID NO: 380743 - RNA, 19 nt, Artificial Sequence
  Description of Artificial Sequence: Synthetic oligonucleotide
  Sense Strand Starting at position 789 of SEQ ID NO: 315600
augugauguagucaaagac

SEQ ID NO: 380744 - RNA, 19 nt, Artificial Sequence
  Description of Artificial Sequence: Synthetic oligonucleotide
  Antisense Strand to SEQ ID NO: 380743
gucuuugacuacaucacau

SEQ ID NO: 380745 - RNA, 19 nt, Artificial Sequence
  Description of Artificial Sequence: Synthetic oligonucleotide
  Sense Strand Starting at position 789 of SEQ ID NO: 315800
gguccugcugaggacaaua

SEQ ID NO: 380746 - RNA, 19 nt, Artificial Sequence
  Description of Artificial Sequence: Synthetic oligonucleotide
  Antisense Strand to SEQ ID NO: 380745
uauuguccucagcaggacc

SEQ ID NO: 380747 - RNA, 19 nt, Artificial Sequence
  Description of Artificial Sequence: Synthetic oligonucleotide
  Sense Strand Starting at position 789 of SEQ ID NO: 315988
cuccuaauuccagggucua

SEQ ID NO: 380748 - RNA, 19 nt, Artificial Sequence
  Description of Artificial Sequence: Synthetic oligonucleotide
  Antisense Strand to SEQ ID NO: 380747
uagacccuggaauuaggag

SEQ ID NO: 380749 - RNA, 19 nt, Artificial Sequence
  Description of Artificial Sequence: Synthetic oligonucleotide
  Sense Strand Starting at position 789 of SEQ ID NO: 315989
uccuaauuccagggucuau

SEQ ID NO: 380750 - RNA, 19 nt, Artificial Sequence
  Description of Artificial Sequence: Synthetic oligonucleotide
  Antisense Strand to SEQ ID NO: 380749
auagacccuggaauuagga

SEQ ID NO: 380751 - RNA, 19 nt, Artificial Sequence
  Description of Artificial Sequence: Synthetic oligonucleotide
  Sense Strand Starting at position 789 of SEQ ID NO: 316046
aucuauuguccaggaccaa

SEQ ID NO: 380752 - RNA, 19 nt, Artificial Sequence
  Description of Artificial Sequence: Synthetic oligonucleotide
  Antisense Strand to SEQ ID NO: 380751
uugguccuggacaauagau

SEQ ID NO: 380753 - RNA, 19 nt, Artificial Sequence
  Description of Artificial Sequence: Synthetic oligonucleotide
  Sense Strand Starting at position 789 of SEQ ID NO: 316179
agugaaauuugaugagaac

SEQ ID NO: 380754 - RNA, 19 nt, Artificial Sequence
  Description of Artificial Sequence: Synthetic oligonucleotide
  Antisense Strand to SEQ ID NO: 380753
guucucaucaaauuucacu

SEQ ID NO: 380755 - RNA, 19 nt, Artificial Sequence
  Description of Artificial Sequence: Synthetic oligonucleotide
  Sense Strand Starting at position 789 of SEQ ID NO: 316182
gaaauuugaugagaacagu

SEQ ID NO: 380756 - RNA, 19 nt, Artificial Sequence
  Description of Artificial Sequence: Synthetic oligonucleotide
  Antisense Strand to SEQ ID NO: 380755
acuguucucaucaaauuuc

SEQ ID NO: 380757 - RNA, 19 nt, Artificial Sequence
  Description of Artificial Sequence: Synthetic oligonucleotide
  Sense Strand Starting at position 789 of SEQ ID NO: 316280
gugcaagcugcaguuguau

SEQ ID NO: 380758 - RNA, 19 nt, Artificial Sequence
  Description of Artificial Sequence: Synthetic oligonucleotide
  Antisense Strand to SEQ ID NO: 380757
auacaacugcagcuugcac

SEQ ID NO: 380759 - RNA, 19 nt, Artificial Sequence
  Description of Artificial Sequence: Synthetic oligonucleotide
  Sense Strand Starting at position 789 of SEQ ID NO: 316316
aacggucacaucgaguuau

SEQ ID NO: 380760 - RNA, 19 nt, Artificial Sequence
  Description of Artificial Sequence: Synthetic oligonucleotide
  Antisense Strand to SEQ ID NO: 380759
auaacucgaugugaccguu

SEQ ID NO: 380761 - RNA, 19 nt, Artificial Sequence
  Description of Artificial Sequence: Synthetic oligonucleotide
  Sense Strand Starting at position 789 of SEQ ID NO: 316327
cgaguuauguugauucgua

SEQ ID NO: 380762 - RNA, 19 nt, Artificial Sequence
  Description of Artificial Sequence: Synthetic oligonucleotide
  Antisense Strand to SEQ ID NO: 380761
uacgaaucaacauaacucg

SEQ ID NO: 380763 - RNA, 19 nt, Artificial Sequence
  Description of Artificial Sequence: Synthetic oligonucleotide
  Sense Strand Starting at position 789 of SEQ ID NO: 316394
guauaagcacuauaaaugu

SEQ ID NO: 380764 - RNA, 19 nt, Artificial Sequence
  Description of Artificial Sequence: Synthetic oligonucleotide
  Antisense Strand to SEQ ID NO: 380763
acauuuauagugcuuauac

SEQ ID NO: 380765 - RNA, 19 nt, Artificial Sequence
  Description of Artificial Sequence: Synthetic oligonucleotide
  Sense Strand Starting at position 789 of SEQ ID NO: 316843
ggcaaaucagcacacugau

SEQ ID NO: 380766 - RNA, 19 nt, Artificial Sequence
  Description of Artificial Sequence: Synthetic oligonucleotide
  Antisense Strand to SEQ ID NO: 380765
aucagugugcugauuugcc

SEQ ID NO: 380767 - RNA, 19 nt, Artificial Sequence
  Description of Artificial Sequence: Synthetic oligonucleotide
  Sense Strand Starting at position 789 of SEQ ID NO: 317375
guguuugucagcgucugga

SEQ ID NO: 380768 - RNA, 19 nt, Artificial Sequence
  Description of Artificial Sequence: Synthetic oligonucleotide
  Antisense Strand to SEQ ID NO: 380767
uccagacgcugacaaacac

SEQ ID NO: 380769 - RNA, 19 nt, Artificial Sequence
  Description of Artificial Sequence: Synthetic oligonucleotide
  Sense Strand Starting at position 789 of SEQ ID NO: 317509
aucacauaccgguauaaug

SEQ ID NO: 380770 - RNA, 19 nt, Artificial Sequence
  Description of Artificial Sequence: Synthetic oligonucleotide
  Antisense Strand to SEQ ID NO: 380769
cauuauaccgguaugugau

SEQ ID NO: 380771 - RNA, 19 nt, Artificial Sequence
  Description of Artificial Sequence: Synthetic oligonucleotide
  Sense Strand Starting at position 789 of SEQ ID NO: 317564
ucugcaagcguucucuuua

SEQ ID NO: 380772 - RNA, 19 nt, Artificial Sequence
  Description of Artificial Sequence: Synthetic oligonucleotide
  Antisense Strand to SEQ ID NO: 380771
uaaagagaacgcuugcaga

SEQ ID NO: 380773 - RNA, 19 nt, Artificial Sequence
  Description of Artificial Sequence: Synthetic oligonucleotide
  Sense Strand Starting at position 789 of SEQ ID NO: 317649
aguuacagacauuguagau

SEQ ID NO: 380774 - RNA, 19 nt, Artificial Sequence
  Description of Artificial Sequence: Synthetic oligonucleotide
  Antisense Strand to SEQ ID NO: 380773
aucuacaaugucuguaacu

SEQ ID NO: 380775 - RNA, 19 nt, Artificial Sequence
  Description of Artificial Sequence: Synthetic oligonucleotide
  Sense Strand Starting at position 789 of SEQ ID NO: 317771
ucguguguuauccacaaga

SEQ ID NO: 380776 - RNA, 19 nt, Artificial Sequence
  Description of Artificial Sequence: Synthetic oligonucleotide
  Antisense Strand to SEQ ID NO: 380775
ucuuguggauaacacacga

SEQ ID NO: 380777 - RNA, 19 nt, Artificial Sequence
  Description of Artificial Sequence: Synthetic oligonucleotide
  Sense Strand Starting at position 789 of SEQ ID NO: 317773
guguguuauccacaagaaa

SEQ ID NO: 380778 - RNA, 19 nt, Artificial Sequence
  Description of Artificial Sequence: Synthetic oligonucleotide
  Antisense Strand to SEQ ID NO: 380777
uuucuuguggauaacacac

SEQ ID NO: 380779 - RNA, 19 nt, Artificial Sequence
  Description of Artificial Sequence: Synthetic oligonucleotide
  Sense Strand Starting at position 789 of SEQ ID NO: 317851
agcugaaguagguauguua

SEQ ID NO: 380780 - RNA, 19 nt, Artificial Sequence
  Description of Artificial Sequence: Synthetic oligonucleotide
  Antisense Strand to SEQ ID NO: 380779
uaacauaccuacuucagcu

SEQ ID NO: 380781 - RNA, 19 nt, Artificial Sequence
  Description of Artificial Sequence: Synthetic oligonucleotide
  Sense Strand Starting at position 789 of SEQ ID NO: 317854
ugaaguagguauguuaauu

SEQ ID NO: 380782 - RNA, 19 nt, Artificial Sequence
  Description of Artificial Sequence: Synthetic oligonucleotide
  Antisense Strand to SEQ ID NO: 380781
aauuaacauaccuacuuca

SEQ ID NO: 380783 - RNA, 19 nt, Artificial Sequence
  Description of Artificial Sequence: Synthetic oligonucleotide
  Sense Strand Starting at position 789 of SEQ ID NO: 317896
aaggaaauuuaucagguau

SEQ ID NO: 380784 - RNA, 19 nt, Artificial Sequence
  Description of Artificial Sequence: Synthetic oligonucleotide
  Antisense Strand to SEQ ID NO: 380783
auaccugauaaauuuccuu

SEQ ID NO: 380785 - RNA, 19 nt, Artificial Sequence
  Description of Artificial Sequence: Synthetic oligonucleotide
  Sense Strand Starting at position 789 of SEQ ID NO: 317898
ggaaauuuaucagguauaa

SEQ ID NO: 380786 - RNA, 19 nt, Artificial Sequence
  Description of Artificial Sequence: Synthetic oligonucleotide
  Antisense Strand to SEQ ID NO: 380785
uuauaccugauaaauuucc

SEQ ID NO: 380787 - RNA, 19 nt, Artificial Sequence
  Description of Artificial Sequence: Synthetic oligonucleotide
  Sense Strand Starting at position 789 of SEQ ID NO: 317945
ucaguuauuugggaagaca

SEQ ID NO: 380788 - RNA, 19 nt, Artificial Sequence
  Description of Artificial Sequence: Synthetic oligonucleotide
  Antisense Strand to SEQ ID NO: 380787
ugucuucccaaauaacuga

SEQ ID NO: 380789 - RNA, 19 nt, Artificial Sequence
  Description of Artificial Sequence: Synthetic oligonucleotide
  Sense Strand Starting at position 789 of SEQ ID NO: 318116
gcaaaugagcaaggauaua

SEQ ID NO: 380790 - RNA, 19 nt, Artificial Sequence
  Description of Artificial Sequence: Synthetic oligonucleotide
  Antisense Strand to SEQ ID NO: 380789
uauauccuugcucauuugc

SEQ ID NO: 380791 - RNA, 19 nt, Artificial Sequence
  Description of Artificial Sequence: Synthetic oligonucleotide
  Sense Strand Starting at position 789 of SEQ ID NO: 318298
aaaguauguucucugacug

SEQ ID NO: 380792 - RNA, 19 nt, Artificial Sequence
  Description of Artificial Sequence: Synthetic oligonucleotide
  Antisense Strand to SEQ ID NO: 380791
cagucagagaacauacuuu

SEQ ID NO: 380793 - RNA, 19 nt, Artificial Sequence
  Description of Artificial Sequence: Synthetic oligonucleotide
  Sense Strand Starting at position 789 of SEQ ID NO: 318305
guucucugacugcaauaga

SEQ ID NO: 380794 - RNA, 19 nt, Artificial Sequence
  Description of Artificial Sequence: Synthetic oligonucleotide
  Antisense Strand to SEQ ID NO: 380793
ucuauugcagucagagaac

SEQ ID NO: 380795 - RNA, 19 nt, Artificial Sequence
  Description of Artificial Sequence: Synthetic oligonucleotide
  Sense Strand Starting at position 789 of SEQ ID NO: 318308
cucugacugcaauagaauu

SEQ ID NO: 380796 - RNA, 19 nt, Artificial Sequence
  Description of Artificial Sequence: Synthetic oligonucleotide
  Antisense Strand to SEQ ID NO: 380795
aauucuauugcagucagag

SEQ ID NO: 380797 - RNA, 19 nt, Artificial Sequence
  Description of Artificial Sequence: Synthetic oligonucleotide
  Sense Strand Starting at position 789 of SEQ ID NO: 318508
ccagcaacccucugugaag

SEQ ID NO: 380798 - RNA, 19 nt, Artificial Sequence
  Description of Artificial Sequence: Synthetic oligonucleotide
  Antisense Strand to SEQ ID NO: 380797
cuucacagaggguugcugg

SEQ ID NO: 380799 - RNA, 19 nt, Artificial Sequence
  Description of Artificial Sequence: Synthetic oligonucleotide
  Sense Strand Starting at position 789 of SEQ ID NO: 318671
acaggcaguccuuaagaca

SEQ ID NO: 380800 - RNA, 19 nt, Artificial Sequence
  Description of Artificial Sequence: Synthetic oligonucleotide
  Antisense Strand to SEQ ID NO: 380799
ugucuuaaggacugccugu

SEQ ID NO: 380801 - RNA, 19 nt, Artificial Sequence
  Description of Artificial Sequence: Synthetic oligonucleotide
  Sense Strand Starting at position 789 of SEQ ID NO: 318702
cugaguugacuagaugcaa

SEQ ID NO: 380802 - RNA, 19 nt, Artificial Sequence
  Description of Artificial Sequence: Synthetic oligonucleotide
  Antisense Strand to SEQ ID NO: 380801
uugcaucuagucaacucag

SEQ ID NO: 380803 - RNA, 19 nt, Artificial Sequence
  Description of Artificial Sequence: Synthetic oligonucleotide
  Sense Strand Starting at position 789 of SEQ ID NO: 318750
gcugaagcucuugaauggu

SEQ ID NO: 380804 - RNA, 19 nt, Artificial Sequence
  Description of Artificial Sequence: Synthetic oligonucleotide
  Antisense Strand to SEQ ID NO: 380803
accauucaagagcuucagc

SEQ ID NO: 380805 - RNA, 19 nt, Artificial Sequence
  Description of Artificial Sequence: Synthetic oligonucleotide
  Sense Strand Starting at position 789 of SEQ ID NO: 318758
ucuugaaugguguggaauc

SEQ ID NO: 380806 - RNA, 19 nt, Artificial Sequence
  Description of Artificial Sequence: Synthetic oligonucleotide
  Antisense Strand to SEQ ID NO: 380805
gauuccacaccauucaaga

SEQ ID NO: 380807 - RNA, 19 nt, Artificial Sequence
  Description of Artificial Sequence: Synthetic oligonucleotide
  Sense Strand Starting at position 789 of SEQ ID NO: 318768
uguggaaucucccuuagaa

SEQ ID NO: 380808 - RNA, 19 nt, Artificial Sequence
  Description of Artificial Sequence: Synthetic oligonucleotide
  Antisense Strand to SEQ ID NO: 380807
uucuaagggagauuccaca

SEQ ID NO: 380809 - RNA, 19 nt, Artificial Sequence
  Description of Artificial Sequence: Synthetic oligonucleotide
  Sense Strand Starting at position 789 of SEQ ID NO: 318843
gaaagauagugacauuuau

SEQ ID NO: 380810 - RNA, 19 nt, Artificial Sequence
  Description of Artificial Sequence: Synthetic oligonucleotide
  Antisense Strand to SEQ ID NO: 380809
auaaaugucacuaucuuuc

SEQ ID NO: 380811 - RNA, 19 nt, Artificial Sequence
  Description of Artificial Sequence: Synthetic oligonucleotide
  Sense Strand Starting at position 789 of SEQ ID NO: 318874
gguuaaauuucuuaccaug

SEQ ID NO: 380812 - RNA, 19 nt, Artificial Sequence
  Description of Artificial Sequence: Synthetic oligonucleotide
  Antisense Strand to SEQ ID NO: 380811
caugguaagaaauuuaacc

SEQ ID NO: 380813 - RNA, 19 nt, Artificial Sequence
  Description of Artificial Sequence: Synthetic oligonucleotide
  Sense Strand Starting at position 790 of SEQ ID NO: 315943
uagagaacaggcuguuuga

SEQ ID NO: 380814 - RNA, 19 nt, Artificial Sequence
  Description of Artificial Sequence: Synthetic oligonucleotide
  Antisense Strand to SEQ ID NO: 380813
ucaaacagccuguucucua

SEQ ID NO: 380815 - RNA, 19 nt, Artificial Sequence
  Description of Artificial Sequence: Synthetic oligonucleotide
  Sense Strand Starting at position 790 of SEQ ID NO: 315952
ggcuguuugagagauucua

SEQ ID NO: 380816 - RNA, 19 nt, Artificial Sequence
  Description of Artificial Sequence: Synthetic oligonucleotide
  Antisense Strand to SEQ ID NO: 380815
uagaaucucucaaacagcc

SEQ ID NO: 380817 - RNA, 19 nt, Artificial Sequence
  Description of Artificial Sequence: Synthetic oligonucleotide
  Sense Strand Starting at position 790 of SEQ ID NO: 315978
ccacuuauuugauagagga

SEQ ID NO: 380818 - RNA, 19 nt, Artificial Sequence
  Description of Artificial Sequence: Synthetic oligonucleotide
  Antisense Strand to SEQ ID NO: 380817
uccucuaucaaauaagugg

SEQ ID NO: 380819 - RNA, 19 nt, Artificial Sequence
  Description of Artificial Sequence: Synthetic oligonucleotide
  Sense Strand Starting at position 790 of SEQ ID NO: 316048
cuguguuuaguccagaaca

SEQ ID NO: 380820 - RNA, 19 nt, Artificial Sequence
  Description of Artificial Sequence: Synthetic oligonucleotide
  Antisense Strand to SEQ ID NO: 380819
uguucuggacuaaacacag

SEQ ID NO: 380821 - RNA, 19 nt, Artificial Sequence
  Description of Artificial Sequence: Synthetic oligonucleotide
  Sense Strand Starting at position 790 of SEQ ID NO: 316050
guguuuaguccagaacaac

SEQ ID NO: 380822 - RNA, 19 nt, Artificial Sequence
  Description of Artificial Sequence: Synthetic oligonucleotide
  Antisense Strand to SEQ ID NO: 380821
guuguucuggacuaaacac

SEQ ID NO: 380823 - RNA, 19 nt, Artificial Sequence
  Description of Artificial Sequence: Synthetic oligonucleotide
  Sense Strand Starting at position 790 of SEQ ID NO: 316079
ggauguuuagugcagagua

SEQ ID NO: 380824 - RNA, 19 nt, Artificial Sequence
  Description of Artificial Sequence: Synthetic oligonucleotide
  Antisense Strand to SEQ ID NO: 380823
uacucugcacuaaacaucc

SEQ ID NO: 380825 - RNA, 19 nt, Artificial Sequence
  Description of Artificial Sequence: Synthetic oligonucleotide
  Sense Strand Starting at position 790 of SEQ ID NO: 316305
ccgggaauucucuaaaguu

SEQ ID NO: 380826 - RNA, 19 nt, Artificial Sequence
  Description of Artificial Sequence: Synthetic oligonucleotide
  Antisense Strand to SEQ ID NO: 380825
aacuuuagagaauucccgg

SEQ ID NO: 380827 - RNA, 19 nt, Artificial Sequence
  Description of Artificial Sequence: Synthetic oligonucleotide
  Sense Strand Starting at position 790 of SEQ ID NO: 316550
aguggaacacguuaaguau

SEQ ID NO: 380828 - RNA, 19 nt, Artificial Sequence
  Description of Artificial Sequence: Synthetic oligonucleotide
  Antisense Strand to SEQ ID NO: 380827
auacuuaacguguuccacu

SEQ ID NO: 380829 - RNA, 19 nt, Artificial Sequence
  Description of Artificial Sequence: Synthetic oligonucleotide
  Sense Strand Starting at position 790 of SEQ ID NO: 316558
acguuaaguauuuguuaga

SEQ ID NO: 380830 - RNA, 19 nt, Artificial Sequence
  Description of Artificial Sequence: Synthetic oligonucleotide
  Antisense Strand to SEQ ID NO: 380829
ucuaacaaauacuuaacgu

SEQ ID NO: 380831 - RNA, 19 nt, Artificial Sequence
  Description of Artificial Sequence: Synthetic oligonucleotide
  Sense Strand Starting at position 790 of SEQ ID NO: 316559
cguuaaguauuuguuagac

SEQ ID NO: 380832 - RNA, 19 nt, Artificial Sequence
  Description of Artificial Sequence: Synthetic oligonucleotide
  Antisense Strand to SEQ ID NO: 380831
gucuaacaaauacuuaacg

SEQ ID NO: 380833 - RNA, 19 nt, Artificial Sequence
  Description of Artificial Sequence: Synthetic oligonucleotide
  Sense Strand Starting at position 790 of SEQ ID NO: 316897
cugcuauuugcagggcuca

SEQ ID NO: 380834 - RNA, 19 nt, Artificial Sequence
  Description of Artificial Sequence: Synthetic oligonucleotide
  Antisense Strand to SEQ ID NO: 380833
ugagcccugcaaauagcag

SEQ ID NO: 380835 - RNA, 19 nt, Artificial Sequence
  Description of Artificial Sequence: Synthetic oligonucleotide
  Sense Strand Starting at position 790 of SEQ ID NO: 317503
uccguuaauuucuucuagu

SEQ ID NO: 380836 - RNA, 19 nt, Artificial Sequence
  Description of Artificial Sequence: Synthetic oligonucleotide
  Antisense Strand to SEQ ID NO: 380835
acuagaagaaauuaacgga

SEQ ID NO: 380837 - RNA, 19 nt, Artificial Sequence
  Description of Artificial Sequence: Synthetic oligonucleotide
  Sense Strand Starting at position 790 of SEQ ID NO: 317504
ccguuaauuucuucuagug

SEQ ID NO: 380838 - RNA, 19 nt, Artificial Sequence
  Description of Artificial Sequence: Synthetic oligonucleotide
  Antisense Strand to SEQ ID NO: 380837
cacuagaagaaauuaacgg

SEQ ID NO: 380839 - RNA, 19 nt, Artificial Sequence
  Description of Artificial Sequence: Synthetic oligonucleotide
  Sense Strand Starting at position 790 of SEQ ID NO: 318040
agauucugccaauacaguu

SEQ ID NO: 380840 - RNA, 19 nt, Artificial Sequence
  Description of Artificial Sequence: Synthetic oligonucleotide
  Antisense Strand to SEQ ID NO: 380839
aacuguauuggcagaaucu

SEQ ID NO: 380841 - RNA, 19 nt, Artificial Sequence
  Description of Artificial Sequence: Synthetic oligonucleotide
  Sense Strand Starting at position 790 of SEQ ID NO: 318058
uuccuaauggagugaauug

SEQ ID NO: 380842 - RNA, 19 nt, Artificial Sequence
  Description of Artificial Sequence: Synthetic oligonucleotide
  Antisense Strand to SEQ ID NO: 380841
caauucacuccauuaggaa

SEQ ID NO: 380843 - RNA, 19 nt, Artificial Sequence
  Description of Artificial Sequence: Synthetic oligonucleotide
  Sense Strand Starting at position 790 of SEQ ID NO: 318121
uugauugcuguacacuuaa

SEQ ID NO: 380844 - RNA, 19 nt, Artificial Sequence
  Description of Artificial Sequence: Synthetic oligonucleotide
  Antisense Strand to SEQ ID NO: 380843
uuaaguguacagcaaucaa

SEQ ID NO: 380845 - RNA, 19 nt, Artificial Sequence
  Description of Artificial Sequence: Synthetic oligonucleotide
  Sense Strand Starting at position 790 of SEQ ID NO: 318282
auaaauuugucccuugugu

SEQ ID NO: 380846 - RNA, 19 nt, Artificial Sequence
  Description of Artificial Sequence: Synthetic oligonucleotide
  Antisense Strand to SEQ ID NO: 380845
acacaagggacaaauuuau

SEQ ID NO: 380847 - RNA, 19 nt, Artificial Sequence
  Description of Artificial Sequence: Synthetic oligonucleotide
  Sense Strand Starting at position 790 of SEQ ID NO: 318432
uccagaaggugaucuugga

SEQ ID NO: 380848 - RNA, 19 nt, Artificial Sequence
  Description of Artificial Sequence: Synthetic oligonucleotide
  Antisense Strand to SEQ ID NO: 380847
uccaagaucaccuucugga

SEQ ID NO: 380849 - RNA, 19 nt, Artificial Sequence
  Description of Artificial Sequence: Synthetic oligonucleotide
  Sense Strand Starting at position 790 of SEQ ID NO: 318439
ggugaucuuggacaagucu

SEQ ID NO: 380850 - RNA, 19 nt, Artificial Sequence
  Description of Artificial Sequence: Synthetic oligonucleotide
  Antisense Strand to SEQ ID NO: 380849
agacuuguccaagaucacc

SEQ ID NO: 380851 - RNA, 19 nt, Artificial Sequence
  Description of Artificial Sequence: Synthetic oligonucleotide
  Sense Strand Starting at position 790 of SEQ ID NO: 318446
uuggacaagucucuuuacu

SEQ ID NO: 380852 - RNA, 19 nt, Artificial Sequence
  Description of Artificial Sequence: Synthetic oligonucleotide
  Antisense Strand to SEQ ID NO: 380851
aguaaagagacuuguccaa

SEQ ID NO: 380853 - RNA, 19 nt, Artificial Sequence
  Description of Artificial Sequence: Synthetic oligonucleotide
  Sense Strand Starting at position 790 of SEQ ID NO: 318448
ggacaagucucuuuacuuc

SEQ ID NO: 380854 - RNA, 19 nt, Artificial Sequence
  Description of Artificial Sequence: Synthetic oligonucleotide
  Antisense Strand to SEQ ID NO: 380853
gaaguaaagagacuugucc

SEQ ID NO: 380855 - RNA, 19 nt, Artificial Sequence
  Description of Artificial Sequence: Synthetic oligonucleotide
  Sense Strand Starting at position 790 of SEQ ID NO: 318486
cguauaaugggagguaaca

SEQ ID NO: 380856 - RNA, 19 nt, Artificial Sequence
  Description of Artificial Sequence: Synthetic oligonucleotide
  Antisense Strand to SEQ ID NO: 380855
uguuaccucccauuauacg

SEQ ID NO: 380857 - RNA, 19 nt, Artificial Sequence
  Description of Artificial Sequence: Synthetic oligonucleotide
  Sense Strand Starting at position 790 of SEQ ID NO: 318528
ggaggauuaaguggcuuaa

SEQ ID NO: 380858 - RNA, 19 nt, Artificial Sequence
  Description of Artificial Sequence: Synthetic oligonucleotide
  Antisense Strand to SEQ ID NO: 380857
uuaagccacuuaauccucc

SEQ ID NO: 380859 - RNA, 19 nt, Artificial Sequence
  Description of Artificial Sequence: Synthetic oligonucleotide
  Sense Strand Starting at position 790 of SEQ ID NO: 318530
aggauuaaguggcuuaaca

SEQ ID NO: 380860 - RNA, 19 nt, Artificial Sequence
  Description of Artificial Sequence: Synthetic oligonucleotide
  Antisense Strand to SEQ ID NO: 380859
uguuaagccacuuaauccu

SEQ ID NO: 380861 - RNA, 19 nt, Artificial Sequence
  Description of Artificial Sequence: Synthetic oligonucleotide
  Sense Strand Starting at position 790 of SEQ ID NO: 318532
gauuaaguggcuuaacauc

SEQ ID NO: 380862 - RNA, 19 nt, Artificial Sequence
  Description of Artificial Sequence: Synthetic oligonucleotide
  Antisense Strand to SEQ ID NO: 380861
gauguuaagccacuuaauc

SEQ ID NO: 380863 - RNA, 19 nt, Artificial Sequence
  Description of Artificial Sequence: Synthetic oligonucleotide
  Sense Strand Starting at position 790 of SEQ ID NO: 318540
ggcuuaacaucuuuggaua

SEQ ID NO: 380864 - RNA, 19 nt, Artificial Sequence
  Description of Artificial Sequence: Synthetic oligonucleotide
  Antisense Strand to SEQ ID NO: 380863
uauccaaagauguuaagcc

SEQ ID NO: 380865 - RNA, 19 nt, Artificial Sequence
  Description of Artificial Sequence: Synthetic oligonucleotide
  Sense Strand Starting at position 790 of SEQ ID NO: 318541
gcuuaacaucuuuggauau

SEQ ID NO: 380866 - RNA, 19 nt, Artificial Sequence
  Description of Artificial Sequence: Synthetic oligonucleotide
  Antisense Strand to SEQ ID NO: 380865
auauccaaagauguuaagc

SEQ ID NO: 380867 - RNA, 19 nt, Artificial Sequence
  Description of Artificial Sequence: Synthetic oligonucleotide
  Sense Strand Starting at position 790 of SEQ ID NO: 318618
agggauuucugagaaucuu

SEQ ID NO: 380868 - RNA, 19 nt, Artificial Sequence
  Description of Artificial Sequence: Synthetic oligonucleotide
  Antisense Strand to SEQ ID NO: 380867
aagauucucagaaaucccu

SEQ ID NO: 380869 - RNA, 19 nt, Artificial Sequence
  Description of Artificial Sequence: Synthetic oligonucleotide
  Sense Strand Starting at position 790 of SEQ ID NO: 318628
gagaaucuuguguagcaug

SEQ ID NO: 380870 - RNA, 19 nt, Artificial Sequence
  Description of Artificial Sequence: Synthetic oligonucleotide
  Antisense Strand to SEQ ID NO: 380869
caugcuacacaagauucuc

SEQ ID NO: 380871 - RNA, 19 nt, Artificial Sequence
  Description of Artificial Sequence: Synthetic oligonucleotide
  Sense Strand Starting at position 790 of SEQ ID NO: 318662
auuagaggccuucgauuaa

SEQ ID NO: 380872 - RNA, 19 nt, Artificial Sequence
  Description of Artificial Sequence: Synthetic oligonucleotide
  Antisense Strand to SEQ ID NO: 380871
uuaaucgaaggccucuaau

SEQ ID NO: 380873 - RNA, 19 nt, Artificial Sequence
  Description of Artificial Sequence: Synthetic oligonucleotide
  Sense Strand Starting at position 790 of SEQ ID NO: 318799
gccugagguagugaagacu

SEQ ID NO: 380874 - RNA, 19 nt, Artificial Sequence
  Description of Artificial Sequence: Synthetic oligonucleotide
  Antisense Strand to SEQ ID NO: 380873
agucuucacuaccucaggc

SEQ ID NO: 380875 - RNA, 19 nt, Artificial Sequence
  Description of Artificial Sequence: Synthetic oligonucleotide
  Sense Strand Starting at position 790 of SEQ ID NO: 318805
gguagugaagacuaaagcu

SEQ ID NO: 380876 - RNA, 19 nt, Artificial Sequence
  Description of Artificial Sequence: Synthetic oligonucleotide
  Antisense Strand to SEQ ID NO: 380875
agcuuuagucuucacuacc

SEQ ID NO: 380877 - RNA, 19 nt, Artificial Sequence
  Description of Artificial Sequence: Synthetic oligonucleotide
  Sense Strand Starting at position 790 of SEQ ID NO: 318812
aagacuaaagcuuggucua

SEQ ID NO: 380878 - RNA, 19 nt, Artificial Sequence
  Description of Artificial Sequence: Synthetic oligonucleotide
  Antisense Strand to SEQ ID NO: 380877
uagaccaagcuuuagucuu

SEQ ID NO: 380879 - RNA, 19 nt, Artificial Sequence
  Description of Artificial Sequence: Synthetic oligonucleotide
  Sense Strand Starting at position 790 of SEQ ID NO: 318815
acuaaagcuuggucuagga

SEQ ID NO: 380880 - RNA, 19 nt, Artificial Sequence
  Description of Artificial Sequence: Synthetic oligonucleotide
  Antisense Strand to SEQ ID NO: 380879
uccuagaccaagcuuuagu

SEQ ID NO: 380881 - RNA, 19 nt, Artificial Sequence
  Description of Artificial Sequence: Synthetic oligonucleotide
  Sense Strand Starting at position 790 of SEQ ID NO: 318819
aagcuuggucuaggaggaa

SEQ ID NO: 380882 - RNA, 19 nt, Artificial Sequence
  Description of Artificial Sequence: Synthetic oligonucleotide
  Antisense Strand to SEQ ID NO: 380881
uuccuccuagaccaagcuu

SEQ ID NO: 380883 - RNA, 19 nt, Artificial Sequence
  Description of Artificial Sequence: Synthetic oligonucleotide
  Sense Strand Starting at position 790 of SEQ ID NO: 318841
ugguuuccuaggcaagaaa

SEQ ID NO: 380884 - RNA, 19 nt, Artificial Sequence
  Description of Artificial Sequence: Synthetic oligonucleotide
  Antisense Strand to SEQ ID NO: 380883
uuucuugccuaggaaacca

SEQ ID NO: 380885 - RNA, 19 nt, Artificial Sequence
  Description of Artificial Sequence: Synthetic oligonucleotide
  Sense Strand Starting at position 790 of SEQ ID NO: 318883
acagcaacuggaugagauu

SEQ ID NO: 380886 - RNA, 19 nt, Artificial Sequence
  Description of Artificial Sequence: Synthetic oligonucleotide
  Antisense Strand to SEQ ID NO: 380885
aaucucauccaguugcugu

SEQ ID NO: 380887 - RNA, 19 nt, Artificial Sequence
  Description of Artificial Sequence: Synthetic oligonucleotide
  Sense Strand Starting at position 790 of SEQ ID NO: 318892
ggaugagauuggagagugu

SEQ ID NO: 380888 - RNA, 19 nt, Artificial Sequence
  Description of Artificial Sequence: Synthetic oligonucleotide
  Antisense Strand to SEQ ID NO: 380887
acacucuccaaucucaucc

SEQ ID NO: 380889 - RNA, 19 nt, Artificial Sequence
  Description of Artificial Sequence: Synthetic oligonucleotide
  Sense Strand Starting at position 790 of SEQ ID NO: 318896
gagauuggagaguguuauu

SEQ ID NO: 380890 - RNA, 19 nt, Artificial Sequence
  Description of Artificial Sequence: Synthetic oligonucleotide
  Antisense Strand to SEQ ID NO: 380889
aauaacacucuccaaucuc

SEQ ID NO: 380891 - RNA, 19 nt, Artificial Sequence
  Description of Artificial Sequence: Synthetic oligonucleotide
  Sense Strand Starting at position 790 of SEQ ID NO: 318901
uggagaguguuauucuaag

SEQ ID NO: 380892 - RNA, 19 nt, Artificial Sequence
  Description of Artificial Sequence: Synthetic oligonucleotide
  Antisense Strand to SEQ ID NO: 380891
cuuagaauaacacucucca

SEQ ID NO: 380893 - RNA, 19 nt, Artificial Sequence
  Description of Artificial Sequence: Synthetic oligonucleotide
  Sense Strand Starting at position 791 of SEQ ID NO: 315259
guggcuuggauacauugaa

SEQ ID NO: 380894 - RNA, 19 nt, Artificial Sequence
  Description of Artificial Sequence: Synthetic oligonucleotide
  Antisense Strand to SEQ ID NO: 380893
uucaauguauccaagccac

SEQ ID NO: 380895 - RNA, 19 nt, Artificial Sequence
  Description of Artificial Sequence: Synthetic oligonucleotide
  Sense Strand Starting at position 791 of SEQ ID NO: 315312
augcaagugcauuaagguu

SEQ ID NO: 380896 - RNA, 19 nt, Artificial Sequence
  Description of Artificial Sequence: Synthetic oligonucleotide
  Antisense Strand to SEQ ID NO: 380895
aaccuuaaugcacuugcau

SEQ ID NO: 380897 - RNA, 19 nt, Artificial Sequence
  Description of Artificial Sequence: Synthetic oligonucleotide
  Sense Strand Starting at position 791 of SEQ ID NO: 315320
gcauuaagguugcccagua

SEQ ID NO: 380898 - RNA, 19 nt, Artificial Sequence
  Description of Artificial Sequence: Synthetic oligonucleotide
  Antisense Strand to SEQ ID NO: 380897
uacugggcaaccuuaaugc

SEQ ID NO: 380899 - RNA, 19 nt, Artificial Sequence
  Description of Artificial Sequence: Synthetic oligonucleotide
  Sense Strand Starting at position 791 of SEQ ID NO: 315325
aagguugcccaguaggaaa

SEQ ID NO: 380900 - RNA, 19 nt, Artificial Sequence
  Description of Artificial Sequence: Synthetic oligonucleotide
  Antisense Strand to SEQ ID NO: 380899
uuuccuacugggcaaccuu

SEQ ID NO: 380901 - RNA, 19 nt, Artificial Sequence
  Description of Artificial Sequence: Synthetic oligonucleotide
  Sense Strand Starting at position 791 of SEQ ID NO: 315372
acggacuucuucccagaca

SEQ ID NO: 380902 - RNA, 19 nt, Artificial Sequence
  Description of Artificial Sequence: Synthetic oligonucleotide
  Antisense Strand to SEQ ID NO: 380901
ugucugggaagaaguccgu

SEQ ID NO: 380903 - RNA, 19 nt, Artificial Sequence
  Description of Artificial Sequence: Synthetic oligonucleotide
  Sense Strand Starting at position 791 of SEQ ID NO: 315470
aagaaugucuagucuugaa

SEQ ID NO: 380904 - RNA, 19 nt, Artificial Sequence
  Description of Artificial Sequence: Synthetic oligonucleotide
  Antisense Strand to SEQ ID NO: 380903
uucaagacuagacauucuu

SEQ ID NO: 380905 - RNA, 19 nt, Artificial Sequence
  Description of Artificial Sequence: Synthetic oligonucleotide
  Sense Strand Starting at position 791 of SEQ ID NO: 315474
augucuagucuugaagaca

SEQ ID NO: 380906 - RNA, 19 nt, Artificial Sequence
  Description of Artificial Sequence: Synthetic oligonucleotide
  Antisense Strand to SEQ ID NO: 380905
ugucuucaagacuagacau

SEQ ID NO: 380907 - RNA, 19 nt, Artificial Sequence
  Description of Artificial Sequence: Synthetic oligonucleotide
  Sense Strand Starting at position 791 of SEQ ID NO: 315515
aaaucagucugagguauuu

SEQ ID NO: 380908 - RNA, 19 nt, Artificial Sequence
  Description of Artificial Sequence: Synthetic oligonucleotide
  Antisense Strand to SEQ ID NO: 380907
aaauaccucagacugauuu

SEQ ID NO: 380909 - RNA, 19 nt, Artificial Sequence
  Description of Artificial Sequence: Synthetic oligonucleotide
  Sense Strand Starting at position 791 of SEQ ID NO: 316061
agcguaaauuaaucaaaug

SEQ ID NO: 380910 - RNA, 19 nt, Artificial Sequence
  Description of Artificial Sequence: Synthetic oligonucleotide
  Antisense Strand to SEQ ID NO: 380909
cauuugauuaauuuacgcu

SEQ ID NO: 380911 - RNA, 19 nt, Artificial Sequence
  Description of Artificial Sequence: Synthetic oligonucleotide
  Sense Strand Starting at position 791 of SEQ ID NO: 316122
uggugagaucaggaggcuu

SEQ ID NO: 380912 - RNA, 19 nt, Artificial Sequence
  Description of Artificial Sequence: Synthetic oligonucleotide
  Antisense Strand to SEQ ID NO: 380911
aagccuccugaucucacca

SEQ ID NO: 380913 - RNA, 19 nt, Artificial Sequence
  Description of Artificial Sequence: Synthetic oligonucleotide
  Sense Strand Starting at position 791 of SEQ ID NO: 316170
augcaagagcgaugaaacu

SEQ ID NO: 380914 - RNA, 19 nt, Artificial Sequence
  Description of Artificial Sequence: Synthetic oligonucleotide
  Antisense Strand to SEQ ID NO: 380913
aguuucaucgcucuugcau

SEQ ID NO: 380915 - RNA, 19 nt, Artificial Sequence
  Description of Artificial Sequence: Synthetic oligonucleotide
  Sense Strand Starting at position 791 of SEQ ID NO: 316255
gggugaaacuccuaggaag

SEQ ID NO: 380916 - RNA, 19 nt, Artificial Sequence
  Description of Artificial Sequence: Synthetic oligonucleotide
  Antisense Strand to SEQ ID NO: 380915
cuuccuaggaguuucaccc

SEQ ID NO: 380917 - RNA, 19 nt, Artificial Sequence
  Description of Artificial Sequence: Synthetic oligonucleotide
  Sense Strand Starting at position 791 of SEQ ID NO: 316258
ugaaacuccuaggaagagu

SEQ ID NO: 380918 - RNA, 19 nt, Artificial Sequence
  Description of Artificial Sequence: Synthetic oligonucleotide
  Antisense Strand to SEQ ID NO: 380917
acucuuccuaggaguuuca

SEQ ID NO: 380919 - RNA, 19 nt, Artificial Sequence
  Description of Artificial Sequence: Synthetic oligonucleotide
  Sense Strand Starting at position 791 of SEQ ID NO: 316267
uaggaagaguuugcugagu

SEQ ID NO: 380920 - RNA, 19 nt, Artificial Sequence
  Description of Artificial Sequence: Synthetic oligonucleotide
  Antisense Strand to SEQ ID NO: 380919
acucagcaaacucuuccua

SEQ ID NO: 380921 - RNA, 19 nt, Artificial Sequence
  Description of Artificial Sequence: Synthetic oligonucleotide
  Sense Strand Starting at position 791 of SEQ ID NO: 316378
cggcuaauuucuucuaggu

SEQ ID NO: 380922 - RNA, 19 nt, Artificial Sequence
  Description of Artificial Sequence: Synthetic oligonucleotide
  Antisense Strand to SEQ ID NO: 380921
accuagaagaaauuagccg

SEQ ID NO: 380923 - RNA, 19 nt, Artificial Sequence
  Description of Artificial Sequence: Synthetic oligonucleotide
  Sense Strand Starting at position 791 of SEQ ID NO: 316816
ucuugcugacgcgaaagau

SEQ ID NO: 380924 - RNA, 19 nt, Artificial Sequence
  Description of Artificial Sequence: Synthetic oligonucleotide
  Antisense Strand to SEQ ID NO: 380923
aucuuucgcgucagcaaga

SEQ ID NO: 380925 - RNA, 19 nt, Artificial Sequence
  Description of Artificial Sequence: Synthetic oligonucleotide
  Sense Strand Starting at position 791 of SEQ ID NO: 317072
guacguguccucgaucacu

SEQ ID NO: 380926 - RNA, 19 nt, Artificial Sequence
  Description of Artificial Sequence: Synthetic oligonucleotide
  Antisense Strand to SEQ ID NO: 380925
agugaucgaggacacguac

SEQ ID NO: 380927 - RNA, 19 nt, Artificial Sequence
  Description of Artificial Sequence: Synthetic oligonucleotide
  Sense Strand Starting at position 791 of SEQ ID NO: 318039
ucaguaugcauguagauag

SEQ ID NO: 380928 - RNA, 19 nt, Artificial Sequence
  Description of Artificial Sequence: Synthetic oligonucleotide
  Antisense Strand to SEQ ID NO: 380927
cuaucuacaugcauacuga

SEQ ID NO: 380929 - RNA, 19 nt, Artificial Sequence
  Description of Artificial Sequence: Synthetic oligonucleotide
  Sense Strand Starting at position 791 of SEQ ID NO: 318154
aacucauugcggcauggga

SEQ ID NO: 380930 - RNA, 19 nt, Artificial Sequence
  Description of Artificial Sequence: Synthetic oligonucleotide
  Antisense Strand to SEQ ID NO: 380929
ucccaugccgcaaugaguu

SEQ ID NO: 380931 - RNA, 19 nt, Artificial Sequence
  Description of Artificial Sequence: Synthetic oligonucleotide
  Sense Strand Starting at position 791 of SEQ ID NO: 318211
caucaaaguggcuagucau

SEQ ID NO: 380932 - RNA, 19 nt, Artificial Sequence
  Description of Artificial Sequence: Synthetic oligonucleotide
  Antisense Strand to SEQ ID NO: 380931
augacuagccacuuugaug

SEQ ID NO: 380933 - RNA, 19 nt, Artificial Sequence
  Description of Artificial Sequence: Synthetic oligonucleotide
  Sense Strand Starting at position 791 of SEQ ID NO: 318341
gggaaauauuuccaccauc

SEQ ID NO: 380934 - RNA, 19 nt, Artificial Sequence
  Description of Artificial Sequence: Synthetic oligonucleotide
  Antisense Strand to SEQ ID NO: 380933
gaugguggaaauauuuccc

SEQ ID NO: 380935 - RNA, 19 nt, Artificial Sequence
  Description of Artificial Sequence: Synthetic oligonucleotide
  Sense Strand Starting at position 791 of SEQ ID NO: 318393
ccguucugauuucuaacuu

SEQ ID NO: 380936 - RNA, 19 nt, Artificial Sequence
  Description of Artificial Sequence: Synthetic oligonucleotide
  Antisense Strand to SEQ ID NO: 380935
aaguuagaaaucagaacgg

SEQ ID NO: 380937 - RNA, 19 nt, Artificial Sequence
  Description of Artificial Sequence: Synthetic oligonucleotide
  Sense Strand Starting at position 791 of SEQ ID NO: 318419
uugaauucuccauguggau

SEQ ID NO: 380938 - RNA, 19 nt, Artificial Sequence
  Description of Artificial Sequence: Synthetic oligonucleotide
  Antisense Strand to SEQ ID NO: 380937
auccacauggagaauucaa

SEQ ID NO: 380939 - RNA, 19 nt, Artificial Sequence
  Description of Artificial Sequence: Synthetic oligonucleotide
  Sense Strand Starting at position 791 of SEQ ID NO: 318443
guuuaaggaucauccacua

SEQ ID NO: 380940 - RNA, 19 nt, Artificial Sequence
  Description of Artificial Sequence: Synthetic oligonucleotide
  Antisense Strand to SEQ ID NO: 380939
uaguggaugauccuuaaac

SEQ ID NO: 380941 - RNA, 19 nt, Artificial Sequence
  Description of Artificial Sequence: Synthetic oligonucleotide
  Sense Strand Starting at position 791 of SEQ ID NO: 318455
uccacuagguuucugacua

SEQ ID NO: 380942 - RNA, 19 nt, Artificial Sequence
  Description of Artificial Sequence: Synthetic oligonucleotide
  Antisense Strand to SEQ ID NO: 380941
uagucagaaaccuagugga

SEQ ID NO: 380943 - RNA, 19 nt, Artificial Sequence
  Description of Artificial Sequence: Synthetic oligonucleotide
  Sense Strand Starting at position 791 of SEQ ID NO: 318459
cuagguuucugacuaaacc

SEQ ID NO: 380944 - RNA, 19 nt, Artificial Sequence
  Description of Artificial Sequence: Synthetic oligonucleotide
  Antisense Strand to SEQ ID NO: 380943
gguuuagucagaaaccuag

SEQ ID NO: 380945 - RNA, 19 nt, Artificial Sequence
  Description of Artificial Sequence: Synthetic oligonucleotide
  Sense Strand Starting at position 791 of SEQ ID NO: 318496
cuuaguaccuccuuuggaa

SEQ ID NO: 380946 - RNA, 19 nt, Artificial Sequence
  Description of Artificial Sequence: Synthetic oligonucleotide
  Antisense Strand to SEQ ID NO: 380945
uuccaaaggagguacuaag

SEQ ID NO: 380947 - RNA, 19 nt, Artificial Sequence
  Description of Artificial Sequence: Synthetic oligonucleotide
  Sense Strand Starting at position 791 of SEQ ID NO: 318535
ccauaacuaugcuugagua

SEQ ID NO: 380948 - RNA, 19 nt, Artificial Sequence
  Description of Artificial Sequence: Synthetic oligonucleotide
  Antisense Strand to SEQ ID NO: 380947
uacucaagcauaguuaugg

SEQ ID NO: 380949 - RNA, 19 nt, Artificial Sequence
  Description of Artificial Sequence: Synthetic oligonucleotide
  Sense Strand Starting at position 791 of SEQ ID NO: 318537
auaacuaugcuugaguaag

SEQ ID NO: 380950 - RNA, 19 nt, Artificial Sequence
  Description of Artificial Sequence: Synthetic oligonucleotide
  Antisense Strand to SEQ ID NO: 380949
cuuacucaagcauaguuau

SEQ ID NO: 380951 - RNA, 19 nt, Artificial Sequence
  Description of Artificial Sequence: Synthetic oligonucleotide
  Sense Strand Starting at position 791 of SEQ ID NO: 318640
gauucuacagucuggaacu

SEQ ID NO: 380952 - RNA, 19 nt, Artificial Sequence
  Description of Artificial Sequence: Synthetic oligonucleotide
  Antisense Strand to SEQ ID NO: 380951
aguuccagacuguagaauc

SEQ ID NO: 380953 - RNA, 19 nt, Artificial Sequence
  Description of Artificial Sequence: Synthetic oligonucleotide
  Sense Strand Starting at position 791 of SEQ ID NO: 318653
ggaacugagugcucugaag

SEQ ID NO: 380954 - RNA, 19 nt, Artificial Sequence
  Description of Artificial Sequence: Synthetic oligonucleotide
  Antisense Strand to SEQ ID NO: 380953
cuucagagcacucaguucc

SEQ ID NO: 380955 - RNA, 19 nt, Artificial Sequence
  Description of Artificial Sequence: Synthetic oligonucleotide
  Sense Strand Starting at position 791 of SEQ ID NO: 318655
aacugagugcucugaagca

SEQ ID NO: 380956 - RNA, 19 nt, Artificial Sequence
  Description of Artificial Sequence: Synthetic oligonucleotide
  Antisense Strand to SEQ ID NO: 380955
ugcuucagagcacucaguu

SEQ ID NO: 380957 - RNA, 19 nt, Artificial Sequence
  Description of Artificial Sequence: Synthetic oligonucleotide
  Sense Strand Starting at position 791 of SEQ ID NO: 318693
cgucauuucuauccaguga

SEQ ID NO: 380958 - RNA, 19 nt, Artificial Sequence
  Description of Artificial Sequence: Synthetic oligonucleotide
  Antisense Strand to SEQ ID NO: 380957
ucacuggauagaaaugacg

SEQ ID NO: 380959 - RNA, 19 nt, Artificial Sequence
  Description of Artificial Sequence: Synthetic oligonucleotide
  Sense Strand Starting at position 791 of SEQ ID NO: 318708
gugacaugccucuaaucca

SEQ ID NO: 380960 - RNA, 19 nt, Artificial Sequence
  Description of Artificial Sequence: Synthetic oligonucleotide
  Antisense Strand to SEQ ID NO: 380959
uggauuagaggcaugucac

SEQ ID NO: 380961 - RNA, 19 nt, Artificial Sequence
  Description of Artificial Sequence: Synthetic oligonucleotide
  Sense Strand Starting at position 791 of SEQ ID NO: 318736
acccuacuugcguacugau

SEQ ID NO: 380962 - RNA, 19 nt, Artificial Sequence
  Description of Artificial Sequence: Synthetic oligonucleotide
  Antisense Strand to SEQ ID NO: 380961
aucaguacgcaaguagggu

SEQ ID NO: 380963 - RNA, 19 nt, Artificial Sequence
  Description of Artificial Sequence: Synthetic oligonucleotide
  Sense Strand Starting at position 791 of SEQ ID NO: 318758
agauuacuauuggucaaug

SEQ ID NO: 380964 - RNA, 19 nt, Artificial Sequence
  Description of Artificial Sequence: Synthetic oligonucleotide
  Antisense Strand to SEQ ID NO: 380963
cauugaccaauaguaaucu

SEQ ID NO: 380965 - RNA, 19 nt, Artificial Sequence
  Description of Artificial Sequence: Synthetic oligonucleotide
  Sense Strand Starting at position 791 of SEQ ID NO: 318763
acuauuggucaaugccaaa

SEQ ID NO: 380966 - RNA, 19 nt, Artificial Sequence
  Description of Artificial Sequence: Synthetic oligonucleotide
  Antisense Strand to SEQ ID NO: 380965
uuuggcauugaccaauagu

SEQ ID NO: 380967 - RNA, 19 nt, Artificial Sequence
  Description of Artificial Sequence: Synthetic oligonucleotide
  Sense Strand Starting at position 791 of SEQ ID NO: 318998
gagcgagacuacgucuuua

SEQ ID NO: 380968 - RNA, 19 nt, Artificial Sequence
  Description of Artificial Sequence: Synthetic oligonucleotide
  Antisense Strand to SEQ ID NO: 380967
uaaagacguagucucgcuc

SEQ ID NO: 380969 - RNA, 19 nt, Artificial Sequence
  Description of Artificial Sequence: Synthetic oligonucleotide
  Sense Strand Starting at position 791 of SEQ ID NO: 319120
acagaaauauagugagaau

SEQ ID NO: 380970 - RNA, 19 nt, Artificial Sequence
  Description of Artificial Sequence: Synthetic oligonucleotide
  Antisense Strand to SEQ ID NO: 380969
auucucacuauauuucugu

SEQ ID NO: 380971 - RNA, 19 nt, Artificial Sequence
  Description of Artificial Sequence: Synthetic oligonucleotide
  Sense Strand Starting at position 791 of SEQ ID NO: 319152
gguggcuuauaacuuacua

SEQ ID NO: 380972 - RNA, 19 nt, Artificial Sequence
  Description of Artificial Sequence: Synthetic oligonucleotide
  Antisense Strand to SEQ ID NO: 380971
uaguaaguuauaagccacc

SEQ ID NO: 380973 - RNA, 19 nt, Artificial Sequence
  Description of Artificial Sequence: Synthetic oligonucleotide
  Sense Strand Starting at position 792 of SEQ ID NO: 315416
ugcauuggacccuggacau

SEQ ID NO: 380974 - RNA, 19 nt, Artificial Sequence
  Description of Artificial Sequence: Synthetic oligonucleotide
  Antisense Strand to SEQ ID NO: 380973
auguccaggguccaaugca

SEQ ID NO: 380975 - RNA, 19 nt, Artificial Sequence
  Description of Artificial Sequence: Synthetic oligonucleotide
  Sense Strand Starting at position 792 of SEQ ID NO: 315476
ucaugagucuugcccuucu

SEQ ID NO: 380976 - RNA, 19 nt, Artificial Sequence
  Description of Artificial Sequence: Synthetic oligonucleotide
  Antisense Strand to SEQ ID NO: 380975
agaagggcaagacucauga

SEQ ID NO: 380977 - RNA, 19 nt, Artificial Sequence
  Description of Artificial Sequence: Synthetic oligonucleotide
  Sense Strand Starting at position 792 of SEQ ID NO: 315592
gcauuuagcuccuccagca

SEQ ID NO: 380978 - RNA, 19 nt, Artificial Sequence
  Description of Artificial Sequence: Synthetic oligonucleotide
  Antisense Strand to SEQ ID NO: 380977
ugcuggaggagcuaaaugc

SEQ ID NO: 380979 - RNA, 19 nt, Artificial Sequence
  Description of Artificial Sequence: Synthetic oligonucleotide
  Sense Strand Starting at position 792 of SEQ ID NO: 315605
ccagcaagauggucaugau

SEQ ID NO: 380980 - RNA, 19 nt, Artificial Sequence
  Description of Artificial Sequence: Synthetic oligonucleotide
  Antisense Strand to SEQ ID NO: 380979
aucaugaccaucuugcugg

SEQ ID NO: 380981 - RNA, 19 nt, Artificial Sequence
  Description of Artificial Sequence: Synthetic oligonucleotide
  Sense Strand Starting at position 792 of SEQ ID NO: 315663
gcugcucucuagcuagaca

SEQ ID NO: 380982 - RNA, 19 nt, Artificial Sequence
  Description of Artificial Sequence: Synthetic oligonucleotide
  Antisense Strand to SEQ ID NO: 380981
ugucuagcuagagagcagc

SEQ ID NO: 380983 - RNA, 19 nt, Artificial Sequence
  Description of Artificial Sequence: Synthetic oligonucleotide
  Sense Strand Starting at position 792 of SEQ ID NO: 316004
cauagcugugcuggauaau

SEQ ID NO: 380984 - RNA, 19 nt, Artificial Sequence
  Description of Artificial Sequence: Synthetic oligonucleotide
  Antisense Strand to SEQ ID NO: 380983
auuauccagcacagcuaug

SEQ ID NO: 380985 - RNA, 19 nt, Artificial Sequence
  Description of Artificial Sequence: Synthetic oligonucleotide
  Sense Strand Starting at position 792 of SEQ ID NO: 316005
auagcugugcuggauaauu

SEQ ID NO: 380986 - RNA, 19 nt, Artificial Sequence
  Description of Artificial Sequence: Synthetic oligonucleotide
  Antisense Strand to SEQ ID NO: 380985
aauuauccagcacagcuau

SEQ ID NO: 380987 - RNA, 19 nt, Artificial Sequence
  Description of Artificial Sequence: Synthetic oligonucleotide
  Sense Strand Starting at position 792 of SEQ ID NO: 316013
gcuggauaauuggaacaca

SEQ ID NO: 380988 - RNA, 19 nt, Artificial Sequence
  Description of Artificial Sequence: Synthetic oligonucleotide
  Antisense Strand to SEQ ID NO: 380987
uguguuccaauuauccagc

SEQ ID NO: 380989 - RNA, 19 nt, Artificial Sequence
  Description of Artificial Sequence: Synthetic oligonucleotide
  Sense Strand Starting at position 792 of SEQ ID NO: 316103
ggucucacacagugauaag

SEQ ID NO: 380990 - RNA, 19 nt, Artificial Sequence
  Description of Artificial Sequence: Synthetic oligonucleotide
  Antisense Strand to SEQ ID NO: 380989
cuuaucacugugugagacc

SEQ ID NO: 380991 - RNA, 19 nt, Artificial Sequence
  Description of Artificial Sequence: Synthetic oligonucleotide
  Sense Strand Starting at position 792 of SEQ ID NO: 316112
cagugauaagcuuguucug

SEQ ID NO: 380992 - RNA, 19 nt, Artificial Sequence
  Description of Artificial Sequence: Synthetic oligonucleotide
  Antisense Strand to SEQ ID NO: 380991
cagaacaagcuuaucacug

SEQ ID NO: 380993 - RNA, 19 nt, Artificial Sequence
  Description of Artificial Sequence: Synthetic oligonucleotide
  Sense Strand Starting at position 792 of SEQ ID NO: 316154
acacuuggacugugucaaa

SEQ ID NO: 380994 - RNA, 19 nt, Artificial Sequence
  Description of Artificial Sequence: Synthetic oligonucleotide
  Antisense Strand to SEQ ID NO: 380993
uuugacacaguccaagugu

SEQ ID NO: 380995 - RNA, 19 nt, Artificial Sequence
  Description of Artificial Sequence: Synthetic oligonucleotide
  Sense Strand Starting at position 792 of SEQ ID NO: 316169
caaacagcucucgggagau

SEQ ID NO: 380996 - RNA, 19 nt, Artificial Sequence
  Description of Artificial Sequence: Synthetic oligonucleotide
  Antisense Strand to SEQ ID NO: 380995
aucucccgagagcuguuug

SEQ ID NO: 380997 - RNA, 19 nt, Artificial Sequence
  Description of Artificial Sequence: Synthetic oligonucleotide
  Sense Strand Starting at position 792 of SEQ ID NO: 316236
gacaucuguacugggugua

SEQ ID NO: 380998 - RNA, 19 nt, Artificial Sequence
  Description of Artificial Sequence: Synthetic oligonucleotide
  Antisense Strand to SEQ ID NO: 380997
uacacccaguacagauguc

SEQ ID NO: 380999 - RNA, 19 nt, Artificial Sequence
  Description of Artificial Sequence: Synthetic oligonucleotide
  Sense Strand Starting at position 792 of SEQ ID NO: 316239
aucuguacuggguguagua

SEQ ID NO: 381000 - RNA, 19 nt, Artificial Sequence
  Description of Artificial Sequence: Synthetic oligonucleotide
  Antisense Strand to SEQ ID NO: 380999
uacuacacccaguacagau

SEQ ID NO: 381001 - RNA, 19 nt, Artificial Sequence
  Description of Artificial Sequence: Synthetic oligonucleotide
  Sense Strand Starting at position 792 of SEQ ID NO: 316332
gccuauuacuucuuucugu

SEQ ID NO: 381002 - RNA, 19 nt, Artificial Sequence
  Description of Artificial Sequence: Synthetic oligonucleotide
  Antisense Strand to SEQ ID NO: 381001
acagaaagaaguaauaggc

SEQ ID NO: 381003 - RNA, 19 nt, Artificial Sequence
  Description of Artificial Sequence: Synthetic oligonucleotide
  Sense Strand Starting at position 792 of SEQ ID NO: 316562
gccaaugugacguaugucu

SEQ ID NO: 381004 - RNA, 19 nt, Artificial Sequence
  Description of Artificial Sequence: Synthetic oligonucleotide
  Antisense Strand to SEQ ID NO: 381003
agacauacgucacauuggc

SEQ ID NO: 381005 - RNA, 19 nt, Artificial Sequence
  Description of Artificial Sequence: Synthetic oligonucleotide
  Sense Strand Starting at position 792 of SEQ ID NO: 316631
cacaguugucugcgaauga

SEQ ID NO: 381006 - RNA, 19 nt, Artificial Sequence
  Description of Artificial Sequence: Synthetic oligonucleotide
  Antisense Strand to SEQ ID NO: 381005
ucauucgcagacaacugug

SEQ ID NO: 381007 - RNA, 19 nt, Artificial Sequence
  Description of Artificial Sequence: Synthetic oligonucleotide
  Sense Strand Starting at position 792 of SEQ ID NO: 316751
gcaccugauaggugaucuu

SEQ ID NO: 381008 - RNA, 19 nt, Artificial Sequence
  Description of Artificial Sequence: Synthetic oligonucleotide
  Antisense Strand to SEQ ID NO: 381007
aagaucaccuaucaggugc

SEQ ID NO: 381009 - RNA, 19 nt, Artificial Sequence
  Description of Artificial Sequence: Synthetic oligonucleotide
  Sense Strand Starting at position 792 of SEQ ID NO: 316785
guggaacucgcugaagaau

SEQ ID NO: 381010 - RNA, 19 nt, Artificial Sequence
  Description of Artificial Sequence: Synthetic oligonucleotide
  Antisense Strand to SEQ ID NO: 381009
auucuucagcgaguuccac

SEQ ID NO: 381011 - RNA, 19 nt, Artificial Sequence
  Description of Artificial Sequence: Synthetic oligonucleotide
  Sense Strand Starting at position 792 of SEQ ID NO: 317223
agggauucacgcuguaacu

SEQ ID NO: 381012 - RNA, 19 nt, Artificial Sequence
  Description of Artificial Sequence: Synthetic oligonucleotide
  Antisense Strand to SEQ ID NO: 381011
aguuacagcgugaaucccu

SEQ ID NO: 381013 - RNA, 19 nt, Artificial Sequence
  Description of Artificial Sequence: Synthetic oligonucleotide
  Sense Strand Starting at position 792 of SEQ ID NO: 317464
uugguacuguucuuuccua

SEQ ID NO: 381014 - RNA, 19 nt, Artificial Sequence
  Description of Artificial Sequence: Synthetic oligonucleotide
  Antisense Strand to SEQ ID NO: 381013
uaggaaagaacaguaccaa

SEQ ID NO: 381015 - RNA, 19 nt, Artificial Sequence
  Description of Artificial Sequence: Synthetic oligonucleotide
  Sense Strand Starting at position 792 of SEQ ID NO: 317482
accauaacuuauuggaaga

SEQ ID NO: 381016 - RNA, 19 nt, Artificial Sequence
  Description of Artificial Sequence: Synthetic oligonucleotide
  Antisense Strand to SEQ ID NO: 381015
ucuuccaauaaguuauggu

SEQ ID NO: 381017 - RNA, 19 nt, Artificial Sequence
  Description of Artificial Sequence: Synthetic oligonucleotide
  Sense Strand Starting at position 792 of SEQ ID NO: 317503
guggcauuccugccuugca

SEQ ID NO: 381018 - RNA, 19 nt, Artificial Sequence
  Description of Artificial Sequence: Synthetic oligonucleotide
  Antisense Strand to SEQ ID NO: 381017
ugcaaggcaggaaugccac

SEQ ID NO: 381019 - RNA, 19 nt, Artificial Sequence
  Description of Artificial Sequence: Synthetic oligonucleotide
  Sense Strand Starting at position 792 of SEQ ID NO: 317734
ggcuccaguaaguagaauu

SEQ ID NO: 381020 - RNA, 19 nt, Artificial Sequence
  Description of Artificial Sequence: Synthetic oligonucleotide
  Antisense Strand to SEQ ID NO: 381019
aauucuacuuacuggagcc

SEQ ID NO: 381021 - RNA, 19 nt, Artificial Sequence
  Description of Artificial Sequence: Synthetic oligonucleotide
  Sense Strand Starting at position 792 of SEQ ID NO: 317836
gagggaauucugugcugga

SEQ ID NO: 381022 - RNA, 19 nt, Artificial Sequence
  Description of Artificial Sequence: Synthetic oligonucleotide
  Antisense Strand to SEQ ID NO: 381021
uccagcacagaauucccuc

SEQ ID NO: 381023 - RNA, 19 nt, Artificial Sequence
  Description of Artificial Sequence: Synthetic oligonucleotide
  Sense Strand Starting at position 792 of SEQ ID NO: 317837
agggaauucugugcuggag

SEQ ID NO: 381024 - RNA, 19 nt, Artificial Sequence
  Description of Artificial Sequence: Synthetic oligonucleotide
  Antisense Strand to SEQ ID NO: 381023
cuccagcacagaauucccu

SEQ ID NO: 381025 - RNA, 19 nt, Artificial Sequence
  Description of Artificial Sequence: Synthetic oligonucleotide
  Sense Strand Starting at position 792 of SEQ ID NO: 317840
gaauucugugcuggagcga

SEQ ID NO: 381026 - RNA, 19 nt, Artificial Sequence
  Description of Artificial Sequence: Synthetic oligonucleotide
  Antisense Strand to SEQ ID NO: 381025
ucgcuccagcacagaauuc

SEQ ID NO: 381027 - RNA, 19 nt, Artificial Sequence
  Description of Artificial Sequence: Synthetic oligonucleotide
  Sense Strand Starting at position 792 of SEQ ID NO: 317896
cagaauuccugguuugucu

SEQ ID NO: 381028 - RNA, 19 nt, Artificial Sequence
  Description of Artificial Sequence: Synthetic oligonucleotide
  Antisense Strand to SEQ ID NO: 381027
agacaaaccaggaauucug

SEQ ID NO: 381029 - RNA, 19 nt, Artificial Sequence
  Description of Artificial Sequence: Synthetic oligonucleotide
  Sense Strand Starting at position 792 of SEQ ID NO: 318106
gcugguauuccucaacccu

SEQ ID NO: 381030 - RNA, 19 nt, Artificial Sequence
  Description of Artificial Sequence: Synthetic oligonucleotide
  Antisense Strand to SEQ ID NO: 381029
aggguugaggaauaccagc

SEQ ID NO: 381031 - RNA, 19 nt, Artificial Sequence
  Description of Artificial Sequence: Synthetic oligonucleotide
  Sense Strand Starting at position 792 of SEQ ID NO: 318216
ugucuuuggcuguaaguag

SEQ ID NO: 381032 - RNA, 19 nt, Artificial Sequence
  Description of Artificial Sequence: Synthetic oligonucleotide
  Antisense Strand to SEQ ID NO: 381031
cuacuuacagccaaagaca

SEQ ID NO: 381033 - RNA, 19 nt, Artificial Sequence
  Description of Artificial Sequence: Synthetic oligonucleotide
  Sense Strand Starting at position 792 of SEQ ID NO: 318312
uuaauaucuguuuggaaga

SEQ ID NO: 381034 - RNA, 19 nt, Artificial Sequence
  Description of Artificial Sequence: Synthetic oligonucleotide
  Antisense Strand to SEQ ID NO: 381033
ucuuccaaacagauauuaa

SEQ ID NO: 381035 - RNA, 19 nt, Artificial Sequence
  Description of Artificial Sequence: Synthetic oligonucleotide
  Sense Strand Starting at position 792 of SEQ ID NO: 318325
ggaagaguugcaugcucca

SEQ ID NO: 381036 - RNA, 19 nt, Artificial Sequence
  Description of Artificial Sequence: Synthetic oligonucleotide
  Antisense Strand to SEQ ID NO: 381035
uggagcaugcaacucuucc

SEQ ID NO: 381037 - RNA, 19 nt, Artificial Sequence
  Description of Artificial Sequence: Synthetic oligonucleotide
  Sense Strand Starting at position 792 of SEQ ID NO: 318328
agaguugcaugcuccaacu

SEQ ID NO: 381038 - RNA, 19 nt, Artificial Sequence
  Description of Artificial Sequence: Synthetic oligonucleotide
  Antisense Strand to SEQ ID NO: 381037
aguuggagcaugcaacucu

SEQ ID NO: 381039 - RNA, 19 nt, Artificial Sequence
  Description of Artificial Sequence: Synthetic oligonucleotide
  Sense Strand Starting at position 792 of SEQ ID NO: 318889
agacuugaaucagaguaau

SEQ ID NO: 381040 - RNA, 19 nt, Artificial Sequence
  Description of Artificial Sequence: Synthetic oligonucleotide
  Antisense Strand to SEQ ID NO: 381039
auuacucugauucaagucu

SEQ ID NO: 381041 - RNA, 19 nt, Artificial Sequence
  Description of Artificial Sequence: Synthetic oligonucleotide
  Sense Strand Starting at position 792 of SEQ ID NO: 318895
gaaucagaguaaugaagac

SEQ ID NO: 381042 - RNA, 19 nt, Artificial Sequence
  Description of Artificial Sequence: Synthetic oligonucleotide
  Antisense Strand to SEQ ID NO: 381041
gucuucauuacucugauuc

SEQ ID NO: 381043 - RNA, 19 nt, Artificial Sequence
  Description of Artificial Sequence: Synthetic oligonucleotide
  Sense Strand Starting at position 792 of SEQ ID NO: 318922
caggucaaauggguaagau

SEQ ID NO: 381044 - RNA, 19 nt, Artificial Sequence
  Description of Artificial Sequence: Synthetic oligonucleotide
  Antisense Strand to SEQ ID NO: 381043
aucuuacccauuugaccug

SEQ ID NO: 381045 - RNA, 19 nt, Artificial Sequence
  Description of Artificial Sequence: Synthetic oligonucleotide
  Sense Strand Starting at position 792 of SEQ ID NO: 318988
gacauugcauuuggaugua

SEQ ID NO: 381046 - RNA, 19 nt, Artificial Sequence
  Description of Artificial Sequence: Synthetic oligonucleotide
  Antisense Strand to SEQ ID NO: 381045
uacauccaaaugcaauguc

SEQ ID NO: 381047 - RNA, 19 nt, Artificial Sequence
  Description of Artificial Sequence: Synthetic oligonucleotide
  Sense Strand Starting at position 792 of SEQ ID NO: 319078
agcucuugccaagaaauug

SEQ ID NO: 381048 - RNA, 19 nt, Artificial Sequence
  Description of Artificial Sequence: Synthetic oligonucleotide
  Antisense Strand to SEQ ID NO: 381047
caauuucuuggcaagagcu

SEQ ID NO: 381049 - RNA, 19 nt, Artificial Sequence
  Description of Artificial Sequence: Synthetic oligonucleotide
  Sense Strand Starting at position 792 of SEQ ID NO: 319115
ggaaacaaagcuugugaau

SEQ ID NO: 381050 - RNA, 19 nt, Artificial Sequence
  Description of Artificial Sequence: Synthetic oligonucleotide
  Antisense Strand to SEQ ID NO: 381049
auucacaagcuuuguuucc

SEQ ID NO: 381051 - RNA, 19 nt, Artificial Sequence
  Description of Artificial Sequence: Synthetic oligonucleotide
  Sense Strand Starting at position 792 of SEQ ID NO: 319169
cuugguaacauacgacaga

SEQ ID NO: 381052 - RNA, 19 nt, Artificial Sequence
  Description of Artificial Sequence: Synthetic oligonucleotide
  Antisense Strand to SEQ ID NO: 381051
ucugucguauguuaccaag

SEQ ID NO: 381053 - RNA, 19 nt, Artificial Sequence
  Description of Artificial Sequence: Synthetic oligonucleotide
  Sense Strand Starting at position 793 of SEQ ID NO: 315332
gcugcucagccucauaagu

SEQ ID NO: 381054 - RNA, 19 nt, Artificial Sequence
  Description of Artificial Sequence: Synthetic oligonucleotide
  Antisense Strand to SEQ ID NO: 381053
acuuaugaggcugagcagc

SEQ ID NO: 381055 - RNA, 19 nt, Artificial Sequence
  Description of Artificial Sequence: Synthetic oligonucleotide
  Sense Strand Starting at position 793 of SEQ ID NO: 315585
uggguaacagcuuguaaca

SEQ ID NO: 381056 - RNA, 19 nt, Artificial Sequence
  Description of Artificial Sequence: Synthetic oligonucleotide
  Antisense Strand to SEQ ID NO: 381055
uguuacaagcuguuaccca

SEQ ID NO: 381057 - RNA, 19 nt, Artificial Sequence
  Description of Artificial Sequence: Synthetic oligonucleotide
  Sense Strand Starting at position 793 of SEQ ID NO: 315596
uuguaacagcuuugaacuu

SEQ ID NO: 381058 - RNA, 19 nt, Artificial Sequence
  Description of Artificial Sequence: Synthetic oligonucleotide
  Antisense Strand to SEQ ID NO: 381057
aaguucaaagcuguuacaa

SEQ ID NO: 381059 - RNA, 19 nt, Artificial Sequence
  Description of Artificial Sequence: Synthetic oligonucleotide
  Sense Strand Starting at position 793 of SEQ ID NO: 315640
uaagaauggucauuguaaa

SEQ ID NO: 381060 - RNA, 19 nt, Artificial Sequence
  Description of Artificial Sequence: Synthetic oligonucleotide
  Antisense Strand to SEQ ID NO: 381059
uuuacaaugaccauucuua

SEQ ID NO: 381061 - RNA, 19 nt, Artificial Sequence
  Description of Artificial Sequence: Synthetic oligonucleotide
  Sense Strand Starting at position 793 of SEQ ID NO: 315641
aagaauggucauuguaaau

SEQ ID NO: 381062 - RNA, 19 nt, Artificial Sequence
  Description of Artificial Sequence: Synthetic oligonucleotide
  Antisense Strand to SEQ ID NO: 381061
auuuacaaugaccauucuu

SEQ ID NO: 381063 - RNA, 19 nt, Artificial Sequence
  Description of Artificial Sequence: Synthetic oligonucleotide
  Sense Strand Starting at position 793 of SEQ ID NO: 315677
ugcaauuaucugcacaaug

SEQ ID NO: 381064 - RNA, 19 nt, Artificial Sequence
  Description of Artificial Sequence: Synthetic oligonucleotide
  Antisense Strand to SEQ ID NO: 381063
cauugugcagauaauugca

SEQ ID NO: 381065 - RNA, 19 nt, Artificial Sequence
  Description of Artificial Sequence: Synthetic oligonucleotide
  Sense Strand Starting at position 793 of SEQ ID NO: 315682
uuaucugcacaaugaauga

SEQ ID NO: 381066 - RNA, 19 nt, Artificial Sequence
  Description of Artificial Sequence: Synthetic oligonucleotide
  Antisense Strand to SEQ ID NO: 381065
ucauucauugugcagauaa

SEQ ID NO: 381067 - RNA, 19 nt, Artificial Sequence
  Description of Artificial Sequence: Synthetic oligonucleotide
  Sense Strand Starting at position 793 of SEQ ID NO: 315749
guuacugugagucagcaaa

SEQ ID NO: 381068 - RNA, 19 nt, Artificial Sequence
  Description of Artificial Sequence: Synthetic oligonucleotide
  Antisense Strand to SEQ ID NO: 381067
uuugcugacucacaguaac

SEQ ID NO: 381069 - RNA, 19 nt, Artificial Sequence
  Description of Artificial Sequence: Synthetic oligonucleotide
  Sense Strand Starting at position 793 of SEQ ID NO: 315837
cuuggaacuugauaaucau

SEQ ID NO: 381070 - RNA, 19 nt, Artificial Sequence
  Description of Artificial Sequence: Synthetic oligonucleotide
  Antisense Strand to SEQ ID NO: 381069
augauuaucaaguuccaag

SEQ ID NO: 381071 - RNA, 19 nt, Artificial Sequence
  Description of Artificial Sequence: Synthetic oligonucleotide
  Sense Strand Starting at position 793 of SEQ ID NO: 316151
gcuaaaggguggguuagaa

SEQ ID NO: 381072 - RNA, 19 nt, Artificial Sequence
  Description of Artificial Sequence: Synthetic oligonucleotide
  Antisense Strand to SEQ ID NO: 381071
uucuaacccacccuuuagc

SEQ ID NO: 381073 - RNA, 19 nt, Artificial Sequence
  Description of Artificial Sequence: Synthetic oligonucleotide
  Sense Strand Starting at position 793 of SEQ ID NO: 316195
uucuaacauguagaaguuu

SEQ ID NO: 381074 - RNA, 19 nt, Artificial Sequence
  Description of Artificial Sequence: Synthetic oligonucleotide
  Antisense Strand to SEQ ID NO: 381073
aaacuucuacauguuagaa

SEQ ID NO: 381075 - RNA, 19 nt, Artificial Sequence
  Description of Artificial Sequence: Synthetic oligonucleotide
  Sense Strand Starting at position 793 of SEQ ID NO: 316204
guagaaguuuaauucuaug

SEQ ID NO: 381076 - RNA, 19 nt, Artificial Sequence
  Description of Artificial Sequence: Synthetic oligonucleotide
  Antisense Strand to SEQ ID NO: 381075
cauagaauuaaacuucuac

SEQ ID NO: 381077 - RNA, 19 nt, Artificial Sequence
  Description of Artificial Sequence: Synthetic oligonucleotide
  Sense Strand Starting at position 793 of SEQ ID NO: 316407
uuguuaucgaggcaagauu

SEQ ID NO: 381078 - RNA, 19 nt, Artificial Sequence
  Description of Artificial Sequence: Synthetic oligonucleotide
  Antisense Strand to SEQ ID NO: 381077
aaucuugccucgauaacaa

SEQ ID NO: 381079 - RNA, 19 nt, Artificial Sequence
  Description of Artificial Sequence: Synthetic oligonucleotide
  Sense Strand Starting at position 793 of SEQ ID NO: 316460
aaagcuggcuguuuccaua

SEQ ID NO: 381080 - RNA, 19 nt, Artificial Sequence
  Description of Artificial Sequence: Synthetic oligonucleotide
  Antisense Strand to SEQ ID NO: 381079
uauggaaacagccagcuuu

SEQ ID NO: 381081 - RNA, 19 nt, Artificial Sequence
  Description of Artificial Sequence: Synthetic oligonucleotide
  Sense Strand Starting at position 793 of SEQ ID NO: 316538
ccuguuguuccguugcaau

SEQ ID NO: 381082 - RNA, 19 nt, Artificial Sequence
  Description of Artificial Sequence: Synthetic oligonucleotide
  Antisense Strand to SEQ ID NO: 381081
auugcaacggaacaacagg

SEQ ID NO: 381083 - RNA, 19 nt, Artificial Sequence
  Description of Artificial Sequence: Synthetic oligonucleotide
  Sense Strand Starting at position 793 of SEQ ID NO: 316540
uguuguuccguugcaaugu

SEQ ID NO: 381084 - RNA, 19 nt, Artificial Sequence
  Description of Artificial Sequence: Synthetic oligonucleotide
  Antisense Strand to SEQ ID NO: 381083
acauugcaacggaacaaca

SEQ ID NO: 381085 - RNA, 19 nt, Artificial Sequence
  Description of Artificial Sequence: Synthetic oligonucleotide
  Sense Strand Starting at position 793 of SEQ ID NO: 316680
ugguguuggagucaccuau

SEQ ID NO: 381086 - RNA, 19 nt, Artificial Sequence
  Description of Artificial Sequence: Synthetic oligonucleotide
  Antisense Strand to SEQ ID NO: 381085
auaggugacuccaacacca

SEQ ID NO: 381087 - RNA, 19 nt, Artificial Sequence
  Description of Artificial Sequence: Synthetic oligonucleotide
  Sense Strand Starting at position 793 of SEQ ID NO: 316684
guuggagucaccuaugauc

SEQ ID NO: 381088 - RNA, 19 nt, Artificial Sequence
  Description of Artificial Sequence: Synthetic oligonucleotide
  Antisense Strand to SEQ ID NO: 381087
gaucauaggugacuccaac

SEQ ID NO: 381089 - RNA, 19 nt, Artificial Sequence
  Description of Artificial Sequence: Synthetic oligonucleotide
  Sense Strand Starting at position 793 of SEQ ID NO: 316686
uggagucaccuaugaucac

SEQ ID NO: 381090 - RNA, 19 nt, Artificial Sequence
  Description of Artificial Sequence: Synthetic oligonucleotide
  Antisense Strand to SEQ ID NO: 381089
gugaucauaggugacucca

SEQ ID NO: 381091 - RNA, 19 nt, Artificial Sequence
  Description of Artificial Sequence: Synthetic oligonucleotide
  Sense Strand Starting at position 793 of SEQ ID NO: 316695
cuaugaucaccugagucau

SEQ ID NO: 381092 - RNA, 19 nt, Artificial Sequence
  Description of Artificial Sequence: Synthetic oligonucleotide
  Antisense Strand to SEQ ID NO: 381091
augacucaggugaucauag

SEQ ID NO: 381093 - RNA, 19 nt, Artificial Sequence
  Description of Artificial Sequence: Synthetic oligonucleotide
  Sense Strand Starting at position 793 of SEQ ID NO: 316705
cugagucauccugaccaua

SEQ ID NO: 381094 - RNA, 19 nt, Artificial Sequence
  Description of Artificial Sequence: Synthetic oligonucleotide
  Antisense Strand to SEQ ID NO: 381093
uauggucaggaugacucag

SEQ ID NO: 381095 - RNA, 19 nt, Artificial Sequence
  Description of Artificial Sequence: Synthetic oligonucleotide
  Sense Strand Starting at position 793 of SEQ ID NO: 316824
ggucgcguccuagagcaaa

SEQ ID NO: 381096 - RNA, 19 nt, Artificial Sequence
  Description of Artificial Sequence: Synthetic oligonucleotide
  Antisense Strand to SEQ ID NO: 381095
uuugcucuaggacgcgacc

SEQ ID NO: 381097 - RNA, 19 nt, Artificial Sequence
  Description of Artificial Sequence: Synthetic oligonucleotide
  Sense Strand Starting at position 793 of SEQ ID NO: 316938
agcguaucccuucgggaaa

SEQ ID NO: 381098 - RNA, 19 nt, Artificial Sequence
  Description of Artificial Sequence: Synthetic oligonucleotide
  Antisense Strand to SEQ ID NO: 381097
uuucccgaagggauacgcu

SEQ ID NO: 381099 - RNA, 19 nt, Artificial Sequence
  Description of Artificial Sequence: Synthetic oligonucleotide
  Sense Strand Starting at position 793 of SEQ ID NO: 317009
ugcacuuccuccucggaau

SEQ ID NO: 381100 - RNA, 19 nt, Artificial Sequence
  Description of Artificial Sequence: Synthetic oligonucleotide
  Antisense Strand to SEQ ID NO: 381099
auuccgaggaggaagugca

SEQ ID NO: 381101 - RNA, 19 nt, Artificial Sequence
  Description of Artificial Sequence: Synthetic oligonucleotide
  Sense Strand Starting at position 793 of SEQ ID NO: 317560
cggcuuugcagggagacaa

SEQ ID NO: 381102 - RNA, 19 nt, Artificial Sequence
  Description of Artificial Sequence: Synthetic oligonucleotide
  Antisense Strand to SEQ ID NO: 381101
uugucucccugcaaagccg

SEQ ID NO: 381103 - RNA, 19 nt, Artificial Sequence
  Description of Artificial Sequence: Synthetic oligonucleotide
  Sense Strand Starting at position 793 of SEQ ID NO: 318625
agaccuauguucuugugau

SEQ ID NO: 381104 - RNA, 19 nt, Artificial Sequence
  Description of Artificial Sequence: Synthetic oligonucleotide
  Antisense Strand to SEQ ID NO: 381103
aucacaagaacauaggucu

SEQ ID NO: 381105 - RNA, 19 nt, Artificial Sequence
  Description of Artificial Sequence: Synthetic oligonucleotide
  Sense Strand Starting at position 793 of SEQ ID NO: 318635
ucuugugauucccagauuu

SEQ ID NO: 381106 - RNA, 19 nt, Artificial Sequence
  Description of Artificial Sequence: Synthetic oligonucleotide
  Antisense Strand to SEQ ID NO: 381105
aaaucugggaaucacaaga

SEQ ID NO: 381107 - RNA, 19 nt, Artificial Sequence
  Description of Artificial Sequence: Synthetic oligonucleotide
  Sense Strand Starting at position 793 of SEQ ID NO: 318698
uccagcagcccguuugauu

SEQ ID NO: 381108 - RNA, 19 nt, Artificial Sequence
  Description of Artificial Sequence: Synthetic oligonucleotide
  Antisense Strand to SEQ ID NO: 381107
aaucaaacgggcugcugga

SEQ ID NO: 381109 - RNA, 19 nt, Artificial Sequence
  Description of Artificial Sequence: Synthetic oligonucleotide
  Sense Strand Starting at position 793 of SEQ ID NO: 318783
agucaagaucugggcguuu

SEQ ID NO: 381110 - RNA, 19 nt, Artificial Sequence
  Description of Artificial Sequence: Synthetic oligonucleotide
  Antisense Strand to SEQ ID NO: 381109
aaacgcccagaucuugacu

SEQ ID NO: 381111 - RNA, 19 nt, Artificial Sequence
  Description of Artificial Sequence: Synthetic oligonucleotide
  Sense Strand Starting at position 793 of SEQ ID NO: 318785
ucaagaucugggcguuuca

SEQ ID NO: 381112 - RNA, 19 nt, Artificial Sequence
  Description of Artificial Sequence: Synthetic oligonucleotide
  Antisense Strand to SEQ ID NO: 381111
ugaaacgcccagaucuuga

SEQ ID NO: 381113 - RNA, 19 nt, Artificial Sequence
  Description of Artificial Sequence: Synthetic oligonucleotide
  Sense Strand Starting at position 793 of SEQ ID NO: 318851
guaugcgugcugaggugaa

SEQ ID NO: 381114 - RNA, 19 nt, Artificial Sequence
  Description of Artificial Sequence: Synthetic oligonucleotide
  Antisense Strand to SEQ ID NO: 381113
uucaccucagcacgcauac

SEQ ID NO: 381115 - RNA, 19 nt, Artificial Sequence
  Description of Artificial Sequence: Synthetic oligonucleotide
  Sense Strand Starting at position 793 of SEQ ID NO: 318914
gaaguaagaugggcugaua

SEQ ID NO: 381116 - RNA, 19 nt, Artificial Sequence
  Description of Artificial Sequence: Synthetic oligonucleotide
  Antisense Strand to SEQ ID NO: 381115
uaucagcccaucuuacuuc

SEQ ID NO: 381117 - RNA, 19 nt, Artificial Sequence
  Description of Artificial Sequence: Synthetic oligonucleotide
  Sense Strand Starting at position 793 of SEQ ID NO: 318925
ggcugauagaggcaugaau

SEQ ID NO: 381118 - RNA, 19 nt, Artificial Sequence
  Description of Artificial Sequence: Synthetic oligonucleotide
  Antisense Strand to SEQ ID NO: 381117
auucaugccucuaucagcc

SEQ ID NO: 381119 - RNA, 19 nt, Artificial Sequence
  Description of Artificial Sequence: Synthetic oligonucleotide
  Sense Strand Starting at position 793 of SEQ ID NO: 318938
augaauagaugauauggua

SEQ ID NO: 381120 - RNA, 19 nt, Artificial Sequence
  Description of Artificial Sequence: Synthetic oligonucleotide
  Antisense Strand to SEQ ID NO: 381119
uaccauaucaucuauucau

SEQ ID NO: 381121 - RNA, 19 nt, Artificial Sequence
  Description of Artificial Sequence: Synthetic oligonucleotide
  Sense Strand Starting at position 793 of SEQ ID NO: 318941
aauagaugauaugguaaga

SEQ ID NO: 381122 - RNA, 19 nt, Artificial Sequence
  Description of Artificial Sequence: Synthetic oligonucleotide
  Antisense Strand to SEQ ID NO: 381121
ucuuaccauaucaucuauu

SEQ ID NO: 381123 - RNA, 19 nt, Artificial Sequence
  Description of Artificial Sequence: Synthetic oligonucleotide
  Sense Strand Starting at position 793 of SEQ ID NO: 318946
augauaugguaagauguua

SEQ ID NO: 381124 - RNA, 19 nt, Artificial Sequence
  Description of Artificial Sequence: Synthetic oligonucleotide
  Antisense Strand to SEQ ID NO: 381123
uaacaucuuaccauaucau

SEQ ID NO: 381125 - RNA, 19 nt, Artificial Sequence
  Description of Artificial Sequence: Synthetic oligonucleotide
  Sense Strand Starting at position 793 of SEQ ID NO: 318957
agauguuaaacuuaggcga

SEQ ID NO: 381126 - RNA, 19 nt, Artificial Sequence
  Description of Artificial Sequence: Synthetic oligonucleotide
  Antisense Strand to SEQ ID NO: 381125
ucgccuaaguuuaacaucu

SEQ ID NO: 381127 - RNA, 19 nt, Artificial Sequence
  Description of Artificial Sequence: Synthetic oligonucleotide
  Sense Strand Starting at position 793 of SEQ ID NO: 319005
uuuccaguuugcucugaaa

SEQ ID NO: 381128 - RNA, 19 nt, Artificial Sequence
  Description of Artificial Sequence: Synthetic oligonucleotide
  Antisense Strand to SEQ ID NO: 381127
uuucagagcaaacuggaaa

SEQ ID NO: 381129 - RNA, 19 nt, Artificial Sequence
  Description of Artificial Sequence: Synthetic oligonucleotide
  Sense Strand Starting at position 793 of SEQ ID NO: 319132
uuugguaaaucugcaaguu

SEQ ID NO: 381130 - RNA, 19 nt, Artificial Sequence
  Description of Artificial Sequence: Synthetic oligonucleotide
  Antisense Strand to SEQ ID NO: 381129
aacuugcagauuuaccaaa

SEQ ID NO: 381131 - RNA, 19 nt, Artificial Sequence
  Description of Artificial Sequence: Synthetic oligonucleotide
  Sense Strand Starting at position 793 of SEQ ID NO: 319133
uugguaaaucugcaaguuc

SEQ ID NO: 381132 - RNA, 19 nt, Artificial Sequence
  Description of Artificial Sequence: Synthetic oligonucleotide
  Antisense Strand to SEQ ID NO: 381131
gaacuugcagauuuaccaa

SEQ ID NO: 381133 - RNA, 19 nt, Artificial Sequence
  Description of Artificial Sequence: Synthetic oligonucleotide
  Sense Strand Starting at position 794 of SEQ ID NO: 315290
gcuaaaggguggguuagaa

SEQ ID NO: 381134 - RNA, 19 nt, Artificial Sequence
  Description of Artificial Sequence: Synthetic oligonucleotide
  Antisense Strand to SEQ ID NO: 381133
uucuaacccacccuuuagc

SEQ ID NO: 381135 - RNA, 19 nt, Artificial Sequence
  Description of Artificial Sequence: Synthetic oligonucleotide
  Sense Strand Starting at position 794 of SEQ ID NO: 315334
uucuaacauguagaaguuu

SEQ ID NO: 381136 - RNA, 19 nt, Artificial Sequence
  Description of Artificial Sequence: Synthetic oligonucleotide
  Antisense Strand to SEQ ID NO: 381135
aaacuucuacauguuagaa

SEQ ID NO: 381137 - RNA, 19 nt, Artificial Sequence
  Description of Artificial Sequence: Synthetic oligonucleotide
  Sense Strand Starting at position 794 of SEQ ID NO: 315343
guagaaguuuaauucuaug

SEQ ID NO: 381138 - RNA, 19 nt, Artificial Sequence
  Description of Artificial Sequence: Synthetic oligonucleotide
  Antisense Strand to SEQ ID NO: 381137
cauagaauuaaacuucuac

SEQ ID NO: 381139 - RNA, 19 nt, Artificial Sequence
  Description of Artificial Sequence: Synthetic oligonucleotide
  Sense Strand Starting at position 794 of SEQ ID NO: 315546
uuguuaucgaggcaagauu

SEQ ID NO: 381140 - RNA, 19 nt, Artificial Sequence
  Description of Artificial Sequence: Synthetic oligonucleotide
  Antisense Strand to SEQ ID NO: 381139
aaucuugccucgauaacaa

SEQ ID NO: 381141 - RNA, 19 nt, Artificial Sequence
  Description of Artificial Sequence: Synthetic oligonucleotide
  Sense Strand Starting at position 794 of SEQ ID NO: 315599
aaagcuggcuguuuccaua

SEQ ID NO: 381142 - RNA, 19 nt, Artificial Sequence
  Description of Artificial Sequence: Synthetic oligonucleotide
  Antisense Strand to SEQ ID NO: 381141
uauggaaacagccagcuuu

SEQ ID NO: 381143 - RNA, 19 nt, Artificial Sequence
  Description of Artificial Sequence: Synthetic oligonucleotide
  Sense Strand Starting at position 794 of SEQ ID NO: 315677
ccuguuguuccguugcaau

SEQ ID NO: 381144 - RNA, 19 nt, Artificial Sequence
  Description of Artificial Sequence: Synthetic oligonucleotide
  Antisense Strand to SEQ ID NO: 381143
auugcaacggaacaacagg

SEQ ID NO: 381145 - RNA, 19 nt, Artificial Sequence
  Description of Artificial Sequence: Synthetic oligonucleotide
  Sense Strand Starting at position 794 of SEQ ID NO: 315679
uguuguuccguugcaaugu

SEQ ID NO: 381146 - RNA, 19 nt, Artificial Sequence
  Description of Artificial Sequence: Synthetic oligonucleotide
  Antisense Strand to SEQ ID NO: 381145
acauugcaacggaacaaca

SEQ ID NO: 381147 - RNA, 19 nt, Artificial Sequence
  Description of Artificial Sequence: Synthetic oligonucleotide
  Sense Strand Starting at position 794 of SEQ ID NO: 315819
ugguguuggagucaccuau

SEQ ID NO: 381148 - RNA, 19 nt, Artificial Sequence
  Description of Artificial Sequence: Synthetic oligonucleotide
  Antisense Strand to SEQ ID NO: 381147
auaggugacuccaacacca

SEQ ID NO: 381149 - RNA, 19 nt, Artificial Sequence
  Description of Artificial Sequence: Synthetic oligonucleotide
  Sense Strand Starting at position 794 of SEQ ID NO: 315823
guuggagucaccuaugauc

SEQ ID NO: 381150 - RNA, 19 nt, Artificial Sequence
  Description of Artificial Sequence: Synthetic oligonucleotide
  Antisense Strand to SEQ ID NO: 381149
gaucauaggugacuccaac

SEQ ID NO: 381151 - RNA, 19 nt, Artificial Sequence
  Description of Artificial Sequence: Synthetic oligonucleotide
  Sense Strand Starting at position 794 of SEQ ID NO: 315825
uggagucaccuaugaucac

SEQ ID NO: 381152 - RNA, 19 nt, Artificial Sequence
  Description of Artificial Sequence: Synthetic oligonucleotide
  Antisense Strand to SEQ ID NO: 381151
gugaucauaggugacucca

SEQ ID NO: 381153 - RNA, 19 nt, Artificial Sequence
  Description of Artificial Sequence: Synthetic oligonucleotide
  Sense Strand Starting at position 794 of SEQ ID NO: 315834
cuaugaucaccugagucau

SEQ ID NO: 381154 - RNA, 19 nt, Artificial Sequence
  Description of Artificial Sequence: Synthetic oligonucleotide
  Antisense Strand to SEQ ID NO: 381153
augacucaggugaucauag

SEQ ID NO: 381155 - RNA, 19 nt, Artificial Sequence
  Description of Artificial Sequence: Synthetic oligonucleotide
  Sense Strand Starting at position 794 of SEQ ID NO: 315844
cugagucauccugaccaua

SEQ ID NO: 381156 - RNA, 19 nt, Artificial Sequence
  Description of Artificial Sequence: Synthetic oligonucleotide
  Antisense Strand to SEQ ID NO: 381155
uauggucaggaugacucag

SEQ ID NO: 381157 - RNA, 19 nt, Artificial Sequence
  Description of Artificial Sequence: Synthetic oligonucleotide
  Sense Strand Starting at position 794 of SEQ ID NO: 315963
ggucgcguccuagagcaaa

SEQ ID NO: 381158 - RNA, 19 nt, Artificial Sequence
  Description of Artificial Sequence: Synthetic oligonucleotide
  Antisense Strand to SEQ ID NO: 381157
uuugcucuaggacgcgacc

SEQ ID NO: 381159 - RNA, 19 nt, Artificial Sequence
  Description of Artificial Sequence: Synthetic oligonucleotide
  Sense Strand Starting at position 794 of SEQ ID NO: 316077
agcguaucccuucgggaaa

SEQ ID NO: 381160 - RNA, 19 nt, Artificial Sequence
  Description of Artificial Sequence: Synthetic oligonucleotide
  Antisense Strand to SEQ ID NO: 381159
uuucccgaagggauacgcu

SEQ ID NO: 381161 - RNA, 19 nt, Artificial Sequence
  Description of Artificial Sequence: Synthetic oligonucleotide
  Sense Strand Starting at position 794 of SEQ ID NO: 316148
ugcacuuccuccucggaau

SEQ ID NO: 381162 - RNA, 19 nt, Artificial Sequence
  Description of Artificial Sequence: Synthetic oligonucleotide
  Antisense Strand to SEQ ID NO: 381161
auuccgaggaggaagugca

SEQ ID NO: 381163 - RNA, 19 nt, Artificial Sequence
  Description of Artificial Sequence: Synthetic oligonucleotide
  Sense Strand Starting at position 794 of SEQ ID NO: 316699
cggcuuugcagggagacaa

SEQ ID NO: 381164 - RNA, 19 nt, Artificial Sequence
  Description of Artificial Sequence: Synthetic oligonucleotide
  Antisense Strand to SEQ ID NO: 381163
uugucucccugcaaagccg

SEQ ID NO: 381165 - RNA, 19 nt, Artificial Sequence
  Description of Artificial Sequence: Synthetic oligonucleotide
  Sense Strand Starting at position 794 of SEQ ID NO: 317764
agaccuauguucuugugau

SEQ ID NO: 381166 - RNA, 19 nt, Artificial Sequence
  Description of Artificial Sequence: Synthetic oligonucleotide
  Antisense Strand to SEQ ID NO: 381165
aucacaagaacauaggucu

SEQ ID NO: 381167 - RNA, 19 nt, Artificial Sequence
  Description of Artificial Sequence: Synthetic oligonucleotide
  Sense Strand Starting at position 794 of SEQ ID NO: 317774
ucuugugauucccagauuu

SEQ ID NO: 381168 - RNA, 19 nt, Artificial Sequence
  Description of Artificial Sequence: Synthetic oligonucleotide
  Antisense Strand to SEQ ID NO: 381167
aaaucugggaaucacaaga

SEQ ID NO: 381169 - RNA, 19 nt, Artificial Sequence
  Description of Artificial Sequence: Synthetic oligonucleotide
  Sense Strand Starting at position 794 of SEQ ID NO: 317837
uccagcagcccguuugauu

SEQ ID NO: 381170 - RNA, 19 nt, Artificial Sequence
  Description of Artificial Sequence: Synthetic oligonucleotide
  Antisense Strand to SEQ ID NO: 381169
aaucaaacgggcugcugga

SEQ ID NO: 381171 - RNA, 19 nt, Artificial Sequence
  Description of Artificial Sequence: Synthetic oligonucleotide
  Sense Strand Starting at position 794 of SEQ ID NO: 317922
agucaagaucugggcguuu

SEQ ID NO: 381172 - RNA, 19 nt, Artificial Sequence
  Description of Artificial Sequence: Synthetic oligonucleotide
  Antisense Strand to SEQ ID NO: 381171
aaacgcccagaucuugacu

SEQ ID NO: 381173 - RNA, 19 nt, Artificial Sequence
  Description of Artificial Sequence: Synthetic oligonucleotide
  Sense Strand Starting at position 794 of SEQ ID NO: 317924
ucaagaucugggcguuuca

SEQ ID NO: 381174 - RNA, 19 nt, Artificial Sequence
  Description of Artificial Sequence: Synthetic oligonucleotide
  Antisense Strand to SEQ ID NO: 381173
ugaaacgcccagaucuuga

SEQ ID NO: 381175 - RNA, 19 nt, Artificial Sequence
  Description of Artificial Sequence: Synthetic oligonucleotide
  Sense Strand Starting at position 794 of SEQ ID NO: 317990
guaugcgugcugaggugaa

SEQ ID NO: 381176 - RNA, 19 nt, Artificial Sequence
  Description of Artificial Sequence: Synthetic oligonucleotide
  Antisense Strand to SEQ ID NO: 381175
uucaccucagcacgcauac

SEQ ID NO: 381177 - RNA, 19 nt, Artificial Sequence
  Description of Artificial Sequence: Synthetic oligonucleotide
  Sense Strand Starting at position 794 of SEQ ID NO: 318053
gaaguaagaugggcugaua

SEQ ID NO: 381178 - RNA, 19 nt, Artificial Sequence
  Description of Artificial Sequence: Synthetic oligonucleotide
  Antisense Strand to SEQ ID NO: 381177
uaucagcccaucuuacuuc

SEQ ID NO: 381179 - RNA, 19 nt, Artificial Sequence
  Description of Artificial Sequence: Synthetic oligonucleotide
  Sense Strand Starting at position 794 of SEQ ID NO: 318064
ggcugauagaggcaugaau

SEQ ID NO: 381180 - RNA, 19 nt, Artificial Sequence
  Description of Artificial Sequence: Synthetic oligonucleotide
  Antisense Strand to SEQ ID NO: 381179
auucaugccucuaucagcc

SEQ ID NO: 381181 - RNA, 19 nt, Artificial Sequence
  Description of Artificial Sequence: Synthetic oligonucleotide
  Sense Strand Starting at position 794 of SEQ ID NO: 318077
augaauagaugauauggua

SEQ ID NO: 381182 - RNA, 19 nt, Artificial Sequence
  Description of Artificial Sequence: Synthetic oligonucleotide
  Antisense Strand to SEQ ID NO: 381181
uaccauaucaucuauucau

SEQ ID NO: 381183 - RNA, 19 nt, Artificial Sequence
  Description of Artificial Sequence: Synthetic oligonucleotide
  Sense Strand Starting at position 794 of SEQ ID NO: 318080
aauagaugauaugguaaga

SEQ ID NO: 381184 - RNA, 19 nt, Artificial Sequence
  Description of Artificial Sequence: Synthetic oligonucleotide
  Antisense Strand to SEQ ID NO: 381183
ucuuaccauaucaucuauu

SEQ ID NO: 381185 - RNA, 19 nt, Artificial Sequence
  Description of Artificial Sequence: Synthetic oligonucleotide
  Sense Strand Starting at position 794 of SEQ ID NO: 318085
augauaugguaagauguua

SEQ ID NO: 381186 - RNA, 19 nt, Artificial Sequence
  Description of Artificial Sequence: Synthetic oligonucleotide
  Antisense Strand to SEQ ID NO: 381185
uaacaucuuaccauaucau

SEQ ID NO: 381187 - RNA, 19 nt, Artificial Sequence
  Description of Artificial Sequence: Synthetic oligonucleotide
  Sense Strand Starting at position 794 of SEQ ID NO: 318096
agauguuaaacuuaggcga

SEQ ID NO: 381188 - RNA, 19 nt, Artificial Sequence
  Description of Artificial Sequence: Synthetic oligonucleotide
  Antisense Strand to SEQ ID NO: 381187
ucgccuaaguuuaacaucu

SEQ ID NO: 381189 - RNA, 19 nt, Artificial Sequence
  Description of Artificial Sequence: Synthetic oligonucleotide
  Sense Strand Starting at position 794 of SEQ ID NO: 318144
uuuccaguuugcucugaaa

SEQ ID NO: 381190 - RNA, 19 nt, Artificial Sequence
  Description of Artificial Sequence: Synthetic oligonucleotide
  Antisense Strand to SEQ ID NO: 381189
uuucagagcaaacuggaaa

SEQ ID NO: 381191 - RNA, 19 nt, Artificial Sequence
  Description of Artificial Sequence: Synthetic oligonucleotide
  Sense Strand Starting at position 794 of SEQ ID NO: 318271
uuugguaaaucugcaaguu

SEQ ID NO: 381192 - RNA, 19 nt, Artificial Sequence
  Description of Artificial Sequence: Synthetic oligonucleotide
  Antisense Strand to SEQ ID NO: 381191
aacuugcagauuuaccaaa

SEQ ID NO: 381193 - RNA, 19 nt, Artificial Sequence
  Description of Artificial Sequence: Synthetic oligonucleotide
  Sense Strand Starting at position 794 of SEQ ID NO: 318272
uugguaaaucugcaaguuc

SEQ ID NO: 381194 - RNA, 19 nt, Artificial Sequence
  Description of Artificial Sequence: Synthetic oligonucleotide
  Antisense Strand to SEQ ID NO: 381193
gaacuugcagauuuaccaa

SEQ ID NO: 381195 - RNA, 19 nt, Artificial Sequence
  Description of Artificial Sequence: Synthetic oligonucleotide
  Sense Strand Starting at position 794 of SEQ ID NO: 318358
uagcaagucugagcuauuc

SEQ ID NO: 381196 - RNA, 19 nt, Artificial Sequence
  Description of Artificial Sequence: Synthetic oligonucleotide
  Antisense Strand to SEQ ID NO: 381195
gaauagcucagacuugcua

SEQ ID NO: 381197 - RNA, 19 nt, Artificial Sequence
  Description of Artificial Sequence: Synthetic oligonucleotide
  Sense Strand Starting at position 794 of SEQ ID NO: 318413
uugguauugcuagagcaaa

SEQ ID NO: 381198 - RNA, 19 nt, Artificial Sequence
  Description of Artificial Sequence: Synthetic oligonucleotide
  Antisense Strand to SEQ ID NO: 381197
uuugcucuagcaauaccaa

SEQ ID NO: 381199 - RNA, 19 nt, Artificial Sequence
  Description of Artificial Sequence: Synthetic oligonucleotide
  Sense Strand Starting at position 794 of SEQ ID NO: 318455
ugcucugguucccuaacua

SEQ ID NO: 381200 - RNA, 19 nt, Artificial Sequence
  Description of Artificial Sequence: Synthetic oligonucleotide
  Antisense Strand to SEQ ID NO: 381199
uaguuagggaaccagagca

SEQ ID NO: 381201 - RNA, 19 nt, Artificial Sequence
  Description of Artificial Sequence: Synthetic oligonucleotide
  Sense Strand Starting at position 794 of SEQ ID NO: 318549
aucugauuacucugcugaa

SEQ ID NO: 381202 - RNA, 19 nt, Artificial Sequence
  Description of Artificial Sequence: Synthetic oligonucleotide
  Antisense Strand to SEQ ID NO: 381201
uucagcagaguaaucagau

SEQ ID NO: 381203 - RNA, 19 nt, Artificial Sequence
  Description of Artificial Sequence: Synthetic oligonucleotide
  Sense Strand Starting at position 794 of SEQ ID NO: 318550
ucugauuacucugcugaaa

SEQ ID NO: 381204 - RNA, 19 nt, Artificial Sequence
  Description of Artificial Sequence: Synthetic oligonucleotide
  Antisense Strand to SEQ ID NO: 381203
uuucagcagaguaaucaga

SEQ ID NO: 381205 - RNA, 19 nt, Artificial Sequence
  Description of Artificial Sequence: Synthetic oligonucleotide
  Sense Strand Starting at position 794 of SEQ ID NO: 318660
uuccaaggcugucuugaua

SEQ ID NO: 381206 - RNA, 19 nt, Artificial Sequence
  Description of Artificial Sequence: Synthetic oligonucleotide
  Antisense Strand to SEQ ID NO: 381205
uaucaagacagccuuggaa

SEQ ID NO: 381207 - RNA, 19 nt, Artificial Sequence
  Description of Artificial Sequence: Synthetic oligonucleotide
  Sense Strand Starting at position 794 of SEQ ID NO: 318710
acgguagcccucuauucuu

SEQ ID NO: 381208 - RNA, 19 nt, Artificial Sequence
  Description of Artificial Sequence: Synthetic oligonucleotide
  Antisense Strand to SEQ ID NO: 381207
aagaauagagggcuaccgu

SEQ ID NO: 381209 - RNA, 19 nt, Artificial Sequence
  Description of Artificial Sequence: Synthetic oligonucleotide
  Sense Strand Starting at position 794 of SEQ ID NO: 318753
ucaugugaugcugauggaa

SEQ ID NO: 381210 - RNA, 19 nt, Artificial Sequence
  Description of Artificial Sequence: Synthetic oligonucleotide
  Antisense Strand to SEQ ID NO: 381209
uuccaucagcaucacauga

SEQ ID NO: 381211 - RNA, 19 nt, Artificial Sequence
  Description of Artificial Sequence: Synthetic oligonucleotide
  Sense Strand Starting at position 794 of SEQ ID NO: 318913
ggcuguguacuguaugauu

SEQ ID NO: 381212 - RNA, 19 nt, Artificial Sequence
  Description of Artificial Sequence: Synthetic oligonucleotide
  Antisense Strand to SEQ ID NO: 381211
aaucauacaguacacagcc

SEQ ID NO: 381213 - RNA, 19 nt, Artificial Sequence
  Description of Artificial Sequence: Synthetic oligonucleotide
  Sense Strand Starting at position 795 of SEQ ID NO: 315311
cuaugaugcugaccucaaa

SEQ ID NO: 381214 - RNA, 19 nt, Artificial Sequence
  Description of Artificial Sequence: Synthetic oligonucleotide
  Antisense Strand to SEQ ID NO: 381213
uuugaggucagcaucauag

SEQ ID NO: 381215 - RNA, 19 nt, Artificial Sequence
  Description of Artificial Sequence: Synthetic oligonucleotide
  Sense Strand Starting at position 795 of SEQ ID NO: 317346
gccagaaguccuuagguua

SEQ ID NO: 381216 - RNA, 19 nt, Artificial Sequence
  Description of Artificial Sequence: Synthetic oligonucleotide
  Antisense Strand to SEQ ID NO: 381215
uaaccuaaggacuucuggc

SEQ ID NO: 381217 - RNA, 19 nt, Artificial Sequence
  Description of Artificial Sequence: Synthetic oligonucleotide
  Sense Strand Starting at position 795 of SEQ ID NO: 317366
ggguaacauacguagcuuu

SEQ ID NO: 381218 - RNA, 19 nt, Artificial Sequence
  Description of Artificial Sequence: Synthetic oligonucleotide
  Antisense Strand to SEQ ID NO: 381217
aaagcuacguauguuaccc

SEQ ID NO: 381219 - RNA, 19 nt, Artificial Sequence
  Description of Artificial Sequence: Synthetic oligonucleotide
  Sense Strand Starting at position 795 of SEQ ID NO: 317446
gugaauuauuuacagcaga

SEQ ID NO: 381220 - RNA, 19 nt, Artificial Sequence
  Description of Artificial Sequence: Synthetic oligonucleotide
  Antisense Strand to SEQ ID NO: 381219
ucugcuguaaauaauucac

SEQ ID NO: 381221 - RNA, 19 nt, Artificial Sequence
  Description of Artificial Sequence: Synthetic oligonucleotide
  Sense Strand Starting at position 795 of SEQ ID NO: 317485
uuaugaaaccacugaggua

SEQ ID NO: 381222 - RNA, 19 nt, Artificial Sequence
  Description of Artificial Sequence: Synthetic oligonucleotide
  Antisense Strand to SEQ ID NO: 381221
uaccucagugguuucauaa

SEQ ID NO: 381223 - RNA, 19 nt, Artificial Sequence
  Description of Artificial Sequence: Synthetic oligonucleotide
  Sense Strand Starting at position 795 of SEQ ID NO: 317504
aaggaaauauucucagguu

SEQ ID NO: 381224 - RNA, 19 nt, Artificial Sequence
  Description of Artificial Sequence: Synthetic oligonucleotide
  Antisense Strand to SEQ ID NO: 381223
aaccugagaauauuuccuu

SEQ ID NO: 381225 - RNA, 19 nt, Artificial Sequence
  Description of Artificial Sequence: Synthetic oligonucleotide
  Sense Strand Starting at position 795 of SEQ ID NO: 317518
agguuucugcagggaucuu

SEQ ID NO: 381226 - RNA, 19 nt, Artificial Sequence
  Description of Artificial Sequence: Synthetic oligonucleotide
  Antisense Strand to SEQ ID NO: 381225
aagaucccugcagaaaccu

SEQ ID NO: 381227 - RNA, 19 nt, Artificial Sequence
  Description of Artificial Sequence: Synthetic oligonucleotide
  Sense Strand Starting at position 795 of SEQ ID NO: 317519
gguuucugcagggaucuuu

SEQ ID NO: 381228 - RNA, 19 nt, Artificial Sequence
  Description of Artificial Sequence: Synthetic oligonucleotide
  Antisense Strand to SEQ ID NO: 381227
aaagaucccugcagaaacc

SEQ ID NO: 381229 - RNA, 19 nt, Artificial Sequence
  Description of Artificial Sequence: Synthetic oligonucleotide
  Sense Strand Starting at position 795 of SEQ ID NO: 317621
cuagcacugcacuguuaau

SEQ ID NO: 381230 - RNA, 19 nt, Artificial Sequence
  Description of Artificial Sequence: Synthetic oligonucleotide
  Antisense Strand to SEQ ID NO: 381229
auuaacagugcagugcuag

SEQ ID NO: 381231 - RNA, 19 nt, Artificial Sequence
  Description of Artificial Sequence: Synthetic oligonucleotide
  Sense Strand Starting at position 795 of SEQ ID NO: 317642
cagacauggcucuauagug

SEQ ID NO: 381232 - RNA, 19 nt, Artificial Sequence
  Description of Artificial Sequence: Synthetic oligonucleotide
  Antisense Strand to SEQ ID NO: 381231
cacuauagagccaugucug

SEQ ID NO: 381233 - RNA, 19 nt, Artificial Sequence
  Description of Artificial Sequence: Synthetic oligonucleotide
  Sense Strand Starting at position 795 of SEQ ID NO: 317648
uggcucuauagugaaauga

SEQ ID NO: 381234 - RNA, 19 nt, Artificial Sequence
  Description of Artificial Sequence: Synthetic oligonucleotide
  Antisense Strand to SEQ ID NO: 381233
ucauuucacuauagagcca

SEQ ID NO: 381235 - RNA, 19 nt, Artificial Sequence
  Description of Artificial Sequence: Synthetic oligonucleotide
  Sense Strand Starting at position 795 of SEQ ID NO: 317689
acacucucguucuuaagga

SEQ ID NO: 381236 - RNA, 19 nt, Artificial Sequence
  Description of Artificial Sequence: Synthetic oligonucleotide
  Antisense Strand to SEQ ID NO: 381235
uccuuaagaacgagagugu

SEQ ID NO: 381237 - RNA, 19 nt, Artificial Sequence
  Description of Artificial Sequence: Synthetic oligonucleotide
  Sense Strand Starting at position 795 of SEQ ID NO: 317779
ggccuugaccuccauucua

SEQ ID NO: 381238 - RNA, 19 nt, Artificial Sequence
  Description of Artificial Sequence: Synthetic oligonucleotide
  Antisense Strand to SEQ ID NO: 381237
uagaauggaggucaaggcc

SEQ ID NO: 381239 - RNA, 19 nt, Artificial Sequence
  Description of Artificial Sequence: Synthetic oligonucleotide
  Sense Strand Starting at position 795 of SEQ ID NO: 317861
aucugaucagccugaagag

SEQ ID NO: 381240 - RNA, 19 nt, Artificial Sequence
  Description of Artificial Sequence: Synthetic oligonucleotide
  Antisense Strand to SEQ ID NO: 381239
cucuucaggcugaucagau

SEQ ID NO: 381241 - RNA, 19 nt, Artificial Sequence
  Description of Artificial Sequence: Synthetic oligonucleotide
  Sense Strand Starting at position 795 of SEQ ID NO: 317862
ucugaucagccugaagagu

SEQ ID NO: 381242 - RNA, 19 nt, Artificial Sequence
  Description of Artificial Sequence: Synthetic oligonucleotide
  Antisense Strand to SEQ ID NO: 381241
acucuucaggcugaucaga

SEQ ID NO: 381243 - RNA, 19 nt, Artificial Sequence
  Description of Artificial Sequence: Synthetic oligonucleotide
  Sense Strand Starting at position 795 of SEQ ID NO: 318184
ccaguuuccucagugugaa

SEQ ID NO: 381244 - RNA, 19 nt, Artificial Sequence
  Description of Artificial Sequence: Synthetic oligonucleotide
  Antisense Strand to SEQ ID NO: 381243
uucacacugaggaaacugg

SEQ ID NO: 381245 - RNA, 19 nt, Artificial Sequence
  Description of Artificial Sequence: Synthetic oligonucleotide
  Sense Strand Starting at position 795 of SEQ ID NO: 318185
caguuuccucagugugaau

SEQ ID NO: 381246 - RNA, 19 nt, Artificial Sequence
  Description of Artificial Sequence: Synthetic oligonucleotide
  Antisense Strand to SEQ ID NO: 381245
auucacacugaggaaacug

SEQ ID NO: 381247 - RNA, 19 nt, Artificial Sequence
  Description of Artificial Sequence: Synthetic oligonucleotide
  Sense Strand Starting at position 795 of SEQ ID NO: 318337
gucacauggucuuucucaa

SEQ ID NO: 381248 - RNA, 19 nt, Artificial Sequence
  Description of Artificial Sequence: Synthetic oligonucleotide
  Antisense Strand to SEQ ID NO: 381247
uugagaaagaccaugugac

SEQ ID NO: 381249 - RNA, 19 nt, Artificial Sequence
  Description of Artificial Sequence: Synthetic oligonucleotide
  Sense Strand Starting at position 795 of SEQ ID NO: 318432
ugaggcagucuuggaggaa

SEQ ID NO: 381250 - RNA, 19 nt, Artificial Sequence
  Description of Artificial Sequence: Synthetic oligonucleotide
  Antisense Strand to SEQ ID NO: 381249
uuccuccaagacugccuca

SEQ ID NO: 381251 - RNA, 19 nt, Artificial Sequence
  Description of Artificial Sequence: Synthetic oligonucleotide
  Sense Strand Starting at position 795 of SEQ ID NO: 318435
ggcagucuuggaggaaacu

SEQ ID NO: 381252 - RNA, 19 nt, Artificial Sequence
  Description of Artificial Sequence: Synthetic oligonucleotide
  Antisense Strand to SEQ ID NO: 381251
aguuuccuccaagacugcc

SEQ ID NO: 381253 - RNA, 19 nt, Artificial Sequence
  Description of Artificial Sequence: Synthetic oligonucleotide
  Sense Strand Starting at position 795 of SEQ ID NO: 318436
gcagucuuggaggaaacuu

SEQ ID NO: 381254 - RNA, 19 nt, Artificial Sequence
  Description of Artificial Sequence: Synthetic oligonucleotide
  Antisense Strand to SEQ ID NO: 381253
aaguuuccuccaagacugc

SEQ ID NO: 381255 - RNA, 19 nt, Artificial Sequence
  Description of Artificial Sequence: Synthetic oligonucleotide
  Sense Strand Starting at position 795 of SEQ ID NO: 318444
ggaggaaacuucucccuuu

SEQ ID NO: 381256 - RNA, 19 nt, Artificial Sequence
  Description of Artificial Sequence: Synthetic oligonucleotide
  Antisense Strand to SEQ ID NO: 381255
aaagggagaaguuuccucc

SEQ ID NO: 381257 - RNA, 19 nt, Artificial Sequence
  Description of Artificial Sequence: Synthetic oligonucleotide
  Sense Strand Starting at position 795 of SEQ ID NO: 318478
gguaguagaaguuacccaa

SEQ ID NO: 381258 - RNA, 19 nt, Artificial Sequence
  Description of Artificial Sequence: Synthetic oligonucleotide
  Antisense Strand to SEQ ID NO: 381257
uuggguaacuucuacuacc

SEQ ID NO: 381259 - RNA, 19 nt, Artificial Sequence
  Description of Artificial Sequence: Synthetic oligonucleotide
  Sense Strand Starting at position 795 of SEQ ID NO: 318511
ggaaucuucucuuugaaag

SEQ ID NO: 381260 - RNA, 19 nt, Artificial Sequence
  Description of Artificial Sequence: Synthetic oligonucleotide
  Antisense Strand to SEQ ID NO: 381259
cuuucaaagagaagauucc

SEQ ID NO: 381261 - RNA, 19 nt, Artificial Sequence
  Description of Artificial Sequence: Synthetic oligonucleotide
  Sense Strand Starting at position 795 of SEQ ID NO: 318578
ccagaaaucgcagauucca

SEQ ID NO: 381262 - RNA, 19 nt, Artificial Sequence
  Description of Artificial Sequence: Synthetic oligonucleotide
  Antisense Strand to SEQ ID NO: 381261
uggaaucugcgauuucugg

SEQ ID NO: 381263 - RNA, 19 nt, Artificial Sequence
  Description of Artificial Sequence: Synthetic oligonucleotide
  Sense Strand Starting at position 795 of SEQ ID NO: 318625
ccagcuguuccagauccua

SEQ ID NO: 381264 - RNA, 19 nt, Artificial Sequence
  Description of Artificial Sequence: Synthetic oligonucleotide
  Antisense Strand to SEQ ID NO: 381263
uaggaucuggaacagcugg

SEQ ID NO: 381265 - RNA, 19 nt, Artificial Sequence
  Description of Artificial Sequence: Synthetic oligonucleotide
  Sense Strand Starting at position 795 of SEQ ID NO: 318641
cuauaauuacucugaggcu

SEQ ID NO: 381266 - RNA, 19 nt, Artificial Sequence
  Description of Artificial Sequence: Synthetic oligonucleotide
  Antisense Strand to SEQ ID NO: 381265
agccucagaguaauuauag

SEQ ID NO: 381267 - RNA, 19 nt, Artificial Sequence
  Description of Artificial Sequence: Synthetic oligonucleotide
  Sense Strand Starting at position 795 of SEQ ID NO: 318667
uuacacuuguggucagaau

SEQ ID NO: 381268 - RNA, 19 nt, Artificial Sequence
  Description of Artificial Sequence: Synthetic oligonucleotide
  Antisense Strand to SEQ ID NO: 381267
auucugaccacaaguguaa

SEQ ID NO: 381269 - RNA, 19 nt, Artificial Sequence
  Description of Artificial Sequence: Synthetic oligonucleotide
  Sense Strand Starting at position 795 of SEQ ID NO: 318668
uacacuuguggucagaauu

SEQ ID NO: 381270 - RNA, 19 nt, Artificial Sequence
  Description of Artificial Sequence: Synthetic oligonucleotide
  Antisense Strand to SEQ ID NO: 381269
aauucugaccacaagugua

SEQ ID NO: 381271 - RNA, 19 nt, Artificial Sequence
  Description of Artificial Sequence: Synthetic oligonucleotide
  Sense Strand Starting at position 795 of SEQ ID NO: 318733
uguaaauuacacugcagaa

SEQ ID NO: 381272 - RNA, 19 nt, Artificial Sequence
  Description of Artificial Sequence: Synthetic oligonucleotide
  Antisense Strand to SEQ ID NO: 381271
uucugcaguguaauuuaca

SEQ ID NO: 381273 - RNA, 19 nt, Artificial Sequence
  Description of Artificial Sequence: Synthetic oligonucleotide
  Sense Strand Starting at position 795 of SEQ ID NO: 318770
cugccuuaguugcuuauaa

SEQ ID NO: 381274 - RNA, 19 nt, Artificial Sequence
  Description of Artificial Sequence: Synthetic oligonucleotide
  Antisense Strand to SEQ ID NO: 381273
uuauaagcaacuaaggcag

SEQ ID NO: 381275 - RNA, 19 nt, Artificial Sequence
  Description of Artificial Sequence: Synthetic oligonucleotide
  Sense Strand Starting at position 795 of SEQ ID NO: 318806
gcccuuauaucaccuggua

SEQ ID NO: 381276 - RNA, 19 nt, Artificial Sequence
  Description of Artificial Sequence: Synthetic oligonucleotide
  Antisense Strand to SEQ ID NO: 381275
uaccaggugauauaagggc

SEQ ID NO: 381277 - RNA, 19 nt, Artificial Sequence
  Description of Artificial Sequence: Synthetic oligonucleotide
  Sense Strand Starting at position 795 of SEQ ID NO: 318809
cuuauaucaccugguacca

SEQ ID NO: 381278 - RNA, 19 nt, Artificial Sequence
  Description of Artificial Sequence: Synthetic oligonucleotide
  Antisense Strand to SEQ ID NO: 381277
ugguaccaggugauauaag

SEQ ID NO: 381279 - RNA, 19 nt, Artificial Sequence
  Description of Artificial Sequence: Synthetic oligonucleotide
  Sense Strand Starting at position 795 of SEQ ID NO: 318900
gaguucugccuuuauugaa

SEQ ID NO: 381280 - RNA, 19 nt, Artificial Sequence
  Description of Artificial Sequence: Synthetic oligonucleotide
  Antisense Strand to SEQ ID NO: 381279
uucaauaaaggcagaacuc

SEQ ID NO: 381281 - RNA, 19 nt, Artificial Sequence
  Description of Artificial Sequence: Synthetic oligonucleotide
  Sense Strand Starting at position 795 of SEQ ID NO: 319021
gcucuuaaaugugugaaac

SEQ ID NO: 381282 - RNA, 19 nt, Artificial Sequence
  Description of Artificial Sequence: Synthetic oligonucleotide
  Antisense Strand to SEQ ID NO: 381281
guuucacacauuuaagagc

SEQ ID NO: 381283 - RNA, 19 nt, Artificial Sequence
  Description of Artificial Sequence: Synthetic oligonucleotide
  Sense Strand Starting at position 795 of SEQ ID NO: 319063
acuuguaaugauggcaagu

SEQ ID NO: 381284 - RNA, 19 nt, Artificial Sequence
  Description of Artificial Sequence: Synthetic oligonucleotide
  Antisense Strand to SEQ ID NO: 381283
acuugccaucauuacaagu

SEQ ID NO: 381285 - RNA, 19 nt, Artificial Sequence
  Description of Artificial Sequence: Synthetic oligonucleotide
  Sense Strand Starting at position 795 of SEQ ID NO: 319115
aagagauaauuggguauuu

SEQ ID NO: 381286 - RNA, 19 nt, Artificial Sequence
  Description of Artificial Sequence: Synthetic oligonucleotide
  Antisense Strand to SEQ ID NO: 381285
aaauacccaauuaucucuu

SEQ ID NO: 381287 - RNA, 19 nt, Artificial Sequence
  Description of Artificial Sequence: Synthetic oligonucleotide
  Sense Strand Starting at position 795 of SEQ ID NO: 319124
uuggguauuugguauauau

SEQ ID NO: 381288 - RNA, 19 nt, Artificial Sequence
  Description of Artificial Sequence: Synthetic oligonucleotide
  Antisense Strand to SEQ ID NO: 381287
auauauaccaaauacccaa

SEQ ID NO: 381289 - RNA, 19 nt, Artificial Sequence
  Description of Artificial Sequence: Synthetic oligonucleotide
  Sense Strand Starting at position 795 of SEQ ID NO: 319189
ucacuauaauguuugagag

SEQ ID NO: 381290 - RNA, 19 nt, Artificial Sequence
  Description of Artificial Sequence: Synthetic oligonucleotide
  Antisense Strand to SEQ ID NO: 381289
cucucaaacauuauaguga

SEQ ID NO: 381291 - RNA, 19 nt, Artificial Sequence
  Description of Artificial Sequence: Synthetic oligonucleotide
  Sense Strand Starting at position 795 of SEQ ID NO: 319193
uauaauguuugagagggau

SEQ ID NO: 381292 - RNA, 19 nt, Artificial Sequence
  Description of Artificial Sequence: Synthetic oligonucleotide
  Antisense Strand to SEQ ID NO: 381291
aucccucucaaacauuaua

SEQ ID NO: 381293 - RNA, 19 nt, Artificial Sequence
  Description of Artificial Sequence: Synthetic oligonucleotide
  Sense Strand Starting at position 796 of SEQ ID NO: 315243
caauaagugccaggugaau

SEQ ID NO: 381294 - RNA, 19 nt, Artificial Sequence
  Description of Artificial Sequence: Synthetic oligonucleotide
  Antisense Strand to SEQ ID NO: 381293
auucaccuggcacuuauug

SEQ ID NO: 381295 - RNA, 19 nt, Artificial Sequence
  Description of Artificial Sequence: Synthetic oligonucleotide
  Sense Strand Starting at position 796 of SEQ ID NO: 315245
auaagugccaggugaauaa

SEQ ID NO: 381296 - RNA, 19 nt, Artificial Sequence
  Description of Artificial Sequence: Synthetic oligonucleotide
  Antisense Strand to SEQ ID NO: 381295
uuauucaccuggcacuuau

SEQ ID NO: 381297 - RNA, 19 nt, Artificial Sequence
  Description of Artificial Sequence: Synthetic oligonucleotide
  Sense Strand Starting at position 796 of SEQ ID NO: 315661
uugaaauaauggguuguca

SEQ ID NO: 381298 - RNA, 19 nt, Artificial Sequence
  Description of Artificial Sequence: Synthetic oligonucleotide
  Antisense Strand to SEQ ID NO: 381297
ugacaacccauuauuucaa

SEQ ID NO: 381299 - RNA, 19 nt, Artificial Sequence
  Description of Artificial Sequence: Synthetic oligonucleotide
  Sense Strand Starting at position 796 of SEQ ID NO: 315663
gaaauaauggguugucauu

SEQ ID NO: 381300 - RNA, 19 nt, Artificial Sequence
  Description of Artificial Sequence: Synthetic oligonucleotide
  Antisense Strand to SEQ ID NO: 381299
aaugacaacccauuauuuc

SEQ ID NO: 381301 - RNA, 19 nt, Artificial Sequence
  Description of Artificial Sequence: Synthetic oligonucleotide
  Sense Strand Starting at position 796 of SEQ ID NO: 315670
uggguugucauuugcacua

SEQ ID NO: 381302 - RNA, 19 nt, Artificial Sequence
  Description of Artificial Sequence: Synthetic oligonucleotide
  Antisense Strand to SEQ ID NO: 381301
uagugcaaaugacaaccca

SEQ ID NO: 381303 - RNA, 19 nt, Artificial Sequence
  Description of Artificial Sequence: Synthetic oligonucleotide
  Sense Strand Starting at position 796 of SEQ ID NO: 315672
gguugucauuugcacuaau

SEQ ID NO: 381304 - RNA, 19 nt, Artificial Sequence
  Description of Artificial Sequence: Synthetic oligonucleotide
  Antisense Strand to SEQ ID NO: 381303
auuagugcaaaugacaacc

SEQ ID NO: 381305 - RNA, 19 nt, Artificial Sequence
  Description of Artificial Sequence: Synthetic oligonucleotide
  Sense Strand Starting at position 796 of SEQ ID NO: 315833
acauauauccugugaugug

SEQ ID NO: 381306 - RNA, 19 nt, Artificial Sequence
  Description of Artificial Sequence: Synthetic oligonucleotide
  Antisense Strand to SEQ ID NO: 381305
cacaucacaggauauaugu

SEQ ID NO: 381307 - RNA, 19 nt, Artificial Sequence
  Description of Artificial Sequence: Synthetic oligonucleotide
  Sense Strand Starting at position 796 of SEQ ID NO: 315919
ugagguucauugguaagac

SEQ ID NO: 381308 - RNA, 19 nt, Artificial Sequence
  Description of Artificial Sequence: Synthetic oligonucleotide
  Antisense Strand to SEQ ID NO: 381307
gucuuaccaaugaaccuca

SEQ ID NO: 381309 - RNA, 19 nt, Artificial Sequence
  Description of Artificial Sequence: Synthetic oligonucleotide
  Sense Strand Starting at position 796 of SEQ ID NO: 315990
agaaguguacacugugaaa

SEQ ID NO: 381310 - RNA, 19 nt, Artificial Sequence
  Description of Artificial Sequence: Synthetic oligonucleotide
  Antisense Strand to SEQ ID NO: 381309
uuucacaguguacacuucu

SEQ ID NO: 381311 - RNA, 19 nt, Artificial Sequence
  Description of Artificial Sequence: Synthetic oligonucleotide
  Sense Strand Starting at position 796 of SEQ ID NO: 315993
aguguacacugugaaauau

SEQ ID NO: 381312 - RNA, 19 nt, Artificial Sequence
  Description of Artificial Sequence: Synthetic oligonucleotide
  Antisense Strand to SEQ ID NO: 381311
auauuucacaguguacacu

SEQ ID NO: 381313 - RNA, 19 nt, Artificial Sequence
  Description of Artificial Sequence: Synthetic oligonucleotide
  Sense Strand Starting at position 796 of SEQ ID NO: 316004
ugaaauaugacguagcagu

SEQ ID NO: 381314 - RNA, 19 nt, Artificial Sequence
  Description of Artificial Sequence: Synthetic oligonucleotide
  Antisense Strand to SEQ ID NO: 381313
acugcuacgucauauuuca

SEQ ID NO: 381315 - RNA, 19 nt, Artificial Sequence
  Description of Artificial Sequence: Synthetic oligonucleotide
  Sense Strand Starting at position 796 of SEQ ID NO: 316035
aguagagcucuauacagau

SEQ ID NO: 381316 - RNA, 19 nt, Artificial Sequence
  Description of Artificial Sequence: Synthetic oligonucleotide
  Antisense Strand to SEQ ID NO: 381315
aucuguauagagcucuacu

SEQ ID NO: 381317 - RNA, 19 nt, Artificial Sequence
  Description of Artificial Sequence: Synthetic oligonucleotide
  Sense Strand Starting at position 796 of SEQ ID NO: 316054
auggaaagucuccaagucu

SEQ ID NO: 381318 - RNA, 19 nt, Artificial Sequence
  Description of Artificial Sequence: Synthetic oligonucleotide
  Antisense Strand to SEQ ID NO: 381317
agacuuggagacuuuccau

SEQ ID NO: 381319 - RNA, 19 nt, Artificial Sequence
  Description of Artificial Sequence: Synthetic oligonucleotide
  Sense Strand Starting at position 796 of SEQ ID NO: 316063
cuccaagucuugcuauuga

SEQ ID NO: 381320 - RNA, 19 nt, Artificial Sequence
  Description of Artificial Sequence: Synthetic oligonucleotide
  Antisense Strand to SEQ ID NO: 381319
ucaauagcaagacuuggag

SEQ ID NO: 381321 - RNA, 19 nt, Artificial Sequence
  Description of Artificial Sequence: Synthetic oligonucleotide
  Sense Strand Starting at position 796 of SEQ ID NO: 316070
ucuugcuauugaguggaaa

SEQ ID NO: 381322 - RNA, 19 nt, Artificial Sequence
  Description of Artificial Sequence: Synthetic oligonucleotide
  Antisense Strand to SEQ ID NO: 381321
uuuccacucaauagcaaga

SEQ ID NO: 381323 - RNA, 19 nt, Artificial Sequence
  Description of Artificial Sequence: Synthetic oligonucleotide
  Sense Strand Starting at position 796 of SEQ ID NO: 316107
uggcaacagauagguuuaa

SEQ ID NO: 381324 - RNA, 19 nt, Artificial Sequence
  Description of Artificial Sequence: Synthetic oligonucleotide
  Antisense Strand to SEQ ID NO: 381323
uuaaaccuaucuguugcca

SEQ ID NO: 381325 - RNA, 19 nt, Artificial Sequence
  Description of Artificial Sequence: Synthetic oligonucleotide
  Sense Strand Starting at position 796 of SEQ ID NO: 316108
ggcaacagauagguuuaau

SEQ ID NO: 381326 - RNA, 19 nt, Artificial Sequence
  Description of Artificial Sequence: Synthetic oligonucleotide
  Antisense Strand to SEQ ID NO: 381325
auuaaaccuaucuguugcc

SEQ ID NO: 381327 - RNA, 19 nt, Artificial Sequence
  Description of Artificial Sequence: Synthetic oligonucleotide
  Sense Strand Starting at position 796 of SEQ ID NO: 316119
gguuuaauaguccaucuau

SEQ ID NO: 381328 - RNA, 19 nt, Artificial Sequence
  Description of Artificial Sequence: Synthetic oligonucleotide
  Antisense Strand to SEQ ID NO: 381327
auagauggacuauuaaacc

SEQ ID NO: 381329 - RNA, 19 nt, Artificial Sequence
  Description of Artificial Sequence: Synthetic oligonucleotide
  Sense Strand Starting at position 796 of SEQ ID NO: 316129
uccaucuaugcauagauga

SEQ ID NO: 381330 - RNA, 19 nt, Artificial Sequence
  Description of Artificial Sequence: Synthetic oligonucleotide
  Antisense Strand to SEQ ID NO: 381329
ucaucuaugcauagaugga

SEQ ID NO: 381331 - RNA, 19 nt, Artificial Sequence
  Description of Artificial Sequence: Synthetic oligonucleotide
  Sense Strand Starting at position 796 of SEQ ID NO: 316165
auggucuggcaguaaauau

SEQ ID NO: 381332 - RNA, 19 nt, Artificial Sequence
  Description of Artificial Sequence: Synthetic oligonucleotide
  Antisense Strand to SEQ ID NO: 381331
auauuuacugccagaccau

SEQ ID NO: 381333 - RNA, 19 nt, Artificial Sequence
  Description of Artificial Sequence: Synthetic oligonucleotide
  Sense Strand Starting at position 796 of SEQ ID NO: 316349
ugugguugucuuggguuua

SEQ ID NO: 381334 - RNA, 19 nt, Artificial Sequence
  Description of Artificial Sequence: Synthetic oligonucleotide
  Antisense Strand to SEQ ID NO: 381333
uaaacccaagacaaccaca

SEQ ID NO: 381335 - RNA, 19 nt, Artificial Sequence
  Description of Artificial Sequence: Synthetic oligonucleotide
  Sense Strand Starting at position 796 of SEQ ID NO: 316359
uuggguuuauuccauaaua

SEQ ID NO: 381336 - RNA, 19 nt, Artificial Sequence
  Description of Artificial Sequence: Synthetic oligonucleotide
  Antisense Strand to SEQ ID NO: 381335
uauuauggaauaaacccaa

SEQ ID NO: 381337 - RNA, 19 nt, Artificial Sequence
  Description of Artificial Sequence: Synthetic oligonucleotide
  Sense Strand Starting at position 796 of SEQ ID NO: 316428
uguuaaaggccagauaguu

SEQ ID NO: 381338 - RNA, 19 nt, Artificial Sequence
  Description of Artificial Sequence: Synthetic oligonucleotide
  Antisense Strand to SEQ ID NO: 381337
aacuaucuggccuuuaaca

SEQ ID NO: 381339 - RNA, 19 nt, Artificial Sequence
  Description of Artificial Sequence: Synthetic oligonucleotide
  Sense Strand Starting at position 796 of SEQ ID NO: 316433
aaggccagauaguuaauau

SEQ ID NO: 381340 - RNA, 19 nt, Artificial Sequence
  Description of Artificial Sequence: Synthetic oligonucleotide
  Antisense Strand to SEQ ID NO: 381339
auauuaacuaucuggccuu

SEQ ID NO: 381341 - RNA, 19 nt, Artificial Sequence
  Description of Artificial Sequence: Synthetic oligonucleotide
  Sense Strand Starting at position 796 of SEQ ID NO: 316479
uuucgcaauuggucaauuu

SEQ ID NO: 381342 - RNA, 19 nt, Artificial Sequence
  Description of Artificial Sequence: Synthetic oligonucleotide
  Antisense Strand to SEQ ID NO: 381341
aaauugaccaauugcgaaa

SEQ ID NO: 381343 - RNA, 19 nt, Artificial Sequence
  Description of Artificial Sequence: Synthetic oligonucleotide
  Sense Strand Starting at position 796 of SEQ ID NO: 316540
ccacauggccucuaaugau

SEQ ID NO: 381344 - RNA, 19 nt, Artificial Sequence
  Description of Artificial Sequence: Synthetic oligonucleotide
  Antisense Strand to SEQ ID NO: 381343
aucauuagaggccaugugg

SEQ ID NO: 381345 - RNA, 19 nt, Artificial Sequence
  Description of Artificial Sequence: Synthetic oligonucleotide
  Sense Strand Starting at position 796 of SEQ ID NO: 316549
cucuaaugauauggccaga

SEQ ID NO: 381346 - RNA, 19 nt, Artificial Sequence
  Description of Artificial Sequence: Synthetic oligonucleotide
  Antisense Strand to SEQ ID NO: 381345
ucuggccauaucauuagag

SEQ ID NO: 381347 - RNA, 19 nt, Artificial Sequence
  Description of Artificial Sequence: Synthetic oligonucleotide
  Sense Strand Starting at position 796 of SEQ ID NO: 316552
uaaugauauggccagaguu

SEQ ID NO: 381348 - RNA, 19 nt, Artificial Sequence
  Description of Artificial Sequence: Synthetic oligonucleotide
  Antisense Strand to SEQ ID NO: 381347
aacucuggccauaucauua

SEQ ID NO: 381349 - RNA, 19 nt, Artificial Sequence
  Description of Artificial Sequence: Synthetic oligonucleotide
  Sense Strand Starting at position 796 of SEQ ID NO: 316671
agaguuagccugugagcca

SEQ ID NO: 381350 - RNA, 19 nt, Artificial Sequence
  Description of Artificial Sequence: Synthetic oligonucleotide
  Antisense Strand to SEQ ID NO: 381349
uggcucacaggcuaacucu

SEQ ID NO: 381351 - RNA, 19 nt, Artificial Sequence
  Description of Artificial Sequence: Synthetic oligonucleotide
  Sense Strand Starting at position 796 of SEQ ID NO: 316738
uuuaaagcguauuugugua

SEQ ID NO: 381352 - RNA, 19 nt, Artificial Sequence
  Description of Artificial Sequence: Synthetic oligonucleotide
  Antisense Strand to SEQ ID NO: 381351
uacacaaauacgcuuuaaa

SEQ ID NO: 381353 - RNA, 19 nt, Artificial Sequence
  Description of Artificial Sequence: Synthetic oligonucleotide
  Sense Strand Starting at position 796 of SEQ ID NO: 316743
agcguauuuguguaccaca

SEQ ID NO: 381354 - RNA, 19 nt, Artificial Sequence
  Description of Artificial Sequence: Synthetic oligonucleotide
  Antisense Strand to SEQ ID NO: 381353
ugugguacacaaauacgcu

SEQ ID NO: 381355 - RNA, 19 nt, Artificial Sequence
  Description of Artificial Sequence: Synthetic oligonucleotide
  Sense Strand Starting at position 796 of SEQ ID NO: 316859
gaggaauagugccugcuau

SEQ ID NO: 381356 - RNA, 19 nt, Artificial Sequence
  Description of Artificial Sequence: Synthetic oligonucleotide
  Antisense Strand to SEQ ID NO: 381355
auagcaggcacuauuccuc

SEQ ID NO: 381357 - RNA, 19 nt, Artificial Sequence
  Description of Artificial Sequence: Synthetic oligonucleotide
  Sense Strand Starting at position 796 of SEQ ID NO: 316860
aggaauagugccugcuaua

SEQ ID NO: 381358 - RNA, 19 nt, Artificial Sequence
  Description of Artificial Sequence: Synthetic oligonucleotide
  Antisense Strand to SEQ ID NO: 381357
uauagcaggcacuauuccu

SEQ ID NO: 381359 - RNA, 19 nt, Artificial Sequence
  Description of Artificial Sequence: Synthetic oligonucleotide
  Sense Strand Starting at position 796 of SEQ ID NO: 316921
guugaccuguccuagauau

SEQ ID NO: 381360 - RNA, 19 nt, Artificial Sequence
  Description of Artificial Sequence: Synthetic oligonucleotide
  Antisense Strand to SEQ ID NO: 381359
auaucuaggacaggucaac

SEQ ID NO: 381361 - RNA, 19 nt, Artificial Sequence
  Description of Artificial Sequence: Synthetic oligonucleotide
  Sense Strand Starting at position 796 of SEQ ID NO: 317300
gugguauuuccugggucca

SEQ ID NO: 381362 - RNA, 19 nt, Artificial Sequence
  Description of Artificial Sequence: Synthetic oligonucleotide
  Antisense Strand to SEQ ID NO: 381361
uggacccaggaaauaccac

SEQ ID NO: 381363 - RNA, 19 nt, Artificial Sequence
  Description of Artificial Sequence: Synthetic oligonucleotide
  Sense Strand Starting at position 796 of SEQ ID NO: 317343
gcugguuguaugugugacu

SEQ ID NO: 381364 - RNA, 19 nt, Artificial Sequence
  Description of Artificial Sequence: Synthetic oligonucleotide
  Antisense Strand to SEQ ID NO: 381363
agucacacauacaaccagc

SEQ ID NO: 381365 - RNA, 19 nt, Artificial Sequence
  Description of Artificial Sequence: Synthetic oligonucleotide
  Sense Strand Starting at position 796 of SEQ ID NO: 317350
guaugugugacuuguggua

SEQ ID NO: 381366 - RNA, 19 nt, Artificial Sequence
  Description of Artificial Sequence: Synthetic oligonucleotide
  Antisense Strand to SEQ ID NO: 381365
uaccacaagucacacauac

SEQ ID NO: 381367 - RNA, 19 nt, Artificial Sequence
  Description of Artificial Sequence: Synthetic oligonucleotide
  Sense Strand Starting at position 796 of SEQ ID NO: 317364
ugguaacucaugcaguagu

SEQ ID NO: 381368 - RNA, 19 nt, Artificial Sequence
  Description of Artificial Sequence: Synthetic oligonucleotide
  Antisense Strand to SEQ ID NO: 381367
acuacugcaugaguuacca

SEQ ID NO: 381369 - RNA, 19 nt, Artificial Sequence
  Description of Artificial Sequence: Synthetic oligonucleotide
  Sense Strand Starting at position 796 of SEQ ID NO: 317385
aggcuucuccuguggugau

SEQ ID NO: 381370 - RNA, 19 nt, Artificial Sequence
  Description of Artificial Sequence: Synthetic oligonucleotide
  Antisense Strand to SEQ ID NO: 381369
aucaccacaggagaagccu

SEQ ID NO: 381371 - RNA, 19 nt, Artificial Sequence
  Description of Artificial Sequence: Synthetic oligonucleotide
  Sense Strand Starting at position 796 of SEQ ID NO: 317537
cuaugaugcugaccucaaa

SEQ ID NO: 381372 - RNA, 19 nt, Artificial Sequence
  Description of Artificial Sequence: Synthetic oligonucleotide
  Antisense Strand to SEQ ID NO: 381371
uuugaggucagcaucauag

SEQ ID NO: 381373 - RNA, 19 nt, Artificial Sequence
  Description of Artificial Sequence: Synthetic oligonucleotide
  Sense Strand Starting at position 797 of SEQ ID NO: 315335
cagccuuuggcuuggaaac

SEQ ID NO: 381374 - RNA, 19 nt, Artificial Sequence
  Description of Artificial Sequence: Synthetic oligonucleotide
  Antisense Strand to SEQ ID NO: 381373
guuuccaagccaaaggcug

SEQ ID NO: 381375 - RNA, 19 nt, Artificial Sequence
  Description of Artificial Sequence: Synthetic oligonucleotide
  Sense Strand Starting at position 797 of SEQ ID NO: 315336
agccuuuggcuuggaaaca

SEQ ID NO: 381376 - RNA, 19 nt, Artificial Sequence
  Description of Artificial Sequence: Synthetic oligonucleotide
  Antisense Strand to SEQ ID NO: 381375
uguuuccaagccaaaggcu

SEQ ID NO: 381377 - RNA, 19 nt, Artificial Sequence
  Description of Artificial Sequence: Synthetic oligonucleotide
  Sense Strand Starting at position 797 of SEQ ID NO: 315405
cagccaguucucgaucaca

SEQ ID NO: 381378 - RNA, 19 nt, Artificial Sequence
  Description of Artificial Sequence: Synthetic oligonucleotide
  Antisense Strand to SEQ ID NO: 381377
ugugaucgagaacuggcug

SEQ ID NO: 381379 - RNA, 19 nt, Artificial Sequence
  Description of Artificial Sequence: Synthetic oligonucleotide
  Sense Strand Starting at position 797 of SEQ ID NO: 315408
ccaguucucgaucacauca

SEQ ID NO: 381380 - RNA, 19 nt, Artificial Sequence
  Description of Artificial Sequence: Synthetic oligonucleotide
  Antisense Strand to SEQ ID NO: 381379
ugaugugaucgagaacugg

SEQ ID NO: 381381 - RNA, 19 nt, Artificial Sequence
  Description of Artificial Sequence: Synthetic oligonucleotide
  Sense Strand Starting at position 797 of SEQ ID NO: 315455
ggauguccugucuggaaug

SEQ ID NO: 381382 - RNA, 19 nt, Artificial Sequence
  Description of Artificial Sequence: Synthetic oligonucleotide
  Antisense Strand to SEQ ID NO: 381381
cauuccagacaggacaucc

SEQ ID NO: 381383 - RNA, 19 nt, Artificial Sequence
  Description of Artificial Sequence: Synthetic oligonucleotide
  Sense Strand Starting at position 797 of SEQ ID NO: 315599
acuuaugacucucuggaau

SEQ ID NO: 381384 - RNA, 19 nt, Artificial Sequence
  Description of Artificial Sequence: Synthetic oligonucleotide
  Antisense Strand to SEQ ID NO: 381383
auuccagagagucauaagu

SEQ ID NO: 381385 - RNA, 19 nt, Artificial Sequence
  Description of Artificial Sequence: Synthetic oligonucleotide
  Sense Strand Starting at position 797 of SEQ ID NO: 315722
guauucagcgaacgaauga

SEQ ID NO: 381386 - RNA, 19 nt, Artificial Sequence
  Description of Artificial Sequence: Synthetic oligonucleotide
  Antisense Strand to SEQ ID NO: 381385
ucauucguucgcugaauac

SEQ ID NO: 381387 - RNA, 19 nt, Artificial Sequence
  Description of Artificial Sequence: Synthetic oligonucleotide
  Sense Strand Starting at position 797 of SEQ ID NO: 315745
agaaucacucccgaauugu

SEQ ID NO: 381388 - RNA, 19 nt, Artificial Sequence
  Description of Artificial Sequence: Synthetic oligonucleotide
  Antisense Strand to SEQ ID NO: 381387
acaauucgggagugauucu

SEQ ID NO: 381389 - RNA, 19 nt, Artificial Sequence
  Description of Artificial Sequence: Synthetic oligonucleotide
  Sense Strand Starting at position 797 of SEQ ID NO: 316063
gcgcaucguggacucgaaa

SEQ ID NO: 381390 - RNA, 19 nt, Artificial Sequence
  Description of Artificial Sequence: Synthetic oligonucleotide
  Antisense Strand to SEQ ID NO: 381389
uuucgaguccacgaugcgc

SEQ ID NO: 381391 - RNA, 19 nt, Artificial Sequence
  Description of Artificial Sequence: Synthetic oligonucleotide
  Sense Strand Starting at position 797 of SEQ ID NO: 316098
uuacuauuguuccucagua

SEQ ID NO: 381392 - RNA, 19 nt, Artificial Sequence
  Description of Artificial Sequence: Synthetic oligonucleotide
  Antisense Strand to SEQ ID NO: 381391
uacugaggaacaauaguaa

SEQ ID NO: 381393 - RNA, 19 nt, Artificial Sequence
  Description of Artificial Sequence: Synthetic oligonucleotide
  Sense Strand Starting at position 797 of SEQ ID NO: 316100
acuauuguuccucaguacu

SEQ ID NO: 381394 - RNA, 19 nt, Artificial Sequence
  Description of Artificial Sequence: Synthetic oligonucleotide
  Antisense Strand to SEQ ID NO: 381393
aguacugaggaacaauagu

SEQ ID NO: 381395 - RNA, 19 nt, Artificial Sequence
  Description of Artificial Sequence: Synthetic oligonucleotide
  Sense Strand Starting at position 797 of SEQ ID NO: 316103
auuguuccucaguacucau

SEQ ID NO: 381396 - RNA, 19 nt, Artificial Sequence
  Description of Artificial Sequence: Synthetic oligonucleotide
  Antisense Strand to SEQ ID NO: 381395
augaguacugaggaacaau

SEQ ID NO: 381397 - RNA, 19 nt, Artificial Sequence
  Description of Artificial Sequence: Synthetic oligonucleotide
  Sense Strand Starting at position 797 of SEQ ID NO: 316595
gccaucuccgucgagaaca

SEQ ID NO: 381398 - RNA, 19 nt, Artificial Sequence
  Description of Artificial Sequence: Synthetic oligonucleotide
  Antisense Strand to SEQ ID NO: 381397
uguucucgacggagauggc

SEQ ID NO: 381399 - RNA, 19 nt, Artificial Sequence
  Description of Artificial Sequence: Synthetic oligonucleotide
  Sense Strand Starting at position 797 of SEQ ID NO: 316597
caucuccgucgagaacaaa

SEQ ID NO: 381400 - RNA, 19 nt, Artificial Sequence
  Description of Artificial Sequence: Synthetic oligonucleotide
  Antisense Strand to SEQ ID NO: 381399
uuuguucucgacggagaug

SEQ ID NO: 381401 - RNA, 19 nt, Artificial Sequence
  Description of Artificial Sequence: Synthetic oligonucleotide
  Sense Strand Starting at position 797 of SEQ ID NO: 317816
ggccaucucaggugaaaug

SEQ ID NO: 381402 - RNA, 19 nt, Artificial Sequence
  Description of Artificial Sequence: Synthetic oligonucleotide
  Antisense Strand to SEQ ID NO: 381401
cauuucaccugagauggcc

SEQ ID NO: 381403 - RNA, 19 nt, Artificial Sequence
  Description of Artificial Sequence: Synthetic oligonucleotide
  Sense Strand Starting at position 797 of SEQ ID NO: 317817
gccaucucaggugaaaugu

SEQ ID NO: 381404 - RNA, 19 nt, Artificial Sequence
  Description of Artificial Sequence: Synthetic oligonucleotide
  Antisense Strand to SEQ ID NO: 381403
acauuucaccugagauggc

SEQ ID NO: 381405 - RNA, 19 nt, Artificial Sequence
  Description of Artificial Sequence: Synthetic oligonucleotide
  Sense Strand Starting at position 797 of SEQ ID NO: 317860
uuugguuucuuaguaaaca

SEQ ID NO: 381406 - RNA, 19 nt, Artificial Sequence
  Description of Artificial Sequence: Synthetic oligonucleotide
  Antisense Strand to SEQ ID NO: 381405
uguuuacuaagaaaccaaa

SEQ ID NO: 381407 - RNA, 19 nt, Artificial Sequence
  Description of Artificial Sequence: Synthetic oligonucleotide
  Sense Strand Starting at position 797 of SEQ ID NO: 317884
uccagaucuuguguaauuc

SEQ ID NO: 381408 - RNA, 19 nt, Artificial Sequence
  Description of Artificial Sequence: Synthetic oligonucleotide
  Antisense Strand to SEQ ID NO: 381407
gaauuacacaagaucugga

SEQ ID NO: 381409 - RNA, 19 nt, Artificial Sequence
  Description of Artificial Sequence: Synthetic oligonucleotide
  Sense Strand Starting at position 797 of SEQ ID NO: 317888
gaucuuguguaauuccaug

SEQ ID NO: 381410 - RNA, 19 nt, Artificial Sequence
  Description of Artificial Sequence: Synthetic oligonucleotide
  Antisense Strand to SEQ ID NO: 381409
cauggaauuacacaagauc

SEQ ID NO: 381411 - RNA, 19 nt, Artificial Sequence
  Description of Artificial Sequence: Synthetic oligonucleotide
  Sense Strand Starting at position 797 of SEQ ID NO: 317926
ggaaguaguacaugguaau

SEQ ID NO: 381412 - RNA, 19 nt, Artificial Sequence
  Description of Artificial Sequence: Synthetic oligonucleotide
  Antisense Strand to SEQ ID NO: 381411
auuaccauguacuacuucc

SEQ ID NO: 381413 - RNA, 19 nt, Artificial Sequence
  Description of Artificial Sequence: Synthetic oligonucleotide
  Sense Strand Starting at position 797 of SEQ ID NO: 317927
gaaguaguacaugguaaua

SEQ ID NO: 381414 - RNA, 19 nt, Artificial Sequence
  Description of Artificial Sequence: Synthetic oligonucleotide
  Antisense Strand to SEQ ID NO: 381413
uauuaccauguacuacuuc

SEQ ID NO: 381415 - RNA, 19 nt, Artificial Sequence
  Description of Artificial Sequence: Synthetic oligonucleotide
  Sense Strand Starting at position 797 of SEQ ID NO: 317938
ugguaauagggauguguaa

SEQ ID NO: 381416 - RNA, 19 nt, Artificial Sequence
  Description of Artificial Sequence: Synthetic oligonucleotide
  Antisense Strand to SEQ ID NO: 381415
uuacacaucccuauuacca

SEQ ID NO: 381417 - RNA, 19 nt, Artificial Sequence
  Description of Artificial Sequence: Synthetic oligonucleotide
  Sense Strand Starting at position 797 of SEQ ID NO: 317940
guaauagggauguguaaag

SEQ ID NO: 381418 - RNA, 19 nt, Artificial Sequence
  Description of Artificial Sequence: Synthetic oligonucleotide
  Antisense Strand to SEQ ID NO: 381417
cuuuacacaucccuauuac

SEQ ID NO: 381419 - RNA, 19 nt, Artificial Sequence
  Description of Artificial Sequence: Synthetic oligonucleotide
  Sense Strand Starting at position 797 of SEQ ID NO: 317989
ugaagaaauuggccugucu

SEQ ID NO: 381420 - RNA, 19 nt, Artificial Sequence
  Description of Artificial Sequence: Synthetic oligonucleotide
  Antisense Strand to SEQ ID NO: 381419
agacaggccaauuucuuca

SEQ ID NO: 381421 - RNA, 19 nt, Artificial Sequence
  Description of Artificial Sequence: Synthetic oligonucleotide
  Sense Strand Starting at position 797 of SEQ ID NO: 317991
aagaaauuggccugucuug

SEQ ID NO: 381422 - RNA, 19 nt, Artificial Sequence
  Description of Artificial Sequence: Synthetic oligonucleotide
  Antisense Strand to SEQ ID NO: 381421
caagacaggccaauuucuu

SEQ ID NO: 381423 - RNA, 19 nt, Artificial Sequence
  Description of Artificial Sequence: Synthetic oligonucleotide
  Sense Strand Starting at position 797 of SEQ ID NO: 318085
ggugcaggcgcuuauuuau

SEQ ID NO: 381424 - RNA, 19 nt, Artificial Sequence
  Description of Artificial Sequence: Synthetic oligonucleotide
  Antisense Strand to SEQ ID NO: 381423
auaaauaagcgccugcacc

SEQ ID NO: 381425 - RNA, 19 nt, Artificial Sequence
  Description of Artificial Sequence: Synthetic oligonucleotide
  Sense Strand Starting at position 797 of SEQ ID NO: 318091
ggcgcuuauuuauccuaaa

SEQ ID NO: 381426 - RNA, 19 nt, Artificial Sequence
  Description of Artificial Sequence: Synthetic oligonucleotide
  Antisense Strand to SEQ ID NO: 381425
uuuaggauaaauaagcgcc

SEQ ID NO: 381427 - RNA, 19 nt, Artificial Sequence
  Description of Artificial Sequence: Synthetic oligonucleotide
  Sense Strand Starting at position 797 of SEQ ID NO: 318092
gcgcuuauuuauccuaaau

SEQ ID NO: 381428 - RNA, 19 nt, Artificial Sequence
  Description of Artificial Sequence: Synthetic oligonucleotide
  Antisense Strand to SEQ ID NO: 381427
auuuaggauaaauaagcgc

SEQ ID NO: 381429 - RNA, 19 nt, Artificial Sequence
  Description of Artificial Sequence: Synthetic oligonucleotide
  Sense Strand Starting at position 797 of SEQ ID NO: 318104
ccuaaaugcccugaagugu

SEQ ID NO: 381430 - RNA, 19 nt, Artificial Sequence
  Description of Artificial Sequence: Synthetic oligonucleotide
  Antisense Strand to SEQ ID NO: 381429
acacuucagggcauuuagg

SEQ ID NO: 381431 - RNA, 19 nt, Artificial Sequence
  Description of Artificial Sequence: Synthetic oligonucleotide
  Sense Strand Starting at position 797 of SEQ ID NO: 318112
cccugaaguguuuaggcua

SEQ ID NO: 381432 - RNA, 19 nt, Artificial Sequence
  Description of Artificial Sequence: Synthetic oligonucleotide
  Antisense Strand to SEQ ID NO: 381431
uagccuaaacacuucaggg

SEQ ID NO: 381433 - RNA, 19 nt, Artificial Sequence
  Description of Artificial Sequence: Synthetic oligonucleotide
  Sense Strand Starting at position 797 of SEQ ID NO: 318403
agcacagcucuugaaauug

SEQ ID NO: 381434 - RNA, 19 nt, Artificial Sequence
  Description of Artificial Sequence: Synthetic oligonucleotide
  Antisense Strand to SEQ ID NO: 381433
caauuucaagagcugugcu

SEQ ID NO: 381435 - RNA, 19 nt, Artificial Sequence
  Description of Artificial Sequence: Synthetic oligonucleotide
  Sense Strand Starting at position 797 of SEQ ID NO: 318433
aagggaauguggucaaauu

SEQ ID NO: 381436 - RNA, 19 nt, Artificial Sequence
  Description of Artificial Sequence: Synthetic oligonucleotide
  Antisense Strand to SEQ ID NO: 381435
aauuugaccacauucccuu

SEQ ID NO: 381437 - RNA, 19 nt, Artificial Sequence
  Description of Artificial Sequence: Synthetic oligonucleotide
  Sense Strand Starting at position 797 of SEQ ID NO: 318508
ggucaagugauguaccuga

SEQ ID NO: 381438 - RNA, 19 nt, Artificial Sequence
  Description of Artificial Sequence: Synthetic oligonucleotide
  Antisense Strand to SEQ ID NO: 381437
ucagguacaucacuugacc

SEQ ID NO: 381439 - RNA, 19 nt, Artificial Sequence
  Description of Artificial Sequence: Synthetic oligonucleotide
  Sense Strand Starting at position 797 of SEQ ID NO: 318512
aagugauguaccugagagg

SEQ ID NO: 381440 - RNA, 19 nt, Artificial Sequence
  Description of Artificial Sequence: Synthetic oligonucleotide
  Antisense Strand to SEQ ID NO: 381439
ccucucagguacaucacuu

SEQ ID NO: 381441 - RNA, 19 nt, Artificial Sequence
  Description of Artificial Sequence: Synthetic oligonucleotide
  Sense Strand Starting at position 797 of SEQ ID NO: 318854
agaugaggaacgugauaug

SEQ ID NO: 381442 - RNA, 19 nt, Artificial Sequence
  Description of Artificial Sequence: Synthetic oligonucleotide
  Antisense Strand to SEQ ID NO: 381441
cauaucacguuccucaucu

SEQ ID NO: 381443 - RNA, 19 nt, Artificial Sequence
  Description of Artificial Sequence: Synthetic oligonucleotide
  Sense Strand Starting at position 797 of SEQ ID NO: 318936
agaacucagcguugacuau

SEQ ID NO: 381444 - RNA, 19 nt, Artificial Sequence
  Description of Artificial Sequence: Synthetic oligonucleotide
  Antisense Strand to SEQ ID NO: 381443
auagucaacgcugaguucu

SEQ ID NO: 381445 - RNA, 19 nt, Artificial Sequence
  Description of Artificial Sequence: Synthetic oligonucleotide
  Sense Strand Starting at position 797 of SEQ ID NO: 318937
gaacucagcguugacuauu

SEQ ID NO: 381446 - RNA, 19 nt, Artificial Sequence
  Description of Artificial Sequence: Synthetic oligonucleotide
  Antisense Strand to SEQ ID NO: 381445
aauagucaacgcugaguuc

SEQ ID NO: 381447 - RNA, 19 nt, Artificial Sequence
  Description of Artificial Sequence: Synthetic oligonucleotide
  Sense Strand Starting at position 797 of SEQ ID NO: 318947
uugacuauucuacggucau

SEQ ID NO: 381448 - RNA, 19 nt, Artificial Sequence
  Description of Artificial Sequence: Synthetic oligonucleotide
  Antisense Strand to SEQ ID NO: 381447
augaccguagaauagucaa

SEQ ID NO: 381449 - RNA, 19 nt, Artificial Sequence
  Description of Artificial Sequence: Synthetic oligonucleotide
  Sense Strand Starting at position 797 of SEQ ID NO: 319026
ucaugagcugagcggaaau

SEQ ID NO: 381450 - RNA, 19 nt, Artificial Sequence
  Description of Artificial Sequence: Synthetic oligonucleotide
  Antisense Strand to SEQ ID NO: 381449
auuuccgcucagcucauga

SEQ ID NO: 381451 - RNA, 19 nt, Artificial Sequence
  Description of Artificial Sequence: Synthetic oligonucleotide
  Sense Strand Starting at position 797 of SEQ ID NO: 319108
cggauugugacauguaaug

SEQ ID NO: 381452 - RNA, 19 nt, Artificial Sequence
  Description of Artificial Sequence: Synthetic oligonucleotide
  Antisense Strand to SEQ ID NO: 381451
cauuacaugucacaauccg

SEQ ID NO: 381453 - RNA, 19 nt, Artificial Sequence
  Description of Artificial Sequence: Synthetic oligonucleotide
  Sense Strand Starting at position 798 of SEQ ID NO: 315330
aggucaauguacucuuaau

SEQ ID NO: 381454 - RNA, 19 nt, Artificial Sequence
  Description of Artificial Sequence: Synthetic oligonucleotide
  Antisense Strand to SEQ ID NO: 381453
auuaagaguacauugaccu

SEQ ID NO: 381455 - RNA, 19 nt, Artificial Sequence
  Description of Artificial Sequence: Synthetic oligonucleotide
  Sense Strand Starting at position 798 of SEQ ID NO: 315402
agguaugucucaucaucaa

SEQ ID NO: 381456 - RNA, 19 nt, Artificial Sequence
  Description of Artificial Sequence: Synthetic oligonucleotide
  Antisense Strand to SEQ ID NO: 381455
uugaugaugagacauaccu

SEQ ID NO: 381457 - RNA, 19 nt, Artificial Sequence
  Description of Artificial Sequence: Synthetic oligonucleotide
  Sense Strand Starting at position 798 of SEQ ID NO: 315424
gcaggaacucuuggaugau

SEQ ID NO: 381458 - RNA, 19 nt, Artificial Sequence
  Description of Artificial Sequence: Synthetic oligonucleotide
  Antisense Strand to SEQ ID NO: 381457
aucauccaagaguuccugc

SEQ ID NO: 381459 - RNA, 19 nt, Artificial Sequence
  Description of Artificial Sequence: Synthetic oligonucleotide
  Sense Strand Starting at position 798 of SEQ ID NO: 315430
acucuuggaugaugaauuu

SEQ ID NO: 381460 - RNA, 19 nt, Artificial Sequence
  Description of Artificial Sequence: Synthetic oligonucleotide
  Antisense Strand to SEQ ID NO: 381459
aaauucaucauccaagagu

SEQ ID NO: 381461 - RNA, 19 nt, Artificial Sequence
  Description of Artificial Sequence: Synthetic oligonucleotide
  Sense Strand Starting at position 798 of SEQ ID NO: 315453
acuauaagagaauguguuu

SEQ ID NO: 381462 - RNA, 19 nt, Artificial Sequence
  Description of Artificial Sequence: Synthetic oligonucleotide
  Antisense Strand to SEQ ID NO: 381461
aaacacauucucuuauagu

SEQ ID NO: 381463 - RNA, 19 nt, Artificial Sequence
  Description of Artificial Sequence: Synthetic oligonucleotide
  Sense Strand Starting at position 798 of SEQ ID NO: 315739
gugaucgugccacagaacu

SEQ ID NO: 381464 - RNA, 19 nt, Artificial Sequence
  Description of Artificial Sequence: Synthetic oligonucleotide
  Antisense Strand to SEQ ID NO: 381463
aguucuguggcacgaucac

SEQ ID NO: 381465 - RNA, 19 nt, Artificial Sequence
  Description of Artificial Sequence: Synthetic oligonucleotide
  Sense Strand Starting at position 798 of SEQ ID NO: 315884
aaccuaaaggcaggaguua

SEQ ID NO: 381466 - RNA, 19 nt, Artificial Sequence
  Description of Artificial Sequence: Synthetic oligonucleotide
  Antisense Strand to SEQ ID NO: 381465
uaacuccugccuuuagguu

SEQ ID NO: 381467 - RNA, 19 nt, Artificial Sequence
  Description of Artificial Sequence: Synthetic oligonucleotide
  Sense Strand Starting at position 798 of SEQ ID NO: 315984
ggagaauaaauacguauug

SEQ ID NO: 381468 - RNA, 19 nt, Artificial Sequence
  Description of Artificial Sequence: Synthetic oligonucleotide
  Antisense Strand to SEQ ID NO: 381467
caauacguauuuauucucc

SEQ ID NO: 381469 - RNA, 19 nt, Artificial Sequence
  Description of Artificial Sequence: Synthetic oligonucleotide
  Sense Strand Starting at position 798 of SEQ ID NO: 315985
gagaauaaauacguauugu

SEQ ID NO: 381470 - RNA, 19 nt, Artificial Sequence
  Description of Artificial Sequence: Synthetic oligonucleotide
  Antisense Strand to SEQ ID NO: 381469
acaauacguauuuauucuc

SEQ ID NO: 381471 - RNA, 19 nt, Artificial Sequence
  Description of Artificial Sequence: Synthetic oligonucleotide
  Sense Strand Starting at position 798 of SEQ ID NO: 315995
acguauuguaaauguaaag

SEQ ID NO: 381472 - RNA, 19 nt, Artificial Sequence
  Description of Artificial Sequence: Synthetic oligonucleotide
  Antisense Strand to SEQ ID NO: 381471
cuuuacauuuacaauacgu

SEQ ID NO: 381473 - RNA, 19 nt, Artificial Sequence
  Description of Artificial Sequence: Synthetic oligonucleotide
  Sense Strand Starting at position 798 of SEQ ID NO: 316446
uuagucucccucugauaag

SEQ ID NO: 381474 - RNA, 19 nt, Artificial Sequence
  Description of Artificial Sequence: Synthetic oligonucleotide
  Antisense Strand to SEQ ID NO: 381473
cuuaucagagggagacuaa

SEQ ID NO: 381475 - RNA, 19 nt, Artificial Sequence
  Description of Artificial Sequence: Synthetic oligonucleotide
  Sense Strand Starting at position 798 of SEQ ID NO: 316456
ucugauaagccauggaucu

SEQ ID NO: 381476 - RNA, 19 nt, Artificial Sequence
  Description of Artificial Sequence: Synthetic oligonucleotide
  Antisense Strand to SEQ ID NO: 381475
agauccauggcuuaucaga

SEQ ID NO: 381477 - RNA, 19 nt, Artificial Sequence
  Description of Artificial Sequence: Synthetic oligonucleotide
  Sense Strand Starting at position 798 of SEQ ID NO: 316457
cugauaagccauggaucua

SEQ ID NO: 381478 - RNA, 19 nt, Artificial Sequence
  Description of Artificial Sequence: Synthetic oligonucleotide
  Antisense Strand to SEQ ID NO: 381477
uagauccauggcuuaucag

SEQ ID NO: 381479 - RNA, 19 nt, Artificial Sequence
  Description of Artificial Sequence: Synthetic oligonucleotide
  Sense Strand Starting at position 798 of SEQ ID NO: 316471
aucuaagucuaggcuaaga

SEQ ID NO: 381480 - RNA, 19 nt, Artificial Sequence
  Description of Artificial Sequence: Synthetic oligonucleotide
  Antisense Strand to SEQ ID NO: 381479
ucuuagccuagacuuagau

SEQ ID NO: 381481 - RNA, 19 nt, Artificial Sequence
  Description of Artificial Sequence: Synthetic oligonucleotide
  Sense Strand Starting at position 798 of SEQ ID NO: 316473
cuaagucuaggcuaagauc

SEQ ID NO: 381482 - RNA, 19 nt, Artificial Sequence
  Description of Artificial Sequence: Synthetic oligonucleotide
  Antisense Strand to SEQ ID NO: 381481
gaucuuagccuagacuuag

SEQ ID NO: 381483 - RNA, 19 nt, Artificial Sequence
  Description of Artificial Sequence: Synthetic oligonucleotide
  Sense Strand Starting at position 798 of SEQ ID NO: 316524
acaaacguucugugggaga

SEQ ID NO: 381484 - RNA, 19 nt, Artificial Sequence
  Description of Artificial Sequence: Synthetic oligonucleotide
  Antisense Strand to SEQ ID NO: 381483
ucucccacagaacguuugu

SEQ ID NO: 381485 - RNA, 19 nt, Artificial Sequence
  Description of Artificial Sequence: Synthetic oligonucleotide
  Sense Strand Starting at position 798 of SEQ ID NO: 316526
aaacguucugugggagaag

SEQ ID NO: 381486 - RNA, 19 nt, Artificial Sequence
  Description of Artificial Sequence: Synthetic oligonucleotide
  Antisense Strand to SEQ ID NO: 381485
cuucucccacagaacguuu

SEQ ID NO: 381487 - RNA, 19 nt, Artificial Sequence
  Description of Artificial Sequence: Synthetic oligonucleotide
  Sense Strand Starting at position 798 of SEQ ID NO: 316610
cugugauagguguugcugu

SEQ ID NO: 381488 - RNA, 19 nt, Artificial Sequence
  Description of Artificial Sequence: Synthetic oligonucleotide
  Antisense Strand to SEQ ID NO: 381487
acagcaacaccuaucacag

SEQ ID NO: 381489 - RNA, 19 nt, Artificial Sequence
  Description of Artificial Sequence: Synthetic oligonucleotide
  Sense Strand Starting at position 798 of SEQ ID NO: 316647
ucaucuaugagauaguggu

SEQ ID NO: 381490 - RNA, 19 nt, Artificial Sequence
  Description of Artificial Sequence: Synthetic oligonucleotide
  Antisense Strand to SEQ ID NO: 381489
accacuaucucauagauga

SEQ ID NO: 381491 - RNA, 19 nt, Artificial Sequence
  Description of Artificial Sequence: Synthetic oligonucleotide
  Sense Strand Starting at position 798 of SEQ ID NO: 316653
augagauagugguucucaa

SEQ ID NO: 381492 - RNA, 19 nt, Artificial Sequence
  Description of Artificial Sequence: Synthetic oligonucleotide
  Antisense Strand to SEQ ID NO: 381491
uugagaaccacuaucucau

SEQ ID NO: 381493 - RNA, 19 nt, Artificial Sequence
  Description of Artificial Sequence: Synthetic oligonucleotide
  Sense Strand Starting at position 798 of SEQ ID NO: 317548
gaggucugcugacccagaa

SEQ ID NO: 381494 - RNA, 19 nt, Artificial Sequence
  Description of Artificial Sequence: Synthetic oligonucleotide
  Antisense Strand to SEQ ID NO: 381493
uucugggucagcagaccuc

SEQ ID NO: 381495 - RNA, 19 nt, Artificial Sequence
  Description of Artificial Sequence: Synthetic oligonucleotide
  Sense Strand Starting at position 798 of SEQ ID NO: 317552
ucugcugacccagaaacuu

SEQ ID NO: 381496 - RNA, 19 nt, Artificial Sequence
  Description of Artificial Sequence: Synthetic oligonucleotide
  Antisense Strand to SEQ ID NO: 381495
aaguuucugggucagcaga

SEQ ID NO: 381497 - RNA, 19 nt, Artificial Sequence
  Description of Artificial Sequence: Synthetic oligonucleotide
  Sense Strand Starting at position 798 of SEQ ID NO: 317560
cccagaaacuuugcuacga

SEQ ID NO: 381498 - RNA, 19 nt, Artificial Sequence
  Description of Artificial Sequence: Synthetic oligonucleotide
  Antisense Strand to SEQ ID NO: 381497
ucguagcaaaguuucuggg

SEQ ID NO: 381499 - RNA, 19 nt, Artificial Sequence
  Description of Artificial Sequence: Synthetic oligonucleotide
  Sense Strand Starting at position 798 of SEQ ID NO: 317723
uacggacccuguguuagaa

SEQ ID NO: 381500 - RNA, 19 nt, Artificial Sequence
  Description of Artificial Sequence: Synthetic oligonucleotide
  Antisense Strand to SEQ ID NO: 381499
uucuaacacaggguccgua

SEQ ID NO: 381501 - RNA, 19 nt, Artificial Sequence
  Description of Artificial Sequence: Synthetic oligonucleotide
  Sense Strand Starting at position 798 of SEQ ID NO: 317748
ggaauugcuuugucgagga

SEQ ID NO: 381502 - RNA, 19 nt, Artificial Sequence
  Description of Artificial Sequence: Synthetic oligonucleotide
  Antisense Strand to SEQ ID NO: 381501
uccucgacaaagcaauucc

SEQ ID NO: 381503 - RNA, 19 nt, Artificial Sequence
  Description of Artificial Sequence: Synthetic oligonucleotide
  Sense Strand Starting at position 798 of SEQ ID NO: 317750
aauugcuuugucgaggacu

SEQ ID NO: 381504 - RNA, 19 nt, Artificial Sequence
  Description of Artificial Sequence: Synthetic oligonucleotide
  Antisense Strand to SEQ ID NO: 381503
aguccucgacaaagcaauu

SEQ ID NO: 381505 - RNA, 19 nt, Artificial Sequence
  Description of Artificial Sequence: Synthetic oligonucleotide
  Sense Strand Starting at position 798 of SEQ ID NO: 317783
agagcuucuugaucuuaga

SEQ ID NO: 381506 - RNA, 19 nt, Artificial Sequence
  Description of Artificial Sequence: Synthetic oligonucleotide
  Antisense Strand to SEQ ID NO: 381505
ucuaagaucaagaagcucu

SEQ ID NO: 381507 - RNA, 19 nt, Artificial Sequence
  Description of Artificial Sequence: Synthetic oligonucleotide
  Sense Strand Starting at position 798 of SEQ ID NO: 317821
uguaccugauguguacaaa

SEQ ID NO: 381508 - RNA, 19 nt, Artificial Sequence
  Description of Artificial Sequence: Synthetic oligonucleotide
  Antisense Strand to SEQ ID NO: 381507
uuuguacacaucagguaca

SEQ ID NO: 381509 - RNA, 19 nt, Artificial Sequence
  Description of Artificial Sequence: Synthetic oligonucleotide
  Sense Strand Starting at position 798 of SEQ ID NO: 317822
guaccugauguguacaaag

SEQ ID NO: 381510 - RNA, 19 nt, Artificial Sequence
  Description of Artificial Sequence: Synthetic oligonucleotide
  Antisense Strand to SEQ ID NO: 381509
cuuuguacacaucagguac

SEQ ID NO: 381511 - RNA, 19 nt, Artificial Sequence
  Description of Artificial Sequence: Synthetic oligonucleotide
  Sense Strand Starting at position 798 of SEQ ID NO: 317824
accugauguguacaaaguu

SEQ ID NO: 381512 - RNA, 19 nt, Artificial Sequence
  Description of Artificial Sequence: Synthetic oligonucleotide
  Antisense Strand to SEQ ID NO: 381511
aacuuuguacacaucaggu

SEQ ID NO: 381513 - RNA, 19 nt, Artificial Sequence
  Description of Artificial Sequence: Synthetic oligonucleotide
  Sense Strand Starting at position 798 of SEQ ID NO: 317953
gcuccuguucucgaggaac

SEQ ID NO: 381514 - RNA, 19 nt, Artificial Sequence
  Description of Artificial Sequence: Synthetic oligonucleotide
  Antisense Strand to SEQ ID NO: 381513
guuccucgagaacaggagc

SEQ ID NO: 381515 - RNA, 19 nt, Artificial Sequence
  Description of Artificial Sequence: Synthetic oligonucleotide
  Sense Strand Starting at position 798 of SEQ ID NO: 317955
uccuguucucgaggaacua

SEQ ID NO: 381516 - RNA, 19 nt, Artificial Sequence
  Description of Artificial Sequence: Synthetic oligonucleotide
  Antisense Strand to SEQ ID NO: 381515
uaguuccucgagaacagga

SEQ ID NO: 381517 - RNA, 19 nt, Artificial Sequence
  Description of Artificial Sequence: Synthetic oligonucleotide
  Sense Strand Starting at position 798 of SEQ ID NO: 317968
gaacuacugucgucuagag

SEQ ID NO: 381518 - RNA, 19 nt, Artificial Sequence
  Description of Artificial Sequence: Synthetic oligonucleotide
  Antisense Strand to SEQ ID NO: 381517
cucuagacgacaguaguuc

SEQ ID NO: 381519 - RNA, 19 nt, Artificial Sequence
  Description of Artificial Sequence: Synthetic oligonucleotide
  Sense Strand Starting at position 798 of SEQ ID NO: 317970
acuacugucgucuagagaa

SEQ ID NO: 381520 - RNA, 19 nt, Artificial Sequence
  Description of Artificial Sequence: Synthetic oligonucleotide
  Antisense Strand to SEQ ID NO: 381519
uucucuagacgacaguagu

SEQ ID NO: 381521 - RNA, 19 nt, Artificial Sequence
  Description of Artificial Sequence: Synthetic oligonucleotide
  Sense Strand Starting at position 798 of SEQ ID NO: 318094
aucugaaacguugaacugu

SEQ ID NO: 381522 - RNA, 19 nt, Artificial Sequence
  Description of Artificial Sequence: Synthetic oligonucleotide
  Antisense Strand to SEQ ID NO: 381521
acaguucaacguuucagau

SEQ ID NO: 381523 - RNA, 19 nt, Artificial Sequence
  Description of Artificial Sequence: Synthetic oligonucleotide
  Sense Strand Starting at position 798 of SEQ ID NO: 318105
ugaacuguccugcaggauu

SEQ ID NO: 381524 - RNA, 19 nt, Artificial Sequence
  Description of Artificial Sequence: Synthetic oligonucleotide
  Antisense Strand to SEQ ID NO: 381523
aauccugcaggacaguuca

SEQ ID NO: 381525 - RNA, 19 nt, Artificial Sequence
  Description of Artificial Sequence: Synthetic oligonucleotide
  Sense Strand Starting at position 798 of SEQ ID NO: 318134
ucuuauagccugugauuug

SEQ ID NO: 381526 - RNA, 19 nt, Artificial Sequence
  Description of Artificial Sequence: Synthetic oligonucleotide
  Antisense Strand to SEQ ID NO: 381525
caaaucacaggcuauaaga

SEQ ID NO: 381527 - RNA, 19 nt, Artificial Sequence
  Description of Artificial Sequence: Synthetic oligonucleotide
  Sense Strand Starting at position 798 of SEQ ID NO: 318145
gugauuugggauugugugu

SEQ ID NO: 381528 - RNA, 19 nt, Artificial Sequence
  Description of Artificial Sequence: Synthetic oligonucleotide
  Antisense Strand to SEQ ID NO: 381527
acacacaaucccaaaucac

SEQ ID NO: 381529 - RNA, 19 nt, Artificial Sequence
  Description of Artificial Sequence: Synthetic oligonucleotide
  Sense Strand Starting at position 798 of SEQ ID NO: 318779
acugucuacuggucaauca

SEQ ID NO: 381530 - RNA, 19 nt, Artificial Sequence
  Description of Artificial Sequence: Synthetic oligonucleotide
  Antisense Strand to SEQ ID NO: 381529
ugauugaccaguagacagu

SEQ ID NO: 381531 - RNA, 19 nt, Artificial Sequence
  Description of Artificial Sequence: Synthetic oligonucleotide
  Sense Strand Starting at position 798 of SEQ ID NO: 318780
cugucuacuggucaaucaa

SEQ ID NO: 381532 - RNA, 19 nt, Artificial Sequence
  Description of Artificial Sequence: Synthetic oligonucleotide
  Antisense Strand to SEQ ID NO: 381531
uugauugaccaguagacag

SEQ ID NO: 381533 - RNA, 19 nt, Artificial Sequence
  Description of Artificial Sequence: Synthetic oligonucleotide
  Sense Strand Starting at position 799 of SEQ ID NO: 315296
guaccuuuggcugagauaa

SEQ ID NO: 381534 - RNA, 19 nt, Artificial Sequence
  Description of Artificial Sequence: Synthetic oligonucleotide
  Antisense Strand to SEQ ID NO: 381533
uuaucucagccaaagguac

SEQ ID NO: 381535 - RNA, 19 nt, Artificial Sequence
  Description of Artificial Sequence: Synthetic oligonucleotide
  Sense Strand Starting at position 799 of SEQ ID NO: 315447
ggaucaaaguaauugcuca

SEQ ID NO: 381536 - RNA, 19 nt, Artificial Sequence
  Description of Artificial Sequence: Synthetic oligonucleotide
  Antisense Strand to SEQ ID NO: 381535
ugagcaauuacuuugaucc

SEQ ID NO: 381537 - RNA, 19 nt, Artificial Sequence
  Description of Artificial Sequence: Synthetic oligonucleotide
  Sense Strand Starting at position 799 of SEQ ID NO: 315465
aaagcaaaggcguaacaau

SEQ ID NO: 381538 - RNA, 19 nt, Artificial Sequence
  Description of Artificial Sequence: Synthetic oligonucleotide
  Antisense Strand to SEQ ID NO: 381537
auuguuacgccuuugcuuu

SEQ ID NO: 381539 - RNA, 19 nt, Artificial Sequence
  Description of Artificial Sequence: Synthetic oligonucleotide
  Sense Strand Starting at position 799 of SEQ ID NO: 315490
uuaccaucccgacaaaguu

SEQ ID NO: 381540 - RNA, 19 nt, Artificial Sequence
  Description of Artificial Sequence: Synthetic oligonucleotide
  Antisense Strand to SEQ ID NO: 381539
aacuuugucgggaugguaa

SEQ ID NO: 381541 - RNA, 19 nt, Artificial Sequence
  Description of Artificial Sequence: Synthetic oligonucleotide
  Sense Strand Starting at position 799 of SEQ ID NO: 315670
aucauaaagcaucgagaug

SEQ ID NO: 381542 - RNA, 19 nt, Artificial Sequence
  Description of Artificial Sequence: Synthetic oligonucleotide
  Antisense Strand to SEQ ID NO: 381541
caucucgaugcuuuaugau

SEQ ID NO: 381543 - RNA, 19 nt, Artificial Sequence
  Description of Artificial Sequence: Synthetic oligonucleotide
  Sense Strand Starting at position 799 of SEQ ID NO: 315832
gcugacacacagugauauu

SEQ ID NO: 381544 - RNA, 19 nt, Artificial Sequence
  Description of Artificial Sequence: Synthetic oligonucleotide
  Antisense Strand to SEQ ID NO: 381543
aauaucacugugugucagc

SEQ ID NO: 381545 - RNA, 19 nt, Artificial Sequence
  Description of Artificial Sequence: Synthetic oligonucleotide
  Sense Strand Starting at position 799 of SEQ ID NO: 315856
uuuacugaacgucaacauu

SEQ ID NO: 381546 - RNA, 19 nt, Artificial Sequence
  Description of Artificial Sequence: Synthetic oligonucleotide
  Antisense Strand to SEQ ID NO: 381545
aauguugacguucaguaaa

SEQ ID NO: 381547 - RNA, 19 nt, Artificial Sequence
  Description of Artificial Sequence: Synthetic oligonucleotide
  Sense Strand Starting at position 799 of SEQ ID NO: 316016
augugaagcaaagguuaaa

SEQ ID NO: 381548 - RNA, 19 nt, Artificial Sequence
  Description of Artificial Sequence: Synthetic oligonucleotide
  Antisense Strand to SEQ ID NO: 381547
uuuaaccuuugcuucacau

SEQ ID NO: 381549 - RNA, 19 nt, Artificial Sequence
  Description of Artificial Sequence: Synthetic oligonucleotide
  Sense Strand Starting at position 799 of SEQ ID NO: 316049
ggcugaagaaacugucaaa

SEQ ID NO: 381550 - RNA, 19 nt, Artificial Sequence
  Description of Artificial Sequence: Synthetic oligonucleotide
  Antisense Strand to SEQ ID NO: 381549
uuugacaguuucuucagcc

SEQ ID NO: 381551 - RNA, 19 nt, Artificial Sequence
  Description of Artificial Sequence: Synthetic oligonucleotide
  Sense Strand Starting at position 799 of SEQ ID NO: 316663
aaagguauuugagaacucu

SEQ ID NO: 381552 - RNA, 19 nt, Artificial Sequence
  Description of Artificial Sequence: Synthetic oligonucleotide
  Antisense Strand to SEQ ID NO: 381551
agaguucucaaauaccuuu

SEQ ID NO: 381553 - RNA, 19 nt, Artificial Sequence
  Description of Artificial Sequence: Synthetic oligonucleotide
  Sense Strand Starting at position 799 of SEQ ID NO: 316671
uugagaacucuguacuauc

SEQ ID NO: 381554 - RNA, 19 nt, Artificial Sequence
  Description of Artificial Sequence: Synthetic oligonucleotide
  Antisense Strand to SEQ ID NO: 381553
gauaguacagaguucucaa

SEQ ID NO: 381555 - RNA, 19 nt, Artificial Sequence
  Description of Artificial Sequence: Synthetic oligonucleotide
  Sense Strand Starting at position 799 of SEQ ID NO: 316713
aaaguuaauuuagggagaa

SEQ ID NO: 381556 - RNA, 19 nt, Artificial Sequence
  Description of Artificial Sequence: Synthetic oligonucleotide
  Antisense Strand to SEQ ID NO: 381555
uucucccuaaauuaacuuu

SEQ ID NO: 381557 - RNA, 19 nt, Artificial Sequence
  Description of Artificial Sequence: Synthetic oligonucleotide
  Sense Strand Starting at position 799 of SEQ ID NO: 317055
cguccagaagcgucucauu

SEQ ID NO: 381558 - RNA, 19 nt, Artificial Sequence
  Description of Artificial Sequence: Synthetic oligonucleotide
  Antisense Strand to SEQ ID NO: 381557
aaugagacgcuucuggacg

SEQ ID NO: 381559 - RNA, 19 nt, Artificial Sequence
  Description of Artificial Sequence: Synthetic oligonucleotide
  Sense Strand Starting at position 799 of SEQ ID NO: 317258
gcgagauacugauuugcuc

SEQ ID NO: 381560 - RNA, 19 nt, Artificial Sequence
  Description of Artificial Sequence: Synthetic oligonucleotide
  Antisense Strand to SEQ ID NO: 381559
gagcaaaucaguaucucgc

SEQ ID NO: 381561 - RNA, 19 nt, Artificial Sequence
  Description of Artificial Sequence: Synthetic oligonucleotide
  Sense Strand Starting at position 799 of SEQ ID NO: 317269
auuugcucgcgcuauagaa

SEQ ID NO: 381562 - RNA, 19 nt, Artificial Sequence
  Description of Artificial Sequence: Synthetic oligonucleotide
  Antisense Strand to SEQ ID NO: 381561
uucuauagcgcgagcaaau

SEQ ID NO: 381563 - RNA, 19 nt, Artificial Sequence
  Description of Artificial Sequence: Synthetic oligonucleotide
  Sense Strand Starting at position 799 of SEQ ID NO: 317282
auagaauucuugucgaaga

SEQ ID NO: 381564 - RNA, 19 nt, Artificial Sequence
  Description of Artificial Sequence: Synthetic oligonucleotide
  Antisense Strand to SEQ ID NO: 381563
ucuucgacaagaauucuau

SEQ ID NO: 381565 - RNA, 19 nt, Artificial Sequence
  Description of Artificial Sequence: Synthetic oligonucleotide
  Sense Strand Starting at position 799 of SEQ ID NO: 317346
cugguaaaggcugauacuu

SEQ ID NO: 381566 - RNA, 19 nt, Artificial Sequence
  Description of Artificial Sequence: Synthetic oligonucleotide
  Antisense Strand to SEQ ID NO: 381565
aaguaucagccuuuaccag

SEQ ID NO: 381567 - RNA, 19 nt, Artificial Sequence
  Description of Artificial Sequence: Synthetic oligonucleotide
  Sense Strand Starting at position 799 of SEQ ID NO: 317354
ggcugauacuucccaggac

SEQ ID NO: 381568 - RNA, 19 nt, Artificial Sequence
  Description of Artificial Sequence: Synthetic oligonucleotide
  Antisense Strand to SEQ ID NO: 381567
guccugggaaguaucagcc

SEQ ID NO: 381569 - RNA, 19 nt, Artificial Sequence
  Description of Artificial Sequence: Synthetic oligonucleotide
  Sense Strand Starting at position 799 of SEQ ID NO: 317392
gccaaagcgacuuucgcua

SEQ ID NO: 381570 - RNA, 19 nt, Artificial Sequence
  Description of Artificial Sequence: Synthetic oligonucleotide
  Antisense Strand to SEQ ID NO: 381569
uagcgaaagucgcuuuggc

SEQ ID NO: 381571 - RNA, 19 nt, Artificial Sequence
  Description of Artificial Sequence: Synthetic oligonucleotide
  Sense Strand Starting at position 799 of SEQ ID NO: 317414
ggauuggucggcguagcuu

SEQ ID NO: 381572 - RNA, 19 nt, Artificial Sequence
  Description of Artificial Sequence: Synthetic oligonucleotide
  Antisense Strand to SEQ ID NO: 381571
aagcuacgccgaccaaucc

SEQ ID NO: 381573 - RNA, 19 nt, Artificial Sequence
  Description of Artificial Sequence: Synthetic oligonucleotide
  Sense Strand Starting at position 799 of SEQ ID NO: 317860
uuuaauggagaguguuaaa

SEQ ID NO: 381574 - RNA, 19 nt, Artificial Sequence
  Description of Artificial Sequence: Synthetic oligonucleotide
  Antisense Strand to SEQ ID NO: 381573
uuuaacacucuccauuaaa

SEQ ID NO: 381575 - RNA, 19 nt, Artificial Sequence
  Description of Artificial Sequence: Synthetic oligonucleotide
  Sense Strand Starting at position 799 of SEQ ID NO: 317869
gaguguuaaacugaaguag

SEQ ID NO: 381576 - RNA, 19 nt, Artificial Sequence
  Description of Artificial Sequence: Synthetic oligonucleotide
  Antisense Strand to SEQ ID NO: 381575
cuacuucaguuuaacacuc

SEQ ID NO: 381577 - RNA, 19 nt, Artificial Sequence
  Description of Artificial Sequence: Synthetic oligonucleotide
  Sense Strand Starting at position 799 of SEQ ID NO: 317890
auguaaagcgguuacaaca

SEQ ID NO: 381578 - RNA, 19 nt, Artificial Sequence
  Description of Artificial Sequence: Synthetic oligonucleotide
  Antisense Strand to SEQ ID NO: 381577
uguuguaaccgcuuuacau

SEQ ID NO: 381579 - RNA, 19 nt, Artificial Sequence
  Description of Artificial Sequence: Synthetic oligonucleotide
  Sense Strand Starting at position 799 of SEQ ID NO: 317920
acaguaaaugcccaaaugu

SEQ ID NO: 381580 - RNA, 19 nt, Artificial Sequence
  Description of Artificial Sequence: Synthetic oligonucleotide
  Antisense Strand to SEQ ID NO: 381579
acauuugggcauuuacugu

SEQ ID NO: 381581 - RNA, 19 nt, Artificial Sequence
  Description of Artificial Sequence: Synthetic oligonucleotide
  Sense Strand Starting at position 799 of SEQ ID NO: 318051
gggagcaauguuuaauggu

SEQ ID NO: 381582 - RNA, 19 nt, Artificial Sequence
  Description of Artificial Sequence: Synthetic oligonucleotide
  Antisense Strand to SEQ ID NO: 381581
accauuaaacauugcuccc

SEQ ID NO: 381583 - RNA, 19 nt, Artificial Sequence
  Description of Artificial Sequence: Synthetic oligonucleotide
  Sense Strand Starting at position 799 of SEQ ID NO: 318061
uuuaaugguucuccaagga

SEQ ID NO: 381584 - RNA, 19 nt, Artificial Sequence
  Description of Artificial Sequence: Synthetic oligonucleotide
  Antisense Strand to SEQ ID NO: 381583
uccuuggagaaccauuaaa

SEQ ID NO: 381585 - RNA, 19 nt, Artificial Sequence
  Description of Artificial Sequence: Synthetic oligonucleotide
  Sense Strand Starting at position 799 of SEQ ID NO: 318065
augguucuccaaggaagau

SEQ ID NO: 381586 - RNA, 19 nt, Artificial Sequence
  Description of Artificial Sequence: Synthetic oligonucleotide
  Antisense Strand to SEQ ID NO: 381585
aucuuccuuggagaaccau

SEQ ID NO: 381587 - RNA, 19 nt, Artificial Sequence
  Description of Artificial Sequence: Synthetic oligonucleotide
  Sense Strand Starting at position 799 of SEQ ID NO: 318074
caaggaagauguuuauuac

SEQ ID NO: 381588 - RNA, 19 nt, Artificial Sequence
  Description of Artificial Sequence: Synthetic oligonucleotide
  Antisense Strand to SEQ ID NO: 381587
guaauaaacaucuuccuug

SEQ ID NO: 381589 - RNA, 19 nt, Artificial Sequence
  Description of Artificial Sequence: Synthetic oligonucleotide
  Sense Strand Starting at position 799 of SEQ ID NO: 318077
ggaagauguuuauuacacc

SEQ ID NO: 381590 - RNA, 19 nt, Artificial Sequence
  Description of Artificial Sequence: Synthetic oligonucleotide
  Antisense Strand to SEQ ID NO: 381589
gguguaauaaacaucuucc

SEQ ID NO: 381591 - RNA, 19 nt, Artificial Sequence
  Description of Artificial Sequence: Synthetic oligonucleotide
  Sense Strand Starting at position 799 of SEQ ID NO: 318190
uugauauggucccugauag

SEQ ID NO: 381592 - RNA, 19 nt, Artificial Sequence
  Description of Artificial Sequence: Synthetic oligonucleotide
  Antisense Strand to SEQ ID NO: 381591
cuaucagggaccauaucaa

SEQ ID NO: 381593 - RNA, 19 nt, Artificial Sequence
  Description of Artificial Sequence: Synthetic oligonucleotide
  Sense Strand Starting at position 799 of SEQ ID NO: 318197
ggucccugauaguuaauaa

SEQ ID NO: 381594 - RNA, 19 nt, Artificial Sequence
  Description of Artificial Sequence: Synthetic oligonucleotide
  Antisense Strand to SEQ ID NO: 381593
uuauuaacuaucagggacc

SEQ ID NO: 381595 - RNA, 19 nt, Artificial Sequence
  Description of Artificial Sequence: Synthetic oligonucleotide
  Sense Strand Starting at position 799 of SEQ ID NO: 318248
ucaauauacguacaugcua

SEQ ID NO: 381596 - RNA, 19 nt, Artificial Sequence
  Description of Artificial Sequence: Synthetic oligonucleotide
  Antisense Strand to SEQ ID NO: 381595
uagcauguacguauauuga

SEQ ID NO: 381597 - RNA, 19 nt, Artificial Sequence
  Description of Artificial Sequence: Synthetic oligonucleotide
  Sense Strand Starting at position 799 of SEQ ID NO: 318618
gugguauuguauuugcaau

SEQ ID NO: 381598 - RNA, 19 nt, Artificial Sequence
  Description of Artificial Sequence: Synthetic oligonucleotide
  Antisense Strand to SEQ ID NO: 381597
auugcaaauacaauaccac

SEQ ID NO: 381599 - RNA, 19 nt, Artificial Sequence
  Description of Artificial Sequence: Synthetic oligonucleotide
  Sense Strand Starting at position 799 of SEQ ID NO: 318620
gguauuguauuugcaaugu

SEQ ID NO: 381600 - RNA, 19 nt, Artificial Sequence
  Description of Artificial Sequence: Synthetic oligonucleotide
  Antisense Strand to SEQ ID NO: 381599
acauugcaaauacaauacc

SEQ ID NO: 381601 - RNA, 19 nt, Artificial Sequence
  Description of Artificial Sequence: Synthetic oligonucleotide
  Sense Strand Starting at position 799 of SEQ ID NO: 318662
agggaauuucgcggcauuc

SEQ ID NO: 381602 - RNA, 19 nt, Artificial Sequence
  Description of Artificial Sequence: Synthetic oligonucleotide
  Antisense Strand to SEQ ID NO: 381601
gaaugccgcgaaauucccu

SEQ ID NO: 381603 - RNA, 19 nt, Artificial Sequence
  Description of Artificial Sequence: Synthetic oligonucleotide
  Sense Strand Starting at position 799 of SEQ ID NO: 318664
ggaauuucgcggcauucuu

SEQ ID NO: 381604 - RNA, 19 nt, Artificial Sequence
  Description of Artificial Sequence: Synthetic oligonucleotide
  Antisense Strand to SEQ ID NO: 381603
aagaaugccgcgaaauucc

SEQ ID NO: 381605 - RNA, 19 nt, Artificial Sequence
  Description of Artificial Sequence: Synthetic oligonucleotide
  Sense Strand Starting at position 799 of SEQ ID NO: 318718
guguuaaccgcugcuguca

SEQ ID NO: 381606 - RNA, 19 nt, Artificial Sequence
  Description of Artificial Sequence: Synthetic oligonucleotide
  Antisense Strand to SEQ ID NO: 381605
ugacagcagcgguuaacac

SEQ ID NO: 381607 - RNA, 19 nt, Artificial Sequence
  Description of Artificial Sequence: Synthetic oligonucleotide
  Sense Strand Starting at position 799 of SEQ ID NO: 318884
uggugauuauggguaggaa

SEQ ID NO: 381608 - RNA, 19 nt, Artificial Sequence
  Description of Artificial Sequence: Synthetic oligonucleotide
  Antisense Strand to SEQ ID NO: 381607
uuccuacccauaaucacca

SEQ ID NO: 381609 - RNA, 19 nt, Artificial Sequence
  Description of Artificial Sequence: Synthetic oligonucleotide
  Sense Strand Starting at position 799 of SEQ ID NO: 318930
ucgaccuuuaaaggauaga

SEQ ID NO: 381610 - RNA, 19 nt, Artificial Sequence
  Description of Artificial Sequence: Synthetic oligonucleotide
  Antisense Strand to SEQ ID NO: 381609
ucuauccuuuaaaggucga

SEQ ID NO: 381611 - RNA, 19 nt, Artificial Sequence
  Description of Artificial Sequence: Synthetic oligonucleotide
  Sense Strand Starting at position 799 of SEQ ID NO: 319042
cgaccagaauuagcaaaua

SEQ ID NO: 381612 - RNA, 19 nt, Artificial Sequence
  Description of Artificial Sequence: Synthetic oligonucleotide
  Antisense Strand to SEQ ID NO: 381611
uauuugcuaauucuggucg

SEQ ID NO: 381613 - RNA, 19 nt, Artificial Sequence
  Description of Artificial Sequence: Synthetic oligonucleotide
  Sense Strand Starting at position 800 of SEQ ID NO: 315261
agccgugacacuuguggau

SEQ ID NO: 381614 - RNA, 19 nt, Artificial Sequence
  Description of Artificial Sequence: Synthetic oligonucleotide
  Antisense Strand to SEQ ID NO: 381613
auccacaagugucacggcu

SEQ ID NO: 381615 - RNA, 19 nt, Artificial Sequence
  Description of Artificial Sequence: Synthetic oligonucleotide
  Sense Strand Starting at position 800 of SEQ ID NO: 315267
gacacuuguggaugccuua

SEQ ID NO: 381616 - RNA, 19 nt, Artificial Sequence
  Description of Artificial Sequence: Synthetic oligonucleotide
  Antisense Strand to SEQ ID NO: 381615
uaaggcauccacaaguguc

SEQ ID NO: 381617 - RNA, 19 nt, Artificial Sequence
  Description of Artificial Sequence: Synthetic oligonucleotide
  Sense Strand Starting at position 800 of SEQ ID NO: 315280
gccuuagaggcuugucuug

SEQ ID NO: 381618 - RNA, 19 nt, Artificial Sequence
  Description of Artificial Sequence: Synthetic oligonucleotide
  Antisense Strand to SEQ ID NO: 381617
caagacaagccucuaaggc

SEQ ID NO: 381619 - RNA, 19 nt, Artificial Sequence
  Description of Artificial Sequence: Synthetic oligonucleotide
  Sense Strand Starting at position 800 of SEQ ID NO: 315282
cuuagaggcuugucuuguu

SEQ ID NO: 381620 - RNA, 19 nt, Artificial Sequence
  Description of Artificial Sequence: Synthetic oligonucleotide
  Antisense Strand to SEQ ID NO: 381619
aacaagacaagccucuaag

SEQ ID NO: 381621 - RNA, 19 nt, Artificial Sequence
  Description of Artificial Sequence: Synthetic oligonucleotide
  Sense Strand Starting at position 800 of SEQ ID NO: 315377
ggugaagucacuugcucca

SEQ ID NO: 381622 - RNA, 19 nt, Artificial Sequence
  Description of Artificial Sequence: Synthetic oligonucleotide
  Antisense Strand to SEQ ID NO: 381621
uggagcaagugacuucacc

SEQ ID NO: 381623 - RNA, 19 nt, Artificial Sequence
  Description of Artificial Sequence: Synthetic oligonucleotide
  Sense Strand Starting at position 800 of SEQ ID NO: 315379
ugaagucacuugcuccaaa

SEQ ID NO: 381624 - RNA, 19 nt, Artificial Sequence
  Description of Artificial Sequence: Synthetic oligonucleotide
  Antisense Strand to SEQ ID NO: 381623
uuuggagcaagugacuuca

SEQ ID NO: 381625 - RNA, 19 nt, Artificial Sequence
  Description of Artificial Sequence: Synthetic oligonucleotide
  Sense Strand Starting at position 800 of SEQ ID NO: 315622
augggaucuuggugggaau

SEQ ID NO: 381626 - RNA, 19 nt, Artificial Sequence
  Description of Artificial Sequence: Synthetic oligonucleotide
  Antisense Strand to SEQ ID NO: 381625
auucccaccaagaucccau

SEQ ID NO: 381627 - RNA, 19 nt, Artificial Sequence
  Description of Artificial Sequence: Synthetic oligonucleotide
  Sense Strand Starting at position 800 of SEQ ID NO: 315635
gggaaugacuuugcuccuu

SEQ ID NO: 381628 - RNA, 19 nt, Artificial Sequence
  Description of Artificial Sequence: Synthetic oligonucleotide
  Antisense Strand to SEQ ID NO: 381627
aaggagcaaagucauuccc

SEQ ID NO: 381629 - RNA, 19 nt, Artificial Sequence
  Description of Artificial Sequence: Synthetic oligonucleotide
  Sense Strand Starting at position 800 of SEQ ID NO: 315637
gaaugacuuugcuccuugu

SEQ ID NO: 381630 - RNA, 19 nt, Artificial Sequence
  Description of Artificial Sequence: Synthetic oligonucleotide
  Antisense Strand to SEQ ID NO: 381629
acaaggagcaaagucauuc

SEQ ID NO: 381631 - RNA, 19 nt, Artificial Sequence
  Description of Artificial Sequence: Synthetic oligonucleotide
  Sense Strand Starting at position 800 of SEQ ID NO: 315640
ugacuuugcuccuuguaug

SEQ ID NO: 381632 - RNA, 19 nt, Artificial Sequence
  Description of Artificial Sequence: Synthetic oligonucleotide
  Antisense Strand to SEQ ID NO: 381631
cauacaaggagcaaaguca

SEQ ID NO: 381633 - RNA, 19 nt, Artificial Sequence
  Description of Artificial Sequence: Synthetic oligonucleotide
  Sense Strand Starting at position 800 of SEQ ID NO: 315641
gacuuugcuccuuguauga

SEQ ID NO: 381634 - RNA, 19 nt, Artificial Sequence
  Description of Artificial Sequence: Synthetic oligonucleotide
  Antisense Strand to SEQ ID NO: 381633
ucauacaaggagcaaaguc

SEQ ID NO: 381635 - RNA, 19 nt, Artificial Sequence
  Description of Artificial Sequence: Synthetic oligonucleotide
  Sense Strand Starting at position 800 of SEQ ID NO: 315734
guaguccucccugaaaccu

SEQ ID NO: 381636 - RNA, 19 nt, Artificial Sequence
  Description of Artificial Sequence: Synthetic oligonucleotide
  Antisense Strand to SEQ ID NO: 381635
agguuucagggaggacuac

SEQ ID NO: 381637 - RNA, 19 nt, Artificial Sequence
  Description of Artificial Sequence: Synthetic oligonucleotide
  Sense Strand Starting at position 800 of SEQ ID NO: 315923
ugccuuuacuggucaagaa

SEQ ID NO: 381638 - RNA, 19 nt, Artificial Sequence
  Description of Artificial Sequence: Synthetic oligonucleotide
  Antisense Strand to SEQ ID NO: 381637
uucuugaccaguaaaggca

SEQ ID NO: 381639 - RNA, 19 nt, Artificial Sequence
  Description of Artificial Sequence: Synthetic oligonucleotide
  Sense Strand Starting at position 800 of SEQ ID NO: 315924
gccuuuacuggucaagaag

SEQ ID NO: 381640 - RNA, 19 nt, Artificial Sequence
  Description of Artificial Sequence: Synthetic oligonucleotide
  Antisense Strand to SEQ ID NO: 381639
cuucuugaccaguaaaggc

SEQ ID NO: 381641 - RNA, 19 nt, Artificial Sequence
  Description of Artificial Sequence: Synthetic oligonucleotide
  Sense Strand Starting at position 800 of SEQ ID NO: 315992
guuagaaucuuccagacag

SEQ ID NO: 381642 - RNA, 19 nt, Artificial Sequence
  Description of Artificial Sequence: Synthetic oligonucleotide
  Antisense Strand to SEQ ID NO: 381641
cugucuggaagauucuaac

SEQ ID NO: 381643 - RNA, 19 nt, Artificial Sequence
  Description of Artificial Sequence: Synthetic oligonucleotide
  Sense Strand Starting at position 800 of SEQ ID NO: 316135
ugcguuucaugcuugagag

SEQ ID NO: 381644 - RNA, 19 nt, Artificial Sequence
  Description of Artificial Sequence: Synthetic oligonucleotide
  Antisense Strand to SEQ ID NO: 381643
cucucaagcaugaaacgca

SEQ ID NO: 381645 - RNA, 19 nt, Artificial Sequence
  Description of Artificial Sequence: Synthetic oligonucleotide
  Sense Strand Starting at position 800 of SEQ ID NO: 316136
gcguuucaugcuugagaga

SEQ ID NO: 381646 - RNA, 19 nt, Artificial Sequence
  Description of Artificial Sequence: Synthetic oligonucleotide
  Antisense Strand to SEQ ID NO: 381645
ucucucaagcaugaaacgc

SEQ ID NO: 381647 - RNA, 19 nt, Artificial Sequence
  Description of Artificial Sequence: Synthetic oligonucleotide
  Sense Strand Starting at position 800 of SEQ ID NO: 316137
cguuucaugcuugagagag

SEQ ID NO: 381648 - RNA, 19 nt, Artificial Sequence
  Description of Artificial Sequence: Synthetic oligonucleotide
  Antisense Strand to SEQ ID NO: 381647
cucucucaagcaugaaacg

SEQ ID NO: 381649 - RNA, 19 nt, Artificial Sequence
  Description of Artificial Sequence: Synthetic oligonucleotide
  Sense Strand Starting at position 800 of SEQ ID NO: 316176
cacccaacuggucagugau

SEQ ID NO: 381650 - RNA, 19 nt, Artificial Sequence
  Description of Artificial Sequence: Synthetic oligonucleotide
  Antisense Strand to SEQ ID NO: 381649
aucacugaccaguugggug

SEQ ID NO: 381651 - RNA, 19 nt, Artificial Sequence
  Description of Artificial Sequence: Synthetic oligonucleotide
  Sense Strand Starting at position 800 of SEQ ID NO: 316348
cgccauuucucagagggag

SEQ ID NO: 381652 - RNA, 19 nt, Artificial Sequence
  Description of Artificial Sequence: Synthetic oligonucleotide
  Antisense Strand to SEQ ID NO: 381651
cucccucugagaaauggcg

SEQ ID NO: 381653 - RNA, 19 nt, Artificial Sequence
  Description of Artificial Sequence: Synthetic oligonucleotide
  Sense Strand Starting at position 800 of SEQ ID NO: 316487
gcgacaucgaggugugucu

SEQ ID NO: 381654 - RNA, 19 nt, Artificial Sequence
  Description of Artificial Sequence: Synthetic oligonucleotide
  Antisense Strand to SEQ ID NO: 381653
agacacaccucgaugucgc

SEQ ID NO: 381655 - RNA, 19 nt, Artificial Sequence
  Description of Artificial Sequence: Synthetic oligonucleotide
  Sense Strand Starting at position 800 of SEQ ID NO: 316575
uggcuuuguccacagcacu

SEQ ID NO: 381656 - RNA, 19 nt, Artificial Sequence
  Description of Artificial Sequence: Synthetic oligonucleotide
  Antisense Strand to SEQ ID NO: 381655
agugcuguggacaaagcca

SEQ ID NO: 381657 - RNA, 19 nt, Artificial Sequence
  Description of Artificial Sequence: Synthetic oligonucleotide
  Sense Strand Starting at position 800 of SEQ ID NO: 318054
ucgacaggcuuuccaacaa

SEQ ID NO: 381658 - RNA, 19 nt, Artificial Sequence
  Description of Artificial Sequence: Synthetic oligonucleotide
  Antisense Strand to SEQ ID NO: 381657
uuguuggaaagccugucga

SEQ ID NO: 381659 - RNA, 19 nt, Artificial Sequence
  Description of Artificial Sequence: Synthetic oligonucleotide
  Sense Strand Starting at position 800 of SEQ ID NO: 318076
uccucuuuccugcgcagaa

SEQ ID NO: 381660 - RNA, 19 nt, Artificial Sequence
  Description of Artificial Sequence: Synthetic oligonucleotide
  Antisense Strand to SEQ ID NO: 381659
uucugcgcaggaaagagga

SEQ ID NO: 381661 - RNA, 19 nt, Artificial Sequence
  Description of Artificial Sequence: Synthetic oligonucleotide
  Sense Strand Starting at position 800 of SEQ ID NO: 318107
cgcauuucuucugcucaga

SEQ ID NO: 381662 - RNA, 19 nt, Artificial Sequence
  Description of Artificial Sequence: Synthetic oligonucleotide
  Antisense Strand to SEQ ID NO: 381661
ucugagcagaagaaaugcg

SEQ ID NO: 381663 - RNA, 19 nt, Artificial Sequence
  Description of Artificial Sequence: Synthetic oligonucleotide
  Sense Strand Starting at position 800 of SEQ ID NO: 318281
uccacugaaccuugauuga

SEQ ID NO: 381664 - RNA, 19 nt, Artificial Sequence
  Description of Artificial Sequence: Synthetic oligonucleotide
  Antisense Strand to SEQ ID NO: 381663
ucaaucaagguucagugga

SEQ ID NO: 381665 - RNA, 19 nt, Artificial Sequence
  Description of Artificial Sequence: Synthetic oligonucleotide
  Sense Strand Starting at position 800 of SEQ ID NO: 318456
gcagcauccagccgucaaa

SEQ ID NO: 381666 - RNA, 19 nt, Artificial Sequence
  Description of Artificial Sequence: Synthetic oligonucleotide
  Antisense Strand to SEQ ID NO: 381665
uuugacggcuggaugcugc

SEQ ID NO: 381667 - RNA, 19 nt, Artificial Sequence
  Description of Artificial Sequence: Synthetic oligonucleotide
  Sense Strand Starting at position 800 of SEQ ID NO: 318688
aucgucucauugguucuaa

SEQ ID NO: 381668 - RNA, 19 nt, Artificial Sequence
  Description of Artificial Sequence: Synthetic oligonucleotide
  Antisense Strand to SEQ ID NO: 381667
uuagaaccaaugagacgau

SEQ ID NO: 381669 - RNA, 19 nt, Artificial Sequence
  Description of Artificial Sequence: Synthetic oligonucleotide
  Sense Strand Starting at position 800 of SEQ ID NO: 318721
uccuuagauugucuaauag

SEQ ID NO: 381670 - RNA, 19 nt, Artificial Sequence
  Description of Artificial Sequence: Synthetic oligonucleotide
  Antisense Strand to SEQ ID NO: 381669
cuauuagacaaucuaagga

SEQ ID NO: 381671 - RNA, 19 nt, Artificial Sequence
  Description of Artificial Sequence: Synthetic oligonucleotide
  Sense Strand Starting at position 800 of SEQ ID NO: 318725
uagauugucuaauaguugu

SEQ ID NO: 381672 - RNA, 19 nt, Artificial Sequence
  Description of Artificial Sequence: Synthetic oligonucleotide
  Antisense Strand to SEQ ID NO: 381671
acaacuauuagacaaucua

SEQ ID NO: 381673 - RNA, 19 nt, Artificial Sequence
  Description of Artificial Sequence: Synthetic oligonucleotide
  Sense Strand Starting at position 800 of SEQ ID NO: 318731
gucuaauaguugucuccuu

SEQ ID NO: 381674 - RNA, 19 nt, Artificial Sequence
  Description of Artificial Sequence: Synthetic oligonucleotide
  Antisense Strand to SEQ ID NO: 381673
aaggagacaacuauuagac

SEQ ID NO: 381675 - RNA, 19 nt, Artificial Sequence
  Description of Artificial Sequence: Synthetic oligonucleotide
  Sense Strand Starting at position 800 of SEQ ID NO: 318773
uuacuuuaguccuagguaa

SEQ ID NO: 381676 - RNA, 19 nt, Artificial Sequence
  Description of Artificial Sequence: Synthetic oligonucleotide
  Antisense Strand to SEQ ID NO: 381675
uuaccuaggacuaaaguaa

SEQ ID NO: 381677 - RNA, 19 nt, Artificial Sequence
  Description of Artificial Sequence: Synthetic oligonucleotide
  Sense Strand Starting at position 800 of SEQ ID NO: 318775
acuuuaguccuagguaaug

SEQ ID NO: 381678 - RNA, 19 nt, Artificial Sequence
  Description of Artificial Sequence: Synthetic oligonucleotide
  Antisense Strand to SEQ ID NO: 381677
cauuaccuaggacuaaagu

SEQ ID NO: 381679 - RNA, 19 nt, Artificial Sequence
  Description of Artificial Sequence: Synthetic oligonucleotide
  Sense Strand Starting at position 800 of SEQ ID NO: 318845
cgcaauuacaagugaaguc

SEQ ID NO: 381680 - RNA, 19 nt, Artificial Sequence
  Description of Artificial Sequence: Synthetic oligonucleotide
  Antisense Strand to SEQ ID NO: 381679
gacuucacuuguaauugcg

SEQ ID NO: 381681 - RNA, 19 nt, Artificial Sequence
  Description of Artificial Sequence: Synthetic oligonucleotide
  Sense Strand Starting at position 800 of SEQ ID NO: 318855
agugaagucucuuaaguca

SEQ ID NO: 381682 - RNA, 19 nt, Artificial Sequence
  Description of Artificial Sequence: Synthetic oligonucleotide
  Antisense Strand to SEQ ID NO: 381681
ugacuuaagagacuucacu

SEQ ID NO: 381683 - RNA, 19 nt, Artificial Sequence
  Description of Artificial Sequence: Synthetic oligonucleotide
  Sense Strand Starting at position 800 of SEQ ID NO: 318889
cuggcauagucucuuaaac

SEQ ID NO: 381684 - RNA, 19 nt, Artificial Sequence
  Description of Artificial Sequence: Synthetic oligonucleotide
  Antisense Strand to SEQ ID NO: 381683
guuuaagagacuaugccag

SEQ ID NO: 381685 - RNA, 19 nt, Artificial Sequence
  Description of Artificial Sequence: Synthetic oligonucleotide
  Sense Strand Starting at position 800 of SEQ ID NO: 318891
ggcauagucucuuaaacug

SEQ ID NO: 381686 - RNA, 19 nt, Artificial Sequence
  Description of Artificial Sequence: Synthetic oligonucleotide
  Antisense Strand to SEQ ID NO: 381685
caguuuaagagacuaugcc

SEQ ID NO: 381687 - RNA, 19 nt, Artificial Sequence
  Description of Artificial Sequence: Synthetic oligonucleotide
  Sense Strand Starting at position 800 of SEQ ID NO: 318899
cucuuaaacugucaguuaa

SEQ ID NO: 381688 - RNA, 19 nt, Artificial Sequence
  Description of Artificial Sequence: Synthetic oligonucleotide
  Antisense Strand to SEQ ID NO: 381687
uuaacugacaguuuaagag

SEQ ID NO: 381689 - RNA, 19 nt, Artificial Sequence
  Description of Artificial Sequence: Synthetic oligonucleotide
  Sense Strand Starting at position 800 of SEQ ID NO: 318901
cuuaaacugucaguuaaga

SEQ ID NO: 381690 - RNA, 19 nt, Artificial Sequence
  Description of Artificial Sequence: Synthetic oligonucleotide
  Antisense Strand to SEQ ID NO: 381689
ucuuaacugacaguuuaag

SEQ ID NO: 381691 - RNA, 19 nt, Artificial Sequence
  Description of Artificial Sequence: Synthetic oligonucleotide
  Sense Strand Starting at position 800 of SEQ ID NO: 319103
ccuguaguggugggaggau

SEQ ID NO: 381692 - RNA, 19 nt, Artificial Sequence
  Description of Artificial Sequence: Synthetic oligonucleotide
  Antisense Strand to SEQ ID NO: 381691
auccucccaccacuacagg

SEQ ID NO: 381693 - RNA, 19 nt, Artificial Sequence
  Description of Artificial Sequence: Synthetic oligonucleotide
  Sense Strand Starting at position 801 of SEQ ID NO: 315275
uggcuuuguccacagcacu

SEQ ID NO: 381694 - RNA, 19 nt, Artificial Sequence
  Description of Artificial Sequence: Synthetic oligonucleotide
  Antisense Strand to SEQ ID NO: 381693
agugcuguggacaaagcca

SEQ ID NO: 381695 - RNA, 19 nt, Artificial Sequence
  Description of Artificial Sequence: Synthetic oligonucleotide
  Sense Strand Starting at position 801 of SEQ ID NO: 316754
ucgacaggcuuuccaacaa

SEQ ID NO: 381696 - RNA, 19 nt, Artificial Sequence
  Description of Artificial Sequence: Synthetic oligonucleotide
  Antisense Strand to SEQ ID NO: 381695
uuguuggaaagccugucga

SEQ ID NO: 381697 - RNA, 19 nt, Artificial Sequence
  Description of Artificial Sequence: Synthetic oligonucleotide
  Sense Strand Starting at position 801 of SEQ ID NO: 316776
uccucuuuccugcgcagaa

SEQ ID NO: 381698 - RNA, 19 nt, Artificial Sequence
  Description of Artificial Sequence: Synthetic oligonucleotide
  Antisense Strand to SEQ ID NO: 381697
uucugcgcaggaaagagga

SEQ ID NO: 381699 - RNA, 19 nt, Artificial Sequence
  Description of Artificial Sequence: Synthetic oligonucleotide
  Sense Strand Starting at position 801 of SEQ ID NO: 316807
cgcauuucuucugcucaga

SEQ ID NO: 381700 - RNA, 19 nt, Artificial Sequence
  Description of Artificial Sequence: Synthetic oligonucleotide
  Antisense Strand to SEQ ID NO: 381699
ucugagcagaagaaaugcg

SEQ ID NO: 381701 - RNA, 19 nt, Artificial Sequence
  Description of Artificial Sequence: Synthetic oligonucleotide
  Sense Strand Starting at position 801 of SEQ ID NO: 316981
uccacugaaccuugauuga

SEQ ID NO: 381702 - RNA, 19 nt, Artificial Sequence
  Description of Artificial Sequence: Synthetic oligonucleotide
  Antisense Strand to SEQ ID NO: 381701
ucaaucaagguucagugga

SEQ ID NO: 381703 - RNA, 19 nt, Artificial Sequence
  Description of Artificial Sequence: Synthetic oligonucleotide
  Sense Strand Starting at position 801 of SEQ ID NO: 317156
gcagcauccagccgucaaa

SEQ ID NO: 381704 - RNA, 19 nt, Artificial Sequence
  Description of Artificial Sequence: Synthetic oligonucleotide
  Antisense Strand to SEQ ID NO: 381703
uuugacggcuggaugcugc

SEQ ID NO: 381705 - RNA, 19 nt, Artificial Sequence
  Description of Artificial Sequence: Synthetic oligonucleotide
  Sense Strand Starting at position 801 of SEQ ID NO: 317388
aucgucucauugguucuaa

SEQ ID NO: 381706 - RNA, 19 nt, Artificial Sequence
  Description of Artificial Sequence: Synthetic oligonucleotide
  Antisense Strand to SEQ ID NO: 381705
uuagaaccaaugagacgau

SEQ ID NO: 381707 - RNA, 19 nt, Artificial Sequence
  Description of Artificial Sequence: Synthetic oligonucleotide
  Sense Strand Starting at position 801 of SEQ ID NO: 317421
uccuuagauugucuaauag

SEQ ID NO: 381708 - RNA, 19 nt, Artificial Sequence
  Description of Artificial Sequence: Synthetic oligonucleotide
  Antisense Strand to SEQ ID NO: 381707
cuauuagacaaucuaagga

SEQ ID NO: 381709 - RNA, 19 nt, Artificial Sequence
  Description of Artificial Sequence: Synthetic oligonucleotide
  Sense Strand Starting at position 801 of SEQ ID NO: 317431
gucuaauaguugucuccuu

SEQ ID NO: 381710 - RNA, 19 nt, Artificial Sequence
  Description of Artificial Sequence: Synthetic oligonucleotide
  Antisense Strand to SEQ ID NO: 381709
aaggagacaacuauuagac

SEQ ID NO: 381711 - RNA, 19 nt, Artificial Sequence
  Description of Artificial Sequence: Synthetic oligonucleotide
  Sense Strand Starting at position 801 of SEQ ID NO: 317473
uuacuuuaguccuagguaa

SEQ ID NO: 381712 - RNA, 19 nt, Artificial Sequence
  Description of Artificial Sequence: Synthetic oligonucleotide
  Antisense Strand to SEQ ID NO: 381711
uuaccuaggacuaaaguaa

SEQ ID NO: 381713 - RNA, 19 nt, Artificial Sequence
  Description of Artificial Sequence: Synthetic oligonucleotide
  Sense Strand Starting at position 801 of SEQ ID NO: 317475
acuuuaguccuagguaaug

SEQ ID NO: 381714 - RNA, 19 nt, Artificial Sequence
  Description of Artificial Sequence: Synthetic oligonucleotide
  Antisense Strand to SEQ ID NO: 381713
cauuaccuaggacuaaagu

SEQ ID NO: 381715 - RNA, 19 nt, Artificial Sequence
  Description of Artificial Sequence: Synthetic oligonucleotide
  Sense Strand Starting at position 801 of SEQ ID NO: 317545
cgcaauuacaagugaaguc

SEQ ID NO: 381716 - RNA, 19 nt, Artificial Sequence
  Description of Artificial Sequence: Synthetic oligonucleotide
  Antisense Strand to SEQ ID NO: 381715
gacuucacuuguaauugcg

SEQ ID NO: 381717 - RNA, 19 nt, Artificial Sequence
  Description of Artificial Sequence: Synthetic oligonucleotide
  Sense Strand Starting at position 801 of SEQ ID NO: 317555
agugaagucucuuaaguca

SEQ ID NO: 381718 - RNA, 19 nt, Artificial Sequence
  Description of Artificial Sequence: Synthetic oligonucleotide
  Antisense Strand to SEQ ID NO: 381717
ugacuuaagagacuucacu

SEQ ID NO: 381719 - RNA, 19 nt, Artificial Sequence
  Description of Artificial Sequence: Synthetic oligonucleotide
  Sense Strand Starting at position 801 of SEQ ID NO: 317589
cuggcauagucucuuaaac

SEQ ID NO: 381720 - RNA, 19 nt, Artificial Sequence
  Description of Artificial Sequence: Synthetic oligonucleotide
  Antisense Strand to SEQ ID NO: 381719
guuuaagagacuaugccag

SEQ ID NO: 381721 - RNA, 19 nt, Artificial Sequence
  Description of Artificial Sequence: Synthetic oligonucleotide
  Sense Strand Starting at position 801 of SEQ ID NO: 317591
ggcauagucucuuaaacug

SEQ ID NO: 381722 - RNA, 19 nt, Artificial Sequence
  Description of Artificial Sequence: Synthetic oligonucleotide
  Antisense Strand to SEQ ID NO: 381721
caguuuaagagacuaugcc

SEQ ID NO: 381723 - RNA, 19 nt, Artificial Sequence
  Description of Artificial Sequence: Synthetic oligonucleotide
  Sense Strand Starting at position 801 of SEQ ID NO: 317599
cucuuaaacugucaguuaa

SEQ ID NO: 381724 - RNA, 19 nt, Artificial Sequence
  Description of Artificial Sequence: Synthetic oligonucleotide
  Antisense Strand to SEQ ID NO: 381723
uuaacugacaguuuaagag

SEQ ID NO: 381725 - RNA, 19 nt, Artificial Sequence
  Description of Artificial Sequence: Synthetic oligonucleotide
  Sense Strand Starting at position 801 of SEQ ID NO: 317601
cuuaaacugucaguuaaga

SEQ ID NO: 381726 - RNA, 19 nt, Artificial Sequence
  Description of Artificial Sequence: Synthetic oligonucleotide
  Antisense Strand to SEQ ID NO: 381725
ucuuaacugacaguuuaag

SEQ ID NO: 381727 - RNA, 19 nt, Artificial Sequence
  Description of Artificial Sequence: Synthetic oligonucleotide
  Sense Strand Starting at position 801 of SEQ ID NO: 317803
ccuguaguggugggaggau

SEQ ID NO: 381728 - RNA, 19 nt, Artificial Sequence
  Description of Artificial Sequence: Synthetic oligonucleotide
  Antisense Strand to SEQ ID NO: 381727
auccucccaccacuacagg

SEQ ID NO: 381729 - RNA, 19 nt, Artificial Sequence
  Description of Artificial Sequence: Synthetic oligonucleotide
  Sense Strand Starting at position 801 of SEQ ID NO: 317921
aaaccauguuugggaauac

SEQ ID NO: 381730 - RNA, 19 nt, Artificial Sequence
  Description of Artificial Sequence: Synthetic oligonucleotide
  Antisense Strand to SEQ ID NO: 381729
guauucccaaacaugguuu

SEQ ID NO: 381731 - RNA, 19 nt, Artificial Sequence
  Description of Artificial Sequence: Synthetic oligonucleotide
  Sense Strand Starting at position 801 of SEQ ID NO: 317922
aaccauguuugggaauaca

SEQ ID NO: 381732 - RNA, 19 nt, Artificial Sequence
  Description of Artificial Sequence: Synthetic oligonucleotide
  Antisense Strand to SEQ ID NO: 381731
uguauucccaaacaugguu

SEQ ID NO: 381733 - RNA, 19 nt, Artificial Sequence
  Description of Artificial Sequence: Synthetic oligonucleotide
  Sense Strand Starting at position 801 of SEQ ID NO: 317925
cauguuugggaauacaugu

SEQ ID NO: 381734 - RNA, 19 nt, Artificial Sequence
  Description of Artificial Sequence: Synthetic oligonucleotide
  Antisense Strand to SEQ ID NO: 381733
acauguauucccaaacaug

SEQ ID NO: 381735 - RNA, 19 nt, Artificial Sequence
  Description of Artificial Sequence: Synthetic oligonucleotide
  Sense Strand Starting at position 801 of SEQ ID NO: 317947
gagcgagggcucugccaau

SEQ ID NO: 381736 - RNA, 19 nt, Artificial Sequence
  Description of Artificial Sequence: Synthetic oligonucleotide
  Antisense Strand to SEQ ID NO: 381735
auuggcagagcccucgcuc

SEQ ID NO: 381737 - RNA, 19 nt, Artificial Sequence
  Description of Artificial Sequence: Synthetic oligonucleotide
  Sense Strand Starting at position 801 of SEQ ID NO: 318005
guuacuaugcuccaggguu

SEQ ID NO: 381738 - RNA, 19 nt, Artificial Sequence
  Description of Artificial Sequence: Synthetic oligonucleotide
  Antisense Strand to SEQ ID NO: 381737
aacccuggagcauaguaac

SEQ ID NO: 381739 - RNA, 19 nt, Artificial Sequence
  Description of Artificial Sequence: Synthetic oligonucleotide
  Sense Strand Starting at position 801 of SEQ ID NO: 318020
gguuguguucagugcauca

SEQ ID NO: 381740 - RNA, 19 nt, Artificial Sequence
  Description of Artificial Sequence: Synthetic oligonucleotide
  Antisense Strand to SEQ ID NO: 381739
ugaugcacugaacacaacc

SEQ ID NO: 381741 - RNA, 19 nt, Artificial Sequence
  Description of Artificial Sequence: Synthetic oligonucleotide
  Sense Strand Starting at position 801 of SEQ ID NO: 318055
aaauuaucacagcgucaga

SEQ ID NO: 381742 - RNA, 19 nt, Artificial Sequence
  Description of Artificial Sequence: Synthetic oligonucleotide
  Antisense Strand to SEQ ID NO: 381741
ucugacgcugugauaauuu

SEQ ID NO: 381743 - RNA, 19 nt, Artificial Sequence
  Description of Artificial Sequence: Synthetic oligonucleotide
  Sense Strand Starting at position 801 of SEQ ID NO: 318138
gcagggaugugguuuggua

SEQ ID NO: 381744 - RNA, 19 nt, Artificial Sequence
  Description of Artificial Sequence: Synthetic oligonucleotide
  Antisense Strand to SEQ ID NO: 381743
uaccaaaccacaucccugc

SEQ ID NO: 381745 - RNA, 19 nt, Artificial Sequence
  Description of Artificial Sequence: Synthetic oligonucleotide
  Sense Strand Starting at position 801 of SEQ ID NO: 318140
agggaugugguuugguaac

SEQ ID NO: 381746 - RNA, 19 nt, Artificial Sequence
  Description of Artificial Sequence: Synthetic oligonucleotide
  Antisense Strand to SEQ ID NO: 381745
guuaccaaaccacaucccu

SEQ ID NO: 381747 - RNA, 19 nt, Artificial Sequence
  Description of Artificial Sequence: Synthetic oligonucleotide
  Sense Strand Starting at position 801 of SEQ ID NO: 318158
cagagugcaugcucuuuau

SEQ ID NO: 381748 - RNA, 19 nt, Artificial Sequence
  Description of Artificial Sequence: Synthetic oligonucleotide
  Antisense Strand to SEQ ID NO: 381747
auaaagagcaugcacucug

SEQ ID NO: 381749 - RNA, 19 nt, Artificial Sequence
  Description of Artificial Sequence: Synthetic oligonucleotide
  Sense Strand Starting at position 801 of SEQ ID NO: 318161
agugcaugcucuuuauacu

SEQ ID NO: 381750 - RNA, 19 nt, Artificial Sequence
  Description of Artificial Sequence: Synthetic oligonucleotide
  Antisense Strand to SEQ ID NO: 381749
aguauaaagagcaugcacu

SEQ ID NO: 381751 - RNA, 19 nt, Artificial Sequence
  Description of Artificial Sequence: Synthetic oligonucleotide
  Sense Strand Starting at position 801 of SEQ ID NO: 318176
uacugcucuucugcgauua

SEQ ID NO: 381752 - RNA, 19 nt, Artificial Sequence
  Description of Artificial Sequence: Synthetic oligonucleotide
  Antisense Strand to SEQ ID NO: 381751
uaaucgcagaagagcagua

SEQ ID NO: 381753 - RNA, 19 nt, Artificial Sequence
  Description of Artificial Sequence: Synthetic oligonucleotide
  Sense Strand Starting at position 801 of SEQ ID NO: 318177
acugcucuucugcgauuau

SEQ ID NO: 381754 - RNA, 19 nt, Artificial Sequence
  Description of Artificial Sequence: Synthetic oligonucleotide
  Antisense Strand to SEQ ID NO: 381753
auaaucgcagaagagcagu

SEQ ID NO: 381755 - RNA, 19 nt, Artificial Sequence
  Description of Artificial Sequence: Synthetic oligonucleotide
  Sense Strand Starting at position 801 of SEQ ID NO: 318187
ugcgauuauugugaauaaa

SEQ ID NO: 381756 - RNA, 19 nt, Artificial Sequence
  Description of Artificial Sequence: Synthetic oligonucleotide
  Antisense Strand to SEQ ID NO: 381755
uuuauucacaauaaucgca

SEQ ID NO: 381757 - RNA, 19 nt, Artificial Sequence
  Description of Artificial Sequence: Synthetic oligonucleotide
  Sense Strand Starting at position 801 of SEQ ID NO: 318199
gaauaaagcgccuacaagu

SEQ ID NO: 381758 - RNA, 19 nt, Artificial Sequence
  Description of Artificial Sequence: Synthetic oligonucleotide
  Antisense Strand to SEQ ID NO: 381757
acuuguaggcgcuuuauuc

SEQ ID NO: 381759 - RNA, 19 nt, Artificial Sequence
  Description of Artificial Sequence: Synthetic oligonucleotide
  Sense Strand Starting at position 801 of SEQ ID NO: 318209
ccuacaagugccuguggaa

SEQ ID NO: 381760 - RNA, 19 nt, Artificial Sequence
  Description of Artificial Sequence: Synthetic oligonucleotide
  Antisense Strand to SEQ ID NO: 381759
uuccacaggcacuuguagg

SEQ ID NO: 381761 - RNA, 19 nt, Artificial Sequence
  Description of Artificial Sequence: Synthetic oligonucleotide
  Sense Strand Starting at position 801 of SEQ ID NO: 318353
uuagaagucuaggcaccaa

SEQ ID NO: 381762 - RNA, 19 nt, Artificial Sequence
  Description of Artificial Sequence: Synthetic oligonucleotide
  Antisense Strand to SEQ ID NO: 381761
uuggugccuagacuucuaa

SEQ ID NO: 381763 - RNA, 19 nt, Artificial Sequence
  Description of Artificial Sequence: Synthetic oligonucleotide
  Sense Strand Starting at position 801 of SEQ ID NO: 318368
ccaaucacgucuccgaaau

SEQ ID NO: 381764 - RNA, 19 nt, Artificial Sequence
  Description of Artificial Sequence: Synthetic oligonucleotide
  Antisense Strand to SEQ ID NO: 381763
auuucggagacgugauugg

SEQ ID NO: 381765 - RNA, 19 nt, Artificial Sequence
  Description of Artificial Sequence: Synthetic oligonucleotide
  Sense Strand Starting at position 801 of SEQ ID NO: 318369
caaucacgucuccgaaaua

SEQ ID NO: 381766 - RNA, 19 nt, Artificial Sequence
  Description of Artificial Sequence: Synthetic oligonucleotide
  Antisense Strand to SEQ ID NO: 381765
uauuucggagacgugauug

SEQ ID NO: 381767 - RNA, 19 nt, Artificial Sequence
  Description of Artificial Sequence: Synthetic oligonucleotide
  Sense Strand Starting at position 801 of SEQ ID NO: 319053
aggagaccuucuguaagug

SEQ ID NO: 381768 - RNA, 19 nt, Artificial Sequence
  Description of Artificial Sequence: Synthetic oligonucleotide
  Antisense Strand to SEQ ID NO: 381767
cacuuacagaaggucuccu

SEQ ID NO: 381769 - RNA, 19 nt, Artificial Sequence
  Description of Artificial Sequence: Synthetic oligonucleotide
  Sense Strand Starting at position 801 of SEQ ID NO: 319054
ggagaccuucuguaaguga

SEQ ID NO: 381770 - RNA, 19 nt, Artificial Sequence
  Description of Artificial Sequence: Synthetic oligonucleotide
  Antisense Strand to SEQ ID NO: 381769
ucacuuacagaaggucucc

SEQ ID NO: 381771 - RNA, 19 nt, Artificial Sequence
  Description of Artificial Sequence: Synthetic oligonucleotide
  Sense Strand Starting at position 801 of SEQ ID NO: 319135
ggaguauucucagauugca

SEQ ID NO: 381772 - RNA, 19 nt, Artificial Sequence
  Description of Artificial Sequence: Synthetic oligonucleotide
  Antisense Strand to SEQ ID NO: 381771
ugcaaucugagaauacucc

SEQ ID NO: 381773 - RNA, 19 nt, Artificial Sequence
  Description of Artificial Sequence: Synthetic oligonucleotide
  Sense Strand Starting at position 802 of SEQ ID NO: 315975
uggcuacugccucaaagau

SEQ ID NO: 381774 - RNA, 19 nt, Artificial Sequence
  Description of Artificial Sequence: Synthetic oligonucleotide
  Antisense Strand to SEQ ID NO: 381773
aucuuugaggcaguagcca

SEQ ID NO: 381775 - RNA, 19 nt, Artificial Sequence
  Description of Artificial Sequence: Synthetic oligonucleotide
  Sense Strand Starting at position 802 of SEQ ID NO: 316031
guccucagauuauuugcau

SEQ ID NO: 381776 - RNA, 19 nt, Artificial Sequence
  Description of Artificial Sequence: Synthetic oligonucleotide
  Antisense Strand to SEQ ID NO: 381775
augcaaauaaucugaggac

SEQ ID NO: 381777 - RNA, 19 nt, Artificial Sequence
  Description of Artificial Sequence: Synthetic oligonucleotide
  Sense Strand Starting at position 802 of SEQ ID NO: 316051
agcauuauuugggaacuuu

SEQ ID NO: 381778 - RNA, 19 nt, Artificial Sequence
  Description of Artificial Sequence: Synthetic oligonucleotide
  Antisense Strand to SEQ ID NO: 381777
aaaguucccaaauaaugcu

SEQ ID NO: 381779 - RNA, 19 nt, Artificial Sequence
  Description of Artificial Sequence: Synthetic oligonucleotide
  Sense Strand Starting at position 802 of SEQ ID NO: 317154
ggucucaccucggaccaau

SEQ ID NO: 381780 - RNA, 19 nt, Artificial Sequence
  Description of Artificial Sequence: Synthetic oligonucleotide
  Antisense Strand to SEQ ID NO: 381779
auugguccgaggugagacc

SEQ ID NO: 381781 - RNA, 19 nt, Artificial Sequence
  Description of Artificial Sequence: Synthetic oligonucleotide
  Sense Strand Starting at position 802 of SEQ ID NO: 317564
gagaaaggcugguacguaa

SEQ ID NO: 381782 - RNA, 19 nt, Artificial Sequence
  Description of Artificial Sequence: Synthetic oligonucleotide
  Antisense Strand to SEQ ID NO: 381781
uuacguaccagccuuucuc

SEQ ID NO: 381783 - RNA, 19 nt, Artificial Sequence
  Description of Artificial Sequence: Synthetic oligonucleotide
  Sense Strand Starting at position 802 of SEQ ID NO: 317812
caacuaucuugagugguga

SEQ ID NO: 381784 - RNA, 19 nt, Artificial Sequence
  Description of Artificial Sequence: Synthetic oligonucleotide
  Antisense Strand to SEQ ID NO: 381783
ucaccacucaagauaguug

SEQ ID NO: 381785 - RNA, 19 nt, Artificial Sequence
  Description of Artificial Sequence: Synthetic oligonucleotide
  Sense Strand Starting at position 802 of SEQ ID NO: 317813
aacuaucuugaguggugaa

SEQ ID NO: 381786 - RNA, 19 nt, Artificial Sequence
  Description of Artificial Sequence: Synthetic oligonucleotide
  Antisense Strand to SEQ ID NO: 381785
uucaccacucaagauaguu

SEQ ID NO: 381787 - RNA, 19 nt, Artificial Sequence
  Description of Artificial Sequence: Synthetic oligonucleotide
  Sense Strand Starting at position 802 of SEQ ID NO: 317814
acuaucuugaguggugaaa

SEQ ID NO: 381788 - RNA, 19 nt, Artificial Sequence
  Description of Artificial Sequence: Synthetic oligonucleotide
  Antisense Strand to SEQ ID NO: 381787
uuucaccacucaagauagu

SEQ ID NO: 381789 - RNA, 19 nt, Artificial Sequence
  Description of Artificial Sequence: Synthetic oligonucleotide
  Sense Strand Starting at position 802 of SEQ ID NO: 317816
uaucuugaguggugaaauu

SEQ ID NO: 381790 - RNA, 19 nt, Artificial Sequence
  Description of Artificial Sequence: Synthetic oligonucleotide
  Antisense Strand to SEQ ID NO: 381789
aauuucaccacucaagaua

SEQ ID NO: 381791 - RNA, 19 nt, Artificial Sequence
  Description of Artificial Sequence: Synthetic oligonucleotide
  Sense Strand Starting at position 802 of SEQ ID NO: 317839
ggacuuggugacugaguga

SEQ ID NO: 381792 - RNA, 19 nt, Artificial Sequence
  Description of Artificial Sequence: Synthetic oligonucleotide
  Antisense Strand to SEQ ID NO: 381791
ucacucagucaccaagucc

SEQ ID NO: 381793 - RNA, 19 nt, Artificial Sequence
  Description of Artificial Sequence: Synthetic oligonucleotide
  Sense Strand Starting at position 802 of SEQ ID NO: 318437
gaaacagguuugugaccuu

SEQ ID NO: 381794 - RNA, 19 nt, Artificial Sequence
  Description of Artificial Sequence: Synthetic oligonucleotide
  Antisense Strand to SEQ ID NO: 381793
aaggucacaaaccuguuuc

SEQ ID NO: 381795 - RNA, 19 nt, Artificial Sequence
  Description of Artificial Sequence: Synthetic oligonucleotide
  Sense Strand Starting at position 802 of SEQ ID NO: 318440
acagguuugugaccuuaac

SEQ ID NO: 381796 - RNA, 19 nt, Artificial Sequence
  Description of Artificial Sequence: Synthetic oligonucleotide
  Antisense Strand to SEQ ID NO: 381795
guuaaggucacaaaccugu

SEQ ID NO: 381797 - RNA, 19 nt, Artificial Sequence
  Description of Artificial Sequence: Synthetic oligonucleotide
  Sense Strand Starting at position 802 of SEQ ID NO: 318531
ugagauauguuaggcacuu

SEQ ID NO: 381798 - RNA, 19 nt, Artificial Sequence
  Description of Artificial Sequence: Synthetic oligonucleotide
  Antisense Strand to SEQ ID NO: 381797
aagugccuaacauaucuca

SEQ ID NO: 381799 - RNA, 19 nt, Artificial Sequence
  Description of Artificial Sequence: Synthetic oligonucleotide
  Sense Strand Starting at position 802 of SEQ ID NO: 318532
gagauauguuaggcacuua

SEQ ID NO: 381800 - RNA, 19 nt, Artificial Sequence
  Description of Artificial Sequence: Synthetic oligonucleotide
  Antisense Strand to SEQ ID NO: 381799
uaagugccuaacauaucuc

SEQ ID NO: 381801 - RNA, 19 nt, Artificial Sequence
  Description of Artificial Sequence: Synthetic oligonucleotide
  Sense Strand Starting at position 802 of SEQ ID NO: 318575
uguagccauucuuggaguu

SEQ ID NO: 381802 - RNA, 19 nt, Artificial Sequence
  Description of Artificial Sequence: Synthetic oligonucleotide
  Antisense Strand to SEQ ID NO: 381801
aacuccaagaauggcuaca

SEQ ID NO: 381803 - RNA, 19 nt, Artificial Sequence
  Description of Artificial Sequence: Synthetic oligonucleotide
  Sense Strand Starting at position 802 of SEQ ID NO: 318577
uagccauucuuggaguuga

SEQ ID NO: 381804 - RNA, 19 nt, Artificial Sequence
  Description of Artificial Sequence: Synthetic oligonucleotide
  Antisense Strand to SEQ ID NO: 381803
ucaacuccaagaauggcua

SEQ ID NO: 381805 - RNA, 19 nt, Artificial Sequence
  Description of Artificial Sequence: Synthetic oligonucleotide
  Sense Strand Starting at position 802 of SEQ ID NO: 318603
ggcacagugcuaugucuua

SEQ ID NO: 381806 - RNA, 19 nt, Artificial Sequence
  Description of Artificial Sequence: Synthetic oligonucleotide
  Antisense Strand to SEQ ID NO: 381805
uaagacauagcacugugcc

SEQ ID NO: 381807 - RNA, 19 nt, Artificial Sequence
  Description of Artificial Sequence: Synthetic oligonucleotide
  Sense Strand Starting at position 802 of SEQ ID NO: 318607
cagugcuaugucuuacguu

SEQ ID NO: 381808 - RNA, 19 nt, Artificial Sequence
  Description of Artificial Sequence: Synthetic oligonucleotide
  Antisense Strand to SEQ ID NO: 381807
aacguaagacauagcacug

SEQ ID NO: 381809 - RNA, 19 nt, Artificial Sequence
  Description of Artificial Sequence: Synthetic oligonucleotide
  Sense Strand Starting at position 802 of SEQ ID NO: 318802
cgcuccaguguuugaagga

SEQ ID NO: 381810 - RNA, 19 nt, Artificial Sequence
  Description of Artificial Sequence: Synthetic oligonucleotide
  Antisense Strand to SEQ ID NO: 381809
uccuucaaacacuggagcg

SEQ ID NO: 381811 - RNA, 19 nt, Artificial Sequence
  Description of Artificial Sequence: Synthetic oligonucleotide
  Sense Strand Starting at position 802 of SEQ ID NO: 318822
ggaugagcuguaugacauc

SEQ ID NO: 381812 - RNA, 19 nt, Artificial Sequence
  Description of Artificial Sequence: Synthetic oligonucleotide
  Antisense Strand to SEQ ID NO: 381811
gaugucauacagcucaucc

SEQ ID NO: 381813 - RNA, 19 nt, Artificial Sequence
  Description of Artificial Sequence: Synthetic oligonucleotide
  Sense Strand Starting at position 802 of SEQ ID NO: 318828
gcuguaugacaucaucuuu

SEQ ID NO: 381814 - RNA, 19 nt, Artificial Sequence
  Description of Artificial Sequence: Synthetic oligonucleotide
  Antisense Strand to SEQ ID NO: 381813
aaagaugaugucauacagc

SEQ ID NO: 381815 - RNA, 19 nt, Artificial Sequence
  Description of Artificial Sequence: Synthetic oligonucleotide
  Sense Strand Starting at position 802 of SEQ ID NO: 318903
cugcauuaaagugaugagu

SEQ ID NO: 381816 - RNA, 19 nt, Artificial Sequence
  Description of Artificial Sequence: Synthetic oligonucleotide
  Antisense Strand to SEQ ID NO: 381815
acucaucacuuuaaugcag

SEQ ID NO: 381817 - RNA, 19 nt, Artificial Sequence
  Description of Artificial Sequence: Synthetic oligonucleotide
  Sense Strand Starting at position 802 of SEQ ID NO: 318905
gcauuaaagugaugagucu

SEQ ID NO: 381818 - RNA, 19 nt, Artificial Sequence
  Description of Artificial Sequence: Synthetic oligonucleotide
  Antisense Strand to SEQ ID NO: 381817
agacucaucacuuuaaugc

SEQ ID NO: 381819 - RNA, 19 nt, Artificial Sequence
  Description of Artificial Sequence: Synthetic oligonucleotide
  Sense Strand Starting at position 802 of SEQ ID NO: 318911
aagugaugagucuguaggu

SEQ ID NO: 381820 - RNA, 19 nt, Artificial Sequence
  Description of Artificial Sequence: Synthetic oligonucleotide
  Antisense Strand to SEQ ID NO: 381819
accuacagacucaucacuu

SEQ ID NO: 381821 - RNA, 19 nt, Artificial Sequence
  Description of Artificial Sequence: Synthetic oligonucleotide
  Sense Strand Starting at position 802 of SEQ ID NO: 318913
gugaugagucuguaggugu

SEQ ID NO: 381822 - RNA, 19 nt, Artificial Sequence
  Description of Artificial Sequence: Synthetic oligonucleotide
  Antisense Strand to SEQ ID NO: 381821
acaccuacagacucaucac

SEQ ID NO: 381823 - RNA, 19 nt, Artificial Sequence
  Description of Artificial Sequence: Synthetic oligonucleotide
  Sense Strand Starting at position 802 of SEQ ID NO: 318914
ugaugagucuguaggugug

SEQ ID NO: 381824 - RNA, 19 nt, Artificial Sequence
  Description of Artificial Sequence: Synthetic oligonucleotide
  Antisense Strand to SEQ ID NO: 381823
cacaccuacagacucauca

SEQ ID NO: 381825 - RNA, 19 nt, Artificial Sequence
  Description of Artificial Sequence: Synthetic oligonucleotide
  Sense Strand Starting at position 802 of SEQ ID NO: 318917
ugagucuguaggugugaua

SEQ ID NO: 381826 - RNA, 19 nt, Artificial Sequence
  Description of Artificial Sequence: Synthetic oligonucleotide
  Antisense Strand to SEQ ID NO: 381825
uaucacaccuacagacuca

SEQ ID NO: 381827 - RNA, 19 nt, Artificial Sequence
  Description of Artificial Sequence: Synthetic oligonucleotide
  Sense Strand Starting at position 802 of SEQ ID NO: 318920
gucuguaggugugauacaa

SEQ ID NO: 381828 - RNA, 19 nt, Artificial Sequence
  Description of Artificial Sequence: Synthetic oligonucleotide
  Antisense Strand to SEQ ID NO: 381827
uuguaucacaccuacagac

SEQ ID NO: 381829 - RNA, 19 nt, Artificial Sequence
  Description of Artificial Sequence: Synthetic oligonucleotide
  Sense Strand Starting at position 802 of SEQ ID NO: 318924
guaggugugauacaauugu

SEQ ID NO: 381830 - RNA, 19 nt, Artificial Sequence
  Description of Artificial Sequence: Synthetic oligonucleotide
  Antisense Strand to SEQ ID NO: 381829
acaauuguaucacaccuac

SEQ ID NO: 381831 - RNA, 19 nt, Artificial Sequence
  Description of Artificial Sequence: Synthetic oligonucleotide
  Sense Strand Starting at position 802 of SEQ ID NO: 318928
gugugauacaauugucacu

SEQ ID NO: 381832 - RNA, 19 nt, Artificial Sequence
  Description of Artificial Sequence: Synthetic oligonucleotide
  Antisense Strand to SEQ ID NO: 381831
agugacaauuguaucacac

SEQ ID NO: 381833 - RNA, 19 nt, Artificial Sequence
  Description of Artificial Sequence: Synthetic oligonucleotide
  Sense Strand Starting at position 802 of SEQ ID NO: 318971
uggaaauagcccugcuuua

SEQ ID NO: 381834 - RNA, 19 nt, Artificial Sequence
  Description of Artificial Sequence: Synthetic oligonucleotide
  Antisense Strand to SEQ ID NO: 381833
uaaagcagggcuauuucca

SEQ ID NO: 381835 - RNA, 19 nt, Artificial Sequence
  Description of Artificial Sequence: Synthetic oligonucleotide
  Sense Strand Starting at position 802 of SEQ ID NO: 319057
ccaguugaaucagaaugua

SEQ ID NO: 381836 - RNA, 19 nt, Artificial Sequence
  Description of Artificial Sequence: Synthetic oligonucleotide
  Antisense Strand to SEQ ID NO: 381835
uacauucugauucaacugg

SEQ ID NO: 381837 - RNA, 19 nt, Artificial Sequence
  Description of Artificial Sequence: Synthetic oligonucleotide
  Sense Strand Starting at position 802 of SEQ ID NO: 319199
auaggcuaccuuuaaugau

SEQ ID NO: 381838 - RNA, 19 nt, Artificial Sequence
  Description of Artificial Sequence: Synthetic oligonucleotide
  Antisense Strand to SEQ ID NO: 381837
aucauuaaagguagccuau

SEQ ID NO: 381839 - RNA, 19 nt, Artificial Sequence
  Description of Artificial Sequence: Synthetic oligonucleotide
  Sense Strand Starting at position 802 of SEQ ID NO: 319202
ggcuaccuuuaaugauuua

SEQ ID NO: 381840 - RNA, 19 nt, Artificial Sequence
  Description of Artificial Sequence: Synthetic oligonucleotide
  Antisense Strand to SEQ ID NO: 381839
uaaaucauuaaagguagcc

SEQ ID NO: 381841 - RNA, 19 nt, Artificial Sequence
  Description of Artificial Sequence: Synthetic oligonucleotide
  Sense Strand Starting at position 803 of SEQ ID NO: 316069
uggcuacugccucaaagau

SEQ ID NO: 381842 - RNA, 19 nt, Artificial Sequence
  Description of Artificial Sequence: Synthetic oligonucleotide
  Antisense Strand to SEQ ID NO: 381841
aucuuugaggcaguagcca

SEQ ID NO: 381843 - RNA, 19 nt, Artificial Sequence
  Description of Artificial Sequence: Synthetic oligonucleotide
  Sense Strand Starting at position 803 of SEQ ID NO: 316125
guccucagauuauuugcau

SEQ ID NO: 381844 - RNA, 19 nt, Artificial Sequence
  Description of Artificial Sequence: Synthetic oligonucleotide
  Antisense Strand to SEQ ID NO: 381843
augcaaauaaucugaggac

SEQ ID NO: 381845 - RNA, 19 nt, Artificial Sequence
  Description of Artificial Sequence: Synthetic oligonucleotide
  Sense Strand Starting at position 803 of SEQ ID NO: 316145
agcauuauuugggaacuuu

SEQ ID NO: 381846 - RNA, 19 nt, Artificial Sequence
  Description of Artificial Sequence: Synthetic oligonucleotide
  Antisense Strand to SEQ ID NO: 381845
aaaguucccaaauaaugcu

SEQ ID NO: 381847 - RNA, 19 nt, Artificial Sequence
  Description of Artificial Sequence: Synthetic oligonucleotide
  Sense Strand Starting at position 803 of SEQ ID NO: 317248
ggucucaccucggaccaau

SEQ ID NO: 381848 - RNA, 19 nt, Artificial Sequence
  Description of Artificial Sequence: Synthetic oligonucleotide
  Antisense Strand to SEQ ID NO: 381847
auugguccgaggugagacc

SEQ ID NO: 381849 - RNA, 19 nt, Artificial Sequence
  Description of Artificial Sequence: Synthetic oligonucleotide
  Sense Strand Starting at position 803 of SEQ ID NO: 317658
gagaaaggcugguacguaa

SEQ ID NO: 381850 - RNA, 19 nt, Artificial Sequence
  Description of Artificial Sequence: Synthetic oligonucleotide
  Antisense Strand to SEQ ID NO: 381849
uuacguaccagccuuucuc

SEQ ID NO: 381851 - RNA, 19 nt, Artificial Sequence
  Description of Artificial Sequence: Synthetic oligonucleotide
  Sense Strand Starting at position 803 of SEQ ID NO: 317906
caacuaucuugagugguga

SEQ ID NO: 381852 - RNA, 19 nt, Artificial Sequence
  Description of Artificial Sequence: Synthetic oligonucleotide
  Antisense Strand to SEQ ID NO: 381851
ucaccacucaagauaguug

SEQ ID NO: 381853 - RNA, 19 nt, Artificial Sequence
  Description of Artificial Sequence: Synthetic oligonucleotide
  Sense Strand Starting at position 803 of SEQ ID NO: 317907
aacuaucuugaguggugaa

SEQ ID NO: 381854 - RNA, 19 nt, Artificial Sequence
  Description of Artificial Sequence: Synthetic oligonucleotide
  Antisense Strand to SEQ ID NO: 381853
uucaccacucaagauaguu

SEQ ID NO: 381855 - RNA, 19 nt, Artificial Sequence
  Description of Artificial Sequence: Synthetic oligonucleotide
  Sense Strand Starting at position 803 of SEQ ID NO: 317908
acuaucuugaguggugaaa

SEQ ID NO: 381856 - RNA, 19 nt, Artificial Sequence
  Description of Artificial Sequence: Synthetic oligonucleotide
  Antisense Strand to SEQ ID NO: 381855
uuucaccacucaagauagu

SEQ ID NO: 381857 - RNA, 19 nt, Artificial Sequence
  Description of Artificial Sequence: Synthetic oligonucleotide
  Sense Strand Starting at position 803 of SEQ ID NO: 317910
uaucuugaguggugaaauu

SEQ ID NO: 381858 - RNA, 19 nt, Artificial Sequence
  Description of Artificial Sequence: Synthetic oligonucleotide
  Antisense Strand to SEQ ID NO: 381857
aauuucaccacucaagaua

SEQ ID NO: 381859 - RNA, 19 nt, Artificial Sequence
  Description of Artificial Sequence: Synthetic oligonucleotide
  Sense Strand Starting at position 803 of SEQ ID NO: 317933
ggacuuggugacugaguga

SEQ ID NO: 381860 - RNA, 19 nt, Artificial Sequence
  Description of Artificial Sequence: Synthetic oligonucleotide
  Antisense Strand to SEQ ID NO: 381859
ucacucagucaccaagucc

SEQ ID NO: 381861 - RNA, 19 nt, Artificial Sequence
  Description of Artificial Sequence: Synthetic oligonucleotide
  Sense Strand Starting at position 803 of SEQ ID NO: 318531
gaaacagguuugugaccuu

SEQ ID NO: 381862 - RNA, 19 nt, Artificial Sequence
  Description of Artificial Sequence: Synthetic oligonucleotide
  Antisense Strand to SEQ ID NO: 381861
aaggucacaaaccuguuuc

SEQ ID NO: 381863 - RNA, 19 nt, Artificial Sequence
  Description of Artificial Sequence: Synthetic oligonucleotide
  Sense Strand Starting at position 803 of SEQ ID NO: 318534
acagguuugugaccuuaac

SEQ ID NO: 381864 - RNA, 19 nt, Artificial Sequence
  Description of Artificial Sequence: Synthetic oligonucleotide
  Antisense Strand to SEQ ID NO: 381863
guuaaggucacaaaccugu

SEQ ID NO: 381865 - RNA, 19 nt, Artificial Sequence
  Description of Artificial Sequence: Synthetic oligonucleotide
  Sense Strand Starting at position 803 of SEQ ID NO: 318625
ugagauauguuaggcacuu

SEQ ID NO: 381866 - RNA, 19 nt, Artificial Sequence
  Description of Artificial Sequence: Synthetic oligonucleotide
  Antisense Strand to SEQ ID NO: 381865
aagugccuaacauaucuca

SEQ ID NO: 381867 - RNA, 19 nt, Artificial Sequence
  Description of Artificial Sequence: Synthetic oligonucleotide
  Sense Strand Starting at position 803 of SEQ ID NO: 318626
gagauauguuaggcacuua

SEQ ID NO: 381868 - RNA, 19 nt, Artificial Sequence
  Description of Artificial Sequence: Synthetic oligonucleotide
  Antisense Strand to SEQ ID NO: 381867
uaagugccuaacauaucuc

SEQ ID NO: 381869 - RNA, 19 nt, Artificial Sequence
  Description of Artificial Sequence: Synthetic oligonucleotide
  Sense Strand Starting at position 803 of SEQ ID NO: 318669
uguagccauucuuggaguu

SEQ ID NO: 381870 - RNA, 19 nt, Artificial Sequence
  Description of Artificial Sequence: Synthetic oligonucleotide
  Antisense Strand to SEQ ID NO: 381869
aacuccaagaauggcuaca

SEQ ID NO: 381871 - RNA, 19 nt, Artificial Sequence
  Description of Artificial Sequence: Synthetic oligonucleotide
  Sense Strand Starting at position 803 of SEQ ID NO: 318671
uagccauucuuggaguuga

SEQ ID NO: 381872 - RNA, 19 nt, Artificial Sequence
  Description of Artificial Sequence: Synthetic oligonucleotide
  Antisense Strand to SEQ ID NO: 381871
ucaacuccaagaauggcua

SEQ ID NO: 381873 - RNA, 19 nt, Artificial Sequence
  Description of Artificial Sequence: Synthetic oligonucleotide
  Sense Strand Starting at position 803 of SEQ ID NO: 318697
ggcacagugcuaugucuua

SEQ ID NO: 381874 - RNA, 19 nt, Artificial Sequence
  Description of Artificial Sequence: Synthetic oligonucleotide
  Antisense Strand to SEQ ID NO: 381873
uaagacauagcacugugcc

SEQ ID NO: 381875 - RNA, 19 nt, Artificial Sequence
  Description of Artificial Sequence: Synthetic oligonucleotide
  Sense Strand Starting at position 803 of SEQ ID NO: 318701
cagugcuaugucuuacguu

SEQ ID NO: 381876 - RNA, 19 nt, Artificial Sequence
  Description of Artificial Sequence: Synthetic oligonucleotide
  Antisense Strand to SEQ ID NO: 381875
aacguaagacauagcacug

SEQ ID NO: 381877 - RNA, 19 nt, Artificial Sequence
  Description of Artificial Sequence: Synthetic oligonucleotide
  Sense Strand Starting at position 803 of SEQ ID NO: 318896
cgcuccaguguuugaagga

SEQ ID NO: 381878 - RNA, 19 nt, Artificial Sequence
  Description of Artificial Sequence: Synthetic oligonucleotide
  Antisense Strand to SEQ ID NO: 381877
uccuucaaacacuggagcg

SEQ ID NO: 381879 - RNA, 19 nt, Artificial Sequence
  Description of Artificial Sequence: Synthetic oligonucleotide
  Sense Strand Starting at position 803 of SEQ ID NO: 318916
ggaugagcuguaugacauc

SEQ ID NO: 381880 - RNA, 19 nt, Artificial Sequence
  Description of Artificial Sequence: Synthetic oligonucleotide
  Antisense Strand to SEQ ID NO: 381879
gaugucauacagcucaucc

SEQ ID NO: 381881 - RNA, 19 nt, Artificial Sequence
  Description of Artificial Sequence: Synthetic oligonucleotide
  Sense Strand Starting at position 803 of SEQ ID NO: 318922
gcuguaugacaucaucuuu

SEQ ID NO: 381882 - RNA, 19 nt, Artificial Sequence
  Description of Artificial Sequence: Synthetic oligonucleotide
  Antisense Strand to SEQ ID NO: 381881
aaagaugaugucauacagc

SEQ ID NO: 381883 - RNA, 19 nt, Artificial Sequence
  Description of Artificial Sequence: Synthetic oligonucleotide
  Sense Strand Starting at position 803 of SEQ ID NO: 318997
cugcauuaaagugaugagu

SEQ ID NO: 381884 - RNA, 19 nt, Artificial Sequence
  Description of Artificial Sequence: Synthetic oligonucleotide
  Antisense Strand to SEQ ID NO: 381883
acucaucacuuuaaugcag

SEQ ID NO: 381885 - RNA, 19 nt, Artificial Sequence
  Description of Artificial Sequence: Synthetic oligonucleotide
  Sense Strand Starting at position 803 of SEQ ID NO: 318999
gcauuaaagugaugagucu

SEQ ID NO: 381886 - RNA, 19 nt, Artificial Sequence
  Description of Artificial Sequence: Synthetic oligonucleotide
  Antisense Strand to SEQ ID NO: 381885
agacucaucacuuuaaugc

SEQ ID NO: 381887 - RNA, 19 nt, Artificial Sequence
  Description of Artificial Sequence: Synthetic oligonucleotide
  Sense Strand Starting at position 803 of SEQ ID NO: 319005
aagugaugagucuguaggu

SEQ ID NO: 381888 - RNA, 19 nt, Artificial Sequence
  Description of Artificial Sequence: Synthetic oligonucleotide
  Antisense Strand to SEQ ID NO: 381887
accuacagacucaucacuu

SEQ ID NO: 381889 - RNA, 19 nt, Artificial Sequence
  Description of Artificial Sequence: Synthetic oligonucleotide
  Sense Strand Starting at position 803 of SEQ ID NO: 319007
gugaugagucuguaggugu

SEQ ID NO: 381890 - RNA, 19 nt, Artificial Sequence
  Description of Artificial Sequence: Synthetic oligonucleotide
  Antisense Strand to SEQ ID NO: 381889
acaccuacagacucaucac

SEQ ID NO: 381891 - RNA, 19 nt, Artificial Sequence
  Description of Artificial Sequence: Synthetic oligonucleotide
  Sense Strand Starting at position 803 of SEQ ID NO: 319008
ugaugagucuguaggugug

SEQ ID NO: 381892 - RNA, 19 nt, Artificial Sequence
  Description of Artificial Sequence: Synthetic oligonucleotide
  Antisense Strand to SEQ ID NO: 381891
cacaccuacagacucauca

SEQ ID NO: 381893 - RNA, 19 nt, Artificial Sequence
  Description of Artificial Sequence: Synthetic oligonucleotide
  Sense Strand Starting at position 803 of SEQ ID NO: 319011
ugagucuguaggugugaua

SEQ ID NO: 381894 - RNA, 19 nt, Artificial Sequence
  Description of Artificial Sequence: Synthetic oligonucleotide
  Antisense Strand to SEQ ID NO: 381893
uaucacaccuacagacuca

SEQ ID NO: 381895 - RNA, 19 nt, Artificial Sequence
  Description of Artificial Sequence: Synthetic oligonucleotide
  Sense Strand Starting at position 803 of SEQ ID NO: 319014
gucuguaggugugauacaa

SEQ ID NO: 381896 - RNA, 19 nt, Artificial Sequence
  Description of Artificial Sequence: Synthetic oligonucleotide
  Antisense Strand to SEQ ID NO: 381895
uuguaucacaccuacagac

SEQ ID NO: 381897 - RNA, 19 nt, Artificial Sequence
  Description of Artificial Sequence: Synthetic oligonucleotide
  Sense Strand Starting at position 803 of SEQ ID NO: 319018
guaggugugauacaauugu

SEQ ID NO: 381898 - RNA, 19 nt, Artificial Sequence
  Description of Artificial Sequence: Synthetic oligonucleotide
  Antisense Strand to SEQ ID NO: 381897
acaauuguaucacaccuac

SEQ ID NO: 381899 - RNA, 19 nt, Artificial Sequence
  Description of Artificial Sequence: Synthetic oligonucleotide
  Sense Strand Starting at position 803 of SEQ ID NO: 319022
gugugauacaauugucacu

SEQ ID NO: 381900 - RNA, 19 nt, Artificial Sequence
  Description of Artificial Sequence: Synthetic oligonucleotide
  Antisense Strand to SEQ ID NO: 381899
agugacaauuguaucacac

SEQ ID NO: 381901 - RNA, 19 nt, Artificial Sequence
  Description of Artificial Sequence: Synthetic oligonucleotide
  Sense Strand Starting at position 803 of SEQ ID NO: 319065
uggaaauagcccugcuuua

SEQ ID NO: 381902 - RNA, 19 nt, Artificial Sequence
  Description of Artificial Sequence: Synthetic oligonucleotide
  Antisense Strand to SEQ ID NO: 381901
uaaagcagggcuauuucca

SEQ ID NO: 381903 - RNA, 19 nt, Artificial Sequence
  Description of Artificial Sequence: Synthetic oligonucleotide
  Sense Strand Starting at position 803 of SEQ ID NO: 319151
ccaguugaaucagaaugua

SEQ ID NO: 381904 - RNA, 19 nt, Artificial Sequence
  Description of Artificial Sequence: Synthetic oligonucleotide
  Antisense Strand to SEQ ID NO: 381903
uacauucugauucaacugg

SEQ ID NO: 381905 - RNA, 19 nt, Artificial Sequence
  Description of Artificial Sequence: Synthetic oligonucleotide
  Sense Strand Starting at position 804 of SEQ ID NO: 315438
aggaguucuccuuggucuu

SEQ ID NO: 381906 - RNA, 19 nt, Artificial Sequence
  Description of Artificial Sequence: Synthetic oligonucleotide
  Antisense Strand to SEQ ID NO: 381905
aagaccaaggagaacuccu

SEQ ID NO: 381907 - RNA, 19 nt, Artificial Sequence
  Description of Artificial Sequence: Synthetic oligonucleotide
  Sense Strand Starting at position 804 of SEQ ID NO: 315440
gaguucuccuuggucuuga

SEQ ID NO: 381908 - RNA, 19 nt, Artificial Sequence
  Description of Artificial Sequence: Synthetic oligonucleotide
  Antisense Strand to SEQ ID NO: 381907
ucaagaccaaggagaacuc

SEQ ID NO: 381909 - RNA, 19 nt, Artificial Sequence
  Description of Artificial Sequence: Synthetic oligonucleotide
  Sense Strand Starting at position 804 of SEQ ID NO: 315445
cuccuuggucuugaggagu

SEQ ID NO: 381910 - RNA, 19 nt, Artificial Sequence
  Description of Artificial Sequence: Synthetic oligonucleotide
  Antisense Strand to SEQ ID NO: 381909
acuccucaagaccaaggag

SEQ ID NO: 381911 - RNA, 19 nt, Artificial Sequence
  Description of Artificial Sequence: Synthetic oligonucleotide
  Sense Strand Starting at position 804 of SEQ ID NO: 316062
uugacccagucuugaaaca

SEQ ID NO: 381912 - RNA, 19 nt, Artificial Sequence
  Description of Artificial Sequence: Synthetic oligonucleotide
  Antisense Strand to SEQ ID NO: 381911
uguuucaagacugggucaa

SEQ ID NO: 381913 - RNA, 19 nt, Artificial Sequence
  Description of Artificial Sequence: Synthetic oligonucleotide
  Sense Strand Starting at position 804 of SEQ ID NO: 316361
auggaaaugcccugagcau

SEQ ID NO: 381914 - RNA, 19 nt, Artificial Sequence
  Description of Artificial Sequence: Synthetic oligonucleotide
  Antisense Strand to SEQ ID NO: 381913
augcucagggcauuuccau

SEQ ID NO: 381915 - RNA, 19 nt, Artificial Sequence
  Description of Artificial Sequence: Synthetic oligonucleotide
  Sense Strand Starting at position 804 of SEQ ID NO: 316429
ucacuucgccucuguaaag

SEQ ID NO: 381916 - RNA, 19 nt, Artificial Sequence
  Description of Artificial Sequence: Synthetic oligonucleotide
  Antisense Strand to SEQ ID NO: 381915
cuuuacagaggcgaaguga

SEQ ID NO: 381917 - RNA, 19 nt, Artificial Sequence
  Description of Artificial Sequence: Synthetic oligonucleotide
  Sense Strand Starting at position 804 of SEQ ID NO: 316516
cugcgcuucguuucacaga

SEQ ID NO: 381918 - RNA, 19 nt, Artificial Sequence
  Description of Artificial Sequence: Synthetic oligonucleotide
  Antisense Strand to SEQ ID NO: 381917
ucugugaaacgaagcgcag

SEQ ID NO: 381919 - RNA, 19 nt, Artificial Sequence
  Description of Artificial Sequence: Synthetic oligonucleotide
  Sense Strand Starting at position 804 of SEQ ID NO: 317631
gcccaugcuucccagaaga

SEQ ID NO: 381920 - RNA, 19 nt, Artificial Sequence
  Description of Artificial Sequence: Synthetic oligonucleotide
  Antisense Strand to SEQ ID NO: 381919
ucuucugggaagcaugggc

SEQ ID NO: 381921 - RNA, 19 nt, Artificial Sequence
  Description of Artificial Sequence: Synthetic oligonucleotide
  Sense Strand Starting at position 804 of SEQ ID NO: 317849
gccauuagagguuaccuau

SEQ ID NO: 381922 - RNA, 19 nt, Artificial Sequence
  Description of Artificial Sequence: Synthetic oligonucleotide
  Antisense Strand to SEQ ID NO: 381921
auagguaaccucuaauggc

SEQ ID NO: 381923 - RNA, 19 nt, Artificial Sequence
  Description of Artificial Sequence: Synthetic oligonucleotide
  Sense Strand Starting at position 804 of SEQ ID NO: 318004
uuuagcugucugucgugaa

SEQ ID NO: 381924 - RNA, 19 nt, Artificial Sequence
  Description of Artificial Sequence: Synthetic oligonucleotide
  Antisense Strand to SEQ ID NO: 381923
uucacgacagacagcuaaa

SEQ ID NO: 381925 - RNA, 19 nt, Artificial Sequence
  Description of Artificial Sequence: Synthetic oligonucleotide
  Sense Strand Starting at position 804 of SEQ ID NO: 318017
cgugaauugcaugaaggca

SEQ ID NO: 381926 - RNA, 19 nt, Artificial Sequence
  Description of Artificial Sequence: Synthetic oligonucleotide
  Antisense Strand to SEQ ID NO: 381925
ugccuucaugcaauucacg

SEQ ID NO: 381927 - RNA, 19 nt, Artificial Sequence
  Description of Artificial Sequence: Synthetic oligonucleotide
  Sense Strand Starting at position 804 of SEQ ID NO: 318073
auaugaaucuagccuugca

SEQ ID NO: 381928 - RNA, 19 nt, Artificial Sequence
  Description of Artificial Sequence: Synthetic oligonucleotide
  Antisense Strand to SEQ ID NO: 381927
ugcaaggcuagauucauau

SEQ ID NO: 381929 - RNA, 19 nt, Artificial Sequence
  Description of Artificial Sequence: Synthetic oligonucleotide
  Sense Strand Starting at position 804 of SEQ ID NO: 318229
gaggauaaaugucaguaag

SEQ ID NO: 381930 - RNA, 19 nt, Artificial Sequence
  Description of Artificial Sequence: Synthetic oligonucleotide
  Antisense Strand to SEQ ID NO: 381929
cuuacugacauuuauccuc

SEQ ID NO: 381931 - RNA, 19 nt, Artificial Sequence
  Description of Artificial Sequence: Synthetic oligonucleotide
  Sense Strand Starting at position 804 of SEQ ID NO: 318231
ggauaaaugucaguaaggc

SEQ ID NO: 381932 - RNA, 19 nt, Artificial Sequence
  Description of Artificial Sequence: Synthetic oligonucleotide
  Antisense Strand to SEQ ID NO: 381931
gccuuacugacauuuaucc

SEQ ID NO: 381933 - RNA, 19 nt, Artificial Sequence
  Description of Artificial Sequence: Synthetic oligonucleotide
  Sense Strand Starting at position 804 of SEQ ID NO: 318232
gauaaaugucaguaaggcu

SEQ ID NO: 381934 - RNA, 19 nt, Artificial Sequence
  Description of Artificial Sequence: Synthetic oligonucleotide
  Antisense Strand to SEQ ID NO: 381933
agccuuacugacauuuauc

SEQ ID NO: 381935 - RNA, 19 nt, Artificial Sequence
  Description of Artificial Sequence: Synthetic oligonucleotide
  Sense Strand Starting at position 804 of SEQ ID NO: 318514
acgggcucccuuugaagaa

SEQ ID NO: 381936 - RNA, 19 nt, Artificial Sequence
  Description of Artificial Sequence: Synthetic oligonucleotide
  Antisense Strand to SEQ ID NO: 381935
uucuucaaagggagcccgu

SEQ ID NO: 381937 - RNA, 19 nt, Artificial Sequence
  Description of Artificial Sequence: Synthetic oligonucleotide
  Sense Strand Starting at position 804 of SEQ ID NO: 318515
cgggcucccuuugaagaaa

SEQ ID NO: 381938 - RNA, 19 nt, Artificial Sequence
  Description of Artificial Sequence: Synthetic oligonucleotide
  Antisense Strand to SEQ ID NO: 381937
uuucuucaaagggagcccg

SEQ ID NO: 381939 - RNA, 19 nt, Artificial Sequence
  Description of Artificial Sequence: Synthetic oligonucleotide
  Sense Strand Starting at position 804 of SEQ ID NO: 318568
gaggguauuugugaggaag

SEQ ID NO: 381940 - RNA, 19 nt, Artificial Sequence
  Description of Artificial Sequence: Synthetic oligonucleotide
  Antisense Strand to SEQ ID NO: 381939
cuuccucacaaauacccuc

SEQ ID NO: 381941 - RNA, 19 nt, Artificial Sequence
  Description of Artificial Sequence: Synthetic oligonucleotide
  Sense Strand Starting at position 804 of SEQ ID NO: 318570
ggguauuugugaggaaguc

SEQ ID NO: 381942 - RNA, 19 nt, Artificial Sequence
  Description of Artificial Sequence: Synthetic oligonucleotide
  Antisense Strand to SEQ ID NO: 381941
gacuuccucacaaauaccc

SEQ ID NO: 381943 - RNA, 19 nt, Artificial Sequence
  Description of Artificial Sequence: Synthetic oligonucleotide
  Sense Strand Starting at position 804 of SEQ ID NO: 318579
ugaggaagucugugggugu

SEQ ID NO: 381944 - RNA, 19 nt, Artificial Sequence
  Description of Artificial Sequence: Synthetic oligonucleotide
  Antisense Strand to SEQ ID NO: 381943
acacccacagacuuccuca

SEQ ID NO: 381945 - RNA, 19 nt, Artificial Sequence
  Description of Artificial Sequence: Synthetic oligonucleotide
  Sense Strand Starting at position 804 of SEQ ID NO: 318592
gggugucuucuggguugca

SEQ ID NO: 381946 - RNA, 19 nt, Artificial Sequence
  Description of Artificial Sequence: Synthetic oligonucleotide
  Antisense Strand to SEQ ID NO: 381945
ugcaacccagaagacaccc

SEQ ID NO: 381947 - RNA, 19 nt, Artificial Sequence
  Description of Artificial Sequence: Synthetic oligonucleotide
  Sense Strand Starting at position 804 of SEQ ID NO: 318595
ugucuucuggguugcacaa

SEQ ID NO: 381948 - RNA, 19 nt, Artificial Sequence
  Description of Artificial Sequence: Synthetic oligonucleotide
  Antisense Strand to SEQ ID NO: 381947
uugugcaacccagaagaca

SEQ ID NO: 381949 - RNA, 19 nt, Artificial Sequence
  Description of Artificial Sequence: Synthetic oligonucleotide
  Sense Strand Starting at position 804 of SEQ ID NO: 318602
uggguugcacaagauugau

SEQ ID NO: 381950 - RNA, 19 nt, Artificial Sequence
  Description of Artificial Sequence: Synthetic oligonucleotide
  Antisense Strand to SEQ ID NO: 381949
aucaaucuugugcaaccca

SEQ ID NO: 381951 - RNA, 19 nt, Artificial Sequence
  Description of Artificial Sequence: Synthetic oligonucleotide
  Sense Strand Starting at position 804 of SEQ ID NO: 318651
guugaaacuuaggcucaaa

SEQ ID NO: 381952 - RNA, 19 nt, Artificial Sequence
  Description of Artificial Sequence: Synthetic oligonucleotide
  Antisense Strand to SEQ ID NO: 381951
uuugagccuaaguuucaac

SEQ ID NO: 381953 - RNA, 19 nt, Artificial Sequence
  Description of Artificial Sequence: Synthetic oligonucleotide
  Sense Strand Starting at position 804 of SEQ ID NO: 318669
aaggguuccaagugaaagu

SEQ ID NO: 381954 - RNA, 19 nt, Artificial Sequence
  Description of Artificial Sequence: Synthetic oligonucleotide
  Antisense Strand to SEQ ID NO: 381953
acuuucacuuggaacccuu

SEQ ID NO: 381955 - RNA, 19 nt, Artificial Sequence
  Description of Artificial Sequence: Synthetic oligonucleotide
  Sense Strand Starting at position 804 of SEQ ID NO: 318678
aagugaaagugauuccucu

SEQ ID NO: 381956 - RNA, 19 nt, Artificial Sequence
  Description of Artificial Sequence: Synthetic oligonucleotide
  Antisense Strand to SEQ ID NO: 381955
agaggaaucacuuucacuu

SEQ ID NO: 381957 - RNA, 19 nt, Artificial Sequence
  Description of Artificial Sequence: Synthetic oligonucleotide
  Sense Strand Starting at position 804 of SEQ ID NO: 318732
augaguguuucccacuuga

SEQ ID NO: 381958 - RNA, 19 nt, Artificial Sequence
  Description of Artificial Sequence: Synthetic oligonucleotide
  Antisense Strand to SEQ ID NO: 381957
ucaagugggaaacacucau

SEQ ID NO: 381959 - RNA, 19 nt, Artificial Sequence
  Description of Artificial Sequence: Synthetic oligonucleotide
  Sense Strand Starting at position 804 of SEQ ID NO: 318736
guguuucccacuugaguau

SEQ ID NO: 381960 - RNA, 19 nt, Artificial Sequence
  Description of Artificial Sequence: Synthetic oligonucleotide
  Antisense Strand to SEQ ID NO: 381959
auacucaagugggaaacac

SEQ ID NO: 381961 - RNA, 19 nt, Artificial Sequence
  Description of Artificial Sequence: Synthetic oligonucleotide
  Sense Strand Starting at position 804 of SEQ ID NO: 318737
uguuucccacuugaguaua

SEQ ID NO: 381962 - RNA, 19 nt, Artificial Sequence
  Description of Artificial Sequence: Synthetic oligonucleotide
  Antisense Strand to SEQ ID NO: 381961
uauacucaagugggaaaca

SEQ ID NO: 381963 - RNA, 19 nt, Artificial Sequence
  Description of Artificial Sequence: Synthetic oligonucleotide
  Sense Strand Starting at position 804 of SEQ ID NO: 318740
uucccacuugaguauacau

SEQ ID NO: 381964 - RNA, 19 nt, Artificial Sequence
  Description of Artificial Sequence: Synthetic oligonucleotide
  Antisense Strand to SEQ ID NO: 381963
auguauacucaagugggaa

SEQ ID NO: 381965 - RNA, 19 nt, Artificial Sequence
  Description of Artificial Sequence: Synthetic oligonucleotide
  Sense Strand Starting at position 804 of SEQ ID NO: 318896
gcagguaaaucucacucuu

SEQ ID NO: 381966 - RNA, 19 nt, Artificial Sequence
  Description of Artificial Sequence: Synthetic oligonucleotide
  Antisense Strand to SEQ ID NO: 381965
aagagugagauuuaccugc

SEQ ID NO: 381967 - RNA, 19 nt, Artificial Sequence
  Description of Artificial Sequence: Synthetic oligonucleotide
  Sense Strand Starting at position 804 of SEQ ID NO: 319020
gguccuucaugggugauga

SEQ ID NO: 381968 - RNA, 19 nt, Artificial Sequence
  Description of Artificial Sequence: Synthetic oligonucleotide
  Antisense Strand to SEQ ID NO: 381967
ucaucacccaugaaggacc

SEQ ID NO: 381969 - RNA, 19 nt, Artificial Sequence
  Description of Artificial Sequence: Synthetic oligonucleotide
  Sense Strand Starting at position 804 of SEQ ID NO: 319021
guccuucaugggugaugau

SEQ ID NO: 381970 - RNA, 19 nt, Artificial Sequence
  Description of Artificial Sequence: Synthetic oligonucleotide
  Antisense Strand to SEQ ID NO: 381969
aucaucacccaugaaggac

SEQ ID NO: 381971 - RNA, 19 nt, Artificial Sequence
  Description of Artificial Sequence: Synthetic oligonucleotide
  Sense Strand Starting at position 804 of SEQ ID NO: 319037
gauuaaauacuguggcaca

SEQ ID NO: 381972 - RNA, 19 nt, Artificial Sequence
  Description of Artificial Sequence: Synthetic oligonucleotide
  Antisense Strand to SEQ ID NO: 381971
ugugccacaguauuuaauc

SEQ ID NO: 381973 - RNA, 19 nt, Artificial Sequence
  Description of Artificial Sequence: Synthetic oligonucleotide
  Sense Strand Starting at position 804 of SEQ ID NO: 319051
gcacaucuaugccauggaa

SEQ ID NO: 381974 - RNA, 19 nt, Artificial Sequence
  Description of Artificial Sequence: Synthetic oligonucleotide
  Antisense Strand to SEQ ID NO: 381973
uuccauggcauagaugugc

SEQ ID NO: 381975 - RNA, 19 nt, Artificial Sequence
  Description of Artificial Sequence: Synthetic oligonucleotide
  Sense Strand Starting at position 804 of SEQ ID NO: 319053
acaucuaugccauggaaua

SEQ ID NO: 381976 - RNA, 19 nt, Artificial Sequence
  Description of Artificial Sequence: Synthetic oligonucleotide
  Antisense Strand to SEQ ID NO: 381975
uauuccauggcauagaugu

SEQ ID NO: 381977 - RNA, 19 nt, Artificial Sequence
  Description of Artificial Sequence: Synthetic oligonucleotide
  Sense Strand Starting at position 804 of SEQ ID NO: 319102
auacauccaucuuggauga

SEQ ID NO: 381978 - RNA, 19 nt, Artificial Sequence
  Description of Artificial Sequence: Synthetic oligonucleotide
  Antisense Strand to SEQ ID NO: 381977
ucauccaagauggauguau

SEQ ID NO: 381979 - RNA, 19 nt, Artificial Sequence
  Description of Artificial Sequence: Synthetic oligonucleotide
  Sense Strand Starting at position 804 of SEQ ID NO: 319172
gguuacauacuguaaacuu

SEQ ID NO: 381980 - RNA, 19 nt, Artificial Sequence
  Description of Artificial Sequence: Synthetic oligonucleotide
  Antisense Strand to SEQ ID NO: 381979
aaguuuacaguauguaacc

SEQ ID NO: 381981 - RNA, 19 nt, Artificial Sequence
  Description of Artificial Sequence: Synthetic oligonucleotide
  Sense Strand Starting at position 804 of SEQ ID NO: 319200
caagauuauugaguuggca

SEQ ID NO: 381982 - RNA, 19 nt, Artificial Sequence
  Description of Artificial Sequence: Synthetic oligonucleotide
  Antisense Strand to SEQ ID NO: 381981
ugccaacucaauaaucuug

SEQ ID NO: 381983 - RNA, 19 nt, Artificial Sequence
  Description of Artificial Sequence: Synthetic oligonucleotide
  Sense Strand Starting at position 804 of SEQ ID NO: 319202
agauuauugaguuggcaaa

SEQ ID NO: 381984 - RNA, 19 nt, Artificial Sequence
  Description of Artificial Sequence: Synthetic oligonucleotide
  Antisense Strand to SEQ ID NO: 381983
uuugccaacucaauaaucu

SEQ ID NO: 381985 - RNA, 19 nt, Artificial Sequence
  Description of Artificial Sequence: Synthetic oligonucleotide
  Sense Strand Starting at position 805 of SEQ ID NO: 315275
uuacaauugucaguaacac

SEQ ID NO: 381986 - RNA, 19 nt, Artificial Sequence
  Description of Artificial Sequence: Synthetic oligonucleotide
  Antisense Strand to SEQ ID NO: 381985
guguuacugacaauuguaa

SEQ ID NO: 381987 - RNA, 19 nt, Artificial Sequence
  Description of Artificial Sequence: Synthetic oligonucleotide
  Sense Strand Starting at position 805 of SEQ ID NO: 315431
ugaggcagucccuauccua

SEQ ID NO: 381988 - RNA, 19 nt, Artificial Sequence
  Description of Artificial Sequence: Synthetic oligonucleotide
  Antisense Strand to SEQ ID NO: 381987
uaggauagggacugccuca

SEQ ID NO: 381989 - RNA, 19 nt, Artificial Sequence
  Description of Artificial Sequence: Synthetic oligonucleotide
  Sense Strand Starting at position 805 of SEQ ID NO: 315456
cugaccuguuggccaaaua

SEQ ID NO: 381990 - RNA, 19 nt, Artificial Sequence
  Description of Artificial Sequence: Synthetic oligonucleotide
  Antisense Strand to SEQ ID NO: 381989
uauuuggccaacaggucag

SEQ ID NO: 381991 - RNA, 19 nt, Artificial Sequence
  Description of Artificial Sequence: Synthetic oligonucleotide
  Sense Strand Starting at position 805 of SEQ ID NO: 315457
ugaccuguuggccaaauaa

SEQ ID NO: 381992 - RNA, 19 nt, Artificial Sequence
  Description of Artificial Sequence: Synthetic oligonucleotide
  Antisense Strand to SEQ ID NO: 381991
uuauuuggccaacagguca

SEQ ID NO: 381993 - RNA, 19 nt, Artificial Sequence
  Description of Artificial Sequence: Synthetic oligonucleotide
  Sense Strand Starting at position 805 of SEQ ID NO: 315493
acagcaagugucuggaacu

SEQ ID NO: 381994 - RNA, 19 nt, Artificial Sequence
  Description of Artificial Sequence: Synthetic oligonucleotide
  Antisense Strand to SEQ ID NO: 381993
aguuccagacacuugcugu

SEQ ID NO: 381995 - RNA, 19 nt, Artificial Sequence
  Description of Artificial Sequence: Synthetic oligonucleotide
  Sense Strand Starting at position 805 of SEQ ID NO: 315531
ucagaacaauaguaagaga

SEQ ID NO: 381996 - RNA, 19 nt, Artificial Sequence
  Description of Artificial Sequence: Synthetic oligonucleotide
  Antisense Strand to SEQ ID NO: 381995
ucucuuacuauuguucuga

SEQ ID NO: 381997 - RNA, 19 nt, Artificial Sequence
  Description of Artificial Sequence: Synthetic oligonucleotide
  Sense Strand Starting at position 805 of SEQ ID NO: 315554
agcacagauuuacauggaa

SEQ ID NO: 381998 - RNA, 19 nt, Artificial Sequence
  Description of Artificial Sequence: Synthetic oligonucleotide
  Antisense Strand to SEQ ID NO: 381997
uuccauguaaaucugugcu

SEQ ID NO: 381999 - RNA, 19 nt, Artificial Sequence
  Description of Artificial Sequence: Synthetic oligonucleotide
  Sense Strand Starting at position 805 of SEQ ID NO: 315755
ggcaguagucugcaggacu

SEQ ID NO: 382000 - RNA, 19 nt, Artificial Sequence
  Description of Artificial Sequence: Synthetic oligonucleotide
  Antisense Strand to SEQ ID NO: 381999
aguccugcagacuacugcc

SEQ ID NO: 382001 - RNA, 19 nt, Artificial Sequence
  Description of Artificial Sequence: Synthetic oligonucleotide
  Sense Strand Starting at position 805 of SEQ ID NO: 315767
caggacuuguuuccacaga

SEQ ID NO: 382002 - RNA, 19 nt, Artificial Sequence
  Description of Artificial Sequence: Synthetic oligonucleotide
  Antisense Strand to SEQ ID NO: 382001
ucuguggaaacaaguccug

SEQ ID NO: 382003 - RNA, 19 nt, Artificial Sequence
  Description of Artificial Sequence: Synthetic oligonucleotide
  Sense Strand Starting at position 805 of SEQ ID NO: 315820
gcacaaagugcugacucau

SEQ ID NO: 382004 - RNA, 19 nt, Artificial Sequence
  Description of Artificial Sequence: Synthetic oligonucleotide
  Antisense Strand to SEQ ID NO: 382003
augagucagcacuuugugc

SEQ ID NO: 382005 - RNA, 19 nt, Artificial Sequence
  Description of Artificial Sequence: Synthetic oligonucleotide
  Sense Strand Starting at position 805 of SEQ ID NO: 316005
cauuaauaaucaucgugga

SEQ ID NO: 382006 - RNA, 19 nt, Artificial Sequence
  Description of Artificial Sequence: Synthetic oligonucleotide
  Antisense Strand to SEQ ID NO: 382005
uccacgaugauuauuaaug

SEQ ID NO: 382007 - RNA, 19 nt, Artificial Sequence
  Description of Artificial Sequence: Synthetic oligonucleotide
  Sense Strand Starting at position 805 of SEQ ID NO: 316006
auuaauaaucaucguggaa

SEQ ID NO: 382008 - RNA, 19 nt, Artificial Sequence
  Description of Artificial Sequence: Synthetic oligonucleotide
  Antisense Strand to SEQ ID NO: 382007
uuccacgaugauuauuaau

SEQ ID NO: 382009 - RNA, 19 nt, Artificial Sequence
  Description of Artificial Sequence: Synthetic oligonucleotide
  Sense Strand Starting at position 805 of SEQ ID NO: 316010
auaaucaucguggaagcuu

SEQ ID NO: 382010 - RNA, 19 nt, Artificial Sequence
  Description of Artificial Sequence: Synthetic oligonucleotide
  Antisense Strand to SEQ ID NO: 382009
aagcuuccacgaugauuau

SEQ ID NO: 382011 - RNA, 19 nt, Artificial Sequence
  Description of Artificial Sequence: Synthetic oligonucleotide
  Sense Strand Starting at position 805 of SEQ ID NO: 316297
agugauuuaucccuucguu

SEQ ID NO: 382012 - RNA, 19 nt, Artificial Sequence
  Description of Artificial Sequence: Synthetic oligonucleotide
  Antisense Strand to SEQ ID NO: 382011
aacgaagggauaaaucacu

SEQ ID NO: 382013 - RNA, 19 nt, Artificial Sequence
  Description of Artificial Sequence: Synthetic oligonucleotide
  Sense Strand Starting at position 805 of SEQ ID NO: 316354
caaagagauugugaggaua

SEQ ID NO: 382014 - RNA, 19 nt, Artificial Sequence
  Description of Artificial Sequence: Synthetic oligonucleotide
  Antisense Strand to SEQ ID NO: 382013
uauccucacaaucucuuug

SEQ ID NO: 382015 - RNA, 19 nt, Artificial Sequence
  Description of Artificial Sequence: Synthetic oligonucleotide
  Sense Strand Starting at position 805 of SEQ ID NO: 316547
ccaccaaagcagugugauu

SEQ ID NO: 382016 - RNA, 19 nt, Artificial Sequence
  Description of Artificial Sequence: Synthetic oligonucleotide
  Antisense Strand to SEQ ID NO: 382015
aaucacacugcuuuggugg

SEQ ID NO: 382017 - RNA, 19 nt, Artificial Sequence
  Description of Artificial Sequence: Synthetic oligonucleotide
  Sense Strand Starting at position 805 of SEQ ID NO: 316552
aaagcagugugauucuuua

SEQ ID NO: 382018 - RNA, 19 nt, Artificial Sequence
  Description of Artificial Sequence: Synthetic oligonucleotide
  Antisense Strand to SEQ ID NO: 382017
uaaagaaucacacugcuuu

SEQ ID NO: 382019 - RNA, 19 nt, Artificial Sequence
  Description of Artificial Sequence: Synthetic oligonucleotide
  Sense Strand Starting at position 805 of SEQ ID NO: 316640
gcacaaaugcugcauaaau

SEQ ID NO: 382020 - RNA, 19 nt, Artificial Sequence
  Description of Artificial Sequence: Synthetic oligonucleotide
  Antisense Strand to SEQ ID NO: 382019
auuuaugcagcauuugugc

SEQ ID NO: 382021 - RNA, 19 nt, Artificial Sequence
  Description of Artificial Sequence: Synthetic oligonucleotide
  Sense Strand Starting at position 805 of SEQ ID NO: 317693
cugaguuuccugggagcau

SEQ ID NO: 382022 - RNA, 19 nt, Artificial Sequence
  Description of Artificial Sequence: Synthetic oligonucleotide
  Antisense Strand to SEQ ID NO: 382021
augcucccaggaaacucag

SEQ ID NO: 382023 - RNA, 19 nt, Artificial Sequence
  Description of Artificial Sequence: Synthetic oligonucleotide
  Sense Strand Starting at position 805 of SEQ ID NO: 317780
gucuuuccuguggagugau

SEQ ID NO: 382024 - RNA, 19 nt, Artificial Sequence
  Description of Artificial Sequence: Synthetic oligonucleotide
  Antisense Strand to SEQ ID NO: 382023
aucacuccacaggaaagac

SEQ ID NO: 382025 - RNA, 19 nt, Artificial Sequence
  Description of Artificial Sequence: Synthetic oligonucleotide
  Sense Strand Starting at position 805 of SEQ ID NO: 317783
uuuccuguggagugaugga

SEQ ID NO: 382026 - RNA, 19 nt, Artificial Sequence
  Description of Artificial Sequence: Synthetic oligonucleotide
  Antisense Strand to SEQ ID NO: 382025
uccaucacuccacaggaaa

SEQ ID NO: 382027 - RNA, 19 nt, Artificial Sequence
  Description of Artificial Sequence: Synthetic oligonucleotide
  Sense Strand Starting at position 805 of SEQ ID NO: 317803
uuuauugugcccugaacca

SEQ ID NO: 382028 - RNA, 19 nt, Artificial Sequence
  Description of Artificial Sequence: Synthetic oligonucleotide
  Antisense Strand to SEQ ID NO: 382027
ugguucagggcacaauaaa

SEQ ID NO: 382029 - RNA, 19 nt, Artificial Sequence
  Description of Artificial Sequence: Synthetic oligonucleotide
  Sense Strand Starting at position 805 of SEQ ID NO: 317825
aaaugcgauuugccaagua

SEQ ID NO: 382030 - RNA, 19 nt, Artificial Sequence
  Description of Artificial Sequence: Synthetic oligonucleotide
  Antisense Strand to SEQ ID NO: 382029
uacuuggcaaaucgcauuu

SEQ ID NO: 382031 - RNA, 19 nt, Artificial Sequence
  Description of Artificial Sequence: Synthetic oligonucleotide
  Sense Strand Starting at position 805 of SEQ ID NO: 317838
caaguauaagcacggauau

SEQ ID NO: 382032 - RNA, 19 nt, Artificial Sequence
  Description of Artificial Sequence: Synthetic oligonucleotide
  Antisense Strand to SEQ ID NO: 382031
auauccgugcuuauacuug

SEQ ID NO: 382033 - RNA, 19 nt, Artificial Sequence
  Description of Artificial Sequence: Synthetic oligonucleotide
  Sense Strand Starting at position 805 of SEQ ID NO: 317839
aaguauaagcacggauaua

SEQ ID NO: 382034 - RNA, 19 nt, Artificial Sequence
  Description of Artificial Sequence: Synthetic oligonucleotide
  Antisense Strand to SEQ ID NO: 382033
uauauccgugcuuauacuu

SEQ ID NO: 382035 - RNA, 19 nt, Artificial Sequence
  Description of Artificial Sequence: Synthetic oligonucleotide
  Sense Strand Starting at position 805 of SEQ ID NO: 317879
uugcuuugacauuagucaa

SEQ ID NO: 382036 - RNA, 19 nt, Artificial Sequence
  Description of Artificial Sequence: Synthetic oligonucleotide
  Antisense Strand to SEQ ID NO: 382035
uugacuaaugucaaagcaa

SEQ ID NO: 382037 - RNA, 19 nt, Artificial Sequence
  Description of Artificial Sequence: Synthetic oligonucleotide
  Sense Strand Starting at position 805 of SEQ ID NO: 317900
acuucuacucgccaguaaa

SEQ ID NO: 382038 - RNA, 19 nt, Artificial Sequence
  Description of Artificial Sequence: Synthetic oligonucleotide
  Antisense Strand to SEQ ID NO: 382037
uuuacuggcgaguagaagu

SEQ ID NO: 382039 - RNA, 19 nt, Artificial Sequence
  Description of Artificial Sequence: Synthetic oligonucleotide
  Sense Strand Starting at position 805 of SEQ ID NO: 317997
ccaauucuggguuauccua

SEQ ID NO: 382040 - RNA, 19 nt, Artificial Sequence
  Description of Artificial Sequence: Synthetic oligonucleotide
  Antisense Strand to SEQ ID NO: 382039
uaggauaacccagaauugg

SEQ ID NO: 382041 - RNA, 19 nt, Artificial Sequence
  Description of Artificial Sequence: Synthetic oligonucleotide
  Sense Strand Starting at position 805 of SEQ ID NO: 318320
ggcaaccagauccgugaau

SEQ ID NO: 382042 - RNA, 19 nt, Artificial Sequence
  Description of Artificial Sequence: Synthetic oligonucleotide
  Antisense Strand to SEQ ID NO: 382041
auucacggaucugguugcc

SEQ ID NO: 382043 - RNA, 19 nt, Artificial Sequence
  Description of Artificial Sequence: Synthetic oligonucleotide
  Sense Strand Starting at position 805 of SEQ ID NO: 318326
cagauccgugaaugggaua

SEQ ID NO: 382044 - RNA, 19 nt, Artificial Sequence
  Description of Artificial Sequence: Synthetic oligonucleotide
  Antisense Strand to SEQ ID NO: 382043
uaucccauucacggaucug

SEQ ID NO: 382045 - RNA, 19 nt, Artificial Sequence
  Description of Artificial Sequence: Synthetic oligonucleotide
  Sense Strand Starting at position 805 of SEQ ID NO: 318364
gguggaagaucucuucugu

SEQ ID NO: 382046 - RNA, 19 nt, Artificial Sequence
  Description of Artificial Sequence: Synthetic oligonucleotide
  Antisense Strand to SEQ ID NO: 382045
acagaagagaucuuccacc

SEQ ID NO: 382047 - RNA, 19 nt, Artificial Sequence
  Description of Artificial Sequence: Synthetic oligonucleotide
  Sense Strand Starting at position 805 of SEQ ID NO: 318370
agaucucuucuguaguaau

SEQ ID NO: 382048 - RNA, 19 nt, Artificial Sequence
  Description of Artificial Sequence: Synthetic oligonucleotide
  Antisense Strand to SEQ ID NO: 382047
auuacuacagaagagaucu

SEQ ID NO: 382049 - RNA, 19 nt, Artificial Sequence
  Description of Artificial Sequence: Synthetic oligonucleotide
  Sense Strand Starting at position 805 of SEQ ID NO: 318829
acuccuucuuccucgagga

SEQ ID NO: 382050 - RNA, 19 nt, Artificial Sequence
  Description of Artificial Sequence: Synthetic oligonucleotide
  Antisense Strand to SEQ ID NO: 382049
uccucgaggaagaaggagu

SEQ ID NO: 382051 - RNA, 19 nt, Artificial Sequence
  Description of Artificial Sequence: Synthetic oligonucleotide
  Sense Strand Starting at position 805 of SEQ ID NO: 318830
cuccuucuuccucgaggaa

SEQ ID NO: 382052 - RNA, 19 nt, Artificial Sequence
  Description of Artificial Sequence: Synthetic oligonucleotide
  Antisense Strand to SEQ ID NO: 382051
uuccucgaggaagaaggag

SEQ ID NO: 382053 - RNA, 19 nt, Artificial Sequence
  Description of Artificial Sequence: Synthetic oligonucleotide
  Sense Strand Starting at position 805 of SEQ ID NO: 318831
uccuucuuccucgaggaaa

SEQ ID NO: 382054 - RNA, 19 nt, Artificial Sequence
  Description of Artificial Sequence: Synthetic oligonucleotide
  Antisense Strand to SEQ ID NO: 382053
uuuccucgaggaagaagga

SEQ ID NO: 382055 - RNA, 19 nt, Artificial Sequence
  Description of Artificial Sequence: Synthetic oligonucleotide
  Sense Strand Starting at position 805 of SEQ ID NO: 318833
cuucuuccucgaggaaaua

SEQ ID NO: 382056 - RNA, 19 nt, Artificial Sequence
  Description of Artificial Sequence: Synthetic oligonucleotide
  Antisense Strand to SEQ ID NO: 382055
uauuuccucgaggaagaag

SEQ ID NO: 382057 - RNA, 19 nt, Artificial Sequence
  Description of Artificial Sequence: Synthetic oligonucleotide
  Sense Strand Starting at position 805 of SEQ ID NO: 318922
cuagacuucugcucugauu

SEQ ID NO: 382058 - RNA, 19 nt, Artificial Sequence
  Description of Artificial Sequence: Synthetic oligonucleotide
  Antisense Strand to SEQ ID NO: 382057
aaucagagcagaagucuag

SEQ ID NO: 382059 - RNA, 19 nt, Artificial Sequence
  Description of Artificial Sequence: Synthetic oligonucleotide
  Sense Strand Starting at position 805 of SEQ ID NO: 318924
agacuucugcucugauuau

SEQ ID NO: 382060 - RNA, 19 nt, Artificial Sequence
  Description of Artificial Sequence: Synthetic oligonucleotide
  Antisense Strand to SEQ ID NO: 382059
auaaucagagcagaagucu

SEQ ID NO: 382061 - RNA, 19 nt, Artificial Sequence
  Description of Artificial Sequence: Synthetic oligonucleotide
  Sense Strand Starting at position 805 of SEQ ID NO: 319017
agaugacuucuaggucaug

SEQ ID NO: 382062 - RNA, 19 nt, Artificial Sequence
  Description of Artificial Sequence: Synthetic oligonucleotide
  Antisense Strand to SEQ ID NO: 382061
caugaccuagaagucaucu

SEQ ID NO: 382063 - RNA, 19 nt, Artificial Sequence
  Description of Artificial Sequence: Synthetic oligonucleotide
  Sense Strand Starting at position 805 of SEQ ID NO: 319071
acucauaacccugaggcau

SEQ ID NO: 382064 - RNA, 19 nt, Artificial Sequence
  Description of Artificial Sequence: Synthetic oligonucleotide
  Antisense Strand to SEQ ID NO: 382063
augccucaggguuaugagu

SEQ ID NO: 382065 - RNA, 19 nt, Artificial Sequence
  Description of Artificial Sequence: Synthetic oligonucleotide
  Sense Strand Starting at position 806 of SEQ ID NO: 315236
acagcaagugucuggaacu

SEQ ID NO: 382066 - RNA, 19 nt, Artificial Sequence
  Description of Artificial Sequence: Synthetic oligonucleotide
  Antisense Strand to SEQ ID NO: 382065
aguuccagacacuugcugu

SEQ ID NO: 382067 - RNA, 19 nt, Artificial Sequence
  Description of Artificial Sequence: Synthetic oligonucleotide
  Sense Strand Starting at position 806 of SEQ ID NO: 315274
ucagaacaauaguaagaga

SEQ ID NO: 382068 - RNA, 19 nt, Artificial Sequence
  Description of Artificial Sequence: Synthetic oligonucleotide
  Antisense Strand to SEQ ID NO: 382067
ucucuuacuauuguucuga

SEQ ID NO: 382069 - RNA, 19 nt, Artificial Sequence
  Description of Artificial Sequence: Synthetic oligonucleotide
  Sense Strand Starting at position 806 of SEQ ID NO: 315297
agcacagauuuacauggaa

SEQ ID NO: 382070 - RNA, 19 nt, Artificial Sequence
  Description of Artificial Sequence: Synthetic oligonucleotide
  Antisense Strand to SEQ ID NO: 382069
uuccauguaaaucugugcu

SEQ ID NO: 382071 - RNA, 19 nt, Artificial Sequence
  Description of Artificial Sequence: Synthetic oligonucleotide
  Sense Strand Starting at position 806 of SEQ ID NO: 315350
ugcaaagaguagcuguauu

SEQ ID NO: 382072 - RNA, 19 nt, Artificial Sequence
  Description of Artificial Sequence: Synthetic oligonucleotide
  Antisense Strand to SEQ ID NO: 382071
aauacagcuacucuuugca

SEQ ID NO: 382073 - RNA, 19 nt, Artificial Sequence
  Description of Artificial Sequence: Synthetic oligonucleotide
  Sense Strand Starting at position 806 of SEQ ID NO: 315498
ggcaguagucugcaggacu

SEQ ID NO: 382074 - RNA, 19 nt, Artificial Sequence
  Description of Artificial Sequence: Synthetic oligonucleotide
  Antisense Strand to SEQ ID NO: 382073
aguccugcagacuacugcc

SEQ ID NO: 382075 - RNA, 19 nt, Artificial Sequence
  Description of Artificial Sequence: Synthetic oligonucleotide
  Sense Strand Starting at position 806 of SEQ ID NO: 315510
caggacuuguuuccacaga

SEQ ID NO: 382076 - RNA, 19 nt, Artificial Sequence
  Description of Artificial Sequence: Synthetic oligonucleotide
  Antisense Strand to SEQ ID NO: 382075
ucuguggaaacaaguccug

SEQ ID NO: 382077 - RNA, 19 nt, Artificial Sequence
  Description of Artificial Sequence: Synthetic oligonucleotide
  Sense Strand Starting at position 806 of SEQ ID NO: 315563
gcacaaagugcugacucau

SEQ ID NO: 382078 - RNA, 19 nt, Artificial Sequence
  Description of Artificial Sequence: Synthetic oligonucleotide
  Antisense Strand to SEQ ID NO: 382077
augagucagcacuuugugc

SEQ ID NO: 382079 - RNA, 19 nt, Artificial Sequence
  Description of Artificial Sequence: Synthetic oligonucleotide
  Sense Strand Starting at position 806 of SEQ ID NO: 315748
cauuaauaaucaucgugga

SEQ ID NO: 382080 - RNA, 19 nt, Artificial Sequence
  Description of Artificial Sequence: Synthetic oligonucleotide
  Antisense Strand to SEQ ID NO: 382079
uccacgaugauuauuaaug

SEQ ID NO: 382081 - RNA, 19 nt, Artificial Sequence
  Description of Artificial Sequence: Synthetic oligonucleotide
  Sense Strand Starting at position 806 of SEQ ID NO: 315749
auuaauaaucaucguggaa

SEQ ID NO: 382082 - RNA, 19 nt, Artificial Sequence
  Description of Artificial Sequence: Synthetic oligonucleotide
  Antisense Strand to SEQ ID NO: 382081
uuccacgaugauuauuaau

SEQ ID NO: 382083 - RNA, 19 nt, Artificial Sequence
  Description of Artificial Sequence: Synthetic oligonucleotide
  Sense Strand Starting at position 806 of SEQ ID NO: 315753
auaaucaucguggaagcuu

SEQ ID NO: 382084 - RNA, 19 nt, Artificial Sequence
  Description of Artificial Sequence: Synthetic oligonucleotide
  Antisense Strand to SEQ ID NO: 382083
aagcuuccacgaugauuau

SEQ ID NO: 382085 - RNA, 19 nt, Artificial Sequence
  Description of Artificial Sequence: Synthetic oligonucleotide
  Sense Strand Starting at position 806 of SEQ ID NO: 315914
cagggacuguuauucguuu

SEQ ID NO: 382086 - RNA, 19 nt, Artificial Sequence
  Description of Artificial Sequence: Synthetic oligonucleotide
  Antisense Strand to SEQ ID NO: 382085
aaacgaauaacagucccug

SEQ ID NO: 382087 - RNA, 19 nt, Artificial Sequence
  Description of Artificial Sequence: Synthetic oligonucleotide
  Sense Strand Starting at position 806 of SEQ ID NO: 316040
agugauuuaucccuucguu

SEQ ID NO: 382088 - RNA, 19 nt, Artificial Sequence
  Description of Artificial Sequence: Synthetic oligonucleotide
  Antisense Strand to SEQ ID NO: 382087
aacgaagggauaaaucacu

SEQ ID NO: 382089 - RNA, 19 nt, Artificial Sequence
  Description of Artificial Sequence: Synthetic oligonucleotide
  Sense Strand Starting at position 806 of SEQ ID NO: 316097
caaagagauugugaggaua

SEQ ID NO: 382090 - RNA, 19 nt, Artificial Sequence
  Description of Artificial Sequence: Synthetic oligonucleotide
  Antisense Strand to SEQ ID NO: 382089
uauccucacaaucucuuug

SEQ ID NO: 382091 - RNA, 19 nt, Artificial Sequence
  Description of Artificial Sequence: Synthetic oligonucleotide
  Sense Strand Starting at position 806 of SEQ ID NO: 316290
ccaccaaagcagugugauu

SEQ ID NO: 382092 - RNA, 19 nt, Artificial Sequence
  Description of Artificial Sequence: Synthetic oligonucleotide
  Antisense Strand to SEQ ID NO: 382091
aaucacacugcuuuggugg

SEQ ID NO: 382093 - RNA, 19 nt, Artificial Sequence
  Description of Artificial Sequence: Synthetic oligonucleotide
  Sense Strand Starting at position 806 of SEQ ID NO: 316295
aaagcagugugauucuuua

SEQ ID NO: 382094 - RNA, 19 nt, Artificial Sequence
  Description of Artificial Sequence: Synthetic oligonucleotide
  Antisense Strand to SEQ ID NO: 382093
uaaagaaucacacugcuuu

SEQ ID NO: 382095 - RNA, 19 nt, Artificial Sequence
  Description of Artificial Sequence: Synthetic oligonucleotide
  Sense Strand Starting at position 806 of SEQ ID NO: 316383
gcacaaaugcugcauaaau

SEQ ID NO: 382096 - RNA, 19 nt, Artificial Sequence
  Description of Artificial Sequence: Synthetic oligonucleotide
  Antisense Strand to SEQ ID NO: 382095
auuuaugcagcauuugugc

SEQ ID NO: 382097 - RNA, 19 nt, Artificial Sequence
  Description of Artificial Sequence: Synthetic oligonucleotide
  Sense Strand Starting at position 806 of SEQ ID NO: 317436
cugaguuuccugggagcau

SEQ ID NO: 382098 - RNA, 19 nt, Artificial Sequence
  Description of Artificial Sequence: Synthetic oligonucleotide
  Antisense Strand to SEQ ID NO: 382097
augcucccaggaaacucag

SEQ ID NO: 382099 - RNA, 19 nt, Artificial Sequence
  Description of Artificial Sequence: Synthetic oligonucleotide
  Sense Strand Starting at position 806 of SEQ ID NO: 317523
gucuuuccuguggagugau

SEQ ID NO: 382100 - RNA, 19 nt, Artificial Sequence
  Description of Artificial Sequence: Synthetic oligonucleotide
  Antisense Strand to SEQ ID NO: 382099
aucacuccacaggaaagac

SEQ ID NO: 382101 - RNA, 19 nt, Artificial Sequence
  Description of Artificial Sequence: Synthetic oligonucleotide
  Sense Strand Starting at position 806 of SEQ ID NO: 317526
uuuccuguggagugaugga

SEQ ID NO: 382102 - RNA, 19 nt, Artificial Sequence
  Description of Artificial Sequence: Synthetic oligonucleotide
  Antisense Strand to SEQ ID NO: 382101
uccaucacuccacaggaaa

SEQ ID NO: 382103 - RNA, 19 nt, Artificial Sequence
  Description of Artificial Sequence: Synthetic oligonucleotide
  Sense Strand Starting at position 806 of SEQ ID NO: 317546
uuuauugugcccugaacca

SEQ ID NO: 382104 - RNA, 19 nt, Artificial Sequence
  Description of Artificial Sequence: Synthetic oligonucleotide
  Antisense Strand to SEQ ID NO: 382103
ugguucagggcacaauaaa

SEQ ID NO: 382105 - RNA, 19 nt, Artificial Sequence
  Description of Artificial Sequence: Synthetic oligonucleotide
  Sense Strand Starting at position 806 of SEQ ID NO: 317568
aaaugcgauuugccaagua

SEQ ID NO: 382106 - RNA, 19 nt, Artificial Sequence
  Description of Artificial Sequence: Synthetic oligonucleotide
  Antisense Strand to SEQ ID NO: 382105
uacuuggcaaaucgcauuu

SEQ ID NO: 382107 - RNA, 19 nt, Artificial Sequence
  Description of Artificial Sequence: Synthetic oligonucleotide
  Sense Strand Starting at position 806 of SEQ ID NO: 317581
caaguauaagcacggauau

SEQ ID NO: 382108 - RNA, 19 nt, Artificial Sequence
  Description of Artificial Sequence: Synthetic oligonucleotide
  Antisense Strand to SEQ ID NO: 382107
auauccgugcuuauacuug

SEQ ID NO: 382109 - RNA, 19 nt, Artificial Sequence
  Description of Artificial Sequence: Synthetic oligonucleotide
  Sense Strand Starting at position 806 of SEQ ID NO: 317582
aaguauaagcacggauaua

SEQ ID NO: 382110 - RNA, 19 nt, Artificial Sequence
  Description of Artificial Sequence: Synthetic oligonucleotide
  Antisense Strand to SEQ ID NO: 382109
uauauccgugcuuauacuu

SEQ ID NO: 382111 - RNA, 19 nt, Artificial Sequence
  Description of Artificial Sequence: Synthetic oligonucleotide
  Sense Strand Starting at position 806 of SEQ ID NO: 317622
uugcuuugacauuagucaa

SEQ ID NO: 382112 - RNA, 19 nt, Artificial Sequence
  Description of Artificial Sequence: Synthetic oligonucleotide
  Antisense Strand to SEQ ID NO: 382111
uugacuaaugucaaagcaa

SEQ ID NO: 382113 - RNA, 19 nt, Artificial Sequence
  Description of Artificial Sequence: Synthetic oligonucleotide
  Sense Strand Starting at position 806 of SEQ ID NO: 317643
acuucuacucgccaguaaa

SEQ ID NO: 382114 - RNA, 19 nt, Artificial Sequence
  Description of Artificial Sequence: Synthetic oligonucleotide
  Antisense Strand to SEQ ID NO: 382113
uuuacuggcgaguagaagu

SEQ ID NO: 382115 - RNA, 19 nt, Artificial Sequence
  Description of Artificial Sequence: Synthetic oligonucleotide
  Sense Strand Starting at position 806 of SEQ ID NO: 317740
ccaauucuggguuauccua

SEQ ID NO: 382116 - RNA, 19 nt, Artificial Sequence
  Description of Artificial Sequence: Synthetic oligonucleotide
  Antisense Strand to SEQ ID NO: 382115
uaggauaacccagaauugg

SEQ ID NO: 382117 - RNA, 19 nt, Artificial Sequence
  Description of Artificial Sequence: Synthetic oligonucleotide
  Sense Strand Starting at position 806 of SEQ ID NO: 318063
ggcaaccagauccgugaau

SEQ ID NO: 382118 - RNA, 19 nt, Artificial Sequence
  Description of Artificial Sequence: Synthetic oligonucleotide
  Antisense Strand to SEQ ID NO: 382117
auucacggaucugguugcc

SEQ ID NO: 382119 - RNA, 19 nt, Artificial Sequence
  Description of Artificial Sequence: Synthetic oligonucleotide
  Sense Strand Starting at position 806 of SEQ ID NO: 318069
cagauccgugaaugggaua

SEQ ID NO: 382120 - RNA, 19 nt, Artificial Sequence
  Description of Artificial Sequence: Synthetic oligonucleotide
  Antisense Strand to SEQ ID NO: 382119
uaucccauucacggaucug

SEQ ID NO: 382121 - RNA, 19 nt, Artificial Sequence
  Description of Artificial Sequence: Synthetic oligonucleotide
  Sense Strand Starting at position 806 of SEQ ID NO: 318107
gguggaagaucucuucugu

SEQ ID NO: 382122 - RNA, 19 nt, Artificial Sequence
  Description of Artificial Sequence: Synthetic oligonucleotide
  Antisense Strand to SEQ ID NO: 382121
acagaagagaucuuccacc

SEQ ID NO: 382123 - RNA, 19 nt, Artificial Sequence
  Description of Artificial Sequence: Synthetic oligonucleotide
  Sense Strand Starting at position 806 of SEQ ID NO: 318113
agaucucuucuguaguaau

SEQ ID NO: 382124 - RNA, 19 nt, Artificial Sequence
  Description of Artificial Sequence: Synthetic oligonucleotide
  Antisense Strand to SEQ ID NO: 382123
auuacuacagaagagaucu

SEQ ID NO: 382125 - RNA, 19 nt, Artificial Sequence
  Description of Artificial Sequence: Synthetic oligonucleotide
  Sense Strand Starting at position 806 of SEQ ID NO: 318572
acuccuucuuccucgagga

SEQ ID NO: 382126 - RNA, 19 nt, Artificial Sequence
  Description of Artificial Sequence: Synthetic oligonucleotide
  Antisense Strand to SEQ ID NO: 382125
uccucgaggaagaaggagu

SEQ ID NO: 382127 - RNA, 19 nt, Artificial Sequence
  Description of Artificial Sequence: Synthetic oligonucleotide
  Sense Strand Starting at position 806 of SEQ ID NO: 318573
cuccuucuuccucgaggaa

SEQ ID NO: 382128 - RNA, 19 nt, Artificial Sequence
  Description of Artificial Sequence: Synthetic oligonucleotide
  Antisense Strand to SEQ ID NO: 382127
uuccucgaggaagaaggag

SEQ ID NO: 382129 - RNA, 19 nt, Artificial Sequence
  Description of Artificial Sequence: Synthetic oligonucleotide
  Sense Strand Starting at position 806 of SEQ ID NO: 318574
uccuucuuccucgaggaaa

SEQ ID NO: 382130 - RNA, 19 nt, Artificial Sequence
  Description of Artificial Sequence: Synthetic oligonucleotide
  Antisense Strand to SEQ ID NO: 382129
uuuccucgaggaagaagga

SEQ ID NO: 382131 - RNA, 19 nt, Artificial Sequence
  Description of Artificial Sequence: Synthetic oligonucleotide
  Sense Strand Starting at position 806 of SEQ ID NO: 318576
cuucuuccucgaggaaaua

SEQ ID NO: 382132 - RNA, 19 nt, Artificial Sequence
  Description of Artificial Sequence: Synthetic oligonucleotide
  Antisense Strand to SEQ ID NO: 382131
uauuuccucgaggaagaag

SEQ ID NO: 382133 - RNA, 19 nt, Artificial Sequence
  Description of Artificial Sequence: Synthetic oligonucleotide
  Sense Strand Starting at position 806 of SEQ ID NO: 318665
cuagacuucugcucugauu

SEQ ID NO: 382134 - RNA, 19 nt, Artificial Sequence
  Description of Artificial Sequence: Synthetic oligonucleotide
  Antisense Strand to SEQ ID NO: 382133
aaucagagcagaagucuag

SEQ ID NO: 382135 - RNA, 19 nt, Artificial Sequence
  Description of Artificial Sequence: Synthetic oligonucleotide
  Sense Strand Starting at position 806 of SEQ ID NO: 318667
agacuucugcucugauuau

SEQ ID NO: 382136 - RNA, 19 nt, Artificial Sequence
  Description of Artificial Sequence: Synthetic oligonucleotide
  Antisense Strand to SEQ ID NO: 382135
auaaucagagcagaagucu

SEQ ID NO: 382137 - RNA, 19 nt, Artificial Sequence
  Description of Artificial Sequence: Synthetic oligonucleotide
  Sense Strand Starting at position 806 of SEQ ID NO: 318760
agaugacuucuaggucaug

SEQ ID NO: 382138 - RNA, 19 nt, Artificial Sequence
  Description of Artificial Sequence: Synthetic oligonucleotide
  Antisense Strand to SEQ ID NO: 382137
caugaccuagaagucaucu

SEQ ID NO: 382139 - RNA, 19 nt, Artificial Sequence
  Description of Artificial Sequence: Synthetic oligonucleotide
  Sense Strand Starting at position 806 of SEQ ID NO: 318814
acucauaacccugaggcau

SEQ ID NO: 382140 - RNA, 19 nt, Artificial Sequence
  Description of Artificial Sequence: Synthetic oligonucleotide
  Antisense Strand to SEQ ID NO: 382139
augccucaggguuaugagu

SEQ ID NO: 382141 - RNA, 19 nt, Artificial Sequence
  Description of Artificial Sequence: Synthetic oligonucleotide
  Sense Strand Starting at position 806 of SEQ ID NO: 319012
acacacuaguguuuauuaa

SEQ ID NO: 382142 - RNA, 19 nt, Artificial Sequence
  Description of Artificial Sequence: Synthetic oligonucleotide
  Antisense Strand to SEQ ID NO: 382141
uuaauaaacacuagugugu

SEQ ID NO: 382143 - RNA, 19 nt, Artificial Sequence
  Description of Artificial Sequence: Synthetic oligonucleotide
  Sense Strand Starting at position 806 of SEQ ID NO: 319125
gcacaagcacauuaaguau

SEQ ID NO: 382144 - RNA, 19 nt, Artificial Sequence
  Description of Artificial Sequence: Synthetic oligonucleotide
  Antisense Strand to SEQ ID NO: 382143
auacuuaaugugcuugugc

SEQ ID NO: 382145 - RNA, 19 nt, Artificial Sequence
  Description of Artificial Sequence: Synthetic oligonucleotide
  Sense Strand Starting at position 807 of SEQ ID NO: 315435
aggagagguaccugcuguu

SEQ ID NO: 382146 - RNA, 19 nt, Artificial Sequence
  Description of Artificial Sequence: Synthetic oligonucleotide
  Antisense Strand to SEQ ID NO: 382145
aacagcagguaccucuccu

SEQ ID NO: 382147 - RNA, 19 nt, Artificial Sequence
  Description of Artificial Sequence: Synthetic oligonucleotide
  Sense Strand Starting at position 807 of SEQ ID NO: 315479
gucagauccuagguaccaa

SEQ ID NO: 382148 - RNA, 19 nt, Artificial Sequence
  Description of Artificial Sequence: Synthetic oligonucleotide
  Antisense Strand to SEQ ID NO: 382147
uugguaccuaggaucugac

SEQ ID NO: 382149 - RNA, 19 nt, Artificial Sequence
  Description of Artificial Sequence: Synthetic oligonucleotide
  Sense Strand Starting at position 807 of SEQ ID NO: 315523
gagagucagcaccguuaga

SEQ ID NO: 382150 - RNA, 19 nt, Artificial Sequence
  Description of Artificial Sequence: Synthetic oligonucleotide
  Antisense Strand to SEQ ID NO: 382149
ucuaacggugcugacucuc

SEQ ID NO: 382151 - RNA, 19 nt, Artificial Sequence
  Description of Artificial Sequence: Synthetic oligonucleotide
  Sense Strand Starting at position 807 of SEQ ID NO: 315576
ucuugugagggcugaguua

SEQ ID NO: 382152 - RNA, 19 nt, Artificial Sequence
  Description of Artificial Sequence: Synthetic oligonucleotide
  Antisense Strand to SEQ ID NO: 382151
uaacucagcccucacaaga

SEQ ID NO: 382153 - RNA, 19 nt, Artificial Sequence
  Description of Artificial Sequence: Synthetic oligonucleotide
  Sense Strand Starting at position 807 of SEQ ID NO: 315689
agcagaugcuuuguauaua

SEQ ID NO: 382154 - RNA, 19 nt, Artificial Sequence
  Description of Artificial Sequence: Synthetic oligonucleotide
  Antisense Strand to SEQ ID NO: 382153
uauauacaaagcaucugcu

SEQ ID NO: 382155 - RNA, 19 nt, Artificial Sequence
  Description of Artificial Sequence: Synthetic oligonucleotide
  Sense Strand Starting at position 807 of SEQ ID NO: 315783
uggugauuagcaggauaau

SEQ ID NO: 382156 - RNA, 19 nt, Artificial Sequence
  Description of Artificial Sequence: Synthetic oligonucleotide
  Antisense Strand to SEQ ID NO: 382155
auuauccugcuaaucacca

SEQ ID NO: 382157 - RNA, 19 nt, Artificial Sequence
  Description of Artificial Sequence: Synthetic oligonucleotide
  Sense Strand Starting at position 807 of SEQ ID NO: 315856
guauuaguuccuuaaaucc

SEQ ID NO: 382158 - RNA, 19 nt, Artificial Sequence
  Description of Artificial Sequence: Synthetic oligonucleotide
  Antisense Strand to SEQ ID NO: 382157
ggauuuaaggaacuaauac

SEQ ID NO: 382159 - RNA, 19 nt, Artificial Sequence
  Description of Artificial Sequence: Synthetic oligonucleotide
  Sense Strand Starting at position 807 of SEQ ID NO: 315929
gucauagagaagugacuua

SEQ ID NO: 382160 - RNA, 19 nt, Artificial Sequence
  Description of Artificial Sequence: Synthetic oligonucleotide
  Antisense Strand to SEQ ID NO: 382159
uaagucacuucucuaugac

SEQ ID NO: 382161 - RNA, 19 nt, Artificial Sequence
  Description of Artificial Sequence: Synthetic oligonucleotide
  Sense Strand Starting at position 807 of SEQ ID NO: 315939
agugacuuauguccaagaa

SEQ ID NO: 382162 - RNA, 19 nt, Artificial Sequence
  Description of Artificial Sequence: Synthetic oligonucleotide
  Antisense Strand to SEQ ID NO: 382161
uucuuggacauaagucacu

SEQ ID NO: 382163 - RNA, 19 nt, Artificial Sequence
  Description of Artificial Sequence: Synthetic oligonucleotide
  Sense Strand Starting at position 807 of SEQ ID NO: 315940
gugacuuauguccaagaac

SEQ ID NO: 382164 - RNA, 19 nt, Artificial Sequence
  Description of Artificial Sequence: Synthetic oligonucleotide
  Antisense Strand to SEQ ID NO: 382163
guucuuggacauaagucac

SEQ ID NO: 382165 - RNA, 19 nt, Artificial Sequence
  Description of Artificial Sequence: Synthetic oligonucleotide
  Sense Strand Starting at position 807 of SEQ ID NO: 315978
cuguacucaccuuggaauu

SEQ ID NO: 382166 - RNA, 19 nt, Artificial Sequence
  Description of Artificial Sequence: Synthetic oligonucleotide
  Antisense Strand to SEQ ID NO: 382165
aauuccaaggugaguacag

SEQ ID NO: 382167 - RNA, 19 nt, Artificial Sequence
  Description of Artificial Sequence: Synthetic oligonucleotide
  Sense Strand Starting at position 807 of SEQ ID NO: 316308
acaauagcuccauguacga

SEQ ID NO: 382168 - RNA, 19 nt, Artificial Sequence
  Description of Artificial Sequence: Synthetic oligonucleotide
  Antisense Strand to SEQ ID NO: 382167
ucguacauggagcuauugu

SEQ ID NO: 382169 - RNA, 19 nt, Artificial Sequence
  Description of Artificial Sequence: Synthetic oligonucleotide
  Sense Strand Starting at position 807 of SEQ ID NO: 316565
accgcuggauccuuacaau

SEQ ID NO: 382170 - RNA, 19 nt, Artificial Sequence
  Description of Artificial Sequence: Synthetic oligonucleotide
  Antisense Strand to SEQ ID NO: 382169
auuguaaggauccagcggu

SEQ ID NO: 382171 - RNA, 19 nt, Artificial Sequence
  Description of Artificial Sequence: Synthetic oligonucleotide
  Sense Strand Starting at position 807 of SEQ ID NO: 316744
cucagucacucaccggaaa

SEQ ID NO: 382172 - RNA, 19 nt, Artificial Sequence
  Description of Artificial Sequence: Synthetic oligonucleotide
  Antisense Strand to SEQ ID NO: 382171
uuuccggugagugacugag

SEQ ID NO: 382173 - RNA, 19 nt, Artificial Sequence
  Description of Artificial Sequence: Synthetic oligonucleotide
  Sense Strand Starting at position 807 of SEQ ID NO: 317289
ggaggcgccaaugagaaau

SEQ ID NO: 382174 - RNA, 19 nt, Artificial Sequence
  Description of Artificial Sequence: Synthetic oligonucleotide
  Antisense Strand to SEQ ID NO: 382173
auuucucauuggcgccucc

SEQ ID NO: 382175 - RNA, 19 nt, Artificial Sequence
  Description of Artificial Sequence: Synthetic oligonucleotide
  Sense Strand Starting at position 807 of SEQ ID NO: 317408
gcgcuaacgaguuccaucu

SEQ ID NO: 382176 - RNA, 19 nt, Artificial Sequence
  Description of Artificial Sequence: Synthetic oligonucleotide
  Antisense Strand to SEQ ID NO: 382175
agauggaacucguuagcgc

SEQ ID NO: 382177 - RNA, 19 nt, Artificial Sequence
  Description of Artificial Sequence: Synthetic oligonucleotide
  Sense Strand Starting at position 807 of SEQ ID NO: 317610
cgggaagugucuccagagu

SEQ ID NO: 382178 - RNA, 19 nt, Artificial Sequence
  Description of Artificial Sequence: Synthetic oligonucleotide
  Antisense Strand to SEQ ID NO: 382177
acucuggagacacuucccg

SEQ ID NO: 382179 - RNA, 19 nt, Artificial Sequence
  Description of Artificial Sequence: Synthetic oligonucleotide
  Sense Strand Starting at position 807 of SEQ ID NO: 317616
gugucuccagaguauuauu

SEQ ID NO: 382180 - RNA, 19 nt, Artificial Sequence
  Description of Artificial Sequence: Synthetic oligonucleotide
  Antisense Strand to SEQ ID NO: 382179
aauaauacucuggagacac

SEQ ID NO: 382181 - RNA, 19 nt, Artificial Sequence
  Description of Artificial Sequence: Synthetic oligonucleotide
  Sense Strand Starting at position 807 of SEQ ID NO: 317621
uccagaguauuauucucuu

SEQ ID NO: 382182 - RNA, 19 nt, Artificial Sequence
  Description of Artificial Sequence: Synthetic oligonucleotide
  Antisense Strand to SEQ ID NO: 382181
aagagaauaauacucugga

SEQ ID NO: 382183 - RNA, 19 nt, Artificial Sequence
  Description of Artificial Sequence: Synthetic oligonucleotide
  Sense Strand Starting at position 807 of SEQ ID NO: 317624
agaguauuauucucuucug

SEQ ID NO: 382184 - RNA, 19 nt, Artificial Sequence
  Description of Artificial Sequence: Synthetic oligonucleotide
  Antisense Strand to SEQ ID NO: 382183
cagaagagaauaauacucu

SEQ ID NO: 382185 - RNA, 19 nt, Artificial Sequence
  Description of Artificial Sequence: Synthetic oligonucleotide
  Sense Strand Starting at position 807 of SEQ ID NO: 317790
ucaugcuuuccucggaaug

SEQ ID NO: 382186 - RNA, 19 nt, Artificial Sequence
  Description of Artificial Sequence: Synthetic oligonucleotide
  Antisense Strand to SEQ ID NO: 382185
cauuccgaggaaagcauga

SEQ ID NO: 382187 - RNA, 19 nt, Artificial Sequence
  Description of Artificial Sequence: Synthetic oligonucleotide
  Sense Strand Starting at position 807 of SEQ ID NO: 317985
gaccuuuaucugggccauu

SEQ ID NO: 382188 - RNA, 19 nt, Artificial Sequence
  Description of Artificial Sequence: Synthetic oligonucleotide
  Antisense Strand to SEQ ID NO: 382187
aauggcccagauaaagguc

SEQ ID NO: 382189 - RNA, 19 nt, Artificial Sequence
  Description of Artificial Sequence: Synthetic oligonucleotide
  Sense Strand Starting at position 807 of SEQ ID NO: 318033
gcuguaucuuaacuaucag

SEQ ID NO: 382190 - RNA, 19 nt, Artificial Sequence
  Description of Artificial Sequence: Synthetic oligonucleotide
  Antisense Strand to SEQ ID NO: 382189
cugauaguuaagauacagc

SEQ ID NO: 382191 - RNA, 19 nt, Artificial Sequence
  Description of Artificial Sequence: Synthetic oligonucleotide
  Sense Strand Starting at position 807 of SEQ ID NO: 318042
uaacuaucaggcugcaagu

SEQ ID NO: 382192 - RNA, 19 nt, Artificial Sequence
  Description of Artificial Sequence: Synthetic oligonucleotide
  Antisense Strand to SEQ ID NO: 382191
acuugcagccugauaguua

SEQ ID NO: 382193 - RNA, 19 nt, Artificial Sequence
  Description of Artificial Sequence: Synthetic oligonucleotide
  Sense Strand Starting at position 807 of SEQ ID NO: 318296
gccgccucggccucuuaaa

SEQ ID NO: 382194 - RNA, 19 nt, Artificial Sequence
  Description of Artificial Sequence: Synthetic oligonucleotide
  Antisense Strand to SEQ ID NO: 382193
uuuaagaggccgaggcggc

SEQ ID NO: 382195 - RNA, 19 nt, Artificial Sequence
  Description of Artificial Sequence: Synthetic oligonucleotide
  Sense Strand Starting at position 807 of SEQ ID NO: 318420
cggaguguaccgucagcau

SEQ ID NO: 382196 - RNA, 19 nt, Artificial Sequence
  Description of Artificial Sequence: Synthetic oligonucleotide
  Antisense Strand to SEQ ID NO: 382195
augcugacgguacacuccg

SEQ ID NO: 382197 - RNA, 19 nt, Artificial Sequence
  Description of Artificial Sequence: Synthetic oligonucleotide
  Sense Strand Starting at position 807 of SEQ ID NO: 318583
caauaaaugucgguggagu

SEQ ID NO: 382198 - RNA, 19 nt, Artificial Sequence
  Description of Artificial Sequence: Synthetic oligonucleotide
  Antisense Strand to SEQ ID NO: 382197
acuccaccgacauuuauug

SEQ ID NO: 382199 - RNA, 19 nt, Artificial Sequence
  Description of Artificial Sequence: Synthetic oligonucleotide
  Sense Strand Starting at position 807 of SEQ ID NO: 318584
aauaaaugucgguggaguc

SEQ ID NO: 382200 - RNA, 19 nt, Artificial Sequence
  Description of Artificial Sequence: Synthetic oligonucleotide
  Antisense Strand to SEQ ID NO: 382199
gacuccaccgacauuuauu

SEQ ID NO: 382201 - RNA, 19 nt, Artificial Sequence
  Description of Artificial Sequence: Synthetic oligonucleotide
  Sense Strand Starting at position 807 of SEQ ID NO: 318682
gaaggucucagcuguauug

SEQ ID NO: 382202 - RNA, 19 nt, Artificial Sequence
  Description of Artificial Sequence: Synthetic oligonucleotide
  Antisense Strand to SEQ ID NO: 382201
caauacagcugagaccuuc

SEQ ID NO: 382203 - RNA, 19 nt, Artificial Sequence
  Description of Artificial Sequence: Synthetic oligonucleotide
  Sense Strand Starting at position 807 of SEQ ID NO: 318684
aggucucagcuguauugau

SEQ ID NO: 382204 - RNA, 19 nt, Artificial Sequence
  Description of Artificial Sequence: Synthetic oligonucleotide
  Antisense Strand to SEQ ID NO: 382203
aucaauacagcugagaccu

SEQ ID NO: 382205 - RNA, 19 nt, Artificial Sequence
  Description of Artificial Sequence: Synthetic oligonucleotide
  Sense Strand Starting at position 807 of SEQ ID NO: 318694
uguauugaugcugaaacac

SEQ ID NO: 382206 - RNA, 19 nt, Artificial Sequence
  Description of Artificial Sequence: Synthetic oligonucleotide
  Antisense Strand to SEQ ID NO: 382205
guguuucagcaucaauaca

SEQ ID NO: 382207 - RNA, 19 nt, Artificial Sequence
  Description of Artificial Sequence: Synthetic oligonucleotide
  Sense Strand Starting at position 807 of SEQ ID NO: 318754
ccaaguaggaaucgauagu

SEQ ID NO: 382208 - RNA, 19 nt, Artificial Sequence
  Description of Artificial Sequence: Synthetic oligonucleotide
  Antisense Strand to SEQ ID NO: 382207
acuaucgauuccuacuugg

SEQ ID NO: 382209 - RNA, 19 nt, Artificial Sequence
  Description of Artificial Sequence: Synthetic oligonucleotide
  Sense Strand Starting at position 807 of SEQ ID NO: 318792
ucagcauacugguugaaga

SEQ ID NO: 382210 - RNA, 19 nt, Artificial Sequence
  Description of Artificial Sequence: Synthetic oligonucleotide
  Antisense Strand to SEQ ID NO: 382209
ucuucaaccaguaugcuga

SEQ ID NO: 382211 - RNA, 19 nt, Artificial Sequence
  Description of Artificial Sequence: Synthetic oligonucleotide
  Sense Strand Starting at position 807 of SEQ ID NO: 318856
uuccuaguuguaggaacuu

SEQ ID NO: 382212 - RNA, 19 nt, Artificial Sequence
  Description of Artificial Sequence: Synthetic oligonucleotide
  Antisense Strand to SEQ ID NO: 382211
aaguuccuacaacuaggaa

SEQ ID NO: 382213 - RNA, 19 nt, Artificial Sequence
  Description of Artificial Sequence: Synthetic oligonucleotide
  Sense Strand Starting at position 807 of SEQ ID NO: 318865
guaggaacuuaggcaagau

SEQ ID NO: 382214 - RNA, 19 nt, Artificial Sequence
  Description of Artificial Sequence: Synthetic oligonucleotide
  Antisense Strand to SEQ ID NO: 382213
aucuugccuaaguuccuac

SEQ ID NO: 382215 - RNA, 19 nt, Artificial Sequence
  Description of Artificial Sequence: Synthetic oligonucleotide
  Sense Strand Starting at position 807 of SEQ ID NO: 318900
agcaucuuuguggagauaa

SEQ ID NO: 382216 - RNA, 19 nt, Artificial Sequence
  Description of Artificial Sequence: Synthetic oligonucleotide
  Antisense Strand to SEQ ID NO: 382215
uuaucuccacaaagaugcu

SEQ ID NO: 382217 - RNA, 19 nt, Artificial Sequence
  Description of Artificial Sequence: Synthetic oligonucleotide
  Sense Strand Starting at position 807 of SEQ ID NO: 318937
acccuauaguuauugcaag

SEQ ID NO: 382218 - RNA, 19 nt, Artificial Sequence
  Description of Artificial Sequence: Synthetic oligonucleotide
  Antisense Strand to SEQ ID NO: 382217
cuugcaauaacuauagggu

SEQ ID NO: 382219 - RNA, 19 nt, Artificial Sequence
  Description of Artificial Sequence: Synthetic oligonucleotide
  Sense Strand Starting at position 807 of SEQ ID NO: 318943
uaguuauugcaaggauuac

SEQ ID NO: 382220 - RNA, 19 nt, Artificial Sequence
  Description of Artificial Sequence: Synthetic oligonucleotide
  Antisense Strand to SEQ ID NO: 382219
guaauccuugcaauaacua

SEQ ID NO: 382221 - RNA, 19 nt, Artificial Sequence
  Description of Artificial Sequence: Synthetic oligonucleotide
  Sense Strand Starting at position 807 of SEQ ID NO: 318961
cgcaaagcugaaugucuaa

SEQ ID NO: 382222 - RNA, 19 nt, Artificial Sequence
  Description of Artificial Sequence: Synthetic oligonucleotide
  Antisense Strand to SEQ ID NO: 382221
uuagacauucagcuuugcg

SEQ ID NO: 382223 - RNA, 19 nt, Artificial Sequence
  Description of Artificial Sequence: Synthetic oligonucleotide
  Sense Strand Starting at position 807 of SEQ ID NO: 319084
gggcccaauuauguaucau

SEQ ID NO: 382224 - RNA, 19 nt, Artificial Sequence
  Description of Artificial Sequence: Synthetic oligonucleotide
  Antisense Strand to SEQ ID NO: 382223
augauacauaauugggccc

SEQ ID NO: 382225 - RNA, 19 nt, Artificial Sequence
  Description of Artificial Sequence: Synthetic oligonucleotide
  Sense Strand Starting at position 808 of SEQ ID NO: 315238
aucucuacuucuuuaggua

SEQ ID NO: 382226 - RNA, 19 nt, Artificial Sequence
  Description of Artificial Sequence: Synthetic oligonucleotide
  Antisense Strand to SEQ ID NO: 382225
uaccuaaagaaguagagau

SEQ ID NO: 382227 - RNA, 19 nt, Artificial Sequence
  Description of Artificial Sequence: Synthetic oligonucleotide
  Sense Strand Starting at position 808 of SEQ ID NO: 315265
gugccaucaccaggagaca

SEQ ID NO: 382228 - RNA, 19 nt, Artificial Sequence
  Description of Artificial Sequence: Synthetic oligonucleotide
  Antisense Strand to SEQ ID NO: 382227
ugucuccuggugauggcac

SEQ ID NO: 382229 - RNA, 19 nt, Artificial Sequence
  Description of Artificial Sequence: Synthetic oligonucleotide
  Sense Strand Starting at position 808 of SEQ ID NO: 315478
ucagauauguuuccucacu

SEQ ID NO: 382230 - RNA, 19 nt, Artificial Sequence
  Description of Artificial Sequence: Synthetic oligonucleotide
  Antisense Strand to SEQ ID NO: 382229
agugaggaaacauaucuga

SEQ ID NO: 382231 - RNA, 19 nt, Artificial Sequence
  Description of Artificial Sequence: Synthetic oligonucleotide
  Sense Strand Starting at position 808 of SEQ ID NO: 315513
aaaugcaaggguuguaaau

SEQ ID NO: 382232 - RNA, 19 nt, Artificial Sequence
  Description of Artificial Sequence: Synthetic oligonucleotide
  Antisense Strand to SEQ ID NO: 382231
auuuacaacccuugcauuu

SEQ ID NO: 382233 - RNA, 19 nt, Artificial Sequence
  Description of Artificial Sequence: Synthetic oligonucleotide
  Sense Strand Starting at position 808 of SEQ ID NO: 315522
gguuguaaauaacuuacuu

SEQ ID NO: 382234 - RNA, 19 nt, Artificial Sequence
  Description of Artificial Sequence: Synthetic oligonucleotide
  Antisense Strand to SEQ ID NO: 382233
aaguaaguuauuuacaacc

SEQ ID NO: 382235 - RNA, 19 nt, Artificial Sequence
  Description of Artificial Sequence: Synthetic oligonucleotide
  Sense Strand Starting at position 808 of SEQ ID NO: 315553
cugugaacuuacucaaaga

SEQ ID NO: 382236 - RNA, 19 nt, Artificial Sequence
  Description of Artificial Sequence: Synthetic oligonucleotide
  Antisense Strand to SEQ ID NO: 382235
ucuuugaguaaguucacag

SEQ ID NO: 382237 - RNA, 19 nt, Artificial Sequence
  Description of Artificial Sequence: Synthetic oligonucleotide
  Sense Strand Starting at position 808 of SEQ ID NO: 316156
ugagcuaagcuugaaggua

SEQ ID NO: 382238 - RNA, 19 nt, Artificial Sequence
  Description of Artificial Sequence: Synthetic oligonucleotide
  Antisense Strand to SEQ ID NO: 382237
uaccuucaagcuuagcuca

SEQ ID NO: 382239 - RNA, 19 nt, Artificial Sequence
  Description of Artificial Sequence: Synthetic oligonucleotide
  Sense Strand Starting at position 808 of SEQ ID NO: 316164
gcuugaagguaucuaauga

SEQ ID NO: 382240 - RNA, 19 nt, Artificial Sequence
  Description of Artificial Sequence: Synthetic oligonucleotide
  Antisense Strand to SEQ ID NO: 382239
ucauuagauaccuucaagc

SEQ ID NO: 382241 - RNA, 19 nt, Artificial Sequence
  Description of Artificial Sequence: Synthetic oligonucleotide
  Sense Strand Starting at position 808 of SEQ ID NO: 316233
uauaguaacgcacagaaau

SEQ ID NO: 382242 - RNA, 19 nt, Artificial Sequence
  Description of Artificial Sequence: Synthetic oligonucleotide
  Antisense Strand to SEQ ID NO: 382241
auuucugugcguuacuaua

SEQ ID NO: 382243 - RNA, 19 nt, Artificial Sequence
  Description of Artificial Sequence: Synthetic oligonucleotide
  Sense Strand Starting at position 808 of SEQ ID NO: 316296
ggcaacaaugauugagauu

SEQ ID NO: 382244 - RNA, 19 nt, Artificial Sequence
  Description of Artificial Sequence: Synthetic oligonucleotide
  Antisense Strand to SEQ ID NO: 382243
aaucucaaucauuguugcc

SEQ ID NO: 382245 - RNA, 19 nt, Artificial Sequence
  Description of Artificial Sequence: Synthetic oligonucleotide
  Sense Strand Starting at position 808 of SEQ ID NO: 316502
agcccagguaccugaagau

SEQ ID NO: 382246 - RNA, 19 nt, Artificial Sequence
  Description of Artificial Sequence: Synthetic oligonucleotide
  Antisense Strand to SEQ ID NO: 382245
aucuucagguaccugggcu

SEQ ID NO: 382247 - RNA, 19 nt, Artificial Sequence
  Description of Artificial Sequence: Synthetic oligonucleotide
  Sense Strand Starting at position 808 of SEQ ID NO: 316726
uugagaggcguccagaauu

SEQ ID NO: 382248 - RNA, 19 nt, Artificial Sequence
  Description of Artificial Sequence: Synthetic oligonucleotide
  Antisense Strand to SEQ ID NO: 382247
aauucuggacgccucucaa

SEQ ID NO: 382249 - RNA, 19 nt, Artificial Sequence
  Description of Artificial Sequence: Synthetic oligonucleotide
  Sense Strand Starting at position 808 of SEQ ID NO: 316821
cauucuggguccucaagaa

SEQ ID NO: 382250 - RNA, 19 nt, Artificial Sequence
  Description of Artificial Sequence: Synthetic oligonucleotide
  Antisense Strand to SEQ ID NO: 382249
uucuugaggacccagaaug

SEQ ID NO: 382251 - RNA, 19 nt, Artificial Sequence
  Description of Artificial Sequence: Synthetic oligonucleotide
  Sense Strand Starting at position 808 of SEQ ID NO: 317324
uugcuuccgauuuggaauu

SEQ ID NO: 382252 - RNA, 19 nt, Artificial Sequence
  Description of Artificial Sequence: Synthetic oligonucleotide
  Antisense Strand to SEQ ID NO: 382251
aauuccaaaucggaagcaa

SEQ ID NO: 382253 - RNA, 19 nt, Artificial Sequence
  Description of Artificial Sequence: Synthetic oligonucleotide
  Sense Strand Starting at position 808 of SEQ ID NO: 317350
agccuugcagguuagagau

SEQ ID NO: 382254 - RNA, 19 nt, Artificial Sequence
  Description of Artificial Sequence: Synthetic oligonucleotide
  Antisense Strand to SEQ ID NO: 382253
aucucuaaccugcaaggcu

SEQ ID NO: 382255 - RNA, 19 nt, Artificial Sequence
  Description of Artificial Sequence: Synthetic oligonucleotide
  Sense Strand Starting at position 808 of SEQ ID NO: 317414
aaaggcguggaaugagaau

SEQ ID NO: 382256 - RNA, 19 nt, Artificial Sequence
  Description of Artificial Sequence: Synthetic oligonucleotide
  Antisense Strand to SEQ ID NO: 382255
auucucauuccacgccuuu

SEQ ID NO: 382257 - RNA, 19 nt, Artificial Sequence
  Description of Artificial Sequence: Synthetic oligonucleotide
  Sense Strand Starting at position 808 of SEQ ID NO: 317453
ccaugaauuuauuaagagu

SEQ ID NO: 382258 - RNA, 19 nt, Artificial Sequence
  Description of Artificial Sequence: Synthetic oligonucleotide
  Antisense Strand to SEQ ID NO: 382257
acucuuaauaaauucaugg

SEQ ID NO: 382259 - RNA, 19 nt, Artificial Sequence
  Description of Artificial Sequence: Synthetic oligonucleotide
  Sense Strand Starting at position 808 of SEQ ID NO: 317501
gagagugcaaggugaaaua

SEQ ID NO: 382260 - RNA, 19 nt, Artificial Sequence
  Description of Artificial Sequence: Synthetic oligonucleotide
  Antisense Strand to SEQ ID NO: 382259
uauuucaccuugcacucuc

SEQ ID NO: 382261 - RNA, 19 nt, Artificial Sequence
  Description of Artificial Sequence: Synthetic oligonucleotide
  Sense Strand Starting at position 808 of SEQ ID NO: 317519
acaguaauagcguacuaca

SEQ ID NO: 382262 - RNA, 19 nt, Artificial Sequence
  Description of Artificial Sequence: Synthetic oligonucleotide
  Antisense Strand to SEQ ID NO: 382261
uguaguacgcuauuacugu

SEQ ID NO: 382263 - RNA, 19 nt, Artificial Sequence
  Description of Artificial Sequence: Synthetic oligonucleotide
  Sense Strand Starting at position 808 of SEQ ID NO: 317572
ugggcaucuuuguuugaaa

SEQ ID NO: 382264 - RNA, 19 nt, Artificial Sequence
  Description of Artificial Sequence: Synthetic oligonucleotide
  Antisense Strand to SEQ ID NO: 382263
uuucaaacaaagaugccca

SEQ ID NO: 382265 - RNA, 19 nt, Artificial Sequence
  Description of Artificial Sequence: Synthetic oligonucleotide
  Sense Strand Starting at position 808 of SEQ ID NO: 317573
gggcaucuuuguuugaaag

SEQ ID NO: 382266 - RNA, 19 nt, Artificial Sequence
  Description of Artificial Sequence: Synthetic oligonucleotide
  Antisense Strand to SEQ ID NO: 382265
cuuucaaacaaagaugccc

SEQ ID NO: 382267 - RNA, 19 nt, Artificial Sequence
  Description of Artificial Sequence: Synthetic oligonucleotide
  Sense Strand Starting at position 808 of SEQ ID NO: 317610
gcaaucaugggaggugaga

SEQ ID NO: 382268 - RNA, 19 nt, Artificial Sequence
  Description of Artificial Sequence: Synthetic oligonucleotide
  Antisense Strand to SEQ ID NO: 382267
ucucaccucccaugauugc

SEQ ID NO: 382269 - RNA, 19 nt, Artificial Sequence
  Description of Artificial Sequence: Synthetic oligonucleotide
  Sense Strand Starting at position 808 of SEQ ID NO: 317650
uaggcuaagucccuuagaa

SEQ ID NO: 382270 - RNA, 19 nt, Artificial Sequence
  Description of Artificial Sequence: Synthetic oligonucleotide
  Antisense Strand to SEQ ID NO: 382269
uucuaagggacuuagccua

SEQ ID NO: 382271 - RNA, 19 nt, Artificial Sequence
  Description of Artificial Sequence: Synthetic oligonucleotide
  Sense Strand Starting at position 808 of SEQ ID NO: 317652
ggcuaagucccuuagaauc

SEQ ID NO: 382272 - RNA, 19 nt, Artificial Sequence
  Description of Artificial Sequence: Synthetic oligonucleotide
  Antisense Strand to SEQ ID NO: 382271
gauucuaagggacuuagcc

SEQ ID NO: 382273 - RNA, 19 nt, Artificial Sequence
  Description of Artificial Sequence: Synthetic oligonucleotide
  Sense Strand Starting at position 808 of SEQ ID NO: 317660
cccuuagaaucucugagga

SEQ ID NO: 382274 - RNA, 19 nt, Artificial Sequence
  Description of Artificial Sequence: Synthetic oligonucleotide
  Antisense Strand to SEQ ID NO: 382273
uccucagagauucuaaggg

SEQ ID NO: 382275 - RNA, 19 nt, Artificial Sequence
  Description of Artificial Sequence: Synthetic oligonucleotide
  Sense Strand Starting at position 808 of SEQ ID NO: 317711
caguaacggguuuggaaua

SEQ ID NO: 382276 - RNA, 19 nt, Artificial Sequence
  Description of Artificial Sequence: Synthetic oligonucleotide
  Antisense Strand to SEQ ID NO: 382275
uauuccaaacccguuacug

SEQ ID NO: 382277 - RNA, 19 nt, Artificial Sequence
  Description of Artificial Sequence: Synthetic oligonucleotide
  Sense Strand Starting at position 808 of SEQ ID NO: 317793
cccaccaguuuguugaaau

SEQ ID NO: 382278 - RNA, 19 nt, Artificial Sequence
  Description of Artificial Sequence: Synthetic oligonucleotide
  Antisense Strand to SEQ ID NO: 382277
auuucaacaaacugguggg

SEQ ID NO: 382279 - RNA, 19 nt, Artificial Sequence
  Description of Artificial Sequence: Synthetic oligonucleotide
  Sense Strand Starting at position 808 of SEQ ID NO: 317806
ugaaaugguccucgucaag

SEQ ID NO: 382280 - RNA, 19 nt, Artificial Sequence
  Description of Artificial Sequence: Synthetic oligonucleotide
  Antisense Strand to SEQ ID NO: 382279
cuugacgaggaccauuuca

SEQ ID NO: 382281 - RNA, 19 nt, Artificial Sequence
  Description of Artificial Sequence: Synthetic oligonucleotide
  Sense Strand Starting at position 808 of SEQ ID NO: 318124
agggauguggccugugaac

SEQ ID NO: 382282 - RNA, 19 nt, Artificial Sequence
  Description of Artificial Sequence: Synthetic oligonucleotide
  Antisense Strand to SEQ ID NO: 382281
guucacaggccacaucccu

SEQ ID NO: 382283 - RNA, 19 nt, Artificial Sequence
  Description of Artificial Sequence: Synthetic oligonucleotide
  Sense Strand Starting at position 808 of SEQ ID NO: 318348
agaccuagccauugauagu

SEQ ID NO: 382284 - RNA, 19 nt, Artificial Sequence
  Description of Artificial Sequence: Synthetic oligonucleotide
  Antisense Strand to SEQ ID NO: 382283
acuaucaauggcuaggucu

SEQ ID NO: 382285 - RNA, 19 nt, Artificial Sequence
  Description of Artificial Sequence: Synthetic oligonucleotide
  Sense Strand Starting at position 808 of SEQ ID NO: 318470
guagaucuuccugggauug

SEQ ID NO: 382286 - RNA, 19 nt, Artificial Sequence
  Description of Artificial Sequence: Synthetic oligonucleotide
  Antisense Strand to SEQ ID NO: 382285
caaucccaggaagaucuac

SEQ ID NO: 382287 - RNA, 19 nt, Artificial Sequence
  Description of Artificial Sequence: Synthetic oligonucleotide
  Sense Strand Starting at position 808 of SEQ ID NO: 318471
uagaucuuccugggauugu

SEQ ID NO: 382288 - RNA, 19 nt, Artificial Sequence
  Description of Artificial Sequence: Synthetic oligonucleotide
  Antisense Strand to SEQ ID NO: 382287
acaaucccaggaagaucua

SEQ ID NO: 382289 - RNA, 19 nt, Artificial Sequence
  Description of Artificial Sequence: Synthetic oligonucleotide
  Sense Strand Starting at position 808 of SEQ ID NO: 318692
guucuacuucuaggcauuu

SEQ ID NO: 382290 - RNA, 19 nt, Artificial Sequence
  Description of Artificial Sequence: Synthetic oligonucleotide
  Antisense Strand to SEQ ID NO: 382289
aaaugccuagaaguagaac

SEQ ID NO: 382291 - RNA, 19 nt, Artificial Sequence
  Description of Artificial Sequence: Synthetic oligonucleotide
  Sense Strand Starting at position 808 of SEQ ID NO: 318716
guggaaucauucccaugua

SEQ ID NO: 382292 - RNA, 19 nt, Artificial Sequence
  Description of Artificial Sequence: Synthetic oligonucleotide
  Antisense Strand to SEQ ID NO: 382291
uacaugggaaugauuccac

SEQ ID NO: 382293 - RNA, 19 nt, Artificial Sequence
  Description of Artificial Sequence: Synthetic oligonucleotide
  Sense Strand Starting at position 808 of SEQ ID NO: 318735
ugcaaagauguaugcauga

SEQ ID NO: 382294 - RNA, 19 nt, Artificial Sequence
  Description of Artificial Sequence: Synthetic oligonucleotide
  Antisense Strand to SEQ ID NO: 382293
ucaugcauacaucuuugca

SEQ ID NO: 382295 - RNA, 19 nt, Artificial Sequence
  Description of Artificial Sequence: Synthetic oligonucleotide
  Sense Strand Starting at position 808 of SEQ ID NO: 318754
ugauguuuauuucugcacu

SEQ ID NO: 382296 - RNA, 19 nt, Artificial Sequence
  Description of Artificial Sequence: Synthetic oligonucleotide
  Antisense Strand to SEQ ID NO: 382295
agugcagaaauaaacauca

SEQ ID NO: 382297 - RNA, 19 nt, Artificial Sequence
  Description of Artificial Sequence: Synthetic oligonucleotide
  Sense Strand Starting at position 808 of SEQ ID NO: 318757
uguuuauuucugcacugua

SEQ ID NO: 382298 - RNA, 19 nt, Artificial Sequence
  Description of Artificial Sequence: Synthetic oligonucleotide
  Antisense Strand to SEQ ID NO: 382297
uacagugcagaaauaaaca

SEQ ID NO: 382299 - RNA, 19 nt, Artificial Sequence
  Description of Artificial Sequence: Synthetic oligonucleotide
  Sense Strand Starting at position 808 of SEQ ID NO: 318760
uuauuucugcacuguauga

SEQ ID NO: 382300 - RNA, 19 nt, Artificial Sequence
  Description of Artificial Sequence: Synthetic oligonucleotide
  Antisense Strand to SEQ ID NO: 382299
ucauacagugcagaaauaa

SEQ ID NO: 382301 - RNA, 19 nt, Artificial Sequence
  Description of Artificial Sequence: Synthetic oligonucleotide
  Sense Strand Starting at position 808 of SEQ ID NO: 318799
aguauaaauguccauguau

SEQ ID NO: 382302 - RNA, 19 nt, Artificial Sequence
  Description of Artificial Sequence: Synthetic oligonucleotide
  Antisense Strand to SEQ ID NO: 382301
auacauggacauuuauacu

SEQ ID NO: 382303 - RNA, 19 nt, Artificial Sequence
  Description of Artificial Sequence: Synthetic oligonucleotide
  Sense Strand Starting at position 808 of SEQ ID NO: 318873
ucuguauguccugauaagg

SEQ ID NO: 382304 - RNA, 19 nt, Artificial Sequence
  Description of Artificial Sequence: Synthetic oligonucleotide
  Antisense Strand to SEQ ID NO: 382303
ccuuaucaggacauacaga

SEQ ID NO: 382305 - RNA, 19 nt, Artificial Sequence
  Description of Artificial Sequence: Synthetic oligonucleotide
  Sense Strand Starting at position 809 of SEQ ID NO: 315519
ccucuuggaguauagcaau

SEQ ID NO: 382306 - RNA, 19 nt, Artificial Sequence
  Description of Artificial Sequence: Synthetic oligonucleotide
  Antisense Strand to SEQ ID NO: 382305
auugcuauacuccaagagg

SEQ ID NO: 382307 - RNA, 19 nt, Artificial Sequence
  Description of Artificial Sequence: Synthetic oligonucleotide
  Sense Strand Starting at position 809 of SEQ ID NO: 315603
uauagaagaucuguacugu

SEQ ID NO: 382308 - RNA, 19 nt, Artificial Sequence
  Description of Artificial Sequence: Synthetic oligonucleotide
  Antisense Strand to SEQ ID NO: 382307
acaguacagaucuucuaua

SEQ ID NO: 382309 - RNA, 19 nt, Artificial Sequence
  Description of Artificial Sequence: Synthetic oligonucleotide
  Sense Strand Starting at position 809 of SEQ ID NO: 315604
auagaagaucuguacuguu

SEQ ID NO: 382310 - RNA, 19 nt, Artificial Sequence
  Description of Artificial Sequence: Synthetic oligonucleotide
  Antisense Strand to SEQ ID NO: 382309
aacaguacagaucuucuau

SEQ ID NO: 382311 - RNA, 19 nt, Artificial Sequence
  Description of Artificial Sequence: Synthetic oligonucleotide
  Sense Strand Starting at position 809 of SEQ ID NO: 315611
aucuguacuguuugagaag

SEQ ID NO: 382312 - RNA, 19 nt, Artificial Sequence
  Description of Artificial Sequence: Synthetic oligonucleotide
  Antisense Strand to SEQ ID NO: 382311
cuucucaaacaguacagau

SEQ ID NO: 382313 - RNA, 19 nt, Artificial Sequence
  Description of Artificial Sequence: Synthetic oligonucleotide
  Sense Strand Starting at position 809 of SEQ ID NO: 315617
acuguuugagaaggcuaua

SEQ ID NO: 382314 - RNA, 19 nt, Artificial Sequence
  Description of Artificial Sequence: Synthetic oligonucleotide
  Antisense Strand to SEQ ID NO: 382313
uauagccuucucaaacagu

SEQ ID NO: 382315 - RNA, 19 nt, Artificial Sequence
  Description of Artificial Sequence: Synthetic oligonucleotide
  Sense Strand Starting at position 809 of SEQ ID NO: 315630
gcuauauccugagauauuu

SEQ ID NO: 382316 - RNA, 19 nt, Artificial Sequence
  Description of Artificial Sequence: Synthetic oligonucleotide
  Antisense Strand to SEQ ID NO: 382315
aaauaucucaggauauagc

SEQ ID NO: 382317 - RNA, 19 nt, Artificial Sequence
  Description of Artificial Sequence: Synthetic oligonucleotide
  Sense Strand Starting at position 809 of SEQ ID NO: 315706
guauaucgacuuuagauau

SEQ ID NO: 382318 - RNA, 19 nt, Artificial Sequence
  Description of Artificial Sequence: Synthetic oligonucleotide
  Antisense Strand to SEQ ID NO: 382317
auaucuaaagucgauauac

SEQ ID NO: 382319 - RNA, 19 nt, Artificial Sequence
  Description of Artificial Sequence: Synthetic oligonucleotide
  Sense Strand Starting at position 809 of SEQ ID NO: 315880
ucugcaagacucugaguuu

SEQ ID NO: 382320 - RNA, 19 nt, Artificial Sequence
  Description of Artificial Sequence: Synthetic oligonucleotide
  Antisense Strand to SEQ ID NO: 382319
aaacucagagucuugcaga

SEQ ID NO: 382321 - RNA, 19 nt, Artificial Sequence
  Description of Artificial Sequence: Synthetic oligonucleotide
  Sense Strand Starting at position 809 of SEQ ID NO: 315934
agccuagugcaguaaacua

SEQ ID NO: 382322 - RNA, 19 nt, Artificial Sequence
  Description of Artificial Sequence: Synthetic oligonucleotide
  Antisense Strand to SEQ ID NO: 382321
uaguuuacugcacuaggcu

SEQ ID NO: 382323 - RNA, 19 nt, Artificial Sequence
  Description of Artificial Sequence: Synthetic oligonucleotide
  Sense Strand Starting at position 809 of SEQ ID NO: 315945
guaaacuagguuugugaac

SEQ ID NO: 382324 - RNA, 19 nt, Artificial Sequence
  Description of Artificial Sequence: Synthetic oligonucleotide
  Antisense Strand to SEQ ID NO: 382323
guucacaaaccuaguuuac

SEQ ID NO: 382325 - RNA, 19 nt, Artificial Sequence
  Description of Artificial Sequence: Synthetic oligonucleotide
  Sense Strand Starting at position 809 of SEQ ID NO: 315946
uaaacuagguuugugaacu

SEQ ID NO: 382326 - RNA, 19 nt, Artificial Sequence
  Description of Artificial Sequence: Synthetic oligonucleotide
  Antisense Strand to SEQ ID NO: 382325
aguucacaaaccuaguuua

SEQ ID NO: 382327 - RNA, 19 nt, Artificial Sequence
  Description of Artificial Sequence: Synthetic oligonucleotide
  Sense Strand Starting at position 809 of SEQ ID NO: 315959
ugaacuaaauggcucuuau

SEQ ID NO: 382328 - RNA, 19 nt, Artificial Sequence
  Description of Artificial Sequence: Synthetic oligonucleotide
  Antisense Strand to SEQ ID NO: 382327
auaagagccauuuaguuca

SEQ ID NO: 382329 - RNA, 19 nt, Artificial Sequence
  Description of Artificial Sequence: Synthetic oligonucleotide
  Sense Strand Starting at position 809 of SEQ ID NO: 315987
ucaauuauugucgguuauu

SEQ ID NO: 382330 - RNA, 19 nt, Artificial Sequence
  Description of Artificial Sequence: Synthetic oligonucleotide
  Antisense Strand to SEQ ID NO: 382329
aauaaccgacaauaauuga

SEQ ID NO: 382331 - RNA, 19 nt, Artificial Sequence
  Description of Artificial Sequence: Synthetic oligonucleotide
  Sense Strand Starting at position 809 of SEQ ID NO: 315988
caauuauugucgguuauuc

SEQ ID NO: 382332 - RNA, 19 nt, Artificial Sequence
  Description of Artificial Sequence: Synthetic oligonucleotide
  Antisense Strand to SEQ ID NO: 382331
gaauaaccgacaauaauug

SEQ ID NO: 382333 - RNA, 19 nt, Artificial Sequence
  Description of Artificial Sequence: Synthetic oligonucleotide
  Sense Strand Starting at position 809 of SEQ ID NO: 316018
gauguagggucccuggaaa

SEQ ID NO: 382334 - RNA, 19 nt, Artificial Sequence
  Description of Artificial Sequence: Synthetic oligonucleotide
  Antisense Strand to SEQ ID NO: 382333
uuuccagggacccuacauc

SEQ ID NO: 382335 - RNA, 19 nt, Artificial Sequence
  Description of Artificial Sequence: Synthetic oligonucleotide
  Sense Strand Starting at position 809 of SEQ ID NO: 316093
gaaaucaaccaugguugau

SEQ ID NO: 382336 - RNA, 19 nt, Artificial Sequence
  Description of Artificial Sequence: Synthetic oligonucleotide
  Antisense Strand to SEQ ID NO: 382335
aucaaccaugguugauuuc

SEQ ID NO: 382337 - RNA, 19 nt, Artificial Sequence
  Description of Artificial Sequence: Synthetic oligonucleotide
  Sense Strand Starting at position 809 of SEQ ID NO: 316097
ucaaccaugguugauguaa

SEQ ID NO: 382338 - RNA, 19 nt, Artificial Sequence
  Description of Artificial Sequence: Synthetic oligonucleotide
  Antisense Strand to SEQ ID NO: 382337
uuacaucaaccaugguuga

SEQ ID NO: 382339 - RNA, 19 nt, Artificial Sequence
  Description of Artificial Sequence: Synthetic oligonucleotide
  Sense Strand Starting at position 809 of SEQ ID NO: 316197
ccacuagcccucugaugaa

SEQ ID NO: 382340 - RNA, 19 nt, Artificial Sequence
  Description of Artificial Sequence: Synthetic oligonucleotide
  Antisense Strand to SEQ ID NO: 382339
uucaucagagggcuagugg

SEQ ID NO: 382341 - RNA, 19 nt, Artificial Sequence
  Description of Artificial Sequence: Synthetic oligonucleotide
  Sense Strand Starting at position 809 of SEQ ID NO: 316235
ccacaagacuuguugacuu

SEQ ID NO: 382342 - RNA, 19 nt, Artificial Sequence
  Description of Artificial Sequence: Synthetic oligonucleotide
  Antisense Strand to SEQ ID NO: 382341
aagucaacaagucuugugg

SEQ ID NO: 382343 - RNA, 19 nt, Artificial Sequence
  Description of Artificial Sequence: Synthetic oligonucleotide
  Sense Strand Starting at position 809 of SEQ ID NO: 316247
uugacuuauuuaugcaaag

SEQ ID NO: 382344 - RNA, 19 nt, Artificial Sequence
  Description of Artificial Sequence: Synthetic oligonucleotide
  Antisense Strand to SEQ ID NO: 382343
cuuugcauaaauaagucaa

SEQ ID NO: 382345 - RNA, 19 nt, Artificial Sequence
  Description of Artificial Sequence: Synthetic oligonucleotide
  Sense Strand Starting at position 809 of SEQ ID NO: 316299
ggaacuguuuacuuccuua

SEQ ID NO: 382346 - RNA, 19 nt, Artificial Sequence
  Description of Artificial Sequence: Synthetic oligonucleotide
  Antisense Strand to SEQ ID NO: 382345
uaaggaaguaaacaguucc

SEQ ID NO: 382347 - RNA, 19 nt, Artificial Sequence
  Description of Artificial Sequence: Synthetic oligonucleotide
  Sense Strand Starting at position 809 of SEQ ID NO: 317224
cugauauauccauacucgu

SEQ ID NO: 382348 - RNA, 19 nt, Artificial Sequence
  Description of Artificial Sequence: Synthetic oligonucleotide
  Antisense Strand to SEQ ID NO: 382347
acgaguauggauauaucag

SEQ ID NO: 382349 - RNA, 19 nt, Artificial Sequence
  Description of Artificial Sequence: Synthetic oligonucleotide
  Sense Strand Starting at position 809 of SEQ ID NO: 317231
auccauacucgucacugua

SEQ ID NO: 382350 - RNA, 19 nt, Artificial Sequence
  Description of Artificial Sequence: Synthetic oligonucleotide
  Antisense Strand to SEQ ID NO: 382349
uacagugacgaguauggau

SEQ ID NO: 382351 - RNA, 19 nt, Artificial Sequence
  Description of Artificial Sequence: Synthetic oligonucleotide
  Sense Strand Starting at position 809 of SEQ ID NO: 317233
ccauacucgucacuguaau

SEQ ID NO: 382352 - RNA, 19 nt, Artificial Sequence
  Description of Artificial Sequence: Synthetic oligonucleotide
  Antisense Strand to SEQ ID NO: 382351
auuacagugacgaguaugg

SEQ ID NO: 382353 - RNA, 19 nt, Artificial Sequence
  Description of Artificial Sequence: Synthetic oligonucleotide
  Sense Strand Starting at position 809 of SEQ ID NO: 317399
uuagguauuugacacuaaa

SEQ ID NO: 382354 - RNA, 19 nt, Artificial Sequence
  Description of Artificial Sequence: Synthetic oligonucleotide
  Antisense Strand to SEQ ID NO: 382353
uuuagugucaaauaccuaa

SEQ ID NO: 382355 - RNA, 19 nt, Artificial Sequence
  Description of Artificial Sequence: Synthetic oligonucleotide
  Sense Strand Starting at position 809 of SEQ ID NO: 317440
gcauauauuugagguguag

SEQ ID NO: 382356 - RNA, 19 nt, Artificial Sequence
  Description of Artificial Sequence: Synthetic oligonucleotide
  Antisense Strand to SEQ ID NO: 382355
cuacaccucaaauauaugc

SEQ ID NO: 382357 - RNA, 19 nt, Artificial Sequence
  Description of Artificial Sequence: Synthetic oligonucleotide
  Sense Strand Starting at position 809 of SEQ ID NO: 317482
ucucuuaguuggccugaga

SEQ ID NO: 382358 - RNA, 19 nt, Artificial Sequence
  Description of Artificial Sequence: Synthetic oligonucleotide
  Antisense Strand to SEQ ID NO: 382357
ucucaggccaacuaagaga

SEQ ID NO: 382359 - RNA, 19 nt, Artificial Sequence
  Description of Artificial Sequence: Synthetic oligonucleotide
  Sense Strand Starting at position 809 of SEQ ID NO: 317485
cuuaguuggccugagaauc

SEQ ID NO: 382360 - RNA, 19 nt, Artificial Sequence
  Description of Artificial Sequence: Synthetic oligonucleotide
  Antisense Strand to SEQ ID NO: 382359
gauucucaggccaacuaag

SEQ ID NO: 382361 - RNA, 19 nt, Artificial Sequence
  Description of Artificial Sequence: Synthetic oligonucleotide
  Sense Strand Starting at position 809 of SEQ ID NO: 317665
uaaauuaugcagggaggua

SEQ ID NO: 382362 - RNA, 19 nt, Artificial Sequence
  Description of Artificial Sequence: Synthetic oligonucleotide
  Antisense Strand to SEQ ID NO: 382361
uaccucccugcauaauuua

SEQ ID NO: 382363 - RNA, 19 nt, Artificial Sequence
  Description of Artificial Sequence: Synthetic oligonucleotide
  Sense Strand Starting at position 809 of SEQ ID NO: 317705
uaacaagcguuguuuguau

SEQ ID NO: 382364 - RNA, 19 nt, Artificial Sequence
  Description of Artificial Sequence: Synthetic oligonucleotide
  Antisense Strand to SEQ ID NO: 382363
auacaaacaacgcuuguua

SEQ ID NO: 382365 - RNA, 19 nt, Artificial Sequence
  Description of Artificial Sequence: Synthetic oligonucleotide
  Sense Strand Starting at position 809 of SEQ ID NO: 317713
guuguuuguauagaauucu

SEQ ID NO: 382366 - RNA, 19 nt, Artificial Sequence
  Description of Artificial Sequence: Synthetic oligonucleotide
  Antisense Strand to SEQ ID NO: 382365
agaauucuauacaaacaac

SEQ ID NO: 382367 - RNA, 19 nt, Artificial Sequence
  Description of Artificial Sequence: Synthetic oligonucleotide
  Sense Strand Starting at position 809 of SEQ ID NO: 317719
uguauagaauucucuugga

SEQ ID NO: 382368 - RNA, 19 nt, Artificial Sequence
  Description of Artificial Sequence: Synthetic oligonucleotide
  Antisense Strand to SEQ ID NO: 382367
uccaagagaauucuauaca

SEQ ID NO: 382369 - RNA, 19 nt, Artificial Sequence
  Description of Artificial Sequence: Synthetic oligonucleotide
  Sense Strand Starting at position 809 of SEQ ID NO: 317839
gugaaauuagaaugcccuu

SEQ ID NO: 382370 - RNA, 19 nt, Artificial Sequence
  Description of Artificial Sequence: Synthetic oligonucleotide
  Antisense Strand to SEQ ID NO: 382369
aagggcauucuaauuucac

SEQ ID NO: 382371 - RNA, 19 nt, Artificial Sequence
  Description of Artificial Sequence: Synthetic oligonucleotide
  Sense Strand Starting at position 809 of SEQ ID NO: 317864
ucugcuguuucuuuaugua

SEQ ID NO: 382372 - RNA, 19 nt, Artificial Sequence
  Description of Artificial Sequence: Synthetic oligonucleotide
  Antisense Strand to SEQ ID NO: 382371
uacauaaagaaacagcaga

SEQ ID NO: 382373 - RNA, 19 nt, Artificial Sequence
  Description of Artificial Sequence: Synthetic oligonucleotide
  Sense Strand Starting at position 809 of SEQ ID NO: 317922
uuugguguggcauauucua

SEQ ID NO: 382374 - RNA, 19 nt, Artificial Sequence
  Description of Artificial Sequence: Synthetic oligonucleotide
  Antisense Strand to SEQ ID NO: 382373
uagaauaugccacaccaaa

SEQ ID NO: 382375 - RNA, 19 nt, Artificial Sequence
  Description of Artificial Sequence: Synthetic oligonucleotide
  Sense Strand Starting at position 809 of SEQ ID NO: 317967
guggaagaccauugcaaug

SEQ ID NO: 382376 - RNA, 19 nt, Artificial Sequence
  Description of Artificial Sequence: Synthetic oligonucleotide
  Antisense Strand to SEQ ID NO: 382375
cauugcaauggucuuccac

SEQ ID NO: 382377 - RNA, 19 nt, Artificial Sequence
  Description of Artificial Sequence: Synthetic oligonucleotide
  Sense Strand Starting at position 809 of SEQ ID NO: 318018
gaaagagaauuaggcuaau

SEQ ID NO: 382378 - RNA, 19 nt, Artificial Sequence
  Description of Artificial Sequence: Synthetic oligonucleotide
  Antisense Strand to SEQ ID NO: 382377
auuagccuaauucucuuuc

SEQ ID NO: 382379 - RNA, 19 nt, Artificial Sequence
  Description of Artificial Sequence: Synthetic oligonucleotide
  Sense Strand Starting at position 809 of SEQ ID NO: 318027
uuaggcuaaucauugaaua

SEQ ID NO: 382380 - RNA, 19 nt, Artificial Sequence
  Description of Artificial Sequence: Synthetic oligonucleotide
  Antisense Strand to SEQ ID NO: 382379
uauucaaugauuagccuaa

SEQ ID NO: 382381 - RNA, 19 nt, Artificial Sequence
  Description of Artificial Sequence: Synthetic oligonucleotide
  Sense Strand Starting at position 809 of SEQ ID NO: 318553
agauauguuuaccaugauu

SEQ ID NO: 382382 - RNA, 19 nt, Artificial Sequence
  Description of Artificial Sequence: Synthetic oligonucleotide
  Antisense Strand to SEQ ID NO: 382381
aaucaugguaaacauaucu

SEQ ID NO: 382383 - RNA, 19 nt, Artificial Sequence
  Description of Artificial Sequence: Synthetic oligonucleotide
  Sense Strand Starting at position 809 of SEQ ID NO: 318973
acagucugacuguggaaua

SEQ ID NO: 382384 - RNA, 19 nt, Artificial Sequence
  Description of Artificial Sequence: Synthetic oligonucleotide
  Antisense Strand to SEQ ID NO: 382383
uauuccacagucagacugu

SEQ ID NO: 382385 - RNA, 19 nt, Artificial Sequence
  Description of Artificial Sequence: Synthetic oligonucleotide
  Sense Strand Starting at position 810 of SEQ ID NO: 315240
ugauuaacauacuugaagu

SEQ ID NO: 382386 - RNA, 19 nt, Artificial Sequence
  Description of Artificial Sequence: Synthetic oligonucleotide
  Antisense Strand to SEQ ID NO: 382385
acuucaaguauguuaauca

SEQ ID NO: 382387 - RNA, 19 nt, Artificial Sequence
  Description of Artificial Sequence: Synthetic oligonucleotide
  Sense Strand Starting at position 810 of SEQ ID NO: 315264
aaguguuaagaagguuaac

SEQ ID NO: 382388 - RNA, 19 nt, Artificial Sequence
  Description of Artificial Sequence: Synthetic oligonucleotide
  Antisense Strand to SEQ ID NO: 382387
guuaaccuucuuaacacuu

SEQ ID NO: 382389 - RNA, 19 nt, Artificial Sequence
  Description of Artificial Sequence: Synthetic oligonucleotide
  Sense Strand Starting at position 810 of SEQ ID NO: 315854
gaccuugaugguuagcaga

SEQ ID NO: 382390 - RNA, 19 nt, Artificial Sequence
  Description of Artificial Sequence: Synthetic oligonucleotide
  Antisense Strand to SEQ ID NO: 382389
ucugcuaaccaucaagguc

SEQ ID NO: 382391 - RNA, 19 nt, Artificial Sequence
  Description of Artificial Sequence: Synthetic oligonucleotide
  Sense Strand Starting at position 810 of SEQ ID NO: 315856
ccuugaugguuagcagaau

SEQ ID NO: 382392 - RNA, 19 nt, Artificial Sequence
  Description of Artificial Sequence: Synthetic oligonucleotide
  Antisense Strand to SEQ ID NO: 382391
auucugcuaaccaucaagg

SEQ ID NO: 382393 - RNA, 19 nt, Artificial Sequence
  Description of Artificial Sequence: Synthetic oligonucleotide
  Sense Strand Starting at position 810 of SEQ ID NO: 315867
agcagaaucauugggacuu

SEQ ID NO: 382394 - RNA, 19 nt, Artificial Sequence
  Description of Artificial Sequence: Synthetic oligonucleotide
  Antisense Strand to SEQ ID NO: 382393
aagucccaaugauucugcu

SEQ ID NO: 382395 - RNA, 19 nt, Artificial Sequence
  Description of Artificial Sequence: Synthetic oligonucleotide
  Sense Strand Starting at position 810 of SEQ ID NO: 315915
ucaguuaugguauaugaug

SEQ ID NO: 382396 - RNA, 19 nt, Artificial Sequence
  Description of Artificial Sequence: Synthetic oligonucleotide
  Antisense Strand to SEQ ID NO: 382395
caucauauaccauaacuga

SEQ ID NO: 382397 - RNA, 19 nt, Artificial Sequence
  Description of Artificial Sequence: Synthetic oligonucleotide
  Sense Strand Starting at position 810 of SEQ ID NO: 315917
aguuaugguauaugaugga

SEQ ID NO: 382398 - RNA, 19 nt, Artificial Sequence
  Description of Artificial Sequence: Synthetic oligonucleotide
  Antisense Strand to SEQ ID NO: 382397
uccaucauauaccauaacu

SEQ ID NO: 382399 - RNA, 19 nt, Artificial Sequence
  Description of Artificial Sequence: Synthetic oligonucleotide
  Sense Strand Starting at position 810 of SEQ ID NO: 315921
augguauaugauggauauc

SEQ ID NO: 382400 - RNA, 19 nt, Artificial Sequence
  Description of Artificial Sequence: Synthetic oligonucleotide
  Antisense Strand to SEQ ID NO: 382399
gauauccaucauauaccau

SEQ ID NO: 382401 - RNA, 19 nt, Artificial Sequence
  Description of Artificial Sequence: Synthetic oligonucleotide
  Sense Strand Starting at position 810 of SEQ ID NO: 315924
guauaugauggauaucgca

SEQ ID NO: 382402 - RNA, 19 nt, Artificial Sequence
  Description of Artificial Sequence: Synthetic oligonucleotide
  Antisense Strand to SEQ ID NO: 382401
ugcgauauccaucauauac

SEQ ID NO: 382403 - RNA, 19 nt, Artificial Sequence
  Description of Artificial Sequence: Synthetic oligonucleotide
  Sense Strand Starting at position 810 of SEQ ID NO: 315931
auggauaucgcagguaauu

SEQ ID NO: 382404 - RNA, 19 nt, Artificial Sequence
  Description of Artificial Sequence: Synthetic oligonucleotide
  Antisense Strand to SEQ ID NO: 382403
aauuaccugcgauauccau

SEQ ID NO: 382405 - RNA, 19 nt, Artificial Sequence
  Description of Artificial Sequence: Synthetic oligonucleotide
  Sense Strand Starting at position 810 of SEQ ID NO: 316068
uuauuugauuucuacaguc

SEQ ID NO: 382406 - RNA, 19 nt, Artificial Sequence
  Description of Artificial Sequence: Synthetic oligonucleotide
  Antisense Strand to SEQ ID NO: 382405
gacuguagaaaucaaauaa

SEQ ID NO: 382407 - RNA, 19 nt, Artificial Sequence
  Description of Artificial Sequence: Synthetic oligonucleotide
  Sense Strand Starting at position 810 of SEQ ID NO: 316143
acauauugcgauuaguuua

SEQ ID NO: 382408 - RNA, 19 nt, Artificial Sequence
  Description of Artificial Sequence: Synthetic oligonucleotide
  Antisense Strand to SEQ ID NO: 382407
uaaacuaaucgcaauaugu

SEQ ID NO: 382409 - RNA, 19 nt, Artificial Sequence
  Description of Artificial Sequence: Synthetic oligonucleotide
  Sense Strand Starting at position 810 of SEQ ID NO: 316184
acuaaagugcuagaacagu

SEQ ID NO: 382410 - RNA, 19 nt, Artificial Sequence
  Description of Artificial Sequence: Synthetic oligonucleotide
  Antisense Strand to SEQ ID NO: 382409
acuguucuagcacuuuagu

SEQ ID NO: 382411 - RNA, 19 nt, Artificial Sequence
  Description of Artificial Sequence: Synthetic oligonucleotide
  Sense Strand Starting at position 810 of SEQ ID NO: 317288
uugcaauggcauuaucagu

SEQ ID NO: 382412 - RNA, 19 nt, Artificial Sequence
  Description of Artificial Sequence: Synthetic oligonucleotide
  Antisense Strand to SEQ ID NO: 382411
acugauaaugccauugcaa

SEQ ID NO: 382413 - RNA, 19 nt, Artificial Sequence
  Description of Artificial Sequence: Synthetic oligonucleotide
  Sense Strand Starting at position 810 of SEQ ID NO: 317293
auggcauuaucaguugaaa

SEQ ID NO: 382414 - RNA, 19 nt, Artificial Sequence
  Description of Artificial Sequence: Synthetic oligonucleotide
  Antisense Strand to SEQ ID NO: 382413
uuucaacugauaaugccau

SEQ ID NO: 382415 - RNA, 19 nt, Artificial Sequence
  Description of Artificial Sequence: Synthetic oligonucleotide
  Sense Strand Starting at position 810 of SEQ ID NO: 317296
gcauuaucaguugaaauug

SEQ ID NO: 382416 - RNA, 19 nt, Artificial Sequence
  Description of Artificial Sequence: Synthetic oligonucleotide
  Antisense Strand to SEQ ID NO: 382415
caauuucaacugauaaugc

SEQ ID NO: 382417 - RNA, 19 nt, Artificial Sequence
  Description of Artificial Sequence: Synthetic oligonucleotide
  Sense Strand Starting at position 810 of SEQ ID NO: 317367
ugaucaguccuauagcuga

SEQ ID NO: 382418 - RNA, 19 nt, Artificial Sequence
  Description of Artificial Sequence: Synthetic oligonucleotide
  Antisense Strand to SEQ ID NO: 382417
ucagcuauaggacugauca

SEQ ID NO: 382419 - RNA, 19 nt, Artificial Sequence
  Description of Artificial Sequence: Synthetic oligonucleotide
  Sense Strand Starting at position 810 of SEQ ID NO: 317372
aguccuauagcugaugaau

SEQ ID NO: 382420 - RNA, 19 nt, Artificial Sequence
  Description of Artificial Sequence: Synthetic oligonucleotide
  Antisense Strand to SEQ ID NO: 382419
auucaucagcuauaggacu

SEQ ID NO: 382421 - RNA, 19 nt, Artificial Sequence
  Description of Artificial Sequence: Synthetic oligonucleotide
  Sense Strand Starting at position 810 of SEQ ID NO: 317438
gaaacugugcaguaauuag

SEQ ID NO: 382422 - RNA, 19 nt, Artificial Sequence
  Description of Artificial Sequence: Synthetic oligonucleotide
  Antisense Strand to SEQ ID NO: 382421
cuaauuacugcacaguuuc

SEQ ID NO: 382423 - RNA, 19 nt, Artificial Sequence
  Description of Artificial Sequence: Synthetic oligonucleotide
  Sense Strand Starting at position 810 of SEQ ID NO: 317534
guuugacuggcauaugaua

SEQ ID NO: 382424 - RNA, 19 nt, Artificial Sequence
  Description of Artificial Sequence: Synthetic oligonucleotide
  Antisense Strand to SEQ ID NO: 382423
uaucauaugccagucaaac

SEQ ID NO: 382425 - RNA, 19 nt, Artificial Sequence
  Description of Artificial Sequence: Synthetic oligonucleotide
  Sense Strand Starting at position 810 of SEQ ID NO: 317741
aacuguacucagggauauu

SEQ ID NO: 382426 - RNA, 19 nt, Artificial Sequence
  Description of Artificial Sequence: Synthetic oligonucleotide
  Antisense Strand to SEQ ID NO: 382425
aauaucccugaguacaguu

SEQ ID NO: 382427 - RNA, 19 nt, Artificial Sequence
  Description of Artificial Sequence: Synthetic oligonucleotide
  Sense Strand Starting at position 810 of SEQ ID NO: 317813
aaauuaucugagugaguuu

SEQ ID NO: 382428 - RNA, 19 nt, Artificial Sequence
  Description of Artificial Sequence: Synthetic oligonucleotide
  Antisense Strand to SEQ ID NO: 382427
aaacucacucagauaauuu

SEQ ID NO: 382429 - RNA, 19 nt, Artificial Sequence
  Description of Artificial Sequence: Synthetic oligonucleotide
  Sense Strand Starting at position 810 of SEQ ID NO: 317947
cuuggugugauaugacauu

SEQ ID NO: 382430 - RNA, 19 nt, Artificial Sequence
  Description of Artificial Sequence: Synthetic oligonucleotide
  Antisense Strand to SEQ ID NO: 382429
aaugucauaucacaccaag

SEQ ID NO: 382431 - RNA, 19 nt, Artificial Sequence
  Description of Artificial Sequence: Synthetic oligonucleotide
  Sense Strand Starting at position 810 of SEQ ID NO: 318047
gcaguaaguggucagugaa

SEQ ID NO: 382432 - RNA, 19 nt, Artificial Sequence
  Description of Artificial Sequence: Synthetic oligonucleotide
  Antisense Strand to SEQ ID NO: 382431
uucacugaccacuuacugc

SEQ ID NO: 382433 - RNA, 19 nt, Artificial Sequence
  Description of Artificial Sequence: Synthetic oligonucleotide
  Sense Strand Starting at position 810 of SEQ ID NO: 318050
guaaguggucagugaagga

SEQ ID NO: 382434 - RNA, 19 nt, Artificial Sequence
  Description of Artificial Sequence: Synthetic oligonucleotide
  Antisense Strand to SEQ ID NO: 382433
uccuucacugaccacuuac

SEQ ID NO: 382435 - RNA, 19 nt, Artificial Sequence
  Description of Artificial Sequence: Synthetic oligonucleotide
  Sense Strand Starting at position 810 of SEQ ID NO: 318158
acaacuagauguguuccaa

SEQ ID NO: 382436 - RNA, 19 nt, Artificial Sequence
  Description of Artificial Sequence: Synthetic oligonucleotide
  Antisense Strand to SEQ ID NO: 382435
uuggaacacaucuaguugu

SEQ ID NO: 382437 - RNA, 19 nt, Artificial Sequence
  Description of Artificial Sequence: Synthetic oligonucleotide
  Sense Strand Starting at position 810 of SEQ ID NO: 318169
uguuccaaucaguaauaug

SEQ ID NO: 382438 - RNA, 19 nt, Artificial Sequence
  Description of Artificial Sequence: Synthetic oligonucleotide
  Antisense Strand to SEQ ID NO: 382437
cauauuacugauuggaaca

SEQ ID NO: 382439 - RNA, 19 nt, Artificial Sequence
  Description of Artificial Sequence: Synthetic oligonucleotide
  Sense Strand Starting at position 810 of SEQ ID NO: 318177
ucaguaauaugagccuauu

SEQ ID NO: 382440 - RNA, 19 nt, Artificial Sequence
  Description of Artificial Sequence: Synthetic oligonucleotide
  Antisense Strand to SEQ ID NO: 382439
aauaggcucauauuacuga

SEQ ID NO: 382441 - RNA, 19 nt, Artificial Sequence
  Description of Artificial Sequence: Synthetic oligonucleotide
  Sense Strand Starting at position 810 of SEQ ID NO: 318180
guaauaugagccuauuaga

SEQ ID NO: 382442 - RNA, 19 nt, Artificial Sequence
  Description of Artificial Sequence: Synthetic oligonucleotide
  Antisense Strand to SEQ ID NO: 382441
ucuaauaggcucauauuac

SEQ ID NO: 382443 - RNA, 19 nt, Artificial Sequence
  Description of Artificial Sequence: Synthetic oligonucleotide
  Sense Strand Starting at position 810 of SEQ ID NO: 318205
uagaaaugauugcuuggau

SEQ ID NO: 382444 - RNA, 19 nt, Artificial Sequence
  Description of Artificial Sequence: Synthetic oligonucleotide
  Antisense Strand to SEQ ID NO: 382443
auccaagcaaucauuucua

SEQ ID NO: 382445 - RNA, 19 nt, Artificial Sequence
  Description of Artificial Sequence: Synthetic oligonucleotide
  Sense Strand Starting at position 810 of SEQ ID NO: 318206
agaaaugauugcuuggauu

SEQ ID NO: 382446 - RNA, 19 nt, Artificial Sequence
  Description of Artificial Sequence: Synthetic oligonucleotide
  Antisense Strand to SEQ ID NO: 382445
aauccaagcaaucauuucu

SEQ ID NO: 382447 - RNA, 19 nt, Artificial Sequence
  Description of Artificial Sequence: Synthetic oligonucleotide
  Sense Strand Starting at position 810 of SEQ ID NO: 318243
cagucaaaggcauaguuaa

SEQ ID NO: 382448 - RNA, 19 nt, Artificial Sequence
  Description of Artificial Sequence: Synthetic oligonucleotide
  Antisense Strand to SEQ ID NO: 382447
uuaacuaugccuuugacug

SEQ ID NO: 382449 - RNA, 19 nt, Artificial Sequence
  Description of Artificial Sequence: Synthetic oligonucleotide
  Sense Strand Starting at position 810 of SEQ ID NO: 318263
gaugaugcauccuuggagu

SEQ ID NO: 382450 - RNA, 19 nt, Artificial Sequence
  Description of Artificial Sequence: Synthetic oligonucleotide
  Antisense Strand to SEQ ID NO: 382449
acuccaaggaugcaucauc

SEQ ID NO: 382451 - RNA, 19 nt, Artificial Sequence
  Description of Artificial Sequence: Synthetic oligonucleotide
  Sense Strand Starting at position 810 of SEQ ID NO: 318402
aaucauaguggcugucaga

SEQ ID NO: 382452 - RNA, 19 nt, Artificial Sequence
  Description of Artificial Sequence: Synthetic oligonucleotide
  Antisense Strand to SEQ ID NO: 382451
ucugacagccacuaugauu

SEQ ID NO: 382453 - RNA, 19 nt, Artificial Sequence
  Description of Artificial Sequence: Synthetic oligonucleotide
  Sense Strand Starting at position 810 of SEQ ID NO: 318411
ggcugucagagguaacaua

SEQ ID NO: 382454 - RNA, 19 nt, Artificial Sequence
  Description of Artificial Sequence: Synthetic oligonucleotide
  Antisense Strand to SEQ ID NO: 382453
uauguuaccucugacagcc

SEQ ID NO: 382455 - RNA, 19 nt, Artificial Sequence
  Description of Artificial Sequence: Synthetic oligonucleotide
  Sense Strand Starting at position 810 of SEQ ID NO: 318716
uggagaaugugguugauuc

SEQ ID NO: 382456 - RNA, 19 nt, Artificial Sequence
  Description of Artificial Sequence: Synthetic oligonucleotide
  Antisense Strand to SEQ ID NO: 382455
gaaucaaccacauucucca

SEQ ID NO: 382457 - RNA, 19 nt, Artificial Sequence
  Description of Artificial Sequence: Synthetic oligonucleotide
  Sense Strand Starting at position 810 of SEQ ID NO: 318717
ggagaaugugguugauuca

SEQ ID NO: 382458 - RNA, 19 nt, Artificial Sequence
  Description of Artificial Sequence: Synthetic oligonucleotide
  Antisense Strand to SEQ ID NO: 382457
ugaaucaaccacauucucc

SEQ ID NO: 382459 - RNA, 19 nt, Artificial Sequence
  Description of Artificial Sequence: Synthetic oligonucleotide
  Sense Strand Starting at position 810 of SEQ ID NO: 318743
ggguauuuauaucagaaua

SEQ ID NO: 382460 - RNA, 19 nt, Artificial Sequence
  Description of Artificial Sequence: Synthetic oligonucleotide
  Antisense Strand to SEQ ID NO: 382459
uauucugauauaaauaccc

SEQ ID NO: 382461 - RNA, 19 nt, Artificial Sequence
  Description of Artificial Sequence: Synthetic oligonucleotide
  Sense Strand Starting at position 810 of SEQ ID NO: 318962
uccaguuucugacuuucua

SEQ ID NO: 382462 - RNA, 19 nt, Artificial Sequence
  Description of Artificial Sequence: Synthetic oligonucleotide
  Antisense Strand to SEQ ID NO: 382461
uagaaagucagaaacugga

SEQ ID NO: 382463 - RNA, 19 nt, Artificial Sequence
  Description of Artificial Sequence: Synthetic oligonucleotide
  Sense Strand Starting at position 810 of SEQ ID NO: 318966
guuucugacuuucuauuau

SEQ ID NO: 382464 - RNA, 19 nt, Artificial Sequence
  Description of Artificial Sequence: Synthetic oligonucleotide
  Antisense Strand to SEQ ID NO: 382463
auaauagaaagucagaaac

SEQ ID NO: 382465 - RNA, 19 nt, Artificial Sequence
  Description of Artificial Sequence: Synthetic oligonucleotide
  Sense Strand Starting at position 811 of SEQ ID NO: 315398
ccugauugucaauaacgca

SEQ ID NO: 382466 - RNA, 19 nt, Artificial Sequence
  Description of Artificial Sequence: Synthetic oligonucleotide
  Antisense Strand to SEQ ID NO: 382465
ugcguuauugacaaucagg

SEQ ID NO: 382467 - RNA, 19 nt, Artificial Sequence
  Description of Artificial Sequence: Synthetic oligonucleotide
  Sense Strand Starting at position 811 of SEQ ID NO: 316169
cuuauaucauaggucauua

SEQ ID NO: 382468 - RNA, 19 nt, Artificial Sequence
  Description of Artificial Sequence: Synthetic oligonucleotide
  Antisense Strand to SEQ ID NO: 382467
uaaugaccuaugauauaag

SEQ ID NO: 382469 - RNA, 19 nt, Artificial Sequence
  Description of Artificial Sequence: Synthetic oligonucleotide
  Sense Strand Starting at position 811 of SEQ ID NO: 316182
ucauuaaagcgcuaggaca

SEQ ID NO: 382470 - RNA, 19 nt, Artificial Sequence
  Description of Artificial Sequence: Synthetic oligonucleotide
  Antisense Strand to SEQ ID NO: 382469
uguccuagcgcuuuaauga

SEQ ID NO: 382471 - RNA, 19 nt, Artificial Sequence
  Description of Artificial Sequence: Synthetic oligonucleotide
  Sense Strand Starting at position 811 of SEQ ID NO: 317288
cugcaaugacauuaugagu

SEQ ID NO: 382472 - RNA, 19 nt, Artificial Sequence
  Description of Artificial Sequence: Synthetic oligonucleotide
  Antisense Strand to SEQ ID NO: 382471
acucauaaugucauugcag

SEQ ID NO: 382473 - RNA, 19 nt, Artificial Sequence
  Description of Artificial Sequence: Synthetic oligonucleotide
  Sense Strand Starting at position 811 of SEQ ID NO: 317312
uugggaaagagguguugau

SEQ ID NO: 382474 - RNA, 19 nt, Artificial Sequence
  Description of Artificial Sequence: Synthetic oligonucleotide
  Antisense Strand to SEQ ID NO: 382473
aucaacaccucuuucccaa

SEQ ID NO: 382475 - RNA, 19 nt, Artificial Sequence
  Description of Artificial Sequence: Synthetic oligonucleotide
  Sense Strand Starting at position 811 of SEQ ID NO: 317328
gauauaaagugugcaauua

SEQ ID NO: 382476 - RNA, 19 nt, Artificial Sequence
  Description of Artificial Sequence: Synthetic oligonucleotide
  Antisense Strand to SEQ ID NO: 382475
uaauugcacacuuuauauc

SEQ ID NO: 382477 - RNA, 19 nt, Artificial Sequence
  Description of Artificial Sequence: Synthetic oligonucleotide
  Sense Strand Starting at position 811 of SEQ ID NO: 317483
cagucuugaaugugguaga

SEQ ID NO: 382478 - RNA, 19 nt, Artificial Sequence
  Description of Artificial Sequence: Synthetic oligonucleotide
  Antisense Strand to SEQ ID NO: 382477
ucuaccacauucaagacug

SEQ ID NO: 382479 - RNA, 19 nt, Artificial Sequence
  Description of Artificial Sequence: Synthetic oligonucleotide
  Sense Strand Starting at position 811 of SEQ ID NO: 317508
cugugucugguacaugaau

SEQ ID NO: 382480 - RNA, 19 nt, Artificial Sequence
  Description of Artificial Sequence: Synthetic oligonucleotide
  Antisense Strand to SEQ ID NO: 382479
auucauguaccagacacag

SEQ ID NO: 382481 - RNA, 19 nt, Artificial Sequence
  Description of Artificial Sequence: Synthetic oligonucleotide
  Sense Strand Starting at position 811 of SEQ ID NO: 317554
augucuggauaagugaaua

SEQ ID NO: 382482 - RNA, 19 nt, Artificial Sequence
  Description of Artificial Sequence: Synthetic oligonucleotide
  Antisense Strand to SEQ ID NO: 382481
uauucacuuauccagacau

SEQ ID NO: 382483 - RNA, 19 nt, Artificial Sequence
  Description of Artificial Sequence: Synthetic oligonucleotide
  Sense Strand Starting at position 811 of SEQ ID NO: 317581
aaauaaaugccacgugaag

SEQ ID NO: 382484 - RNA, 19 nt, Artificial Sequence
  Description of Artificial Sequence: Synthetic oligonucleotide
  Antisense Strand to SEQ ID NO: 382483
cuucacguggcauuuauuu

SEQ ID NO: 382485 - RNA, 19 nt, Artificial Sequence
  Description of Artificial Sequence: Synthetic oligonucleotide
  Sense Strand Starting at position 811 of SEQ ID NO: 317583
auaaaugccacgugaagaa

SEQ ID NO: 382486 - RNA, 19 nt, Artificial Sequence
  Description of Artificial Sequence: Synthetic oligonucleotide
  Antisense Strand to SEQ ID NO: 382485
uucuucacguggcauuuau

SEQ ID NO: 382487 - RNA, 19 nt, Artificial Sequence
  Description of Artificial Sequence: Synthetic oligonucleotide
  Sense Strand Starting at position 811 of SEQ ID NO: 317620
guaauauaagaaugcacca

SEQ ID NO: 382488 - RNA, 19 nt, Artificial Sequence
  Description of Artificial Sequence: Synthetic oligonucleotide
  Antisense Strand to SEQ ID NO: 382487
uggugcauucuuauauuac

SEQ ID NO: 382489 - RNA, 19 nt, Artificial Sequence
  Description of Artificial Sequence: Synthetic oligonucleotide
  Sense Strand Starting at position 811 of SEQ ID NO: 317741
agaaacuuguuacuaaggu

SEQ ID NO: 382490 - RNA, 19 nt, Artificial Sequence
  Description of Artificial Sequence: Synthetic oligonucleotide
  Antisense Strand to SEQ ID NO: 382489
accuuaguaacaaguuucu

SEQ ID NO: 382491 - RNA, 19 nt, Artificial Sequence
  Description of Artificial Sequence: Synthetic oligonucleotide
  Sense Strand Starting at position 811 of SEQ ID NO: 317908
aaaugaaugcuagaugucu

SEQ ID NO: 382492 - RNA, 19 nt, Artificial Sequence
  Description of Artificial Sequence: Synthetic oligonucleotide
  Antisense Strand to SEQ ID NO: 382491
agacaucuagcauucauuu

SEQ ID NO: 382493 - RNA, 19 nt, Artificial Sequence
  Description of Artificial Sequence: Synthetic oligonucleotide
  Sense Strand Starting at position 811 of SEQ ID NO: 317914
augcuagaugucuagucca

SEQ ID NO: 382494 - RNA, 19 nt, Artificial Sequence
  Description of Artificial Sequence: Synthetic oligonucleotide
  Antisense Strand to SEQ ID NO: 382493
uggacuagacaucuagcau

SEQ ID NO: 382495 - RNA, 19 nt, Artificial Sequence
  Description of Artificial Sequence: Synthetic oligonucleotide
  Sense Strand Starting at position 811 of SEQ ID NO: 317968
agaaauagauuccaaggaa

SEQ ID NO: 382496 - RNA, 19 nt, Artificial Sequence
  Description of Artificial Sequence: Synthetic oligonucleotide
  Antisense Strand to SEQ ID NO: 382495
uuccuuggaaucuauuucu

SEQ ID NO: 382497 - RNA, 19 nt, Artificial Sequence
  Description of Artificial Sequence: Synthetic oligonucleotide
  Sense Strand Starting at position 811 of SEQ ID NO: 318052
auaagagucacuuggugac

SEQ ID NO: 382498 - RNA, 19 nt, Artificial Sequence
  Description of Artificial Sequence: Synthetic oligonucleotide
  Antisense Strand to SEQ ID NO: 382497
gucaccaagugacucuuau

SEQ ID NO: 382499 - RNA, 19 nt, Artificial Sequence
  Description of Artificial Sequence: Synthetic oligonucleotide
  Sense Strand Starting at position 811 of SEQ ID NO: 318070
cuggguaauuggucauuaa

SEQ ID NO: 382500 - RNA, 19 nt, Artificial Sequence
  Description of Artificial Sequence: Synthetic oligonucleotide
  Antisense Strand to SEQ ID NO: 382499
uuaaugaccaauuacccag

SEQ ID NO: 382501 - RNA, 19 nt, Artificial Sequence
  Description of Artificial Sequence: Synthetic oligonucleotide
  Sense Strand Starting at position 811 of SEQ ID NO: 318071
uggguaauuggucauuaac

SEQ ID NO: 382502 - RNA, 19 nt, Artificial Sequence
  Description of Artificial Sequence: Synthetic oligonucleotide
  Antisense Strand to SEQ ID NO: 382501
guuaaugaccaauuaccca

SEQ ID NO: 382503 - RNA, 19 nt, Artificial Sequence
  Description of Artificial Sequence: Synthetic oligonucleotide
  Sense Strand Starting at position 811 of SEQ ID NO: 318073
gguaauuggucauuaacua

SEQ ID NO: 382504 - RNA, 19 nt, Artificial Sequence
  Description of Artificial Sequence: Synthetic oligonucleotide
  Antisense Strand to SEQ ID NO: 382503
uaguuaaugaccaauuacc

SEQ ID NO: 382505 - RNA, 19 nt, Artificial Sequence
  Description of Artificial Sequence: Synthetic oligonucleotide
  Sense Strand Starting at position 811 of SEQ ID NO: 318074
guaauuggucauuaacuau

SEQ ID NO: 382506 - RNA, 19 nt, Artificial Sequence
  Description of Artificial Sequence: Synthetic oligonucleotide
  Antisense Strand to SEQ ID NO: 382505
auaguuaaugaccaauuac

SEQ ID NO: 382507 - RNA, 19 nt, Artificial Sequence
  Description of Artificial Sequence: Synthetic oligonucleotide
  Sense Strand Starting at position 811 of SEQ ID NO: 318142
guggucaacuaggugagau

SEQ ID NO: 382508 - RNA, 19 nt, Artificial Sequence
  Description of Artificial Sequence: Synthetic oligonucleotide
  Antisense Strand to SEQ ID NO: 382507
aucucaccuaguugaccac

SEQ ID NO: 382509 - RNA, 19 nt, Artificial Sequence
  Description of Artificial Sequence: Synthetic oligonucleotide
  Sense Strand Starting at position 811 of SEQ ID NO: 318143
uggucaacuaggugagauc

SEQ ID NO: 382510 - RNA, 19 nt, Artificial Sequence
  Description of Artificial Sequence: Synthetic oligonucleotide
  Antisense Strand to SEQ ID NO: 382509
gaucucaccuaguugacca

SEQ ID NO: 382511 - RNA, 19 nt, Artificial Sequence
  Description of Artificial Sequence: Synthetic oligonucleotide
  Sense Strand Starting at position 811 of SEQ ID NO: 318178
ccuguuagagcuuaauaga

SEQ ID NO: 382512 - RNA, 19 nt, Artificial Sequence
  Description of Artificial Sequence: Synthetic oligonucleotide
  Antisense Strand to SEQ ID NO: 382511
ucuauuaagcucuaacagg

SEQ ID NO: 382513 - RNA, 19 nt, Artificial Sequence
  Description of Artificial Sequence: Synthetic oligonucleotide
  Sense Strand Starting at position 811 of SEQ ID NO: 318324
guggacauaugucugguaa

SEQ ID NO: 382514 - RNA, 19 nt, Artificial Sequence
  Description of Artificial Sequence: Synthetic oligonucleotide
  Antisense Strand to SEQ ID NO: 382513
uuaccagacauauguccac

SEQ ID NO: 382515 - RNA, 19 nt, Artificial Sequence
  Description of Artificial Sequence: Synthetic oligonucleotide
  Sense Strand Starting at position 811 of SEQ ID NO: 318325
uggacauaugucugguaaa

SEQ ID NO: 382516 - RNA, 19 nt, Artificial Sequence
  Description of Artificial Sequence: Synthetic oligonucleotide
  Antisense Strand to SEQ ID NO: 382515
uuuaccagacauaugucca

SEQ ID NO: 382517 - RNA, 19 nt, Artificial Sequence
  Description of Artificial Sequence: Synthetic oligonucleotide
  Sense Strand Starting at position 811 of SEQ ID NO: 318339
guaaauagccaagauguga

SEQ ID NO: 382518 - RNA, 19 nt, Artificial Sequence
  Description of Artificial Sequence: Synthetic oligonucleotide
  Antisense Strand to SEQ ID NO: 382517
ucacaucuuggcuauuuac

SEQ ID NO: 382519 - RNA, 19 nt, Artificial Sequence
  Description of Artificial Sequence: Synthetic oligonucleotide
  Sense Strand Starting at position 811 of SEQ ID NO: 318445
uucuuacuuguagagugaa

SEQ ID NO: 382520 - RNA, 19 nt, Artificial Sequence
  Description of Artificial Sequence: Synthetic oligonucleotide
  Antisense Strand to SEQ ID NO: 382519
uucacucuacaaguaagaa

SEQ ID NO: 382521 - RNA, 19 nt, Artificial Sequence
  Description of Artificial Sequence: Synthetic oligonucleotide
  Sense Strand Starting at position 811 of SEQ ID NO: 318468
caugaucuaggauggcaaa

SEQ ID NO: 382522 - RNA, 19 nt, Artificial Sequence
  Description of Artificial Sequence: Synthetic oligonucleotide
  Antisense Strand to SEQ ID NO: 382521
uuugccauccuagaucaug

SEQ ID NO: 382523 - RNA, 19 nt, Artificial Sequence
  Description of Artificial Sequence: Synthetic oligonucleotide
  Sense Strand Starting at position 811 of SEQ ID NO: 318555
gcagaauuaccaggacccu

SEQ ID NO: 382524 - RNA, 19 nt, Artificial Sequence
  Description of Artificial Sequence: Synthetic oligonucleotide
  Antisense Strand to SEQ ID NO: 382523
aggguccugguaauucugc

SEQ ID NO: 382525 - RNA, 19 nt, Artificial Sequence
  Description of Artificial Sequence: Synthetic oligonucleotide
  Sense Strand Starting at position 811 of SEQ ID NO: 318621
gucaaauuauugucaaaug

SEQ ID NO: 382526 - RNA, 19 nt, Artificial Sequence
  Description of Artificial Sequence: Synthetic oligonucleotide
  Antisense Strand to SEQ ID NO: 382525
cauuugacaauaauuugac

SEQ ID NO: 382527 - RNA, 19 nt, Artificial Sequence
  Description of Artificial Sequence: Synthetic oligonucleotide
  Sense Strand Starting at position 811 of SEQ ID NO: 318655
aggaguuuaucuguaggug

SEQ ID NO: 382528 - RNA, 19 nt, Artificial Sequence
  Description of Artificial Sequence: Synthetic oligonucleotide
  Antisense Strand to SEQ ID NO: 382527
caccuacagauaaacuccu

SEQ ID NO: 382529 - RNA, 19 nt, Artificial Sequence
  Description of Artificial Sequence: Synthetic oligonucleotide
  Sense Strand Starting at position 811 of SEQ ID NO: 318656
ggaguuuaucuguagguga

SEQ ID NO: 382530 - RNA, 19 nt, Artificial Sequence
  Description of Artificial Sequence: Synthetic oligonucleotide
  Antisense Strand to SEQ ID NO: 382529
ucaccuacagauaaacucc

SEQ ID NO: 382531 - RNA, 19 nt, Artificial Sequence
  Description of Artificial Sequence: Synthetic oligonucleotide
  Sense Strand Starting at position 811 of SEQ ID NO: 318667
guaggugacucaucuuaaa

SEQ ID NO: 382532 - RNA, 19 nt, Artificial Sequence
  Description of Artificial Sequence: Synthetic oligonucleotide
  Antisense Strand to SEQ ID NO: 382531
uuuaagaugagucaccuac

SEQ ID NO: 382533 - RNA, 19 nt, Artificial Sequence
  Description of Artificial Sequence: Synthetic oligonucleotide
  Sense Strand Starting at position 811 of SEQ ID NO: 318690
uuaaucagagaguguaguu

SEQ ID NO: 382534 - RNA, 19 nt, Artificial Sequence
  Description of Artificial Sequence: Synthetic oligonucleotide
  Antisense Strand to SEQ ID NO: 382533
aacuacacucucugauuaa

SEQ ID NO: 382535 - RNA, 19 nt, Artificial Sequence
  Description of Artificial Sequence: Synthetic oligonucleotide
  Sense Strand Starting at position 811 of SEQ ID NO: 318695
cagagaguguaguuaauua

SEQ ID NO: 382536 - RNA, 19 nt, Artificial Sequence
  Description of Artificial Sequence: Synthetic oligonucleotide
  Antisense Strand to SEQ ID NO: 382535
uaauuaacuacacucucug

SEQ ID NO: 382537 - RNA, 19 nt, Artificial Sequence
  Description of Artificial Sequence: Synthetic oligonucleotide
  Sense Strand Starting at position 811 of SEQ ID NO: 318895
uccauaguauagucauaaa

SEQ ID NO: 382538 - RNA, 19 nt, Artificial Sequence
  Description of Artificial Sequence: Synthetic oligonucleotide
  Antisense Strand to SEQ ID NO: 382537
uuuaugacuauacuaugga

SEQ ID NO: 382539 - RNA, 19 nt, Artificial Sequence
  Description of Artificial Sequence: Synthetic oligonucleotide
  Sense Strand Starting at position 811 of SEQ ID NO: 318935
aguaauaguuacccaacuu

SEQ ID NO: 382540 - RNA, 19 nt, Artificial Sequence
  Description of Artificial Sequence: Synthetic oligonucleotide
  Antisense Strand to SEQ ID NO: 382539
aaguuggguaacuauuacu

SEQ ID NO: 382541 - RNA, 19 nt, Artificial Sequence
  Description of Artificial Sequence: Synthetic oligonucleotide
  Sense Strand Starting at position 811 of SEQ ID NO: 318973
gcuuguauaccugaucaaa

SEQ ID NO: 382542 - RNA, 19 nt, Artificial Sequence
  Description of Artificial Sequence: Synthetic oligonucleotide
  Antisense Strand to SEQ ID NO: 382541
uuugaucagguauacaagc

SEQ ID NO: 382543 - RNA, 19 nt, Artificial Sequence
  Description of Artificial Sequence: Synthetic oligonucleotide
  Sense Strand Starting at position 811 of SEQ ID NO: 319088
guggauauccuuuaaacgu

SEQ ID NO: 382544 - RNA, 19 nt, Artificial Sequence
  Description of Artificial Sequence: Synthetic oligonucleotide
  Antisense Strand to SEQ ID NO: 382543
acguuuaaaggauauccac

SEQ ID NO: 382545 - RNA, 19 nt, Artificial Sequence
  Description of Artificial Sequence: Synthetic oligonucleotide
  Sense Strand Starting at position 812 of SEQ ID NO: 315243
gugucagaagguuaacaau

SEQ ID NO: 382546 - RNA, 19 nt, Artificial Sequence
  Description of Artificial Sequence: Synthetic oligonucleotide
  Antisense Strand to SEQ ID NO: 382545
auuguuaaccuucugacac

SEQ ID NO: 382547 - RNA, 19 nt, Artificial Sequence
  Description of Artificial Sequence: Synthetic oligonucleotide
  Sense Strand Starting at position 812 of SEQ ID NO: 315624
gaagccauccuagaaaguu

SEQ ID NO: 382548 - RNA, 19 nt, Artificial Sequence
  Description of Artificial Sequence: Synthetic oligonucleotide
  Antisense Strand to SEQ ID NO: 382547
aacuuucuaggauggcuuc

SEQ ID NO: 382549 - RNA, 19 nt, Artificial Sequence
  Description of Artificial Sequence: Synthetic oligonucleotide
  Sense Strand Starting at position 812 of SEQ ID NO: 315777
uuacuugaccugugaguag

SEQ ID NO: 382550 - RNA, 19 nt, Artificial Sequence
  Description of Artificial Sequence: Synthetic oligonucleotide
  Antisense Strand to SEQ ID NO: 382549
cuacucacaggucaaguaa

SEQ ID NO: 382551 - RNA, 19 nt, Artificial Sequence
  Description of Artificial Sequence: Synthetic oligonucleotide
  Sense Strand Starting at position 812 of SEQ ID NO: 315789
ugaguagacuuccugugag

SEQ ID NO: 382552 - RNA, 19 nt, Artificial Sequence
  Description of Artificial Sequence: Synthetic oligonucleotide
  Antisense Strand to SEQ ID NO: 382551
cucacaggaagucuacuca

SEQ ID NO: 382553 - RNA, 19 nt, Artificial Sequence
  Description of Artificial Sequence: Synthetic oligonucleotide
  Sense Strand Starting at position 812 of SEQ ID NO: 315792
guagacuuccugugagaaa

SEQ ID NO: 382554 - RNA, 19 nt, Artificial Sequence
  Description of Artificial Sequence: Synthetic oligonucleotide
  Antisense Strand to SEQ ID NO: 382553
uuucucacaggaagucuac

SEQ ID NO: 382555 - RNA, 19 nt, Artificial Sequence
  Description of Artificial Sequence: Synthetic oligonucleotide
  Sense Strand Starting at position 812 of SEQ ID NO: 315840
auggaagaccuuugauagu

SEQ ID NO: 382556 - RNA, 19 nt, Artificial Sequence
  Description of Artificial Sequence: Synthetic oligonucleotide
  Antisense Strand to SEQ ID NO: 382555
acuaucaaaggucuuccau

SEQ ID NO: 382557 - RNA, 19 nt, Artificial Sequence
  Description of Artificial Sequence: Synthetic oligonucleotide
  Sense Strand Starting at position 812 of SEQ ID NO: 315849
cuuugauaguuagcagaau

SEQ ID NO: 382558 - RNA, 19 nt, Artificial Sequence
  Description of Artificial Sequence: Synthetic oligonucleotide
  Antisense Strand to SEQ ID NO: 382557
auucugcuaacuaucaaag

SEQ ID NO: 382559 - RNA, 19 nt, Artificial Sequence
  Description of Artificial Sequence: Synthetic oligonucleotide
  Sense Strand Starting at position 812 of SEQ ID NO: 315858
uuagcagaauuauugggau

SEQ ID NO: 382560 - RNA, 19 nt, Artificial Sequence
  Description of Artificial Sequence: Synthetic oligonucleotide
  Antisense Strand to SEQ ID NO: 382559
aucccaauaauucugcuaa

SEQ ID NO: 382561 - RNA, 19 nt, Artificial Sequence
  Description of Artificial Sequence: Synthetic oligonucleotide
  Sense Strand Starting at position 812 of SEQ ID NO: 315906
ccuccacuauggguuaaau

SEQ ID NO: 382562 - RNA, 19 nt, Artificial Sequence
  Description of Artificial Sequence: Synthetic oligonucleotide
  Antisense Strand to SEQ ID NO: 382561
auuuaacccauaguggagg

SEQ ID NO: 382563 - RNA, 19 nt, Artificial Sequence
  Description of Artificial Sequence: Synthetic oligonucleotide
  Sense Strand Starting at position 812 of SEQ ID NO: 315908
uccacuauggguuaaaugu

SEQ ID NO: 382564 - RNA, 19 nt, Artificial Sequence
  Description of Artificial Sequence: Synthetic oligonucleotide
  Antisense Strand to SEQ ID NO: 382563
acauuuaacccauagugga

SEQ ID NO: 382565 - RNA, 19 nt, Artificial Sequence
  Description of Artificial Sequence: Synthetic oligonucleotide
  Sense Strand Starting at position 812 of SEQ ID NO: 316173
aauguuaggucauuaaagu

SEQ ID NO: 382566 - RNA, 19 nt, Artificial Sequence
  Description of Artificial Sequence: Synthetic oligonucleotide
  Antisense Strand to SEQ ID NO: 382565
acuuuaaugaccuaacauu

SEQ ID NO: 382567 - RNA, 19 nt, Artificial Sequence
  Description of Artificial Sequence: Synthetic oligonucleotide
  Sense Strand Starting at position 812 of SEQ ID NO: 316174
auguuaggucauuaaagug

SEQ ID NO: 382568 - RNA, 19 nt, Artificial Sequence
  Description of Artificial Sequence: Synthetic oligonucleotide
  Antisense Strand to SEQ ID NO: 382567
cacuuuaaugaccuaacau

SEQ ID NO: 382569 - RNA, 19 nt, Artificial Sequence
  Description of Artificial Sequence: Synthetic oligonucleotide
  Sense Strand Starting at position 812 of SEQ ID NO: 316245
ccucuaacuugcguaauuu

SEQ ID NO: 382570 - RNA, 19 nt, Artificial Sequence
  Description of Artificial Sequence: Synthetic oligonucleotide
  Antisense Strand to SEQ ID NO: 382569
aaauuacgcaaguuagagg

SEQ ID NO: 382571 - RNA, 19 nt, Artificial Sequence
  Description of Artificial Sequence: Synthetic oligonucleotide
  Sense Strand Starting at position 812 of SEQ ID NO: 317288
uugcaaugacauuaugagu

SEQ ID NO: 382572 - RNA, 19 nt, Artificial Sequence
  Description of Artificial Sequence: Synthetic oligonucleotide
  Antisense Strand to SEQ ID NO: 382571
acucauaaugucauugcaa

SEQ ID NO: 382573 - RNA, 19 nt, Artificial Sequence
  Description of Artificial Sequence: Synthetic oligonucleotide
  Sense Strand Starting at position 812 of SEQ ID NO: 317475
aggcauucucuguauacac

SEQ ID NO: 382574 - RNA, 19 nt, Artificial Sequence
  Description of Artificial Sequence: Synthetic oligonucleotide
  Antisense Strand to SEQ ID NO: 382573
guguauacagagaaugccu

SEQ ID NO: 382575 - RNA, 19 nt, Artificial Sequence
  Description of Artificial Sequence: Synthetic oligonucleotide
  Sense Strand Starting at position 812 of SEQ ID NO: 317477
gcauucucuguauacacua

SEQ ID NO: 382576 - RNA, 19 nt, Artificial Sequence
  Description of Artificial Sequence: Synthetic oligonucleotide
  Antisense Strand to SEQ ID NO: 382575
uaguguauacagagaaugc

SEQ ID NO: 382577 - RNA, 19 nt, Artificial Sequence
  Description of Artificial Sequence: Synthetic oligonucleotide
  Sense Strand Starting at position 812 of SEQ ID NO: 317601
augagugccauaugaagaa

SEQ ID NO: 382578 - RNA, 19 nt, Artificial Sequence
  Description of Artificial Sequence: Synthetic oligonucleotide
  Antisense Strand to SEQ ID NO: 382577
uucuucauauggcacucau

SEQ ID NO: 382579 - RNA, 19 nt, Artificial Sequence
  Description of Artificial Sequence: Synthetic oligonucleotide
  Sense Strand Starting at position 812 of SEQ ID NO: 317605
gugccauaugaagaaucuu

SEQ ID NO: 382580 - RNA, 19 nt, Artificial Sequence
  Description of Artificial Sequence: Synthetic oligonucleotide
  Antisense Strand to SEQ ID NO: 382579
aagauucuucauauggcac

SEQ ID NO: 382581 - RNA, 19 nt, Artificial Sequence
  Description of Artificial Sequence: Synthetic oligonucleotide
  Sense Strand Starting at position 812 of SEQ ID NO: 317764
agaaacuucuuaguaaggu

SEQ ID NO: 382582 - RNA, 19 nt, Artificial Sequence
  Description of Artificial Sequence: Synthetic oligonucleotide
  Antisense Strand to SEQ ID NO: 382581
accuuacuaagaaguuucu

SEQ ID NO: 382583 - RNA, 19 nt, Artificial Sequence
  Description of Artificial Sequence: Synthetic oligonucleotide
  Sense Strand Starting at position 812 of SEQ ID NO: 317879
gaaugaggucuagggaucu

SEQ ID NO: 382584 - RNA, 19 nt, Artificial Sequence
  Description of Artificial Sequence: Synthetic oligonucleotide
  Antisense Strand to SEQ ID NO: 382583
agaucccuagaccucauuc

SEQ ID NO: 382585 - RNA, 19 nt, Artificial Sequence
  Description of Artificial Sequence: Synthetic oligonucleotide
  Sense Strand Starting at position 812 of SEQ ID NO: 317957
gauauaacauuggaagaga

SEQ ID NO: 382586 - RNA, 19 nt, Artificial Sequence
  Description of Artificial Sequence: Synthetic oligonucleotide
  Antisense Strand to SEQ ID NO: 382585
ucucuuccaauguuauauc

SEQ ID NO: 382587 - RNA, 19 nt, Artificial Sequence
  Description of Artificial Sequence: Synthetic oligonucleotide
  Sense Strand Starting at position 812 of SEQ ID NO: 318048
ggaaguaaguggucaguaa

SEQ ID NO: 382588 - RNA, 19 nt, Artificial Sequence
  Description of Artificial Sequence: Synthetic oligonucleotide
  Antisense Strand to SEQ ID NO: 382587
uuacugaccacuuacuucc

SEQ ID NO: 382589 - RNA, 19 nt, Artificial Sequence
  Description of Artificial Sequence: Synthetic oligonucleotide
  Sense Strand Starting at position 812 of SEQ ID NO: 318049
gaaguaaguggucaguaaa

SEQ ID NO: 382590 - RNA, 19 nt, Artificial Sequence
  Description of Artificial Sequence: Synthetic oligonucleotide
  Antisense Strand to SEQ ID NO: 382589
uuuacugaccacuuacuuc

SEQ ID NO: 382591 - RNA, 19 nt, Artificial Sequence
  Description of Artificial Sequence: Synthetic oligonucleotide
  Sense Strand Starting at position 812 of SEQ ID NO: 318052
guaaguggucaguaaagga

SEQ ID NO: 382592 - RNA, 19 nt, Artificial Sequence
  Description of Artificial Sequence: Synthetic oligonucleotide
  Antisense Strand to SEQ ID NO: 382591
uccuuuacugaccacuuac

SEQ ID NO: 382593 - RNA, 19 nt, Artificial Sequence
  Description of Artificial Sequence: Synthetic oligonucleotide
  Sense Strand Starting at position 812 of SEQ ID NO: 318232
gguagucaaaggcauaguu

SEQ ID NO: 382594 - RNA, 19 nt, Artificial Sequence
  Description of Artificial Sequence: Synthetic oligonucleotide
  Antisense Strand to SEQ ID NO: 382593
aacuaugccuuugacuacc

SEQ ID NO: 382595 - RNA, 19 nt, Artificial Sequence
  Description of Artificial Sequence: Synthetic oligonucleotide
  Sense Strand Starting at position 812 of SEQ ID NO: 318234
uagucaaaggcauaguuaa

SEQ ID NO: 382596 - RNA, 19 nt, Artificial Sequence
  Description of Artificial Sequence: Synthetic oligonucleotide
  Antisense Strand to SEQ ID NO: 382595
uuaacuaugccuuugacua

SEQ ID NO: 382597 - RNA, 19 nt, Artificial Sequence
  Description of Artificial Sequence: Synthetic oligonucleotide
  Sense Strand Starting at position 812 of SEQ ID NO: 318304
aauaaacucgagcagguua

SEQ ID NO: 382598 - RNA, 19 nt, Artificial Sequence
  Description of Artificial Sequence: Synthetic oligonucleotide
  Antisense Strand to SEQ ID NO: 382597
uaaccugcucgaguuuauu

SEQ ID NO: 382599 - RNA, 19 nt, Artificial Sequence
  Description of Artificial Sequence: Synthetic oligonucleotide
  Sense Strand Starting at position 812 of SEQ ID NO: 318309
acucgagcagguuauauua

SEQ ID NO: 382600 - RNA, 19 nt, Artificial Sequence
  Description of Artificial Sequence: Synthetic oligonucleotide
  Antisense Strand to SEQ ID NO: 382599
uaauauaaccugcucgagu

SEQ ID NO: 382601 - RNA, 19 nt, Artificial Sequence
  Description of Artificial Sequence: Synthetic oligonucleotide
  Sense Strand Starting at position 812 of SEQ ID NO: 318356
guaaauggccaagauguua

SEQ ID NO: 382602 - RNA, 19 nt, Artificial Sequence
  Description of Artificial Sequence: Synthetic oligonucleotide
  Antisense Strand to SEQ ID NO: 382601
uaacaucuuggccauuuac

SEQ ID NO: 382603 - RNA, 19 nt, Artificial Sequence
  Description of Artificial Sequence: Synthetic oligonucleotide
  Sense Strand Starting at position 812 of SEQ ID NO: 318394
agucuugguggcuaucaga

SEQ ID NO: 382604 - RNA, 19 nt, Artificial Sequence
  Description of Artificial Sequence: Synthetic oligonucleotide
  Antisense Strand to SEQ ID NO: 382603
ucugauagccaccaagacu

SEQ ID NO: 382605 - RNA, 19 nt, Artificial Sequence
  Description of Artificial Sequence: Synthetic oligonucleotide
  Sense Strand Starting at position 812 of SEQ ID NO: 318496
uaggauggccagugaaaca

SEQ ID NO: 382606 - RNA, 19 nt, Artificial Sequence
  Description of Artificial Sequence: Synthetic oligonucleotide
  Antisense Strand to SEQ ID NO: 382605
uguuucacuggccauccua

SEQ ID NO: 382607 - RNA, 19 nt, Artificial Sequence
  Description of Artificial Sequence: Synthetic oligonucleotide
  Sense Strand Starting at position 812 of SEQ ID NO: 318588
agguaaucaagguggacau

SEQ ID NO: 382608 - RNA, 19 nt, Artificial Sequence
  Description of Artificial Sequence: Synthetic oligonucleotide
  Antisense Strand to SEQ ID NO: 382607
auguccaccuugauuaccu

SEQ ID NO: 382609 - RNA, 19 nt, Artificial Sequence
  Description of Artificial Sequence: Synthetic oligonucleotide
  Sense Strand Starting at position 812 of SEQ ID NO: 318589
gguaaucaagguggacaua

SEQ ID NO: 382610 - RNA, 19 nt, Artificial Sequence
  Description of Artificial Sequence: Synthetic oligonucleotide
  Antisense Strand to SEQ ID NO: 382609
uauguccaccuugauuacc

SEQ ID NO: 382611 - RNA, 19 nt, Artificial Sequence
  Description of Artificial Sequence: Synthetic oligonucleotide
  Sense Strand Starting at position 812 of SEQ ID NO: 318661
gcugucaaauuauugacaa

SEQ ID NO: 382612 - RNA, 19 nt, Artificial Sequence
  Description of Artificial Sequence: Synthetic oligonucleotide
  Antisense Strand to SEQ ID NO: 382611
uugucaauaauuugacagc

SEQ ID NO: 382613 - RNA, 19 nt, Artificial Sequence
  Description of Artificial Sequence: Synthetic oligonucleotide
  Sense Strand Starting at position 812 of SEQ ID NO: 318703
guaagugacugaccuuaaa

SEQ ID NO: 382614 - RNA, 19 nt, Artificial Sequence
  Description of Artificial Sequence: Synthetic oligonucleotide
  Antisense Strand to SEQ ID NO: 382613
uuuaaggucagucacuuac

SEQ ID NO: 382615 - RNA, 19 nt, Artificial Sequence
  Description of Artificial Sequence: Synthetic oligonucleotide
  Sense Strand Starting at position 812 of SEQ ID NO: 318726
uuaauuagagaaugugguu

SEQ ID NO: 382616 - RNA, 19 nt, Artificial Sequence
  Description of Artificial Sequence: Synthetic oligonucleotide
  Antisense Strand to SEQ ID NO: 382615
aaccacauucucuaauuaa

SEQ ID NO: 382617 - RNA, 19 nt, Artificial Sequence
  Description of Artificial Sequence: Synthetic oligonucleotide
  Sense Strand Starting at position 812 of SEQ ID NO: 318731
uagagaaugugguuaguua

SEQ ID NO: 382618 - RNA, 19 nt, Artificial Sequence
  Description of Artificial Sequence: Synthetic oligonucleotide
  Antisense Strand to SEQ ID NO: 382617
uaacuaaccacauucucua

SEQ ID NO: 382619 - RNA, 19 nt, Artificial Sequence
  Description of Artificial Sequence: Synthetic oligonucleotide
  Sense Strand Starting at position 812 of SEQ ID NO: 318732
agagaaugugguuaguuaa

SEQ ID NO: 382620 - RNA, 19 nt, Artificial Sequence
  Description of Artificial Sequence: Synthetic oligonucleotide
  Antisense Strand to SEQ ID NO: 382619
uuaacuaaccacauucucu

SEQ ID NO: 382621 - RNA, 19 nt, Artificial Sequence
  Description of Artificial Sequence: Synthetic oligonucleotide
  Sense Strand Starting at position 812 of SEQ ID NO: 318991
ccaucuugcuauuucgaca

SEQ ID NO: 382622 - RNA, 19 nt, Artificial Sequence
  Description of Artificial Sequence: Synthetic oligonucleotide
  Antisense Strand to SEQ ID NO: 382621
ugucgaaauagcaagaugg

SEQ ID NO: 382623 - RNA, 19 nt, Artificial Sequence
  Description of Artificial Sequence: Synthetic oligonucleotide
  Sense Strand Starting at position 812 of SEQ ID NO: 319124
guggauauccuuuaaaugu

SEQ ID NO: 382624 - RNA, 19 nt, Artificial Sequence
  Description of Artificial Sequence: Synthetic oligonucleotide
  Antisense Strand to SEQ ID NO: 382623
acauuuaaaggauauccac

SEQ ID NO: 382625 - RNA, 19 nt, Artificial Sequence
  Description of Artificial Sequence: Synthetic oligonucleotide
  Sense Strand Starting at position 813 of SEQ ID NO: 315554
uucugaauucguuagcaau

SEQ ID NO: 382626 - RNA, 19 nt, Artificial Sequence
  Description of Artificial Sequence: Synthetic oligonucleotide
  Antisense Strand to SEQ ID NO: 382625
auugcuaacgaauucagaa

SEQ ID NO: 382627 - RNA, 19 nt, Artificial Sequence
  Description of Artificial Sequence: Synthetic oligonucleotide
  Sense Strand Starting at position 813 of SEQ ID NO: 315560
auucguuagcaauaugaau

SEQ ID NO: 382628 - RNA, 19 nt, Artificial Sequence
  Description of Artificial Sequence: Synthetic oligonucleotide
  Antisense Strand to SEQ ID NO: 382627
auucauauugcuaacgaau

SEQ ID NO: 382629 - RNA, 19 nt, Artificial Sequence
  Description of Artificial Sequence: Synthetic oligonucleotide
  Sense Strand Starting at position 813 of SEQ ID NO: 315809
agaagugaaguuugccaau

SEQ ID NO: 382630 - RNA, 19 nt, Artificial Sequence
  Description of Artificial Sequence: Synthetic oligonucleotide
  Antisense Strand to SEQ ID NO: 382629
auuggcaaacuucacuucu

SEQ ID NO: 382631 - RNA, 19 nt, Artificial Sequence
  Description of Artificial Sequence: Synthetic oligonucleotide
  Sense Strand Starting at position 813 of SEQ ID NO: 315859
gacagcugauuccugagau

SEQ ID NO: 382632 - RNA, 19 nt, Artificial Sequence
  Description of Artificial Sequence: Synthetic oligonucleotide
  Antisense Strand to SEQ ID NO: 382631
aucucaggaaucagcuguc

SEQ ID NO: 382633 - RNA, 19 nt, Artificial Sequence
  Description of Artificial Sequence: Synthetic oligonucleotide
  Sense Strand Starting at position 813 of SEQ ID NO: 315877
ucuuuaucggcucaaccaa

SEQ ID NO: 382634 - RNA, 19 nt, Artificial Sequence
  Description of Artificial Sequence: Synthetic oligonucleotide
  Antisense Strand to SEQ ID NO: 382633
uugguugagccgauaaaga

SEQ ID NO: 382635 - RNA, 19 nt, Artificial Sequence
  Description of Artificial Sequence: Synthetic oligonucleotide
  Sense Strand Starting at position 813 of SEQ ID NO: 315957
gcuguauuauauuuccuac

SEQ ID NO: 382636 - RNA, 19 nt, Artificial Sequence
  Description of Artificial Sequence: Synthetic oligonucleotide
  Antisense Strand to SEQ ID NO: 382635
guaggaaauauaauacagc

SEQ ID NO: 382637 - RNA, 19 nt, Artificial Sequence
  Description of Artificial Sequence: Synthetic oligonucleotide
  Sense Strand Starting at position 813 of SEQ ID NO: 315990
gaggaacuacagugcuuua

SEQ ID NO: 382638 - RNA, 19 nt, Artificial Sequence
  Description of Artificial Sequence: Synthetic oligonucleotide
  Antisense Strand to SEQ ID NO: 382637
uaaagcacuguaguuccuc

SEQ ID NO: 382639 - RNA, 19 nt, Artificial Sequence
  Description of Artificial Sequence: Synthetic oligonucleotide
  Sense Strand Starting at position 813 of SEQ ID NO: 316154
ggaguuuauuagguauaaa

SEQ ID NO: 382640 - RNA, 19 nt, Artificial Sequence
  Description of Artificial Sequence: Synthetic oligonucleotide
  Antisense Strand to SEQ ID NO: 382639
uuuauaccuaauaaacucc

SEQ ID NO: 382641 - RNA, 19 nt, Artificial Sequence
  Description of Artificial Sequence: Synthetic oligonucleotide
  Sense Strand Starting at position 813 of SEQ ID NO: 317228
auucgacaucccugaaaug

SEQ ID NO: 382642 - RNA, 19 nt, Artificial Sequence
  Description of Artificial Sequence: Synthetic oligonucleotide
  Antisense Strand to SEQ ID NO: 382641
cauuucagggaugucgaau

SEQ ID NO: 382643 - RNA, 19 nt, Artificial Sequence
  Description of Artificial Sequence: Synthetic oligonucleotide
  Sense Strand Starting at position 813 of SEQ ID NO: 317243
aaugaaaugcaguaaaugu

SEQ ID NO: 382644 - RNA, 19 nt, Artificial Sequence
  Description of Artificial Sequence: Synthetic oligonucleotide
  Antisense Strand to SEQ ID NO: 382643
acauuuacugcauuucauu

SEQ ID NO: 382645 - RNA, 19 nt, Artificial Sequence
  Description of Artificial Sequence: Synthetic oligonucleotide
  Sense Strand Starting at position 813 of SEQ ID NO: 317363
ccuguaauagauggaaacu

SEQ ID NO: 382646 - RNA, 19 nt, Artificial Sequence
  Description of Artificial Sequence: Synthetic oligonucleotide
  Antisense Strand to SEQ ID NO: 382645
aguuuccaucuauuacagg

SEQ ID NO: 382647 - RNA, 19 nt, Artificial Sequence
  Description of Artificial Sequence: Synthetic oligonucleotide
  Sense Strand Starting at position 813 of SEQ ID NO: 317386
ugggaaauauaagaaauca

SEQ ID NO: 382648 - RNA, 19 nt, Artificial Sequence
  Description of Artificial Sequence: Synthetic oligonucleotide
  Antisense Strand to SEQ ID NO: 382647
ugauuucuuauauuuccca

SEQ ID NO: 382649 - RNA, 19 nt, Artificial Sequence
  Description of Artificial Sequence: Synthetic oligonucleotide
  Sense Strand Starting at position 813 of SEQ ID NO: 317464
agaugauagaaaugcaugu

SEQ ID NO: 382650 - RNA, 19 nt, Artificial Sequence
  Description of Artificial Sequence: Synthetic oligonucleotide
  Antisense Strand to SEQ ID NO: 382649
acaugcauuucuaucaucu

SEQ ID NO: 382651 - RNA, 19 nt, Artificial Sequence
  Description of Artificial Sequence: Synthetic oligonucleotide
  Sense Strand Starting at position 813 of SEQ ID NO: 317468
gauagaaaugcauguaaug

SEQ ID NO: 382652 - RNA, 19 nt, Artificial Sequence
  Description of Artificial Sequence: Synthetic oligonucleotide
  Antisense Strand to SEQ ID NO: 382651
cauuacaugcauuucuauc

SEQ ID NO: 382653 - RNA, 19 nt, Artificial Sequence
  Description of Artificial Sequence: Synthetic oligonucleotide
  Sense Strand Starting at position 813 of SEQ ID NO: 317535
agacuuauuucuuauaagg

SEQ ID NO: 382654 - RNA, 19 nt, Artificial Sequence
  Description of Artificial Sequence: Synthetic oligonucleotide
  Antisense Strand to SEQ ID NO: 382653
ccuuauaagaaauaagucu

SEQ ID NO: 382655 - RNA, 19 nt, Artificial Sequence
  Description of Artificial Sequence: Synthetic oligonucleotide
  Sense Strand Starting at position 813 of SEQ ID NO: 317649
ggagcuuuaggcuaaauaa

SEQ ID NO: 382656 - RNA, 19 nt, Artificial Sequence
  Description of Artificial Sequence: Synthetic oligonucleotide
  Antisense Strand to SEQ ID NO: 382655
uuauuuagccuaaagcucc

SEQ ID NO: 382657 - RNA, 19 nt, Artificial Sequence
  Description of Artificial Sequence: Synthetic oligonucleotide
  Sense Strand Starting at position 813 of SEQ ID NO: 317659
gcuaaauaaguuggcuaaa

SEQ ID NO: 382658 - RNA, 19 nt, Artificial Sequence
  Description of Artificial Sequence: Synthetic oligonucleotide
  Antisense Strand to SEQ ID NO: 382657
uuuagccaacuuauuuagc

SEQ ID NO: 382659 - RNA, 19 nt, Artificial Sequence
  Description of Artificial Sequence: Synthetic oligonucleotide
  Sense Strand Starting at position 813 of SEQ ID NO: 317660
cuaaauaaguuggcuaaau

SEQ ID NO: 382660 - RNA, 19 nt, Artificial Sequence
  Description of Artificial Sequence: Synthetic oligonucleotide
  Antisense Strand to SEQ ID NO: 382659
auuuagccaacuuauuuag

SEQ ID NO: 382661 - RNA, 19 nt, Artificial Sequence
  Description of Artificial Sequence: Synthetic oligonucleotide
  Sense Strand Starting at position 813 of SEQ ID NO: 317731
uuggcacaugcauauugaa

SEQ ID NO: 382662 - RNA, 19 nt, Artificial Sequence
  Description of Artificial Sequence: Synthetic oligonucleotide
  Antisense Strand to SEQ ID NO: 382661
uucaauaugcaugugccaa

SEQ ID NO: 382663 - RNA, 19 nt, Artificial Sequence
  Description of Artificial Sequence: Synthetic oligonucleotide
  Sense Strand Starting at position 813 of SEQ ID NO: 317738
augcauauugaacauguau

SEQ ID NO: 382664 - RNA, 19 nt, Artificial Sequence
  Description of Artificial Sequence: Synthetic oligonucleotide
  Antisense Strand to SEQ ID NO: 382663
auacauguucaauaugcau

SEQ ID NO: 382665 - RNA, 19 nt, Artificial Sequence
  Description of Artificial Sequence: Synthetic oligonucleotide
  Sense Strand Starting at position 813 of SEQ ID NO: 317744
auugaacauguauguaaca

SEQ ID NO: 382666 - RNA, 19 nt, Artificial Sequence
  Description of Artificial Sequence: Synthetic oligonucleotide
  Antisense Strand to SEQ ID NO: 382665
uguuacauacauguucaau

SEQ ID NO: 382667 - RNA, 19 nt, Artificial Sequence
  Description of Artificial Sequence: Synthetic oligonucleotide
  Sense Strand Starting at position 813 of SEQ ID NO: 318115
agaggugccugacuuaaac

SEQ ID NO: 382668 - RNA, 19 nt, Artificial Sequence
  Description of Artificial Sequence: Synthetic oligonucleotide
  Antisense Strand to SEQ ID NO: 382667
guuuaagucaggcaccucu

SEQ ID NO: 382669 - RNA, 19 nt, Artificial Sequence
  Description of Artificial Sequence: Synthetic oligonucleotide
  Sense Strand Starting at position 813 of SEQ ID NO: 318239
aguugucaugucuaaauug

SEQ ID NO: 382670 - RNA, 19 nt, Artificial Sequence
  Description of Artificial Sequence: Synthetic oligonucleotide
  Antisense Strand to SEQ ID NO: 382669
caauuuagacaugacaacu

SEQ ID NO: 382671 - RNA, 19 nt, Artificial Sequence
  Description of Artificial Sequence: Synthetic oligonucleotide
  Sense Strand Starting at position 813 of SEQ ID NO: 318406
cuaguccauguguauuaua

SEQ ID NO: 382672 - RNA, 19 nt, Artificial Sequence
  Description of Artificial Sequence: Synthetic oligonucleotide
  Antisense Strand to SEQ ID NO: 382671
uauaauacacauggacuag

SEQ ID NO: 382673 - RNA, 19 nt, Artificial Sequence
  Description of Artificial Sequence: Synthetic oligonucleotide
  Sense Strand Starting at position 813 of SEQ ID NO: 318471
aaaguagugucacuaggac

SEQ ID NO: 382674 - RNA, 19 nt, Artificial Sequence
  Description of Artificial Sequence: Synthetic oligonucleotide
  Antisense Strand to SEQ ID NO: 382673
guccuagugacacuacuuu

SEQ ID NO: 382675 - RNA, 19 nt, Artificial Sequence
  Description of Artificial Sequence: Synthetic oligonucleotide
  Sense Strand Starting at position 813 of SEQ ID NO: 318485
aggacuuagucacauauuu

SEQ ID NO: 382676 - RNA, 19 nt, Artificial Sequence
  Description of Artificial Sequence: Synthetic oligonucleotide
  Antisense Strand to SEQ ID NO: 382675
aaauaugugacuaaguccu

SEQ ID NO: 382677 - RNA, 19 nt, Artificial Sequence
  Description of Artificial Sequence: Synthetic oligonucleotide
  Sense Strand Starting at position 813 of SEQ ID NO: 318492
agucacauauuugauagaa

SEQ ID NO: 382678 - RNA, 19 nt, Artificial Sequence
  Description of Artificial Sequence: Synthetic oligonucleotide
  Antisense Strand to SEQ ID NO: 382677
uucuaucaaauaugugacu

SEQ ID NO: 382679 - RNA, 19 nt, Artificial Sequence
  Description of Artificial Sequence: Synthetic oligonucleotide
  Sense Strand Starting at position 813 of SEQ ID NO: 318512
aguaguauucagugaagga

SEQ ID NO: 382680 - RNA, 19 nt, Artificial Sequence
  Description of Artificial Sequence: Synthetic oligonucleotide
  Antisense Strand to SEQ ID NO: 382679
uccuucacugaauacuacu

SEQ ID NO: 382681 - RNA, 19 nt, Artificial Sequence
  Description of Artificial Sequence: Synthetic oligonucleotide
  Sense Strand Starting at position 813 of SEQ ID NO: 318612
ugagcaugccuugaauaug

SEQ ID NO: 382682 - RNA, 19 nt, Artificial Sequence
  Description of Artificial Sequence: Synthetic oligonucleotide
  Antisense Strand to SEQ ID NO: 382681
cauauucaaggcaugcuca

SEQ ID NO: 382683 - RNA, 19 nt, Artificial Sequence
  Description of Artificial Sequence: Synthetic oligonucleotide
  Sense Strand Starting at position 813 of SEQ ID NO: 318621
cuugaauauguaggugaga

SEQ ID NO: 382684 - RNA, 19 nt, Artificial Sequence
  Description of Artificial Sequence: Synthetic oligonucleotide
  Antisense Strand to SEQ ID NO: 382683
ucucaccuacauauucaag

SEQ ID NO: 382685 - RNA, 19 nt, Artificial Sequence
  Description of Artificial Sequence: Synthetic oligonucleotide
  Sense Strand Starting at position 813 of SEQ ID NO: 318622
uugaauauguaggugagau

SEQ ID NO: 382686 - RNA, 19 nt, Artificial Sequence
  Description of Artificial Sequence: Synthetic oligonucleotide
  Antisense Strand to SEQ ID NO: 382685
aucucaccuacauauucaa

SEQ ID NO: 382687 - RNA, 19 nt, Artificial Sequence
  Description of Artificial Sequence: Synthetic oligonucleotide
  Sense Strand Starting at position 813 of SEQ ID NO: 318623
ugaauauguaggugagaug

SEQ ID NO: 382688 - RNA, 19 nt, Artificial Sequence
  Description of Artificial Sequence: Synthetic oligonucleotide
  Antisense Strand to SEQ ID NO: 382687
caucucaccuacauauuca

SEQ ID NO: 382689 - RNA, 19 nt, Artificial Sequence
  Description of Artificial Sequence: Synthetic oligonucleotide
  Sense Strand Starting at position 813 of SEQ ID NO: 318624
gaauauguaggugagaugu

SEQ ID NO: 382690 - RNA, 19 nt, Artificial Sequence
  Description of Artificial Sequence: Synthetic oligonucleotide
  Antisense Strand to SEQ ID NO: 382689
acaucucaccuacauauuc

SEQ ID NO: 382691 - RNA, 19 nt, Artificial Sequence
  Description of Artificial Sequence: Synthetic oligonucleotide
  Sense Strand Starting at position 813 of SEQ ID NO: 318634
gugagauguuugguauuag

SEQ ID NO: 382692 - RNA, 19 nt, Artificial Sequence
  Description of Artificial Sequence: Synthetic oligonucleotide
  Antisense Strand to SEQ ID NO: 382691
cuaauaccaaacaucucac

SEQ ID NO: 382693 - RNA, 19 nt, Artificial Sequence
  Description of Artificial Sequence: Synthetic oligonucleotide
  Sense Strand Starting at position 813 of SEQ ID NO: 318660
auucuacuagagugauaga

SEQ ID NO: 382694 - RNA, 19 nt, Artificial Sequence
  Description of Artificial Sequence: Synthetic oligonucleotide
  Antisense Strand to SEQ ID NO: 382693
ucuaucacucuaguagaau

SEQ ID NO: 382695 - RNA, 19 nt, Artificial Sequence
  Description of Artificial Sequence: Synthetic oligonucleotide
  Sense Strand Starting at position 813 of SEQ ID NO: 318699
aguaguugaaggcauagua

SEQ ID NO: 382696 - RNA, 19 nt, Artificial Sequence
  Description of Artificial Sequence: Synthetic oligonucleotide
  Antisense Strand to SEQ ID NO: 382695
uacuaugccuucaacuacu

SEQ ID NO: 382697 - RNA, 19 nt, Artificial Sequence
  Description of Artificial Sequence: Synthetic oligonucleotide
  Sense Strand Starting at position 813 of SEQ ID NO: 318711
cauaguaauggaugucuua

SEQ ID NO: 382698 - RNA, 19 nt, Artificial Sequence
  Description of Artificial Sequence: Synthetic oligonucleotide
  Antisense Strand to SEQ ID NO: 382697
uaagacauccauuacuaug

SEQ ID NO: 382699 - RNA, 19 nt, Artificial Sequence
  Description of Artificial Sequence: Synthetic oligonucleotide
  Sense Strand Starting at position 813 of SEQ ID NO: 318724
gucuuaccuauuggagagu

SEQ ID NO: 382700 - RNA, 19 nt, Artificial Sequence
  Description of Artificial Sequence: Synthetic oligonucleotide
  Antisense Strand to SEQ ID NO: 382699
acucuccaauagguaagac

SEQ ID NO: 382701 - RNA, 19 nt, Artificial Sequence
  Description of Artificial Sequence: Synthetic oligonucleotide
  Sense Strand Starting at position 813 of SEQ ID NO: 319064
guguguugacugccuguau

SEQ ID NO: 382702 - RNA, 19 nt, Artificial Sequence
  Description of Artificial Sequence: Synthetic oligonucleotide
  Antisense Strand to SEQ ID NO: 382701
auacaggcagucaacacac

SEQ ID NO: 382703 - RNA, 19 nt, Artificial Sequence
  Description of Artificial Sequence: Synthetic oligonucleotide
  Sense Strand Starting at position 813 of SEQ ID NO: 319110
guccuuugcuuauuuguua

SEQ ID NO: 382704 - RNA, 19 nt, Artificial Sequence
  Description of Artificial Sequence: Synthetic oligonucleotide
  Antisense Strand to SEQ ID NO: 382703
uaacaaauaagcaaaggac

SEQ ID NO: 382705 - RNA, 19 nt, Artificial Sequence
  Description of Artificial Sequence: Synthetic oligonucleotide
  Sense Strand Starting at position 814 of SEQ ID NO: 315494
cuuacuagacacugguuaa

SEQ ID NO: 382706 - RNA, 19 nt, Artificial Sequence
  Description of Artificial Sequence: Synthetic oligonucleotide
  Antisense Strand to SEQ ID NO: 382705
uuaaccagugucuaguaag

SEQ ID NO: 382707 - RNA, 19 nt, Artificial Sequence
  Description of Artificial Sequence: Synthetic oligonucleotide
  Sense Strand Starting at position 814 of SEQ ID NO: 315497
acuagacacugguuaaguu

SEQ ID NO: 382708 - RNA, 19 nt, Artificial Sequence
  Description of Artificial Sequence: Synthetic oligonucleotide
  Antisense Strand to SEQ ID NO: 382707
aacuuaaccagugucuagu

SEQ ID NO: 382709 - RNA, 19 nt, Artificial Sequence
  Description of Artificial Sequence: Synthetic oligonucleotide
  Sense Strand Starting at position 814 of SEQ ID NO: 315570
ucaagaugauguucuguga

SEQ ID NO: 382710 - RNA, 19 nt, Artificial Sequence
  Description of Artificial Sequence: Synthetic oligonucleotide
  Antisense Strand to SEQ ID NO: 382709
ucacagaacaucaucuuga

SEQ ID NO: 382711 - RNA, 19 nt, Artificial Sequence
  Description of Artificial Sequence: Synthetic oligonucleotide
  Sense Strand Starting at position 814 of SEQ ID NO: 315581
uucugugauccauauuauc

SEQ ID NO: 382712 - RNA, 19 nt, Artificial Sequence
  Description of Artificial Sequence: Synthetic oligonucleotide
  Antisense Strand to SEQ ID NO: 382711
gauaauauggaucacagaa

SEQ ID NO: 382713 - RNA, 19 nt, Artificial Sequence
  Description of Artificial Sequence: Synthetic oligonucleotide
  Sense Strand Starting at position 814 of SEQ ID NO: 315597
aucuuuagccaguaucuga

SEQ ID NO: 382714 - RNA, 19 nt, Artificial Sequence
  Description of Artificial Sequence: Synthetic oligonucleotide
  Antisense Strand to SEQ ID NO: 382713
ucagauacuggcuaaagau

SEQ ID NO: 382715 - RNA, 19 nt, Artificial Sequence
  Description of Artificial Sequence: Synthetic oligonucleotide
  Sense Strand Starting at position 814 of SEQ ID NO: 315607
aguaucugauuacuuaaga

SEQ ID NO: 382716 - RNA, 19 nt, Artificial Sequence
  Description of Artificial Sequence: Synthetic oligonucleotide
  Antisense Strand to SEQ ID NO: 382715
ucuuaaguaaucagauacu

SEQ ID NO: 382717 - RNA, 19 nt, Artificial Sequence
  Description of Artificial Sequence: Synthetic oligonucleotide
  Sense Strand Starting at position 814 of SEQ ID NO: 315608
guaucugauuacuuaagaa

SEQ ID NO: 382718 - RNA, 19 nt, Artificial Sequence
  Description of Artificial Sequence: Synthetic oligonucleotide
  Antisense Strand to SEQ ID NO: 382717
uucuuaaguaaucagauac

SEQ ID NO: 382719 - RNA, 19 nt, Artificial Sequence
  Description of Artificial Sequence: Synthetic oligonucleotide
  Sense Strand Starting at position 814 of SEQ ID NO: 315765
ggucaagacaaaugguaug

SEQ ID NO: 382720 - RNA, 19 nt, Artificial Sequence
  Description of Artificial Sequence: Synthetic oligonucleotide
  Antisense Strand to SEQ ID NO: 382719
cauaccauuugucuugacc

SEQ ID NO: 382721 - RNA, 19 nt, Artificial Sequence
  Description of Artificial Sequence: Synthetic oligonucleotide
  Sense Strand Starting at position 814 of SEQ ID NO: 315770
agacaaaugguauguucuu

SEQ ID NO: 382722 - RNA, 19 nt, Artificial Sequence
  Description of Artificial Sequence: Synthetic oligonucleotide
  Antisense Strand to SEQ ID NO: 382721
aagaacauaccauuugucu

SEQ ID NO: 382723 - RNA, 19 nt, Artificial Sequence
  Description of Artificial Sequence: Synthetic oligonucleotide
  Sense Strand Starting at position 814 of SEQ ID NO: 315771
gacaaaugguauguucuua

SEQ ID NO: 382724 - RNA, 19 nt, Artificial Sequence
  Description of Artificial Sequence: Synthetic oligonucleotide
  Antisense Strand to SEQ ID NO: 382723
uaagaacauaccauuuguc

SEQ ID NO: 382725 - RNA, 19 nt, Artificial Sequence
  Description of Artificial Sequence: Synthetic oligonucleotide
  Sense Strand Starting at position 814 of SEQ ID NO: 315825
ggcuaugaugucuaauuaa

SEQ ID NO: 382726 - RNA, 19 nt, Artificial Sequence
  Description of Artificial Sequence: Synthetic oligonucleotide
  Antisense Strand to SEQ ID NO: 382725
uuaauuagacaucauagcc

SEQ ID NO: 382727 - RNA, 19 nt, Artificial Sequence
  Description of Artificial Sequence: Synthetic oligonucleotide
  Sense Strand Starting at position 814 of SEQ ID NO: 316084
agugcuauugaauaacauu

SEQ ID NO: 382728 - RNA, 19 nt, Artificial Sequence
  Description of Artificial Sequence: Synthetic oligonucleotide
  Antisense Strand to SEQ ID NO: 382727
aauguuauucaauagcacu

SEQ ID NO: 382729 - RNA, 19 nt, Artificial Sequence
  Description of Artificial Sequence: Synthetic oligonucleotide
  Sense Strand Starting at position 814 of SEQ ID NO: 316157
aggacuuugcaucaucuuu

SEQ ID NO: 382730 - RNA, 19 nt, Artificial Sequence
  Description of Artificial Sequence: Synthetic oligonucleotide
  Antisense Strand to SEQ ID NO: 382729
aaagaugaugcaaaguccu

SEQ ID NO: 382731 - RNA, 19 nt, Artificial Sequence
  Description of Artificial Sequence: Synthetic oligonucleotide
  Sense Strand Starting at position 814 of SEQ ID NO: 317242
auggaauugugaguugaaa

SEQ ID NO: 382732 - RNA, 19 nt, Artificial Sequence
  Description of Artificial Sequence: Synthetic oligonucleotide
  Antisense Strand to SEQ ID NO: 382731
uuucaacucacaauuccau

SEQ ID NO: 382733 - RNA, 19 nt, Artificial Sequence
  Description of Artificial Sequence: Synthetic oligonucleotide
  Sense Strand Starting at position 814 of SEQ ID NO: 317244
ggaauugugaguugaaauu

SEQ ID NO: 382734 - RNA, 19 nt, Artificial Sequence
  Description of Artificial Sequence: Synthetic oligonucleotide
  Antisense Strand to SEQ ID NO: 382733
aauuucaacucacaauucc

SEQ ID NO: 382735 - RNA, 19 nt, Artificial Sequence
  Description of Artificial Sequence: Synthetic oligonucleotide
  Sense Strand Starting at position 814 of SEQ ID NO: 317317
ugaucagugcuauaauuga

SEQ ID NO: 382736 - RNA, 19 nt, Artificial Sequence
  Description of Artificial Sequence: Synthetic oligonucleotide
  Antisense Strand to SEQ ID NO: 382735
ucaauuauagcacugauca

SEQ ID NO: 382737 - RNA, 19 nt, Artificial Sequence
  Description of Artificial Sequence: Synthetic oligonucleotide
  Sense Strand Starting at position 814 of SEQ ID NO: 317394
uuguguaggaguuaacaga

SEQ ID NO: 382738 - RNA, 19 nt, Artificial Sequence
  Description of Artificial Sequence: Synthetic oligonucleotide
  Antisense Strand to SEQ ID NO: 382737
ucuguuaacuccuacacaa

SEQ ID NO: 382739 - RNA, 19 nt, Artificial Sequence
  Description of Artificial Sequence: Synthetic oligonucleotide
  Sense Strand Starting at position 814 of SEQ ID NO: 317402
gaguuaacagacugagagu

SEQ ID NO: 382740 - RNA, 19 nt, Artificial Sequence
  Description of Artificial Sequence: Synthetic oligonucleotide
  Antisense Strand to SEQ ID NO: 382739
acucucagucuguuaacuc

SEQ ID NO: 382741 - RNA, 19 nt, Artificial Sequence
  Description of Artificial Sequence: Synthetic oligonucleotide
  Sense Strand Starting at position 814 of SEQ ID NO: 317456
guggacucuacugaaugua

SEQ ID NO: 382742 - RNA, 19 nt, Artificial Sequence
  Description of Artificial Sequence: Synthetic oligonucleotide
  Antisense Strand to SEQ ID NO: 382741
uacauucaguagaguccac

SEQ ID NO: 382743 - RNA, 19 nt, Artificial Sequence
  Description of Artificial Sequence: Synthetic oligonucleotide
  Sense Strand Starting at position 814 of SEQ ID NO: 317459
gacucuacugaauguaaug

SEQ ID NO: 382744 - RNA, 19 nt, Artificial Sequence
  Description of Artificial Sequence: Synthetic oligonucleotide
  Antisense Strand to SEQ ID NO: 382743
cauuacauucaguagaguc

SEQ ID NO: 382745 - RNA, 19 nt, Artificial Sequence
  Description of Artificial Sequence: Synthetic oligonucleotide
  Sense Strand Starting at position 814 of SEQ ID NO: 317552
gaaugaaugcaaugugaag

SEQ ID NO: 382746 - RNA, 19 nt, Artificial Sequence
  Description of Artificial Sequence: Synthetic oligonucleotide
  Antisense Strand to SEQ ID NO: 382745
cuucacauugcauucauuc

SEQ ID NO: 382747 - RNA, 19 nt, Artificial Sequence
  Description of Artificial Sequence: Synthetic oligonucleotide
  Sense Strand Starting at position 814 of SEQ ID NO: 317564
ugugaagaaucucaaauuu

SEQ ID NO: 382748 - RNA, 19 nt, Artificial Sequence
  Description of Artificial Sequence: Synthetic oligonucleotide
  Antisense Strand to SEQ ID NO: 382747
aaauuugagauucuucaca

SEQ ID NO: 382749 - RNA, 19 nt, Artificial Sequence
  Description of Artificial Sequence: Synthetic oligonucleotide
  Sense Strand Starting at position 814 of SEQ ID NO: 317871
acccucaagugauugaaau

SEQ ID NO: 382750 - RNA, 19 nt, Artificial Sequence
  Description of Artificial Sequence: Synthetic oligonucleotide
  Antisense Strand to SEQ ID NO: 382749
auuucaaucacuugagggu

SEQ ID NO: 382751 - RNA, 19 nt, Artificial Sequence
  Description of Artificial Sequence: Synthetic oligonucleotide
  Sense Strand Starting at position 814 of SEQ ID NO: 317872
cccucaagugauugaaaug

SEQ ID NO: 382752 - RNA, 19 nt, Artificial Sequence
  Description of Artificial Sequence: Synthetic oligonucleotide
  Antisense Strand to SEQ ID NO: 382751
cauuucaaucacuugaggg

SEQ ID NO: 382753 - RNA, 19 nt, Artificial Sequence
  Description of Artificial Sequence: Synthetic oligonucleotide
  Sense Strand Starting at position 814 of SEQ ID NO: 317879
gugauugaaaugcauguga

SEQ ID NO: 382754 - RNA, 19 nt, Artificial Sequence
  Description of Artificial Sequence: Synthetic oligonucleotide
  Antisense Strand to SEQ ID NO: 382753
ucacaugcauuucaaucac

SEQ ID NO: 382755 - RNA, 19 nt, Artificial Sequence
  Description of Artificial Sequence: Synthetic oligonucleotide
  Sense Strand Starting at position 814 of SEQ ID NO: 317881
gauugaaaugcaugugaag

SEQ ID NO: 382756 - RNA, 19 nt, Artificial Sequence
  Description of Artificial Sequence: Synthetic oligonucleotide
  Antisense Strand to SEQ ID NO: 382755
cuucacaugcauuucaauc

SEQ ID NO: 382757 - RNA, 19 nt, Artificial Sequence
  Description of Artificial Sequence: Synthetic oligonucleotide
  Sense Strand Starting at position 814 of SEQ ID NO: 318008
gaaguauguggucagugaa

SEQ ID NO: 382758 - RNA, 19 nt, Artificial Sequence
  Description of Artificial Sequence: Synthetic oligonucleotide
  Antisense Strand to SEQ ID NO: 382757
uucacugaccacauacuuc

SEQ ID NO: 382759 - RNA, 19 nt, Artificial Sequence
  Description of Artificial Sequence: Synthetic oligonucleotide
  Sense Strand Starting at position 814 of SEQ ID NO: 318031
agagaagucacuuggugac

SEQ ID NO: 382760 - RNA, 19 nt, Artificial Sequence
  Description of Artificial Sequence: Synthetic oligonucleotide
  Antisense Strand to SEQ ID NO: 382759
gucaccaagugacuucucu

SEQ ID NO: 382761 - RNA, 19 nt, Artificial Sequence
  Description of Artificial Sequence: Synthetic oligonucleotide
  Sense Strand Starting at position 814 of SEQ ID NO: 318033
agaagucacuuggugacua

SEQ ID NO: 382762 - RNA, 19 nt, Artificial Sequence
  Description of Artificial Sequence: Synthetic oligonucleotide
  Antisense Strand to SEQ ID NO: 382761
uagucaccaagugacuucu

SEQ ID NO: 382763 - RNA, 19 nt, Artificial Sequence
  Description of Artificial Sequence: Synthetic oligonucleotide
  Sense Strand Starting at position 814 of SEQ ID NO: 318037
gucacuuggugacuagaua

SEQ ID NO: 382764 - RNA, 19 nt, Artificial Sequence
  Description of Artificial Sequence: Synthetic oligonucleotide
  Antisense Strand to SEQ ID NO: 382763
uaucuagucaccaagugac

SEQ ID NO: 382765 - RNA, 19 nt, Artificial Sequence
  Description of Artificial Sequence: Synthetic oligonucleotide
  Sense Strand Starting at position 814 of SEQ ID NO: 318247
uuuauaagauggucaagau

SEQ ID NO: 382766 - RNA, 19 nt, Artificial Sequence
  Description of Artificial Sequence: Synthetic oligonucleotide
  Antisense Strand to SEQ ID NO: 382765
aucuugaccaucuuauaaa

SEQ ID NO: 382767 - RNA, 19 nt, Artificial Sequence
  Description of Artificial Sequence: Synthetic oligonucleotide
  Sense Strand Starting at position 814 of SEQ ID NO: 318418
ugauccuaccuuuggaaua

SEQ ID NO: 382768 - RNA, 19 nt, Artificial Sequence
  Description of Artificial Sequence: Synthetic oligonucleotide
  Antisense Strand to SEQ ID NO: 382767
uauuccaaagguaggauca

SEQ ID NO: 382769 - RNA, 19 nt, Artificial Sequence
  Description of Artificial Sequence: Synthetic oligonucleotide
  Sense Strand Starting at position 814 of SEQ ID NO: 318559
gucaaauuauggccagaag

SEQ ID NO: 382770 - RNA, 19 nt, Artificial Sequence
  Description of Artificial Sequence: Synthetic oligonucleotide
  Antisense Strand to SEQ ID NO: 382769
cuucuggccauaauuugac

SEQ ID NO: 382771 - RNA, 19 nt, Artificial Sequence
  Description of Artificial Sequence: Synthetic oligonucleotide
  Sense Strand Starting at position 814 of SEQ ID NO: 318560
ucaaauuauggccagaagu

SEQ ID NO: 382772 - RNA, 19 nt, Artificial Sequence
  Description of Artificial Sequence: Synthetic oligonucleotide
  Antisense Strand to SEQ ID NO: 382771
acuucuggccauaauuuga

SEQ ID NO: 382773 - RNA, 19 nt, Artificial Sequence
  Description of Artificial Sequence: Synthetic oligonucleotide
  Sense Strand Starting at position 814 of SEQ ID NO: 318562
aaauuauggccagaagugu

SEQ ID NO: 382774 - RNA, 19 nt, Artificial Sequence
  Description of Artificial Sequence: Synthetic oligonucleotide
  Antisense Strand to SEQ ID NO: 382773
acacuucuggccauaauuu

SEQ ID NO: 382775 - RNA, 19 nt, Artificial Sequence
  Description of Artificial Sequence: Synthetic oligonucleotide
  Sense Strand Starting at position 814 of SEQ ID NO: 318608
agugacuagccuuaagagu

SEQ ID NO: 382776 - RNA, 19 nt, Artificial Sequence
  Description of Artificial Sequence: Synthetic oligonucleotide
  Antisense Strand to SEQ ID NO: 382775
acucuuaaggcuagucacu

SEQ ID NO: 382777 - RNA, 19 nt, Artificial Sequence
  Description of Artificial Sequence: Synthetic oligonucleotide
  Sense Strand Starting at position 814 of SEQ ID NO: 318634
cgagaaugugcauaauuaa

SEQ ID NO: 382778 - RNA, 19 nt, Artificial Sequence
  Description of Artificial Sequence: Synthetic oligonucleotide
  Antisense Strand to SEQ ID NO: 382777
uuaauuaugcacauucucg

SEQ ID NO: 382779 - RNA, 19 nt, Artificial Sequence
  Description of Artificial Sequence: Synthetic oligonucleotide
  Sense Strand Starting at position 814 of SEQ ID NO: 318716
agucucauuuguuuaaugu

SEQ ID NO: 382780 - RNA, 19 nt, Artificial Sequence
  Description of Artificial Sequence: Synthetic oligonucleotide
  Antisense Strand to SEQ ID NO: 382779
acauuaaacaaaugagacu

SEQ ID NO: 382781 - RNA, 19 nt, Artificial Sequence
  Description of Artificial Sequence: Synthetic oligonucleotide
  Sense Strand Starting at position 814 of SEQ ID NO: 318863
gagauaagccaguaauagc

SEQ ID NO: 382782 - RNA, 19 nt, Artificial Sequence
  Description of Artificial Sequence: Synthetic oligonucleotide
  Antisense Strand to SEQ ID NO: 382781
gcuauuacuggcuuaucuc

SEQ ID NO: 382783 - RNA, 19 nt, Artificial Sequence
  Description of Artificial Sequence: Synthetic oligonucleotide
  Sense Strand Starting at position 814 of SEQ ID NO: 319016
gaaagaaauuuaggagauc

SEQ ID NO: 382784 - RNA, 19 nt, Artificial Sequence
  Description of Artificial Sequence: Synthetic oligonucleotide
  Antisense Strand to SEQ ID NO: 382783
gaucuccuaaauuucuuuc

SEQ ID NO: 382785 - RNA, 19 nt, Artificial Sequence
  Description of Artificial Sequence: Synthetic oligonucleotide
  Sense Strand Starting at position 815 of SEQ ID NO: 315461
auaauauacccaggguagu

SEQ ID NO: 382786 - RNA, 19 nt, Artificial Sequence
  Description of Artificial Sequence: Synthetic oligonucleotide
  Antisense Strand to SEQ ID NO: 382785
acuacccuggguauauuau

SEQ ID NO: 382787 - RNA, 19 nt, Artificial Sequence
  Description of Artificial Sequence: Synthetic oligonucleotide
  Sense Strand Starting at position 815 of SEQ ID NO: 315474
gguaguggucucuauuguu

SEQ ID NO: 382788 - RNA, 19 nt, Artificial Sequence
  Description of Artificial Sequence: Synthetic oligonucleotide
  Antisense Strand to SEQ ID NO: 382787
aacaauagagaccacuacc

SEQ ID NO: 382789 - RNA, 19 nt, Artificial Sequence
  Description of Artificial Sequence: Synthetic oligonucleotide
  Sense Strand Starting at position 815 of SEQ ID NO: 315479
uggucucuauuguugaaac

SEQ ID NO: 382790 - RNA, 19 nt, Artificial Sequence
  Description of Artificial Sequence: Synthetic oligonucleotide
  Antisense Strand to SEQ ID NO: 382789
guuucaacaauagagacca

SEQ ID NO: 382791 - RNA, 19 nt, Artificial Sequence
  Description of Artificial Sequence: Synthetic oligonucleotide
  Sense Strand Starting at position 815 of SEQ ID NO: 315481
gucucuauuguugaaaccu

SEQ ID NO: 382792 - RNA, 19 nt, Artificial Sequence
  Description of Artificial Sequence: Synthetic oligonucleotide
  Antisense Strand to SEQ ID NO: 382791
agguuucaacaauagagac

SEQ ID NO: 382793 - RNA, 19 nt, Artificial Sequence
  Description of Artificial Sequence: Synthetic oligonucleotide
  Sense Strand Starting at position 815 of SEQ ID NO: 315654
aauguagcuugacuugaaa

SEQ ID NO: 382794 - RNA, 19 nt, Artificial Sequence
  Description of Artificial Sequence: Synthetic oligonucleotide
  Antisense Strand to SEQ ID NO: 382793
uuucaagucaagcuacauu

SEQ ID NO: 382795 - RNA, 19 nt, Artificial Sequence
  Description of Artificial Sequence: Synthetic oligonucleotide
  Sense Strand Starting at position 815 of SEQ ID NO: 315673
auugacauucuguguuuaa

SEQ ID NO: 382796 - RNA, 19 nt, Artificial Sequence
  Description of Artificial Sequence: Synthetic oligonucleotide
  Antisense Strand to SEQ ID NO: 382795
uuaaacacagaaugucaau

SEQ ID NO: 382797 - RNA, 19 nt, Artificial Sequence
  Description of Artificial Sequence: Synthetic oligonucleotide
  Sense Strand Starting at position 815 of SEQ ID NO: 315842
ugcucauggauguaaguga

SEQ ID NO: 382798 - RNA, 19 nt, Artificial Sequence
  Description of Artificial Sequence: Synthetic oligonucleotide
  Antisense Strand to SEQ ID NO: 382797
ucacuuacauccaugagca

SEQ ID NO: 382799 - RNA, 19 nt, Artificial Sequence
  Description of Artificial Sequence: Synthetic oligonucleotide
  Sense Strand Starting at position 815 of SEQ ID NO: 315911
augcucaugcucuaagcua

SEQ ID NO: 382800 - RNA, 19 nt, Artificial Sequence
  Description of Artificial Sequence: Synthetic oligonucleotide
  Antisense Strand to SEQ ID NO: 382799
uagcuuagagcaugagcau

SEQ ID NO: 382801 - RNA, 19 nt, Artificial Sequence
  Description of Artificial Sequence: Synthetic oligonucleotide
  Sense Strand Starting at position 815 of SEQ ID NO: 315943
ucugguuaucaaugcuuaa

SEQ ID NO: 382802 - RNA, 19 nt, Artificial Sequence
  Description of Artificial Sequence: Synthetic oligonucleotide
  Antisense Strand to SEQ ID NO: 382801
uuaagcauugauaaccaga

SEQ ID NO: 382803 - RNA, 19 nt, Artificial Sequence
  Description of Artificial Sequence: Synthetic oligonucleotide
  Sense Strand Starting at position 815 of SEQ ID NO: 315947
guuaucaaugcuuaaugga

SEQ ID NO: 382804 - RNA, 19 nt, Artificial Sequence
  Description of Artificial Sequence: Synthetic oligonucleotide
  Antisense Strand to SEQ ID NO: 382803
uccauuaagcauugauaac

SEQ ID NO: 382805 - RNA, 19 nt, Artificial Sequence
  Description of Artificial Sequence: Synthetic oligonucleotide
  Sense Strand Starting at position 815 of SEQ ID NO: 315961
auggaaugguccuuugaac

SEQ ID NO: 382806 - RNA, 19 nt, Artificial Sequence
  Description of Artificial Sequence: Synthetic oligonucleotide
  Antisense Strand to SEQ ID NO: 382805
guucaaaggaccauuccau

SEQ ID NO: 382807 - RNA, 19 nt, Artificial Sequence
  Description of Artificial Sequence: Synthetic oligonucleotide
  Sense Strand Starting at position 815 of SEQ ID NO: 316010
ggaugcuuaucaucccuga

SEQ ID NO: 382808 - RNA, 19 nt, Artificial Sequence
  Description of Artificial Sequence: Synthetic oligonucleotide
  Antisense Strand to SEQ ID NO: 382807
ucagggaugauaagcaucc

SEQ ID NO: 382809 - RNA, 19 nt, Artificial Sequence
  Description of Artificial Sequence: Synthetic oligonucleotide
  Sense Strand Starting at position 815 of SEQ ID NO: 316060
cuacauuguuacuugaaug

SEQ ID NO: 382810 - RNA, 19 nt, Artificial Sequence
  Description of Artificial Sequence: Synthetic oligonucleotide
  Antisense Strand to SEQ ID NO: 382809
cauucaaguaacaauguag

SEQ ID NO: 382811 - RNA, 19 nt, Artificial Sequence
  Description of Artificial Sequence: Synthetic oligonucleotide
  Sense Strand Starting at position 815 of SEQ ID NO: 316065
uuguuacuugaaugaguuc

SEQ ID NO: 382812 - RNA, 19 nt, Artificial Sequence
  Description of Artificial Sequence: Synthetic oligonucleotide
  Antisense Strand to SEQ ID NO: 382811
gaacucauucaaguaacaa

SEQ ID NO: 382813 - RNA, 19 nt, Artificial Sequence
  Description of Artificial Sequence: Synthetic oligonucleotide
  Sense Strand Starting at position 815 of SEQ ID NO: 316166
gccacuuaauuugaaugua

SEQ ID NO: 382814 - RNA, 19 nt, Artificial Sequence
  Description of Artificial Sequence: Synthetic oligonucleotide
  Antisense Strand to SEQ ID NO: 382813
uacauucaaauuaaguggc

SEQ ID NO: 382815 - RNA, 19 nt, Artificial Sequence
  Description of Artificial Sequence: Synthetic oligonucleotide
  Sense Strand Starting at position 815 of SEQ ID NO: 316264
aucauuaagcuauaguaga

SEQ ID NO: 382816 - RNA, 19 nt, Artificial Sequence
  Description of Artificial Sequence: Synthetic oligonucleotide
  Antisense Strand to SEQ ID NO: 382815
ucuacuauagcuuaaugau

SEQ ID NO: 382817 - RNA, 19 nt, Artificial Sequence
  Description of Artificial Sequence: Synthetic oligonucleotide
  Sense Strand Starting at position 815 of SEQ ID NO: 316280
agaugucacuuguuuccau

SEQ ID NO: 382818 - RNA, 19 nt, Artificial Sequence
  Description of Artificial Sequence: Synthetic oligonucleotide
  Antisense Strand to SEQ ID NO: 382817
auggaaacaagugacaucu

SEQ ID NO: 382819 - RNA, 19 nt, Artificial Sequence
  Description of Artificial Sequence: Synthetic oligonucleotide
  Sense Strand Starting at position 815 of SEQ ID NO: 317235
auuccugacuugucugaaa

SEQ ID NO: 382820 - RNA, 19 nt, Artificial Sequence
  Description of Artificial Sequence: Synthetic oligonucleotide
  Antisense Strand to SEQ ID NO: 382819
uuucagacaagucaggaau

SEQ ID NO: 382821 - RNA, 19 nt, Artificial Sequence
  Description of Artificial Sequence: Synthetic oligonucleotide
  Sense Strand Starting at position 815 of SEQ ID NO: 317303
uaggucucuuuggcuuaaa

SEQ ID NO: 382822 - RNA, 19 nt, Artificial Sequence
  Description of Artificial Sequence: Synthetic oligonucleotide
  Antisense Strand to SEQ ID NO: 382821
uuuaagccaaagagaccua

SEQ ID NO: 382823 - RNA, 19 nt, Artificial Sequence
  Description of Artificial Sequence: Synthetic oligonucleotide
  Sense Strand Starting at position 815 of SEQ ID NO: 317306
gucucuuuggcuuaaagga

SEQ ID NO: 382824 - RNA, 19 nt, Artificial Sequence
  Description of Artificial Sequence: Synthetic oligonucleotide
  Antisense Strand to SEQ ID NO: 382823
uccuuuaagccaaagagac

SEQ ID NO: 382825 - RNA, 19 nt, Artificial Sequence
  Description of Artificial Sequence: Synthetic oligonucleotide
  Sense Strand Starting at position 815 of SEQ ID NO: 317338
ccacaauguuuccucaugu

SEQ ID NO: 382826 - RNA, 19 nt, Artificial Sequence
  Description of Artificial Sequence: Synthetic oligonucleotide
  Antisense Strand to SEQ ID NO: 382825
acaugaggaaacauugugg

SEQ ID NO: 382827 - RNA, 19 nt, Artificial Sequence
  Description of Artificial Sequence: Synthetic oligonucleotide
  Sense Strand Starting at position 815 of SEQ ID NO: 317409
ggaauuaccucuuuggcua

SEQ ID NO: 382828 - RNA, 19 nt, Artificial Sequence
  Description of Artificial Sequence: Synthetic oligonucleotide
  Antisense Strand to SEQ ID NO: 382827
uagccaaagagguaauucc

SEQ ID NO: 382829 - RNA, 19 nt, Artificial Sequence
  Description of Artificial Sequence: Synthetic oligonucleotide
  Sense Strand Starting at position 815 of SEQ ID NO: 317421
uuggcuagugaugaaacau

SEQ ID NO: 382830 - RNA, 19 nt, Artificial Sequence
  Description of Artificial Sequence: Synthetic oligonucleotide
  Antisense Strand to SEQ ID NO: 382829
auguuucaucacuagccaa

SEQ ID NO: 382831 - RNA, 19 nt, Artificial Sequence
  Description of Artificial Sequence: Synthetic oligonucleotide
  Sense Strand Starting at position 815 of SEQ ID NO: 317553
guuccauucuuucuguaca

SEQ ID NO: 382832 - RNA, 19 nt, Artificial Sequence
  Description of Artificial Sequence: Synthetic oligonucleotide
  Antisense Strand to SEQ ID NO: 382831
uguacagaaagaauggaac

SEQ ID NO: 382833 - RNA, 19 nt, Artificial Sequence
  Description of Artificial Sequence: Synthetic oligonucleotide
  Sense Strand Starting at position 815 of SEQ ID NO: 317556
ccauucuuucuguacaugu

SEQ ID NO: 382834 - RNA, 19 nt, Artificial Sequence
  Description of Artificial Sequence: Synthetic oligonucleotide
  Antisense Strand to SEQ ID NO: 382833
acauguacagaaagaaugg

SEQ ID NO: 382835 - RNA, 19 nt, Artificial Sequence
  Description of Artificial Sequence: Synthetic oligonucleotide
  Sense Strand Starting at position 815 of SEQ ID NO: 317761
ucaauuguugaugggcauu

SEQ ID NO: 382836 - RNA, 19 nt, Artificial Sequence
  Description of Artificial Sequence: Synthetic oligonucleotide
  Antisense Strand to SEQ ID NO: 382835
aaugcccaucaacaauuga

SEQ ID NO: 382837 - RNA, 19 nt, Artificial Sequence
  Description of Artificial Sequence: Synthetic oligonucleotide
  Sense Strand Starting at position 815 of SEQ ID NO: 317903
uucucuauauggguuaagu

SEQ ID NO: 382838 - RNA, 19 nt, Artificial Sequence
  Description of Artificial Sequence: Synthetic oligonucleotide
  Antisense Strand to SEQ ID NO: 382837
acuuaacccauauagagaa

SEQ ID NO: 382839 - RNA, 19 nt, Artificial Sequence
  Description of Artificial Sequence: Synthetic oligonucleotide
  Sense Strand Starting at position 815 of SEQ ID NO: 317905
cucuauauggguuaaguaa

SEQ ID NO: 382840 - RNA, 19 nt, Artificial Sequence
  Description of Artificial Sequence: Synthetic oligonucleotide
  Antisense Strand to SEQ ID NO: 382839
uuacuuaacccauauagag

SEQ ID NO: 382841 - RNA, 19 nt, Artificial Sequence
  Description of Artificial Sequence: Synthetic oligonucleotide
  Sense Strand Starting at position 815 of SEQ ID NO: 317937
uuuaaaugucagcaauuag

SEQ ID NO: 382842 - RNA, 19 nt, Artificial Sequence
  Description of Artificial Sequence: Synthetic oligonucleotide
  Antisense Strand to SEQ ID NO: 382841
cuaauugcugacauuuaaa

SEQ ID NO: 382843 - RNA, 19 nt, Artificial Sequence
  Description of Artificial Sequence: Synthetic oligonucleotide
  Sense Strand Starting at position 815 of SEQ ID NO: 317993
acugauuaacaauguuguu

SEQ ID NO: 382844 - RNA, 19 nt, Artificial Sequence
  Description of Artificial Sequence: Synthetic oligonucleotide
  Antisense Strand to SEQ ID NO: 382843
aacaacauuguuaaucagu

SEQ ID NO: 382845 - RNA, 19 nt, Artificial Sequence
  Description of Artificial Sequence: Synthetic oligonucleotide
  Sense Strand Starting at position 815 of SEQ ID NO: 318182
ggaucaaccuuggagacau

SEQ ID NO: 382846 - RNA, 19 nt, Artificial Sequence
  Description of Artificial Sequence: Synthetic oligonucleotide
  Antisense Strand to SEQ ID NO: 382845
augucuccaagguugaucc

SEQ ID NO: 382847 - RNA, 19 nt, Artificial Sequence
  Description of Artificial Sequence: Synthetic oligonucleotide
  Sense Strand Starting at position 815 of SEQ ID NO: 318197
acauaaugcuaauugaagu

SEQ ID NO: 382848 - RNA, 19 nt, Artificial Sequence
  Description of Artificial Sequence: Synthetic oligonucleotide
  Antisense Strand to SEQ ID NO: 382847
acuucaauuagcauuaugu

SEQ ID NO: 382849 - RNA, 19 nt, Artificial Sequence
  Description of Artificial Sequence: Synthetic oligonucleotide
  Sense Strand Starting at position 815 of SEQ ID NO: 318289
agaauauagaguggugguu

SEQ ID NO: 382850 - RNA, 19 nt, Artificial Sequence
  Description of Artificial Sequence: Synthetic oligonucleotide
  Antisense Strand to SEQ ID NO: 382849
aaccaccacucuauauucu

SEQ ID NO: 382851 - RNA, 19 nt, Artificial Sequence
  Description of Artificial Sequence: Synthetic oligonucleotide
  Sense Strand Starting at position 815 of SEQ ID NO: 318329
ggagcuauuucuuaauggu

SEQ ID NO: 382852 - RNA, 19 nt, Artificial Sequence
  Description of Artificial Sequence: Synthetic oligonucleotide
  Antisense Strand to SEQ ID NO: 382851
accauuaagaaauagcucc

SEQ ID NO: 382853 - RNA, 19 nt, Artificial Sequence
  Description of Artificial Sequence: Synthetic oligonucleotide
  Sense Strand Starting at position 815 of SEQ ID NO: 318371
uaaaguucuggaugaguag

SEQ ID NO: 382854 - RNA, 19 nt, Artificial Sequence
  Description of Artificial Sequence: Synthetic oligonucleotide
  Antisense Strand to SEQ ID NO: 382853
cuacucauccagaacuuua

SEQ ID NO: 382855 - RNA, 19 nt, Artificial Sequence
  Description of Artificial Sequence: Synthetic oligonucleotide
  Sense Strand Starting at position 815 of SEQ ID NO: 318372
aaaguucuggaugaguagu

SEQ ID NO: 382856 - RNA, 19 nt, Artificial Sequence
  Description of Artificial Sequence: Synthetic oligonucleotide
  Antisense Strand to SEQ ID NO: 382855
acuacucauccagaacuuu

SEQ ID NO: 382857 - RNA, 19 nt, Artificial Sequence
  Description of Artificial Sequence: Synthetic oligonucleotide
  Sense Strand Starting at position 815 of SEQ ID NO: 318390
uggugauggcuguauuaau

SEQ ID NO: 382858 - RNA, 19 nt, Artificial Sequence
  Description of Artificial Sequence: Synthetic oligonucleotide
  Antisense Strand to SEQ ID NO: 382857
auuaauacagccaucacca

SEQ ID NO: 382859 - RNA, 19 nt, Artificial Sequence
  Description of Artificial Sequence: Synthetic oligonucleotide
  Sense Strand Starting at position 815 of SEQ ID NO: 318447
ucuuaaauauggcuaagau

SEQ ID NO: 382860 - RNA, 19 nt, Artificial Sequence
  Description of Artificial Sequence: Synthetic oligonucleotide
  Antisense Strand to SEQ ID NO: 382859
aucuuagccauauuuaaga

SEQ ID NO: 382861 - RNA, 19 nt, Artificial Sequence
  Description of Artificial Sequence: Synthetic oligonucleotide
  Sense Strand Starting at position 815 of SEQ ID NO: 318516
ucaguuguauauucuuagu

SEQ ID NO: 382862 - RNA, 19 nt, Artificial Sequence
  Description of Artificial Sequence: Synthetic oligonucleotide
  Antisense Strand to SEQ ID NO: 382861
acuaagaauauacaacuga

SEQ ID NO: 382863 - RNA, 19 nt, Artificial Sequence
  Description of Artificial Sequence: Synthetic oligonucleotide
  Sense Strand Starting at position 815 of SEQ ID NO: 318547
ccaauacugcuggagugua

SEQ ID NO: 382864 - RNA, 19 nt, Artificial Sequence
  Description of Artificial Sequence: Synthetic oligonucleotide
  Antisense Strand to SEQ ID NO: 382863
uacacuccagcaguauugg

SEQ ID NO: 382865 - RNA, 19 nt, Artificial Sequence
  Description of Artificial Sequence: Synthetic oligonucleotide
  Sense Strand Starting at position 816 of SEQ ID NO: 315307
auuggaaaguaucucuuua

SEQ ID NO: 382866 - RNA, 19 nt, Artificial Sequence
  Description of Artificial Sequence: Synthetic oligonucleotide
  Antisense Strand to SEQ ID NO: 382865
uaaagagauacuuuccaau

SEQ ID NO: 382867 - RNA, 19 nt, Artificial Sequence
  Description of Artificial Sequence: Synthetic oligonucleotide
  Sense Strand Starting at position 816 of SEQ ID NO: 315309
uggaaaguaucucuuuaau

SEQ ID NO: 382868 - RNA, 19 nt, Artificial Sequence
  Description of Artificial Sequence: Synthetic oligonucleotide
  Antisense Strand to SEQ ID NO: 382867
auuaaagagauacuuucca

SEQ ID NO: 382869 - RNA, 19 nt, Artificial Sequence
  Description of Artificial Sequence: Synthetic oligonucleotide
  Sense Strand Starting at position 816 of SEQ ID NO: 315379
ugcaauggugaaggaauaa

SEQ ID NO: 382870 - RNA, 19 nt, Artificial Sequence
  Description of Artificial Sequence: Synthetic oligonucleotide
  Antisense Strand to SEQ ID NO: 382869
uuauuccuucaccauugca

SEQ ID NO: 382871 - RNA, 19 nt, Artificial Sequence
  Description of Artificial Sequence: Synthetic oligonucleotide
  Sense Strand Starting at position 816 of SEQ ID NO: 315523
cacagagaaguuuagccua

SEQ ID NO: 382872 - RNA, 19 nt, Artificial Sequence
  Description of Artificial Sequence: Synthetic oligonucleotide
  Antisense Strand to SEQ ID NO: 382871
uaggcuaaacuucucugug

SEQ ID NO: 382873 - RNA, 19 nt, Artificial Sequence
  Description of Artificial Sequence: Synthetic oligonucleotide
  Sense Strand Starting at position 816 of SEQ ID NO: 315526
agagaaguuuagccuaacu

SEQ ID NO: 382874 - RNA, 19 nt, Artificial Sequence
  Description of Artificial Sequence: Synthetic oligonucleotide
  Antisense Strand to SEQ ID NO: 382873
aguuaggcuaaacuucucu

SEQ ID NO: 382875 - RNA, 19 nt, Artificial Sequence
  Description of Artificial Sequence: Synthetic oligonucleotide
  Sense Strand Starting at position 816 of SEQ ID NO: 315528
agaaguuuagccuaacuca

SEQ ID NO: 382876 - RNA, 19 nt, Artificial Sequence
  Description of Artificial Sequence: Synthetic oligonucleotide
  Antisense Strand to SEQ ID NO: 382875
ugaguuaggcuaaacuucu

SEQ ID NO: 382877 - RNA, 19 nt, Artificial Sequence
  Description of Artificial Sequence: Synthetic oligonucleotide
  Sense Strand Starting at position 816 of SEQ ID NO: 315570
cuacaugaaguuugaaaug

SEQ ID NO: 382878 - RNA, 19 nt, Artificial Sequence
  Description of Artificial Sequence: Synthetic oligonucleotide
  Antisense Strand to SEQ ID NO: 382877
cauuucaaacuucauguag

SEQ ID NO: 382879 - RNA, 19 nt, Artificial Sequence
  Description of Artificial Sequence: Synthetic oligonucleotide
  Sense Strand Starting at position 816 of SEQ ID NO: 315580
uuugaaauguuugucuaga

SEQ ID NO: 382880 - RNA, 19 nt, Artificial Sequence
  Description of Artificial Sequence: Synthetic oligonucleotide
  Antisense Strand to SEQ ID NO: 382879
ucuagacaaacauuucaaa

SEQ ID NO: 382881 - RNA, 19 nt, Artificial Sequence
  Description of Artificial Sequence: Synthetic oligonucleotide
  Sense Strand Starting at position 816 of SEQ ID NO: 315581
uugaaauguuugucuagaa

SEQ ID NO: 382882 - RNA, 19 nt, Artificial Sequence
  Description of Artificial Sequence: Synthetic oligonucleotide
  Antisense Strand to SEQ ID NO: 382881
uucuagacaaacauuucaa

SEQ ID NO: 382883 - RNA, 19 nt, Artificial Sequence
  Description of Artificial Sequence: Synthetic oligonucleotide
  Sense Strand Starting at position 816 of SEQ ID NO: 315582
ugaaauguuugucuagaac

SEQ ID NO: 382884 - RNA, 19 nt, Artificial Sequence
  Description of Artificial Sequence: Synthetic oligonucleotide
  Antisense Strand to SEQ ID NO: 382883
guucuagacaaacauuuca

SEQ ID NO: 382885 - RNA, 19 nt, Artificial Sequence
  Description of Artificial Sequence: Synthetic oligonucleotide
  Sense Strand Starting at position 816 of SEQ ID NO: 315604
augauaugguaucuuuaug

SEQ ID NO: 382886 - RNA, 19 nt, Artificial Sequence
  Description of Artificial Sequence: Synthetic oligonucleotide
  Antisense Strand to SEQ ID NO: 382885
cauaaagauaccauaucau

SEQ ID NO: 382887 - RNA, 19 nt, Artificial Sequence
  Description of Artificial Sequence: Synthetic oligonucleotide
  Sense Strand Starting at position 816 of SEQ ID NO: 315846
guugcucauggauauaagu

SEQ ID NO: 382888 - RNA, 19 nt, Artificial Sequence
  Description of Artificial Sequence: Synthetic oligonucleotide
  Antisense Strand to SEQ ID NO: 382887
acuuauauccaugagcaac

SEQ ID NO: 382889 - RNA, 19 nt, Artificial Sequence
  Description of Artificial Sequence: Synthetic oligonucleotide
  Sense Strand Starting at position 816 of SEQ ID NO: 315848
ugcucauggauauaaguga

SEQ ID NO: 382890 - RNA, 19 nt, Artificial Sequence
  Description of Artificial Sequence: Synthetic oligonucleotide
  Antisense Strand to SEQ ID NO: 382889
ucacuuauauccaugagca

SEQ ID NO: 382891 - RNA, 19 nt, Artificial Sequence
  Description of Artificial Sequence: Synthetic oligonucleotide
  Sense Strand Starting at position 816 of SEQ ID NO: 316009
uuggguguugaucaucauu

SEQ ID NO: 382892 - RNA, 19 nt, Artificial Sequence
  Description of Artificial Sequence: Synthetic oligonucleotide
  Antisense Strand to SEQ ID NO: 382891
aaugaugaucaacacccaa

SEQ ID NO: 382893 - RNA, 19 nt, Artificial Sequence
  Description of Artificial Sequence: Synthetic oligonucleotide
  Sense Strand Starting at position 816 of SEQ ID NO: 316011
ggguguugaucaucauuga

SEQ ID NO: 382894 - RNA, 19 nt, Artificial Sequence
  Description of Artificial Sequence: Synthetic oligonucleotide
  Antisense Strand to SEQ ID NO: 382893
ucaaugaugaucaacaccc

SEQ ID NO: 382895 - RNA, 19 nt, Artificial Sequence
  Description of Artificial Sequence: Synthetic oligonucleotide
  Sense Strand Starting at position 816 of SEQ ID NO: 316012
gguguugaucaucauugau

SEQ ID NO: 382896 - RNA, 19 nt, Artificial Sequence
  Description of Artificial Sequence: Synthetic oligonucleotide
  Antisense Strand to SEQ ID NO: 382895
aucaaugaugaucaacacc

SEQ ID NO: 382897 - RNA, 19 nt, Artificial Sequence
  Description of Artificial Sequence: Synthetic oligonucleotide
  Sense Strand Starting at position 816 of SEQ ID NO: 316014
uguugaucaucauugauac

SEQ ID NO: 382898 - RNA, 19 nt, Artificial Sequence
  Description of Artificial Sequence: Synthetic oligonucleotide
  Antisense Strand to SEQ ID NO: 382897
guaucaaugaugaucaaca

SEQ ID NO: 382899 - RNA, 19 nt, Artificial Sequence
  Description of Artificial Sequence: Synthetic oligonucleotide
  Sense Strand Starting at position 816 of SEQ ID NO: 316015
guugaucaucauugauacu

SEQ ID NO: 382900 - RNA, 19 nt, Artificial Sequence
  Description of Artificial Sequence: Synthetic oligonucleotide
  Antisense Strand to SEQ ID NO: 382899
aguaucaaugaugaucaac

SEQ ID NO: 382901 - RNA, 19 nt, Artificial Sequence
  Description of Artificial Sequence: Synthetic oligonucleotide
  Sense Strand Starting at position 816 of SEQ ID NO: 316155
ugucacauauuucugcuua

SEQ ID NO: 382902 - RNA, 19 nt, Artificial Sequence
  Description of Artificial Sequence: Synthetic oligonucleotide
  Antisense Strand to SEQ ID NO: 382901
uaagcagaaauaugugaca

SEQ ID NO: 382903 - RNA, 19 nt, Artificial Sequence
  Description of Artificial Sequence: Synthetic oligonucleotide
  Sense Strand Starting at position 816 of SEQ ID NO: 316265
accauuaagcuaggauaga

SEQ ID NO: 382904 - RNA, 19 nt, Artificial Sequence
  Description of Artificial Sequence: Synthetic oligonucleotide
  Antisense Strand to SEQ ID NO: 382903
ucuauccuagcuuaauggu

SEQ ID NO: 382905 - RNA, 19 nt, Artificial Sequence
  Description of Artificial Sequence: Synthetic oligonucleotide
  Sense Strand Starting at position 816 of SEQ ID NO: 317526
cuccauauaguauagguaa

SEQ ID NO: 382906 - RNA, 19 nt, Artificial Sequence
  Description of Artificial Sequence: Synthetic oligonucleotide
  Antisense Strand to SEQ ID NO: 382905
uuaccuauacuauauggag

SEQ ID NO: 382907 - RNA, 19 nt, Artificial Sequence
  Description of Artificial Sequence: Synthetic oligonucleotide
  Sense Strand Starting at position 816 of SEQ ID NO: 317546
gcugauucguaauuuaagu

SEQ ID NO: 382908 - RNA, 19 nt, Artificial Sequence
  Description of Artificial Sequence: Synthetic oligonucleotide
  Antisense Strand to SEQ ID NO: 382907
acuuaaauuacgaaucagc

SEQ ID NO: 382909 - RNA, 19 nt, Artificial Sequence
  Description of Artificial Sequence: Synthetic oligonucleotide
  Sense Strand Starting at position 816 of SEQ ID NO: 317552
ucguaauuuaagugucagu

SEQ ID NO: 382910 - RNA, 19 nt, Artificial Sequence
  Description of Artificial Sequence: Synthetic oligonucleotide
  Antisense Strand to SEQ ID NO: 382909
acugacacuuaaauuacga

SEQ ID NO: 382911 - RNA, 19 nt, Artificial Sequence
  Description of Artificial Sequence: Synthetic oligonucleotide
  Sense Strand Starting at position 816 of SEQ ID NO: 317576
guaccaguguucccgauuu

SEQ ID NO: 382912 - RNA, 19 nt, Artificial Sequence
  Description of Artificial Sequence: Synthetic oligonucleotide
  Antisense Strand to SEQ ID NO: 382911
aaaucgggaacacugguac

SEQ ID NO: 382913 - RNA, 19 nt, Artificial Sequence
  Description of Artificial Sequence: Synthetic oligonucleotide
  Sense Strand Starting at position 816 of SEQ ID NO: 317605
auauguagugguuaacaau

SEQ ID NO: 382914 - RNA, 19 nt, Artificial Sequence
  Description of Artificial Sequence: Synthetic oligonucleotide
  Antisense Strand to SEQ ID NO: 382913
auuguuaaccacuacauau

SEQ ID NO: 382915 - RNA, 19 nt, Artificial Sequence
  Description of Artificial Sequence: Synthetic oligonucleotide
  Sense Strand Starting at position 816 of SEQ ID NO: 317614
gguuaacaauguguuuaaa

SEQ ID NO: 382916 - RNA, 19 nt, Artificial Sequence
  Description of Artificial Sequence: Synthetic oligonucleotide
  Antisense Strand to SEQ ID NO: 382915
uuuaaacacauuguuaacc

SEQ ID NO: 382917 - RNA, 19 nt, Artificial Sequence
  Description of Artificial Sequence: Synthetic oligonucleotide
  Sense Strand Starting at position 816 of SEQ ID NO: 317728
auaaauugugguggaauau

SEQ ID NO: 382918 - RNA, 19 nt, Artificial Sequence
  Description of Artificial Sequence: Synthetic oligonucleotide
  Antisense Strand to SEQ ID NO: 382917
auauuccaccacaauuuau

SEQ ID NO: 382919 - RNA, 19 nt, Artificial Sequence
  Description of Artificial Sequence: Synthetic oligonucleotide
  Sense Strand Starting at position 816 of SEQ ID NO: 317737
gguggaauauuacucaguc

SEQ ID NO: 382920 - RNA, 19 nt, Artificial Sequence
  Description of Artificial Sequence: Synthetic oligonucleotide
  Antisense Strand to SEQ ID NO: 382919
gacugaguaauauuccacc

SEQ ID NO: 382921 - RNA, 19 nt, Artificial Sequence
  Description of Artificial Sequence: Synthetic oligonucleotide
  Sense Strand Starting at position 816 of SEQ ID NO: 317738
guggaauauuacucagucu

SEQ ID NO: 382922 - RNA, 19 nt, Artificial Sequence
  Description of Artificial Sequence: Synthetic oligonucleotide
  Antisense Strand to SEQ ID NO: 382921
agacugaguaauauuccac

SEQ ID NO: 382923 - RNA, 19 nt, Artificial Sequence
  Description of Artificial Sequence: Synthetic oligonucleotide
  Sense Strand Starting at position 816 of SEQ ID NO: 317965
aguguuucuguuuaggaag

SEQ ID NO: 382924 - RNA, 19 nt, Artificial Sequence
  Description of Artificial Sequence: Synthetic oligonucleotide
  Antisense Strand to SEQ ID NO: 382923
cuuccuaaacagaaacacu

SEQ ID NO: 382925 - RNA, 19 nt, Artificial Sequence
  Description of Artificial Sequence: Synthetic oligonucleotide
  Sense Strand Starting at position 816 of SEQ ID NO: 318234
uuuauauuccugggaguug

SEQ ID NO: 382926 - RNA, 19 nt, Artificial Sequence
  Description of Artificial Sequence: Synthetic oligonucleotide
  Antisense Strand to SEQ ID NO: 382925
caacucccaggaauauaaa

SEQ ID NO: 382927 - RNA, 19 nt, Artificial Sequence
  Description of Artificial Sequence: Synthetic oligonucleotide
  Sense Strand Starting at position 816 of SEQ ID NO: 318366
gagggagcaucacuugaau

SEQ ID NO: 382928 - RNA, 19 nt, Artificial Sequence
  Description of Artificial Sequence: Synthetic oligonucleotide
  Antisense Strand to SEQ ID NO: 382927
auucaagugaugcucccuc

SEQ ID NO: 382929 - RNA, 19 nt, Artificial Sequence
  Description of Artificial Sequence: Synthetic oligonucleotide
  Sense Strand Starting at position 816 of SEQ ID NO: 318780
cugggagauuaucugcagu

SEQ ID NO: 382930 - RNA, 19 nt, Artificial Sequence
  Description of Artificial Sequence: Synthetic oligonucleotide
  Antisense Strand to SEQ ID NO: 382929
acugcagauaaucucccag

SEQ ID NO: 382931 - RNA, 19 nt, Artificial Sequence
  Description of Artificial Sequence: Synthetic oligonucleotide
  Sense Strand Starting at position 816 of SEQ ID NO: 318782
gggagauuaucugcaguaa

SEQ ID NO: 382932 - RNA, 19 nt, Artificial Sequence
  Description of Artificial Sequence: Synthetic oligonucleotide
  Antisense Strand to SEQ ID NO: 382931
uuacugcagauaaucuccc

SEQ ID NO: 382933 - RNA, 19 nt, Artificial Sequence
  Description of Artificial Sequence: Synthetic oligonucleotide
  Sense Strand Starting at position 816 of SEQ ID NO: 318793
ugcaguaaauuugauaaag

SEQ ID NO: 382934 - RNA, 19 nt, Artificial Sequence
  Description of Artificial Sequence: Synthetic oligonucleotide
  Antisense Strand to SEQ ID NO: 382933
cuuuaucaaauuuacugca

SEQ ID NO: 382935 - RNA, 19 nt, Artificial Sequence
  Description of Artificial Sequence: Synthetic oligonucleotide
  Sense Strand Starting at position 816 of SEQ ID NO: 318817
guaccuuugcuauaagauc

SEQ ID NO: 382936 - RNA, 19 nt, Artificial Sequence
  Description of Artificial Sequence: Synthetic oligonucleotide
  Antisense Strand to SEQ ID NO: 382935
gaucuuauagcaaagguac

SEQ ID NO: 382937 - RNA, 19 nt, Artificial Sequence
  Description of Artificial Sequence: Synthetic oligonucleotide
  Sense Strand Starting at position 816 of SEQ ID NO: 319024
aauauugagcguuaucuag

SEQ ID NO: 382938 - RNA, 19 nt, Artificial Sequence
  Description of Artificial Sequence: Synthetic oligonucleotide
  Antisense Strand to SEQ ID NO: 382937
cuagauaacgcucaauauu

SEQ ID NO: 382939 - RNA, 19 nt, Artificial Sequence
  Description of Artificial Sequence: Synthetic oligonucleotide
  Sense Strand Starting at position 816 of SEQ ID NO: 319028
uugagcguuaucuagaaua

SEQ ID NO: 382940 - RNA, 19 nt, Artificial Sequence
  Description of Artificial Sequence: Synthetic oligonucleotide
  Antisense Strand to SEQ ID NO: 382939
uauucuagauaacgcucaa

SEQ ID NO: 382941 - RNA, 19 nt, Artificial Sequence
  Description of Artificial Sequence: Synthetic oligonucleotide
  Sense Strand Starting at position 816 of SEQ ID NO: 319030
gagcguuaucuagaauaua

SEQ ID NO: 382942 - RNA, 19 nt, Artificial Sequence
  Description of Artificial Sequence: Synthetic oligonucleotide
  Antisense Strand to SEQ ID NO: 382941
uauauucuagauaacgcuc

SEQ ID NO: 382943 - RNA, 19 nt, Artificial Sequence
  Description of Artificial Sequence: Synthetic oligonucleotide
  Sense Strand Starting at position 816 of SEQ ID NO: 319033
cguuaucuagaauauagua

SEQ ID NO: 382944 - RNA, 19 nt, Artificial Sequence
  Description of Artificial Sequence: Synthetic oligonucleotide
  Antisense Strand to SEQ ID NO: 382943
uacuauauucuagauaacg

SEQ ID NO: 382945 - RNA, 19 nt, Artificial Sequence
  Description of Artificial Sequence: Synthetic oligonucleotide
  Sense Strand Starting at position 817 of SEQ ID NO: 315284
cugaauagaugucugggau

SEQ ID NO: 382946 - RNA, 19 nt, Artificial Sequence
  Description of Artificial Sequence: Synthetic oligonucleotide
  Antisense Strand to SEQ ID NO: 382945
aucccagacaucuauucag

SEQ ID NO: 382947 - RNA, 19 nt, Artificial Sequence
  Description of Artificial Sequence: Synthetic oligonucleotide
  Sense Strand Starting at position 817 of SEQ ID NO: 315285
ugaauagaugucugggauu

SEQ ID NO: 382948 - RNA, 19 nt, Artificial Sequence
  Description of Artificial Sequence: Synthetic oligonucleotide
  Antisense Strand to SEQ ID NO: 382947
aaucccagacaucuauuca

SEQ ID NO: 382949 - RNA, 19 nt, Artificial Sequence
  Description of Artificial Sequence: Synthetic oligonucleotide
  Sense Strand Starting at position 817 of SEQ ID NO: 315308
guuacuaagaguugagagu

SEQ ID NO: 382950 - RNA, 19 nt, Artificial Sequence
  Description of Artificial Sequence: Synthetic oligonucleotide
  Antisense Strand to SEQ ID NO: 382949
acucucaacucuuaguaac

SEQ ID NO: 382951 - RNA, 19 nt, Artificial Sequence
  Description of Artificial Sequence: Synthetic oligonucleotide
  Sense Strand Starting at position 817 of SEQ ID NO: 315473
ucuccuagguagucgagau

SEQ ID NO: 382952 - RNA, 19 nt, Artificial Sequence
  Description of Artificial Sequence: Synthetic oligonucleotide
  Antisense Strand to SEQ ID NO: 382951
aucucgacuaccuaggaga

SEQ ID NO: 382953 - RNA, 19 nt, Artificial Sequence
  Description of Artificial Sequence: Synthetic oligonucleotide
  Sense Strand Starting at position 817 of SEQ ID NO: 315474
cuccuagguagucgagauu

SEQ ID NO: 382954 - RNA, 19 nt, Artificial Sequence
  Description of Artificial Sequence: Synthetic oligonucleotide
  Antisense Strand to SEQ ID NO: 382953
aaucucgacuaccuaggag

SEQ ID NO: 382955 - RNA, 19 nt, Artificial Sequence
  Description of Artificial Sequence: Synthetic oligonucleotide
  Sense Strand Starting at position 817 of SEQ ID NO: 315477
cuagguagucgagauuaua

SEQ ID NO: 382956 - RNA, 19 nt, Artificial Sequence
  Description of Artificial Sequence: Synthetic oligonucleotide
  Antisense Strand to SEQ ID NO: 382955
uauaaucucgacuaccuag

SEQ ID NO: 382957 - RNA, 19 nt, Artificial Sequence
  Description of Artificial Sequence: Synthetic oligonucleotide
  Sense Strand Starting at position 817 of SEQ ID NO: 315631
ggcauaagcccagauuacu

SEQ ID NO: 382958 - RNA, 19 nt, Artificial Sequence
  Description of Artificial Sequence: Synthetic oligonucleotide
  Antisense Strand to SEQ ID NO: 382957
aguaaucugggcuuaugcc

SEQ ID NO: 382959 - RNA, 19 nt, Artificial Sequence
  Description of Artificial Sequence: Synthetic oligonucleotide
  Sense Strand Starting at position 817 of SEQ ID NO: 315639
cccagauuacugugccaag

SEQ ID NO: 382960 - RNA, 19 nt, Artificial Sequence
  Description of Artificial Sequence: Synthetic oligonucleotide
  Antisense Strand to SEQ ID NO: 382959
cuuggcacaguaaucuggg

SEQ ID NO: 382961 - RNA, 19 nt, Artificial Sequence
  Description of Artificial Sequence: Synthetic oligonucleotide
  Sense Strand Starting at position 817 of SEQ ID NO: 315915
guuugagaacuuggaaugu

SEQ ID NO: 382962 - RNA, 19 nt, Artificial Sequence
  Description of Artificial Sequence: Synthetic oligonucleotide
  Antisense Strand to SEQ ID NO: 382961
acauuccaaguucucaaac

SEQ ID NO: 382963 - RNA, 19 nt, Artificial Sequence
  Description of Artificial Sequence: Synthetic oligonucleotide
  Sense Strand Starting at position 817 of SEQ ID NO: 315924
cuuggaaugugccugaguu

SEQ ID NO: 382964 - RNA, 19 nt, Artificial Sequence
  Description of Artificial Sequence: Synthetic oligonucleotide
  Antisense Strand to SEQ ID NO: 382963
aacucaggcacauuccaag

SEQ ID NO: 382965 - RNA, 19 nt, Artificial Sequence
  Description of Artificial Sequence: Synthetic oligonucleotide
  Sense Strand Starting at position 817 of SEQ ID NO: 315991
gcacacuaccguuauaugu

SEQ ID NO: 382966 - RNA, 19 nt, Artificial Sequence
  Description of Artificial Sequence: Synthetic oligonucleotide
  Antisense Strand to SEQ ID NO: 382965
acauauaacgguagugugc

SEQ ID NO: 382967 - RNA, 19 nt, Artificial Sequence
  Description of Artificial Sequence: Synthetic oligonucleotide
  Sense Strand Starting at position 817 of SEQ ID NO: 316023
ccuaguauuuguuggauuu

SEQ ID NO: 382968 - RNA, 19 nt, Artificial Sequence
  Description of Artificial Sequence: Synthetic oligonucleotide
  Antisense Strand to SEQ ID NO: 382967
aaauccaacaaauacuagg

SEQ ID NO: 382969 - RNA, 19 nt, Artificial Sequence
  Description of Artificial Sequence: Synthetic oligonucleotide
  Sense Strand Starting at position 817 of SEQ ID NO: 316112
gaacacuaguagcuuagau

SEQ ID NO: 382970 - RNA, 19 nt, Artificial Sequence
  Description of Artificial Sequence: Synthetic oligonucleotide
  Antisense Strand to SEQ ID NO: 382969
aucuaagcuacuaguguuc

SEQ ID NO: 382971 - RNA, 19 nt, Artificial Sequence
  Description of Artificial Sequence: Synthetic oligonucleotide
  Sense Strand Starting at position 817 of SEQ ID NO: 317238
uccaccuugucuguugaga

SEQ ID NO: 382972 - RNA, 19 nt, Artificial Sequence
  Description of Artificial Sequence: Synthetic oligonucleotide
  Antisense Strand to SEQ ID NO: 382971
ucucaacagacaaggugga

SEQ ID NO: 382973 - RNA, 19 nt, Artificial Sequence
  Description of Artificial Sequence: Synthetic oligonucleotide
  Sense Strand Starting at position 817 of SEQ ID NO: 317289
uguaauugagagcauauua

SEQ ID NO: 382974 - RNA, 19 nt, Artificial Sequence
  Description of Artificial Sequence: Synthetic oligonucleotide
  Antisense Strand to SEQ ID NO: 382973
uaauaugcucucaauuaca

SEQ ID NO: 382975 - RNA, 19 nt, Artificial Sequence
  Description of Artificial Sequence: Synthetic oligonucleotide
  Sense Strand Starting at position 817 of SEQ ID NO: 317445
agcucugacccuuaggauu

SEQ ID NO: 382976 - RNA, 19 nt, Artificial Sequence
  Description of Artificial Sequence: Synthetic oligonucleotide
  Antisense Strand to SEQ ID NO: 382975
aauccuaagggucagagcu

SEQ ID NO: 382977 - RNA, 19 nt, Artificial Sequence
  Description of Artificial Sequence: Synthetic oligonucleotide
  Sense Strand Starting at position 817 of SEQ ID NO: 317486
cagggaagauguuuaaagu

SEQ ID NO: 382978 - RNA, 19 nt, Artificial Sequence
  Description of Artificial Sequence: Synthetic oligonucleotide
  Antisense Strand to SEQ ID NO: 382977
acuuuaaacaucuucccug

SEQ ID NO: 382979 - RNA, 19 nt, Artificial Sequence
  Description of Artificial Sequence: Synthetic oligonucleotide
  Sense Strand Starting at position 817 of SEQ ID NO: 317492
agauguuuaaaguggaaau

SEQ ID NO: 382980 - RNA, 19 nt, Artificial Sequence
  Description of Artificial Sequence: Synthetic oligonucleotide
  Antisense Strand to SEQ ID NO: 382979
auuuccacuuuaaacaucu

SEQ ID NO: 382981 - RNA, 19 nt, Artificial Sequence
  Description of Artificial Sequence: Synthetic oligonucleotide
  Sense Strand Starting at position 817 of SEQ ID NO: 317749
auauucuuccaguagauug

SEQ ID NO: 382982 - RNA, 19 nt, Artificial Sequence
  Description of Artificial Sequence: Synthetic oligonucleotide
  Antisense Strand to SEQ ID NO: 382981
caaucuacuggaagaauau

SEQ ID NO: 382983 - RNA, 19 nt, Artificial Sequence
  Description of Artificial Sequence: Synthetic oligonucleotide
  Sense Strand Starting at position 817 of SEQ ID NO: 317811
uuaggaacuguaugaaauu

SEQ ID NO: 382984 - RNA, 19 nt, Artificial Sequence
  Description of Artificial Sequence: Synthetic oligonucleotide
  Antisense Strand to SEQ ID NO: 382983
aauuucauacaguuccuaa

SEQ ID NO: 382985 - RNA, 19 nt, Artificial Sequence
  Description of Artificial Sequence: Synthetic oligonucleotide
  Sense Strand Starting at position 817 of SEQ ID NO: 317969
auucuauuauuccuguuga

SEQ ID NO: 382986 - RNA, 19 nt, Artificial Sequence
  Description of Artificial Sequence: Synthetic oligonucleotide
  Antisense Strand to SEQ ID NO: 382985
ucaacaggaauaauagaau

SEQ ID NO: 382987 - RNA, 19 nt, Artificial Sequence
  Description of Artificial Sequence: Synthetic oligonucleotide
  Sense Strand Starting at position 817 of SEQ ID NO: 318099
aacgguagaugcucucuua

SEQ ID NO: 382988 - RNA, 19 nt, Artificial Sequence
  Description of Artificial Sequence: Synthetic oligonucleotide
  Antisense Strand to SEQ ID NO: 382987
uaagagagcaucuaccguu

SEQ ID NO: 382989 - RNA, 19 nt, Artificial Sequence
  Description of Artificial Sequence: Synthetic oligonucleotide
  Sense Strand Starting at position 817 of SEQ ID NO: 318102
gguagaugcucucuuauau

SEQ ID NO: 382990 - RNA, 19 nt, Artificial Sequence
  Description of Artificial Sequence: Synthetic oligonucleotide
  Antisense Strand to SEQ ID NO: 382989
auauaagagagcaucuacc

SEQ ID NO: 382991 - RNA, 19 nt, Artificial Sequence
  Description of Artificial Sequence: Synthetic oligonucleotide
  Sense Strand Starting at position 817 of SEQ ID NO: 318312
ugaguaaaguugcuuuaug

SEQ ID NO: 382992 - RNA, 19 nt, Artificial Sequence
  Description of Artificial Sequence: Synthetic oligonucleotide
  Antisense Strand to SEQ ID NO: 382991
cauaaagcaacuuuacuca

SEQ ID NO: 382993 - RNA, 19 nt, Artificial Sequence
  Description of Artificial Sequence: Synthetic oligonucleotide
  Sense Strand Starting at position 817 of SEQ ID NO: 318313
gaguaaaguugcuuuauga

SEQ ID NO: 382994 - RNA, 19 nt, Artificial Sequence
  Description of Artificial Sequence: Synthetic oligonucleotide
  Antisense Strand to SEQ ID NO: 382993
ucauaaagcaacuuuacuc

SEQ ID NO: 382995 - RNA, 19 nt, Artificial Sequence
  Description of Artificial Sequence: Synthetic oligonucleotide
  Sense Strand Starting at position 817 of SEQ ID NO: 318354
auucuuugguuucugcaga

SEQ ID NO: 382996 - RNA, 19 nt, Artificial Sequence
  Description of Artificial Sequence: Synthetic oligonucleotide
  Antisense Strand to SEQ ID NO: 382995
ucugcagaaaccaaagaau

SEQ ID NO: 382997 - RNA, 19 nt, Artificial Sequence
  Description of Artificial Sequence: Synthetic oligonucleotide
  Sense Strand Starting at position 817 of SEQ ID NO: 318359
uugguuucugcagacuauu

SEQ ID NO: 382998 - RNA, 19 nt, Artificial Sequence
  Description of Artificial Sequence: Synthetic oligonucleotide
  Antisense Strand to SEQ ID NO: 382997
aauagucugcagaaaccaa

SEQ ID NO: 382999 - RNA, 19 nt, Artificial Sequence
  Description of Artificial Sequence: Synthetic oligonucleotide
  Sense Strand Starting at position 817 of SEQ ID NO: 318367
ugcagacuauuagcuuuaa

SEQ ID NO: 383000 - RNA, 19 nt, Artificial Sequence
  Description of Artificial Sequence: Synthetic oligonucleotide
  Antisense Strand to SEQ ID NO: 382999
uuaaagcuaauagucugca

SEQ ID NO: 383001 - RNA, 19 nt, Artificial Sequence
  Description of Artificial Sequence: Synthetic oligonucleotide
  Sense Strand Starting at position 817 of SEQ ID NO: 318368
gcagacuauuagcuuuaaa

SEQ ID NO: 383002 - RNA, 19 nt, Artificial Sequence
  Description of Artificial Sequence: Synthetic oligonucleotide
  Antisense Strand to SEQ ID NO: 383001
uuuaaagcuaauagucugc

SEQ ID NO: 383003 - RNA, 19 nt, Artificial Sequence
  Description of Artificial Sequence: Synthetic oligonucleotide
  Sense Strand Starting at position 817 of SEQ ID NO: 318708
auauaaguucuauggucaa

SEQ ID NO: 383004 - RNA, 19 nt, Artificial Sequence
  Description of Artificial Sequence: Synthetic oligonucleotide
  Antisense Strand to SEQ ID NO: 383003
uugaccauagaacuuauau

SEQ ID NO: 383005 - RNA, 19 nt, Artificial Sequence
  Description of Artificial Sequence: Synthetic oligonucleotide
  Sense Strand Starting at position 817 of SEQ ID NO: 318804
aaauguaagccauguaguc

SEQ ID NO: 383006 - RNA, 19 nt, Artificial Sequence
  Description of Artificial Sequence: Synthetic oligonucleotide
  Antisense Strand to SEQ ID NO: 383005
gacuacauggcuuacauuu

SEQ ID NO: 383007 - RNA, 19 nt, Artificial Sequence
  Description of Artificial Sequence: Synthetic oligonucleotide
  Sense Strand Starting at position 817 of SEQ ID NO: 318821
ucaguuaaguuagcaauaa

SEQ ID NO: 383008 - RNA, 19 nt, Artificial Sequence
  Description of Artificial Sequence: Synthetic oligonucleotide
  Antisense Strand to SEQ ID NO: 383007
uuauugcuaacuuaacuga

SEQ ID NO: 383009 - RNA, 19 nt, Artificial Sequence
  Description of Artificial Sequence: Synthetic oligonucleotide
  Sense Strand Starting at position 817 of SEQ ID NO: 318916
aucagaaagucagacaaau

SEQ ID NO: 383010 - RNA, 19 nt, Artificial Sequence
  Description of Artificial Sequence: Synthetic oligonucleotide
  Antisense Strand to SEQ ID NO: 383009
auuugucugacuuucugau

SEQ ID NO: 383011 - RNA, 19 nt, Artificial Sequence
  Description of Artificial Sequence: Synthetic oligonucleotide
  Sense Strand Starting at position 817 of SEQ ID NO: 318928
gacaaauugcaguauugug

SEQ ID NO: 383012 - RNA, 19 nt, Artificial Sequence
  Description of Artificial Sequence: Synthetic oligonucleotide
  Antisense Strand to SEQ ID NO: 383011
cacaauacugcaauuuguc

SEQ ID NO: 383013 - RNA, 19 nt, Artificial Sequence
  Description of Artificial Sequence: Synthetic oligonucleotide
  Sense Strand Starting at position 817 of SEQ ID NO: 319006
gcugaaauuuaagaacaau

SEQ ID NO: 383014 - RNA, 19 nt, Artificial Sequence
  Description of Artificial Sequence: Synthetic oligonucleotide
  Antisense Strand to SEQ ID NO: 383013
auuguucuuaaauuucagc

SEQ ID NO: 383015 - RNA, 19 nt, Artificial Sequence
  Description of Artificial Sequence: Synthetic oligonucleotide
  Sense Strand Starting at position 817 of SEQ ID NO: 319062
agagcuuuaugguugcuaa

SEQ ID NO: 383016 - RNA, 19 nt, Artificial Sequence
  Description of Artificial Sequence: Synthetic oligonucleotide
  Antisense Strand to SEQ ID NO: 383015
uuagcaaccauaaagcucu

SEQ ID NO: 383017 - RNA, 19 nt, Artificial Sequence
  Description of Artificial Sequence: Synthetic oligonucleotide
  Sense Strand Starting at position 817 of SEQ ID NO: 319063
gagcuuuaugguugcuaaa

SEQ ID NO: 383018 - RNA, 19 nt, Artificial Sequence
  Description of Artificial Sequence: Synthetic oligonucleotide
  Antisense Strand to SEQ ID NO: 383017
uuuagcaaccauaaagcuc

SEQ ID NO: 383019 - RNA, 19 nt, Artificial Sequence
  Description of Artificial Sequence: Synthetic oligonucleotide
  Sense Strand Starting at position 817 of SEQ ID NO: 319105
acgcuucucuuaccuagau

SEQ ID NO: 383020 - RNA, 19 nt, Artificial Sequence
  Description of Artificial Sequence: Synthetic oligonucleotide
  Antisense Strand to SEQ ID NO: 383019
aucuagguaagagaagcgu

SEQ ID NO: 383021 - RNA, 19 nt, Artificial Sequence
  Description of Artificial Sequence: Synthetic oligonucleotide
  Sense Strand Starting at position 817 of SEQ ID NO: 319129
ugagaagagcuuuguaaca

SEQ ID NO: 383022 - RNA, 19 nt, Artificial Sequence
  Description of Artificial Sequence: Synthetic oligonucleotide
  Antisense Strand to SEQ ID NO: 383021
uguuacaaagcucuucuca

SEQ ID NO: 383023 - RNA, 19 nt, Artificial Sequence
  Description of Artificial Sequence: Synthetic oligonucleotide
  Sense Strand Starting at position 817 of SEQ ID NO: 319140
uuguaacagcuuuaugaug

SEQ ID NO: 383024 - RNA, 19 nt, Artificial Sequence
  Description of Artificial Sequence: Synthetic oligonucleotide
  Antisense Strand to SEQ ID NO: 383023
caucauaaagcuguuacaa

SEQ ID NO: 383025 - RNA, 19 nt, Artificial Sequence
  Description of Artificial Sequence: Synthetic oligonucleotide
  Sense Strand Starting at position 818 of SEQ ID NO: 315493
gaguguuaauauguaaacu

SEQ ID NO: 383026 - RNA, 19 nt, Artificial Sequence
  Description of Artificial Sequence: Synthetic oligonucleotide
  Antisense Strand to SEQ ID NO: 383025
aguuuacauauuaacacuc

SEQ ID NO: 383027 - RNA, 19 nt, Artificial Sequence
  Description of Artificial Sequence: Synthetic oligonucleotide
  Sense Strand Starting at position 818 of SEQ ID NO: 315531
agccaauaacaugguugau

SEQ ID NO: 383028 - RNA, 19 nt, Artificial Sequence
  Description of Artificial Sequence: Synthetic oligonucleotide
  Antisense Strand to SEQ ID NO: 383027
aucaaccauguuauuggcu

SEQ ID NO: 383029 - RNA, 19 nt, Artificial Sequence
  Description of Artificial Sequence: Synthetic oligonucleotide
  Sense Strand Starting at position 818 of SEQ ID NO: 315577
uaugcuucuggcuaaagua

SEQ ID NO: 383030 - RNA, 19 nt, Artificial Sequence
  Description of Artificial Sequence: Synthetic oligonucleotide
  Antisense Strand to SEQ ID NO: 383029
uacuuuagccagaagcaua

SEQ ID NO: 383031 - RNA, 19 nt, Artificial Sequence
  Description of Artificial Sequence: Synthetic oligonucleotide
  Sense Strand Starting at position 818 of SEQ ID NO: 315671
gccucuuugcaugugugua

SEQ ID NO: 383032 - RNA, 19 nt, Artificial Sequence
  Description of Artificial Sequence: Synthetic oligonucleotide
  Antisense Strand to SEQ ID NO: 383031
uacacacaugcaaagaggc

SEQ ID NO: 383033 - RNA, 19 nt, Artificial Sequence
  Description of Artificial Sequence: Synthetic oligonucleotide
  Sense Strand Starting at position 818 of SEQ ID NO: 315928
gcuacauaggauuggauau

SEQ ID NO: 383034 - RNA, 19 nt, Artificial Sequence
  Description of Artificial Sequence: Synthetic oligonucleotide
  Antisense Strand to SEQ ID NO: 383033
auauccaauccuauguagc

SEQ ID NO: 383035 - RNA, 19 nt, Artificial Sequence
  Description of Artificial Sequence: Synthetic oligonucleotide
  Sense Strand Starting at position 818 of SEQ ID NO: 315940
uggauauaaugucuuccau

SEQ ID NO: 383036 - RNA, 19 nt, Artificial Sequence
  Description of Artificial Sequence: Synthetic oligonucleotide
  Antisense Strand to SEQ ID NO: 383035
auggaagacauuauaucca

SEQ ID NO: 383037 - RNA, 19 nt, Artificial Sequence
  Description of Artificial Sequence: Synthetic oligonucleotide
  Sense Strand Starting at position 818 of SEQ ID NO: 316014
ucaugcuauguugauuaau

SEQ ID NO: 383038 - RNA, 19 nt, Artificial Sequence
  Description of Artificial Sequence: Synthetic oligonucleotide
  Antisense Strand to SEQ ID NO: 383037
auuaaucaacauagcauga

SEQ ID NO: 383039 - RNA, 19 nt, Artificial Sequence
  Description of Artificial Sequence: Synthetic oligonucleotide
  Sense Strand Starting at position 818 of SEQ ID NO: 316016
augcuauguugauuaauug

SEQ ID NO: 383040 - RNA, 19 nt, Artificial Sequence
  Description of Artificial Sequence: Synthetic oligonucleotide
  Antisense Strand to SEQ ID NO: 383039
caauuaaucaacauagcau

SEQ ID NO: 383041 - RNA, 19 nt, Artificial Sequence
  Description of Artificial Sequence: Synthetic oligonucleotide
  Sense Strand Starting at position 818 of SEQ ID NO: 316017
ugcuauguugauuaauuga

SEQ ID NO: 383042 - RNA, 19 nt, Artificial Sequence
  Description of Artificial Sequence: Synthetic oligonucleotide
  Antisense Strand to SEQ ID NO: 383041
ucaauuaaucaacauagca

SEQ ID NO: 383043 - RNA, 19 nt, Artificial Sequence
  Description of Artificial Sequence: Synthetic oligonucleotide
  Sense Strand Starting at position 818 of SEQ ID NO: 316022
uguugauuaauugagguuu

SEQ ID NO: 383044 - RNA, 19 nt, Artificial Sequence
  Description of Artificial Sequence: Synthetic oligonucleotide
  Antisense Strand to SEQ ID NO: 383043
aaaccucaauuaaucaaca

SEQ ID NO: 383045 - RNA, 19 nt, Artificial Sequence
  Description of Artificial Sequence: Synthetic oligonucleotide
  Sense Strand Starting at position 818 of SEQ ID NO: 316054
cugacaauuccaugagagu

SEQ ID NO: 383046 - RNA, 19 nt, Artificial Sequence
  Description of Artificial Sequence: Synthetic oligonucleotide
  Antisense Strand to SEQ ID NO: 383045
acucucauggaauugucag

SEQ ID NO: 383047 - RNA, 19 nt, Artificial Sequence
  Description of Artificial Sequence: Synthetic oligonucleotide
  Sense Strand Starting at position 818 of SEQ ID NO: 316068
agagucaugaaagguagua

SEQ ID NO: 383048 - RNA, 19 nt, Artificial Sequence
  Description of Artificial Sequence: Synthetic oligonucleotide
  Antisense Strand to SEQ ID NO: 383047
uacuaccuuucaugacucu

SEQ ID NO: 383049 - RNA, 19 nt, Artificial Sequence
  Description of Artificial Sequence: Synthetic oligonucleotide
  Sense Strand Starting at position 818 of SEQ ID NO: 316113
auucauucugguuguggga

SEQ ID NO: 383050 - RNA, 19 nt, Artificial Sequence
  Description of Artificial Sequence: Synthetic oligonucleotide
  Antisense Strand to SEQ ID NO: 383049
ucccacaaccagaaugaau

SEQ ID NO: 383051 - RNA, 19 nt, Artificial Sequence
  Description of Artificial Sequence: Synthetic oligonucleotide
  Sense Strand Starting at position 818 of SEQ ID NO: 317287
agcagaauguuucuaauuc

SEQ ID NO: 383052 - RNA, 19 nt, Artificial Sequence
  Description of Artificial Sequence: Synthetic oligonucleotide
  Antisense Strand to SEQ ID NO: 383051
gaauuagaaacauucugcu

SEQ ID NO: 383053 - RNA, 19 nt, Artificial Sequence
  Description of Artificial Sequence: Synthetic oligonucleotide
  Sense Strand Starting at position 818 of SEQ ID NO: 317385
cacucacugugggucaaau

SEQ ID NO: 383054 - RNA, 19 nt, Artificial Sequence
  Description of Artificial Sequence: Synthetic oligonucleotide
  Antisense Strand to SEQ ID NO: 383053
auuugacccacagugagug

SEQ ID NO: 383055 - RNA, 19 nt, Artificial Sequence
  Description of Artificial Sequence: Synthetic oligonucleotide
  Sense Strand Starting at position 818 of SEQ ID NO: 317477
aggaaagcuuuaucugcau

SEQ ID NO: 383056 - RNA, 19 nt, Artificial Sequence
  Description of Artificial Sequence: Synthetic oligonucleotide
  Antisense Strand to SEQ ID NO: 383055
augcagauaaagcuuuccu

SEQ ID NO: 383057 - RNA, 19 nt, Artificial Sequence
  Description of Artificial Sequence: Synthetic oligonucleotide
  Sense Strand Starting at position 818 of SEQ ID NO: 317496
gaauuauccuaugccgaug

SEQ ID NO: 383058 - RNA, 19 nt, Artificial Sequence
  Description of Artificial Sequence: Synthetic oligonucleotide
  Antisense Strand to SEQ ID NO: 383057
caucggcauaggauaauuc

SEQ ID NO: 383059 - RNA, 19 nt, Artificial Sequence
  Description of Artificial Sequence: Synthetic oligonucleotide
  Sense Strand Starting at position 818 of SEQ ID NO: 317499
uuauccuaugccgauguaa

SEQ ID NO: 383060 - RNA, 19 nt, Artificial Sequence
  Description of Artificial Sequence: Synthetic oligonucleotide
  Antisense Strand to SEQ ID NO: 383059
uuacaucggcauaggauaa

SEQ ID NO: 383061 - RNA, 19 nt, Artificial Sequence
  Description of Artificial Sequence: Synthetic oligonucleotide
  Sense Strand Starting at position 818 of SEQ ID NO: 317519
aucuguggucaguacauau

SEQ ID NO: 383062 - RNA, 19 nt, Artificial Sequence
  Description of Artificial Sequence: Synthetic oligonucleotide
  Antisense Strand to SEQ ID NO: 383061
auauguacugaccacagau

SEQ ID NO: 383063 - RNA, 19 nt, Artificial Sequence
  Description of Artificial Sequence: Synthetic oligonucleotide
  Sense Strand Starting at position 818 of SEQ ID NO: 317523
guggucaguacauauaauu

SEQ ID NO: 383064 - RNA, 19 nt, Artificial Sequence
  Description of Artificial Sequence: Synthetic oligonucleotide
  Antisense Strand to SEQ ID NO: 383063
aauuauauguacugaccac

SEQ ID NO: 383065 - RNA, 19 nt, Artificial Sequence
  Description of Artificial Sequence: Synthetic oligonucleotide
  Sense Strand Starting at position 818 of SEQ ID NO: 317742
cagauaaggucaccaauug

SEQ ID NO: 383066 - RNA, 19 nt, Artificial Sequence
  Description of Artificial Sequence: Synthetic oligonucleotide
  Antisense Strand to SEQ ID NO: 383065
caauuggugaccuuaucug

SEQ ID NO: 383067 - RNA, 19 nt, Artificial Sequence
  Description of Artificial Sequence: Synthetic oligonucleotide
  Sense Strand Starting at position 818 of SEQ ID NO: 317797
ggauaagaauaugaaacau

SEQ ID NO: 383068 - RNA, 19 nt, Artificial Sequence
  Description of Artificial Sequence: Synthetic oligonucleotide
  Antisense Strand to SEQ ID NO: 383067
auguuucauauucuuaucc

SEQ ID NO: 383069 - RNA, 19 nt, Artificial Sequence
  Description of Artificial Sequence: Synthetic oligonucleotide
  Sense Strand Starting at position 818 of SEQ ID NO: 317807
augaaacaucuaugagugu

SEQ ID NO: 383070 - RNA, 19 nt, Artificial Sequence
  Description of Artificial Sequence: Synthetic oligonucleotide
  Antisense Strand to SEQ ID NO: 383069
acacucauagauguuucau

SEQ ID NO: 383071 - RNA, 19 nt, Artificial Sequence
  Description of Artificial Sequence: Synthetic oligonucleotide
  Sense Strand Starting at position 818 of SEQ ID NO: 317814
aucuaugaguguucuuaau

SEQ ID NO: 383072 - RNA, 19 nt, Artificial Sequence
  Description of Artificial Sequence: Synthetic oligonucleotide
  Antisense Strand to SEQ ID NO: 383071
auuaagaacacucauagau

SEQ ID NO: 383073 - RNA, 19 nt, Artificial Sequence
  Description of Artificial Sequence: Synthetic oligonucleotide
  Sense Strand Starting at position 818 of SEQ ID NO: 317816
cuaugaguguucuuaauca

SEQ ID NO: 383074 - RNA, 19 nt, Artificial Sequence
  Description of Artificial Sequence: Synthetic oligonucleotide
  Antisense Strand to SEQ ID NO: 383073
ugauuaagaacacucauag

SEQ ID NO: 383075 - RNA, 19 nt, Artificial Sequence
  Description of Artificial Sequence: Synthetic oligonucleotide
  Sense Strand Starting at position 818 of SEQ ID NO: 317886
ccaaucuugguaugacaaa

SEQ ID NO: 383076 - RNA, 19 nt, Artificial Sequence
  Description of Artificial Sequence: Synthetic oligonucleotide
  Antisense Strand to SEQ ID NO: 383075
uuugucauaccaagauugg

SEQ ID NO: 383077 - RNA, 19 nt, Artificial Sequence
  Description of Artificial Sequence: Synthetic oligonucleotide
  Sense Strand Starting at position 818 of SEQ ID NO: 317898
ugacaaauuucccaaggag

SEQ ID NO: 383078 - RNA, 19 nt, Artificial Sequence
  Description of Artificial Sequence: Synthetic oligonucleotide
  Antisense Strand to SEQ ID NO: 383077
cuccuugggaaauuuguca

SEQ ID NO: 383079 - RNA, 19 nt, Artificial Sequence
  Description of Artificial Sequence: Synthetic oligonucleotide
  Sense Strand Starting at position 818 of SEQ ID NO: 317912
aggaguuauuacucuuaau

SEQ ID NO: 383080 - RNA, 19 nt, Artificial Sequence
  Description of Artificial Sequence: Synthetic oligonucleotide
  Antisense Strand to SEQ ID NO: 383079
auuaagaguaauaacuccu

SEQ ID NO: 383081 - RNA, 19 nt, Artificial Sequence
  Description of Artificial Sequence: Synthetic oligonucleotide
  Sense Strand Starting at position 818 of SEQ ID NO: 317978
augcauguccaacauugua

SEQ ID NO: 383082 - RNA, 19 nt, Artificial Sequence
  Description of Artificial Sequence: Synthetic oligonucleotide
  Antisense Strand to SEQ ID NO: 383081
uacaauguuggacaugcau

SEQ ID NO: 383083 - RNA, 19 nt, Artificial Sequence
  Description of Artificial Sequence: Synthetic oligonucleotide
  Sense Strand Starting at position 818 of SEQ ID NO: 318102
cagugaguucuauggaggu

SEQ ID NO: 383084 - RNA, 19 nt, Artificial Sequence
  Description of Artificial Sequence: Synthetic oligonucleotide
  Antisense Strand to SEQ ID NO: 383083
accuccauagaacucacug

SEQ ID NO: 383085 - RNA, 19 nt, Artificial Sequence
  Description of Artificial Sequence: Synthetic oligonucleotide
  Sense Strand Starting at position 818 of SEQ ID NO: 318104
gugaguucuauggagguuc

SEQ ID NO: 383086 - RNA, 19 nt, Artificial Sequence
  Description of Artificial Sequence: Synthetic oligonucleotide
  Antisense Strand to SEQ ID NO: 383085
gaaccuccauagaacucac

SEQ ID NO: 383087 - RNA, 19 nt, Artificial Sequence
  Description of Artificial Sequence: Synthetic oligonucleotide
  Sense Strand Starting at position 818 of SEQ ID NO: 318201
ugaguuuaaugaucaacua

SEQ ID NO: 383088 - RNA, 19 nt, Artificial Sequence
  Description of Artificial Sequence: Synthetic oligonucleotide
  Antisense Strand to SEQ ID NO: 383087
uaguugaucauuaaacuca

SEQ ID NO: 383089 - RNA, 19 nt, Artificial Sequence
  Description of Artificial Sequence: Synthetic oligonucleotide
  Sense Strand Starting at position 818 of SEQ ID NO: 318244
uuggcaacuguacauuaaa

SEQ ID NO: 383090 - RNA, 19 nt, Artificial Sequence
  Description of Artificial Sequence: Synthetic oligonucleotide
  Antisense Strand to SEQ ID NO: 383089
uuuaauguacaguugccaa

SEQ ID NO: 383091 - RNA, 19 nt, Artificial Sequence
  Description of Artificial Sequence: Synthetic oligonucleotide
  Sense Strand Starting at position 818 of SEQ ID NO: 318380
aagagccuacgauaguuaa

SEQ ID NO: 383092 - RNA, 19 nt, Artificial Sequence
  Description of Artificial Sequence: Synthetic oligonucleotide
  Antisense Strand to SEQ ID NO: 383091
uuaacuaucguaggcucuu

SEQ ID NO: 383093 - RNA, 19 nt, Artificial Sequence
  Description of Artificial Sequence: Synthetic oligonucleotide
  Sense Strand Starting at position 818 of SEQ ID NO: 318736
ucacuagaggcuuguaauc

SEQ ID NO: 383094 - RNA, 19 nt, Artificial Sequence
  Description of Artificial Sequence: Synthetic oligonucleotide
  Antisense Strand to SEQ ID NO: 383093
gauuacaagccucuaguga

SEQ ID NO: 383095 - RNA, 19 nt, Artificial Sequence
  Description of Artificial Sequence: Synthetic oligonucleotide
  Sense Strand Starting at position 818 of SEQ ID NO: 318741
agaggcuuguaaucaaaug

SEQ ID NO: 383096 - RNA, 19 nt, Artificial Sequence
  Description of Artificial Sequence: Synthetic oligonucleotide
  Antisense Strand to SEQ ID NO: 383095
cauuugauuacaagccucu

SEQ ID NO: 383097 - RNA, 19 nt, Artificial Sequence
  Description of Artificial Sequence: Synthetic oligonucleotide
  Sense Strand Starting at position 818 of SEQ ID NO: 319079
aggacaucaucagccuuau

SEQ ID NO: 383098 - RNA, 19 nt, Artificial Sequence
  Description of Artificial Sequence: Synthetic oligonucleotide
  Antisense Strand to SEQ ID NO: 383097
auaaggcugaugauguccu

SEQ ID NO: 383099 - RNA, 19 nt, Artificial Sequence
  Description of Artificial Sequence: Synthetic oligonucleotide
  Sense Strand Starting at position 818 of SEQ ID NO: 319096
aucuguguauuugcugaua

SEQ ID NO: 383100 - RNA, 19 nt, Artificial Sequence
  Description of Artificial Sequence: Synthetic oligonucleotide
  Antisense Strand to SEQ ID NO: 383099
uaucagcaaauacacagau

SEQ ID NO: 383101 - RNA, 19 nt, Artificial Sequence
  Description of Artificial Sequence: Synthetic oligonucleotide
  Sense Strand Starting at position 818 of SEQ ID NO: 319142
aggucagacuuauccacuu

SEQ ID NO: 383102 - RNA, 19 nt, Artificial Sequence
  Description of Artificial Sequence: Synthetic oligonucleotide
  Antisense Strand to SEQ ID NO: 383101
aaguggauaagucugaccu

SEQ ID NO: 383103 - RNA, 19 nt, Artificial Sequence
  Description of Artificial Sequence: Synthetic oligonucleotide
  Sense Strand Starting at position 818 of SEQ ID NO: 319209
gagaauuauuaaguggcua

SEQ ID NO: 383104 - RNA, 19 nt, Artificial Sequence
  Description of Artificial Sequence: Synthetic oligonucleotide
  Antisense Strand to SEQ ID NO: 383103
uagccacuuaauaauucuc

SEQ ID NO: 383105 - RNA, 19 nt, Artificial Sequence
  Description of Artificial Sequence: Synthetic oligonucleotide
  Sense Strand Starting at position 819 of SEQ ID NO: 315833
augaacuguuacuuagaga

SEQ ID NO: 383106 - RNA, 19 nt, Artificial Sequence
  Description of Artificial Sequence: Synthetic oligonucleotide
  Antisense Strand to SEQ ID NO: 383105
ucucuaaguaacaguucau

SEQ ID NO: 383107 - RNA, 19 nt, Artificial Sequence
  Description of Artificial Sequence: Synthetic oligonucleotide
  Sense Strand Starting at position 819 of SEQ ID NO: 315844
cuuagagaauuacuguaau

SEQ ID NO: 383108 - RNA, 19 nt, Artificial Sequence
  Description of Artificial Sequence: Synthetic oligonucleotide
  Antisense Strand to SEQ ID NO: 383107
auuacaguaauucucuaag

SEQ ID NO: 383109 - RNA, 19 nt, Artificial Sequence
  Description of Artificial Sequence: Synthetic oligonucleotide
  Sense Strand Starting at position 819 of SEQ ID NO: 316679
cgggaaaugccugacucau

SEQ ID NO: 383110 - RNA, 19 nt, Artificial Sequence
  Description of Artificial Sequence: Synthetic oligonucleotide
  Antisense Strand to SEQ ID NO: 383109
augagucaggcauuucccg

SEQ ID NO: 383111 - RNA, 19 nt, Artificial Sequence
  Description of Artificial Sequence: Synthetic oligonucleotide
  Sense Strand Starting at position 819 of SEQ ID NO: 316681
ggaaaugccugacucauac

SEQ ID NO: 383112 - RNA, 19 nt, Artificial Sequence
  Description of Artificial Sequence: Synthetic oligonucleotide
  Antisense Strand to SEQ ID NO: 383111
guaugagucaggcauuucc

SEQ ID NO: 383113 - RNA, 19 nt, Artificial Sequence
  Description of Artificial Sequence: Synthetic oligonucleotide
  Sense Strand Starting at position 819 of SEQ ID NO: 317018
agggaaucucugcacguca

SEQ ID NO: 383114 - RNA, 19 nt, Artificial Sequence
  Description of Artificial Sequence: Synthetic oligonucleotide
  Antisense Strand to SEQ ID NO: 383113
ugacgugcagagauucccu

SEQ ID NO: 383115 - RNA, 19 nt, Artificial Sequence
  Description of Artificial Sequence: Synthetic oligonucleotide
  Sense Strand Starting at position 819 of SEQ ID NO: 317271
gcaggugauccucacaggu

SEQ ID NO: 383116 - RNA, 19 nt, Artificial Sequence
  Description of Artificial Sequence: Synthetic oligonucleotide
  Antisense Strand to SEQ ID NO: 383115
accugugaggaucaccugc

SEQ ID NO: 383117 - RNA, 19 nt, Artificial Sequence
  Description of Artificial Sequence: Synthetic oligonucleotide
  Sense Strand Starting at position 819 of SEQ ID NO: 317365
gcgcgaacucucagguuug

SEQ ID NO: 383118 - RNA, 19 nt, Artificial Sequence
  Description of Artificial Sequence: Synthetic oligonucleotide
  Antisense Strand to SEQ ID NO: 383117
caaaccugagaguucgcgc

SEQ ID NO: 383119 - RNA, 19 nt, Artificial Sequence
  Description of Artificial Sequence: Synthetic oligonucleotide
  Sense Strand Starting at position 819 of SEQ ID NO: 317383
gugcgagugcuuccuuaaa

SEQ ID NO: 383120 - RNA, 19 nt, Artificial Sequence
  Description of Artificial Sequence: Synthetic oligonucleotide
  Antisense Strand to SEQ ID NO: 383119
uuuaaggaagcacucgcac

SEQ ID NO: 383121 - RNA, 19 nt, Artificial Sequence
  Description of Artificial Sequence: Synthetic oligonucleotide
  Sense Strand Starting at position 819 of SEQ ID NO: 317395
ccuuaaauugaguguccua

SEQ ID NO: 383122 - RNA, 19 nt, Artificial Sequence
  Description of Artificial Sequence: Synthetic oligonucleotide
  Antisense Strand to SEQ ID NO: 383121
uaggacacucaauuuaagg

SEQ ID NO: 383123 - RNA, 19 nt, Artificial Sequence
  Description of Artificial Sequence: Synthetic oligonucleotide
  Sense Strand Starting at position 819 of SEQ ID NO: 317398
uaaauugaguguccuaggu

SEQ ID NO: 383124 - RNA, 19 nt, Artificial Sequence
  Description of Artificial Sequence: Synthetic oligonucleotide
  Antisense Strand to SEQ ID NO: 383123
accuaggacacucaauuua

SEQ ID NO: 383125 - RNA, 19 nt, Artificial Sequence
  Description of Artificial Sequence: Synthetic oligonucleotide
  Sense Strand Starting at position 819 of SEQ ID NO: 317445
cccugaauggcacgcauaa

SEQ ID NO: 383126 - RNA, 19 nt, Artificial Sequence
  Description of Artificial Sequence: Synthetic oligonucleotide
  Antisense Strand to SEQ ID NO: 383125
uuaugcgugccauucaggg

SEQ ID NO: 383127 - RNA, 19 nt, Artificial Sequence
  Description of Artificial Sequence: Synthetic oligonucleotide
  Sense Strand Starting at position 819 of SEQ ID NO: 317776
gaugauaggugaucuccgu

SEQ ID NO: 383128 - RNA, 19 nt, Artificial Sequence
  Description of Artificial Sequence: Synthetic oligonucleotide
  Antisense Strand to SEQ ID NO: 383127
acggagaucaccuaucauc

SEQ ID NO: 383129 - RNA, 19 nt, Artificial Sequence
  Description of Artificial Sequence: Synthetic oligonucleotide
  Sense Strand Starting at position 819 of SEQ ID NO: 317780
auaggugaucuccguccaa

SEQ ID NO: 383130 - RNA, 19 nt, Artificial Sequence
  Description of Artificial Sequence: Synthetic oligonucleotide
  Antisense Strand to SEQ ID NO: 383129
uuggacggagaucaccuau

SEQ ID NO: 383131 - RNA, 19 nt, Artificial Sequence
  Description of Artificial Sequence: Synthetic oligonucleotide
  Sense Strand Starting at position 819 of SEQ ID NO: 317784
gugaucuccguccaaagga

SEQ ID NO: 383132 - RNA, 19 nt, Artificial Sequence
  Description of Artificial Sequence: Synthetic oligonucleotide
  Antisense Strand to SEQ ID NO: 383131
uccuuuggacggagaucac

SEQ ID NO: 383133 - RNA, 19 nt, Artificial Sequence
  Description of Artificial Sequence: Synthetic oligonucleotide
  Sense Strand Starting at position 819 of SEQ ID NO: 317921
ccaggaagauuucaugggu

SEQ ID NO: 383134 - RNA, 19 nt, Artificial Sequence
  Description of Artificial Sequence: Synthetic oligonucleotide
  Antisense Strand to SEQ ID NO: 383133
acccaugaaaucuuccugg

SEQ ID NO: 383135 - RNA, 19 nt, Artificial Sequence
  Description of Artificial Sequence: Synthetic oligonucleotide
  Sense Strand Starting at position 819 of SEQ ID NO: 317938
gugguuuagcucuagagau

SEQ ID NO: 383136 - RNA, 19 nt, Artificial Sequence
  Description of Artificial Sequence: Synthetic oligonucleotide
  Antisense Strand to SEQ ID NO: 383135
aucucuagagcuaaaccac

SEQ ID NO: 383137 - RNA, 19 nt, Artificial Sequence
  Description of Artificial Sequence: Synthetic oligonucleotide
  Sense Strand Starting at position 819 of SEQ ID NO: 317948
ucuagagaugcacggagaa

SEQ ID NO: 383138 - RNA, 19 nt, Artificial Sequence
  Description of Artificial Sequence: Synthetic oligonucleotide
  Antisense Strand to SEQ ID NO: 383137
uucuccgugcaucucuaga

SEQ ID NO: 383139 - RNA, 19 nt, Artificial Sequence
  Description of Artificial Sequence: Synthetic oligonucleotide
  Sense Strand Starting at position 819 of SEQ ID NO: 317967
gcuucuggaguugaagaga

SEQ ID NO: 383140 - RNA, 19 nt, Artificial Sequence
  Description of Artificial Sequence: Synthetic oligonucleotide
  Antisense Strand to SEQ ID NO: 383139
ucucuucaacuccagaagc

SEQ ID NO: 383141 - RNA, 19 nt, Artificial Sequence
  Description of Artificial Sequence: Synthetic oligonucleotide
  Sense Strand Starting at position 819 of SEQ ID NO: 318055
aagagcuugccuggaccaa

SEQ ID NO: 383142 - RNA, 19 nt, Artificial Sequence
  Description of Artificial Sequence: Synthetic oligonucleotide
  Antisense Strand to SEQ ID NO: 383141
uugguccaggcaagcucuu

SEQ ID NO: 383143 - RNA, 19 nt, Artificial Sequence
  Description of Artificial Sequence: Synthetic oligonucleotide
  Sense Strand Starting at position 819 of SEQ ID NO: 318056
agagcuugccuggaccaaa

SEQ ID NO: 383144 - RNA, 19 nt, Artificial Sequence
  Description of Artificial Sequence: Synthetic oligonucleotide
  Antisense Strand to SEQ ID NO: 383143
uuugguccaggcaagcucu

SEQ ID NO: 383145 - RNA, 19 nt, Artificial Sequence
  Description of Artificial Sequence: Synthetic oligonucleotide
  Sense Strand Starting at position 819 of SEQ ID NO: 318091
gcugaauucuaaccuauga

SEQ ID NO: 383146 - RNA, 19 nt, Artificial Sequence
  Description of Artificial Sequence: Synthetic oligonucleotide
  Antisense Strand to SEQ ID NO: 383145
ucauagguuagaauucagc

SEQ ID NO: 383147 - RNA, 19 nt, Artificial Sequence
  Description of Artificial Sequence: Synthetic oligonucleotide
  Sense Strand Starting at position 819 of SEQ ID NO: 318160
acaaaugauaccggcugua

SEQ ID NO: 383148 - RNA, 19 nt, Artificial Sequence
  Description of Artificial Sequence: Synthetic oligonucleotide
  Antisense Strand to SEQ ID NO: 383147
uacagccgguaucauuugu

SEQ ID NO: 383149 - RNA, 19 nt, Artificial Sequence
  Description of Artificial Sequence: Synthetic oligonucleotide
  Sense Strand Starting at position 819 of SEQ ID NO: 318163
aaugauaccggcuguaaua

SEQ ID NO: 383150 - RNA, 19 nt, Artificial Sequence
  Description of Artificial Sequence: Synthetic oligonucleotide
  Antisense Strand to SEQ ID NO: 383149
uauuacagccgguaucauu

SEQ ID NO: 383151 - RNA, 19 nt, Artificial Sequence
  Description of Artificial Sequence: Synthetic oligonucleotide
  Sense Strand Starting at position 819 of SEQ ID NO: 318165
ugauaccggcuguaauaaa

SEQ ID NO: 383152 - RNA, 19 nt, Artificial Sequence
  Description of Artificial Sequence: Synthetic oligonucleotide
  Antisense Strand to SEQ ID NO: 383151
uuuauuacagccgguauca

SEQ ID NO: 383153 - RNA, 19 nt, Artificial Sequence
  Description of Artificial Sequence: Synthetic oligonucleotide
  Sense Strand Starting at position 819 of SEQ ID NO: 318236
agaguauccuuccuccaca

SEQ ID NO: 383154 - RNA, 19 nt, Artificial Sequence
  Description of Artificial Sequence: Synthetic oligonucleotide
  Antisense Strand to SEQ ID NO: 383153
uguggaggaaggauacucu

SEQ ID NO: 383155 - RNA, 19 nt, Artificial Sequence
  Description of Artificial Sequence: Synthetic oligonucleotide
  Sense Strand Starting at position 819 of SEQ ID NO: 318262
uaggcuuggccauggaauu

SEQ ID NO: 383156 - RNA, 19 nt, Artificial Sequence
  Description of Artificial Sequence: Synthetic oligonucleotide
  Antisense Strand to SEQ ID NO: 383155
aauuccauggccaagccua

SEQ ID NO: 383157 - RNA, 19 nt, Artificial Sequence
  Description of Artificial Sequence: Synthetic oligonucleotide
  Sense Strand Starting at position 819 of SEQ ID NO: 318277
aauugcuuugagcaaugga

SEQ ID NO: 383158 - RNA, 19 nt, Artificial Sequence
  Description of Artificial Sequence: Synthetic oligonucleotide
  Antisense Strand to SEQ ID NO: 383157
uccauugcucaaagcaauu

SEQ ID NO: 383159 - RNA, 19 nt, Artificial Sequence
  Description of Artificial Sequence: Synthetic oligonucleotide
  Sense Strand Starting at position 819 of SEQ ID NO: 318280
ugcuuugagcaauggaaug

SEQ ID NO: 383160 - RNA, 19 nt, Artificial Sequence
  Description of Artificial Sequence: Synthetic oligonucleotide
  Antisense Strand to SEQ ID NO: 383159
cauuccauugcucaaagca

SEQ ID NO: 383161 - RNA, 19 nt, Artificial Sequence
  Description of Artificial Sequence: Synthetic oligonucleotide
  Sense Strand Starting at position 819 of SEQ ID NO: 318332
aagcuuuaagagcagucau

SEQ ID NO: 383162 - RNA, 19 nt, Artificial Sequence
  Description of Artificial Sequence: Synthetic oligonucleotide
  Antisense Strand to SEQ ID NO: 383161
augacugcucuuaaagcuu

SEQ ID NO: 383163 - RNA, 19 nt, Artificial Sequence
  Description of Artificial Sequence: Synthetic oligonucleotide
  Sense Strand Starting at position 819 of SEQ ID NO: 318460
uccuaagccaguuaguguu

SEQ ID NO: 383164 - RNA, 19 nt, Artificial Sequence
  Description of Artificial Sequence: Synthetic oligonucleotide
  Antisense Strand to SEQ ID NO: 383163
aacacuaacuggcuuagga

SEQ ID NO: 383165 - RNA, 19 nt, Artificial Sequence
  Description of Artificial Sequence: Synthetic oligonucleotide
  Sense Strand Starting at position 819 of SEQ ID NO: 318505
guuugaagccauugagauu

SEQ ID NO: 383166 - RNA, 19 nt, Artificial Sequence
  Description of Artificial Sequence: Synthetic oligonucleotide
  Antisense Strand to SEQ ID NO: 383165
aaucucaauggcuucaaac

SEQ ID NO: 383167 - RNA, 19 nt, Artificial Sequence
  Description of Artificial Sequence: Synthetic oligonucleotide
  Sense Strand Starting at position 819 of SEQ ID NO: 318589
cauugaguccugcauugac

SEQ ID NO: 383168 - RNA, 19 nt, Artificial Sequence
  Description of Artificial Sequence: Synthetic oligonucleotide
  Antisense Strand to SEQ ID NO: 383167
gucaaugcaggacucaaug

SEQ ID NO: 383169 - RNA, 19 nt, Artificial Sequence
  Description of Artificial Sequence: Synthetic oligonucleotide
  Sense Strand Starting at position 819 of SEQ ID NO: 318960
agcagaugugcugaaagua

SEQ ID NO: 383170 - RNA, 19 nt, Artificial Sequence
  Description of Artificial Sequence: Synthetic oligonucleotide
  Antisense Strand to SEQ ID NO: 383169
uacuuucagcacaucugcu

SEQ ID NO: 383171 - RNA, 19 nt, Artificial Sequence
  Description of Artificial Sequence: Synthetic oligonucleotide
  Sense Strand Starting at position 819 of SEQ ID NO: 318969
gcugaaaguagaggcuaua

SEQ ID NO: 383172 - RNA, 19 nt, Artificial Sequence
  Description of Artificial Sequence: Synthetic oligonucleotide
  Antisense Strand to SEQ ID NO: 383171
uauagccucuacuuucagc

SEQ ID NO: 383173 - RNA, 19 nt, Artificial Sequence
  Description of Artificial Sequence: Synthetic oligonucleotide
  Sense Strand Starting at position 819 of SEQ ID NO: 319063
guuucucacccauggaguu

SEQ ID NO: 383174 - RNA, 19 nt, Artificial Sequence
  Description of Artificial Sequence: Synthetic oligonucleotide
  Antisense Strand to SEQ ID NO: 383173
aacuccaugggugagaaac

SEQ ID NO: 383175 - RNA, 19 nt, Artificial Sequence
  Description of Artificial Sequence: Synthetic oligonucleotide
  Sense Strand Starting at position 819 of SEQ ID NO: 319064
uuucucacccauggaguua

SEQ ID NO: 383176 - RNA, 19 nt, Artificial Sequence
  Description of Artificial Sequence: Synthetic oligonucleotide
  Antisense Strand to SEQ ID NO: 383175
uaacuccaugggugagaaa

SEQ ID NO: 383177 - RNA, 19 nt, Artificial Sequence
  Description of Artificial Sequence: Synthetic oligonucleotide
  Sense Strand Starting at position 819 of SEQ ID NO: 319103
ccagaaagcuuuccuugac

SEQ ID NO: 383178 - RNA, 19 nt, Artificial Sequence
  Description of Artificial Sequence: Synthetic oligonucleotide
  Antisense Strand to SEQ ID NO: 383177
gucaaggaaagcuuucugg

SEQ ID NO: 383179 - RNA, 19 nt, Artificial Sequence
  Description of Artificial Sequence: Synthetic oligonucleotide
  Sense Strand Starting at position 819 of SEQ ID NO: 319116
cuugaccuaccguaguaua

SEQ ID NO: 383180 - RNA, 19 nt, Artificial Sequence
  Description of Artificial Sequence: Synthetic oligonucleotide
  Antisense Strand to SEQ ID NO: 383179
uauacuacgguaggucaag

SEQ ID NO: 383181 - RNA, 19 nt, Artificial Sequence
  Description of Artificial Sequence: Synthetic oligonucleotide
  Sense Strand Starting at position 819 of SEQ ID NO: 319147
aagguaccugcagaauuau

SEQ ID NO: 383182 - RNA, 19 nt, Artificial Sequence
  Description of Artificial Sequence: Synthetic oligonucleotide
  Antisense Strand to SEQ ID NO: 383181
auaauucugcagguaccuu

SEQ ID NO: 383183 - RNA, 19 nt, Artificial Sequence
  Description of Artificial Sequence: Synthetic oligonucleotide
  Sense Strand Starting at position 819 of SEQ ID NO: 319156
gcagaauuauguuuggaga

SEQ ID NO: 383184 - RNA, 19 nt, Artificial Sequence
  Description of Artificial Sequence: Synthetic oligonucleotide
  Antisense Strand to SEQ ID NO: 383183
ucuccaaacauaauucugc

SEQ ID NO: 383185 - RNA, 19 nt, Artificial Sequence
  Description of Artificial Sequence: Synthetic oligonucleotide
  Sense Strand Starting at position 820 of SEQ ID NO: 315750
auugaaguggccugagcaa

SEQ ID NO: 383186 - RNA, 19 nt, Artificial Sequence
  Description of Artificial Sequence: Synthetic oligonucleotide
  Antisense Strand to SEQ ID NO: 383185
uugcucaggccacuucaau

SEQ ID NO: 383187 - RNA, 19 nt, Artificial Sequence
  Description of Artificial Sequence: Synthetic oligonucleotide
  Sense Strand Starting at position 820 of SEQ ID NO: 315791
ucagguuuaguuuaucaga

SEQ ID NO: 383188 - RNA, 19 nt, Artificial Sequence
  Description of Artificial Sequence: Synthetic oligonucleotide
  Antisense Strand to SEQ ID NO: 383187
ucugauaaacuaaaccuga

SEQ ID NO: 383189 - RNA, 19 nt, Artificial Sequence
  Description of Artificial Sequence: Synthetic oligonucleotide
  Sense Strand Starting at position 820 of SEQ ID NO: 315796
uuuaguuuaucagaggcau

SEQ ID NO: 383190 - RNA, 19 nt, Artificial Sequence
  Description of Artificial Sequence: Synthetic oligonucleotide
  Antisense Strand to SEQ ID NO: 383189
augccucugauaaacuaaa

SEQ ID NO: 383191 - RNA, 19 nt, Artificial Sequence
  Description of Artificial Sequence: Synthetic oligonucleotide
  Sense Strand Starting at position 820 of SEQ ID NO: 315811
gcauuaggaucucuaccuu

SEQ ID NO: 383192 - RNA, 19 nt, Artificial Sequence
  Description of Artificial Sequence: Synthetic oligonucleotide
  Antisense Strand to SEQ ID NO: 383191
aagguagagauccuaaugc

SEQ ID NO: 383193 - RNA, 19 nt, Artificial Sequence
  Description of Artificial Sequence: Synthetic oligonucleotide
  Sense Strand Starting at position 820 of SEQ ID NO: 315823
cuaccuuuguccuugcauu

SEQ ID NO: 383194 - RNA, 19 nt, Artificial Sequence
  Description of Artificial Sequence: Synthetic oligonucleotide
  Antisense Strand to SEQ ID NO: 383193
aaugcaaggacaaagguag

SEQ ID NO: 383195 - RNA, 19 nt, Artificial Sequence
  Description of Artificial Sequence: Synthetic oligonucleotide
  Sense Strand Starting at position 820 of SEQ ID NO: 315958
ucucgagaaagcugaguua

SEQ ID NO: 383196 - RNA, 19 nt, Artificial Sequence
  Description of Artificial Sequence: Synthetic oligonucleotide
  Antisense Strand to SEQ ID NO: 383195
uaacucagcuuucucgaga

SEQ ID NO: 383197 - RNA, 19 nt, Artificial Sequence
  Description of Artificial Sequence: Synthetic oligonucleotide
  Sense Strand Starting at position 820 of SEQ ID NO: 315961
cgagaaagcugaguuaaac

SEQ ID NO: 383198 - RNA, 19 nt, Artificial Sequence
  Description of Artificial Sequence: Synthetic oligonucleotide
  Antisense Strand to SEQ ID NO: 383197
guuuaacucagcuuucucg

SEQ ID NO: 383199 - RNA, 19 nt, Artificial Sequence
  Description of Artificial Sequence: Synthetic oligonucleotide
  Sense Strand Starting at position 820 of SEQ ID NO: 315992
cgcagucuaucagagaaag

SEQ ID NO: 383200 - RNA, 19 nt, Artificial Sequence
  Description of Artificial Sequence: Synthetic oligonucleotide
  Antisense Strand to SEQ ID NO: 383199
cuuucucugauagacugcg

SEQ ID NO: 383201 - RNA, 19 nt, Artificial Sequence
  Description of Artificial Sequence: Synthetic oligonucleotide
  Sense Strand Starting at position 820 of SEQ ID NO: 316003
agagaaagcuggcuuguaa

SEQ ID NO: 383202 - RNA, 19 nt, Artificial Sequence
  Description of Artificial Sequence: Synthetic oligonucleotide
  Antisense Strand to SEQ ID NO: 383201
uuacaagccagcuuucucu

SEQ ID NO: 383203 - RNA, 19 nt, Artificial Sequence
  Description of Artificial Sequence: Synthetic oligonucleotide
  Sense Strand Starting at position 820 of SEQ ID NO: 316076
gcauuaacucucugacugu

SEQ ID NO: 383204 - RNA, 19 nt, Artificial Sequence
  Description of Artificial Sequence: Synthetic oligonucleotide
  Antisense Strand to SEQ ID NO: 383203
acagucagagaguuaaugc

SEQ ID NO: 383205 - RNA, 19 nt, Artificial Sequence
  Description of Artificial Sequence: Synthetic oligonucleotide
  Sense Strand Starting at position 820 of SEQ ID NO: 316079
uuaacucucugacuguaga

SEQ ID NO: 383206 - RNA, 19 nt, Artificial Sequence
  Description of Artificial Sequence: Synthetic oligonucleotide
  Antisense Strand to SEQ ID NO: 383205
ucuacagucagagaguuaa

SEQ ID NO: 383207 - RNA, 19 nt, Artificial Sequence
  Description of Artificial Sequence: Synthetic oligonucleotide
  Sense Strand Starting at position 820 of SEQ ID NO: 316107
gggauacauuucuguguuc

SEQ ID NO: 383208 - RNA, 19 nt, Artificial Sequence
  Description of Artificial Sequence: Synthetic oligonucleotide
  Antisense Strand to SEQ ID NO: 383207
gaacacagaaauguauccc

SEQ ID NO: 383209 - RNA, 19 nt, Artificial Sequence
  Description of Artificial Sequence: Synthetic oligonucleotide
  Sense Strand Starting at position 820 of SEQ ID NO: 316200
ccaaacgagauguaucagu

SEQ ID NO: 383210 - RNA, 19 nt, Artificial Sequence
  Description of Artificial Sequence: Synthetic oligonucleotide
  Antisense Strand to SEQ ID NO: 383209
acugauacaucucguuugg

SEQ ID NO: 383211 - RNA, 19 nt, Artificial Sequence
  Description of Artificial Sequence: Synthetic oligonucleotide
  Sense Strand Starting at position 820 of SEQ ID NO: 316205
cgagauguaucaguagcuu

SEQ ID NO: 383212 - RNA, 19 nt, Artificial Sequence
  Description of Artificial Sequence: Synthetic oligonucleotide
  Antisense Strand to SEQ ID NO: 383211
aagcuacugauacaucucg

SEQ ID NO: 383213 - RNA, 19 nt, Artificial Sequence
  Description of Artificial Sequence: Synthetic oligonucleotide
  Sense Strand Starting at position 820 of SEQ ID NO: 316295
accuccaccucgggaaaua

SEQ ID NO: 383214 - RNA, 19 nt, Artificial Sequence
  Description of Artificial Sequence: Synthetic oligonucleotide
  Antisense Strand to SEQ ID NO: 383213
uauuucccgagguggaggu

SEQ ID NO: 383215 - RNA, 19 nt, Artificial Sequence
  Description of Artificial Sequence: Synthetic oligonucleotide
  Sense Strand Starting at position 820 of SEQ ID NO: 316459
ccgagacuuucauugugga

SEQ ID NO: 383216 - RNA, 19 nt, Artificial Sequence
  Description of Artificial Sequence: Synthetic oligonucleotide
  Antisense Strand to SEQ ID NO: 383215
uccacaaugaaagucucgg

SEQ ID NO: 383217 - RNA, 19 nt, Artificial Sequence
  Description of Artificial Sequence: Synthetic oligonucleotide
  Sense Strand Starting at position 820 of SEQ ID NO: 316460
cgagacuuucauuguggac

SEQ ID NO: 383218 - RNA, 19 nt, Artificial Sequence
  Description of Artificial Sequence: Synthetic oligonucleotide
  Antisense Strand to SEQ ID NO: 383217
guccacaaugaaagucucg

SEQ ID NO: 383219 - RNA, 19 nt, Artificial Sequence
  Description of Artificial Sequence: Synthetic oligonucleotide
  Sense Strand Starting at position 820 of SEQ ID NO: 316521
ccuucuugagcgggagaga

SEQ ID NO: 383220 - RNA, 19 nt, Artificial Sequence
  Description of Artificial Sequence: Synthetic oligonucleotide
  Antisense Strand to SEQ ID NO: 383219
ucucucccgcucaagaagg

SEQ ID NO: 383221 - RNA, 19 nt, Artificial Sequence
  Description of Artificial Sequence: Synthetic oligonucleotide
  Sense Strand Starting at position 820 of SEQ ID NO: 316522
cuucuugagcgggagagaa

SEQ ID NO: 383222 - RNA, 19 nt, Artificial Sequence
  Description of Artificial Sequence: Synthetic oligonucleotide
  Antisense Strand to SEQ ID NO: 383221
uucucucccgcucaagaag

SEQ ID NO: 383223 - RNA, 19 nt, Artificial Sequence
  Description of Artificial Sequence: Synthetic oligonucleotide
  Sense Strand Starting at position 820 of SEQ ID NO: 316535
agagaacaauucuguaguu

SEQ ID NO: 383224 - RNA, 19 nt, Artificial Sequence
  Description of Artificial Sequence: Synthetic oligonucleotide
  Antisense Strand to SEQ ID NO: 383223
aacuacagaauuguucucu

SEQ ID NO: 383225 - RNA, 19 nt, Artificial Sequence
  Description of Artificial Sequence: Synthetic oligonucleotide
  Sense Strand Starting at position 820 of SEQ ID NO: 316537
agaacaauucuguaguucu

SEQ ID NO: 383226 - RNA, 19 nt, Artificial Sequence
  Description of Artificial Sequence: Synthetic oligonucleotide
  Antisense Strand to SEQ ID NO: 383225
agaacuacagaauuguucu

SEQ ID NO: 383227 - RNA, 19 nt, Artificial Sequence
  Description of Artificial Sequence: Synthetic oligonucleotide
  Sense Strand Starting at position 820 of SEQ ID NO: 316545
ucuguaguucuguagguga

SEQ ID NO: 383228 - RNA, 19 nt, Artificial Sequence
  Description of Artificial Sequence: Synthetic oligonucleotide
  Antisense Strand to SEQ ID NO: 383227
ucaccuacagaacuacaga

SEQ ID NO: 383229 - RNA, 19 nt, Artificial Sequence
  Description of Artificial Sequence: Synthetic oligonucleotide
  Sense Strand Starting at position 820 of SEQ ID NO: 316547
uguaguucuguaggugacu

SEQ ID NO: 383230 - RNA, 19 nt, Artificial Sequence
  Description of Artificial Sequence: Synthetic oligonucleotide
  Antisense Strand to SEQ ID NO: 383229
agucaccuacagaacuaca

SEQ ID NO: 383231 - RNA, 19 nt, Artificial Sequence
  Description of Artificial Sequence: Synthetic oligonucleotide
  Sense Strand Starting at position 820 of SEQ ID NO: 316548
guaguucuguaggugacuu

SEQ ID NO: 383232 - RNA, 19 nt, Artificial Sequence
  Description of Artificial Sequence: Synthetic oligonucleotide
  Antisense Strand to SEQ ID NO: 383231
aagucaccuacagaacuac

SEQ ID NO: 383233 - RNA, 19 nt, Artificial Sequence
  Description of Artificial Sequence: Synthetic oligonucleotide
  Sense Strand Starting at position 820 of SEQ ID NO: 316591
uaugauaccgguugcuaaa

SEQ ID NO: 383234 - RNA, 19 nt, Artificial Sequence
  Description of Artificial Sequence: Synthetic oligonucleotide
  Antisense Strand to SEQ ID NO: 383233
uuuagcaaccgguaucaua

SEQ ID NO: 383235 - RNA, 19 nt, Artificial Sequence
  Description of Artificial Sequence: Synthetic oligonucleotide
  Sense Strand Starting at position 820 of SEQ ID NO: 316626
gcgggacugucaaaugguc

SEQ ID NO: 383236 - RNA, 19 nt, Artificial Sequence
  Description of Artificial Sequence: Synthetic oligonucleotide
  Antisense Strand to SEQ ID NO: 383235
gaccauuugacagucccgc

SEQ ID NO: 383237 - RNA, 19 nt, Artificial Sequence
  Description of Artificial Sequence: Synthetic oligonucleotide
  Sense Strand Starting at position 820 of SEQ ID NO: 316631
acugucaaaugguccagaa

SEQ ID NO: 383238 - RNA, 19 nt, Artificial Sequence
  Description of Artificial Sequence: Synthetic oligonucleotide
  Antisense Strand to SEQ ID NO: 383237
uucuggaccauuugacagu

SEQ ID NO: 383239 - RNA, 19 nt, Artificial Sequence
  Description of Artificial Sequence: Synthetic oligonucleotide
  Sense Strand Starting at position 820 of SEQ ID NO: 316762
aaagcauccggcgagaaga

SEQ ID NO: 383240 - RNA, 19 nt, Artificial Sequence
  Description of Artificial Sequence: Synthetic oligonucleotide
  Antisense Strand to SEQ ID NO: 383239
ucuucucgccggaugcuuu

SEQ ID NO: 383241 - RNA, 19 nt, Artificial Sequence
  Description of Artificial Sequence: Synthetic oligonucleotide
  Sense Strand Starting at position 820 of SEQ ID NO: 317100
cgggacaacuuccucuuau

SEQ ID NO: 383242 - RNA, 19 nt, Artificial Sequence
  Description of Artificial Sequence: Synthetic oligonucleotide
  Antisense Strand to SEQ ID NO: 383241
auaagaggaaguugucccg

SEQ ID NO: 383243 - RNA, 19 nt, Artificial Sequence
  Description of Artificial Sequence: Synthetic oligonucleotide
  Sense Strand Starting at position 820 of SEQ ID NO: 317101
gggacaacuuccucuuaug

SEQ ID NO: 383244 - RNA, 19 nt, Artificial Sequence
  Description of Artificial Sequence: Synthetic oligonucleotide
  Antisense Strand to SEQ ID NO: 383243
cauaagaggaaguuguccc

SEQ ID NO: 383245 - RNA, 19 nt, Artificial Sequence
  Description of Artificial Sequence: Synthetic oligonucleotide
  Sense Strand Starting at position 820 of SEQ ID NO: 317169
gcgcuaucuccagacccaa

SEQ ID NO: 383246 - RNA, 19 nt, Artificial Sequence
  Description of Artificial Sequence: Synthetic oligonucleotide
  Antisense Strand to SEQ ID NO: 383245
uugggucuggagauagcgc

SEQ ID NO: 383247 - RNA, 19 nt, Artificial Sequence
  Description of Artificial Sequence: Synthetic oligonucleotide
  Sense Strand Starting at position 820 of SEQ ID NO: 317863
guccuagccuuccauuuga

SEQ ID NO: 383248 - RNA, 19 nt, Artificial Sequence
  Description of Artificial Sequence: Synthetic oligonucleotide
  Antisense Strand to SEQ ID NO: 383247
ucaaauggaaggcuaggac

SEQ ID NO: 383249 - RNA, 19 nt, Artificial Sequence
  Description of Artificial Sequence: Synthetic oligonucleotide
  Sense Strand Starting at position 820 of SEQ ID NO: 317940
aagcaaacaucuguacguu

SEQ ID NO: 383250 - RNA, 19 nt, Artificial Sequence
  Description of Artificial Sequence: Synthetic oligonucleotide
  Antisense Strand to SEQ ID NO: 383249
aacguacagauguuugcuu

SEQ ID NO: 383251 - RNA, 19 nt, Artificial Sequence
  Description of Artificial Sequence: Synthetic oligonucleotide
  Sense Strand Starting at position 820 of SEQ ID NO: 317941
agcaaacaucuguacguuu

SEQ ID NO: 383252 - RNA, 19 nt, Artificial Sequence
  Description of Artificial Sequence: Synthetic oligonucleotide
  Antisense Strand to SEQ ID NO: 383251
aaacguacagauguuugcu

SEQ ID NO: 383253 - RNA, 19 nt, Artificial Sequence
  Description of Artificial Sequence: Synthetic oligonucleotide
  Sense Strand Starting at position 820 of SEQ ID NO: 317984
caagcaugacauuggagua

SEQ ID NO: 383254 - RNA, 19 nt, Artificial Sequence
  Description of Artificial Sequence: Synthetic oligonucleotide
  Antisense Strand to SEQ ID NO: 383253
uacuccaaugucaugcuug

SEQ ID NO: 383255 - RNA, 19 nt, Artificial Sequence
  Description of Artificial Sequence: Synthetic oligonucleotide
  Sense Strand Starting at position 820 of SEQ ID NO: 318029
agaagcugucauggaaauu

SEQ ID NO: 383256 - RNA, 19 nt, Artificial Sequence
  Description of Artificial Sequence: Synthetic oligonucleotide
  Antisense Strand to SEQ ID NO: 383255
aauuuccaugacagcuucu

SEQ ID NO: 383257 - RNA, 19 nt, Artificial Sequence
  Description of Artificial Sequence: Synthetic oligonucleotide
  Sense Strand Starting at position 820 of SEQ ID NO: 318135
aagagugcauggguagauu

SEQ ID NO: 383258 - RNA, 19 nt, Artificial Sequence
  Description of Artificial Sequence: Synthetic oligonucleotide
  Antisense Strand to SEQ ID NO: 383257
aaucuacccaugcacucuu

SEQ ID NO: 383259 - RNA, 19 nt, Artificial Sequence
  Description of Artificial Sequence: Synthetic oligonucleotide
  Sense Strand Starting at position 820 of SEQ ID NO: 318144
uggguagauuucuaaaguc

SEQ ID NO: 383260 - RNA, 19 nt, Artificial Sequence
  Description of Artificial Sequence: Synthetic oligonucleotide
  Antisense Strand to SEQ ID NO: 383259
gacuuuagaaaucuaccca

SEQ ID NO: 383261 - RNA, 19 nt, Artificial Sequence
  Description of Artificial Sequence: Synthetic oligonucleotide
  Sense Strand Starting at position 820 of SEQ ID NO: 318631
gacauugugcagcagaaca

SEQ ID NO: 383262 - RNA, 19 nt, Artificial Sequence
  Description of Artificial Sequence: Synthetic oligonucleotide
  Antisense Strand to SEQ ID NO: 383261
uguucugcugcacaauguc

SEQ ID NO: 383263 - RNA, 19 nt, Artificial Sequence
  Description of Artificial Sequence: Synthetic oligonucleotide
  Sense Strand Starting at position 820 of SEQ ID NO: 318639
gcagcagaacauugugaaa

SEQ ID NO: 383264 - RNA, 19 nt, Artificial Sequence
  Description of Artificial Sequence: Synthetic oligonucleotide
  Antisense Strand to SEQ ID NO: 383263
uuucacaauguucugcugc

SEQ ID NO: 383265 - RNA, 19 nt, Artificial Sequence
  Description of Artificial Sequence: Synthetic oligonucleotide
  Sense Strand Starting at position 821 of SEQ ID NO: 315542
cauccaaguggugacuuua

SEQ ID NO: 383266 - RNA, 19 nt, Artificial Sequence
  Description of Artificial Sequence: Synthetic oligonucleotide
  Antisense Strand to SEQ ID NO: 383265
uaaagucaccacuuggaug

SEQ ID NO: 383267 - RNA, 19 nt, Artificial Sequence
  Description of Artificial Sequence: Synthetic oligonucleotide
  Sense Strand Starting at position 821 of SEQ ID NO: 315583
aguguacucccuuaaucac

SEQ ID NO: 383268 - RNA, 19 nt, Artificial Sequence
  Description of Artificial Sequence: Synthetic oligonucleotide
  Antisense Strand to SEQ ID NO: 383267
gugauuaagggaguacacu

SEQ ID NO: 383269 - RNA, 19 nt, Artificial Sequence
  Description of Artificial Sequence: Synthetic oligonucleotide
  Sense Strand Starting at position 821 of SEQ ID NO: 316137
uucuuuguacuuuagucau

SEQ ID NO: 383270 - RNA, 19 nt, Artificial Sequence
  Description of Artificial Sequence: Synthetic oligonucleotide
  Antisense Strand to SEQ ID NO: 383269
augacuaaaguacaaagaa

SEQ ID NO: 383271 - RNA, 19 nt, Artificial Sequence
  Description of Artificial Sequence: Synthetic oligonucleotide
  Sense Strand Starting at position 821 of SEQ ID NO: 316350
ucuuuccacguuuagauaa

SEQ ID NO: 383272 - RNA, 19 nt, Artificial Sequence
  Description of Artificial Sequence: Synthetic oligonucleotide
  Antisense Strand to SEQ ID NO: 383271
uuaucuaaacguggaaaga

SEQ ID NO: 383273 - RNA, 19 nt, Artificial Sequence
  Description of Artificial Sequence: Synthetic oligonucleotide
  Sense Strand Starting at position 821 of SEQ ID NO: 316391
ugaggagaagaucgugauu

SEQ ID NO: 383274 - RNA, 19 nt, Artificial Sequence
  Description of Artificial Sequence: Synthetic oligonucleotide
  Antisense Strand to SEQ ID NO: 383273
aaucacgaucuucuccuca

SEQ ID NO: 383275 - RNA, 19 nt, Artificial Sequence
  Description of Artificial Sequence: Synthetic oligonucleotide
  Sense Strand Starting at position 821 of SEQ ID NO: 316442
aauggcauguuggcaauaa

SEQ ID NO: 383276 - RNA, 19 nt, Artificial Sequence
  Description of Artificial Sequence: Synthetic oligonucleotide
  Antisense Strand to SEQ ID NO: 383275
uuauugccaacaugccauu

SEQ ID NO: 383277 - RNA, 19 nt, Artificial Sequence
  Description of Artificial Sequence: Synthetic oligonucleotide
  Sense Strand Starting at position 821 of SEQ ID NO: 316551
uccuucuuacucuaguaga

SEQ ID NO: 383278 - RNA, 19 nt, Artificial Sequence
  Description of Artificial Sequence: Synthetic oligonucleotide
  Antisense Strand to SEQ ID NO: 383277
ucuacuagaguaagaagga

SEQ ID NO: 383279 - RNA, 19 nt, Artificial Sequence
  Description of Artificial Sequence: Synthetic oligonucleotide
  Sense Strand Starting at position 821 of SEQ ID NO: 317108
uuauuucuguaagcuaguu

SEQ ID NO: 383280 - RNA, 19 nt, Artificial Sequence
  Description of Artificial Sequence: Synthetic oligonucleotide
  Antisense Strand to SEQ ID NO: 383279
aacuagcuuacagaaauaa

SEQ ID NO: 383281 - RNA, 19 nt, Artificial Sequence
  Description of Artificial Sequence: Synthetic oligonucleotide
  Sense Strand Starting at position 821 of SEQ ID NO: 317233
gcaucuaaggguuacauau

SEQ ID NO: 383282 - RNA, 19 nt, Artificial Sequence
  Description of Artificial Sequence: Synthetic oligonucleotide
  Antisense Strand to SEQ ID NO: 383281
auauguaacccuuagaugc

SEQ ID NO: 383283 - RNA, 19 nt, Artificial Sequence
  Description of Artificial Sequence: Synthetic oligonucleotide
  Sense Strand Starting at position 821 of SEQ ID NO: 317263
cauugauucguuuggaaug

SEQ ID NO: 383284 - RNA, 19 nt, Artificial Sequence
  Description of Artificial Sequence: Synthetic oligonucleotide
  Antisense Strand to SEQ ID NO: 383283
cauuccaaacgaaucaaug

SEQ ID NO: 383285 - RNA, 19 nt, Artificial Sequence
  Description of Artificial Sequence: Synthetic oligonucleotide
  Sense Strand Starting at position 821 of SEQ ID NO: 317268
auucguuuggaauguaaag

SEQ ID NO: 383286 - RNA, 19 nt, Artificial Sequence
  Description of Artificial Sequence: Synthetic oligonucleotide
  Antisense Strand to SEQ ID NO: 383285
cuuuacauuccaaacgaau

SEQ ID NO: 383287 - RNA, 19 nt, Artificial Sequence
  Description of Artificial Sequence: Synthetic oligonucleotide
  Sense Strand Starting at position 821 of SEQ ID NO: 317309
aggacuguuagaggcaaau

SEQ ID NO: 383288 - RNA, 19 nt, Artificial Sequence
  Description of Artificial Sequence: Synthetic oligonucleotide
  Antisense Strand to SEQ ID NO: 383287
auuugccucuaacaguccu

SEQ ID NO: 383289 - RNA, 19 nt, Artificial Sequence
  Description of Artificial Sequence: Synthetic oligonucleotide
  Sense Strand Starting at position 821 of SEQ ID NO: 317321
ggcaaaugguaagccaaau

SEQ ID NO: 383290 - RNA, 19 nt, Artificial Sequence
  Description of Artificial Sequence: Synthetic oligonucleotide
  Antisense Strand to SEQ ID NO: 383289
auuuggcuuaccauuugcc

SEQ ID NO: 383291 - RNA, 19 nt, Artificial Sequence
  Description of Artificial Sequence: Synthetic oligonucleotide
  Sense Strand Starting at position 821 of SEQ ID NO: 317350
caguauauuugagugcauc

SEQ ID NO: 383292 - RNA, 19 nt, Artificial Sequence
  Description of Artificial Sequence: Synthetic oligonucleotide
  Antisense Strand to SEQ ID NO: 383291
gaugcacucaaauauacug

SEQ ID NO: 383293 - RNA, 19 nt, Artificial Sequence
  Description of Artificial Sequence: Synthetic oligonucleotide
  Sense Strand Starting at position 821 of SEQ ID NO: 317351
aguauauuugagugcaucu

SEQ ID NO: 383294 - RNA, 19 nt, Artificial Sequence
  Description of Artificial Sequence: Synthetic oligonucleotide
  Antisense Strand to SEQ ID NO: 383293
agaugcacucaaauauacu

SEQ ID NO: 383295 - RNA, 19 nt, Artificial Sequence
  Description of Artificial Sequence: Synthetic oligonucleotide
  Sense Strand Starting at position 821 of SEQ ID NO: 317358
uugagugcaucucuacaaa

SEQ ID NO: 383296 - RNA, 19 nt, Artificial Sequence
  Description of Artificial Sequence: Synthetic oligonucleotide
  Antisense Strand to SEQ ID NO: 383295
uuuguagagaugcacucaa

SEQ ID NO: 383297 - RNA, 19 nt, Artificial Sequence
  Description of Artificial Sequence: Synthetic oligonucleotide
  Sense Strand Starting at position 821 of SEQ ID NO: 317402
guccaucucccagaacgaa

SEQ ID NO: 383298 - RNA, 19 nt, Artificial Sequence
  Description of Artificial Sequence: Synthetic oligonucleotide
  Antisense Strand to SEQ ID NO: 383297
uucguucugggagauggac

SEQ ID NO: 383299 - RNA, 19 nt, Artificial Sequence
  Description of Artificial Sequence: Synthetic oligonucleotide
  Sense Strand Starting at position 821 of SEQ ID NO: 317461
guuguacagcuauaauaau

SEQ ID NO: 383300 - RNA, 19 nt, Artificial Sequence
  Description of Artificial Sequence: Synthetic oligonucleotide
  Antisense Strand to SEQ ID NO: 383299
auuauuauagcuguacaac

SEQ ID NO: 383301 - RNA, 19 nt, Artificial Sequence
  Description of Artificial Sequence: Synthetic oligonucleotide
  Sense Strand Starting at position 821 of SEQ ID NO: 317505
augagaaaugcagguaaug

SEQ ID NO: 383302 - RNA, 19 nt, Artificial Sequence
  Description of Artificial Sequence: Synthetic oligonucleotide
  Antisense Strand to SEQ ID NO: 383301
cauuaccugcauuucucau

SEQ ID NO: 383303 - RNA, 19 nt, Artificial Sequence
  Description of Artificial Sequence: Synthetic oligonucleotide
  Sense Strand Starting at position 821 of SEQ ID NO: 317562
uuauauauguaacugagga

SEQ ID NO: 383304 - RNA, 19 nt, Artificial Sequence
  Description of Artificial Sequence: Synthetic oligonucleotide
  Antisense Strand to SEQ ID NO: 383303
uccucaguuacauauauaa

SEQ ID NO: 383305 - RNA, 19 nt, Artificial Sequence
  Description of Artificial Sequence: Synthetic oligonucleotide
  Sense Strand Starting at position 821 of SEQ ID NO: 317577
aggagaaauuuguaacagu

SEQ ID NO: 383306 - RNA, 19 nt, Artificial Sequence
  Description of Artificial Sequence: Synthetic oligonucleotide
  Antisense Strand to SEQ ID NO: 383305
acuguuacaaauuucuccu

SEQ ID NO: 383307 - RNA, 19 nt, Artificial Sequence
  Description of Artificial Sequence: Synthetic oligonucleotide
  Sense Strand Starting at position 821 of SEQ ID NO: 318165
aucuaaucauuuggagaaa

SEQ ID NO: 383308 - RNA, 19 nt, Artificial Sequence
  Description of Artificial Sequence: Synthetic oligonucleotide
  Antisense Strand to SEQ ID NO: 383307
uuucuccaaaugauuagau

SEQ ID NO: 383309 - RNA, 19 nt, Artificial Sequence
  Description of Artificial Sequence: Synthetic oligonucleotide
  Sense Strand Starting at position 821 of SEQ ID NO: 318213
gcuuaucucuuaccuagga

SEQ ID NO: 383310 - RNA, 19 nt, Artificial Sequence
  Description of Artificial Sequence: Synthetic oligonucleotide
  Antisense Strand to SEQ ID NO: 383309
uccuagguaagagauaagc

SEQ ID NO: 383311 - RNA, 19 nt, Artificial Sequence
  Description of Artificial Sequence: Synthetic oligonucleotide
  Sense Strand Starting at position 821 of SEQ ID NO: 318249
uagguauguguauacuacu

SEQ ID NO: 383312 - RNA, 19 nt, Artificial Sequence
  Description of Artificial Sequence: Synthetic oligonucleotide
  Antisense Strand to SEQ ID NO: 383311
aguaguauacacauaccua

SEQ ID NO: 383313 - RNA, 19 nt, Artificial Sequence
  Description of Artificial Sequence: Synthetic oligonucleotide
  Sense Strand Starting at position 821 of SEQ ID NO: 318269
agaaacugucaauguuuau

SEQ ID NO: 383314 - RNA, 19 nt, Artificial Sequence
  Description of Artificial Sequence: Synthetic oligonucleotide
  Antisense Strand to SEQ ID NO: 383313
auaaacauugacaguuucu

SEQ ID NO: 383315 - RNA, 19 nt, Artificial Sequence
  Description of Artificial Sequence: Synthetic oligonucleotide
  Sense Strand Starting at position 821 of SEQ ID NO: 318282
guuuauaugcaacauguau

SEQ ID NO: 383316 - RNA, 19 nt, Artificial Sequence
  Description of Artificial Sequence: Synthetic oligonucleotide
  Antisense Strand to SEQ ID NO: 383315
auacauguugcauauaaac

SEQ ID NO: 383317 - RNA, 19 nt, Artificial Sequence
  Description of Artificial Sequence: Synthetic oligonucleotide
  Sense Strand Starting at position 821 of SEQ ID NO: 318313
agccucaugguauauagua

SEQ ID NO: 383318 - RNA, 19 nt, Artificial Sequence
  Description of Artificial Sequence: Synthetic oligonucleotide
  Antisense Strand to SEQ ID NO: 383317
uacuauauaccaugaggcu

SEQ ID NO: 383319 - RNA, 19 nt, Artificial Sequence
  Description of Artificial Sequence: Synthetic oligonucleotide
  Sense Strand Starting at position 821 of SEQ ID NO: 318635
uaugauuaccucugcagag

SEQ ID NO: 383320 - RNA, 19 nt, Artificial Sequence
  Description of Artificial Sequence: Synthetic oligonucleotide
  Antisense Strand to SEQ ID NO: 383319
cucugcagagguaaucaua

SEQ ID NO: 383321 - RNA, 19 nt, Artificial Sequence
  Description of Artificial Sequence: Synthetic oligonucleotide
  Sense Strand Starting at position 821 of SEQ ID NO: 318636
augauuaccucugcagaga

SEQ ID NO: 383322 - RNA, 19 nt, Artificial Sequence
  Description of Artificial Sequence: Synthetic oligonucleotide
  Antisense Strand to SEQ ID NO: 383321
ucucugcagagguaaucau

SEQ ID NO: 383323 - RNA, 19 nt, Artificial Sequence
  Description of Artificial Sequence: Synthetic oligonucleotide
  Sense Strand Starting at position 821 of SEQ ID NO: 318637
ugauuaccucugcagagau

SEQ ID NO: 383324 - RNA, 19 nt, Artificial Sequence
  Description of Artificial Sequence: Synthetic oligonucleotide
  Antisense Strand to SEQ ID NO: 383323
aucucugcagagguaauca

SEQ ID NO: 383325 - RNA, 19 nt, Artificial Sequence
  Description of Artificial Sequence: Synthetic oligonucleotide
  Sense Strand Starting at position 821 of SEQ ID NO: 318747
guuaauucuggguagugag

SEQ ID NO: 383326 - RNA, 19 nt, Artificial Sequence
  Description of Artificial Sequence: Synthetic oligonucleotide
  Antisense Strand to SEQ ID NO: 383325
cucacuacccagaauuaac

SEQ ID NO: 383327 - RNA, 19 nt, Artificial Sequence
  Description of Artificial Sequence: Synthetic oligonucleotide
  Sense Strand Starting at position 821 of SEQ ID NO: 318764
agcacaaagauguguuuga

SEQ ID NO: 383328 - RNA, 19 nt, Artificial Sequence
  Description of Artificial Sequence: Synthetic oligonucleotide
  Antisense Strand to SEQ ID NO: 383327
ucaaacacaucuuugugcu

SEQ ID NO: 383329 - RNA, 19 nt, Artificial Sequence
  Description of Artificial Sequence: Synthetic oligonucleotide
  Sense Strand Starting at position 821 of SEQ ID NO: 318857
guuugacuacuggaaguua

SEQ ID NO: 383330 - RNA, 19 nt, Artificial Sequence
  Description of Artificial Sequence: Synthetic oligonucleotide
  Antisense Strand to SEQ ID NO: 383329
uaacuuccaguagucaaac

SEQ ID NO: 383331 - RNA, 19 nt, Artificial Sequence
  Description of Artificial Sequence: Synthetic oligonucleotide
  Sense Strand Starting at position 821 of SEQ ID NO: 318901
ugcucuacucagggaagau

SEQ ID NO: 383332 - RNA, 19 nt, Artificial Sequence
  Description of Artificial Sequence: Synthetic oligonucleotide
  Antisense Strand to SEQ ID NO: 383331
aucuucccugaguagagca

SEQ ID NO: 383333 - RNA, 19 nt, Artificial Sequence
  Description of Artificial Sequence: Synthetic oligonucleotide
  Sense Strand Starting at position 821 of SEQ ID NO: 318911
agggaagaucguggaguau

SEQ ID NO: 383334 - RNA, 19 nt, Artificial Sequence
  Description of Artificial Sequence: Synthetic oligonucleotide
  Antisense Strand to SEQ ID NO: 383333
auacuccacgaucuucccu

SEQ ID NO: 383335 - RNA, 19 nt, Artificial Sequence
  Description of Artificial Sequence: Synthetic oligonucleotide
  Sense Strand Starting at position 821 of SEQ ID NO: 319104
ucuguaagauuggauuuga

SEQ ID NO: 383336 - RNA, 19 nt, Artificial Sequence
  Description of Artificial Sequence: Synthetic oligonucleotide
  Antisense Strand to SEQ ID NO: 383335
ucaaauccaaucuuacaga

SEQ ID NO: 383337 - RNA, 19 nt, Artificial Sequence
  Description of Artificial Sequence: Synthetic oligonucleotide
  Sense Strand Starting at position 821 of SEQ ID NO: 319109
aagauuggauuugagucau

SEQ ID NO: 383338 - RNA, 19 nt, Artificial Sequence
  Description of Artificial Sequence: Synthetic oligonucleotide
  Antisense Strand to SEQ ID NO: 383337
augacucaaauccaaucuu

SEQ ID NO: 383339 - RNA, 19 nt, Artificial Sequence
  Description of Artificial Sequence: Synthetic oligonucleotide
  Sense Strand Starting at position 821 of SEQ ID NO: 319137
uuaguaucaguguaaccuu

SEQ ID NO: 383340 - RNA, 19 nt, Artificial Sequence
  Description of Artificial Sequence: Synthetic oligonucleotide
  Antisense Strand to SEQ ID NO: 383339
aagguuacacugauacuaa

SEQ ID NO: 383341 - RNA, 19 nt, Artificial Sequence
  Description of Artificial Sequence: Synthetic oligonucleotide
  Sense Strand Starting at position 821 of SEQ ID NO: 319140
guaucaguguaaccuugaa

SEQ ID NO: 383342 - RNA, 19 nt, Artificial Sequence
  Description of Artificial Sequence: Synthetic oligonucleotide
  Antisense Strand to SEQ ID NO: 383341
uucaagguuacacugauac

SEQ ID NO: 383343 - RNA, 19 nt, Artificial Sequence
  Description of Artificial Sequence: Synthetic oligonucleotide
  Sense Strand Starting at position 821 of SEQ ID NO: 319147
uguaaccuugaauaaguau

SEQ ID NO: 383344 - RNA, 19 nt, Artificial Sequence
  Description of Artificial Sequence: Synthetic oligonucleotide
  Antisense Strand to SEQ ID NO: 383343
auacuuauucaagguuaca

SEQ ID NO: 383345 - RNA, 19 nt, Artificial Sequence
  Description of Artificial Sequence: Synthetic oligonucleotide
  Sense Strand Starting at position 822 of SEQ ID NO: 315265
uuaacuauuucugaggcau

SEQ ID NO: 383346 - RNA, 19 nt, Artificial Sequence
  Description of Artificial Sequence: Synthetic oligonucleotide
  Antisense Strand to SEQ ID NO: 383345
augccucagaaauaguuaa

SEQ ID NO: 383347 - RNA, 19 nt, Artificial Sequence
  Description of Artificial Sequence: Synthetic oligonucleotide
  Sense Strand Starting at position 822 of SEQ ID NO: 315347
cucucaugaagcugagagu

SEQ ID NO: 383348 - RNA, 19 nt, Artificial Sequence
  Description of Artificial Sequence: Synthetic oligonucleotide
  Antisense Strand to SEQ ID NO: 383347
acucucagcuucaugagag

SEQ ID NO: 383349 - RNA, 19 nt, Artificial Sequence
  Description of Artificial Sequence: Synthetic oligonucleotide
  Sense Strand Starting at position 822 of SEQ ID NO: 315546
cagaguagcuucccuaagu

SEQ ID NO: 383350 - RNA, 19 nt, Artificial Sequence
  Description of Artificial Sequence: Synthetic oligonucleotide
  Antisense Strand to SEQ ID NO: 383349
acuuagggaagcuacucug

SEQ ID NO: 383351 - RNA, 19 nt, Artificial Sequence
  Description of Artificial Sequence: Synthetic oligonucleotide
  Sense Strand Starting at position 822 of SEQ ID NO: 315547
agaguagcuucccuaagua

SEQ ID NO: 383352 - RNA, 19 nt, Artificial Sequence
  Description of Artificial Sequence: Synthetic oligonucleotide
  Antisense Strand to SEQ ID NO: 383351
uacuuagggaagcuacucu

SEQ ID NO: 383353 - RNA, 19 nt, Artificial Sequence
  Description of Artificial Sequence: Synthetic oligonucleotide
  Sense Strand Starting at position 822 of SEQ ID NO: 315654
aggguaauaacuuggcaca

SEQ ID NO: 383354 - RNA, 19 nt, Artificial Sequence
  Description of Artificial Sequence: Synthetic oligonucleotide
  Antisense Strand to SEQ ID NO: 383353
ugugccaaguuauuacccu

SEQ ID NO: 383355 - RNA, 19 nt, Artificial Sequence
  Description of Artificial Sequence: Synthetic oligonucleotide
  Sense Strand Starting at position 822 of SEQ ID NO: 315665
uuggcacaccuuggaauua

SEQ ID NO: 383356 - RNA, 19 nt, Artificial Sequence
  Description of Artificial Sequence: Synthetic oligonucleotide
  Antisense Strand to SEQ ID NO: 383355
uaauuccaaggugugccaa

SEQ ID NO: 383357 - RNA, 19 nt, Artificial Sequence
  Description of Artificial Sequence: Synthetic oligonucleotide
  Sense Strand Starting at position 822 of SEQ ID NO: 315819
ugaccaugcccuugggauu

SEQ ID NO: 383358 - RNA, 19 nt, Artificial Sequence
  Description of Artificial Sequence: Synthetic oligonucleotide
  Antisense Strand to SEQ ID NO: 383357
aaucccaagggcaugguca

SEQ ID NO: 383359 - RNA, 19 nt, Artificial Sequence
  Description of Artificial Sequence: Synthetic oligonucleotide
  Sense Strand Starting at position 822 of SEQ ID NO: 316050
aagcuuggugaagauguau

SEQ ID NO: 383360 - RNA, 19 nt, Artificial Sequence
  Description of Artificial Sequence: Synthetic oligonucleotide
  Antisense Strand to SEQ ID NO: 383359
auacaucuucaccaagcuu

SEQ ID NO: 383361 - RNA, 19 nt, Artificial Sequence
  Description of Artificial Sequence: Synthetic oligonucleotide
  Sense Strand Starting at position 822 of SEQ ID NO: 316059
gaagauguauaauugcuua

SEQ ID NO: 383362 - RNA, 19 nt, Artificial Sequence
  Description of Artificial Sequence: Synthetic oligonucleotide
  Antisense Strand to SEQ ID NO: 383361
uaagcaauuauacaucuuc

SEQ ID NO: 383363 - RNA, 19 nt, Artificial Sequence
  Description of Artificial Sequence: Synthetic oligonucleotide
  Sense Strand Starting at position 822 of SEQ ID NO: 316094
uccucaggcaauggugaau

SEQ ID NO: 383364 - RNA, 19 nt, Artificial Sequence
  Description of Artificial Sequence: Synthetic oligonucleotide
  Antisense Strand to SEQ ID NO: 383363
auucaccauugccugagga

SEQ ID NO: 383365 - RNA, 19 nt, Artificial Sequence
  Description of Artificial Sequence: Synthetic oligonucleotide
  Sense Strand Starting at position 822 of SEQ ID NO: 316278
ugggcaaugacacaguauu

SEQ ID NO: 383366 - RNA, 19 nt, Artificial Sequence
  Description of Artificial Sequence: Synthetic oligonucleotide
  Antisense Strand to SEQ ID NO: 383365
aauacugugucauugccca

SEQ ID NO: 383367 - RNA, 19 nt, Artificial Sequence
  Description of Artificial Sequence: Synthetic oligonucleotide
  Sense Strand Starting at position 822 of SEQ ID NO: 316286
gacacaguauugccucaga

SEQ ID NO: 383368 - RNA, 19 nt, Artificial Sequence
  Description of Artificial Sequence: Synthetic oligonucleotide
  Antisense Strand to SEQ ID NO: 383367
ucugaggcaauacuguguc

SEQ ID NO: 383369 - RNA, 19 nt, Artificial Sequence
  Description of Artificial Sequence: Synthetic oligonucleotide
  Sense Strand Starting at position 822 of SEQ ID NO: 316289
acaguauugccucagaaau

SEQ ID NO: 383370 - RNA, 19 nt, Artificial Sequence
  Description of Artificial Sequence: Synthetic oligonucleotide
  Antisense Strand to SEQ ID NO: 383369
auuucugaggcaauacugu

SEQ ID NO: 383371 - RNA, 19 nt, Artificial Sequence
  Description of Artificial Sequence: Synthetic oligonucleotide
  Sense Strand Starting at position 822 of SEQ ID NO: 316322
auggaauccuaagcuuuau

SEQ ID NO: 383372 - RNA, 19 nt, Artificial Sequence
  Description of Artificial Sequence: Synthetic oligonucleotide
  Antisense Strand to SEQ ID NO: 383371
auaaagcuuaggauuccau

SEQ ID NO: 383373 - RNA, 19 nt, Artificial Sequence
  Description of Artificial Sequence: Synthetic oligonucleotide
  Sense Strand Starting at position 822 of SEQ ID NO: 316483
guaauaaaccugugcaucu

SEQ ID NO: 383374 - RNA, 19 nt, Artificial Sequence
  Description of Artificial Sequence: Synthetic oligonucleotide
  Antisense Strand to SEQ ID NO: 383373
agaugcacagguuuauuac

SEQ ID NO: 383375 - RNA, 19 nt, Artificial Sequence
  Description of Artificial Sequence: Synthetic oligonucleotide
  Sense Strand Starting at position 822 of SEQ ID NO: 316517
ccaugcuggaguugguaau

SEQ ID NO: 383376 - RNA, 19 nt, Artificial Sequence
  Description of Artificial Sequence: Synthetic oligonucleotide
  Antisense Strand to SEQ ID NO: 383375
auuaccaacuccagcaugg

SEQ ID NO: 383377 - RNA, 19 nt, Artificial Sequence
  Description of Artificial Sequence: Synthetic oligonucleotide
  Sense Strand Starting at position 822 of SEQ ID NO: 316523
uggaguugguaauuccuga

SEQ ID NO: 383378 - RNA, 19 nt, Artificial Sequence
  Description of Artificial Sequence: Synthetic oligonucleotide
  Antisense Strand to SEQ ID NO: 383377
ucaggaauuaccaacucca

SEQ ID NO: 383379 - RNA, 19 nt, Artificial Sequence
  Description of Artificial Sequence: Synthetic oligonucleotide
  Sense Strand Starting at position 822 of SEQ ID NO: 316528
uugguaauuccugacuuug

SEQ ID NO: 383380 - RNA, 19 nt, Artificial Sequence
  Description of Artificial Sequence: Synthetic oligonucleotide
  Antisense Strand to SEQ ID NO: 383379
caaagucaggaauuaccaa

SEQ ID NO: 383381 - RNA, 19 nt, Artificial Sequence
  Description of Artificial Sequence: Synthetic oligonucleotide
  Sense Strand Starting at position 822 of SEQ ID NO: 316563
ccaguagaauugucuacaa

SEQ ID NO: 383382 - RNA, 19 nt, Artificial Sequence
  Description of Artificial Sequence: Synthetic oligonucleotide
  Antisense Strand to SEQ ID NO: 383381
uuguagacaauucuacugg

SEQ ID NO: 383383 - RNA, 19 nt, Artificial Sequence
  Description of Artificial Sequence: Synthetic oligonucleotide
  Sense Strand Starting at position 822 of SEQ ID NO: 316570
aauugucuacaaugaugga

SEQ ID NO: 383384 - RNA, 19 nt, Artificial Sequence
  Description of Artificial Sequence: Synthetic oligonucleotide
  Antisense Strand to SEQ ID NO: 383383
uccaucauuguagacaauu

SEQ ID NO: 383385 - RNA, 19 nt, Artificial Sequence
  Description of Artificial Sequence: Synthetic oligonucleotide
  Sense Strand Starting at position 822 of SEQ ID NO: 316592
gcuaucugugcugcccaau

SEQ ID NO: 383386 - RNA, 19 nt, Artificial Sequence
  Description of Artificial Sequence: Synthetic oligonucleotide
  Antisense Strand to SEQ ID NO: 383385
auugggcagcacagauagc

SEQ ID NO: 383387 - RNA, 19 nt, Artificial Sequence
  Description of Artificial Sequence: Synthetic oligonucleotide
  Sense Strand Starting at position 822 of SEQ ID NO: 316639
gcuaaugugacugaugaac

SEQ ID NO: 383388 - RNA, 19 nt, Artificial Sequence
  Description of Artificial Sequence: Synthetic oligonucleotide
  Antisense Strand to SEQ ID NO: 383387
guucaucagucacauuagc

SEQ ID NO: 383389 - RNA, 19 nt, Artificial Sequence
  Description of Artificial Sequence: Synthetic oligonucleotide
  Sense Strand Starting at position 822 of SEQ ID NO: 317410
cauguaaauguguacuuga

SEQ ID NO: 383390 - RNA, 19 nt, Artificial Sequence
  Description of Artificial Sequence: Synthetic oligonucleotide
  Antisense Strand to SEQ ID NO: 383389
ucaaguacacauuuacaug

SEQ ID NO: 383391 - RNA, 19 nt, Artificial Sequence
  Description of Artificial Sequence: Synthetic oligonucleotide
  Sense Strand Starting at position 822 of SEQ ID NO: 317413
guaaauguguacuugaauc

SEQ ID NO: 383392 - RNA, 19 nt, Artificial Sequence
  Description of Artificial Sequence: Synthetic oligonucleotide
  Antisense Strand to SEQ ID NO: 383391
gauucaaguacacauuuac

SEQ ID NO: 383393 - RNA, 19 nt, Artificial Sequence
  Description of Artificial Sequence: Synthetic oligonucleotide
  Sense Strand Starting at position 822 of SEQ ID NO: 317421
guacuugaaucacuacaga

SEQ ID NO: 383394 - RNA, 19 nt, Artificial Sequence
  Description of Artificial Sequence: Synthetic oligonucleotide
  Antisense Strand to SEQ ID NO: 383393
ucuguagugauucaaguac

SEQ ID NO: 383395 - RNA, 19 nt, Artificial Sequence
  Description of Artificial Sequence: Synthetic oligonucleotide
  Sense Strand Starting at position 822 of SEQ ID NO: 317589
gcucauauacccuguggaa

SEQ ID NO: 383396 - RNA, 19 nt, Artificial Sequence
  Description of Artificial Sequence: Synthetic oligonucleotide
  Antisense Strand to SEQ ID NO: 383395
uuccacaggguauaugagc

SEQ ID NO: 383397 - RNA, 19 nt, Artificial Sequence
  Description of Artificial Sequence: Synthetic oligonucleotide
  Sense Strand Starting at position 822 of SEQ ID NO: 317591
ucauauacccuguggaaga

SEQ ID NO: 383398 - RNA, 19 nt, Artificial Sequence
  Description of Artificial Sequence: Synthetic oligonucleotide
  Antisense Strand to SEQ ID NO: 383397
ucuuccacaggguauauga

SEQ ID NO: 383399 - RNA, 19 nt, Artificial Sequence
  Description of Artificial Sequence: Synthetic oligonucleotide
  Sense Strand Starting at position 822 of SEQ ID NO: 317665
uuuguauuagagggagaug

SEQ ID NO: 383400 - RNA, 19 nt, Artificial Sequence
  Description of Artificial Sequence: Synthetic oligonucleotide
  Antisense Strand to SEQ ID NO: 383399
caucucccucuaauacaaa

SEQ ID NO: 383401 - RNA, 19 nt, Artificial Sequence
  Description of Artificial Sequence: Synthetic oligonucleotide
  Sense Strand Starting at position 822 of SEQ ID NO: 317689
uauugaacugaguaguuua

SEQ ID NO: 383402 - RNA, 19 nt, Artificial Sequence
  Description of Artificial Sequence: Synthetic oligonucleotide
  Antisense Strand to SEQ ID NO: 383401
uaaacuacucaguucaaua

SEQ ID NO: 383403 - RNA, 19 nt, Artificial Sequence
  Description of Artificial Sequence: Synthetic oligonucleotide
  Sense Strand Starting at position 822 of SEQ ID NO: 317743
gugaaauaguccuuaaauc

SEQ ID NO: 383404 - RNA, 19 nt, Artificial Sequence
  Description of Artificial Sequence: Synthetic oligonucleotide
  Antisense Strand to SEQ ID NO: 383403
gauuuaaggacuauuucac

SEQ ID NO: 383405 - RNA, 19 nt, Artificial Sequence
  Description of Artificial Sequence: Synthetic oligonucleotide
  Sense Strand Starting at position 822 of SEQ ID NO: 317765
uaaggauaaugguccuguu

SEQ ID NO: 383406 - RNA, 19 nt, Artificial Sequence
  Description of Artificial Sequence: Synthetic oligonucleotide
  Antisense Strand to SEQ ID NO: 383405
aacaggaccauuauccuua

SEQ ID NO: 383407 - RNA, 19 nt, Artificial Sequence
  Description of Artificial Sequence: Synthetic oligonucleotide
  Sense Strand Starting at position 822 of SEQ ID NO: 318008
agugauaugauguaagguu

SEQ ID NO: 383408 - RNA, 19 nt, Artificial Sequence
  Description of Artificial Sequence: Synthetic oligonucleotide
  Antisense Strand to SEQ ID NO: 383407
aaccuuacaucauaucacu

SEQ ID NO: 383409 - RNA, 19 nt, Artificial Sequence
  Description of Artificial Sequence: Synthetic oligonucleotide
  Sense Strand Starting at position 822 of SEQ ID NO: 318016
gauguaagguuucuaauga

SEQ ID NO: 383410 - RNA, 19 nt, Artificial Sequence
  Description of Artificial Sequence: Synthetic oligonucleotide
  Antisense Strand to SEQ ID NO: 383409
ucauuagaaaccuuacauc

SEQ ID NO: 383411 - RNA, 19 nt, Artificial Sequence
  Description of Artificial Sequence: Synthetic oligonucleotide
  Sense Strand Starting at position 822 of SEQ ID NO: 318099
aacagauagccaggguuau

SEQ ID NO: 383412 - RNA, 19 nt, Artificial Sequence
  Description of Artificial Sequence: Synthetic oligonucleotide
  Antisense Strand to SEQ ID NO: 383411
auaacccuggcuaucuguu

SEQ ID NO: 383413 - RNA, 19 nt, Artificial Sequence
  Description of Artificial Sequence: Synthetic oligonucleotide
  Sense Strand Starting at position 822 of SEQ ID NO: 318100
acagauagccaggguuaua

SEQ ID NO: 383414 - RNA, 19 nt, Artificial Sequence
  Description of Artificial Sequence: Synthetic oligonucleotide
  Antisense Strand to SEQ ID NO: 383413
uauaacccuggcuaucugu

SEQ ID NO: 383415 - RNA, 19 nt, Artificial Sequence
  Description of Artificial Sequence: Synthetic oligonucleotide
  Sense Strand Starting at position 822 of SEQ ID NO: 318123
cacauuuccugauaggaga

SEQ ID NO: 383416 - RNA, 19 nt, Artificial Sequence
  Description of Artificial Sequence: Synthetic oligonucleotide
  Antisense Strand to SEQ ID NO: 383415
ucuccuaucaggaaaugug

SEQ ID NO: 383417 - RNA, 19 nt, Artificial Sequence
  Description of Artificial Sequence: Synthetic oligonucleotide
  Sense Strand Starting at position 822 of SEQ ID NO: 318223
ucccuacucugaguagaug

SEQ ID NO: 383418 - RNA, 19 nt, Artificial Sequence
  Description of Artificial Sequence: Synthetic oligonucleotide
  Antisense Strand to SEQ ID NO: 383417
caucuacucagaguaggga

SEQ ID NO: 383419 - RNA, 19 nt, Artificial Sequence
  Description of Artificial Sequence: Synthetic oligonucleotide
  Sense Strand Starting at position 822 of SEQ ID NO: 318235
guagaugccguacauuaau

SEQ ID NO: 383420 - RNA, 19 nt, Artificial Sequence
  Description of Artificial Sequence: Synthetic oligonucleotide
  Antisense Strand to SEQ ID NO: 383419
auuaauguacggcaucuac

SEQ ID NO: 383421 - RNA, 19 nt, Artificial Sequence
  Description of Artificial Sequence: Synthetic oligonucleotide
  Sense Strand Starting at position 822 of SEQ ID NO: 318483
uucuccugggacugauaaa

SEQ ID NO: 383422 - RNA, 19 nt, Artificial Sequence
  Description of Artificial Sequence: Synthetic oligonucleotide
  Antisense Strand to SEQ ID NO: 383421
uuuaucagucccaggagaa

SEQ ID NO: 383423 - RNA, 19 nt, Artificial Sequence
  Description of Artificial Sequence: Synthetic oligonucleotide
  Sense Strand Starting at position 822 of SEQ ID NO: 319131
ucaguaaauuguccuguga

SEQ ID NO: 383424 - RNA, 19 nt, Artificial Sequence
  Description of Artificial Sequence: Synthetic oligonucleotide
  Antisense Strand to SEQ ID NO: 383423
ucacaggacaauuuacuga

SEQ ID NO: 383425 - RNA, 19 nt, Artificial Sequence
  Description of Artificial Sequence: Synthetic oligonucleotide
  Sense Strand Starting at position 823 of SEQ ID NO: 315281
agccaagaaugccucaaua

SEQ ID NO: 383426 - RNA, 19 nt, Artificial Sequence
  Description of Artificial Sequence: Synthetic oligonucleotide
  Antisense Strand to SEQ ID NO: 383425
uauugaggcauucuuggcu

SEQ ID NO: 383427 - RNA, 19 nt, Artificial Sequence
  Description of Artificial Sequence: Synthetic oligonucleotide
  Sense Strand Starting at position 823 of SEQ ID NO: 315301
gcauaaaugcacugaaauu

SEQ ID NO: 383428 - RNA, 19 nt, Artificial Sequence
  Description of Artificial Sequence: Synthetic oligonucleotide
  Antisense Strand to SEQ ID NO: 383427
aauuucagugcauuuaugc

SEQ ID NO: 383429 - RNA, 19 nt, Artificial Sequence
  Description of Artificial Sequence: Synthetic oligonucleotide
  Sense Strand Starting at position 823 of SEQ ID NO: 315423
gugguaaacaaguaguaua

SEQ ID NO: 383430 - RNA, 19 nt, Artificial Sequence
  Description of Artificial Sequence: Synthetic oligonucleotide
  Antisense Strand to SEQ ID NO: 383429
uauacuacuuguuuaccac

SEQ ID NO: 383431 - RNA, 19 nt, Artificial Sequence
  Description of Artificial Sequence: Synthetic oligonucleotide
  Sense Strand Starting at position 823 of SEQ ID NO: 315434
guaguauacacagaguauu

SEQ ID NO: 383432 - RNA, 19 nt, Artificial Sequence
  Description of Artificial Sequence: Synthetic oligonucleotide
  Antisense Strand to SEQ ID NO: 383431
aauacucuguguauacuac

SEQ ID NO: 383433 - RNA, 19 nt, Artificial Sequence
  Description of Artificial Sequence: Synthetic oligonucleotide
  Sense Strand Starting at position 823 of SEQ ID NO: 315682
ugguauugccaauaaacaa

SEQ ID NO: 383434 - RNA, 19 nt, Artificial Sequence
  Description of Artificial Sequence: Synthetic oligonucleotide
  Antisense Strand to SEQ ID NO: 383433
uuguuuauuggcaauacca

SEQ ID NO: 383435 - RNA, 19 nt, Artificial Sequence
  Description of Artificial Sequence: Synthetic oligonucleotide
  Sense Strand Starting at position 823 of SEQ ID NO: 316078
gggauauauuauguauaug

SEQ ID NO: 383436 - RNA, 19 nt, Artificial Sequence
  Description of Artificial Sequence: Synthetic oligonucleotide
  Antisense Strand to SEQ ID NO: 383435
cauauacauaauauauccc

SEQ ID NO: 383437 - RNA, 19 nt, Artificial Sequence
  Description of Artificial Sequence: Synthetic oligonucleotide
  Sense Strand Starting at position 823 of SEQ ID NO: 316120
guuauauaucauugcugaa

SEQ ID NO: 383438 - RNA, 19 nt, Artificial Sequence
  Description of Artificial Sequence: Synthetic oligonucleotide
  Antisense Strand to SEQ ID NO: 383437
uucagcaaugauauauaac

SEQ ID NO: 383439 - RNA, 19 nt, Artificial Sequence
  Description of Artificial Sequence: Synthetic oligonucleotide
  Sense Strand Starting at position 823 of SEQ ID NO: 316149
cucauaauuuccgugcaaa

SEQ ID NO: 383440 - RNA, 19 nt, Artificial Sequence
  Description of Artificial Sequence: Synthetic oligonucleotide
  Antisense Strand to SEQ ID NO: 383439
uuugcacggaaauuaugag

SEQ ID NO: 383441 - RNA, 19 nt, Artificial Sequence
  Description of Artificial Sequence: Synthetic oligonucleotide
  Sense Strand Starting at position 823 of SEQ ID NO: 316260
aguugccagagguaaucaa

SEQ ID NO: 383442 - RNA, 19 nt, Artificial Sequence
  Description of Artificial Sequence: Synthetic oligonucleotide
  Antisense Strand to SEQ ID NO: 383441
uugauuaccucuggcaacu

SEQ ID NO: 383443 - RNA, 19 nt, Artificial Sequence
  Description of Artificial Sequence: Synthetic oligonucleotide
  Sense Strand Starting at position 823 of SEQ ID NO: 316296
cccagaucuucucucgaaa

SEQ ID NO: 383444 - RNA, 19 nt, Artificial Sequence
  Description of Artificial Sequence: Synthetic oligonucleotide
  Antisense Strand to SEQ ID NO: 383443
uuucgagagaagaucuggg

SEQ ID NO: 383445 - RNA, 19 nt, Artificial Sequence
  Description of Artificial Sequence: Synthetic oligonucleotide
  Sense Strand Starting at position 823 of SEQ ID NO: 316299
agaucuucucucgaaagug

SEQ ID NO: 383446 - RNA, 19 nt, Artificial Sequence
  Description of Artificial Sequence: Synthetic oligonucleotide
  Antisense Strand to SEQ ID NO: 383445
cacuuucgagagaagaucu

SEQ ID NO: 383447 - RNA, 19 nt, Artificial Sequence
  Description of Artificial Sequence: Synthetic oligonucleotide
  Sense Strand Starting at position 823 of SEQ ID NO: 316363
ccuaguaauuaaguaagac

SEQ ID NO: 383448 - RNA, 19 nt, Artificial Sequence
  Description of Artificial Sequence: Synthetic oligonucleotide
  Antisense Strand to SEQ ID NO: 383447
gucuuacuuaauuacuagg

SEQ ID NO: 383449 - RNA, 19 nt, Artificial Sequence
  Description of Artificial Sequence: Synthetic oligonucleotide
  Sense Strand Starting at position 823 of SEQ ID NO: 316482
ugauaaaccugccuacuga

SEQ ID NO: 383450 - RNA, 19 nt, Artificial Sequence
  Description of Artificial Sequence: Synthetic oligonucleotide
  Antisense Strand to SEQ ID NO: 383449
ucaguaggcagguuuauca

SEQ ID NO: 383451 - RNA, 19 nt, Artificial Sequence
  Description of Artificial Sequence: Synthetic oligonucleotide
  Sense Strand Starting at position 823 of SEQ ID NO: 316542
uaauuuguuccugggcuuu

SEQ ID NO: 383452 - RNA, 19 nt, Artificial Sequence
  Description of Artificial Sequence: Synthetic oligonucleotide
  Antisense Strand to SEQ ID NO: 383451
aaagcccaggaacaaauua

SEQ ID NO: 383453 - RNA, 19 nt, Artificial Sequence
  Description of Artificial Sequence: Synthetic oligonucleotide
  Sense Strand Starting at position 823 of SEQ ID NO: 316624
uguaccucaguuuaaagau

SEQ ID NO: 383454 - RNA, 19 nt, Artificial Sequence
  Description of Artificial Sequence: Synthetic oligonucleotide
  Antisense Strand to SEQ ID NO: 383453
aucuuuaaacugagguaca

SEQ ID NO: 383455 - RNA, 19 nt, Artificial Sequence
  Description of Artificial Sequence: Synthetic oligonucleotide
  Sense Strand Starting at position 823 of SEQ ID NO: 316661
uguaaacuccuagaguuga

SEQ ID NO: 383456 - RNA, 19 nt, Artificial Sequence
  Description of Artificial Sequence: Synthetic oligonucleotide
  Antisense Strand to SEQ ID NO: 383455
ucaacucuaggaguuuaca

SEQ ID NO: 383457 - RNA, 19 nt, Artificial Sequence
  Description of Artificial Sequence: Synthetic oligonucleotide
  Sense Strand Starting at position 823 of SEQ ID NO: 317442
ccgguuccggcgaaguuaa

SEQ ID NO: 383458 - RNA, 19 nt, Artificial Sequence
  Description of Artificial Sequence: Synthetic oligonucleotide
  Antisense Strand to SEQ ID NO: 383457
uuaacuucgccggaaccgg

SEQ ID NO: 383459 - RNA, 19 nt, Artificial Sequence
  Description of Artificial Sequence: Synthetic oligonucleotide
  Sense Strand Starting at position 823 of SEQ ID NO: 317443
cgguuccggcgaaguuaaa

SEQ ID NO: 383460 - RNA, 19 nt, Artificial Sequence
  Description of Artificial Sequence: Synthetic oligonucleotide
  Antisense Strand to SEQ ID NO: 383459
uuuaacuucgccggaaccg

SEQ ID NO: 383461 - RNA, 19 nt, Artificial Sequence
  Description of Artificial Sequence: Synthetic oligonucleotide
  Sense Strand Starting at position 823 of SEQ ID NO: 317528
guuucaugacgagguggaa

SEQ ID NO: 383462 - RNA, 19 nt, Artificial Sequence
  Description of Artificial Sequence: Synthetic oligonucleotide
  Antisense Strand to SEQ ID NO: 383461
uuccaccucgucaugaaac

SEQ ID NO: 383463 - RNA, 19 nt, Artificial Sequence
  Description of Artificial Sequence: Synthetic oligonucleotide
  Sense Strand Starting at position 823 of SEQ ID NO: 317567
cgaggacucggagacguau

SEQ ID NO: 383464 - RNA, 19 nt, Artificial Sequence
  Description of Artificial Sequence: Synthetic oligonucleotide
  Antisense Strand to SEQ ID NO: 383463
auacgucuccgaguccucg

SEQ ID NO: 383465 - RNA, 19 nt, Artificial Sequence
  Description of Artificial Sequence: Synthetic oligonucleotide
  Sense Strand Starting at position 823 of SEQ ID NO: 317595
ugcccauguggagauaacu

SEQ ID NO: 383466 - RNA, 19 nt, Artificial Sequence
  Description of Artificial Sequence: Synthetic oligonucleotide
  Antisense Strand to SEQ ID NO: 383465
aguuaucuccacaugggca

SEQ ID NO: 383467 - RNA, 19 nt, Artificial Sequence
  Description of Artificial Sequence: Synthetic oligonucleotide
  Sense Strand Starting at position 823 of SEQ ID NO: 317811
caguucuggccuuagauua

SEQ ID NO: 383468 - RNA, 19 nt, Artificial Sequence
  Description of Artificial Sequence: Synthetic oligonucleotide
  Antisense Strand to SEQ ID NO: 383467
uaaucuaaggccagaacug

SEQ ID NO: 383469 - RNA, 19 nt, Artificial Sequence
  Description of Artificial Sequence: Synthetic oligonucleotide
  Sense Strand Starting at position 823 of SEQ ID NO: 317885
ggucccaaccugggauauu

SEQ ID NO: 383470 - RNA, 19 nt, Artificial Sequence
  Description of Artificial Sequence: Synthetic oligonucleotide
  Antisense Strand to SEQ ID NO: 383469
aauaucccagguugggacc

SEQ ID NO: 383471 - RNA, 19 nt, Artificial Sequence
  Description of Artificial Sequence: Synthetic oligonucleotide
  Sense Strand Starting at position 823 of SEQ ID NO: 318163
guaggaagauuuggagaau

SEQ ID NO: 383472 - RNA, 19 nt, Artificial Sequence
  Description of Artificial Sequence: Synthetic oligonucleotide
  Antisense Strand to SEQ ID NO: 383471
auucuccaaaucuuccuac

SEQ ID NO: 383473 - RNA, 19 nt, Artificial Sequence
  Description of Artificial Sequence: Synthetic oligonucleotide
  Sense Strand Starting at position 823 of SEQ ID NO: 318226
agugauuuaugacaaagua

SEQ ID NO: 383474 - RNA, 19 nt, Artificial Sequence
  Description of Artificial Sequence: Synthetic oligonucleotide
  Antisense Strand to SEQ ID NO: 383473
uacuuugucauaaaucacu

SEQ ID NO: 383475 - RNA, 19 nt, Artificial Sequence
  Description of Artificial Sequence: Synthetic oligonucleotide
  Sense Strand Starting at position 823 of SEQ ID NO: 318311
cagugaugagugcaggaga

SEQ ID NO: 383476 - RNA, 19 nt, Artificial Sequence
  Description of Artificial Sequence: Synthetic oligonucleotide
  Antisense Strand to SEQ ID NO: 383475
ucuccugcacucaucacug

SEQ ID NO: 383477 - RNA, 19 nt, Artificial Sequence
  Description of Artificial Sequence: Synthetic oligonucleotide
  Sense Strand Starting at position 823 of SEQ ID NO: 318322
gcaggagaauguuucauug

SEQ ID NO: 383478 - RNA, 19 nt, Artificial Sequence
  Description of Artificial Sequence: Synthetic oligonucleotide
  Antisense Strand to SEQ ID NO: 383477
caaugaaacauucuccugc

SEQ ID NO: 383479 - RNA, 19 nt, Artificial Sequence
  Description of Artificial Sequence: Synthetic oligonucleotide
  Sense Strand Starting at position 823 of SEQ ID NO: 318387
ugauaaacagccgaauagu

SEQ ID NO: 383480 - RNA, 19 nt, Artificial Sequence
  Description of Artificial Sequence: Synthetic oligonucleotide
  Antisense Strand to SEQ ID NO: 383479
acuauucggcuguuuauca

SEQ ID NO: 383481 - RNA, 19 nt, Artificial Sequence
  Description of Artificial Sequence: Synthetic oligonucleotide
  Sense Strand Starting at position 823 of SEQ ID NO: 318454
agauaaaucuagcuuuagu

SEQ ID NO: 383482 - RNA, 19 nt, Artificial Sequence
  Description of Artificial Sequence: Synthetic oligonucleotide
  Antisense Strand to SEQ ID NO: 383481
acuaaagcuagauuuaucu

SEQ ID NO: 383483 - RNA, 19 nt, Artificial Sequence
  Description of Artificial Sequence: Synthetic oligonucleotide
  Sense Strand Starting at position 823 of SEQ ID NO: 318572
cugcuagacuuacuuugaa

SEQ ID NO: 383484 - RNA, 19 nt, Artificial Sequence
  Description of Artificial Sequence: Synthetic oligonucleotide
  Antisense Strand to SEQ ID NO: 383483
uucaaaguaagucuagcag

SEQ ID NO: 383485 - RNA, 19 nt, Artificial Sequence
  Description of Artificial Sequence: Synthetic oligonucleotide
  Sense Strand Starting at position 823 of SEQ ID NO: 318592
ggaacaauuguaugguauu

SEQ ID NO: 383486 - RNA, 19 nt, Artificial Sequence
  Description of Artificial Sequence: Synthetic oligonucleotide
  Antisense Strand to SEQ ID NO: 383485
aauaccauacaauuguucc

SEQ ID NO: 383487 - RNA, 19 nt, Artificial Sequence
  Description of Artificial Sequence: Synthetic oligonucleotide
  Sense Strand Starting at position 823 of SEQ ID NO: 318609
uuucgugcuggcuuauaca

SEQ ID NO: 383488 - RNA, 19 nt, Artificial Sequence
  Description of Artificial Sequence: Synthetic oligonucleotide
  Antisense Strand to SEQ ID NO: 383487
uguauaagccagcacgaaa

SEQ ID NO: 383489 - RNA, 19 nt, Artificial Sequence
  Description of Artificial Sequence: Synthetic oligonucleotide
  Sense Strand Starting at position 823 of SEQ ID NO: 318651
gagauauaauuccuaggug

SEQ ID NO: 383490 - RNA, 19 nt, Artificial Sequence
  Description of Artificial Sequence: Synthetic oligonucleotide
  Antisense Strand to SEQ ID NO: 383489
caccuaggaauuauaucuc

SEQ ID NO: 383491 - RNA, 19 nt, Artificial Sequence
  Description of Artificial Sequence: Synthetic oligonucleotide
  Sense Strand Starting at position 823 of SEQ ID NO: 318866
ggcacagagccucaugaga

SEQ ID NO: 383492 - RNA, 19 nt, Artificial Sequence
  Description of Artificial Sequence: Synthetic oligonucleotide
  Antisense Strand to SEQ ID NO: 383491
ucucaugaggcucugugcc

SEQ ID NO: 383493 - RNA, 19 nt, Artificial Sequence
  Description of Artificial Sequence: Synthetic oligonucleotide
  Sense Strand Starting at position 823 of SEQ ID NO: 318882
agagaagcgggcuauaauu

SEQ ID NO: 383494 - RNA, 19 nt, Artificial Sequence
  Description of Artificial Sequence: Synthetic oligonucleotide
  Antisense Strand to SEQ ID NO: 383493
aauuauagcccgcuucucu

SEQ ID NO: 383495 - RNA, 19 nt, Artificial Sequence
  Description of Artificial Sequence: Synthetic oligonucleotide
  Sense Strand Starting at position 823 of SEQ ID NO: 318891
ggcuauaauuuagacuaua

SEQ ID NO: 383496 - RNA, 19 nt, Artificial Sequence
  Description of Artificial Sequence: Synthetic oligonucleotide
  Antisense Strand to SEQ ID NO: 383495
uauagucuaaauuauagcc

SEQ ID NO: 383497 - RNA, 19 nt, Artificial Sequence
  Description of Artificial Sequence: Synthetic oligonucleotide
  Sense Strand Starting at position 823 of SEQ ID NO: 318942
aaaugugcucugcaacaga

SEQ ID NO: 383498 - RNA, 19 nt, Artificial Sequence
  Description of Artificial Sequence: Synthetic oligonucleotide
  Antisense Strand to SEQ ID NO: 383497
ucuguugcagagcacauuu

SEQ ID NO: 383499 - RNA, 19 nt, Artificial Sequence
  Description of Artificial Sequence: Synthetic oligonucleotide
  Sense Strand Starting at position 823 of SEQ ID NO: 318985
agugcuggucugggaggaa

SEQ ID NO: 383500 - RNA, 19 nt, Artificial Sequence
  Description of Artificial Sequence: Synthetic oligonucleotide
  Antisense Strand to SEQ ID NO: 383499
uuccucccagaccagcacu

SEQ ID NO: 383501 - RNA, 19 nt, Artificial Sequence
  Description of Artificial Sequence: Synthetic oligonucleotide
  Sense Strand Starting at position 823 of SEQ ID NO: 319048
aggccuuaauagguaaaga

SEQ ID NO: 383502 - RNA, 19 nt, Artificial Sequence
  Description of Artificial Sequence: Synthetic oligonucleotide
  Antisense Strand to SEQ ID NO: 383501
ucuuuaccuauuaaggccu

SEQ ID NO: 383503 - RNA, 19 nt, Artificial Sequence
  Description of Artificial Sequence: Synthetic oligonucleotide
  Sense Strand Starting at position 823 of SEQ ID NO: 319093
uguacauaugaggguauga

SEQ ID NO: 383504 - RNA, 19 nt, Artificial Sequence
  Description of Artificial Sequence: Synthetic oligonucleotide
  Antisense Strand to SEQ ID NO: 383503
ucauacccucauauguaca

SEQ ID NO: 383505 - RNA, 19 nt, Artificial Sequence
  Description of Artificial Sequence: Synthetic oligonucleotide
  Sense Strand Starting at position 824 of SEQ ID NO: 315264
agugucuuauuugaagaaa

SEQ ID NO: 383506 - RNA, 19 nt, Artificial Sequence
  Description of Artificial Sequence: Synthetic oligonucleotide
  Antisense Strand to SEQ ID NO: 383505
uuucuucaaauaagacacu

SEQ ID NO: 383507 - RNA, 19 nt, Artificial Sequence
  Description of Artificial Sequence: Synthetic oligonucleotide
  Sense Strand Starting at position 824 of SEQ ID NO: 315276
gaagaaauauuucgaagga

SEQ ID NO: 383508 - RNA, 19 nt, Artificial Sequence
  Description of Artificial Sequence: Synthetic oligonucleotide
  Antisense Strand to SEQ ID NO: 383507
uccuucgaaauauuucuuc

SEQ ID NO: 383509 - RNA, 19 nt, Artificial Sequence
  Description of Artificial Sequence: Synthetic oligonucleotide
  Sense Strand Starting at position 824 of SEQ ID NO: 316622
gaagcauccuuugucagga

SEQ ID NO: 383510 - RNA, 19 nt, Artificial Sequence
  Description of Artificial Sequence: Synthetic oligonucleotide
  Antisense Strand to SEQ ID NO: 383509
uccugacaaaggaugcuuc

SEQ ID NO: 383511 - RNA, 19 nt, Artificial Sequence
  Description of Artificial Sequence: Synthetic oligonucleotide
  Sense Strand Starting at position 824 of SEQ ID NO: 316627
auccuuugucaggauuacu

SEQ ID NO: 383512 - RNA, 19 nt, Artificial Sequence
  Description of Artificial Sequence: Synthetic oligonucleotide
  Antisense Strand to SEQ ID NO: 383511
aguaauccugacaaaggau

SEQ ID NO: 383513 - RNA, 19 nt, Artificial Sequence
  Description of Artificial Sequence: Synthetic oligonucleotide
  Sense Strand Starting at position 824 of SEQ ID NO: 316630
cuuugucaggauuacugau

SEQ ID NO: 383514 - RNA, 19 nt, Artificial Sequence
  Description of Artificial Sequence: Synthetic oligonucleotide
  Antisense Strand to SEQ ID NO: 383513
aucaguaauccugacaaag

SEQ ID NO: 383515 - RNA, 19 nt, Artificial Sequence
  Description of Artificial Sequence: Synthetic oligonucleotide
  Sense Strand Starting at position 824 of SEQ ID NO: 316632
uugucaggauuacugauaa

SEQ ID NO: 383516 - RNA, 19 nt, Artificial Sequence
  Description of Artificial Sequence: Synthetic oligonucleotide
  Antisense Strand to SEQ ID NO: 383515
uuaucaguaauccugacaa

SEQ ID NO: 383517 - RNA, 19 nt, Artificial Sequence
  Description of Artificial Sequence: Synthetic oligonucleotide
  Sense Strand Starting at position 824 of SEQ ID NO: 316721
guaagugggcuuuaucaau

SEQ ID NO: 383518 - RNA, 19 nt, Artificial Sequence
  Description of Artificial Sequence: Synthetic oligonucleotide
  Antisense Strand to SEQ ID NO: 383517
auugauaaagcccacuuac

SEQ ID NO: 383519 - RNA, 19 nt, Artificial Sequence
  Description of Artificial Sequence: Synthetic oligonucleotide
  Sense Strand Starting at position 824 of SEQ ID NO: 316810
ggauacauggguuggcaau

SEQ ID NO: 383520 - RNA, 19 nt, Artificial Sequence
  Description of Artificial Sequence: Synthetic oligonucleotide
  Antisense Strand to SEQ ID NO: 383519
auugccaacccauguaucc

SEQ ID NO: 383521 - RNA, 19 nt, Artificial Sequence
  Description of Artificial Sequence: Synthetic oligonucleotide
  Sense Strand Starting at position 824 of SEQ ID NO: 316811
gauacauggguuggcaaua

SEQ ID NO: 383522 - RNA, 19 nt, Artificial Sequence
  Description of Artificial Sequence: Synthetic oligonucleotide
  Antisense Strand to SEQ ID NO: 383521
uauugccaacccauguauc

SEQ ID NO: 383523 - RNA, 19 nt, Artificial Sequence
  Description of Artificial Sequence: Synthetic oligonucleotide
  Sense Strand Starting at position 824 of SEQ ID NO: 317478
uucuuuggcagugauaaug

SEQ ID NO: 383524 - RNA, 19 nt, Artificial Sequence
  Description of Artificial Sequence: Synthetic oligonucleotide
  Antisense Strand to SEQ ID NO: 383523
cauuaucacugccaaagaa

SEQ ID NO: 383525 - RNA, 19 nt, Artificial Sequence
  Description of Artificial Sequence: Synthetic oligonucleotide
  Sense Strand Starting at position 824 of SEQ ID NO: 317487
agugauaaugcccaaauau

SEQ ID NO: 383526 - RNA, 19 nt, Artificial Sequence
  Description of Artificial Sequence: Synthetic oligonucleotide
  Antisense Strand to SEQ ID NO: 383525
auauuugggcauuaucacu

SEQ ID NO: 383527 - RNA, 19 nt, Artificial Sequence
  Description of Artificial Sequence: Synthetic oligonucleotide
  Sense Strand Starting at position 824 of SEQ ID NO: 317562
uaaggaaauucucugcagu

SEQ ID NO: 383528 - RNA, 19 nt, Artificial Sequence
  Description of Artificial Sequence: Synthetic oligonucleotide
  Antisense Strand to SEQ ID NO: 383527
acugcagagaauuuccuua

SEQ ID NO: 383529 - RNA, 19 nt, Artificial Sequence
  Description of Artificial Sequence: Synthetic oligonucleotide
  Sense Strand Starting at position 824 of SEQ ID NO: 317563
aaggaaauucucugcaguu

SEQ ID NO: 383530 - RNA, 19 nt, Artificial Sequence
  Description of Artificial Sequence: Synthetic oligonucleotide
  Antisense Strand to SEQ ID NO: 383529
aacugcagagaauuuccuu

SEQ ID NO: 383531 - RNA, 19 nt, Artificial Sequence
  Description of Artificial Sequence: Synthetic oligonucleotide
  Sense Strand Starting at position 824 of SEQ ID NO: 317565
ggaaauucucugcaguuuc

SEQ ID NO: 383532 - RNA, 19 nt, Artificial Sequence
  Description of Artificial Sequence: Synthetic oligonucleotide
  Antisense Strand to SEQ ID NO: 383531
gaaacugcagagaauuucc

SEQ ID NO: 383533 - RNA, 19 nt, Artificial Sequence
  Description of Artificial Sequence: Synthetic oligonucleotide
  Sense Strand Starting at position 824 of SEQ ID NO: 317614
aguaauugugaguaaagug

SEQ ID NO: 383534 - RNA, 19 nt, Artificial Sequence
  Description of Artificial Sequence: Synthetic oligonucleotide
  Antisense Strand to SEQ ID NO: 383533
cacuuuacucacaauuacu

SEQ ID NO: 383535 - RNA, 19 nt, Artificial Sequence
  Description of Artificial Sequence: Synthetic oligonucleotide
  Sense Strand Starting at position 824 of SEQ ID NO: 317619
uugugaguaaaguggaauu

SEQ ID NO: 383536 - RNA, 19 nt, Artificial Sequence
  Description of Artificial Sequence: Synthetic oligonucleotide
  Antisense Strand to SEQ ID NO: 383535
aauuccacuuuacucacaa

SEQ ID NO: 383537 - RNA, 19 nt, Artificial Sequence
  Description of Artificial Sequence: Synthetic oligonucleotide
  Sense Strand Starting at position 824 of SEQ ID NO: 317659
gaaauuuguuguguaucuu

SEQ ID NO: 383538 - RNA, 19 nt, Artificial Sequence
  Description of Artificial Sequence: Synthetic oligonucleotide
  Antisense Strand to SEQ ID NO: 383537
aagauacacaacaaauuuc

SEQ ID NO: 383539 - RNA, 19 nt, Artificial Sequence
  Description of Artificial Sequence: Synthetic oligonucleotide
  Sense Strand Starting at position 824 of SEQ ID NO: 317692
ugccaugcagccguuuaaa

SEQ ID NO: 383540 - RNA, 19 nt, Artificial Sequence
  Description of Artificial Sequence: Synthetic oligonucleotide
  Antisense Strand to SEQ ID NO: 383539
uuuaaacggcugcauggca

SEQ ID NO: 383541 - RNA, 19 nt, Artificial Sequence
  Description of Artificial Sequence: Synthetic oligonucleotide
  Sense Strand Starting at position 824 of SEQ ID NO: 317713
aauucugcaggugaauauu

SEQ ID NO: 383542 - RNA, 19 nt, Artificial Sequence
  Description of Artificial Sequence: Synthetic oligonucleotide
  Antisense Strand to SEQ ID NO: 383541
aauauucaccugcagaauu

SEQ ID NO: 383543 - RNA, 19 nt, Artificial Sequence
  Description of Artificial Sequence: Synthetic oligonucleotide
  Sense Strand Starting at position 824 of SEQ ID NO: 317740
agauguugcgacuauuugu

SEQ ID NO: 383544 - RNA, 19 nt, Artificial Sequence
  Description of Artificial Sequence: Synthetic oligonucleotide
  Antisense Strand to SEQ ID NO: 383543
acaaauagucgcaacaucu

SEQ ID NO: 383545 - RNA, 19 nt, Artificial Sequence
  Description of Artificial Sequence: Synthetic oligonucleotide
  Sense Strand Starting at position 824 of SEQ ID NO: 317750
acuauuuguuaggagacau

SEQ ID NO: 383546 - RNA, 19 nt, Artificial Sequence
  Description of Artificial Sequence: Synthetic oligonucleotide
  Antisense Strand to SEQ ID NO: 383545
augucuccuaacaaauagu

SEQ ID NO: 383547 - RNA, 19 nt, Artificial Sequence
  Description of Artificial Sequence: Synthetic oligonucleotide
  Sense Strand Starting at position 824 of SEQ ID NO: 317754
uuuguuaggagacauaguu

SEQ ID NO: 383548 - RNA, 19 nt, Artificial Sequence
  Description of Artificial Sequence: Synthetic oligonucleotide
  Antisense Strand to SEQ ID NO: 383547
aacuaugucuccuaacaaa

SEQ ID NO: 383549 - RNA, 19 nt, Artificial Sequence
  Description of Artificial Sequence: Synthetic oligonucleotide
  Sense Strand Starting at position 824 of SEQ ID NO: 317808
ucuuuaaaggucugcaaga

SEQ ID NO: 383550 - RNA, 19 nt, Artificial Sequence
  Description of Artificial Sequence: Synthetic oligonucleotide
  Antisense Strand to SEQ ID NO: 383549
ucuugcagaccuuuaaaga

SEQ ID NO: 383551 - RNA, 19 nt, Artificial Sequence
  Description of Artificial Sequence: Synthetic oligonucleotide
  Sense Strand Starting at position 824 of SEQ ID NO: 317809
cuuuaaaggucugcaagau

SEQ ID NO: 383552 - RNA, 19 nt, Artificial Sequence
  Description of Artificial Sequence: Synthetic oligonucleotide
  Antisense Strand to SEQ ID NO: 383551
aucuugcagaccuuuaaag

SEQ ID NO: 383553 - RNA, 19 nt, Artificial Sequence
  Description of Artificial Sequence: Synthetic oligonucleotide
  Sense Strand Starting at position 824 of SEQ ID NO: 317810
uuuaaaggucugcaagaug

SEQ ID NO: 383554 - RNA, 19 nt, Artificial Sequence
  Description of Artificial Sequence: Synthetic oligonucleotide
  Antisense Strand to SEQ ID NO: 383553
caucuugcagaccuuuaaa

SEQ ID NO: 383555 - RNA, 19 nt, Artificial Sequence
  Description of Artificial Sequence: Synthetic oligonucleotide
  Sense Strand Starting at position 824 of SEQ ID NO: 317813
aaaggucugcaagauguau

SEQ ID NO: 383556 - RNA, 19 nt, Artificial Sequence
  Description of Artificial Sequence: Synthetic oligonucleotide
  Antisense Strand to SEQ ID NO: 383555
auacaucuugcagaccuuu

SEQ ID NO: 383557 - RNA, 19 nt, Artificial Sequence
  Description of Artificial Sequence: Synthetic oligonucleotide
  Sense Strand Starting at position 824 of SEQ ID NO: 317819
cugcaagauguauacugau

SEQ ID NO: 383558 - RNA, 19 nt, Artificial Sequence
  Description of Artificial Sequence: Synthetic oligonucleotide
  Antisense Strand to SEQ ID NO: 383557
aucaguauacaucuugcag

SEQ ID NO: 383559 - RNA, 19 nt, Artificial Sequence
  Description of Artificial Sequence: Synthetic oligonucleotide
  Sense Strand Starting at position 824 of SEQ ID NO: 317825
gauguauacugauugugau

SEQ ID NO: 383560 - RNA, 19 nt, Artificial Sequence
  Description of Artificial Sequence: Synthetic oligonucleotide
  Antisense Strand to SEQ ID NO: 383559
aucacaaucaguauacauc

SEQ ID NO: 383561 - RNA, 19 nt, Artificial Sequence
  Description of Artificial Sequence: Synthetic oligonucleotide
  Sense Strand Starting at position 824 of SEQ ID NO: 317826
auguauacugauugugauc

SEQ ID NO: 383562 - RNA, 19 nt, Artificial Sequence
  Description of Artificial Sequence: Synthetic oligonucleotide
  Antisense Strand to SEQ ID NO: 383561
gaucacaaucaguauacau

SEQ ID NO: 383563 - RNA, 19 nt, Artificial Sequence
  Description of Artificial Sequence: Synthetic oligonucleotide
  Sense Strand Starting at position 824 of SEQ ID NO: 318281
uggaccuucuagucauauu

SEQ ID NO: 383564 - RNA, 19 nt, Artificial Sequence
  Description of Artificial Sequence: Synthetic oligonucleotide
  Antisense Strand to SEQ ID NO: 383563
aauaugacuagaaggucca

SEQ ID NO: 383565 - RNA, 19 nt, Artificial Sequence
  Description of Artificial Sequence: Synthetic oligonucleotide
  Sense Strand Starting at position 824 of SEQ ID NO: 318333
auuguuuccaaguagagug

SEQ ID NO: 383566 - RNA, 19 nt, Artificial Sequence
  Description of Artificial Sequence: Synthetic oligonucleotide
  Antisense Strand to SEQ ID NO: 383565
cacucuacuuggaaacaau

SEQ ID NO: 383567 - RNA, 19 nt, Artificial Sequence
  Description of Artificial Sequence: Synthetic oligonucleotide
  Sense Strand Starting at position 824 of SEQ ID NO: 318493
accagucaccucuaguuga

SEQ ID NO: 383568 - RNA, 19 nt, Artificial Sequence
  Description of Artificial Sequence: Synthetic oligonucleotide
  Antisense Strand to SEQ ID NO: 383567
ucaacuagaggugacuggu

SEQ ID NO: 383569 - RNA, 19 nt, Artificial Sequence
  Description of Artificial Sequence: Synthetic oligonucleotide
  Sense Strand Starting at position 824 of SEQ ID NO: 318527
aaaguagaguuucuugaag

SEQ ID NO: 383570 - RNA, 19 nt, Artificial Sequence
  Description of Artificial Sequence: Synthetic oligonucleotide
  Antisense Strand to SEQ ID NO: 383569
cuucaagaaacucuacuuu

SEQ ID NO: 383571 - RNA, 19 nt, Artificial Sequence
  Description of Artificial Sequence: Synthetic oligonucleotide
  Sense Strand Starting at position 824 of SEQ ID NO: 318576
aacacuugaugaguaagua

SEQ ID NO: 383572 - RNA, 19 nt, Artificial Sequence
  Description of Artificial Sequence: Synthetic oligonucleotide
  Antisense Strand to SEQ ID NO: 383571
uacuuacucaucaaguguu

SEQ ID NO: 383573 - RNA, 19 nt, Artificial Sequence
  Description of Artificial Sequence: Synthetic oligonucleotide
  Sense Strand Starting at position 824 of SEQ ID NO: 318584
augaguaaguaccuaaacu

SEQ ID NO: 383574 - RNA, 19 nt, Artificial Sequence
  Description of Artificial Sequence: Synthetic oligonucleotide
  Antisense Strand to SEQ ID NO: 383573
aguuuagguacuuacucau

SEQ ID NO: 383575 - RNA, 19 nt, Artificial Sequence
  Description of Artificial Sequence: Synthetic oligonucleotide
  Sense Strand Starting at position 824 of SEQ ID NO: 318731
uuggcuaagaggugacaaa

SEQ ID NO: 383576 - RNA, 19 nt, Artificial Sequence
  Description of Artificial Sequence: Synthetic oligonucleotide
  Antisense Strand to SEQ ID NO: 383575
uuugucaccucuuagccaa

SEQ ID NO: 383577 - RNA, 19 nt, Artificial Sequence
  Description of Artificial Sequence: Synthetic oligonucleotide
  Sense Strand Starting at position 824 of SEQ ID NO: 318953
cuagguuugccuuaaauuc

SEQ ID NO: 383578 - RNA, 19 nt, Artificial Sequence
  Description of Artificial Sequence: Synthetic oligonucleotide
  Antisense Strand to SEQ ID NO: 383577
gaauuuaaggcaaaccuag

SEQ ID NO: 383579 - RNA, 19 nt, Artificial Sequence
  Description of Artificial Sequence: Synthetic oligonucleotide
  Sense Strand Starting at position 824 of SEQ ID NO: 319135
cuaucaaugcuugaaguuu

SEQ ID NO: 383580 - RNA, 19 nt, Artificial Sequence
  Description of Artificial Sequence: Synthetic oligonucleotide
  Antisense Strand to SEQ ID NO: 383579
aaacuucaagcauugauag

SEQ ID NO: 383581 - RNA, 19 nt, Artificial Sequence
  Description of Artificial Sequence: Synthetic oligonucleotide
  Sense Strand Starting at position 824 of SEQ ID NO: 319192
agaaguuuauggucuagua

SEQ ID NO: 383582 - RNA, 19 nt, Artificial Sequence
  Description of Artificial Sequence: Synthetic oligonucleotide
  Antisense Strand to SEQ ID NO: 383581
uacuagaccauaaacuucu

SEQ ID NO: 383583 - RNA, 19 nt, Artificial Sequence
  Description of Artificial Sequence: Synthetic oligonucleotide
  Sense Strand Starting at position 824 of SEQ ID NO: 319194
aaguuuauggucuaguaaa

SEQ ID NO: 383584 - RNA, 19 nt, Artificial Sequence
  Description of Artificial Sequence: Synthetic oligonucleotide
  Antisense Strand to SEQ ID NO: 383583
uuuacuagaccauaaacuu

SEQ ID NO: 383585 - RNA, 19 nt, Artificial Sequence
  Description of Artificial Sequence: Synthetic oligonucleotide
  Sense Strand Starting at position 825 of SEQ ID NO: 315324
gcuggcaaagcagauaauu

SEQ ID NO: 383586 - RNA, 19 nt, Artificial Sequence
  Description of Artificial Sequence: Synthetic oligonucleotide
  Antisense Strand to SEQ ID NO: 383585
aauuaucugcuuugccagc

SEQ ID NO: 383587 - RNA, 19 nt, Artificial Sequence
  Description of Artificial Sequence: Synthetic oligonucleotide
  Sense Strand Starting at position 825 of SEQ ID NO: 315380
uuggauugagccuguauag

SEQ ID NO: 383588 - RNA, 19 nt, Artificial Sequence
  Description of Artificial Sequence: Synthetic oligonucleotide
  Antisense Strand to SEQ ID NO: 383587
cuauacaggcucaauccaa

SEQ ID NO: 383589 - RNA, 19 nt, Artificial Sequence
  Description of Artificial Sequence: Synthetic oligonucleotide
  Sense Strand Starting at position 825 of SEQ ID NO: 315387
gagccuguauagcuaaaca

SEQ ID NO: 383590 - RNA, 19 nt, Artificial Sequence
  Description of Artificial Sequence: Synthetic oligonucleotide
  Antisense Strand to SEQ ID NO: 383589
uguuuagcuauacaggcuc

SEQ ID NO: 383591 - RNA, 19 nt, Artificial Sequence
  Description of Artificial Sequence: Synthetic oligonucleotide
  Sense Strand Starting at position 825 of SEQ ID NO: 315426
ggguuauuguuguccaaca

SEQ ID NO: 383592 - RNA, 19 nt, Artificial Sequence
  Description of Artificial Sequence: Synthetic oligonucleotide
  Antisense Strand to SEQ ID NO: 383591
uguuggacaacaauaaccc

SEQ ID NO: 383593 - RNA, 19 nt, Artificial Sequence
  Description of Artificial Sequence: Synthetic oligonucleotide
  Sense Strand Starting at position 825 of SEQ ID NO: 315427
gguuauuguuguccaacaa

SEQ ID NO: 383594 - RNA, 19 nt, Artificial Sequence
  Description of Artificial Sequence: Synthetic oligonucleotide
  Antisense Strand to SEQ ID NO: 383593
uuguuggacaacaauaacc

SEQ ID NO: 383595 - RNA, 19 nt, Artificial Sequence
  Description of Artificial Sequence: Synthetic oligonucleotide
  Sense Strand Starting at position 825 of SEQ ID NO: 315428
guuauuguuguccaacaaa

SEQ ID NO: 383596 - RNA, 19 nt, Artificial Sequence
  Description of Artificial Sequence: Synthetic oligonucleotide
  Antisense Strand to SEQ ID NO: 383595
uuuguuggacaacaauaac

SEQ ID NO: 383597 - RNA, 19 nt, Artificial Sequence
  Description of Artificial Sequence: Synthetic oligonucleotide
  Sense Strand Starting at position 825 of SEQ ID NO: 315505
acaaucuaugugcaaguuu

SEQ ID NO: 383598 - RNA, 19 nt, Artificial Sequence
  Description of Artificial Sequence: Synthetic oligonucleotide
  Antisense Strand to SEQ ID NO: 383597
aaacuugcacauagauugu

SEQ ID NO: 383599 - RNA, 19 nt, Artificial Sequence
  Description of Artificial Sequence: Synthetic oligonucleotide
  Sense Strand Starting at position 825 of SEQ ID NO: 315611
gagggccuccagugauacu

SEQ ID NO: 383600 - RNA, 19 nt, Artificial Sequence
  Description of Artificial Sequence: Synthetic oligonucleotide
  Antisense Strand to SEQ ID NO: 383599
aguaucacuggaggcccuc

SEQ ID NO: 383601 - RNA, 19 nt, Artificial Sequence
  Description of Artificial Sequence: Synthetic oligonucleotide
  Sense Strand Starting at position 825 of SEQ ID NO: 315765
cuauaucccucuguaagga

SEQ ID NO: 383602 - RNA, 19 nt, Artificial Sequence
  Description of Artificial Sequence: Synthetic oligonucleotide
  Antisense Strand to SEQ ID NO: 383601
uccuuacagagggauauag

SEQ ID NO: 383603 - RNA, 19 nt, Artificial Sequence
  Description of Artificial Sequence: Synthetic oligonucleotide
  Sense Strand Starting at position 825 of SEQ ID NO: 315879
cuaaguagaucuccagguu

SEQ ID NO: 383604 - RNA, 19 nt, Artificial Sequence
  Description of Artificial Sequence: Synthetic oligonucleotide
  Antisense Strand to SEQ ID NO: 383603
aaccuggagaucuacuuag

SEQ ID NO: 383605 - RNA, 19 nt, Artificial Sequence
  Description of Artificial Sequence: Synthetic oligonucleotide
  Sense Strand Starting at position 825 of SEQ ID NO: 315880
uaaguagaucuccagguua

SEQ ID NO: 383606 - RNA, 19 nt, Artificial Sequence
  Description of Artificial Sequence: Synthetic oligonucleotide
  Antisense Strand to SEQ ID NO: 383605
uaaccuggagaucuacuua

SEQ ID NO: 383607 - RNA, 19 nt, Artificial Sequence
  Description of Artificial Sequence: Synthetic oligonucleotide
  Sense Strand Starting at position 825 of SEQ ID NO: 315882
aguagaucuccagguuauu

SEQ ID NO: 383608 - RNA, 19 nt, Artificial Sequence
  Description of Artificial Sequence: Synthetic oligonucleotide
  Antisense Strand to SEQ ID NO: 383607
aauaaccuggagaucuacu

SEQ ID NO: 383609 - RNA, 19 nt, Artificial Sequence
  Description of Artificial Sequence: Synthetic oligonucleotide
  Sense Strand Starting at position 825 of SEQ ID NO: 315891
ccagguuauucucuaucag

SEQ ID NO: 383610 - RNA, 19 nt, Artificial Sequence
  Description of Artificial Sequence: Synthetic oligonucleotide
  Antisense Strand to SEQ ID NO: 383609
cugauagagaauaaccugg

SEQ ID NO: 383611 - RNA, 19 nt, Artificial Sequence
  Description of Artificial Sequence: Synthetic oligonucleotide
  Sense Strand Starting at position 825 of SEQ ID NO: 316305
acuggaaagucaguuggaa

SEQ ID NO: 383612 - RNA, 19 nt, Artificial Sequence
  Description of Artificial Sequence: Synthetic oligonucleotide
  Antisense Strand to SEQ ID NO: 383611
uuccaacugacuuuccagu

SEQ ID NO: 383613 - RNA, 19 nt, Artificial Sequence
  Description of Artificial Sequence: Synthetic oligonucleotide
  Sense Strand Starting at position 825 of SEQ ID NO: 316443
cccagaaaucgauggcugu

SEQ ID NO: 383614 - RNA, 19 nt, Artificial Sequence
  Description of Artificial Sequence: Synthetic oligonucleotide
  Antisense Strand to SEQ ID NO: 383613
acagccaucgauuucuggg

SEQ ID NO: 383615 - RNA, 19 nt, Artificial Sequence
  Description of Artificial Sequence: Synthetic oligonucleotide
  Sense Strand Starting at position 825 of SEQ ID NO: 316562
auuugagaauccuguacac

SEQ ID NO: 383616 - RNA, 19 nt, Artificial Sequence
  Description of Artificial Sequence: Synthetic oligonucleotide
  Antisense Strand to SEQ ID NO: 383615
guguacaggauucucaaau

SEQ ID NO: 383617 - RNA, 19 nt, Artificial Sequence
  Description of Artificial Sequence: Synthetic oligonucleotide
  Sense Strand Starting at position 825 of SEQ ID NO: 317395
ggaagaagugcuuagguag

SEQ ID NO: 383618 - RNA, 19 nt, Artificial Sequence
  Description of Artificial Sequence: Synthetic oligonucleotide
  Antisense Strand to SEQ ID NO: 383617
cuaccuaagcacuucuucc

SEQ ID NO: 383619 - RNA, 19 nt, Artificial Sequence
  Description of Artificial Sequence: Synthetic oligonucleotide
  Sense Strand Starting at position 825 of SEQ ID NO: 317572
uuuguuugagaaggaauca

SEQ ID NO: 383620 - RNA, 19 nt, Artificial Sequence
  Description of Artificial Sequence: Synthetic oligonucleotide
  Antisense Strand to SEQ ID NO: 383619
ugauuccuucucaaacaaa

SEQ ID NO: 383621 - RNA, 19 nt, Artificial Sequence
  Description of Artificial Sequence: Synthetic oligonucleotide
  Sense Strand Starting at position 825 of SEQ ID NO: 317605
guggguagacgucagucau

SEQ ID NO: 383622 - RNA, 19 nt, Artificial Sequence
  Description of Artificial Sequence: Synthetic oligonucleotide
  Antisense Strand to SEQ ID NO: 383621
augacugacgucuacccac

SEQ ID NO: 383623 - RNA, 19 nt, Artificial Sequence
  Description of Artificial Sequence: Synthetic oligonucleotide
  Sense Strand Starting at position 825 of SEQ ID NO: 317609
guagacgucagucauaaau

SEQ ID NO: 383624 - RNA, 19 nt, Artificial Sequence
  Description of Artificial Sequence: Synthetic oligonucleotide
  Antisense Strand to SEQ ID NO: 383623
auuuaugacugacgucuac

SEQ ID NO: 383625 - RNA, 19 nt, Artificial Sequence
  Description of Artificial Sequence: Synthetic oligonucleotide
  Sense Strand Starting at position 825 of SEQ ID NO: 317868
cggagugaaacuggaaguu

SEQ ID NO: 383626 - RNA, 19 nt, Artificial Sequence
  Description of Artificial Sequence: Synthetic oligonucleotide
  Antisense Strand to SEQ ID NO: 383625
aacuuccaguuucacuccg

SEQ ID NO: 383627 - RNA, 19 nt, Artificial Sequence
  Description of Artificial Sequence: Synthetic oligonucleotide
  Sense Strand Starting at position 825 of SEQ ID NO: 317878
cuggaaguuugccugguga

SEQ ID NO: 383628 - RNA, 19 nt, Artificial Sequence
  Description of Artificial Sequence: Synthetic oligonucleotide
  Antisense Strand to SEQ ID NO: 383627
ucaccaggcaaacuuccag

SEQ ID NO: 383629 - RNA, 19 nt, Artificial Sequence
  Description of Artificial Sequence: Synthetic oligonucleotide
  Sense Strand Starting at position 825 of SEQ ID NO: 317880
ggaaguuugccuggugaca

SEQ ID NO: 383630 - RNA, 19 nt, Artificial Sequence
  Description of Artificial Sequence: Synthetic oligonucleotide
  Antisense Strand to SEQ ID NO: 383629
ugucaccaggcaaacuucc

SEQ ID NO: 383631 - RNA, 19 nt, Artificial Sequence
  Description of Artificial Sequence: Synthetic oligonucleotide
  Sense Strand Starting at position 825 of SEQ ID NO: 318082
gugagaucgacccacggau

SEQ ID NO: 383632 - RNA, 19 nt, Artificial Sequence
  Description of Artificial Sequence: Synthetic oligonucleotide
  Antisense Strand to SEQ ID NO: 383631
auccgugggucgaucucac

SEQ ID NO: 383633 - RNA, 19 nt, Artificial Sequence
  Description of Artificial Sequence: Synthetic oligonucleotide
  Sense Strand Starting at position 825 of SEQ ID NO: 318169
acggccguuagagaaauua

SEQ ID NO: 383634 - RNA, 19 nt, Artificial Sequence
  Description of Artificial Sequence: Synthetic oligonucleotide
  Antisense Strand to SEQ ID NO: 383633
uaauuucucuaacggccgu

SEQ ID NO: 383635 - RNA, 19 nt, Artificial Sequence
  Description of Artificial Sequence: Synthetic oligonucleotide
  Sense Strand Starting at position 825 of SEQ ID NO: 318178
agagaaauuagcgagcuga

SEQ ID NO: 383636 - RNA, 19 nt, Artificial Sequence
  Description of Artificial Sequence: Synthetic oligonucleotide
  Antisense Strand to SEQ ID NO: 383635
ucagcucgcuaauuucucu

SEQ ID NO: 383637 - RNA, 19 nt, Artificial Sequence
  Description of Artificial Sequence: Synthetic oligonucleotide
  Sense Strand Starting at position 825 of SEQ ID NO: 318199
acugaacacgcuugguaaa

SEQ ID NO: 383638 - RNA, 19 nt, Artificial Sequence
  Description of Artificial Sequence: Synthetic oligonucleotide
  Antisense Strand to SEQ ID NO: 383637
uuuaccaagcguguucagu

SEQ ID NO: 383639 - RNA, 19 nt, Artificial Sequence
  Description of Artificial Sequence: Synthetic oligonucleotide
  Sense Strand Starting at position 825 of SEQ ID NO: 318200
cugaacacgcuugguaaau

SEQ ID NO: 383640 - RNA, 19 nt, Artificial Sequence
  Description of Artificial Sequence: Synthetic oligonucleotide
  Antisense Strand to SEQ ID NO: 383639
auuuaccaagcguguucag

SEQ ID NO: 383641 - RNA, 19 nt, Artificial Sequence
  Description of Artificial Sequence: Synthetic oligonucleotide
  Sense Strand Starting at position 825 of SEQ ID NO: 318201
ugaacacgcuugguaaauu

SEQ ID NO: 383642 - RNA, 19 nt, Artificial Sequence
  Description of Artificial Sequence: Synthetic oligonucleotide
  Antisense Strand to SEQ ID NO: 383641
aauuuaccaagcguguuca

SEQ ID NO: 383643 - RNA, 19 nt, Artificial Sequence
  Description of Artificial Sequence: Synthetic oligonucleotide
  Sense Strand Starting at position 825 of SEQ ID NO: 318266
gaaacuguucuagguugga

SEQ ID NO: 383644 - RNA, 19 nt, Artificial Sequence
  Description of Artificial Sequence: Synthetic oligonucleotide
  Antisense Strand to SEQ ID NO: 383643
uccaaccuagaacaguuuc

SEQ ID NO: 383645 - RNA, 19 nt, Artificial Sequence
  Description of Artificial Sequence: Synthetic oligonucleotide
  Sense Strand Starting at position 825 of SEQ ID NO: 318298
aacggcagucuuuaaggaa

SEQ ID NO: 383646 - RNA, 19 nt, Artificial Sequence
  Description of Artificial Sequence: Synthetic oligonucleotide
  Antisense Strand to SEQ ID NO: 383645
uuccuuaaagacugccguu

SEQ ID NO: 383647 - RNA, 19 nt, Artificial Sequence
  Description of Artificial Sequence: Synthetic oligonucleotide
  Sense Strand Starting at position 825 of SEQ ID NO: 318656
ggcccucaaccauggaaau

SEQ ID NO: 383648 - RNA, 19 nt, Artificial Sequence
  Description of Artificial Sequence: Synthetic oligonucleotide
  Antisense Strand to SEQ ID NO: 383647
auuuccaugguugagggcc

SEQ ID NO: 383649 - RNA, 19 nt, Artificial Sequence
  Description of Artificial Sequence: Synthetic oligonucleotide
  Sense Strand Starting at position 825 of SEQ ID NO: 318657
gcccucaaccauggaaaua

SEQ ID NO: 383650 - RNA, 19 nt, Artificial Sequence
  Description of Artificial Sequence: Synthetic oligonucleotide
  Antisense Strand to SEQ ID NO: 383649
uauuuccaugguugagggc

SEQ ID NO: 383651 - RNA, 19 nt, Artificial Sequence
  Description of Artificial Sequence: Synthetic oligonucleotide
  Sense Strand Starting at position 825 of SEQ ID NO: 318699
agagaaauucccggcacuu

SEQ ID NO: 383652 - RNA, 19 nt, Artificial Sequence
  Description of Artificial Sequence: Synthetic oligonucleotide
  Antisense Strand to SEQ ID NO: 383651
aagugccgggaauuucucu

SEQ ID NO: 383653 - RNA, 19 nt, Artificial Sequence
  Description of Artificial Sequence: Synthetic oligonucleotide
  Sense Strand Starting at position 825 of SEQ ID NO: 318753
gcaagagggcaguaauaac

SEQ ID NO: 383654 - RNA, 19 nt, Artificial Sequence
  Description of Artificial Sequence: Synthetic oligonucleotide
  Antisense Strand to SEQ ID NO: 383653
guuauuacugcccucuugc

SEQ ID NO: 383655 - RNA, 19 nt, Artificial Sequence
  Description of Artificial Sequence: Synthetic oligonucleotide
  Sense Strand Starting at position 825 of SEQ ID NO: 318802
cuggauguuugguucccua

SEQ ID NO: 383656 - RNA, 19 nt, Artificial Sequence
  Description of Artificial Sequence: Synthetic oligonucleotide
  Antisense Strand to SEQ ID NO: 383655
uagggaaccaaacauccag

SEQ ID NO: 383657 - RNA, 19 nt, Artificial Sequence
  Description of Artificial Sequence: Synthetic oligonucleotide
  Sense Strand Starting at position 825 of SEQ ID NO: 318805
gauguuugguucccuauaa

SEQ ID NO: 383658 - RNA, 19 nt, Artificial Sequence
  Description of Artificial Sequence: Synthetic oligonucleotide
  Antisense Strand to SEQ ID NO: 383657
uuauagggaaccaaacauc

SEQ ID NO: 383659 - RNA, 19 nt, Artificial Sequence
  Description of Artificial Sequence: Synthetic oligonucleotide
  Sense Strand Starting at position 825 of SEQ ID NO: 318806
auguuugguucccuauaaa

SEQ ID NO: 383660 - RNA, 19 nt, Artificial Sequence
  Description of Artificial Sequence: Synthetic oligonucleotide
  Antisense Strand to SEQ ID NO: 383659
uuuauagggaaccaaacau

SEQ ID NO: 383661 - RNA, 19 nt, Artificial Sequence
  Description of Artificial Sequence: Synthetic oligonucleotide
  Sense Strand Starting at position 825 of SEQ ID NO: 318965
aguuucuucuuccugaaga

SEQ ID NO: 383662 - RNA, 19 nt, Artificial Sequence
  Description of Artificial Sequence: Synthetic oligonucleotide
  Antisense Strand to SEQ ID NO: 383661
ucuucaggaagaagaaacu

SEQ ID NO: 383663 - RNA, 19 nt, Artificial Sequence
  Description of Artificial Sequence: Synthetic oligonucleotide
  Sense Strand Starting at position 825 of SEQ ID NO: 319017
uucuacugauccgaaauuu

SEQ ID NO: 383664 - RNA, 19 nt, Artificial Sequence
  Description of Artificial Sequence: Synthetic oligonucleotide
  Antisense Strand to SEQ ID NO: 383663
aaauuucggaucaguagaa

SEQ ID NO: 383665 - RNA, 19 nt, Artificial Sequence
  Description of Artificial Sequence: Synthetic oligonucleotide
  Sense Strand Starting at position 826 of SEQ ID NO: 315503
ggugaugucccacagcaac

SEQ ID NO: 383666 - RNA, 19 nt, Artificial Sequence
  Description of Artificial Sequence: Synthetic oligonucleotide
  Antisense Strand to SEQ ID NO: 383665
guugcugugggacaucacc

SEQ ID NO: 383667 - RNA, 19 nt, Artificial Sequence
  Description of Artificial Sequence: Synthetic oligonucleotide
  Sense Strand Starting at position 826 of SEQ ID NO: 315940
cuggguccacccugaaaca

SEQ ID NO: 383668 - RNA, 19 nt, Artificial Sequence
  Description of Artificial Sequence: Synthetic oligonucleotide
  Antisense Strand to SEQ ID NO: 383667
uguuucaggguggacccag

SEQ ID NO: 383669 - RNA, 19 nt, Artificial Sequence
  Description of Artificial Sequence: Synthetic oligonucleotide
  Sense Strand Starting at position 826 of SEQ ID NO: 316387
ucaaguacuuccuccggaa

SEQ ID NO: 383670 - RNA, 19 nt, Artificial Sequence
  Description of Artificial Sequence: Synthetic oligonucleotide
  Antisense Strand to SEQ ID NO: 383669
uuccggaggaaguacuuga

SEQ ID NO: 383671 - RNA, 19 nt, Artificial Sequence
  Description of Artificial Sequence: Synthetic oligonucleotide
  Sense Strand Starting at position 826 of SEQ ID NO: 316389
aaguacuuccuccggaaau

SEQ ID NO: 383672 - RNA, 19 nt, Artificial Sequence
  Description of Artificial Sequence: Synthetic oligonucleotide
  Antisense Strand to SEQ ID NO: 383671
auuuccggaggaaguacuu

SEQ ID NO: 383673 - RNA, 19 nt, Artificial Sequence
  Description of Artificial Sequence: Synthetic oligonucleotide
  Sense Strand Starting at position 826 of SEQ ID NO: 316415
uagccacuugccugggaaa

SEQ ID NO: 383674 - RNA, 19 nt, Artificial Sequence
  Description of Artificial Sequence: Synthetic oligonucleotide
  Antisense Strand to SEQ ID NO: 383673
uuucccaggcaaguggcua

SEQ ID NO: 383675 - RNA, 19 nt, Artificial Sequence
  Description of Artificial Sequence: Synthetic oligonucleotide
  Sense Strand Starting at position 826 of SEQ ID NO: 316667
gcgcuuuggacccagauaa

SEQ ID NO: 383676 - RNA, 19 nt, Artificial Sequence
  Description of Artificial Sequence: Synthetic oligonucleotide
  Antisense Strand to SEQ ID NO: 383675
uuaucuggguccaaagcgc

SEQ ID NO: 383677 - RNA, 19 nt, Artificial Sequence
  Description of Artificial Sequence: Synthetic oligonucleotide
  Sense Strand Starting at position 826 of SEQ ID NO: 316687
caaggacucugagucucaa

SEQ ID NO: 383678 - RNA, 19 nt, Artificial Sequence
  Description of Artificial Sequence: Synthetic oligonucleotide
  Antisense Strand to SEQ ID NO: 383677
uugagacucagaguccuug

SEQ ID NO: 383679 - RNA, 19 nt, Artificial Sequence
  Description of Artificial Sequence: Synthetic oligonucleotide
  Sense Strand Starting at position 826 of SEQ ID NO: 316698
agucucaaucccgagaagu

SEQ ID NO: 383680 - RNA, 19 nt, Artificial Sequence
  Description of Artificial Sequence: Synthetic oligonucleotide
  Antisense Strand to SEQ ID NO: 383679
acuucucgggauugagacu

SEQ ID NO: 383681 - RNA, 19 nt, Artificial Sequence
  Description of Artificial Sequence: Synthetic oligonucleotide
  Sense Strand Starting at position 826 of SEQ ID NO: 316700
ucucaaucccgagaaguca

SEQ ID NO: 383682 - RNA, 19 nt, Artificial Sequence
  Description of Artificial Sequence: Synthetic oligonucleotide
  Antisense Strand to SEQ ID NO: 383681
ugacuucucgggauugaga

SEQ ID NO: 383683 - RNA, 19 nt, Artificial Sequence
  Description of Artificial Sequence: Synthetic oligonucleotide
  Sense Strand Starting at position 826 of SEQ ID NO: 316718
acuuuacaaucucucggaa

SEQ ID NO: 383684 - RNA, 19 nt, Artificial Sequence
  Description of Artificial Sequence: Synthetic oligonucleotide
  Antisense Strand to SEQ ID NO: 383683
uuccgagagauuguaaagu

SEQ ID NO: 383685 - RNA, 19 nt, Artificial Sequence
  Description of Artificial Sequence: Synthetic oligonucleotide
  Sense Strand Starting at position 826 of SEQ ID NO: 317219
gucccagagccuuaacaaa

SEQ ID NO: 383686 - RNA, 19 nt, Artificial Sequence
  Description of Artificial Sequence: Synthetic oligonucleotide
  Antisense Strand to SEQ ID NO: 383685
uuuguuaaggcucugggac

SEQ ID NO: 383687 - RNA, 19 nt, Artificial Sequence
  Description of Artificial Sequence: Synthetic oligonucleotide
  Sense Strand Starting at position 826 of SEQ ID NO: 317304
uuccuuucuugguuuagaa

SEQ ID NO: 383688 - RNA, 19 nt, Artificial Sequence
  Description of Artificial Sequence: Synthetic oligonucleotide
  Antisense Strand to SEQ ID NO: 383687
uucuaaaccaagaaaggaa

SEQ ID NO: 383689 - RNA, 19 nt, Artificial Sequence
  Description of Artificial Sequence: Synthetic oligonucleotide
  Sense Strand Starting at position 826 of SEQ ID NO: 317322
agcucuugacuccgagaca

SEQ ID NO: 383690 - RNA, 19 nt, Artificial Sequence
  Description of Artificial Sequence: Synthetic oligonucleotide
  Antisense Strand to SEQ ID NO: 383689
ugucucggagucaagagcu

SEQ ID NO: 383691 - RNA, 19 nt, Artificial Sequence
  Description of Artificial Sequence: Synthetic oligonucleotide
  Sense Strand Starting at position 826 of SEQ ID NO: 317325
ucuugacuccgagacacau

SEQ ID NO: 383692 - RNA, 19 nt, Artificial Sequence
  Description of Artificial Sequence: Synthetic oligonucleotide
  Antisense Strand to SEQ ID NO: 383691
augugucucggagucaaga

SEQ ID NO: 383693 - RNA, 19 nt, Artificial Sequence
  Description of Artificial Sequence: Synthetic oligonucleotide
  Sense Strand Starting at position 826 of SEQ ID NO: 317375
guagauagugaugaaguua

SEQ ID NO: 383694 - RNA, 19 nt, Artificial Sequence
  Description of Artificial Sequence: Synthetic oligonucleotide
  Antisense Strand to SEQ ID NO: 383693
uaacuucaucacuaucuac

SEQ ID NO: 383695 - RNA, 19 nt, Artificial Sequence
  Description of Artificial Sequence: Synthetic oligonucleotide
  Sense Strand Starting at position 826 of SEQ ID NO: 317470
ugauguagcggcuuuagca

SEQ ID NO: 383696 - RNA, 19 nt, Artificial Sequence
  Description of Artificial Sequence: Synthetic oligonucleotide
  Antisense Strand to SEQ ID NO: 383695
ugcuaaagccgcuacauca

SEQ ID NO: 383697 - RNA, 19 nt, Artificial Sequence
  Description of Artificial Sequence: Synthetic oligonucleotide
  Sense Strand Starting at position 826 of SEQ ID NO: 317477
gcggcuuuagcagugaacu

SEQ ID NO: 383698 - RNA, 19 nt, Artificial Sequence
  Description of Artificial Sequence: Synthetic oligonucleotide
  Antisense Strand to SEQ ID NO: 383697
aguucacugcuaaagccgc

SEQ ID NO: 383699 - RNA, 19 nt, Artificial Sequence
  Description of Artificial Sequence: Synthetic oligonucleotide
  Sense Strand Starting at position 826 of SEQ ID NO: 317479
ggcuuuagcagugaacuca

SEQ ID NO: 383700 - RNA, 19 nt, Artificial Sequence
  Description of Artificial Sequence: Synthetic oligonucleotide
  Antisense Strand to SEQ ID NO: 383699
ugaguucacugcuaaagcc

SEQ ID NO: 383701 - RNA, 19 nt, Artificial Sequence
  Description of Artificial Sequence: Synthetic oligonucleotide
  Sense Strand Starting at position 826 of SEQ ID NO: 317501
aagucuuugcuuuggaaua

SEQ ID NO: 383702 - RNA, 19 nt, Artificial Sequence
  Description of Artificial Sequence: Synthetic oligonucleotide
  Antisense Strand to SEQ ID NO: 383701
uauuccaaagcaaagacuu

SEQ ID NO: 383703 - RNA, 19 nt, Artificial Sequence
  Description of Artificial Sequence: Synthetic oligonucleotide
  Sense Strand Starting at position 826 of SEQ ID NO: 317527
uccuauucccguuaaugag

SEQ ID NO: 383704 - RNA, 19 nt, Artificial Sequence
  Description of Artificial Sequence: Synthetic oligonucleotide
  Antisense Strand to SEQ ID NO: 383703
cucauuaacgggaauagga

SEQ ID NO: 383705 - RNA, 19 nt, Artificial Sequence
  Description of Artificial Sequence: Synthetic oligonucleotide
  Sense Strand Starting at position 826 of SEQ ID NO: 317551
agaaauggccucuauucua

SEQ ID NO: 383706 - RNA, 19 nt, Artificial Sequence
  Description of Artificial Sequence: Synthetic oligonucleotide
  Antisense Strand to SEQ ID NO: 383705
uagaauagaggccauuucu

SEQ ID NO: 383707 - RNA, 19 nt, Artificial Sequence
  Description of Artificial Sequence: Synthetic oligonucleotide
  Sense Strand Starting at position 826 of SEQ ID NO: 317920
uguggagagacuugaguua

SEQ ID NO: 383708 - RNA, 19 nt, Artificial Sequence
  Description of Artificial Sequence: Synthetic oligonucleotide
  Antisense Strand to SEQ ID NO: 383707
uaacucaagucucuccaca

SEQ ID NO: 383709 - RNA, 19 nt, Artificial Sequence
  Description of Artificial Sequence: Synthetic oligonucleotide
  Sense Strand Starting at position 826 of SEQ ID NO: 317943
aggacuggguuuccuuaau

SEQ ID NO: 383710 - RNA, 19 nt, Artificial Sequence
  Description of Artificial Sequence: Synthetic oligonucleotide
  Antisense Strand to SEQ ID NO: 383709
auuaaggaaacccaguccu

SEQ ID NO: 383711 - RNA, 19 nt, Artificial Sequence
  Description of Artificial Sequence: Synthetic oligonucleotide
  Sense Strand Starting at position 826 of SEQ ID NO: 317949
ggguuuccuuaauccacaa

SEQ ID NO: 383712 - RNA, 19 nt, Artificial Sequence
  Description of Artificial Sequence: Synthetic oligonucleotide
  Antisense Strand to SEQ ID NO: 383711
uuguggauuaaggaaaccc

SEQ ID NO: 383713 - RNA, 19 nt, Artificial Sequence
  Description of Artificial Sequence: Synthetic oligonucleotide
  Sense Strand Starting at position 826 of SEQ ID NO: 318012
ccuggaucccaggguucua

SEQ ID NO: 383714 - RNA, 19 nt, Artificial Sequence
  Description of Artificial Sequence: Synthetic oligonucleotide
  Antisense Strand to SEQ ID NO: 383713
uagaacccugggauccagg

SEQ ID NO: 383715 - RNA, 19 nt, Artificial Sequence
  Description of Artificial Sequence: Synthetic oligonucleotide
  Sense Strand Starting at position 826 of SEQ ID NO: 318022
aggguucuagcugaguaau

SEQ ID NO: 383716 - RNA, 19 nt, Artificial Sequence
  Description of Artificial Sequence: Synthetic oligonucleotide
  Antisense Strand to SEQ ID NO: 383715
auuacucagcuagaacccu

SEQ ID NO: 383717 - RNA, 19 nt, Artificial Sequence
  Description of Artificial Sequence: Synthetic oligonucleotide
  Sense Strand Starting at position 826 of SEQ ID NO: 318025
guucuagcugaguaaucau

SEQ ID NO: 383718 - RNA, 19 nt, Artificial Sequence
  Description of Artificial Sequence: Synthetic oligonucleotide
  Antisense Strand to SEQ ID NO: 383717
augauuacucagcuagaac

SEQ ID NO: 383719 - RNA, 19 nt, Artificial Sequence
  Description of Artificial Sequence: Synthetic oligonucleotide
  Sense Strand Starting at position 826 of SEQ ID NO: 318083
gguggcaggcaguauuaau

SEQ ID NO: 383720 - RNA, 19 nt, Artificial Sequence
  Description of Artificial Sequence: Synthetic oligonucleotide
  Antisense Strand to SEQ ID NO: 383719
auuaauacugccugccacc

SEQ ID NO: 383721 - RNA, 19 nt, Artificial Sequence
  Description of Artificial Sequence: Synthetic oligonucleotide
  Sense Strand Starting at position 826 of SEQ ID NO: 318154
agacgacucaggugagaau

SEQ ID NO: 383722 - RNA, 19 nt, Artificial Sequence
  Description of Artificial Sequence: Synthetic oligonucleotide
  Antisense Strand to SEQ ID NO: 383721
auucucaccugagucgucu

SEQ ID NO: 383723 - RNA, 19 nt, Artificial Sequence
  Description of Artificial Sequence: Synthetic oligonucleotide
  Sense Strand Starting at position 826 of SEQ ID NO: 318165
gugagaaugaagugaccuu

SEQ ID NO: 383724 - RNA, 19 nt, Artificial Sequence
  Description of Artificial Sequence: Synthetic oligonucleotide
  Antisense Strand to SEQ ID NO: 383723
aaggucacuucauucucac

SEQ ID NO: 383725 - RNA, 19 nt, Artificial Sequence
  Description of Artificial Sequence: Synthetic oligonucleotide
  Sense Strand Starting at position 826 of SEQ ID NO: 318226
aaaugagagcacuggucaa

SEQ ID NO: 383726 - RNA, 19 nt, Artificial Sequence
  Description of Artificial Sequence: Synthetic oligonucleotide
  Antisense Strand to SEQ ID NO: 383725
uugaccagugcucucauuu

SEQ ID NO: 383727 - RNA, 19 nt, Artificial Sequence
  Description of Artificial Sequence: Synthetic oligonucleotide
  Sense Strand Starting at position 826 of SEQ ID NO: 318239
ggucaagauagcuaauguc

SEQ ID NO: 383728 - RNA, 19 nt, Artificial Sequence
  Description of Artificial Sequence: Synthetic oligonucleotide
  Antisense Strand to SEQ ID NO: 383727
gacauuagcuaucuugacc

SEQ ID NO: 383729 - RNA, 19 nt, Artificial Sequence
  Description of Artificial Sequence: Synthetic oligonucleotide
  Sense Strand Starting at position 826 of SEQ ID NO: 318289
guauaaucugugcaaucug

SEQ ID NO: 383730 - RNA, 19 nt, Artificial Sequence
  Description of Artificial Sequence: Synthetic oligonucleotide
  Antisense Strand to SEQ ID NO: 383729
cagauugcacagauuauac

SEQ ID NO: 383731 - RNA, 19 nt, Artificial Sequence
  Description of Artificial Sequence: Synthetic oligonucleotide
  Sense Strand Starting at position 826 of SEQ ID NO: 318701
auuucucauugugugcaga

SEQ ID NO: 383732 - RNA, 19 nt, Artificial Sequence
  Description of Artificial Sequence: Synthetic oligonucleotide
  Antisense Strand to SEQ ID NO: 383731
ucugcacacaaugagaaau

SEQ ID NO: 383733 - RNA, 19 nt, Artificial Sequence
  Description of Artificial Sequence: Synthetic oligonucleotide
  Sense Strand Starting at position 826 of SEQ ID NO: 318790
gagcuucggccagggagaa

SEQ ID NO: 383734 - RNA, 19 nt, Artificial Sequence
  Description of Artificial Sequence: Synthetic oligonucleotide
  Antisense Strand to SEQ ID NO: 383733
uucucccuggccgaagcuc

SEQ ID NO: 383735 - RNA, 19 nt, Artificial Sequence
  Description of Artificial Sequence: Synthetic oligonucleotide
  Sense Strand Starting at position 826 of SEQ ID NO: 318958
uaauacuugggagaucguu

SEQ ID NO: 383736 - RNA, 19 nt, Artificial Sequence
  Description of Artificial Sequence: Synthetic oligonucleotide
  Antisense Strand to SEQ ID NO: 383735
aacgaucucccaaguauua

SEQ ID NO: 383737 - RNA, 19 nt, Artificial Sequence
  Description of Artificial Sequence: Synthetic oligonucleotide
  Sense Strand Starting at position 826 of SEQ ID NO: 319007
cagaaugaguucuccagga

SEQ ID NO: 383738 - RNA, 19 nt, Artificial Sequence
  Description of Artificial Sequence: Synthetic oligonucleotide
  Antisense Strand to SEQ ID NO: 383737
uccuggagaacucauucug

SEQ ID NO: 383739 - RNA, 19 nt, Artificial Sequence
  Description of Artificial Sequence: Synthetic oligonucleotide
  Sense Strand Starting at position 826 of SEQ ID NO: 319012
ugaguucuccaggaagcaa

SEQ ID NO: 383740 - RNA, 19 nt, Artificial Sequence
  Description of Artificial Sequence: Synthetic oligonucleotide
  Antisense Strand to SEQ ID NO: 383739
uugcuuccuggagaacuca

SEQ ID NO: 383741 - RNA, 19 nt, Artificial Sequence
  Description of Artificial Sequence: Synthetic oligonucleotide
  Sense Strand Starting at position 826 of SEQ ID NO: 319042
auacuucucagagaguggu

SEQ ID NO: 383742 - RNA, 19 nt, Artificial Sequence
  Description of Artificial Sequence: Synthetic oligonucleotide
  Antisense Strand to SEQ ID NO: 383741
accacucucugagaaguau

SEQ ID NO: 383743 - RNA, 19 nt, Artificial Sequence
  Description of Artificial Sequence: Synthetic oligonucleotide
  Sense Strand Starting at position 826 of SEQ ID NO: 319155
ucuauaucccuguaucugu

SEQ ID NO: 383744 - RNA, 19 nt, Artificial Sequence
  Description of Artificial Sequence: Synthetic oligonucleotide
  Antisense Strand to SEQ ID NO: 383743
acagauacagggauauaga

SEQ ID NO: 383745 - RNA, 19 nt, Artificial Sequence
  Description of Artificial Sequence: Synthetic oligonucleotide
  Sense Strand Starting at position 827 of SEQ ID NO: 317359
cagcuaucucggcaaagug

SEQ ID NO: 383746 - RNA, 19 nt, Artificial Sequence
  Description of Artificial Sequence: Synthetic oligonucleotide
  Antisense Strand to SEQ ID NO: 383745
cacuuugccgagauagcug

SEQ ID NO: 383747 - RNA, 19 nt, Artificial Sequence
  Description of Artificial Sequence: Synthetic oligonucleotide
  Sense Strand Starting at position 827 of SEQ ID NO: 317528
gaacgccugucauugcaga

SEQ ID NO: 383748 - RNA, 19 nt, Artificial Sequence
  Description of Artificial Sequence: Synthetic oligonucleotide
  Antisense Strand to SEQ ID NO: 383747
ucugcaaugacaggcguuc

SEQ ID NO: 383749 - RNA, 19 nt, Artificial Sequence
  Description of Artificial Sequence: Synthetic oligonucleotide
  Sense Strand Starting at position 827 of SEQ ID NO: 317586
ggaaccugcuauuccaaga

SEQ ID NO: 383750 - RNA, 19 nt, Artificial Sequence
  Description of Artificial Sequence: Synthetic oligonucleotide
  Antisense Strand to SEQ ID NO: 383749
ucuuggaauagcagguucc

SEQ ID NO: 383751 - RNA, 19 nt, Artificial Sequence
  Description of Artificial Sequence: Synthetic oligonucleotide
  Sense Strand Starting at position 827 of SEQ ID NO: 317651
cucuguuucgcccuucuua

SEQ ID NO: 383752 - RNA, 19 nt, Artificial Sequence
  Description of Artificial Sequence: Synthetic oligonucleotide
  Antisense Strand to SEQ ID NO: 383751
uaagaagggcgaaacagag

SEQ ID NO: 383753 - RNA, 19 nt, Artificial Sequence
  Description of Artificial Sequence: Synthetic oligonucleotide
  Sense Strand Starting at position 827 of SEQ ID NO: 317749
acaucaacgugagaauuuc

SEQ ID NO: 383754 - RNA, 19 nt, Artificial Sequence
  Description of Artificial Sequence: Synthetic oligonucleotide
  Antisense Strand to SEQ ID NO: 383753
gaaauucucacguugaugu

SEQ ID NO: 383755 - RNA, 19 nt, Artificial Sequence
  Description of Artificial Sequence: Synthetic oligonucleotide
  Sense Strand Starting at position 827 of SEQ ID NO: 317773
uagucuugugaagauauua

SEQ ID NO: 383756 - RNA, 19 nt, Artificial Sequence
  Description of Artificial Sequence: Synthetic oligonucleotide
  Antisense Strand to SEQ ID NO: 383755
uaauaucuucacaagacua

SEQ ID NO: 383757 - RNA, 19 nt, Artificial Sequence
  Description of Artificial Sequence: Synthetic oligonucleotide
  Sense Strand Starting at position 827 of SEQ ID NO: 317784
agauauuacuaguccauau

SEQ ID NO: 383758 - RNA, 19 nt, Artificial Sequence
  Description of Artificial Sequence: Synthetic oligonucleotide
  Antisense Strand to SEQ ID NO: 383757
auauggacuaguaauaucu

SEQ ID NO: 383759 - RNA, 19 nt, Artificial Sequence
  Description of Artificial Sequence: Synthetic oligonucleotide
  Sense Strand Starting at position 827 of SEQ ID NO: 317788
auuacuaguccauauugca

SEQ ID NO: 383760 - RNA, 19 nt, Artificial Sequence
  Description of Artificial Sequence: Synthetic oligonucleotide
  Antisense Strand to SEQ ID NO: 383759
ugcaauauggacuaguaau

SEQ ID NO: 383761 - RNA, 19 nt, Artificial Sequence
  Description of Artificial Sequence: Synthetic oligonucleotide
  Sense Strand Starting at position 827 of SEQ ID NO: 317816
agcucaaauuugucgucau

SEQ ID NO: 383762 - RNA, 19 nt, Artificial Sequence
  Description of Artificial Sequence: Synthetic oligonucleotide
  Antisense Strand to SEQ ID NO: 383761
augacgacaaauuugagcu

SEQ ID NO: 383763 - RNA, 19 nt, Artificial Sequence
  Description of Artificial Sequence: Synthetic oligonucleotide
  Sense Strand Starting at position 827 of SEQ ID NO: 317890
auuuaaagaucagaagcua

SEQ ID NO: 383764 - RNA, 19 nt, Artificial Sequence
  Description of Artificial Sequence: Synthetic oligonucleotide
  Antisense Strand to SEQ ID NO: 383763
uagcuucugaucuuuaaau

SEQ ID NO: 383765 - RNA, 19 nt, Artificial Sequence
  Description of Artificial Sequence: Synthetic oligonucleotide
  Sense Strand Starting at position 827 of SEQ ID NO: 317971
cauuuauauugauagacgu

SEQ ID NO: 383766 - RNA, 19 nt, Artificial Sequence
  Description of Artificial Sequence: Synthetic oligonucleotide
  Antisense Strand to SEQ ID NO: 383765
acgucuaucaauauaaaug

SEQ ID NO: 383767 - RNA, 19 nt, Artificial Sequence
  Description of Artificial Sequence: Synthetic oligonucleotide
  Sense Strand Starting at position 827 of SEQ ID NO: 318010
aagugacuaagguaugguu

SEQ ID NO: 383768 - RNA, 19 nt, Artificial Sequence
  Description of Artificial Sequence: Synthetic oligonucleotide
  Antisense Strand to SEQ ID NO: 383767
aaccauaccuuagucacuu

SEQ ID NO: 383769 - RNA, 19 nt, Artificial Sequence
  Description of Artificial Sequence: Synthetic oligonucleotide
  Sense Strand Starting at position 827 of SEQ ID NO: 318079
aguuaaagugauuaguuac

SEQ ID NO: 383770 - RNA, 19 nt, Artificial Sequence
  Description of Artificial Sequence: Synthetic oligonucleotide
  Antisense Strand to SEQ ID NO: 383769
guaacuaaucacuuuaacu

SEQ ID NO: 383771 - RNA, 19 nt, Artificial Sequence
  Description of Artificial Sequence: Synthetic oligonucleotide
  Sense Strand Starting at position 827 of SEQ ID NO: 318170
ucuugccuugaauguaaau

SEQ ID NO: 383772 - RNA, 19 nt, Artificial Sequence
  Description of Artificial Sequence: Synthetic oligonucleotide
  Antisense Strand to SEQ ID NO: 383771
auuuacauucaaggcaaga

SEQ ID NO: 383773 - RNA, 19 nt, Artificial Sequence
  Description of Artificial Sequence: Synthetic oligonucleotide
  Sense Strand Starting at position 827 of SEQ ID NO: 318218
gagcaaguuuaauuggaaa

SEQ ID NO: 383774 - RNA, 19 nt, Artificial Sequence
  Description of Artificial Sequence: Synthetic oligonucleotide
  Antisense Strand to SEQ ID NO: 383773
uuuccaauuaaacuugcuc

SEQ ID NO: 383775 - RNA, 19 nt, Artificial Sequence
  Description of Artificial Sequence: Synthetic oligonucleotide
  Sense Strand Starting at position 827 of SEQ ID NO: 318296
cuagcacuucuugacaagu

SEQ ID NO: 383776 - RNA, 19 nt, Artificial Sequence
  Description of Artificial Sequence: Synthetic oligonucleotide
  Antisense Strand to SEQ ID NO: 383775
acuugucaagaagugcuag

SEQ ID NO: 383777 - RNA, 19 nt, Artificial Sequence
  Description of Artificial Sequence: Synthetic oligonucleotide
  Sense Strand Starting at position 827 of SEQ ID NO: 318305
cuugacaaguuacuaguua

SEQ ID NO: 383778 - RNA, 19 nt, Artificial Sequence
  Description of Artificial Sequence: Synthetic oligonucleotide
  Antisense Strand to SEQ ID NO: 383777
uaacuaguaacuugucaag

SEQ ID NO: 383779 - RNA, 19 nt, Artificial Sequence
  Description of Artificial Sequence: Synthetic oligonucleotide
  Sense Strand Starting at position 827 of SEQ ID NO: 318309
acaaguuacuaguuaaugu

SEQ ID NO: 383780 - RNA, 19 nt, Artificial Sequence
  Description of Artificial Sequence: Synthetic oligonucleotide
  Antisense Strand to SEQ ID NO: 383779
acauuaacuaguaacuugu

SEQ ID NO: 383781 - RNA, 19 nt, Artificial Sequence
  Description of Artificial Sequence: Synthetic oligonucleotide
  Sense Strand Starting at position 827 of SEQ ID NO: 318438
acaugauaguguucccuua

SEQ ID NO: 383782 - RNA, 19 nt, Artificial Sequence
  Description of Artificial Sequence: Synthetic oligonucleotide
  Antisense Strand to SEQ ID NO: 383781
uaagggaacacuaucaugu

SEQ ID NO: 383783 - RNA, 19 nt, Artificial Sequence
  Description of Artificial Sequence: Synthetic oligonucleotide
  Sense Strand Starting at position 827 of SEQ ID NO: 318440
augauaguguucccuuaaa

SEQ ID NO: 383784 - RNA, 19 nt, Artificial Sequence
  Description of Artificial Sequence: Synthetic oligonucleotide
  Antisense Strand to SEQ ID NO: 383783
uuuaagggaacacuaucau

SEQ ID NO: 383785 - RNA, 19 nt, Artificial Sequence
  Description of Artificial Sequence: Synthetic oligonucleotide
  Sense Strand Starting at position 827 of SEQ ID NO: 318518
agauccagaugguucuuua

SEQ ID NO: 383786 - RNA, 19 nt, Artificial Sequence
  Description of Artificial Sequence: Synthetic oligonucleotide
  Antisense Strand to SEQ ID NO: 383785
uaaagaaccaucuggaucu

SEQ ID NO: 383787 - RNA, 19 nt, Artificial Sequence
  Description of Artificial Sequence: Synthetic oligonucleotide
  Sense Strand Starting at position 827 of SEQ ID NO: 318521
uccagaugguucuuuagag

SEQ ID NO: 383788 - RNA, 19 nt, Artificial Sequence
  Description of Artificial Sequence: Synthetic oligonucleotide
  Antisense Strand to SEQ ID NO: 383787
cucuaaagaaccaucugga

SEQ ID NO: 383789 - RNA, 19 nt, Artificial Sequence
  Description of Artificial Sequence: Synthetic oligonucleotide
  Sense Strand Starting at position 827 of SEQ ID NO: 318556
gagcauaucuuagcacaug

SEQ ID NO: 383790 - RNA, 19 nt, Artificial Sequence
  Description of Artificial Sequence: Synthetic oligonucleotide
  Antisense Strand to SEQ ID NO: 383789
caugugcuaagauaugcuc

SEQ ID NO: 383791 - RNA, 19 nt, Artificial Sequence
  Description of Artificial Sequence: Synthetic oligonucleotide
  Sense Strand Starting at position 827 of SEQ ID NO: 318575
guaugaauacacuggguuu

SEQ ID NO: 383792 - RNA, 19 nt, Artificial Sequence
  Description of Artificial Sequence: Synthetic oligonucleotide
  Antisense Strand to SEQ ID NO: 383791
aaacccaguguauucauac

SEQ ID NO: 383793 - RNA, 19 nt, Artificial Sequence
  Description of Artificial Sequence: Synthetic oligonucleotide
  Sense Strand Starting at position 827 of SEQ ID NO: 318592
uuugaauuguagucaauug

SEQ ID NO: 383794 - RNA, 19 nt, Artificial Sequence
  Description of Artificial Sequence: Synthetic oligonucleotide
  Antisense Strand to SEQ ID NO: 383793
caauugacuacaauucaaa

SEQ ID NO: 383795 - RNA, 19 nt, Artificial Sequence
  Description of Artificial Sequence: Synthetic oligonucleotide
  Sense Strand Starting at position 827 of SEQ ID NO: 318650
ucaaguaaacagugugaau

SEQ ID NO: 383796 - RNA, 19 nt, Artificial Sequence
  Description of Artificial Sequence: Synthetic oligonucleotide
  Antisense Strand to SEQ ID NO: 383795
auucacacuguuuacuuga

SEQ ID NO: 383797 - RNA, 19 nt, Artificial Sequence
  Description of Artificial Sequence: Synthetic oligonucleotide
  Sense Strand Starting at position 827 of SEQ ID NO: 318652
aaguaaacagugugaauga

SEQ ID NO: 383798 - RNA, 19 nt, Artificial Sequence
  Description of Artificial Sequence: Synthetic oligonucleotide
  Antisense Strand to SEQ ID NO: 383797
ucauucacacuguuuacuu

SEQ ID NO: 383799 - RNA, 19 nt, Artificial Sequence
  Description of Artificial Sequence: Synthetic oligonucleotide
  Sense Strand Starting at position 827 of SEQ ID NO: 318665
gaaugagguugucuugaaa

SEQ ID NO: 383800 - RNA, 19 nt, Artificial Sequence
  Description of Artificial Sequence: Synthetic oligonucleotide
  Antisense Strand to SEQ ID NO: 383799
uuucaagacaaccucauuc

SEQ ID NO: 383801 - RNA, 19 nt, Artificial Sequence
  Description of Artificial Sequence: Synthetic oligonucleotide
  Sense Strand Starting at position 827 of SEQ ID NO: 318715
cugauuauaugagucuaug

SEQ ID NO: 383802 - RNA, 19 nt, Artificial Sequence
  Description of Artificial Sequence: Synthetic oligonucleotide
  Antisense Strand to SEQ ID NO: 383801
cauagacucauauaaucag

SEQ ID NO: 383803 - RNA, 19 nt, Artificial Sequence
  Description of Artificial Sequence: Synthetic oligonucleotide
  Sense Strand Starting at position 827 of SEQ ID NO: 318729
cuaugauucugagccuuaa

SEQ ID NO: 383804 - RNA, 19 nt, Artificial Sequence
  Description of Artificial Sequence: Synthetic oligonucleotide
  Antisense Strand to SEQ ID NO: 383803
uuaaggcucagaaucauag

SEQ ID NO: 383805 - RNA, 19 nt, Artificial Sequence
  Description of Artificial Sequence: Synthetic oligonucleotide
  Sense Strand Starting at position 827 of SEQ ID NO: 318749
augaaacauuuguguauug

SEQ ID NO: 383806 - RNA, 19 nt, Artificial Sequence
  Description of Artificial Sequence: Synthetic oligonucleotide
  Antisense Strand to SEQ ID NO: 383805
caauacacaaauguuucau

SEQ ID NO: 383807 - RNA, 19 nt, Artificial Sequence
  Description of Artificial Sequence: Synthetic oligonucleotide
  Sense Strand Starting at position 827 of SEQ ID NO: 318758
uuguguauuguuugauuag

SEQ ID NO: 383808 - RNA, 19 nt, Artificial Sequence
  Description of Artificial Sequence: Synthetic oligonucleotide
  Antisense Strand to SEQ ID NO: 383807
cuaaucaaacaauacacaa

SEQ ID NO: 383809 - RNA, 19 nt, Artificial Sequence
  Description of Artificial Sequence: Synthetic oligonucleotide
  Sense Strand Starting at position 827 of SEQ ID NO: 318767
guuugauuaguaugguccu

SEQ ID NO: 383810 - RNA, 19 nt, Artificial Sequence
  Description of Artificial Sequence: Synthetic oligonucleotide
  Antisense Strand to SEQ ID NO: 383809
aggaccauacuaaucaaac

SEQ ID NO: 383811 - RNA, 19 nt, Artificial Sequence
  Description of Artificial Sequence: Synthetic oligonucleotide
  Sense Strand Starting at position 827 of SEQ ID NO: 318788
gugggaugauugucuauua

SEQ ID NO: 383812 - RNA, 19 nt, Artificial Sequence
  Description of Artificial Sequence: Synthetic oligonucleotide
  Antisense Strand to SEQ ID NO: 383811
uaauagacaaucaucccac

SEQ ID NO: 383813 - RNA, 19 nt, Artificial Sequence
  Description of Artificial Sequence: Synthetic oligonucleotide
  Sense Strand Starting at position 827 of SEQ ID NO: 318789
ugggaugauugucuauuaa

SEQ ID NO: 383814 - RNA, 19 nt, Artificial Sequence
  Description of Artificial Sequence: Synthetic oligonucleotide
  Antisense Strand to SEQ ID NO: 383813
uuaauagacaaucauccca

SEQ ID NO: 383815 - RNA, 19 nt, Artificial Sequence
  Description of Artificial Sequence: Synthetic oligonucleotide
  Sense Strand Starting at position 827 of SEQ ID NO: 318796
auugucuauuaagagagaa

SEQ ID NO: 383816 - RNA, 19 nt, Artificial Sequence
  Description of Artificial Sequence: Synthetic oligonucleotide
  Antisense Strand to SEQ ID NO: 383815
uucucucuuaauagacaau

SEQ ID NO: 383817 - RNA, 19 nt, Artificial Sequence
  Description of Artificial Sequence: Synthetic oligonucleotide
  Sense Strand Starting at position 827 of SEQ ID NO: 318847
ggguacucaauaggucuua

SEQ ID NO: 383818 - RNA, 19 nt, Artificial Sequence
  Description of Artificial Sequence: Synthetic oligonucleotide
  Antisense Strand to SEQ ID NO: 383817
uaagaccuauugaguaccc

SEQ ID NO: 383819 - RNA, 19 nt, Artificial Sequence
  Description of Artificial Sequence: Synthetic oligonucleotide
  Sense Strand Starting at position 827 of SEQ ID NO: 318848
gguacucaauaggucuuaa

SEQ ID NO: 383820 - RNA, 19 nt, Artificial Sequence
  Description of Artificial Sequence: Synthetic oligonucleotide
  Antisense Strand to SEQ ID NO: 383819
uuaagaccuauugaguacc

SEQ ID NO: 383821 - RNA, 19 nt, Artificial Sequence
  Description of Artificial Sequence: Synthetic oligonucleotide
  Sense Strand Starting at position 827 of SEQ ID NO: 318919
cucagaaguuuguugcaaa

SEQ ID NO: 383822 - RNA, 19 nt, Artificial Sequence
  Description of Artificial Sequence: Synthetic oligonucleotide
  Antisense Strand to SEQ ID NO: 383821
uuugcaacaaacuucugag

SEQ ID NO: 383823 - RNA, 19 nt, Artificial Sequence
  Description of Artificial Sequence: Synthetic oligonucleotide
  Sense Strand Starting at position 827 of SEQ ID NO: 318987
accauuaaguacuugcaga

SEQ ID NO: 383824 - RNA, 19 nt, Artificial Sequence
  Description of Artificial Sequence: Synthetic oligonucleotide
  Antisense Strand to SEQ ID NO: 383823
ucugcaaguacuuaauggu

SEQ ID NO: 383825 - RNA, 19 nt, Artificial Sequence
  Description of Artificial Sequence: Synthetic oligonucleotide
  Sense Strand Starting at position 828 of SEQ ID NO: 315248
gugcaaagucugcauuaca

SEQ ID NO: 383826 - RNA, 19 nt, Artificial Sequence
  Description of Artificial Sequence: Synthetic oligonucleotide
  Antisense Strand to SEQ ID NO: 383825
uguaaugcagacuuugcac

SEQ ID NO: 383827 - RNA, 19 nt, Artificial Sequence
  Description of Artificial Sequence: Synthetic oligonucleotide
  Sense Strand Starting at position 828 of SEQ ID NO: 315343
cuuccugucuggucagaca

SEQ ID NO: 383828 - RNA, 19 nt, Artificial Sequence
  Description of Artificial Sequence: Synthetic oligonucleotide
  Antisense Strand to SEQ ID NO: 383827
ugucugaccagacaggaag

SEQ ID NO: 383829 - RNA, 19 nt, Artificial Sequence
  Description of Artificial Sequence: Synthetic oligonucleotide
  Sense Strand Starting at position 828 of SEQ ID NO: 315440
uugugcuaagaauaaaucu

SEQ ID NO: 383830 - RNA, 19 nt, Artificial Sequence
  Description of Artificial Sequence: Synthetic oligonucleotide
  Antisense Strand to SEQ ID NO: 383829
agauuuauucuuagcacaa

SEQ ID NO: 383831 - RNA, 19 nt, Artificial Sequence
  Description of Artificial Sequence: Synthetic oligonucleotide
  Sense Strand Starting at position 828 of SEQ ID NO: 315455
aucugagaagacuguuaua

SEQ ID NO: 383832 - RNA, 19 nt, Artificial Sequence
  Description of Artificial Sequence: Synthetic oligonucleotide
  Antisense Strand to SEQ ID NO: 383831
uauaacagucuucucagau

SEQ ID NO: 383833 - RNA, 19 nt, Artificial Sequence
  Description of Artificial Sequence: Synthetic oligonucleotide
  Sense Strand Starting at position 828 of SEQ ID NO: 315769
gauaguggauguuuccaua

SEQ ID NO: 383834 - RNA, 19 nt, Artificial Sequence
  Description of Artificial Sequence: Synthetic oligonucleotide
  Antisense Strand to SEQ ID NO: 383833
uauggaaacauccacuauc

SEQ ID NO: 383835 - RNA, 19 nt, Artificial Sequence
  Description of Artificial Sequence: Synthetic oligonucleotide
  Sense Strand Starting at position 828 of SEQ ID NO: 315816
auaguaauuguacagcaaa

SEQ ID NO: 383836 - RNA, 19 nt, Artificial Sequence
  Description of Artificial Sequence: Synthetic oligonucleotide
  Antisense Strand to SEQ ID NO: 383835
uuugcuguacaauuacuau

SEQ ID NO: 383837 - RNA, 19 nt, Artificial Sequence
  Description of Artificial Sequence: Synthetic oligonucleotide
  Sense Strand Starting at position 828 of SEQ ID NO: 316002
guuugaaugacugaacugu

SEQ ID NO: 383838 - RNA, 19 nt, Artificial Sequence
  Description of Artificial Sequence: Synthetic oligonucleotide
  Antisense Strand to SEQ ID NO: 383837
acaguucagucauucaaac

SEQ ID NO: 383839 - RNA, 19 nt, Artificial Sequence
  Description of Artificial Sequence: Synthetic oligonucleotide
  Sense Strand Starting at position 828 of SEQ ID NO: 316008
augacugaacugugcugaa

SEQ ID NO: 383840 - RNA, 19 nt, Artificial Sequence
  Description of Artificial Sequence: Synthetic oligonucleotide
  Antisense Strand to SEQ ID NO: 383839
uucagcacaguucagucau

SEQ ID NO: 383841 - RNA, 19 nt, Artificial Sequence
  Description of Artificial Sequence: Synthetic oligonucleotide
  Sense Strand Starting at position 828 of SEQ ID NO: 316344
acauguaugcaugguauaa

SEQ ID NO: 383842 - RNA, 19 nt, Artificial Sequence
  Description of Artificial Sequence: Synthetic oligonucleotide
  Antisense Strand to SEQ ID NO: 383841
uuauaccaugcauacaugu

SEQ ID NO: 383843 - RNA, 19 nt, Artificial Sequence
  Description of Artificial Sequence: Synthetic oligonucleotide
  Sense Strand Starting at position 828 of SEQ ID NO: 316355
ugguauaagcuuugauaua

SEQ ID NO: 383844 - RNA, 19 nt, Artificial Sequence
  Description of Artificial Sequence: Synthetic oligonucleotide
  Antisense Strand to SEQ ID NO: 383843
uauaucaaagcuuauacca

SEQ ID NO: 383845 - RNA, 19 nt, Artificial Sequence
  Description of Artificial Sequence: Synthetic oligonucleotide
  Sense Strand Starting at position 828 of SEQ ID NO: 316367
ugauauacugauggcgauu

SEQ ID NO: 383846 - RNA, 19 nt, Artificial Sequence
  Description of Artificial Sequence: Synthetic oligonucleotide
  Antisense Strand to SEQ ID NO: 383845
aaucgccaucaguauauca

SEQ ID NO: 383847 - RNA, 19 nt, Artificial Sequence
  Description of Artificial Sequence: Synthetic oligonucleotide
  Sense Strand Starting at position 828 of SEQ ID NO: 316648
uugagaucagccuguauua

SEQ ID NO: 383848 - RNA, 19 nt, Artificial Sequence
  Description of Artificial Sequence: Synthetic oligonucleotide
  Antisense Strand to SEQ ID NO: 383847
uaauacaggcugaucucaa

SEQ ID NO: 383849 - RNA, 19 nt, Artificial Sequence
  Description of Artificial Sequence: Synthetic oligonucleotide
  Sense Strand Starting at position 828 of SEQ ID NO: 316650
gagaucagccuguauuaug

SEQ ID NO: 383850 - RNA, 19 nt, Artificial Sequence
  Description of Artificial Sequence: Synthetic oligonucleotide
  Antisense Strand to SEQ ID NO: 383849
cauaauacaggcugaucuc

SEQ ID NO: 383851 - RNA, 19 nt, Artificial Sequence
  Description of Artificial Sequence: Synthetic oligonucleotide
  Sense Strand Starting at position 828 of SEQ ID NO: 316658
ccuguauuaugagcucaag

SEQ ID NO: 383852 - RNA, 19 nt, Artificial Sequence
  Description of Artificial Sequence: Synthetic oligonucleotide
  Antisense Strand to SEQ ID NO: 383851
cuugagcucauaauacagg

SEQ ID NO: 383853 - RNA, 19 nt, Artificial Sequence
  Description of Artificial Sequence: Synthetic oligonucleotide
  Sense Strand Starting at position 828 of SEQ ID NO: 316661
guauuaugagcucaaguug

SEQ ID NO: 383854 - RNA, 19 nt, Artificial Sequence
  Description of Artificial Sequence: Synthetic oligonucleotide
  Antisense Strand to SEQ ID NO: 383853
caacuugagcucauaauac

SEQ ID NO: 383855 - RNA, 19 nt, Artificial Sequence
  Description of Artificial Sequence: Synthetic oligonucleotide
  Sense Strand Starting at position 828 of SEQ ID NO: 316670
gcucaaguuguuuauggau

SEQ ID NO: 383856 - RNA, 19 nt, Artificial Sequence
  Description of Artificial Sequence: Synthetic oligonucleotide
  Antisense Strand to SEQ ID NO: 383855
auccauaaacaacuugagc

SEQ ID NO: 383857 - RNA, 19 nt, Artificial Sequence
  Description of Artificial Sequence: Synthetic oligonucleotide
  Sense Strand Starting at position 828 of SEQ ID NO: 316784
ccuuauuaguacccagaag

SEQ ID NO: 383858 - RNA, 19 nt, Artificial Sequence
  Description of Artificial Sequence: Synthetic oligonucleotide
  Antisense Strand to SEQ ID NO: 383857
cuucuggguacuaauaagg

SEQ ID NO: 383859 - RNA, 19 nt, Artificial Sequence
  Description of Artificial Sequence: Synthetic oligonucleotide
  Sense Strand Starting at position 828 of SEQ ID NO: 316929
uuaggauaacucuaugcuu

SEQ ID NO: 383860 - RNA, 19 nt, Artificial Sequence
  Description of Artificial Sequence: Synthetic oligonucleotide
  Antisense Strand to SEQ ID NO: 383859
aagcauagaguuauccuaa

SEQ ID NO: 383861 - RNA, 19 nt, Artificial Sequence
  Description of Artificial Sequence: Synthetic oligonucleotide
  Sense Strand Starting at position 828 of SEQ ID NO: 316932
ggauaacucuaugcuugga

SEQ ID NO: 383862 - RNA, 19 nt, Artificial Sequence
  Description of Artificial Sequence: Synthetic oligonucleotide
  Antisense Strand to SEQ ID NO: 383861
uccaagcauagaguuaucc

SEQ ID NO: 383863 - RNA, 19 nt, Artificial Sequence
  Description of Artificial Sequence: Synthetic oligonucleotide
  Sense Strand Starting at position 828 of SEQ ID NO: 317103
aucaaugguuaccuuguaa

SEQ ID NO: 383864 - RNA, 19 nt, Artificial Sequence
  Description of Artificial Sequence: Synthetic oligonucleotide
  Antisense Strand to SEQ ID NO: 383863
uuacaagguaaccauugau

SEQ ID NO: 383865 - RNA, 19 nt, Artificial Sequence
  Description of Artificial Sequence: Synthetic oligonucleotide
  Sense Strand Starting at position 828 of SEQ ID NO: 317115
cuuguaaucugacccugga

SEQ ID NO: 383866 - RNA, 19 nt, Artificial Sequence
  Description of Artificial Sequence: Synthetic oligonucleotide
  Antisense Strand to SEQ ID NO: 383865
uccagggucagauuacaag

SEQ ID NO: 383867 - RNA, 19 nt, Artificial Sequence
  Description of Artificial Sequence: Synthetic oligonucleotide
  Sense Strand Starting at position 828 of SEQ ID NO: 317118
guaaucugacccuggacau

SEQ ID NO: 383868 - RNA, 19 nt, Artificial Sequence
  Description of Artificial Sequence: Synthetic oligonucleotide
  Antisense Strand to SEQ ID NO: 383867
auguccagggucagauuac

SEQ ID NO: 383869 - RNA, 19 nt, Artificial Sequence
  Description of Artificial Sequence: Synthetic oligonucleotide
  Sense Strand Starting at position 828 of SEQ ID NO: 317135
augagaaaguguucuguuc

SEQ ID NO: 383870 - RNA, 19 nt, Artificial Sequence
  Description of Artificial Sequence: Synthetic oligonucleotide
  Antisense Strand to SEQ ID NO: 383869
gaacagaacacuuucucau

SEQ ID NO: 383871 - RNA, 19 nt, Artificial Sequence
  Description of Artificial Sequence: Synthetic oligonucleotide
  Sense Strand Starting at position 828 of SEQ ID NO: 317167
uucugauugugaucacuac

SEQ ID NO: 383872 - RNA, 19 nt, Artificial Sequence
  Description of Artificial Sequence: Synthetic oligonucleotide
  Antisense Strand to SEQ ID NO: 383871
guagugaucacaaucagaa

SEQ ID NO: 383873 - RNA, 19 nt, Artificial Sequence
  Description of Artificial Sequence: Synthetic oligonucleotide
  Sense Strand Starting at position 828 of SEQ ID NO: 317214
auguuuguuguguaacaac

SEQ ID NO: 383874 - RNA, 19 nt, Artificial Sequence
  Description of Artificial Sequence: Synthetic oligonucleotide
  Antisense Strand to SEQ ID NO: 383873
guuguuacacaacaaacau

SEQ ID NO: 383875 - RNA, 19 nt, Artificial Sequence
  Description of Artificial Sequence: Synthetic oligonucleotide
  Sense Strand Starting at position 828 of SEQ ID NO: 317296
uuggaacugccuuguagaa

SEQ ID NO: 383876 - RNA, 19 nt, Artificial Sequence
  Description of Artificial Sequence: Synthetic oligonucleotide
  Antisense Strand to SEQ ID NO: 383875
uucuacaaggcaguuccaa

SEQ ID NO: 383877 - RNA, 19 nt, Artificial Sequence
  Description of Artificial Sequence: Synthetic oligonucleotide
  Sense Strand Starting at position 828 of SEQ ID NO: 317309
guagaacauguucaggguu

SEQ ID NO: 383878 - RNA, 19 nt, Artificial Sequence
  Description of Artificial Sequence: Synthetic oligonucleotide
  Antisense Strand to SEQ ID NO: 383877
aacccugaacauguucuac

SEQ ID NO: 383879 - RNA, 19 nt, Artificial Sequence
  Description of Artificial Sequence: Synthetic oligonucleotide
  Sense Strand Starting at position 828 of SEQ ID NO: 317674
uuugucuuaccauaggaua

SEQ ID NO: 383880 - RNA, 19 nt, Artificial Sequence
  Description of Artificial Sequence: Synthetic oligonucleotide
  Antisense Strand to SEQ ID NO: 383879
uauccuaugguaagacaaa

SEQ ID NO: 383881 - RNA, 19 nt, Artificial Sequence
  Description of Artificial Sequence: Synthetic oligonucleotide
  Sense Strand Starting at position 828 of SEQ ID NO: 317757
agucauuggcauuaucaua

SEQ ID NO: 383882 - RNA, 19 nt, Artificial Sequence
  Description of Artificial Sequence: Synthetic oligonucleotide
  Antisense Strand to SEQ ID NO: 383881
uaugauaaugccaaugacu

SEQ ID NO: 383883 - RNA, 19 nt, Artificial Sequence
  Description of Artificial Sequence: Synthetic oligonucleotide
  Sense Strand Starting at position 828 of SEQ ID NO: 317780
gaggucauaucuuugaaga

SEQ ID NO: 383884 - RNA, 19 nt, Artificial Sequence
  Description of Artificial Sequence: Synthetic oligonucleotide
  Antisense Strand to SEQ ID NO: 383883
ucuucaaagauaugaccuc

SEQ ID NO: 383885 - RNA, 19 nt, Artificial Sequence
  Description of Artificial Sequence: Synthetic oligonucleotide
  Sense Strand Starting at position 828 of SEQ ID NO: 317781
aggucauaucuuugaagau

SEQ ID NO: 383886 - RNA, 19 nt, Artificial Sequence
  Description of Artificial Sequence: Synthetic oligonucleotide
  Antisense Strand to SEQ ID NO: 383885
aucuucaaagauaugaccu

SEQ ID NO: 383887 - RNA, 19 nt, Artificial Sequence
  Description of Artificial Sequence: Synthetic oligonucleotide
  Sense Strand Starting at position 828 of SEQ ID NO: 318200
uuguuaggauauucucuau

SEQ ID NO: 383888 - RNA, 19 nt, Artificial Sequence
  Description of Artificial Sequence: Synthetic oligonucleotide
  Antisense Strand to SEQ ID NO: 383887
auagagaauauccuaacaa

SEQ ID NO: 383889 - RNA, 19 nt, Artificial Sequence
  Description of Artificial Sequence: Synthetic oligonucleotide
  Sense Strand Starting at position 828 of SEQ ID NO: 318391
agacaauuacaguguaaug

SEQ ID NO: 383890 - RNA, 19 nt, Artificial Sequence
  Description of Artificial Sequence: Synthetic oligonucleotide
  Antisense Strand to SEQ ID NO: 383889
cauuacacuguaauugucu

SEQ ID NO: 383891 - RNA, 19 nt, Artificial Sequence
  Description of Artificial Sequence: Synthetic oligonucleotide
  Sense Strand Starting at position 828 of SEQ ID NO: 318493
gauuaagaguuagcuggga

SEQ ID NO: 383892 - RNA, 19 nt, Artificial Sequence
  Description of Artificial Sequence: Synthetic oligonucleotide
  Antisense Strand to SEQ ID NO: 383891
ucccagcuaacucuuaauc

SEQ ID NO: 383893 - RNA, 19 nt, Artificial Sequence
  Description of Artificial Sequence: Synthetic oligonucleotide
  Sense Strand Starting at position 828 of SEQ ID NO: 318497
aagaguuagcugggaggua

SEQ ID NO: 383894 - RNA, 19 nt, Artificial Sequence
  Description of Artificial Sequence: Synthetic oligonucleotide
  Antisense Strand to SEQ ID NO: 383893
uaccucccagcuaacucuu

SEQ ID NO: 383895 - RNA, 19 nt, Artificial Sequence
  Description of Artificial Sequence: Synthetic oligonucleotide
  Sense Strand Starting at position 828 of SEQ ID NO: 318585
uuuagaguagccugagaau

SEQ ID NO: 383896 - RNA, 19 nt, Artificial Sequence
  Description of Artificial Sequence: Synthetic oligonucleotide
  Antisense Strand to SEQ ID NO: 383895
auucucaggcuacucuaaa

SEQ ID NO: 383897 - RNA, 19 nt, Artificial Sequence
  Description of Artificial Sequence: Synthetic oligonucleotide
  Sense Strand Starting at position 828 of SEQ ID NO: 318604
cuaauaccaguuuguguaa

SEQ ID NO: 383898 - RNA, 19 nt, Artificial Sequence
  Description of Artificial Sequence: Synthetic oligonucleotide
  Antisense Strand to SEQ ID NO: 383897
uuacacaaacugguauuag

SEQ ID NO: 383899 - RNA, 19 nt, Artificial Sequence
  Description of Artificial Sequence: Synthetic oligonucleotide
  Sense Strand Starting at position 828 of SEQ ID NO: 318607
auaccaguuuguguaaaga

SEQ ID NO: 383900 - RNA, 19 nt, Artificial Sequence
  Description of Artificial Sequence: Synthetic oligonucleotide
  Antisense Strand to SEQ ID NO: 383899
ucuuuacacaaacugguau

SEQ ID NO: 383901 - RNA, 19 nt, Artificial Sequence
  Description of Artificial Sequence: Synthetic oligonucleotide
  Sense Strand Starting at position 828 of SEQ ID NO: 318631
agcuaaagucauggucaag

SEQ ID NO: 383902 - RNA, 19 nt, Artificial Sequence
  Description of Artificial Sequence: Synthetic oligonucleotide
  Antisense Strand to SEQ ID NO: 383901
cuugaccaugacuuuagcu

SEQ ID NO: 383903 - RNA, 19 nt, Artificial Sequence
  Description of Artificial Sequence: Synthetic oligonucleotide
  Sense Strand Starting at position 828 of SEQ ID NO: 318634
uaaagucauggucaaguuu

SEQ ID NO: 383904 - RNA, 19 nt, Artificial Sequence
  Description of Artificial Sequence: Synthetic oligonucleotide
  Antisense Strand to SEQ ID NO: 383903
aaacuugaccaugacuuua

SEQ ID NO: 383905 - RNA, 19 nt, Artificial Sequence
  Description of Artificial Sequence: Synthetic oligonucleotide
  Sense Strand Starting at position 829 of SEQ ID NO: 315419
ugcaucucugcugaagaga

SEQ ID NO: 383906 - RNA, 19 nt, Artificial Sequence
  Description of Artificial Sequence: Synthetic oligonucleotide
  Antisense Strand to SEQ ID NO: 383905
ucucuucagcagagaugca

SEQ ID NO: 383907 - RNA, 19 nt, Artificial Sequence
  Description of Artificial Sequence: Synthetic oligonucleotide
  Sense Strand Starting at position 829 of SEQ ID NO: 315457
ugugaaguuauagaugcuu

SEQ ID NO: 383908 - RNA, 19 nt, Artificial Sequence
  Description of Artificial Sequence: Synthetic oligonucleotide
  Antisense Strand to SEQ ID NO: 383907
aagcaucuauaacuucaca

SEQ ID NO: 383909 - RNA, 19 nt, Artificial Sequence
  Description of Artificial Sequence: Synthetic oligonucleotide
  Sense Strand Starting at position 829 of SEQ ID NO: 315459
ugaaguuauagaugcuuag

SEQ ID NO: 383910 - RNA, 19 nt, Artificial Sequence
  Description of Artificial Sequence: Synthetic oligonucleotide
  Antisense Strand to SEQ ID NO: 383909
cuaagcaucuauaacuuca

SEQ ID NO: 383911 - RNA, 19 nt, Artificial Sequence
  Description of Artificial Sequence: Synthetic oligonucleotide
  Sense Strand Starting at position 829 of SEQ ID NO: 315520
ugucuuagagcucacucau

SEQ ID NO: 383912 - RNA, 19 nt, Artificial Sequence
  Description of Artificial Sequence: Synthetic oligonucleotide
  Antisense Strand to SEQ ID NO: 383911
augagugagcucuaagaca

SEQ ID NO: 383913 - RNA, 19 nt, Artificial Sequence
  Description of Artificial Sequence: Synthetic oligonucleotide
  Sense Strand Starting at position 829 of SEQ ID NO: 315711
gauggauaauugccuguua

SEQ ID NO: 383914 - RNA, 19 nt, Artificial Sequence
  Description of Artificial Sequence: Synthetic oligonucleotide
  Antisense Strand to SEQ ID NO: 383913
uaacaggcaauuauccauc

SEQ ID NO: 383915 - RNA, 19 nt, Artificial Sequence
  Description of Artificial Sequence: Synthetic oligonucleotide
  Sense Strand Starting at position 829 of SEQ ID NO: 316054
uguauauauggucaugagu

SEQ ID NO: 383916 - RNA, 19 nt, Artificial Sequence
  Description of Artificial Sequence: Synthetic oligonucleotide
  Antisense Strand to SEQ ID NO: 383915
acucaugaccauauauaca

SEQ ID NO: 383917 - RNA, 19 nt, Artificial Sequence
  Description of Artificial Sequence: Synthetic oligonucleotide
  Sense Strand Starting at position 829 of SEQ ID NO: 316089
agggcauacuuuccagauu

SEQ ID NO: 383918 - RNA, 19 nt, Artificial Sequence
  Description of Artificial Sequence: Synthetic oligonucleotide
  Antisense Strand to SEQ ID NO: 383917
aaucuggaaaguaugcccu

SEQ ID NO: 383919 - RNA, 19 nt, Artificial Sequence
  Description of Artificial Sequence: Synthetic oligonucleotide
  Sense Strand Starting at position 829 of SEQ ID NO: 316176
cuuaacaagugacuugaau

SEQ ID NO: 383920 - RNA, 19 nt, Artificial Sequence
  Description of Artificial Sequence: Synthetic oligonucleotide
  Antisense Strand to SEQ ID NO: 383919
auucaagucacuuguuaag

SEQ ID NO: 383921 - RNA, 19 nt, Artificial Sequence
  Description of Artificial Sequence: Synthetic oligonucleotide
  Sense Strand Starting at position 829 of SEQ ID NO: 316182
aagugacuugaauaugcua

SEQ ID NO: 383922 - RNA, 19 nt, Artificial Sequence
  Description of Artificial Sequence: Synthetic oligonucleotide
  Antisense Strand to SEQ ID NO: 383921
uagcauauucaagucacuu

SEQ ID NO: 383923 - RNA, 19 nt, Artificial Sequence
  Description of Artificial Sequence: Synthetic oligonucleotide
  Sense Strand Starting at position 829 of SEQ ID NO: 316185
ugacuugaauaugcuauau

SEQ ID NO: 383924 - RNA, 19 nt, Artificial Sequence
  Description of Artificial Sequence: Synthetic oligonucleotide
  Antisense Strand to SEQ ID NO: 383923
auauagcauauucaaguca

SEQ ID NO: 383925 - RNA, 19 nt, Artificial Sequence
  Description of Artificial Sequence: Synthetic oligonucleotide
  Sense Strand Starting at position 829 of SEQ ID NO: 316189
uugaauaugcuauauggca

SEQ ID NO: 383926 - RNA, 19 nt, Artificial Sequence
  Description of Artificial Sequence: Synthetic oligonucleotide
  Antisense Strand to SEQ ID NO: 383925
ugccauauagcauauucaa

SEQ ID NO: 383927 - RNA, 19 nt, Artificial Sequence
  Description of Artificial Sequence: Synthetic oligonucleotide
  Sense Strand Starting at position 829 of SEQ ID NO: 316362
uagauaaaugaauguagca

SEQ ID NO: 383928 - RNA, 19 nt, Artificial Sequence
  Description of Artificial Sequence: Synthetic oligonucleotide
  Antisense Strand to SEQ ID NO: 383927
ugcuacauucauuuaucua

SEQ ID NO: 383929 - RNA, 19 nt, Artificial Sequence
  Description of Artificial Sequence: Synthetic oligonucleotide
  Sense Strand Starting at position 829 of SEQ ID NO: 316413
uucuguccuuaauuaugga

SEQ ID NO: 383930 - RNA, 19 nt, Artificial Sequence
  Description of Artificial Sequence: Synthetic oligonucleotide
  Antisense Strand to SEQ ID NO: 383929
uccauaauuaaggacagaa

SEQ ID NO: 383931 - RNA, 19 nt, Artificial Sequence
  Description of Artificial Sequence: Synthetic oligonucleotide
  Sense Strand Starting at position 829 of SEQ ID NO: 316609
aaauucgacuuagugaaua

SEQ ID NO: 383932 - RNA, 19 nt, Artificial Sequence
  Description of Artificial Sequence: Synthetic oligonucleotide
  Antisense Strand to SEQ ID NO: 383931
uauucacuaagucgaauuu

SEQ ID NO: 383933 - RNA, 19 nt, Artificial Sequence
  Description of Artificial Sequence: Synthetic oligonucleotide
  Sense Strand Starting at position 829 of SEQ ID NO: 316614
cgacuuagugaauauacau

SEQ ID NO: 383934 - RNA, 19 nt, Artificial Sequence
  Description of Artificial Sequence: Synthetic oligonucleotide
  Antisense Strand to SEQ ID NO: 383933
auguauauucacuaagucg

SEQ ID NO: 383935 - RNA, 19 nt, Artificial Sequence
  Description of Artificial Sequence: Synthetic oligonucleotide
  Sense Strand Starting at position 829 of SEQ ID NO: 316665
ucuugacauugagaauuuc

SEQ ID NO: 383936 - RNA, 19 nt, Artificial Sequence
  Description of Artificial Sequence: Synthetic oligonucleotide
  Antisense Strand to SEQ ID NO: 383935
gaaauucucaaugucaaga

SEQ ID NO: 383937 - RNA, 19 nt, Artificial Sequence
  Description of Artificial Sequence: Synthetic oligonucleotide
  Sense Strand Starting at position 829 of SEQ ID NO: 316866
cauugauaguuauuaaggu

SEQ ID NO: 383938 - RNA, 19 nt, Artificial Sequence
  Description of Artificial Sequence: Synthetic oligonucleotide
  Antisense Strand to SEQ ID NO: 383937
accuuaauaacuaucaaug

SEQ ID NO: 383939 - RNA, 19 nt, Artificial Sequence
  Description of Artificial Sequence: Synthetic oligonucleotide
  Sense Strand Starting at position 829 of SEQ ID NO: 317003
gaauguauccaguaaguag

SEQ ID NO: 383940 - RNA, 19 nt, Artificial Sequence
  Description of Artificial Sequence: Synthetic oligonucleotide
  Antisense Strand to SEQ ID NO: 383939
cuacuuacuggauacauuc

SEQ ID NO: 383941 - RNA, 19 nt, Artificial Sequence
  Description of Artificial Sequence: Synthetic oligonucleotide
  Sense Strand Starting at position 829 of SEQ ID NO: 317130
ucuugagugcucuagagag

SEQ ID NO: 383942 - RNA, 19 nt, Artificial Sequence
  Description of Artificial Sequence: Synthetic oligonucleotide
  Antisense Strand to SEQ ID NO: 383941
cucucuagagcacucaaga

SEQ ID NO: 383943 - RNA, 19 nt, Artificial Sequence
  Description of Artificial Sequence: Synthetic oligonucleotide
  Sense Strand Starting at position 829 of SEQ ID NO: 317341
ugaaaccugcuauagaguu

SEQ ID NO: 383944 - RNA, 19 nt, Artificial Sequence
  Description of Artificial Sequence: Synthetic oligonucleotide
  Antisense Strand to SEQ ID NO: 383943
aacucuauagcagguuuca

SEQ ID NO: 383945 - RNA, 19 nt, Artificial Sequence
  Description of Artificial Sequence: Synthetic oligonucleotide
  Sense Strand Starting at position 829 of SEQ ID NO: 317348
ugcuauagaguugaugauu

SEQ ID NO: 383946 - RNA, 19 nt, Artificial Sequence
  Description of Artificial Sequence: Synthetic oligonucleotide
  Antisense Strand to SEQ ID NO: 383945
aaucaucaacucuauagca

SEQ ID NO: 383947 - RNA, 19 nt, Artificial Sequence
  Description of Artificial Sequence: Synthetic oligonucleotide
  Sense Strand Starting at position 829 of SEQ ID NO: 317368
auaacuucgaguuaugguu

SEQ ID NO: 383948 - RNA, 19 nt, Artificial Sequence
  Description of Artificial Sequence: Synthetic oligonucleotide
  Antisense Strand to SEQ ID NO: 383947
aaccauaacucgaaguuau

SEQ ID NO: 383949 - RNA, 19 nt, Artificial Sequence
  Description of Artificial Sequence: Synthetic oligonucleotide
  Sense Strand Starting at position 829 of SEQ ID NO: 317433
gucugcuuccuggagaaga

SEQ ID NO: 383950 - RNA, 19 nt, Artificial Sequence
  Description of Artificial Sequence: Synthetic oligonucleotide
  Antisense Strand to SEQ ID NO: 383949
ucuucuccaggaagcagac

SEQ ID NO: 383951 - RNA, 19 nt, Artificial Sequence
  Description of Artificial Sequence: Synthetic oligonucleotide
  Sense Strand Starting at position 829 of SEQ ID NO: 317435
cugcuuccuggagaagauu

SEQ ID NO: 383952 - RNA, 19 nt, Artificial Sequence
  Description of Artificial Sequence: Synthetic oligonucleotide
  Antisense Strand to SEQ ID NO: 383951
aaucuucuccaggaagcag

SEQ ID NO: 383953 - RNA, 19 nt, Artificial Sequence
  Description of Artificial Sequence: Synthetic oligonucleotide
  Sense Strand Starting at position 829 of SEQ ID NO: 317632
uugauuaacuccuuuguag

SEQ ID NO: 383954 - RNA, 19 nt, Artificial Sequence
  Description of Artificial Sequence: Synthetic oligonucleotide
  Antisense Strand to SEQ ID NO: 383953
cuacaaaggaguuaaucaa

SEQ ID NO: 383955 - RNA, 19 nt, Artificial Sequence
  Description of Artificial Sequence: Synthetic oligonucleotide
  Sense Strand Starting at position 829 of SEQ ID NO: 317638
aacuccuuuguaggugaaa

SEQ ID NO: 383956 - RNA, 19 nt, Artificial Sequence
  Description of Artificial Sequence: Synthetic oligonucleotide
  Antisense Strand to SEQ ID NO: 383955
uuucaccuacaaaggaguu

SEQ ID NO: 383957 - RNA, 19 nt, Artificial Sequence
  Description of Artificial Sequence: Synthetic oligonucleotide
  Sense Strand Starting at position 829 of SEQ ID NO: 317865
acaguuguuuaacuuugaa

SEQ ID NO: 383958 - RNA, 19 nt, Artificial Sequence
  Description of Artificial Sequence: Synthetic oligonucleotide
  Antisense Strand to SEQ ID NO: 383957
uucaaaguuaaacaacugu

SEQ ID NO: 383959 - RNA, 19 nt, Artificial Sequence
  Description of Artificial Sequence: Synthetic oligonucleotide
  Sense Strand Starting at position 829 of SEQ ID NO: 317909
gggugagauugaagggcaa

SEQ ID NO: 383960 - RNA, 19 nt, Artificial Sequence
  Description of Artificial Sequence: Synthetic oligonucleotide
  Antisense Strand to SEQ ID NO: 383959
uugcccuucaaucucaccc

SEQ ID NO: 383961 - RNA, 19 nt, Artificial Sequence
  Description of Artificial Sequence: Synthetic oligonucleotide
  Sense Strand Starting at position 829 of SEQ ID NO: 318681
ugcaguguccuucuguuau

SEQ ID NO: 383962 - RNA, 19 nt, Artificial Sequence
  Description of Artificial Sequence: Synthetic oligonucleotide
  Antisense Strand to SEQ ID NO: 383961
auaacagaaggacacugca

SEQ ID NO: 383963 - RNA, 19 nt, Artificial Sequence
  Description of Artificial Sequence: Synthetic oligonucleotide
  Sense Strand Starting at position 829 of SEQ ID NO: 318693
cuguuaucagugggaauca

SEQ ID NO: 383964 - RNA, 19 nt, Artificial Sequence
  Description of Artificial Sequence: Synthetic oligonucleotide
  Antisense Strand to SEQ ID NO: 383963
ugauucccacugauaacag

SEQ ID NO: 383965 - RNA, 19 nt, Artificial Sequence
  Description of Artificial Sequence: Synthetic oligonucleotide
  Sense Strand Starting at position 829 of SEQ ID NO: 318763
uugaguauuugucuauguc

SEQ ID NO: 383966 - RNA, 19 nt, Artificial Sequence
  Description of Artificial Sequence: Synthetic oligonucleotide
  Antisense Strand to SEQ ID NO: 383965
gacauagacaaauacucaa

SEQ ID NO: 383967 - RNA, 19 nt, Artificial Sequence
  Description of Artificial Sequence: Synthetic oligonucleotide
  Sense Strand Starting at position 829 of SEQ ID NO: 318766
aguauuugucuaugucuuu

SEQ ID NO: 383968 - RNA, 19 nt, Artificial Sequence
  Description of Artificial Sequence: Synthetic oligonucleotide
  Antisense Strand to SEQ ID NO: 383967
aaagacauagacaaauacu

SEQ ID NO: 383969 - RNA, 19 nt, Artificial Sequence
  Description of Artificial Sequence: Synthetic oligonucleotide
  Sense Strand Starting at position 829 of SEQ ID NO: 318767
guauuugucuaugucuuua

SEQ ID NO: 383970 - RNA, 19 nt, Artificial Sequence
  Description of Artificial Sequence: Synthetic oligonucleotide
  Antisense Strand to SEQ ID NO: 383969
uaaagacauagacaaauac

SEQ ID NO: 383971 - RNA, 19 nt, Artificial Sequence
  Description of Artificial Sequence: Synthetic oligonucleotide
  Sense Strand Starting at position 829 of SEQ ID NO: 318873
accaaucuagcugagugaa

SEQ ID NO: 383972 - RNA, 19 nt, Artificial Sequence
  Description of Artificial Sequence: Synthetic oligonucleotide
  Antisense Strand to SEQ ID NO: 383971
uucacucagcuagauuggu

SEQ ID NO: 383973 - RNA, 19 nt, Artificial Sequence
  Description of Artificial Sequence: Synthetic oligonucleotide
  Sense Strand Starting at position 829 of SEQ ID NO: 318875
caaucuagcugagugaaua

SEQ ID NO: 383974 - RNA, 19 nt, Artificial Sequence
  Description of Artificial Sequence: Synthetic oligonucleotide
  Antisense Strand to SEQ ID NO: 383973
uauucacucagcuagauug

SEQ ID NO: 383975 - RNA, 19 nt, Artificial Sequence
  Description of Artificial Sequence: Synthetic oligonucleotide
  Sense Strand Starting at position 829 of SEQ ID NO: 319058
ccaaauguuggucaucuua

SEQ ID NO: 383976 - RNA, 19 nt, Artificial Sequence
  Description of Artificial Sequence: Synthetic oligonucleotide
  Antisense Strand to SEQ ID NO: 383975
uaagaugaccaacauuugg

SEQ ID NO: 383977 - RNA, 19 nt, Artificial Sequence
  Description of Artificial Sequence: Synthetic oligonucleotide
  Sense Strand Starting at position 829 of SEQ ID NO: 319067
ggucaucuuaaagggauua

SEQ ID NO: 383978 - RNA, 19 nt, Artificial Sequence
  Description of Artificial Sequence: Synthetic oligonucleotide
  Antisense Strand to SEQ ID NO: 383977
uaaucccuuuaagaugacc

SEQ ID NO: 383979 - RNA, 19 nt, Artificial Sequence
  Description of Artificial Sequence: Synthetic oligonucleotide
  Sense Strand Starting at position 829 of SEQ ID NO: 319077
aagggauuaguuugauauu

SEQ ID NO: 383980 - RNA, 19 nt, Artificial Sequence
  Description of Artificial Sequence: Synthetic oligonucleotide
  Antisense Strand to SEQ ID NO: 383979
aauaucaaacuaaucccuu

SEQ ID NO: 383981 - RNA, 19 nt, Artificial Sequence
  Description of Artificial Sequence: Synthetic oligonucleotide
  Sense Strand Starting at position 829 of SEQ ID NO: 319157
cuuccuuauuuguuggagu

SEQ ID NO: 383982 - RNA, 19 nt, Artificial Sequence
  Description of Artificial Sequence: Synthetic oligonucleotide
  Antisense Strand to SEQ ID NO: 383981
acuccaacaaauaaggaag

SEQ ID NO: 383983 - RNA, 19 nt, Artificial Sequence
  Description of Artificial Sequence: Synthetic oligonucleotide
  Sense Strand Starting at position 829 of SEQ ID NO: 319159
uccuuauuuguuggagucu

SEQ ID NO: 383984 - RNA, 19 nt, Artificial Sequence
  Description of Artificial Sequence: Synthetic oligonucleotide
  Antisense Strand to SEQ ID NO: 383983
agacuccaacaaauaagga

SEQ ID NO: 383985 - RNA, 19 nt, Artificial Sequence
  Description of Artificial Sequence: Synthetic oligonucleotide
  Sense Strand Starting at position 830 of SEQ ID NO: 315350
gggagguuuguagggauau

SEQ ID NO: 383986 - RNA, 19 nt, Artificial Sequence
  Description of Artificial Sequence: Synthetic oligonucleotide
  Antisense Strand to SEQ ID NO: 383985
auaucccuacaaaccuccc

SEQ ID NO: 383987 - RNA, 19 nt, Artificial Sequence
  Description of Artificial Sequence: Synthetic oligonucleotide
  Sense Strand Starting at position 830 of SEQ ID NO: 315503
ucagcuuaugaauagaucu

SEQ ID NO: 383988 - RNA, 19 nt, Artificial Sequence
  Description of Artificial Sequence: Synthetic oligonucleotide
  Antisense Strand to SEQ ID NO: 383987
agaucuauucauaagcuga

SEQ ID NO: 383989 - RNA, 19 nt, Artificial Sequence
  Description of Artificial Sequence: Synthetic oligonucleotide
  Sense Strand Starting at position 830 of SEQ ID NO: 315511
ugaauagaucuauguggau

SEQ ID NO: 383990 - RNA, 19 nt, Artificial Sequence
  Description of Artificial Sequence: Synthetic oligonucleotide
  Antisense Strand to SEQ ID NO: 383989
auccacauagaucuauuca

SEQ ID NO: 383991 - RNA, 19 nt, Artificial Sequence
  Description of Artificial Sequence: Synthetic oligonucleotide
  Sense Strand Starting at position 830 of SEQ ID NO: 315632
acggaagucucaucaauaa

SEQ ID NO: 383992 - RNA, 19 nt, Artificial Sequence
  Description of Artificial Sequence: Synthetic oligonucleotide
  Antisense Strand to SEQ ID NO: 383991
uuauugaugagacuuccgu

SEQ ID NO: 383993 - RNA, 19 nt, Artificial Sequence
  Description of Artificial Sequence: Synthetic oligonucleotide
  Sense Strand Starting at position 830 of SEQ ID NO: 315653
agaaguuaacccuauguac

SEQ ID NO: 383994 - RNA, 19 nt, Artificial Sequence
  Description of Artificial Sequence: Synthetic oligonucleotide
  Antisense Strand to SEQ ID NO: 383993
guacauaggguuaacuucu

SEQ ID NO: 383995 - RNA, 19 nt, Artificial Sequence
  Description of Artificial Sequence: Synthetic oligonucleotide
  Sense Strand Starting at position 830 of SEQ ID NO: 316291
uucucaaaggucugaugau

SEQ ID NO: 383996 - RNA, 19 nt, Artificial Sequence
  Description of Artificial Sequence: Synthetic oligonucleotide
  Antisense Strand to SEQ ID NO: 383995
aucaucagaccuuugagaa

SEQ ID NO: 383997 - RNA, 19 nt, Artificial Sequence
  Description of Artificial Sequence: Synthetic oligonucleotide
  Sense Strand Starting at position 830 of SEQ ID NO: 316354
ccacauacauggucucaua

SEQ ID NO: 383998 - RNA, 19 nt, Artificial Sequence
  Description of Artificial Sequence: Synthetic oligonucleotide
  Antisense Strand to SEQ ID NO: 383997
uaugagaccauguaugugg

SEQ ID NO: 383999 - RNA, 19 nt, Artificial Sequence
  Description of Artificial Sequence: Synthetic oligonucleotide
  Sense Strand Starting at position 830 of SEQ ID NO: 316427
gugugagucagagaggauu

SEQ ID NO: 384000 - RNA, 19 nt, Artificial Sequence
  Description of Artificial Sequence: Synthetic oligonucleotide
  Antisense Strand to SEQ ID NO: 383999
aauccucucugacucacac

SEQ ID NO: 384001 - RNA, 19 nt, Artificial Sequence
  Description of Artificial Sequence: Synthetic oligonucleotide
  Sense Strand Starting at position 830 of SEQ ID NO: 316562
caggaugccggucaagaaa

SEQ ID NO: 384002 - RNA, 19 nt, Artificial Sequence
  Description of Artificial Sequence: Synthetic oligonucleotide
  Antisense Strand to SEQ ID NO: 384001
uuucuugaccggcauccug

SEQ ID NO: 384003 - RNA, 19 nt, Artificial Sequence
  Description of Artificial Sequence: Synthetic oligonucleotide
  Sense Strand Starting at position 830 of SEQ ID NO: 316772
agacuuuauguuuauagca

SEQ ID NO: 384004 - RNA, 19 nt, Artificial Sequence
  Description of Artificial Sequence: Synthetic oligonucleotide
  Antisense Strand to SEQ ID NO: 384003
ugcuauaaacauaaagucu

SEQ ID NO: 384005 - RNA, 19 nt, Artificial Sequence
  Description of Artificial Sequence: Synthetic oligonucleotide
  Sense Strand Starting at position 830 of SEQ ID NO: 317026
aucagauugcuguaaauua

SEQ ID NO: 384006 - RNA, 19 nt, Artificial Sequence
  Description of Artificial Sequence: Synthetic oligonucleotide
  Antisense Strand to SEQ ID NO: 384005
uaauuuacagcaaucugau

SEQ ID NO: 384007 - RNA, 19 nt, Artificial Sequence
  Description of Artificial Sequence: Synthetic oligonucleotide
  Sense Strand Starting at position 830 of SEQ ID NO: 317063
uaaacuaugguuuguagaa

SEQ ID NO: 384008 - RNA, 19 nt, Artificial Sequence
  Description of Artificial Sequence: Synthetic oligonucleotide
  Antisense Strand to SEQ ID NO: 384007
uucuacaaaccauaguuua

SEQ ID NO: 384009 - RNA, 19 nt, Artificial Sequence
  Description of Artificial Sequence: Synthetic oligonucleotide
  Sense Strand Starting at position 830 of SEQ ID NO: 317064
aaacuaugguuuguagaau

SEQ ID NO: 384010 - RNA, 19 nt, Artificial Sequence
  Description of Artificial Sequence: Synthetic oligonucleotide
  Antisense Strand to SEQ ID NO: 384009
auucuacaaaccauaguuu

SEQ ID NO: 384011 - RNA, 19 nt, Artificial Sequence
  Description of Artificial Sequence: Synthetic oligonucleotide
  Sense Strand Starting at position 830 of SEQ ID NO: 317070
ugguuuguagaauauuaac

SEQ ID NO: 384012 - RNA, 19 nt, Artificial Sequence
  Description of Artificial Sequence: Synthetic oligonucleotide
  Antisense Strand to SEQ ID NO: 384011
guuaauauucuacaaacca

SEQ ID NO: 384013 - RNA, 19 nt, Artificial Sequence
  Description of Artificial Sequence: Synthetic oligonucleotide
  Sense Strand Starting at position 830 of SEQ ID NO: 317163
ucaccuuugggaggauacu

SEQ ID NO: 384014 - RNA, 19 nt, Artificial Sequence
  Description of Artificial Sequence: Synthetic oligonucleotide
  Antisense Strand to SEQ ID NO: 384013
aguauccucccaaagguga

SEQ ID NO: 384015 - RNA, 19 nt, Artificial Sequence
  Description of Artificial Sequence: Synthetic oligonucleotide
  Sense Strand Starting at position 830 of SEQ ID NO: 317172
ggaggauacucaguucucu

SEQ ID NO: 384016 - RNA, 19 nt, Artificial Sequence
  Description of Artificial Sequence: Synthetic oligonucleotide
  Antisense Strand to SEQ ID NO: 384015
agagaacugaguauccucc

SEQ ID NO: 384017 - RNA, 19 nt, Artificial Sequence
  Description of Artificial Sequence: Synthetic oligonucleotide
  Sense Strand Starting at position 830 of SEQ ID NO: 317225
uacaaaugagcaugugaag

SEQ ID NO: 384018 - RNA, 19 nt, Artificial Sequence
  Description of Artificial Sequence: Synthetic oligonucleotide
  Antisense Strand to SEQ ID NO: 384017
cuucacaugcucauuugua

SEQ ID NO: 384019 - RNA, 19 nt, Artificial Sequence
  Description of Artificial Sequence: Synthetic oligonucleotide
  Sense Strand Starting at position 830 of SEQ ID NO: 317491
uuguauauaguggaaagua

SEQ ID NO: 384020 - RNA, 19 nt, Artificial Sequence
  Description of Artificial Sequence: Synthetic oligonucleotide
  Antisense Strand to SEQ ID NO: 384019
uacuuuccacuauauacaa

SEQ ID NO: 384021 - RNA, 19 nt, Artificial Sequence
  Description of Artificial Sequence: Synthetic oligonucleotide
  Sense Strand Starting at position 830 of SEQ ID NO: 317624
ucaggaagacgguauguuu

SEQ ID NO: 384022 - RNA, 19 nt, Artificial Sequence
  Description of Artificial Sequence: Synthetic oligonucleotide
  Antisense Strand to SEQ ID NO: 384021
aaacauaccgucuuccuga

SEQ ID NO: 384023 - RNA, 19 nt, Artificial Sequence
  Description of Artificial Sequence: Synthetic oligonucleotide
  Sense Strand Starting at position 830 of SEQ ID NO: 318091
ggccaauaucugugcauuu

SEQ ID NO: 384024 - RNA, 19 nt, Artificial Sequence
  Description of Artificial Sequence: Synthetic oligonucleotide
  Antisense Strand to SEQ ID NO: 384023
aaaugcacagauauuggcc

SEQ ID NO: 384025 - RNA, 19 nt, Artificial Sequence
  Description of Artificial Sequence: Synthetic oligonucleotide
  Sense Strand Starting at position 830 of SEQ ID NO: 318132
guuugaaagauguaauggu

SEQ ID NO: 384026 - RNA, 19 nt, Artificial Sequence
  Description of Artificial Sequence: Synthetic oligonucleotide
  Antisense Strand to SEQ ID NO: 384025
accauuacaucuuucaaac

SEQ ID NO: 384027 - RNA, 19 nt, Artificial Sequence
  Description of Artificial Sequence: Synthetic oligonucleotide
  Sense Strand Starting at position 830 of SEQ ID NO: 318292
cauggaguuagacgagacu

SEQ ID NO: 384028 - RNA, 19 nt, Artificial Sequence
  Description of Artificial Sequence: Synthetic oligonucleotide
  Antisense Strand to SEQ ID NO: 384027
agucucgucuaacuccaug

SEQ ID NO: 384029 - RNA, 19 nt, Artificial Sequence
  Description of Artificial Sequence: Synthetic oligonucleotide
  Sense Strand Starting at position 830 of SEQ ID NO: 318295
ggaguuagacgagacuagu

SEQ ID NO: 384030 - RNA, 19 nt, Artificial Sequence
  Description of Artificial Sequence: Synthetic oligonucleotide
  Antisense Strand to SEQ ID NO: 384029
acuagucucgucuaacucc

SEQ ID NO: 384031 - RNA, 19 nt, Artificial Sequence
  Description of Artificial Sequence: Synthetic oligonucleotide
  Sense Strand Starting at position 830 of SEQ ID NO: 318312
guguuaguugaucacaaag

SEQ ID NO: 384032 - RNA, 19 nt, Artificial Sequence
  Description of Artificial Sequence: Synthetic oligonucleotide
  Antisense Strand to SEQ ID NO: 384031
cuuugugaucaacuaacac

SEQ ID NO: 384033 - RNA, 19 nt, Artificial Sequence
  Description of Artificial Sequence: Synthetic oligonucleotide
  Sense Strand Starting at position 830 of SEQ ID NO: 318476
uaaauuaauccuugggagu

SEQ ID NO: 384034 - RNA, 19 nt, Artificial Sequence
  Description of Artificial Sequence: Synthetic oligonucleotide
  Antisense Strand to SEQ ID NO: 384033
acucccaaggauuaauuua

SEQ ID NO: 384035 - RNA, 19 nt, Artificial Sequence
  Description of Artificial Sequence: Synthetic oligonucleotide
  Sense Strand Starting at position 830 of SEQ ID NO: 318477
aaauuaauccuugggagua

SEQ ID NO: 384036 - RNA, 19 nt, Artificial Sequence
  Description of Artificial Sequence: Synthetic oligonucleotide
  Antisense Strand to SEQ ID NO: 384035
uacucccaaggauuaauuu

SEQ ID NO: 384037 - RNA, 19 nt, Artificial Sequence
  Description of Artificial Sequence: Synthetic oligonucleotide
  Sense Strand Starting at position 830 of SEQ ID NO: 318694
agauaaauucugugcagga

SEQ ID NO: 384038 - RNA, 19 nt, Artificial Sequence
  Description of Artificial Sequence: Synthetic oligonucleotide
  Antisense Strand to SEQ ID NO: 384037
uccugcacagaauuuaucu

SEQ ID NO: 384039 - RNA, 19 nt, Artificial Sequence
  Description of Artificial Sequence: Synthetic oligonucleotide
  Sense Strand Starting at position 830 of SEQ ID NO: 318695
gauaaauucugugcaggau

SEQ ID NO: 384040 - RNA, 19 nt, Artificial Sequence
  Description of Artificial Sequence: Synthetic oligonucleotide
  Antisense Strand to SEQ ID NO: 384039
auccugcacagaauuuauc

SEQ ID NO: 384041 - RNA, 19 nt, Artificial Sequence
  Description of Artificial Sequence: Synthetic oligonucleotide
  Sense Strand Starting at position 830 of SEQ ID NO: 318696
auaaauucugugcaggaua

SEQ ID NO: 384042 - RNA, 19 nt, Artificial Sequence
  Description of Artificial Sequence: Synthetic oligonucleotide
  Antisense Strand to SEQ ID NO: 384041
uauccugcacagaauuuau

SEQ ID NO: 384043 - RNA, 19 nt, Artificial Sequence
  Description of Artificial Sequence: Synthetic oligonucleotide
  Sense Strand Starting at position 830 of SEQ ID NO: 318698
aaauucugugcaggauaau

SEQ ID NO: 384044 - RNA, 19 nt, Artificial Sequence
  Description of Artificial Sequence: Synthetic oligonucleotide
  Antisense Strand to SEQ ID NO: 384043
auuauccugcacagaauuu

SEQ ID NO: 384045 - RNA, 19 nt, Artificial Sequence
  Description of Artificial Sequence: Synthetic oligonucleotide
  Sense Strand Starting at position 830 of SEQ ID NO: 318699
aauucugugcaggauaauu

SEQ ID NO: 384046 - RNA, 19 nt, Artificial Sequence
  Description of Artificial Sequence: Synthetic oligonucleotide
  Antisense Strand to SEQ ID NO: 384045
aauuauccugcacagaauu

SEQ ID NO: 384047 - RNA, 19 nt, Artificial Sequence
  Description of Artificial Sequence: Synthetic oligonucleotide
  Sense Strand Starting at position 830 of SEQ ID NO: 318734
ggaaaucacuucuugguca

SEQ ID NO: 384048 - RNA, 19 nt, Artificial Sequence
  Description of Artificial Sequence: Synthetic oligonucleotide
  Antisense Strand to SEQ ID NO: 384047
ugaccaagaagugauuucc

SEQ ID NO: 384049 - RNA, 19 nt, Artificial Sequence
  Description of Artificial Sequence: Synthetic oligonucleotide
  Sense Strand Starting at position 830 of SEQ ID NO: 318763
cacugaagugugggaaacu

SEQ ID NO: 384050 - RNA, 19 nt, Artificial Sequence
  Description of Artificial Sequence: Synthetic oligonucleotide
  Antisense Strand to SEQ ID NO: 384049
aguuucccacacuucagug

SEQ ID NO: 384051 - RNA, 19 nt, Artificial Sequence
  Description of Artificial Sequence: Synthetic oligonucleotide
  Sense Strand Starting at position 830 of SEQ ID NO: 318810
uguuucuagaguuauggaa

SEQ ID NO: 384052 - RNA, 19 nt, Artificial Sequence
  Description of Artificial Sequence: Synthetic oligonucleotide
  Antisense Strand to SEQ ID NO: 384051
uuccauaacucuagaaaca

SEQ ID NO: 384053 - RNA, 19 nt, Artificial Sequence
  Description of Artificial Sequence: Synthetic oligonucleotide
  Sense Strand Starting at position 830 of SEQ ID NO: 318839
uuaaaugugguagauguca

SEQ ID NO: 384054 - RNA, 19 nt, Artificial Sequence
  Description of Artificial Sequence: Synthetic oligonucleotide
  Antisense Strand to SEQ ID NO: 384053
ugacaucuaccacauuuaa

SEQ ID NO: 384055 - RNA, 19 nt, Artificial Sequence
  Description of Artificial Sequence: Synthetic oligonucleotide
  Sense Strand Starting at position 830 of SEQ ID NO: 318859
aguguuugacuauaguaaa

SEQ ID NO: 384056 - RNA, 19 nt, Artificial Sequence
  Description of Artificial Sequence: Synthetic oligonucleotide
  Antisense Strand to SEQ ID NO: 384055
uuuacuauagucaaacacu

SEQ ID NO: 384057 - RNA, 19 nt, Artificial Sequence
  Description of Artificial Sequence: Synthetic oligonucleotide
  Sense Strand Starting at position 830 of SEQ ID NO: 318902
uguguuugugcuucuuaug

SEQ ID NO: 384058 - RNA, 19 nt, Artificial Sequence
  Description of Artificial Sequence: Synthetic oligonucleotide
  Antisense Strand to SEQ ID NO: 384057
cauaagaagcacaaacaca

SEQ ID NO: 384059 - RNA, 19 nt, Artificial Sequence
  Description of Artificial Sequence: Synthetic oligonucleotide
  Sense Strand Starting at position 830 of SEQ ID NO: 318903
guguuugugcuucuuaugu

SEQ ID NO: 384060 - RNA, 19 nt, Artificial Sequence
  Description of Artificial Sequence: Synthetic oligonucleotide
  Antisense Strand to SEQ ID NO: 384059
acauaagaagcacaaacac

SEQ ID NO: 384061 - RNA, 19 nt, Artificial Sequence
  Description of Artificial Sequence: Synthetic oligonucleotide
  Sense Strand Starting at position 830 of SEQ ID NO: 319067
uucuuaugaccuuaggcaa

SEQ ID NO: 384062 - RNA, 19 nt, Artificial Sequence
  Description of Artificial Sequence: Synthetic oligonucleotide
  Antisense Strand to SEQ ID NO: 384061
uugccuaaggucauaagaa

SEQ ID NO: 384063 - RNA, 19 nt, Artificial Sequence
  Description of Artificial Sequence: Synthetic oligonucleotide
  Sense Strand Starting at position 830 of SEQ ID NO: 319089
gcuuaugcccacuaugaaa

SEQ ID NO: 384064 - RNA, 19 nt, Artificial Sequence
  Description of Artificial Sequence: Synthetic oligonucleotide
  Antisense Strand to SEQ ID NO: 384063
uuucauagugggcauaagc

SEQ ID NO: 384065 - RNA, 19 nt, Artificial Sequence
  Description of Artificial Sequence: Synthetic oligonucleotide
  Sense Strand Starting at position 831 of SEQ ID NO: 316029
aguagauucuaagcaugua

SEQ ID NO: 384066 - RNA, 19 nt, Artificial Sequence
  Description of Artificial Sequence: Synthetic oligonucleotide
  Antisense Strand to SEQ ID NO: 384065
uacaugcuuagaaucuacu

SEQ ID NO: 384067 - RNA, 19 nt, Artificial Sequence
  Description of Artificial Sequence: Synthetic oligonucleotide
  Sense Strand Starting at position 831 of SEQ ID NO: 316032
agauucuaagcauguauau

SEQ ID NO: 384068 - RNA, 19 nt, Artificial Sequence
  Description of Artificial Sequence: Synthetic oligonucleotide
  Antisense Strand to SEQ ID NO: 384067
auauacaugcuuagaaucu

SEQ ID NO: 384069 - RNA, 19 nt, Artificial Sequence
  Description of Artificial Sequence: Synthetic oligonucleotide
  Sense Strand Starting at position 831 of SEQ ID NO: 316186
auguuuaacgcucagagga

SEQ ID NO: 384070 - RNA, 19 nt, Artificial Sequence
  Description of Artificial Sequence: Synthetic oligonucleotide
  Antisense Strand to SEQ ID NO: 384069
uccucugagcguuaaacau

SEQ ID NO: 384071 - RNA, 19 nt, Artificial Sequence
  Description of Artificial Sequence: Synthetic oligonucleotide
  Sense Strand Starting at position 831 of SEQ ID NO: 316484
auauucguucuuuauugga

SEQ ID NO: 384072 - RNA, 19 nt, Artificial Sequence
  Description of Artificial Sequence: Synthetic oligonucleotide
  Antisense Strand to SEQ ID NO: 384071
uccaauaaagaacgaauau

SEQ ID NO: 384073 - RNA, 19 nt, Artificial Sequence
  Description of Artificial Sequence: Synthetic oligonucleotide
  Sense Strand Starting at position 831 of SEQ ID NO: 316504
ugucuuugcccugagauua

SEQ ID NO: 384074 - RNA, 19 nt, Artificial Sequence
  Description of Artificial Sequence: Synthetic oligonucleotide
  Antisense Strand to SEQ ID NO: 384073
uaaucucagggcaaagaca

SEQ ID NO: 384075 - RNA, 19 nt, Artificial Sequence
  Description of Artificial Sequence: Synthetic oligonucleotide
  Sense Strand Starting at position 831 of SEQ ID NO: 316509
uugcccugagauuauauau

SEQ ID NO: 384076 - RNA, 19 nt, Artificial Sequence
  Description of Artificial Sequence: Synthetic oligonucleotide
  Antisense Strand to SEQ ID NO: 384075
auauauaaucucagggcaa

SEQ ID NO: 384077 - RNA, 19 nt, Artificial Sequence
  Description of Artificial Sequence: Synthetic oligonucleotide
  Sense Strand Starting at position 831 of SEQ ID NO: 316544
acugguccacuuuaucaua

SEQ ID NO: 384078 - RNA, 19 nt, Artificial Sequence
  Description of Artificial Sequence: Synthetic oligonucleotide
  Antisense Strand to SEQ ID NO: 384077
uaugauaaaguggaccagu

SEQ ID NO: 384079 - RNA, 19 nt, Artificial Sequence
  Description of Artificial Sequence: Synthetic oligonucleotide
  Sense Strand Starting at position 831 of SEQ ID NO: 316597
uccgacugucuggauaaua

SEQ ID NO: 384080 - RNA, 19 nt, Artificial Sequence
  Description of Artificial Sequence: Synthetic oligonucleotide
  Antisense Strand to SEQ ID NO: 384079
uauuauccagacagucgga

SEQ ID NO: 384081 - RNA, 19 nt, Artificial Sequence
  Description of Artificial Sequence: Synthetic oligonucleotide
  Sense Strand Starting at position 831 of SEQ ID NO: 316667
aggaaaucaugccuuauca

SEQ ID NO: 384082 - RNA, 19 nt, Artificial Sequence
  Description of Artificial Sequence: Synthetic oligonucleotide
  Antisense Strand to SEQ ID NO: 384081
ugauaaggcaugauuuccu

SEQ ID NO: 384083 - RNA, 19 nt, Artificial Sequence
  Description of Artificial Sequence: Synthetic oligonucleotide
  Sense Strand Starting at position 831 of SEQ ID NO: 316719
cuagacuugguuuauuacu

SEQ ID NO: 384084 - RNA, 19 nt, Artificial Sequence
  Description of Artificial Sequence: Synthetic oligonucleotide
  Antisense Strand to SEQ ID NO: 384083
aguaauaaaccaagucuag

SEQ ID NO: 384085 - RNA, 19 nt, Artificial Sequence
  Description of Artificial Sequence: Synthetic oligonucleotide
  Sense Strand Starting at position 831 of SEQ ID NO: 316724
cuugguuuauuacuugaau

SEQ ID NO: 384086 - RNA, 19 nt, Artificial Sequence
  Description of Artificial Sequence: Synthetic oligonucleotide
  Antisense Strand to SEQ ID NO: 384085
auucaaguaauaaaccaag

SEQ ID NO: 384087 - RNA, 19 nt, Artificial Sequence
  Description of Artificial Sequence: Synthetic oligonucleotide
  Sense Strand Starting at position 831 of SEQ ID NO: 316906
uuagguucucuguaggcaa

SEQ ID NO: 384088 - RNA, 19 nt, Artificial Sequence
  Description of Artificial Sequence: Synthetic oligonucleotide
  Antisense Strand to SEQ ID NO: 384087
uugccuacagagaaccuaa

SEQ ID NO: 384089 - RNA, 19 nt, Artificial Sequence
  Description of Artificial Sequence: Synthetic oligonucleotide
  Sense Strand Starting at position 831 of SEQ ID NO: 316910
guucucuguaggcaagaua

SEQ ID NO: 384090 - RNA, 19 nt, Artificial Sequence
  Description of Artificial Sequence: Synthetic oligonucleotide
  Antisense Strand to SEQ ID NO: 384089
uaucuugccuacagagaac

SEQ ID NO: 384091 - RNA, 19 nt, Artificial Sequence
  Description of Artificial Sequence: Synthetic oligonucleotide
  Sense Strand Starting at position 831 of SEQ ID NO: 316941
gaguguagcauuugauguu

SEQ ID NO: 384092 - RNA, 19 nt, Artificial Sequence
  Description of Artificial Sequence: Synthetic oligonucleotide
  Antisense Strand to SEQ ID NO: 384091
aacaucaaaugcuacacuc

SEQ ID NO: 384093 - RNA, 19 nt, Artificial Sequence
  Description of Artificial Sequence: Synthetic oligonucleotide
  Sense Strand Starting at position 831 of SEQ ID NO: 316983
gcuggacugcucguguuga

SEQ ID NO: 384094 - RNA, 19 nt, Artificial Sequence
  Description of Artificial Sequence: Synthetic oligonucleotide
  Antisense Strand to SEQ ID NO: 384093
ucaacacgagcaguccagc

SEQ ID NO: 384095 - RNA, 19 nt, Artificial Sequence
  Description of Artificial Sequence: Synthetic oligonucleotide
  Sense Strand Starting at position 831 of SEQ ID NO: 317060
auugacaucucgccaaaug

SEQ ID NO: 384096 - RNA, 19 nt, Artificial Sequence
  Description of Artificial Sequence: Synthetic oligonucleotide
  Antisense Strand to SEQ ID NO: 384095
cauuuggcgagaugucaau

SEQ ID NO: 384097 - RNA, 19 nt, Artificial Sequence
  Description of Artificial Sequence: Synthetic oligonucleotide
  Sense Strand Starting at position 831 of SEQ ID NO: 317093
acuacagauguccaguauu

SEQ ID NO: 384098 - RNA, 19 nt, Artificial Sequence
  Description of Artificial Sequence: Synthetic oligonucleotide
  Antisense Strand to SEQ ID NO: 384097
aauacuggacaucuguagu

SEQ ID NO: 384099 - RNA, 19 nt, Artificial Sequence
  Description of Artificial Sequence: Synthetic oligonucleotide
  Sense Strand Starting at position 831 of SEQ ID NO: 317096
acagauguccaguauucuu

SEQ ID NO: 384100 - RNA, 19 nt, Artificial Sequence
  Description of Artificial Sequence: Synthetic oligonucleotide
  Antisense Strand to SEQ ID NO: 384099
aagaauacuggacaucugu

SEQ ID NO: 384101 - RNA, 19 nt, Artificial Sequence
  Description of Artificial Sequence: Synthetic oligonucleotide
  Sense Strand Starting at position 831 of SEQ ID NO: 317116
ggagcccagcucuaauaua

SEQ ID NO: 384102 - RNA, 19 nt, Artificial Sequence
  Description of Artificial Sequence: Synthetic oligonucleotide
  Antisense Strand to SEQ ID NO: 384101
uauauuagagcugggcucc

SEQ ID NO: 384103 - RNA, 19 nt, Artificial Sequence
  Description of Artificial Sequence: Synthetic oligonucleotide
  Sense Strand Starting at position 831 of SEQ ID NO: 317163
uuugcuuaggguuacagau

SEQ ID NO: 384104 - RNA, 19 nt, Artificial Sequence
  Description of Artificial Sequence: Synthetic oligonucleotide
  Antisense Strand to SEQ ID NO: 384103
aucuguaacccuaagcaaa

SEQ ID NO: 384105 - RNA, 19 nt, Artificial Sequence
  Description of Artificial Sequence: Synthetic oligonucleotide
  Sense Strand Starting at position 831 of SEQ ID NO: 317383
ccuugaaauuaguuggaaa

SEQ ID NO: 384106 - RNA, 19 nt, Artificial Sequence
  Description of Artificial Sequence: Synthetic oligonucleotide
  Antisense Strand to SEQ ID NO: 384105
uuuccaacuaauuucaagg

SEQ ID NO: 384107 - RNA, 19 nt, Artificial Sequence
  Description of Artificial Sequence: Synthetic oligonucleotide
  Sense Strand Starting at position 831 of SEQ ID NO: 317465
caggaaagcuguuuaagua

SEQ ID NO: 384108 - RNA, 19 nt, Artificial Sequence
  Description of Artificial Sequence: Synthetic oligonucleotide
  Antisense Strand to SEQ ID NO: 384107
uacuuaaacagcuuuccug

SEQ ID NO: 384109 - RNA, 19 nt, Artificial Sequence
  Description of Artificial Sequence: Synthetic oligonucleotide
  Sense Strand Starting at position 831 of SEQ ID NO: 317466
aggaaagcuguuuaaguag

SEQ ID NO: 384110 - RNA, 19 nt, Artificial Sequence
  Description of Artificial Sequence: Synthetic oligonucleotide
  Antisense Strand to SEQ ID NO: 384109
cuacuuaaacagcuuuccu

SEQ ID NO: 384111 - RNA, 19 nt, Artificial Sequence
  Description of Artificial Sequence: Synthetic oligonucleotide
  Sense Strand Starting at position 831 of SEQ ID NO: 317601
uagacuuauccuggucuag

SEQ ID NO: 384112 - RNA, 19 nt, Artificial Sequence
  Description of Artificial Sequence: Synthetic oligonucleotide
  Antisense Strand to SEQ ID NO: 384111
cuagaccaggauaagucua

SEQ ID NO: 384113 - RNA, 19 nt, Artificial Sequence
  Description of Artificial Sequence: Synthetic oligonucleotide
  Sense Strand Starting at position 831 of SEQ ID NO: 317617
uagggauggacuugaugca

SEQ ID NO: 384114 - RNA, 19 nt, Artificial Sequence
  Description of Artificial Sequence: Synthetic oligonucleotide
  Antisense Strand to SEQ ID NO: 384113
ugcaucaaguccaucccua

SEQ ID NO: 384115 - RNA, 19 nt, Artificial Sequence
  Description of Artificial Sequence: Synthetic oligonucleotide
  Sense Strand Starting at position 831 of SEQ ID NO: 317654
uccaucuguuauccugaca

SEQ ID NO: 384116 - RNA, 19 nt, Artificial Sequence
  Description of Artificial Sequence: Synthetic oligonucleotide
  Antisense Strand to SEQ ID NO: 384115
ugucaggauaacagaugga

SEQ ID NO: 384117 - RNA, 19 nt, Artificial Sequence
  Description of Artificial Sequence: Synthetic oligonucleotide
  Sense Strand Starting at position 831 of SEQ ID NO: 317657
aucuguuauccugacacau

SEQ ID NO: 384118 - RNA, 19 nt, Artificial Sequence
  Description of Artificial Sequence: Synthetic oligonucleotide
  Antisense Strand to SEQ ID NO: 384117
augugucaggauaacagau

SEQ ID NO: 384119 - RNA, 19 nt, Artificial Sequence
  Description of Artificial Sequence: Synthetic oligonucleotide
  Sense Strand Starting at position 831 of SEQ ID NO: 317782
aucccaaugccuggauauu

SEQ ID NO: 384120 - RNA, 19 nt, Artificial Sequence
  Description of Artificial Sequence: Synthetic oligonucleotide
  Antisense Strand to SEQ ID NO: 384119
aauauccaggcauugggau

SEQ ID NO: 384121 - RNA, 19 nt, Artificial Sequence
  Description of Artificial Sequence: Synthetic oligonucleotide
  Sense Strand Starting at position 831 of SEQ ID NO: 317832
cugaaauuaugcucuggau

SEQ ID NO: 384122 - RNA, 19 nt, Artificial Sequence
  Description of Artificial Sequence: Synthetic oligonucleotide
  Antisense Strand to SEQ ID NO: 384121
auccagagcauaauuucag

SEQ ID NO: 384123 - RNA, 19 nt, Artificial Sequence
  Description of Artificial Sequence: Synthetic oligonucleotide
  Sense Strand Starting at position 831 of SEQ ID NO: 317876
gaaggaaaggccugagucu

SEQ ID NO: 384124 - RNA, 19 nt, Artificial Sequence
  Description of Artificial Sequence: Synthetic oligonucleotide
  Antisense Strand to SEQ ID NO: 384123
agacucaggccuuuccuuc

SEQ ID NO: 384125 - RNA, 19 nt, Artificial Sequence
  Description of Artificial Sequence: Synthetic oligonucleotide
  Sense Strand Starting at position 831 of SEQ ID NO: 317930
ggccuauagcaucaacuuu

SEQ ID NO: 384126 - RNA, 19 nt, Artificial Sequence
  Description of Artificial Sequence: Synthetic oligonucleotide
  Antisense Strand to SEQ ID NO: 384125
aaaguugaugcuauaggcc

SEQ ID NO: 384127 - RNA, 19 nt, Artificial Sequence
  Description of Artificial Sequence: Synthetic oligonucleotide
  Sense Strand Starting at position 831 of SEQ ID NO: 317985
aggcaugcucacgaucaau

SEQ ID NO: 384128 - RNA, 19 nt, Artificial Sequence
  Description of Artificial Sequence: Synthetic oligonucleotide
  Antisense Strand to SEQ ID NO: 384127
auugaucgugagcaugccu

SEQ ID NO: 384129 - RNA, 19 nt, Artificial Sequence
  Description of Artificial Sequence: Synthetic oligonucleotide
  Sense Strand Starting at position 831 of SEQ ID NO: 318063
ugugaauccucuuuauuag

SEQ ID NO: 384130 - RNA, 19 nt, Artificial Sequence
  Description of Artificial Sequence: Synthetic oligonucleotide
  Antisense Strand to SEQ ID NO: 384129
cuaauaaagaggauucaca

SEQ ID NO: 384131 - RNA, 19 nt, Artificial Sequence
  Description of Artificial Sequence: Synthetic oligonucleotide
  Sense Strand Starting at position 831 of SEQ ID NO: 318064
gugaauccucuuuauuagc

SEQ ID NO: 384132 - RNA, 19 nt, Artificial Sequence
  Description of Artificial Sequence: Synthetic oligonucleotide
  Antisense Strand to SEQ ID NO: 384131
gcuaauaaagaggauucac

SEQ ID NO: 384133 - RNA, 19 nt, Artificial Sequence
  Description of Artificial Sequence: Synthetic oligonucleotide
  Sense Strand Starting at position 831 of SEQ ID NO: 318113
uccaaacuuguuggaaaug

SEQ ID NO: 384134 - RNA, 19 nt, Artificial Sequence
  Description of Artificial Sequence: Synthetic oligonucleotide
  Antisense Strand to SEQ ID NO: 384133
cauuuccaacaaguuugga

SEQ ID NO: 384135 - RNA, 19 nt, Artificial Sequence
  Description of Artificial Sequence: Synthetic oligonucleotide
  Sense Strand Starting at position 831 of SEQ ID NO: 318508
aguugaauacucuagcuau

SEQ ID NO: 384136 - RNA, 19 nt, Artificial Sequence
  Description of Artificial Sequence: Synthetic oligonucleotide
  Antisense Strand to SEQ ID NO: 384135
auagcuagaguauucaacu

SEQ ID NO: 384137 - RNA, 19 nt, Artificial Sequence
  Description of Artificial Sequence: Synthetic oligonucleotide
  Sense Strand Starting at position 831 of SEQ ID NO: 318742
ugcuaugaaaguggguaua

SEQ ID NO: 384138 - RNA, 19 nt, Artificial Sequence
  Description of Artificial Sequence: Synthetic oligonucleotide
  Antisense Strand to SEQ ID NO: 384137
uauacccacuuucauagca

SEQ ID NO: 384139 - RNA, 19 nt, Artificial Sequence
  Description of Artificial Sequence: Synthetic oligonucleotide
  Sense Strand Starting at position 831 of SEQ ID NO: 318744
cuaugaaaguggguauaca

SEQ ID NO: 384140 - RNA, 19 nt, Artificial Sequence
  Description of Artificial Sequence: Synthetic oligonucleotide
  Antisense Strand to SEQ ID NO: 384139
uguauacccacuuucauag

SEQ ID NO: 384141 - RNA, 19 nt, Artificial Sequence
  Description of Artificial Sequence: Synthetic oligonucleotide
  Sense Strand Starting at position 831 of SEQ ID NO: 318832
ugguaauccuauguuaauu

SEQ ID NO: 384142 - RNA, 19 nt, Artificial Sequence
  Description of Artificial Sequence: Synthetic oligonucleotide
  Antisense Strand to SEQ ID NO: 384141
aauuaacauaggauuacca

SEQ ID NO: 384143 - RNA, 19 nt, Artificial Sequence
  Description of Artificial Sequence: Synthetic oligonucleotide
  Sense Strand Starting at position 831 of SEQ ID NO: 319034
ugaugaugauucucucugu

SEQ ID NO: 384144 - RNA, 19 nt, Artificial Sequence
  Description of Artificial Sequence: Synthetic oligonucleotide
  Antisense Strand to SEQ ID NO: 384143
acagagagaaucaucauca

SEQ ID NO: 384145 - RNA, 19 nt, Artificial Sequence
  Description of Artificial Sequence: Synthetic oligonucleotide
  Sense Strand Starting at position 832 of SEQ ID NO: 315377
ggaauaaaccugugacuuc

SEQ ID NO: 384146 - RNA, 19 nt, Artificial Sequence
  Description of Artificial Sequence: Synthetic oligonucleotide
  Antisense Strand to SEQ ID NO: 384145
gaagucacagguuuauucc

SEQ ID NO: 384147 - RNA, 19 nt, Artificial Sequence
  Description of Artificial Sequence: Synthetic oligonucleotide
  Sense Strand Starting at position 832 of SEQ ID NO: 315406
gagccuuaggcuuagggaa

SEQ ID NO: 384148 - RNA, 19 nt, Artificial Sequence
  Description of Artificial Sequence: Synthetic oligonucleotide
  Antisense Strand to SEQ ID NO: 384147
uucccuaagccuaaggcuc

SEQ ID NO: 384149 - RNA, 19 nt, Artificial Sequence
  Description of Artificial Sequence: Synthetic oligonucleotide
  Sense Strand Starting at position 832 of SEQ ID NO: 315453
acuuuauagagugaacguu

SEQ ID NO: 384150 - RNA, 19 nt, Artificial Sequence
  Description of Artificial Sequence: Synthetic oligonucleotide
  Antisense Strand to SEQ ID NO: 384149
aacguucacucuauaaagu

SEQ ID NO: 384151 - RNA, 19 nt, Artificial Sequence
  Description of Artificial Sequence: Synthetic oligonucleotide
  Sense Strand Starting at position 832 of SEQ ID NO: 315645
cuuugaguaccuuggaauc

SEQ ID NO: 384152 - RNA, 19 nt, Artificial Sequence
  Description of Artificial Sequence: Synthetic oligonucleotide
  Antisense Strand to SEQ ID NO: 384151
gauuccaagguacucaaag

SEQ ID NO: 384153 - RNA, 19 nt, Artificial Sequence
  Description of Artificial Sequence: Synthetic oligonucleotide
  Sense Strand Starting at position 832 of SEQ ID NO: 316324
auuguccuugguuaacaaa

SEQ ID NO: 384154 - RNA, 19 nt, Artificial Sequence
  Description of Artificial Sequence: Synthetic oligonucleotide
  Antisense Strand to SEQ ID NO: 384153
uuuguuaaccaaggacaau

SEQ ID NO: 384155 - RNA, 19 nt, Artificial Sequence
  Description of Artificial Sequence: Synthetic oligonucleotide
  Sense Strand Starting at position 832 of SEQ ID NO: 316375
gguugaauaagcugacauu

SEQ ID NO: 384156 - RNA, 19 nt, Artificial Sequence
  Description of Artificial Sequence: Synthetic oligonucleotide
  Antisense Strand to SEQ ID NO: 384155
aaugucagcuuauucaacc

SEQ ID NO: 384157 - RNA, 19 nt, Artificial Sequence
  Description of Artificial Sequence: Synthetic oligonucleotide
  Sense Strand Starting at position 832 of SEQ ID NO: 316404
gcuaauucuccugaaugua

SEQ ID NO: 384158 - RNA, 19 nt, Artificial Sequence
  Description of Artificial Sequence: Synthetic oligonucleotide
  Antisense Strand to SEQ ID NO: 384157
uacauucaggagaauuagc

SEQ ID NO: 384159 - RNA, 19 nt, Artificial Sequence
  Description of Artificial Sequence: Synthetic oligonucleotide
  Sense Strand Starting at position 832 of SEQ ID NO: 316578
ggguuaacuuauccuaaua

SEQ ID NO: 384160 - RNA, 19 nt, Artificial Sequence
  Description of Artificial Sequence: Synthetic oligonucleotide
  Antisense Strand to SEQ ID NO: 384159
uauuaggauaaguuaaccc

SEQ ID NO: 384161 - RNA, 19 nt, Artificial Sequence
  Description of Artificial Sequence: Synthetic oligonucleotide
  Sense Strand Starting at position 832 of SEQ ID NO: 316619
ccuauauaaguguauguac

SEQ ID NO: 384162 - RNA, 19 nt, Artificial Sequence
  Description of Artificial Sequence: Synthetic oligonucleotide
  Antisense Strand to SEQ ID NO: 384161
guacauacacuuauauagg

SEQ ID NO: 384163 - RNA, 19 nt, Artificial Sequence
  Description of Artificial Sequence: Synthetic oligonucleotide
  Sense Strand Starting at position 832 of SEQ ID NO: 316700
guauuaugcuaaucgauuu

SEQ ID NO: 384164 - RNA, 19 nt, Artificial Sequence
  Description of Artificial Sequence: Synthetic oligonucleotide
  Antisense Strand to SEQ ID NO: 384163
aaaucgauuagcauaauac

SEQ ID NO: 384165 - RNA, 19 nt, Artificial Sequence
  Description of Artificial Sequence: Synthetic oligonucleotide
  Sense Strand Starting at position 832 of SEQ ID NO: 316765
auguuuguccuggaugaau

SEQ ID NO: 384166 - RNA, 19 nt, Artificial Sequence
  Description of Artificial Sequence: Synthetic oligonucleotide
  Antisense Strand to SEQ ID NO: 384165
auucauccaggacaaacau

SEQ ID NO: 384167 - RNA, 19 nt, Artificial Sequence
  Description of Artificial Sequence: Synthetic oligonucleotide
  Sense Strand Starting at position 832 of SEQ ID NO: 317483
ugugguaugagguggagaa

SEQ ID NO: 384168 - RNA, 19 nt, Artificial Sequence
  Description of Artificial Sequence: Synthetic oligonucleotide
  Antisense Strand to SEQ ID NO: 384167
uucuccaccucauaccaca

SEQ ID NO: 384169 - RNA, 19 nt, Artificial Sequence
  Description of Artificial Sequence: Synthetic oligonucleotide
  Sense Strand Starting at position 832 of SEQ ID NO: 317496
ggagaacugauguguaaga

SEQ ID NO: 384170 - RNA, 19 nt, Artificial Sequence
  Description of Artificial Sequence: Synthetic oligonucleotide
  Antisense Strand to SEQ ID NO: 384169
ucuuacacaucaguucucc

SEQ ID NO: 384171 - RNA, 19 nt, Artificial Sequence
  Description of Artificial Sequence: Synthetic oligonucleotide
  Sense Strand Starting at position 832 of SEQ ID NO: 317497
gagaacugauguguaagau

SEQ ID NO: 384172 - RNA, 19 nt, Artificial Sequence
  Description of Artificial Sequence: Synthetic oligonucleotide
  Antisense Strand to SEQ ID NO: 384171
aucuuacacaucaguucuc

SEQ ID NO: 384173 - RNA, 19 nt, Artificial Sequence
  Description of Artificial Sequence: Synthetic oligonucleotide
  Sense Strand Starting at position 832 of SEQ ID NO: 317503
ugauguguaagauaugguu

SEQ ID NO: 384174 - RNA, 19 nt, Artificial Sequence
  Description of Artificial Sequence: Synthetic oligonucleotide
  Antisense Strand to SEQ ID NO: 384173
aaccauaucuuacacauca

SEQ ID NO: 384175 - RNA, 19 nt, Artificial Sequence
  Description of Artificial Sequence: Synthetic oligonucleotide
  Sense Strand Starting at position 832 of SEQ ID NO: 317511
aagauaugguucuuucuga

SEQ ID NO: 384176 - RNA, 19 nt, Artificial Sequence
  Description of Artificial Sequence: Synthetic oligonucleotide
  Antisense Strand to SEQ ID NO: 384175
ucagaaagaaccauaucuu

SEQ ID NO: 384177 - RNA, 19 nt, Artificial Sequence
  Description of Artificial Sequence: Synthetic oligonucleotide
  Sense Strand Starting at position 832 of SEQ ID NO: 317512
agauaugguucuuucugaa

SEQ ID NO: 384178 - RNA, 19 nt, Artificial Sequence
  Description of Artificial Sequence: Synthetic oligonucleotide
  Antisense Strand to SEQ ID NO: 384177
uucagaaagaaccauaucu

SEQ ID NO: 384179 - RNA, 19 nt, Artificial Sequence
  Description of Artificial Sequence: Synthetic oligonucleotide
  Sense Strand Starting at position 832 of SEQ ID NO: 317560
caguauaacgugcagagau

SEQ ID NO: 384180 - RNA, 19 nt, Artificial Sequence
  Description of Artificial Sequence: Synthetic oligonucleotide
  Antisense Strand to SEQ ID NO: 384179
aucucugcacguuauacug

SEQ ID NO: 384181 - RNA, 19 nt, Artificial Sequence
  Description of Artificial Sequence: Synthetic oligonucleotide
  Sense Strand Starting at position 832 of SEQ ID NO: 317632
gacaccaaugucgacauau

SEQ ID NO: 384182 - RNA, 19 nt, Artificial Sequence
  Description of Artificial Sequence: Synthetic oligonucleotide
  Antisense Strand to SEQ ID NO: 384181
auaugucgacauugguguc

SEQ ID NO: 384183 - RNA, 19 nt, Artificial Sequence
  Description of Artificial Sequence: Synthetic oligonucleotide
  Sense Strand Starting at position 832 of SEQ ID NO: 317772
guuugugcuguguuacuau

SEQ ID NO: 384184 - RNA, 19 nt, Artificial Sequence
  Description of Artificial Sequence: Synthetic oligonucleotide
  Antisense Strand to SEQ ID NO: 384183
auaguaacacagcacaaac

SEQ ID NO: 384185 - RNA, 19 nt, Artificial Sequence
  Description of Artificial Sequence: Synthetic oligonucleotide
  Sense Strand Starting at position 832 of SEQ ID NO: 317826
ucuguaauauaauugguga

SEQ ID NO: 384186 - RNA, 19 nt, Artificial Sequence
  Description of Artificial Sequence: Synthetic oligonucleotide
  Antisense Strand to SEQ ID NO: 384185
ucaccaauuauauuacaga

SEQ ID NO: 384187 - RNA, 19 nt, Artificial Sequence
  Description of Artificial Sequence: Synthetic oligonucleotide
  Sense Strand Starting at position 832 of SEQ ID NO: 318035
gccaaauuauggguaacaa

SEQ ID NO: 384188 - RNA, 19 nt, Artificial Sequence
  Description of Artificial Sequence: Synthetic oligonucleotide
  Antisense Strand to SEQ ID NO: 384187
uuguuacccauaauuuggc

SEQ ID NO: 384189 - RNA, 19 nt, Artificial Sequence
  Description of Artificial Sequence: Synthetic oligonucleotide
  Sense Strand Starting at position 832 of SEQ ID NO: 318107
uuauaacuggcuuaugaca

SEQ ID NO: 384190 - RNA, 19 nt, Artificial Sequence
  Description of Artificial Sequence: Synthetic oligonucleotide
  Antisense Strand to SEQ ID NO: 384189
ugucauaagccaguuauaa

SEQ ID NO: 384191 - RNA, 19 nt, Artificial Sequence
  Description of Artificial Sequence: Synthetic oligonucleotide
  Sense Strand Starting at position 832 of SEQ ID NO: 318174
caguguucuggacauugga

SEQ ID NO: 384192 - RNA, 19 nt, Artificial Sequence
  Description of Artificial Sequence: Synthetic oligonucleotide
  Antisense Strand to SEQ ID NO: 384191
uccaauguccagaacacug

SEQ ID NO: 384193 - RNA, 19 nt, Artificial Sequence
  Description of Artificial Sequence: Synthetic oligonucleotide
  Sense Strand Starting at position 832 of SEQ ID NO: 318177
uguucuggacauuggagau

SEQ ID NO: 384194 - RNA, 19 nt, Artificial Sequence
  Description of Artificial Sequence: Synthetic oligonucleotide
  Antisense Strand to SEQ ID NO: 384193
aucuccaauguccagaaca

SEQ ID NO: 384195 - RNA, 19 nt, Artificial Sequence
  Description of Artificial Sequence: Synthetic oligonucleotide
  Sense Strand Starting at position 832 of SEQ ID NO: 318229
uucccucaugaagaguauu

SEQ ID NO: 384196 - RNA, 19 nt, Artificial Sequence
  Description of Artificial Sequence: Synthetic oligonucleotide
  Antisense Strand to SEQ ID NO: 384195
aauacucuucaugagggaa

SEQ ID NO: 384197 - RNA, 19 nt, Artificial Sequence
  Description of Artificial Sequence: Synthetic oligonucleotide
  Sense Strand Starting at position 832 of SEQ ID NO: 318291
uuggcaaagaccugugaga

SEQ ID NO: 384198 - RNA, 19 nt, Artificial Sequence
  Description of Artificial Sequence: Synthetic oligonucleotide
  Antisense Strand to SEQ ID NO: 384197
ucucacaggucuuugccaa

SEQ ID NO: 384199 - RNA, 19 nt, Artificial Sequence
  Description of Artificial Sequence: Synthetic oligonucleotide
  Sense Strand Starting at position 832 of SEQ ID NO: 318293
ggcaaagaccugugagaca

SEQ ID NO: 384200 - RNA, 19 nt, Artificial Sequence
  Description of Artificial Sequence: Synthetic oligonucleotide
  Antisense Strand to SEQ ID NO: 384199
ugucucacaggucuuugcc

SEQ ID NO: 384201 - RNA, 19 nt, Artificial Sequence
  Description of Artificial Sequence: Synthetic oligonucleotide
  Sense Strand Starting at position 832 of SEQ ID NO: 318310
cacagagcuuguuuagaga

SEQ ID NO: 384202 - RNA, 19 nt, Artificial Sequence
  Description of Artificial Sequence: Synthetic oligonucleotide
  Antisense Strand to SEQ ID NO: 384201
ucucuaaacaagcucugug

SEQ ID NO: 384203 - RNA, 19 nt, Artificial Sequence
  Description of Artificial Sequence: Synthetic oligonucleotide
  Sense Strand Starting at position 832 of SEQ ID NO: 318323
uagagaaguucgccauuuc

SEQ ID NO: 384204 - RNA, 19 nt, Artificial Sequence
  Description of Artificial Sequence: Synthetic oligonucleotide
  Antisense Strand to SEQ ID NO: 384203
gaaauggcgaacuucucua

SEQ ID NO: 384205 - RNA, 19 nt, Artificial Sequence
  Description of Artificial Sequence: Synthetic oligonucleotide
  Sense Strand Starting at position 832 of SEQ ID NO: 318419
gaauacugaugugcauaga

SEQ ID NO: 384206 - RNA, 19 nt, Artificial Sequence
  Description of Artificial Sequence: Synthetic oligonucleotide
  Antisense Strand to SEQ ID NO: 384205
ucuaugcacaucaguauuc

SEQ ID NO: 384207 - RNA, 19 nt, Artificial Sequence
  Description of Artificial Sequence: Synthetic oligonucleotide
  Sense Strand Starting at position 832 of SEQ ID NO: 318462
ugagaucugguagguaaau

SEQ ID NO: 384208 - RNA, 19 nt, Artificial Sequence
  Description of Artificial Sequence: Synthetic oligonucleotide
  Antisense Strand to SEQ ID NO: 384207
auuuaccuaccagaucuca

SEQ ID NO: 384209 - RNA, 19 nt, Artificial Sequence
  Description of Artificial Sequence: Synthetic oligonucleotide
  Sense Strand Starting at position 832 of SEQ ID NO: 318463
gagaucugguagguaaaua

SEQ ID NO: 384210 - RNA, 19 nt, Artificial Sequence
  Description of Artificial Sequence: Synthetic oligonucleotide
  Antisense Strand to SEQ ID NO: 384209
uauuuaccuaccagaucuc

SEQ ID NO: 384211 - RNA, 19 nt, Artificial Sequence
  Description of Artificial Sequence: Synthetic oligonucleotide
  Sense Strand Starting at position 832 of SEQ ID NO: 318545
cagaguccuccagauguaa

SEQ ID NO: 384212 - RNA, 19 nt, Artificial Sequence
  Description of Artificial Sequence: Synthetic oligonucleotide
  Antisense Strand to SEQ ID NO: 384211
uuacaucuggaggacucug

SEQ ID NO: 384213 - RNA, 19 nt, Artificial Sequence
  Description of Artificial Sequence: Synthetic oligonucleotide
  Sense Strand Starting at position 832 of SEQ ID NO: 318739
agauguuauugaguaugac

SEQ ID NO: 384214 - RNA, 19 nt, Artificial Sequence
  Description of Artificial Sequence: Synthetic oligonucleotide
  Antisense Strand to SEQ ID NO: 384213
gucauacucaauaacaucu

SEQ ID NO: 384215 - RNA, 19 nt, Artificial Sequence
  Description of Artificial Sequence: Synthetic oligonucleotide
  Sense Strand Starting at position 832 of SEQ ID NO: 318740
gauguuauugaguaugacu

SEQ ID NO: 384216 - RNA, 19 nt, Artificial Sequence
  Description of Artificial Sequence: Synthetic oligonucleotide
  Antisense Strand to SEQ ID NO: 384215
agucauacucaauaacauc

SEQ ID NO: 384217 - RNA, 19 nt, Artificial Sequence
  Description of Artificial Sequence: Synthetic oligonucleotide
  Sense Strand Starting at position 832 of SEQ ID NO: 318771
auaauuuguugcuucuuga

SEQ ID NO: 384218 - RNA, 19 nt, Artificial Sequence
  Description of Artificial Sequence: Synthetic oligonucleotide
  Antisense Strand to SEQ ID NO: 384217
ucaagaagcaacaaauuau

SEQ ID NO: 384219 - RNA, 19 nt, Artificial Sequence
  Description of Artificial Sequence: Synthetic oligonucleotide
  Sense Strand Starting at position 832 of SEQ ID NO: 318959
uuggacucuguguaagaca

SEQ ID NO: 384220 - RNA, 19 nt, Artificial Sequence
  Description of Artificial Sequence: Synthetic oligonucleotide
  Antisense Strand to SEQ ID NO: 384219
ugucuuacacagaguccaa

SEQ ID NO: 384221 - RNA, 19 nt, Artificial Sequence
  Description of Artificial Sequence: Synthetic oligonucleotide
  Sense Strand Starting at position 832 of SEQ ID NO: 319158
ucacaauggcuccaugagu

SEQ ID NO: 384222 - RNA, 19 nt, Artificial Sequence
  Description of Artificial Sequence: Synthetic oligonucleotide
  Antisense Strand to SEQ ID NO: 384221
acucauggagccauuguga

SEQ ID NO: 384223 - RNA, 19 nt, Artificial Sequence
  Description of Artificial Sequence: Synthetic oligonucleotide
  Sense Strand Starting at position 832 of SEQ ID NO: 319164
uggcuccaugaguaaagua

SEQ ID NO: 384224 - RNA, 19 nt, Artificial Sequence
  Description of Artificial Sequence: Synthetic oligonucleotide
  Antisense Strand to SEQ ID NO: 384223
uacuuuacucauggagcca

SEQ ID NO: 384225 - RNA, 19 nt, Artificial Sequence
  Description of Artificial Sequence: Synthetic oligonucleotide
  Sense Strand Starting at position 833 of SEQ ID NO: 315273
caggaauggcccuggguuu

SEQ ID NO: 384226 - RNA, 19 nt, Artificial Sequence
  Description of Artificial Sequence: Synthetic oligonucleotide
  Antisense Strand to SEQ ID NO: 384225
aaacccagggccauuccug

SEQ ID NO: 384227 - RNA, 19 nt, Artificial Sequence
  Description of Artificial Sequence: Synthetic oligonucleotide
  Sense Strand Starting at position 833 of SEQ ID NO: 315280
ggcccuggguuugcaaaua

SEQ ID NO: 384228 - RNA, 19 nt, Artificial Sequence
  Description of Artificial Sequence: Synthetic oligonucleotide
  Antisense Strand to SEQ ID NO: 384227
uauuugcaaacccagggcc

SEQ ID NO: 384229 - RNA, 19 nt, Artificial Sequence
  Description of Artificial Sequence: Synthetic oligonucleotide
  Sense Strand Starting at position 833 of SEQ ID NO: 315285
uggguuugcaaauauguuu

SEQ ID NO: 384230 - RNA, 19 nt, Artificial Sequence
  Description of Artificial Sequence: Synthetic oligonucleotide
  Antisense Strand to SEQ ID NO: 384229
aaacauauuugcaaaccca

SEQ ID NO: 384231 - RNA, 19 nt, Artificial Sequence
  Description of Artificial Sequence: Synthetic oligonucleotide
  Sense Strand Starting at position 833 of SEQ ID NO: 315293
caaauauguuugucacgga

SEQ ID NO: 384232 - RNA, 19 nt, Artificial Sequence
  Description of Artificial Sequence: Synthetic oligonucleotide
  Antisense Strand to SEQ ID NO: 384231
uccgugacaaacauauuug

SEQ ID NO: 384233 - RNA, 19 nt, Artificial Sequence
  Description of Artificial Sequence: Synthetic oligonucleotide
  Sense Strand Starting at position 833 of SEQ ID NO: 315348
ggacaauguccaugggacu

SEQ ID NO: 384234 - RNA, 19 nt, Artificial Sequence
  Description of Artificial Sequence: Synthetic oligonucleotide
  Antisense Strand to SEQ ID NO: 384233
agucccauggacauugucc

SEQ ID NO: 384235 - RNA, 19 nt, Artificial Sequence
  Description of Artificial Sequence: Synthetic oligonucleotide
  Sense Strand Starting at position 833 of SEQ ID NO: 315349
gacaauguccaugggacua

SEQ ID NO: 384236 - RNA, 19 nt, Artificial Sequence
  Description of Artificial Sequence: Synthetic oligonucleotide
  Antisense Strand to SEQ ID NO: 384235
uagucccauggacauuguc

SEQ ID NO: 384237 - RNA, 19 nt, Artificial Sequence
  Description of Artificial Sequence: Synthetic oligonucleotide
  Sense Strand Starting at position 833 of SEQ ID NO: 315388
acugguggucuuugaagga

SEQ ID NO: 384238 - RNA, 19 nt, Artificial Sequence
  Description of Artificial Sequence: Synthetic oligonucleotide
  Antisense Strand to SEQ ID NO: 384237
uccuucaaagaccaccagu

SEQ ID NO: 384239 - RNA, 19 nt, Artificial Sequence
  Description of Artificial Sequence: Synthetic oligonucleotide
  Sense Strand Starting at position 833 of SEQ ID NO: 315459
caggcuauguggguucuaa

SEQ ID NO: 384240 - RNA, 19 nt, Artificial Sequence
  Description of Artificial Sequence: Synthetic oligonucleotide
  Antisense Strand to SEQ ID NO: 384239
uuagaacccacauagccug

SEQ ID NO: 384241 - RNA, 19 nt, Artificial Sequence
  Description of Artificial Sequence: Synthetic oligonucleotide
  Sense Strand Starting at position 833 of SEQ ID NO: 315643
cucagaaacgaugagcuau

SEQ ID NO: 384242 - RNA, 19 nt, Artificial Sequence
  Description of Artificial Sequence: Synthetic oligonucleotide
  Antisense Strand to SEQ ID NO: 384241
auagcucaucguuucugag

SEQ ID NO: 384243 - RNA, 19 nt, Artificial Sequence
  Description of Artificial Sequence: Synthetic oligonucleotide
  Sense Strand Starting at position 833 of SEQ ID NO: 315677
ggagucacccuagaaagcu

SEQ ID NO: 384244 - RNA, 19 nt, Artificial Sequence
  Description of Artificial Sequence: Synthetic oligonucleotide
  Antisense Strand to SEQ ID NO: 384243
agcuuucuagggugacucc

SEQ ID NO: 384245 - RNA, 19 nt, Artificial Sequence
  Description of Artificial Sequence: Synthetic oligonucleotide
  Sense Strand Starting at position 833 of SEQ ID NO: 315685
ccuagaaagcuuugcccau

SEQ ID NO: 384246 - RNA, 19 nt, Artificial Sequence
  Description of Artificial Sequence: Synthetic oligonucleotide
  Antisense Strand to SEQ ID NO: 384245
augggcaaagcuuucuagg

SEQ ID NO: 384247 - RNA, 19 nt, Artificial Sequence
  Description of Artificial Sequence: Synthetic oligonucleotide
  Sense Strand Starting at position 833 of SEQ ID NO: 315689
gaaagcuuugcccaugaug

SEQ ID NO: 384248 - RNA, 19 nt, Artificial Sequence
  Description of Artificial Sequence: Synthetic oligonucleotide
  Antisense Strand to SEQ ID NO: 384247
caucaugggcaaagcuuuc

SEQ ID NO: 384249 - RNA, 19 nt, Artificial Sequence
  Description of Artificial Sequence: Synthetic oligonucleotide
  Sense Strand Starting at position 833 of SEQ ID NO: 315698
gcccaugauggcugaacaa

SEQ ID NO: 384250 - RNA, 19 nt, Artificial Sequence
  Description of Artificial Sequence: Synthetic oligonucleotide
  Antisense Strand to SEQ ID NO: 384249
uuguucagccaucaugggc

SEQ ID NO: 384251 - RNA, 19 nt, Artificial Sequence
  Description of Artificial Sequence: Synthetic oligonucleotide
  Sense Strand Starting at position 833 of SEQ ID NO: 315800
gguaccaguuuaucuacau

SEQ ID NO: 384252 - RNA, 19 nt, Artificial Sequence
  Description of Artificial Sequence: Synthetic oligonucleotide
  Antisense Strand to SEQ ID NO: 384251
auguagauaaacugguacc

SEQ ID NO: 384253 - RNA, 19 nt, Artificial Sequence
  Description of Artificial Sequence: Synthetic oligonucleotide
  Sense Strand Starting at position 833 of SEQ ID NO: 315801
guaccaguuuaucuacauu

SEQ ID NO: 384254 - RNA, 19 nt, Artificial Sequence
  Description of Artificial Sequence: Synthetic oligonucleotide
  Antisense Strand to SEQ ID NO: 384253
aauguagauaaacugguac

SEQ ID NO: 384255 - RNA, 19 nt, Artificial Sequence
  Description of Artificial Sequence: Synthetic oligonucleotide
  Sense Strand Starting at position 833 of SEQ ID NO: 315890
ucggcagaaagcugguuau

SEQ ID NO: 384256 - RNA, 19 nt, Artificial Sequence
  Description of Artificial Sequence: Synthetic oligonucleotide
  Antisense Strand to SEQ ID NO: 384255
auaaccagcuuucugccga

SEQ ID NO: 384257 - RNA, 19 nt, Artificial Sequence
  Description of Artificial Sequence: Synthetic oligonucleotide
  Sense Strand Starting at position 833 of SEQ ID NO: 315893
gcagaaagcugguuaucag

SEQ ID NO: 384258 - RNA, 19 nt, Artificial Sequence
  Description of Artificial Sequence: Synthetic oligonucleotide
  Antisense Strand to SEQ ID NO: 384257
cugauaaccagcuuucugc

SEQ ID NO: 384259 - RNA, 19 nt, Artificial Sequence
  Description of Artificial Sequence: Synthetic oligonucleotide
  Sense Strand Starting at position 833 of SEQ ID NO: 315894
cagaaagcugguuaucagu

SEQ ID NO: 384260 - RNA, 19 nt, Artificial Sequence
  Description of Artificial Sequence: Synthetic oligonucleotide
  Antisense Strand to SEQ ID NO: 384259
acugauaaccagcuuucug

SEQ ID NO: 384261 - RNA, 19 nt, Artificial Sequence
  Description of Artificial Sequence: Synthetic oligonucleotide
  Sense Strand Starting at position 833 of SEQ ID NO: 315896
gaaagcugguuaucagucu

SEQ ID NO: 384262 - RNA, 19 nt, Artificial Sequence
  Description of Artificial Sequence: Synthetic oligonucleotide
  Antisense Strand to SEQ ID NO: 384261
agacugauaaccagcuuuc

SEQ ID NO: 384263 - RNA, 19 nt, Artificial Sequence
  Description of Artificial Sequence: Synthetic oligonucleotide
  Sense Strand Starting at position 833 of SEQ ID NO: 315927
ccaguucuagaaggugaca

SEQ ID NO: 384264 - RNA, 19 nt, Artificial Sequence
  Description of Artificial Sequence: Synthetic oligonucleotide
  Antisense Strand to SEQ ID NO: 384263
ugucaccuucuagaacugg

SEQ ID NO: 384265 - RNA, 19 nt, Artificial Sequence
  Description of Artificial Sequence: Synthetic oligonucleotide
  Sense Strand Starting at position 833 of SEQ ID NO: 315929
aguucuagaaggugacaga

SEQ ID NO: 384266 - RNA, 19 nt, Artificial Sequence
  Description of Artificial Sequence: Synthetic oligonucleotide
  Antisense Strand to SEQ ID NO: 384265
ucugucaccuucuagaacu

SEQ ID NO: 384267 - RNA, 19 nt, Artificial Sequence
  Description of Artificial Sequence: Synthetic oligonucleotide
  Sense Strand Starting at position 833 of SEQ ID NO: 315932
ucuagaaggugacagaauu

SEQ ID NO: 384268 - RNA, 19 nt, Artificial Sequence
  Description of Artificial Sequence: Synthetic oligonucleotide
  Antisense Strand to SEQ ID NO: 384267
aauucugucaccuucuaga

SEQ ID NO: 384269 - RNA, 19 nt, Artificial Sequence
  Description of Artificial Sequence: Synthetic oligonucleotide
  Sense Strand Starting at position 833 of SEQ ID NO: 316013
cagcccugugauggaagaa

SEQ ID NO: 384270 - RNA, 19 nt, Artificial Sequence
  Description of Artificial Sequence: Synthetic oligonucleotide
  Antisense Strand to SEQ ID NO: 384269
uucuuccaucacagggcug

SEQ ID NO: 384271 - RNA, 19 nt, Artificial Sequence
  Description of Artificial Sequence: Synthetic oligonucleotide
  Sense Strand Starting at position 833 of SEQ ID NO: 316055
gagggaguguuacccuauu

SEQ ID NO: 384272 - RNA, 19 nt, Artificial Sequence
  Description of Artificial Sequence: Synthetic oligonucleotide
  Antisense Strand to SEQ ID NO: 384271
aauaggguaacacucccuc

SEQ ID NO: 384273 - RNA, 19 nt, Artificial Sequence
  Description of Artificial Sequence: Synthetic oligonucleotide
  Sense Strand Starting at position 833 of SEQ ID NO: 316198
uggcccuucccaggaguau

SEQ ID NO: 384274 - RNA, 19 nt, Artificial Sequence
  Description of Artificial Sequence: Synthetic oligonucleotide
  Antisense Strand to SEQ ID NO: 384273
auacuccugggaagggcca

SEQ ID NO: 384275 - RNA, 19 nt, Artificial Sequence
  Description of Artificial Sequence: Synthetic oligonucleotide
  Sense Strand Starting at position 833 of SEQ ID NO: 316210
ggaguaucuggcggacuua

SEQ ID NO: 384276 - RNA, 19 nt, Artificial Sequence
  Description of Artificial Sequence: Synthetic oligonucleotide
  Antisense Strand to SEQ ID NO: 384275
uaaguccgccagauacucc

SEQ ID NO: 384277 - RNA, 19 nt, Artificial Sequence
  Description of Artificial Sequence: Synthetic oligonucleotide
  Sense Strand Starting at position 833 of SEQ ID NO: 317231
cccucuugccuccgggaaa

SEQ ID NO: 384278 - RNA, 19 nt, Artificial Sequence
  Description of Artificial Sequence: Synthetic oligonucleotide
  Antisense Strand to SEQ ID NO: 384277
uuucccggaggcaagaggg

SEQ ID NO: 384279 - RNA, 19 nt, Artificial Sequence
  Description of Artificial Sequence: Synthetic oligonucleotide
  Sense Strand Starting at position 833 of SEQ ID NO: 317248
aaaguaucgucugcaucuu

SEQ ID NO: 384280 - RNA, 19 nt, Artificial Sequence
  Description of Artificial Sequence: Synthetic oligonucleotide
  Antisense Strand to SEQ ID NO: 384279
aagaugcagacgauacuuu

SEQ ID NO: 384281 - RNA, 19 nt, Artificial Sequence
  Description of Artificial Sequence: Synthetic oligonucleotide
  Sense Strand Starting at position 833 of SEQ ID NO: 317260
gcaucuucuugcuccagga

SEQ ID NO: 384282 - RNA, 19 nt, Artificial Sequence
  Description of Artificial Sequence: Synthetic oligonucleotide
  Antisense Strand to SEQ ID NO: 384281
uccuggagcaagaagaugc

SEQ ID NO: 384283 - RNA, 19 nt, Artificial Sequence
  Description of Artificial Sequence: Synthetic oligonucleotide
  Sense Strand Starting at position 833 of SEQ ID NO: 317435
uccggaucucccgggaagu

SEQ ID NO: 384284 - RNA, 19 nt, Artificial Sequence
  Description of Artificial Sequence: Synthetic oligonucleotide
  Antisense Strand to SEQ ID NO: 384283
acuucccgggagauccgga

SEQ ID NO: 384285 - RNA, 19 nt, Artificial Sequence
  Description of Artificial Sequence: Synthetic oligonucleotide
  Sense Strand Starting at position 833 of SEQ ID NO: 317582
ugaaccagugcucagguau

SEQ ID NO: 384286 - RNA, 19 nt, Artificial Sequence
  Description of Artificial Sequence: Synthetic oligonucleotide
  Antisense Strand to SEQ ID NO: 384285
auaccugagcacugguuca

SEQ ID NO: 384287 - RNA, 19 nt, Artificial Sequence
  Description of Artificial Sequence: Synthetic oligonucleotide
  Sense Strand Starting at position 833 of SEQ ID NO: 317588
agugcucagguauauggaa

SEQ ID NO: 384288 - RNA, 19 nt, Artificial Sequence
  Description of Artificial Sequence: Synthetic oligonucleotide
  Antisense Strand to SEQ ID NO: 384287
uuccauauaccugagcacu

SEQ ID NO: 384289 - RNA, 19 nt, Artificial Sequence
  Description of Artificial Sequence: Synthetic oligonucleotide
  Sense Strand Starting at position 833 of SEQ ID NO: 317602
uggaacacuccuugcauca

SEQ ID NO: 384290 - RNA, 19 nt, Artificial Sequence
  Description of Artificial Sequence: Synthetic oligonucleotide
  Antisense Strand to SEQ ID NO: 384289
ugaugcaaggaguguucca

SEQ ID NO: 384291 - RNA, 19 nt, Artificial Sequence
  Description of Artificial Sequence: Synthetic oligonucleotide
  Sense Strand Starting at position 833 of SEQ ID NO: 317775
gcugguuauccucaggaag

SEQ ID NO: 384292 - RNA, 19 nt, Artificial Sequence
  Description of Artificial Sequence: Synthetic oligonucleotide
  Antisense Strand to SEQ ID NO: 384291
cuuccugaggauaaccagc

SEQ ID NO: 384293 - RNA, 19 nt, Artificial Sequence
  Description of Artificial Sequence: Synthetic oligonucleotide
  Sense Strand Starting at position 833 of SEQ ID NO: 318631
gaaugaaguugagacuauu

SEQ ID NO: 384294 - RNA, 19 nt, Artificial Sequence
  Description of Artificial Sequence: Synthetic oligonucleotide
  Antisense Strand to SEQ ID NO: 384293
aauagucucaacuucauuc

SEQ ID NO: 384295 - RNA, 19 nt, Artificial Sequence
  Description of Artificial Sequence: Synthetic oligonucleotide
  Sense Strand Starting at position 833 of SEQ ID NO: 319078
cugauagcucauugccaga

SEQ ID NO: 384296 - RNA, 19 nt, Artificial Sequence
  Description of Artificial Sequence: Synthetic oligonucleotide
  Antisense Strand to SEQ ID NO: 384295
ucuggcaaugagcuaucag

SEQ ID NO: 384297 - RNA, 19 nt, Artificial Sequence
  Description of Artificial Sequence: Synthetic oligonucleotide
  Sense Strand Starting at position 833 of SEQ ID NO: 319080
gauagcucauugccagaca

SEQ ID NO: 384298 - RNA, 19 nt, Artificial Sequence
  Description of Artificial Sequence: Synthetic oligonucleotide
  Antisense Strand to SEQ ID NO: 384297
ugucuggcaaugagcuauc

SEQ ID NO: 384299 - RNA, 19 nt, Artificial Sequence
  Description of Artificial Sequence: Synthetic oligonucleotide
  Sense Strand Starting at position 833 of SEQ ID NO: 319083
agcucauugccagacaaca

SEQ ID NO: 384300 - RNA, 19 nt, Artificial Sequence
  Description of Artificial Sequence: Synthetic oligonucleotide
  Antisense Strand to SEQ ID NO: 384299
uguugucuggcaaugagcu

SEQ ID NO: 384301 - RNA, 19 nt, Artificial Sequence
  Description of Artificial Sequence: Synthetic oligonucleotide
  Sense Strand Starting at position 833 of SEQ ID NO: 319135
cugucagcugugggaauuu

SEQ ID NO: 384302 - RNA, 19 nt, Artificial Sequence
  Description of Artificial Sequence: Synthetic oligonucleotide
  Antisense Strand to SEQ ID NO: 384301
aaauucccacagcugacag

SEQ ID NO: 384303 - RNA, 19 nt, Artificial Sequence
  Description of Artificial Sequence: Synthetic oligonucleotide
  Sense Strand Starting at position 833 of SEQ ID NO: 319203
cuuugaugccaugacaaua

SEQ ID NO: 384304 - RNA, 19 nt, Artificial Sequence
  Description of Artificial Sequence: Synthetic oligonucleotide
  Antisense Strand to SEQ ID NO: 384303
uauugucauggcaucaaag

SEQ ID NO: 384305 - RNA, 19 nt, Artificial Sequence
  Description of Artificial Sequence: Synthetic oligonucleotide
  Sense Strand Starting at position 834 of SEQ ID NO: 315379
aguauugaagcugaguauu

SEQ ID NO: 384306 - RNA, 19 nt, Artificial Sequence
  Description of Artificial Sequence: Synthetic oligonucleotide
  Antisense Strand to SEQ ID NO: 384305
aauacucagcuucaauacu

SEQ ID NO: 384307 - RNA, 19 nt, Artificial Sequence
  Description of Artificial Sequence: Synthetic oligonucleotide
  Sense Strand Starting at position 834 of SEQ ID NO: 315496
aucggaaaguugguuuaag

SEQ ID NO: 384308 - RNA, 19 nt, Artificial Sequence
  Description of Artificial Sequence: Synthetic oligonucleotide
  Antisense Strand to SEQ ID NO: 384307
cuuaaaccaacuuuccgau

SEQ ID NO: 384309 - RNA, 19 nt, Artificial Sequence
  Description of Artificial Sequence: Synthetic oligonucleotide
  Sense Strand Starting at position 834 of SEQ ID NO: 315497
ucggaaaguugguuuaaga

SEQ ID NO: 384310 - RNA, 19 nt, Artificial Sequence
  Description of Artificial Sequence: Synthetic oligonucleotide
  Antisense Strand to SEQ ID NO: 384309
ucuuaaaccaacuuuccga

SEQ ID NO: 384311 - RNA, 19 nt, Artificial Sequence
  Description of Artificial Sequence: Synthetic oligonucleotide
  Sense Strand Starting at position 834 of SEQ ID NO: 315571
uaauaaguagcucgaaaga

SEQ ID NO: 384312 - RNA, 19 nt, Artificial Sequence
  Description of Artificial Sequence: Synthetic oligonucleotide
  Antisense Strand to SEQ ID NO: 384311
ucuuucgagcuacuuauua

SEQ ID NO: 384313 - RNA, 19 nt, Artificial Sequence
  Description of Artificial Sequence: Synthetic oligonucleotide
  Sense Strand Starting at position 834 of SEQ ID NO: 315772
uguaacuuuacugaguguu

SEQ ID NO: 384314 - RNA, 19 nt, Artificial Sequence
  Description of Artificial Sequence: Synthetic oligonucleotide
  Antisense Strand to SEQ ID NO: 384313
aacacucaguaaaguuaca

SEQ ID NO: 384315 - RNA, 19 nt, Artificial Sequence
  Description of Artificial Sequence: Synthetic oligonucleotide
  Sense Strand Starting at position 834 of SEQ ID NO: 315859
uacuuauaagagcggaaga

SEQ ID NO: 384316 - RNA, 19 nt, Artificial Sequence
  Description of Artificial Sequence: Synthetic oligonucleotide
  Antisense Strand to SEQ ID NO: 384315
ucuuccgcucuuauaagua

SEQ ID NO: 384317 - RNA, 19 nt, Artificial Sequence
  Description of Artificial Sequence: Synthetic oligonucleotide
  Sense Strand Starting at position 834 of SEQ ID NO: 315861
cuuauaagagcggaagagu

SEQ ID NO: 384318 - RNA, 19 nt, Artificial Sequence
  Description of Artificial Sequence: Synthetic oligonucleotide
  Antisense Strand to SEQ ID NO: 384317
acucuuccgcucuuauaag

SEQ ID NO: 384319 - RNA, 19 nt, Artificial Sequence
  Description of Artificial Sequence: Synthetic oligonucleotide
  Sense Strand Starting at position 834 of SEQ ID NO: 315907
gugcacaaccuugauccaa

SEQ ID NO: 384320 - RNA, 19 nt, Artificial Sequence
  Description of Artificial Sequence: Synthetic oligonucleotide
  Antisense Strand to SEQ ID NO: 384319
uuggaucaagguugugcac

SEQ ID NO: 384321 - RNA, 19 nt, Artificial Sequence
  Description of Artificial Sequence: Synthetic oligonucleotide
  Sense Strand Starting at position 834 of SEQ ID NO: 316035
augauaucaaccggaguuc

SEQ ID NO: 384322 - RNA, 19 nt, Artificial Sequence
  Description of Artificial Sequence: Synthetic oligonucleotide
  Antisense Strand to SEQ ID NO: 384321
gaacuccgguugauaucau

SEQ ID NO: 384323 - RNA, 19 nt, Artificial Sequence
  Description of Artificial Sequence: Synthetic oligonucleotide
  Sense Strand Starting at position 834 of SEQ ID NO: 316046
cggaguucguuauuuauca

SEQ ID NO: 384324 - RNA, 19 nt, Artificial Sequence
  Description of Artificial Sequence: Synthetic oligonucleotide
  Antisense Strand to SEQ ID NO: 384323
ugauaaauaacgaacuccg

SEQ ID NO: 384325 - RNA, 19 nt, Artificial Sequence
  Description of Artificial Sequence: Synthetic oligonucleotide
  Sense Strand Starting at position 834 of SEQ ID NO: 316163
ucuguucuuggaugacuua

SEQ ID NO: 384326 - RNA, 19 nt, Artificial Sequence
  Description of Artificial Sequence: Synthetic oligonucleotide
  Antisense Strand to SEQ ID NO: 384325
uaagucauccaagaacaga

SEQ ID NO: 384327 - RNA, 19 nt, Artificial Sequence
  Description of Artificial Sequence: Synthetic oligonucleotide
  Sense Strand Starting at position 834 of SEQ ID NO: 316164
cuguucuuggaugacuuau

SEQ ID NO: 384328 - RNA, 19 nt, Artificial Sequence
  Description of Artificial Sequence: Synthetic oligonucleotide
  Antisense Strand to SEQ ID NO: 384327
auaagucauccaagaacag

SEQ ID NO: 384329 - RNA, 19 nt, Artificial Sequence
  Description of Artificial Sequence: Synthetic oligonucleotide
  Sense Strand Starting at position 834 of SEQ ID NO: 316170
uuggaugacuuaucuuuaa

SEQ ID NO: 384330 - RNA, 19 nt, Artificial Sequence
  Description of Artificial Sequence: Synthetic oligonucleotide
  Antisense Strand to SEQ ID NO: 384329
uuaaagauaagucauccaa

SEQ ID NO: 384331 - RNA, 19 nt, Artificial Sequence
  Description of Artificial Sequence: Synthetic oligonucleotide
  Sense Strand Starting at position 834 of SEQ ID NO: 316459
caagcuacucgcgacaaua

SEQ ID NO: 384332 - RNA, 19 nt, Artificial Sequence
  Description of Artificial Sequence: Synthetic oligonucleotide
  Antisense Strand to SEQ ID NO: 384331
uauugucgcgaguagcuug

SEQ ID NO: 384333 - RNA, 19 nt, Artificial Sequence
  Description of Artificial Sequence: Synthetic oligonucleotide
  Sense Strand Starting at position 834 of SEQ ID NO: 316471
gacaauauuccugagcagu

SEQ ID NO: 384334 - RNA, 19 nt, Artificial Sequence
  Description of Artificial Sequence: Synthetic oligonucleotide
  Antisense Strand to SEQ ID NO: 384333
acugcucaggaauauuguc

SEQ ID NO: 384335 - RNA, 19 nt, Artificial Sequence
  Description of Artificial Sequence: Synthetic oligonucleotide
  Sense Strand Starting at position 834 of SEQ ID NO: 316473
caauauuccugagcaguga

SEQ ID NO: 384336 - RNA, 19 nt, Artificial Sequence
  Description of Artificial Sequence: Synthetic oligonucleotide
  Antisense Strand to SEQ ID NO: 384335
ucacugcucaggaauauug

SEQ ID NO: 384337 - RNA, 19 nt, Artificial Sequence
  Description of Artificial Sequence: Synthetic oligonucleotide
  Sense Strand Starting at position 834 of SEQ ID NO: 316474
aauauuccugagcagugaa

SEQ ID NO: 384338 - RNA, 19 nt, Artificial Sequence
  Description of Artificial Sequence: Synthetic oligonucleotide
  Antisense Strand to SEQ ID NO: 384337
uucacugcucaggaauauu

SEQ ID NO: 384339 - RNA, 19 nt, Artificial Sequence
  Description of Artificial Sequence: Synthetic oligonucleotide
  Sense Strand Starting at position 834 of SEQ ID NO: 316525
gagaaucagugagaggaaa

SEQ ID NO: 384340 - RNA, 19 nt, Artificial Sequence
  Description of Artificial Sequence: Synthetic oligonucleotide
  Antisense Strand to SEQ ID NO: 384339
uuuccucucacugauucuc

SEQ ID NO: 384341 - RNA, 19 nt, Artificial Sequence
  Description of Artificial Sequence: Synthetic oligonucleotide
  Sense Strand Starting at position 834 of SEQ ID NO: 316562
gagagucugguccagcauu

SEQ ID NO: 384342 - RNA, 19 nt, Artificial Sequence
  Description of Artificial Sequence: Synthetic oligonucleotide
  Antisense Strand to SEQ ID NO: 384341
aaugcuggaccagacucuc

SEQ ID NO: 384343 - RNA, 19 nt, Artificial Sequence
  Description of Artificial Sequence: Synthetic oligonucleotide
  Sense Strand Starting at position 834 of SEQ ID NO: 316568
cugguccagcauuaagaaa

SEQ ID NO: 384344 - RNA, 19 nt, Artificial Sequence
  Description of Artificial Sequence: Synthetic oligonucleotide
  Antisense Strand to SEQ ID NO: 384343
uuucuuaaugcuggaccag

SEQ ID NO: 384345 - RNA, 19 nt, Artificial Sequence
  Description of Artificial Sequence: Synthetic oligonucleotide
  Sense Strand Starting at position 834 of SEQ ID NO: 317398
agucuuuguauugagagga

SEQ ID NO: 384346 - RNA, 19 nt, Artificial Sequence
  Description of Artificial Sequence: Synthetic oligonucleotide
  Antisense Strand to SEQ ID NO: 384345
uccucucaauacaaagacu

SEQ ID NO: 384347 - RNA, 19 nt, Artificial Sequence
  Description of Artificial Sequence: Synthetic oligonucleotide
  Sense Strand Starting at position 834 of SEQ ID NO: 317640
ggaggaguucaucaauguu

SEQ ID NO: 384348 - RNA, 19 nt, Artificial Sequence
  Description of Artificial Sequence: Synthetic oligonucleotide
  Antisense Strand to SEQ ID NO: 384347
aacauugaugaacuccucc

SEQ ID NO: 384349 - RNA, 19 nt, Artificial Sequence
  Description of Artificial Sequence: Synthetic oligonucleotide
  Sense Strand Starting at position 834 of SEQ ID NO: 317680
gagugucugauauggacua

SEQ ID NO: 384350 - RNA, 19 nt, Artificial Sequence
  Description of Artificial Sequence: Synthetic oligonucleotide
  Antisense Strand to SEQ ID NO: 384349
uaguccauaucagacacuc

SEQ ID NO: 384351 - RNA, 19 nt, Artificial Sequence
  Description of Artificial Sequence: Synthetic oligonucleotide
  Sense Strand Starting at position 834 of SEQ ID NO: 317682
gugucugauauggacuaga

SEQ ID NO: 384352 - RNA, 19 nt, Artificial Sequence
  Description of Artificial Sequence: Synthetic oligonucleotide
  Antisense Strand to SEQ ID NO: 384351
ucuaguccauaucagacac

SEQ ID NO: 384353 - RNA, 19 nt, Artificial Sequence
  Description of Artificial Sequence: Synthetic oligonucleotide
  Sense Strand Starting at position 834 of SEQ ID NO: 317702
acuguuaagcaucagaaau

SEQ ID NO: 384354 - RNA, 19 nt, Artificial Sequence
  Description of Artificial Sequence: Synthetic oligonucleotide
  Antisense Strand to SEQ ID NO: 384353
auuucugaugcuuaacagu

SEQ ID NO: 384355 - RNA, 19 nt, Artificial Sequence
  Description of Artificial Sequence: Synthetic oligonucleotide
  Sense Strand Starting at position 834 of SEQ ID NO: 318061
cuuuguggagcuuauauga

SEQ ID NO: 384356 - RNA, 19 nt, Artificial Sequence
  Description of Artificial Sequence: Synthetic oligonucleotide
  Antisense Strand to SEQ ID NO: 384355
ucauauaagcuccacaaag

SEQ ID NO: 384357 - RNA, 19 nt, Artificial Sequence
  Description of Artificial Sequence: Synthetic oligonucleotide
  Sense Strand Starting at position 834 of SEQ ID NO: 318080
ggacgcaguaauuaaagua

SEQ ID NO: 384358 - RNA, 19 nt, Artificial Sequence
  Description of Artificial Sequence: Synthetic oligonucleotide
  Antisense Strand to SEQ ID NO: 384357
uacuuuaauuacugcgucc

SEQ ID NO: 384359 - RNA, 19 nt, Artificial Sequence
  Description of Artificial Sequence: Synthetic oligonucleotide
  Sense Strand Starting at position 834 of SEQ ID NO: 318095
aguagucacaccugguaua

SEQ ID NO: 384360 - RNA, 19 nt, Artificial Sequence
  Description of Artificial Sequence: Synthetic oligonucleotide
  Antisense Strand to SEQ ID NO: 384359
uauaccaggugugacuacu

SEQ ID NO: 384361 - RNA, 19 nt, Artificial Sequence
  Description of Artificial Sequence: Synthetic oligonucleotide
  Sense Strand Starting at position 834 of SEQ ID NO: 318096
guagucacaccugguauaa

SEQ ID NO: 384362 - RNA, 19 nt, Artificial Sequence
  Description of Artificial Sequence: Synthetic oligonucleotide
  Antisense Strand to SEQ ID NO: 384361
uuauaccaggugugacuac

SEQ ID NO: 384363 - RNA, 19 nt, Artificial Sequence
  Description of Artificial Sequence: Synthetic oligonucleotide
  Sense Strand Starting at position 834 of SEQ ID NO: 318160
ccucguuaaggaggugaca

SEQ ID NO: 384364 - RNA, 19 nt, Artificial Sequence
  Description of Artificial Sequence: Synthetic oligonucleotide
  Antisense Strand to SEQ ID NO: 384363
ugucaccuccuuaacgagg

SEQ ID NO: 384365 - RNA, 19 nt, Artificial Sequence
  Description of Artificial Sequence: Synthetic oligonucleotide
  Sense Strand Starting at position 834 of SEQ ID NO: 318162
ucguuaaggaggugacacu

SEQ ID NO: 384366 - RNA, 19 nt, Artificial Sequence
  Description of Artificial Sequence: Synthetic oligonucleotide
  Antisense Strand to SEQ ID NO: 384365
agugucaccuccuuaacga

SEQ ID NO: 384367 - RNA, 19 nt, Artificial Sequence
  Description of Artificial Sequence: Synthetic oligonucleotide
  Sense Strand Starting at position 834 of SEQ ID NO: 318302
acaagaaggcgguacuauu

SEQ ID NO: 384368 - RNA, 19 nt, Artificial Sequence
  Description of Artificial Sequence: Synthetic oligonucleotide
  Antisense Strand to SEQ ID NO: 384367
aauaguaccgccuucuugu

SEQ ID NO: 384369 - RNA, 19 nt, Artificial Sequence
  Description of Artificial Sequence: Synthetic oligonucleotide
  Sense Strand Starting at position 834 of SEQ ID NO: 318361
uccugaaugccaugguaaa

SEQ ID NO: 384370 - RNA, 19 nt, Artificial Sequence
  Description of Artificial Sequence: Synthetic oligonucleotide
  Antisense Strand to SEQ ID NO: 384369
uuuaccauggcauucagga

SEQ ID NO: 384371 - RNA, 19 nt, Artificial Sequence
  Description of Artificial Sequence: Synthetic oligonucleotide
  Sense Strand Starting at position 834 of SEQ ID NO: 318438
uggcuuacacuuuaagauc

SEQ ID NO: 384372 - RNA, 19 nt, Artificial Sequence
  Description of Artificial Sequence: Synthetic oligonucleotide
  Antisense Strand to SEQ ID NO: 384371
gaucuuaaaguguaagcca

SEQ ID NO: 384373 - RNA, 19 nt, Artificial Sequence
  Description of Artificial Sequence: Synthetic oligonucleotide
  Sense Strand Starting at position 834 of SEQ ID NO: 318536
gaggaauugugcuucucua

SEQ ID NO: 384374 - RNA, 19 nt, Artificial Sequence
  Description of Artificial Sequence: Synthetic oligonucleotide
  Antisense Strand to SEQ ID NO: 384373
uagagaagcacaauuccuc

SEQ ID NO: 384375 - RNA, 19 nt, Artificial Sequence
  Description of Artificial Sequence: Synthetic oligonucleotide
  Sense Strand Starting at position 834 of SEQ ID NO: 318723
aauagaauguuucugacag

SEQ ID NO: 384376 - RNA, 19 nt, Artificial Sequence
  Description of Artificial Sequence: Synthetic oligonucleotide
  Antisense Strand to SEQ ID NO: 384375
cugucagaaacauucuauu

SEQ ID NO: 384377 - RNA, 19 nt, Artificial Sequence
  Description of Artificial Sequence: Synthetic oligonucleotide
  Sense Strand Starting at position 834 of SEQ ID NO: 318825
ggcaccuacuuaucucaga

SEQ ID NO: 384378 - RNA, 19 nt, Artificial Sequence
  Description of Artificial Sequence: Synthetic oligonucleotide
  Antisense Strand to SEQ ID NO: 384377
ucugagauaaguaggugcc

SEQ ID NO: 384379 - RNA, 19 nt, Artificial Sequence
  Description of Artificial Sequence: Synthetic oligonucleotide
  Sense Strand Starting at position 834 of SEQ ID NO: 318915
ugugauccugcauaggacu

SEQ ID NO: 384380 - RNA, 19 nt, Artificial Sequence
  Description of Artificial Sequence: Synthetic oligonucleotide
  Antisense Strand to SEQ ID NO: 384379
aguccuaugcaggaucaca

SEQ ID NO: 384381 - RNA, 19 nt, Artificial Sequence
  Description of Artificial Sequence: Synthetic oligonucleotide
  Sense Strand Starting at position 834 of SEQ ID NO: 318921
ccugcauaggacuggaaau

SEQ ID NO: 384382 - RNA, 19 nt, Artificial Sequence
  Description of Artificial Sequence: Synthetic oligonucleotide
  Antisense Strand to SEQ ID NO: 384381
auuuccaguccuaugcagg

SEQ ID NO: 384383 - RNA, 19 nt, Artificial Sequence
  Description of Artificial Sequence: Synthetic oligonucleotide
  Sense Strand Starting at position 834 of SEQ ID NO: 318922
cugcauaggacuggaaauu

SEQ ID NO: 384384 - RNA, 19 nt, Artificial Sequence
  Description of Artificial Sequence: Synthetic oligonucleotide
  Antisense Strand to SEQ ID NO: 384383
aauuuccaguccuaugcag

SEQ ID NO: 384385 - RNA, 19 nt, Artificial Sequence
  Description of Artificial Sequence: Synthetic oligonucleotide
  Sense Strand Starting at position 835 of SEQ ID NO: 315286
acucgagcuccucaccaau

SEQ ID NO: 384386 - RNA, 19 nt, Artificial Sequence
  Description of Artificial Sequence: Synthetic oligonucleotide
  Antisense Strand to SEQ ID NO: 384385
auuggugaggagcucgagu

SEQ ID NO: 384387 - RNA, 19 nt, Artificial Sequence
  Description of Artificial Sequence: Synthetic oligonucleotide
  Sense Strand Starting at position 835 of SEQ ID NO: 315289
cgagcuccucaccaauagu

SEQ ID NO: 384388 - RNA, 19 nt, Artificial Sequence
  Description of Artificial Sequence: Synthetic oligonucleotide
  Antisense Strand to SEQ ID NO: 384387
acuauuggugaggagcucg

SEQ ID NO: 384389 - RNA, 19 nt, Artificial Sequence
  Description of Artificial Sequence: Synthetic oligonucleotide
  Sense Strand Starting at position 835 of SEQ ID NO: 315300
ccaauaguuuaaccagagu

SEQ ID NO: 384390 - RNA, 19 nt, Artificial Sequence
  Description of Artificial Sequence: Synthetic oligonucleotide
  Antisense Strand to SEQ ID NO: 384389
acucugguuaaacuauugg

SEQ ID NO: 384391 - RNA, 19 nt, Artificial Sequence
  Description of Artificial Sequence: Synthetic oligonucleotide
  Sense Strand Starting at position 835 of SEQ ID NO: 315423
aaguguaugcaaugcagaa

SEQ ID NO: 384392 - RNA, 19 nt, Artificial Sequence
  Description of Artificial Sequence: Synthetic oligonucleotide
  Antisense Strand to SEQ ID NO: 384391
uucugcauugcauacacuu

SEQ ID NO: 384393 - RNA, 19 nt, Artificial Sequence
  Description of Artificial Sequence: Synthetic oligonucleotide
  Sense Strand Starting at position 835 of SEQ ID NO: 315435
ugcagaaggcugugaaauu

SEQ ID NO: 384394 - RNA, 19 nt, Artificial Sequence
  Description of Artificial Sequence: Synthetic oligonucleotide
  Antisense Strand to SEQ ID NO: 384393
aauuucacagccuucugca

SEQ ID NO: 384395 - RNA, 19 nt, Artificial Sequence
  Description of Artificial Sequence: Synthetic oligonucleotide
  Sense Strand Starting at position 835 of SEQ ID NO: 315624
ugugccuguuuccuacaaa

SEQ ID NO: 384396 - RNA, 19 nt, Artificial Sequence
  Description of Artificial Sequence: Synthetic oligonucleotide
  Antisense Strand to SEQ ID NO: 384395
uuuguaggaaacaggcaca

SEQ ID NO: 384397 - RNA, 19 nt, Artificial Sequence
  Description of Artificial Sequence: Synthetic oligonucleotide
  Sense Strand Starting at position 835 of SEQ ID NO: 315627
gccuguuuccuacaaagcu

SEQ ID NO: 384398 - RNA, 19 nt, Artificial Sequence
  Description of Artificial Sequence: Synthetic oligonucleotide
  Antisense Strand to SEQ ID NO: 384397
agcuuuguaggaaacaggc

SEQ ID NO: 384399 - RNA, 19 nt, Artificial Sequence
  Description of Artificial Sequence: Synthetic oligonucleotide
  Sense Strand Starting at position 835 of SEQ ID NO: 315686
agaaguucccaaggauucu

SEQ ID NO: 384400 - RNA, 19 nt, Artificial Sequence
  Description of Artificial Sequence: Synthetic oligonucleotide
  Antisense Strand to SEQ ID NO: 384399
agaauccuugggaacuucu

SEQ ID NO: 384401 - RNA, 19 nt, Artificial Sequence
  Description of Artificial Sequence: Synthetic oligonucleotide
  Sense Strand Starting at position 835 of SEQ ID NO: 315810
acucacugccuuugagaaa

SEQ ID NO: 384402 - RNA, 19 nt, Artificial Sequence
  Description of Artificial Sequence: Synthetic oligonucleotide
  Antisense Strand to SEQ ID NO: 384401
uuucucaaaggcagugagu

SEQ ID NO: 384403 - RNA, 19 nt, Artificial Sequence
  Description of Artificial Sequence: Synthetic oligonucleotide
  Sense Strand Starting at position 835 of SEQ ID NO: 315821
uugagaaaucccuggaugu

SEQ ID NO: 384404 - RNA, 19 nt, Artificial Sequence
  Description of Artificial Sequence: Synthetic oligonucleotide
  Antisense Strand to SEQ ID NO: 384403
acauccagggauuucucaa

SEQ ID NO: 384405 - RNA, 19 nt, Artificial Sequence
  Description of Artificial Sequence: Synthetic oligonucleotide
  Sense Strand Starting at position 835 of SEQ ID NO: 315942
uugggaucccuuuguagca

SEQ ID NO: 384406 - RNA, 19 nt, Artificial Sequence
  Description of Artificial Sequence: Synthetic oligonucleotide
  Antisense Strand to SEQ ID NO: 384405
ugcuacaaagggaucccaa

SEQ ID NO: 384407 - RNA, 19 nt, Artificial Sequence
  Description of Artificial Sequence: Synthetic oligonucleotide
  Sense Strand Starting at position 835 of SEQ ID NO: 315986
agcaccuuccuugagcaaa

SEQ ID NO: 384408 - RNA, 19 nt, Artificial Sequence
  Description of Artificial Sequence: Synthetic oligonucleotide
  Antisense Strand to SEQ ID NO: 384407
uuugcucaaggaaggugcu

SEQ ID NO: 384409 - RNA, 19 nt, Artificial Sequence
  Description of Artificial Sequence: Synthetic oligonucleotide
  Sense Strand Starting at position 835 of SEQ ID NO: 316353
ucuugcucacguugaagaa

SEQ ID NO: 384410 - RNA, 19 nt, Artificial Sequence
  Description of Artificial Sequence: Synthetic oligonucleotide
  Antisense Strand to SEQ ID NO: 384409
uucuucaacgugagcaaga

SEQ ID NO: 384411 - RNA, 19 nt, Artificial Sequence
  Description of Artificial Sequence: Synthetic oligonucleotide
  Sense Strand Starting at position 835 of SEQ ID NO: 316402
guagaagugcacgaagagu

SEQ ID NO: 384412 - RNA, 19 nt, Artificial Sequence
  Description of Artificial Sequence: Synthetic oligonucleotide
  Antisense Strand to SEQ ID NO: 384411
acucuucgugcacuucuac

SEQ ID NO: 384413 - RNA, 19 nt, Artificial Sequence
  Description of Artificial Sequence: Synthetic oligonucleotide
  Sense Strand Starting at position 835 of SEQ ID NO: 316447
gagccagcucucgagcaua

SEQ ID NO: 384414 - RNA, 19 nt, Artificial Sequence
  Description of Artificial Sequence: Synthetic oligonucleotide
  Antisense Strand to SEQ ID NO: 384413
uaugcucgagagcuggcuc

SEQ ID NO: 384415 - RNA, 19 nt, Artificial Sequence
  Description of Artificial Sequence: Synthetic oligonucleotide
  Sense Strand Starting at position 835 of SEQ ID NO: 316450
ccagcucucgagcauaaug

SEQ ID NO: 384416 - RNA, 19 nt, Artificial Sequence
  Description of Artificial Sequence: Synthetic oligonucleotide
  Antisense Strand to SEQ ID NO: 384415
cauuaugcucgagagcugg

SEQ ID NO: 384417 - RNA, 19 nt, Artificial Sequence
  Description of Artificial Sequence: Synthetic oligonucleotide
  Sense Strand Starting at position 835 of SEQ ID NO: 316656
gcugcaaguauggagucau

SEQ ID NO: 384418 - RNA, 19 nt, Artificial Sequence
  Description of Artificial Sequence: Synthetic oligonucleotide
  Antisense Strand to SEQ ID NO: 384417
augacuccauacuugcagc

SEQ ID NO: 384419 - RNA, 19 nt, Artificial Sequence
  Description of Artificial Sequence: Synthetic oligonucleotide
  Sense Strand Starting at position 835 of SEQ ID NO: 316668
gagucaugacucuggcauc

SEQ ID NO: 384420 - RNA, 19 nt, Artificial Sequence
  Description of Artificial Sequence: Synthetic oligonucleotide
  Antisense Strand to SEQ ID NO: 384419
gaugccagagucaugacuc

SEQ ID NO: 384421 - RNA, 19 nt, Artificial Sequence
  Description of Artificial Sequence: Synthetic oligonucleotide
  Sense Strand Starting at position 835 of SEQ ID NO: 316929
ggcagaacuugcucaggaa

SEQ ID NO: 384422 - RNA, 19 nt, Artificial Sequence
  Description of Artificial Sequence: Synthetic oligonucleotide
  Antisense Strand to SEQ ID NO: 384421
uuccugagcaaguucugcc

SEQ ID NO: 384423 - RNA, 19 nt, Artificial Sequence
  Description of Artificial Sequence: Synthetic oligonucleotide
  Sense Strand Starting at position 835 of SEQ ID NO: 316930
gcagaacuugcucaggaac

SEQ ID NO: 384424 - RNA, 19 nt, Artificial Sequence
  Description of Artificial Sequence: Synthetic oligonucleotide
  Antisense Strand to SEQ ID NO: 384423
guuccugagcaaguucugc

SEQ ID NO: 384425 - RNA, 19 nt, Artificial Sequence
  Description of Artificial Sequence: Synthetic oligonucleotide
  Sense Strand Starting at position 835 of SEQ ID NO: 316974
agaaguugagcgucucguu

SEQ ID NO: 384426 - RNA, 19 nt, Artificial Sequence
  Description of Artificial Sequence: Synthetic oligonucleotide
  Antisense Strand to SEQ ID NO: 384425
aacgagacgcucaacuucu

SEQ ID NO: 384427 - RNA, 19 nt, Artificial Sequence
  Description of Artificial Sequence: Synthetic oligonucleotide
  Sense Strand Starting at position 835 of SEQ ID NO: 317731
cccugucucgaguuccgua

SEQ ID NO: 384428 - RNA, 19 nt, Artificial Sequence
  Description of Artificial Sequence: Synthetic oligonucleotide
  Antisense Strand to SEQ ID NO: 384427
uacggaacucgagacaggg

SEQ ID NO: 384429 - RNA, 19 nt, Artificial Sequence
  Description of Artificial Sequence: Synthetic oligonucleotide
  Sense Strand Starting at position 835 of SEQ ID NO: 317736
ucucgaguuccguaccauc

SEQ ID NO: 384430 - RNA, 19 nt, Artificial Sequence
  Description of Artificial Sequence: Synthetic oligonucleotide
  Antisense Strand to SEQ ID NO: 384429
gaugguacggaacucgaga

SEQ ID NO: 384431 - RNA, 19 nt, Artificial Sequence
  Description of Artificial Sequence: Synthetic oligonucleotide
  Sense Strand Starting at position 835 of SEQ ID NO: 317982
gagagaugcgccagcggua

SEQ ID NO: 384432 - RNA, 19 nt, Artificial Sequence
  Description of Artificial Sequence: Synthetic oligonucleotide
  Antisense Strand to SEQ ID NO: 384431
uaccgcuggcgcaucucuc

SEQ ID NO: 384433 - RNA, 19 nt, Artificial Sequence
  Description of Artificial Sequence: Synthetic oligonucleotide
  Sense Strand Starting at position 835 of SEQ ID NO: 317994
agcgguaaucuccggaggu

SEQ ID NO: 384434 - RNA, 19 nt, Artificial Sequence
  Description of Artificial Sequence: Synthetic oligonucleotide
  Antisense Strand to SEQ ID NO: 384433
accuccggagauuaccgcu

SEQ ID NO: 384435 - RNA, 19 nt, Artificial Sequence
  Description of Artificial Sequence: Synthetic oligonucleotide
  Sense Strand Starting at position 835 of SEQ ID NO: 318197
guuggucuucuuucgucua

SEQ ID NO: 384436 - RNA, 19 nt, Artificial Sequence
  Description of Artificial Sequence: Synthetic oligonucleotide
  Antisense Strand to SEQ ID NO: 384435
uagacgaaagaagaccaac

SEQ ID NO: 384437 - RNA, 19 nt, Artificial Sequence
  Description of Artificial Sequence: Synthetic oligonucleotide
  Sense Strand Starting at position 835 of SEQ ID NO: 318259
ccuuguccuguccgaaaga

SEQ ID NO: 384438 - RNA, 19 nt, Artificial Sequence
  Description of Artificial Sequence: Synthetic oligonucleotide
  Antisense Strand to SEQ ID NO: 384437
ucuuucggacaggacaagg

SEQ ID NO: 384439 - RNA, 19 nt, Artificial Sequence
  Description of Artificial Sequence: Synthetic oligonucleotide
  Sense Strand Starting at position 835 of SEQ ID NO: 318571
gaaguccaguugguagaaa

SEQ ID NO: 384440 - RNA, 19 nt, Artificial Sequence
  Description of Artificial Sequence: Synthetic oligonucleotide
  Antisense Strand to SEQ ID NO: 384439
uuucuaccaacuggacuuc

SEQ ID NO: 384441 - RNA, 19 nt, Artificial Sequence
  Description of Artificial Sequence: Synthetic oligonucleotide
  Sense Strand Starting at position 835 of SEQ ID NO: 318694
gaugcacugcagugugaaa

SEQ ID NO: 384442 - RNA, 19 nt, Artificial Sequence
  Description of Artificial Sequence: Synthetic oligonucleotide
  Antisense Strand to SEQ ID NO: 384441
uuucacacugcagugcauc

SEQ ID NO: 384443 - RNA, 19 nt, Artificial Sequence
  Description of Artificial Sequence: Synthetic oligonucleotide
  Sense Strand Starting at position 835 of SEQ ID NO: 318717
gcccuugagccuuaaagaa

SEQ ID NO: 384444 - RNA, 19 nt, Artificial Sequence
  Description of Artificial Sequence: Synthetic oligonucleotide
  Antisense Strand to SEQ ID NO: 384443
uucuuuaaggcucaagggc

SEQ ID NO: 384445 - RNA, 19 nt, Artificial Sequence
  Description of Artificial Sequence: Synthetic oligonucleotide
  Sense Strand Starting at position 835 of SEQ ID NO: 319096
uuaguagagccucaagaug

SEQ ID NO: 384446 - RNA, 19 nt, Artificial Sequence
  Description of Artificial Sequence: Synthetic oligonucleotide
  Antisense Strand to SEQ ID NO: 384445
caucuugaggcucuacuaa

SEQ ID NO: 384447 - RNA, 19 nt, Artificial Sequence
  Description of Artificial Sequence: Synthetic oligonucleotide
  Sense Strand Starting at position 835 of SEQ ID NO: 319114
ggauuuaaguuauggauaa

SEQ ID NO: 384448 - RNA, 19 nt, Artificial Sequence
  Description of Artificial Sequence: Synthetic oligonucleotide
  Antisense Strand to SEQ ID NO: 384447
uuauccauaacuuaaaucc

SEQ ID NO: 384449 - RNA, 19 nt, Artificial Sequence
  Description of Artificial Sequence: Synthetic oligonucleotide
  Sense Strand Starting at position 835 of SEQ ID NO: 319115
gauuuaaguuauggauaag

SEQ ID NO: 384450 - RNA, 19 nt, Artificial Sequence
  Description of Artificial Sequence: Synthetic oligonucleotide
  Antisense Strand to SEQ ID NO: 384449
cuuauccauaacuuaaauc

SEQ ID NO: 384451 - RNA, 19 nt, Artificial Sequence
  Description of Artificial Sequence: Synthetic oligonucleotide
  Sense Strand Starting at position 835 of SEQ ID NO: 319162
uauuauaagugucugcagu

SEQ ID NO: 384452 - RNA, 19 nt, Artificial Sequence
  Description of Artificial Sequence: Synthetic oligonucleotide
  Antisense Strand to SEQ ID NO: 384451
acugcagacacuuauaaua

SEQ ID NO: 384453 - RNA, 19 nt, Artificial Sequence
  Description of Artificial Sequence: Synthetic oligonucleotide
  Sense Strand Starting at position 835 of SEQ ID NO: 319163
auuauaagugucugcaguu

SEQ ID NO: 384454 - RNA, 19 nt, Artificial Sequence
  Description of Artificial Sequence: Synthetic oligonucleotide
  Antisense Strand to SEQ ID NO: 384453
aacugcagacacuuauaau

SEQ ID NO: 384455 - RNA, 19 nt, Artificial Sequence
  Description of Artificial Sequence: Synthetic oligonucleotide
  Sense Strand Starting at position 835 of SEQ ID NO: 319164
uuauaagugucugcaguua

SEQ ID NO: 384456 - RNA, 19 nt, Artificial Sequence
  Description of Artificial Sequence: Synthetic oligonucleotide
  Antisense Strand to SEQ ID NO: 384455
uaacugcagacacuuauaa

SEQ ID NO: 384457 - RNA, 19 nt, Artificial Sequence
  Description of Artificial Sequence: Synthetic oligonucleotide
  Sense Strand Starting at position 835 of SEQ ID NO: 319169
agugucugcaguuacuuaa

SEQ ID NO: 384458 - RNA, 19 nt, Artificial Sequence
  Description of Artificial Sequence: Synthetic oligonucleotide
  Antisense Strand to SEQ ID NO: 384457
uuaaguaacugcagacacu

SEQ ID NO: 384459 - RNA, 19 nt, Artificial Sequence
  Description of Artificial Sequence: Synthetic oligonucleotide
  Sense Strand Starting at position 835 of SEQ ID NO: 319179
guuacuuaaggaugcuaga

SEQ ID NO: 384460 - RNA, 19 nt, Artificial Sequence
  Description of Artificial Sequence: Synthetic oligonucleotide
  Antisense Strand to SEQ ID NO: 384459
ucuagcauccuuaaguaac

SEQ ID NO: 384461 - RNA, 19 nt, Artificial Sequence
  Description of Artificial Sequence: Synthetic oligonucleotide
  Sense Strand Starting at position 835 of SEQ ID NO: 319182
acuuaaggaugcuagaaac

SEQ ID NO: 384462 - RNA, 19 nt, Artificial Sequence
  Description of Artificial Sequence: Synthetic oligonucleotide
  Antisense Strand to SEQ ID NO: 384461
guuucuagcauccuuaagu

SEQ ID NO: 384463 - RNA, 19 nt, Artificial Sequence
  Description of Artificial Sequence: Synthetic oligonucleotide
  Sense Strand Starting at position 835 of SEQ ID NO: 319213
ucagucuucucucugaagu

SEQ ID NO: 384464 - RNA, 19 nt, Artificial Sequence
  Description of Artificial Sequence: Synthetic oligonucleotide
  Antisense Strand to SEQ ID NO: 384463
acuucagagagaagacuga

SEQ ID NO: 384465 - RNA, 19 nt, Artificial Sequence
  Description of Artificial Sequence: Synthetic oligonucleotide
  Sense Strand Starting at position 836 of SEQ ID NO: 315334
aggccuacauucucaugua

SEQ ID NO: 384466 - RNA, 19 nt, Artificial Sequence
  Description of Artificial Sequence: Synthetic oligonucleotide
  Antisense Strand to SEQ ID NO: 384465
uacaugagaauguaggccu

SEQ ID NO: 384467 - RNA, 19 nt, Artificial Sequence
  Description of Artificial Sequence: Synthetic oligonucleotide
  Sense Strand Starting at position 836 of SEQ ID NO: 315489
uuacuagaggcucauuagu

SEQ ID NO: 384468 - RNA, 19 nt, Artificial Sequence
  Description of Artificial Sequence: Synthetic oligonucleotide
  Antisense Strand to SEQ ID NO: 384467
acuaaugagccucuaguaa

SEQ ID NO: 384469 - RNA, 19 nt, Artificial Sequence
  Description of Artificial Sequence: Synthetic oligonucleotide
  Sense Strand Starting at position 836 of SEQ ID NO: 315491
acuagaggcucauuaguuu

SEQ ID NO: 384470 - RNA, 19 nt, Artificial Sequence
  Description of Artificial Sequence: Synthetic oligonucleotide
  Antisense Strand to SEQ ID NO: 384469
aaacuaaugagccucuagu

SEQ ID NO: 384471 - RNA, 19 nt, Artificial Sequence
  Description of Artificial Sequence: Synthetic oligonucleotide
  Sense Strand Starting at position 836 of SEQ ID NO: 315537
uacggugauguguacauaa

SEQ ID NO: 384472 - RNA, 19 nt, Artificial Sequence
  Description of Artificial Sequence: Synthetic oligonucleotide
  Antisense Strand to SEQ ID NO: 384471
uuauguacacaucaccgua

SEQ ID NO: 384473 - RNA, 19 nt, Artificial Sequence
  Description of Artificial Sequence: Synthetic oligonucleotide
  Sense Strand Starting at position 836 of SEQ ID NO: 315539
cggugauguguacauaaau

SEQ ID NO: 384474 - RNA, 19 nt, Artificial Sequence
  Description of Artificial Sequence: Synthetic oligonucleotide
  Antisense Strand to SEQ ID NO: 384473
auuuauguacacaucaccg

SEQ ID NO: 384475 - RNA, 19 nt, Artificial Sequence
  Description of Artificial Sequence: Synthetic oligonucleotide
  Sense Strand Starting at position 836 of SEQ ID NO: 315629
cacucuguugcucaagaug

SEQ ID NO: 384476 - RNA, 19 nt, Artificial Sequence
  Description of Artificial Sequence: Synthetic oligonucleotide
  Antisense Strand to SEQ ID NO: 384475
caucuugagcaacagagug

SEQ ID NO: 384477 - RNA, 19 nt, Artificial Sequence
  Description of Artificial Sequence: Synthetic oligonucleotide
  Sense Strand Starting at position 836 of SEQ ID NO: 315994
aagauuagugccugacaga

SEQ ID NO: 384478 - RNA, 19 nt, Artificial Sequence
  Description of Artificial Sequence: Synthetic oligonucleotide
  Antisense Strand to SEQ ID NO: 384477
ucugucaggcacuaaucuu

SEQ ID NO: 384479 - RNA, 19 nt, Artificial Sequence
  Description of Artificial Sequence: Synthetic oligonucleotide
  Sense Strand Starting at position 836 of SEQ ID NO: 315995
agauuagugccugacagau

SEQ ID NO: 384480 - RNA, 19 nt, Artificial Sequence
  Description of Artificial Sequence: Synthetic oligonucleotide
  Antisense Strand to SEQ ID NO: 384479
aucugucaggcacuaaucu

SEQ ID NO: 384481 - RNA, 19 nt, Artificial Sequence
  Description of Artificial Sequence: Synthetic oligonucleotide
  Sense Strand Starting at position 836 of SEQ ID NO: 316005
cugacagaucuauguuagu

SEQ ID NO: 384482 - RNA, 19 nt, Artificial Sequence
  Description of Artificial Sequence: Synthetic oligonucleotide
  Antisense Strand to SEQ ID NO: 384481
acuaacauagaucugucag

SEQ ID NO: 384483 - RNA, 19 nt, Artificial Sequence
  Description of Artificial Sequence: Synthetic oligonucleotide
  Sense Strand Starting at position 836 of SEQ ID NO: 316010
agaucuauguuaguguaug

SEQ ID NO: 384484 - RNA, 19 nt, Artificial Sequence
  Description of Artificial Sequence: Synthetic oligonucleotide
  Antisense Strand to SEQ ID NO: 384483
cauacacuaacauagaucu

SEQ ID NO: 384485 - RNA, 19 nt, Artificial Sequence
  Description of Artificial Sequence: Synthetic oligonucleotide
  Sense Strand Starting at position 836 of SEQ ID NO: 316015
uauguuaguguaugaagau

SEQ ID NO: 384486 - RNA, 19 nt, Artificial Sequence
  Description of Artificial Sequence: Synthetic oligonucleotide
  Antisense Strand to SEQ ID NO: 384485
aucuucauacacuaacaua

SEQ ID NO: 384487 - RNA, 19 nt, Artificial Sequence
  Description of Artificial Sequence: Synthetic oligonucleotide
  Sense Strand Starting at position 836 of SEQ ID NO: 316031
gauacaauguauguaaagu

SEQ ID NO: 384488 - RNA, 19 nt, Artificial Sequence
  Description of Artificial Sequence: Synthetic oligonucleotide
  Antisense Strand to SEQ ID NO: 384487
acuuuacauacauuguauc

SEQ ID NO: 384489 - RNA, 19 nt, Artificial Sequence
  Description of Artificial Sequence: Synthetic oligonucleotide
  Sense Strand Starting at position 836 of SEQ ID NO: 316076
cuggaaugcuugucggaca

SEQ ID NO: 384490 - RNA, 19 nt, Artificial Sequence
  Description of Artificial Sequence: Synthetic oligonucleotide
  Antisense Strand to SEQ ID NO: 384489
uguccgacaagcauuccag

SEQ ID NO: 384491 - RNA, 19 nt, Artificial Sequence
  Description of Artificial Sequence: Synthetic oligonucleotide
  Sense Strand Starting at position 836 of SEQ ID NO: 316081
augcuugucggacauauag

SEQ ID NO: 384492 - RNA, 19 nt, Artificial Sequence
  Description of Artificial Sequence: Synthetic oligonucleotide
  Antisense Strand to SEQ ID NO: 384491
cuauauguccgacaagcau

SEQ ID NO: 384493 - RNA, 19 nt, Artificial Sequence
  Description of Artificial Sequence: Synthetic oligonucleotide
  Sense Strand Starting at position 836 of SEQ ID NO: 316083
gcuugucggacauauaggu

SEQ ID NO: 384494 - RNA, 19 nt, Artificial Sequence
  Description of Artificial Sequence: Synthetic oligonucleotide
  Antisense Strand to SEQ ID NO: 384493
accuauauguccgacaagc

SEQ ID NO: 384495 - RNA, 19 nt, Artificial Sequence
  Description of Artificial Sequence: Synthetic oligonucleotide
  Sense Strand Starting at position 836 of SEQ ID NO: 316119
cccucuccugauugugauu

SEQ ID NO: 384496 - RNA, 19 nt, Artificial Sequence
  Description of Artificial Sequence: Synthetic oligonucleotide
  Antisense Strand to SEQ ID NO: 384495
aaucacaaucaggagaggg

SEQ ID NO: 384497 - RNA, 19 nt, Artificial Sequence
  Description of Artificial Sequence: Synthetic oligonucleotide
  Sense Strand Starting at position 836 of SEQ ID NO: 316149
gggugaggccugggacaua

SEQ ID NO: 384498 - RNA, 19 nt, Artificial Sequence
  Description of Artificial Sequence: Synthetic oligonucleotide
  Antisense Strand to SEQ ID NO: 384497
uaugucccaggccucaccc

SEQ ID NO: 384499 - RNA, 19 nt, Artificial Sequence
  Description of Artificial Sequence: Synthetic oligonucleotide
  Sense Strand Starting at position 836 of SEQ ID NO: 316185
ucaggugauccuugagauu

SEQ ID NO: 384500 - RNA, 19 nt, Artificial Sequence
  Description of Artificial Sequence: Synthetic oligonucleotide
  Antisense Strand to SEQ ID NO: 384499
aaucucaaggaucaccuga

SEQ ID NO: 384501 - RNA, 19 nt, Artificial Sequence
  Description of Artificial Sequence: Synthetic oligonucleotide
  Sense Strand Starting at position 836 of SEQ ID NO: 316220
acauuagagccucgauuau

SEQ ID NO: 384502 - RNA, 19 nt, Artificial Sequence
  Description of Artificial Sequence: Synthetic oligonucleotide
  Antisense Strand to SEQ ID NO: 384501
auaaucgaggcucuaaugu

SEQ ID NO: 384503 - RNA, 19 nt, Artificial Sequence
  Description of Artificial Sequence: Synthetic oligonucleotide
  Sense Strand Starting at position 836 of SEQ ID NO: 316257
cguguugauaaacaauguu

SEQ ID NO: 384504 - RNA, 19 nt, Artificial Sequence
  Description of Artificial Sequence: Synthetic oligonucleotide
  Antisense Strand to SEQ ID NO: 384503
aacauuguuuaucaacacg

SEQ ID NO: 384505 - RNA, 19 nt, Artificial Sequence
  Description of Artificial Sequence: Synthetic oligonucleotide
  Sense Strand Starting at position 836 of SEQ ID NO: 316260
guugauaaacaauguuucu

SEQ ID NO: 384506 - RNA, 19 nt, Artificial Sequence
  Description of Artificial Sequence: Synthetic oligonucleotide
  Antisense Strand to SEQ ID NO: 384505
agaaacauuguuuaucaac

SEQ ID NO: 384507 - RNA, 19 nt, Artificial Sequence
  Description of Artificial Sequence: Synthetic oligonucleotide
  Sense Strand Starting at position 836 of SEQ ID NO: 316273
guuucuuaucagcaaucag

SEQ ID NO: 384508 - RNA, 19 nt, Artificial Sequence
  Description of Artificial Sequence: Synthetic oligonucleotide
  Antisense Strand to SEQ ID NO: 384507
cugauugcugauaagaaac

SEQ ID NO: 384509 - RNA, 19 nt, Artificial Sequence
  Description of Artificial Sequence: Synthetic oligonucleotide
  Sense Strand Starting at position 836 of SEQ ID NO: 316434
aaugaauuacugugaugca

SEQ ID NO: 384510 - RNA, 19 nt, Artificial Sequence
  Description of Artificial Sequence: Synthetic oligonucleotide
  Antisense Strand to SEQ ID NO: 384509
ugcaucacaguaauucauu

SEQ ID NO: 384511 - RNA, 19 nt, Artificial Sequence
  Description of Artificial Sequence: Synthetic oligonucleotide
  Sense Strand Starting at position 836 of SEQ ID NO: 316577
acgacuuugccagacacaa

SEQ ID NO: 384512 - RNA, 19 nt, Artificial Sequence
  Description of Artificial Sequence: Synthetic oligonucleotide
  Antisense Strand to SEQ ID NO: 384511
uugugucuggcaaagucgu

SEQ ID NO: 384513 - RNA, 19 nt, Artificial Sequence
  Description of Artificial Sequence: Synthetic oligonucleotide
  Sense Strand Starting at position 836 of SEQ ID NO: 316644
gaaggcgacugguuguaau

SEQ ID NO: 384514 - RNA, 19 nt, Artificial Sequence
  Description of Artificial Sequence: Synthetic oligonucleotide
  Antisense Strand to SEQ ID NO: 384513
auuacaaccagucgccuuc

SEQ ID NO: 384515 - RNA, 19 nt, Artificial Sequence
  Description of Artificial Sequence: Synthetic oligonucleotide
  Sense Strand Starting at position 836 of SEQ ID NO: 316648
gcgacugguuguaauggaa

SEQ ID NO: 384516 - RNA, 19 nt, Artificial Sequence
  Description of Artificial Sequence: Synthetic oligonucleotide
  Antisense Strand to SEQ ID NO: 384515
uuccauuacaaccagucgc

SEQ ID NO: 384517 - RNA, 19 nt, Artificial Sequence
  Description of Artificial Sequence: Synthetic oligonucleotide
  Sense Strand Starting at position 836 of SEQ ID NO: 316672
ccuuuauaauuagauggaa

SEQ ID NO: 384518 - RNA, 19 nt, Artificial Sequence
  Description of Artificial Sequence: Synthetic oligonucleotide
  Antisense Strand to SEQ ID NO: 384517
uuccaucuaauuauaaagg

SEQ ID NO: 384519 - RNA, 19 nt, Artificial Sequence
  Description of Artificial Sequence: Synthetic oligonucleotide
  Sense Strand Starting at position 836 of SEQ ID NO: 316820
cguccuucccaaugggaaa

SEQ ID NO: 384520 - RNA, 19 nt, Artificial Sequence
  Description of Artificial Sequence: Synthetic oligonucleotide
  Antisense Strand to SEQ ID NO: 384519
uuucccauugggaaggacg

SEQ ID NO: 384521 - RNA, 19 nt, Artificial Sequence
  Description of Artificial Sequence: Synthetic oligonucleotide
  Sense Strand Starting at position 836 of SEQ ID NO: 317491
aggcgcuuugccuaagauc

SEQ ID NO: 384522 - RNA, 19 nt, Artificial Sequence
  Description of Artificial Sequence: Synthetic oligonucleotide
  Antisense Strand to SEQ ID NO: 384521
gaucuuaggcaaagcgccu

SEQ ID NO: 384523 - RNA, 19 nt, Artificial Sequence
  Description of Artificial Sequence: Synthetic oligonucleotide
  Sense Strand Starting at position 836 of SEQ ID NO: 317510
gcauuuaaucgucacagca

SEQ ID NO: 384524 - RNA, 19 nt, Artificial Sequence
  Description of Artificial Sequence: Synthetic oligonucleotide
  Antisense Strand to SEQ ID NO: 384523
ugcugugacgauuaaaugc

SEQ ID NO: 384525 - RNA, 19 nt, Artificial Sequence
  Description of Artificial Sequence: Synthetic oligonucleotide
  Sense Strand Starting at position 836 of SEQ ID NO: 317531
gcuagagguagaugucauc

SEQ ID NO: 384526 - RNA, 19 nt, Artificial Sequence
  Description of Artificial Sequence: Synthetic oligonucleotide
  Antisense Strand to SEQ ID NO: 384525
gaugacaucuaccucuagc

SEQ ID NO: 384527 - RNA, 19 nt, Artificial Sequence
  Description of Artificial Sequence: Synthetic oligonucleotide
  Sense Strand Starting at position 836 of SEQ ID NO: 317537
gguagaugucaucacuguu

SEQ ID NO: 384528 - RNA, 19 nt, Artificial Sequence
  Description of Artificial Sequence: Synthetic oligonucleotide
  Antisense Strand to SEQ ID NO: 384527
aacagugaugacaucuacc

SEQ ID NO: 384529 - RNA, 19 nt, Artificial Sequence
  Description of Artificial Sequence: Synthetic oligonucleotide
  Sense Strand Starting at position 836 of SEQ ID NO: 318301
gucauuggccauuacucaa

SEQ ID NO: 384530 - RNA, 19 nt, Artificial Sequence
  Description of Artificial Sequence: Synthetic oligonucleotide
  Antisense Strand to SEQ ID NO: 384529
uugaguaauggccaaugac

SEQ ID NO: 384531 - RNA, 19 nt, Artificial Sequence
  Description of Artificial Sequence: Synthetic oligonucleotide
  Sense Strand Starting at position 836 of SEQ ID NO: 318373
ugaaacaucuaaccgacuu

SEQ ID NO: 384532 - RNA, 19 nt, Artificial Sequence
  Description of Artificial Sequence: Synthetic oligonucleotide
  Antisense Strand to SEQ ID NO: 384531
aagucgguuagauguuuca

SEQ ID NO: 384533 - RNA, 19 nt, Artificial Sequence
  Description of Artificial Sequence: Synthetic oligonucleotide
  Sense Strand Starting at position 836 of SEQ ID NO: 318491
augcuuaucucugcaauag

SEQ ID NO: 384534 - RNA, 19 nt, Artificial Sequence
  Description of Artificial Sequence: Synthetic oligonucleotide
  Antisense Strand to SEQ ID NO: 384533
cuauugcagagauaagcau

SEQ ID NO: 384535 - RNA, 19 nt, Artificial Sequence
  Description of Artificial Sequence: Synthetic oligonucleotide
  Sense Strand Starting at position 836 of SEQ ID NO: 318547
cagugugucaggugauaug

SEQ ID NO: 384536 - RNA, 19 nt, Artificial Sequence
  Description of Artificial Sequence: Synthetic oligonucleotide
  Antisense Strand to SEQ ID NO: 384535
cauaucaccugacacacug

SEQ ID NO: 384537 - RNA, 19 nt, Artificial Sequence
  Description of Artificial Sequence: Synthetic oligonucleotide
  Sense Strand Starting at position 836 of SEQ ID NO: 318576
ggauacaauugagaagaca

SEQ ID NO: 384538 - RNA, 19 nt, Artificial Sequence
  Description of Artificial Sequence: Synthetic oligonucleotide
  Antisense Strand to SEQ ID NO: 384537
ugucuucucaauuguaucc

SEQ ID NO: 384539 - RNA, 19 nt, Artificial Sequence
  Description of Artificial Sequence: Synthetic oligonucleotide
  Sense Strand Starting at position 836 of SEQ ID NO: 318630
gggagaaggcucuguagga

SEQ ID NO: 384540 - RNA, 19 nt, Artificial Sequence
  Description of Artificial Sequence: Synthetic oligonucleotide
  Antisense Strand to SEQ ID NO: 384539
uccuacagagccuucuccc

SEQ ID NO: 384541 - RNA, 19 nt, Artificial Sequence
  Description of Artificial Sequence: Synthetic oligonucleotide
  Sense Strand Starting at position 836 of SEQ ID NO: 318744
agaggauugaaguguuccu

SEQ ID NO: 384542 - RNA, 19 nt, Artificial Sequence
  Description of Artificial Sequence: Synthetic oligonucleotide
  Antisense Strand to SEQ ID NO: 384541
aggaacacuucaauccucu

SEQ ID NO: 384543 - RNA, 19 nt, Artificial Sequence
  Description of Artificial Sequence: Synthetic oligonucleotide
  Sense Strand Starting at position 836 of SEQ ID NO: 318749
auugaaguguuccucagaa

SEQ ID NO: 384544 - RNA, 19 nt, Artificial Sequence
  Description of Artificial Sequence: Synthetic oligonucleotide
  Antisense Strand to SEQ ID NO: 384543
uucugaggaacacuucaau

SEQ ID NO: 384545 - RNA, 19 nt, Artificial Sequence
  Description of Artificial Sequence: Synthetic oligonucleotide
  Sense Strand Starting at position 837 of SEQ ID NO: 315445
gagggcuagaauugaguua

SEQ ID NO: 384546 - RNA, 19 nt, Artificial Sequence
  Description of Artificial Sequence: Synthetic oligonucleotide
  Antisense Strand to SEQ ID NO: 384545
uaacucaauucuagcccuc

SEQ ID NO: 384547 - RNA, 19 nt, Artificial Sequence
  Description of Artificial Sequence: Synthetic oligonucleotide
  Sense Strand Starting at position 837 of SEQ ID NO: 315669
ugggaaggugccugguuaa

SEQ ID NO: 384548 - RNA, 19 nt, Artificial Sequence
  Description of Artificial Sequence: Synthetic oligonucleotide
  Antisense Strand to SEQ ID NO: 384547
uuaaccaggcaccuuccca

SEQ ID NO: 384549 - RNA, 19 nt, Artificial Sequence
  Description of Artificial Sequence: Synthetic oligonucleotide
  Sense Strand Starting at position 837 of SEQ ID NO: 315763
ccuuaagggccagaucgau

SEQ ID NO: 384550 - RNA, 19 nt, Artificial Sequence
  Description of Artificial Sequence: Synthetic oligonucleotide
  Antisense Strand to SEQ ID NO: 384549
aucgaucuggcccuuaagg

SEQ ID NO: 384551 - RNA, 19 nt, Artificial Sequence
  Description of Artificial Sequence: Synthetic oligonucleotide
  Sense Strand Starting at position 837 of SEQ ID NO: 315769
gggccagaucgauggugau

SEQ ID NO: 384552 - RNA, 19 nt, Artificial Sequence
  Description of Artificial Sequence: Synthetic oligonucleotide
  Antisense Strand to SEQ ID NO: 384551
aucaccaucgaucuggccc

SEQ ID NO: 384553 - RNA, 19 nt, Artificial Sequence
  Description of Artificial Sequence: Synthetic oligonucleotide
  Sense Strand Starting at position 837 of SEQ ID NO: 315781
uggugaugcugaccucuga

SEQ ID NO: 384554 - RNA, 19 nt, Artificial Sequence
  Description of Artificial Sequence: Synthetic oligonucleotide
  Antisense Strand to SEQ ID NO: 384553
ucagaggucagcaucacca

SEQ ID NO: 384555 - RNA, 19 nt, Artificial Sequence
  Description of Artificial Sequence: Synthetic oligonucleotide
  Sense Strand Starting at position 837 of SEQ ID NO: 315874
cugagcacuccuugguaaa

SEQ ID NO: 384556 - RNA, 19 nt, Artificial Sequence
  Description of Artificial Sequence: Synthetic oligonucleotide
  Antisense Strand to SEQ ID NO: 384555
uuuaccaaggagugcucag

SEQ ID NO: 384557 - RNA, 19 nt, Artificial Sequence
  Description of Artificial Sequence: Synthetic oligonucleotide
  Sense Strand Starting at position 837 of SEQ ID NO: 316099
cgacaugaaagcggaauua

SEQ ID NO: 384558 - RNA, 19 nt, Artificial Sequence
  Description of Artificial Sequence: Synthetic oligonucleotide
  Antisense Strand to SEQ ID NO: 384557
uaauuccgcuuucaugucg

SEQ ID NO: 384559 - RNA, 19 nt, Artificial Sequence
  Description of Artificial Sequence: Synthetic oligonucleotide
  Sense Strand Starting at position 837 of SEQ ID NO: 316123
ugacuagaucccgauaggu

SEQ ID NO: 384560 - RNA, 19 nt, Artificial Sequence
  Description of Artificial Sequence: Synthetic oligonucleotide
  Antisense Strand to SEQ ID NO: 384559
accuaucgggaucuaguca

SEQ ID NO: 384561 - RNA, 19 nt, Artificial Sequence
  Description of Artificial Sequence: Synthetic oligonucleotide
  Sense Strand Starting at position 837 of SEQ ID NO: 316125
acuagaucccgauagguca

SEQ ID NO: 384562 - RNA, 19 nt, Artificial Sequence
  Description of Artificial Sequence: Synthetic oligonucleotide
  Antisense Strand to SEQ ID NO: 384561
ugaccuaucgggaucuagu

SEQ ID NO: 384563 - RNA, 19 nt, Artificial Sequence
  Description of Artificial Sequence: Synthetic oligonucleotide
  Sense Strand Starting at position 837 of SEQ ID NO: 316132
cccgauaggucaucaucca

SEQ ID NO: 384564 - RNA, 19 nt, Artificial Sequence
  Description of Artificial Sequence: Synthetic oligonucleotide
  Antisense Strand to SEQ ID NO: 384563
uggaugaugaccuaucggg

SEQ ID NO: 384565 - RNA, 19 nt, Artificial Sequence
  Description of Artificial Sequence: Synthetic oligonucleotide
  Sense Strand Starting at position 837 of SEQ ID NO: 316133
ccgauaggucaucauccau

SEQ ID NO: 384566 - RNA, 19 nt, Artificial Sequence
  Description of Artificial Sequence: Synthetic oligonucleotide
  Antisense Strand to SEQ ID NO: 384565
auggaugaugaccuaucgg

SEQ ID NO: 384567 - RNA, 19 nt, Artificial Sequence
  Description of Artificial Sequence: Synthetic oligonucleotide
  Sense Strand Starting at position 837 of SEQ ID NO: 316267
aguggugggucuguaagga

SEQ ID NO: 384568 - RNA, 19 nt, Artificial Sequence
  Description of Artificial Sequence: Synthetic oligonucleotide
  Antisense Strand to SEQ ID NO: 384567
uccuuacagacccaccacu

SEQ ID NO: 384569 - RNA, 19 nt, Artificial Sequence
  Description of Artificial Sequence: Synthetic oligonucleotide
  Sense Strand Starting at position 837 of SEQ ID NO: 316284
gagggaacuuugccgacuu

SEQ ID NO: 384570 - RNA, 19 nt, Artificial Sequence
  Description of Artificial Sequence: Synthetic oligonucleotide
  Antisense Strand to SEQ ID NO: 384569
aagucggcaaaguucccuc

SEQ ID NO: 384571 - RNA, 19 nt, Artificial Sequence
  Description of Artificial Sequence: Synthetic oligonucleotide
  Sense Strand Starting at position 837 of SEQ ID NO: 316297
cgacuuucccuccaaagcu

SEQ ID NO: 384572 - RNA, 19 nt, Artificial Sequence
  Description of Artificial Sequence: Synthetic oligonucleotide
  Antisense Strand to SEQ ID NO: 384571
agcuuuggagggaaagucg

SEQ ID NO: 384573 - RNA, 19 nt, Artificial Sequence
  Description of Artificial Sequence: Synthetic oligonucleotide
  Sense Strand Starting at position 837 of SEQ ID NO: 316557
caaggaaucucugugacuu
